United States Patent Application Publication US 2007/0067865 A1 - sequence listing, part 35

SEQ ID NO: 215346 - DNA, 420 bp, Gossypium hirsutum
agcacacataaattggaagcagttgaaggctgggagcagatagcctccgctgcttttgagcatttcgaacaggagggcaatcgagtaatttcaattgaggaattggcacgggagctgagtgtaggcccttcagcttactcattcctcaaagactggatcagaatctctgatggaaagcttaattttcttggatataaaaaaattttacatggcgtgacgtttcgtagctcgaatacaagacttcattagtttttttagccatttagccattgattattatacagtgtcttaccattcatgacgttttgatttgactttttttcaaacaatttttagccgttcatattatttagtcctttaaaatttataacattttgaatgacttgtgggggtttctttggtttttggttttttttttaa

SEQ ID NO: 215347 - DNA, 405 bp, Gossypium hirsutum
  unsure (1)..(405): unsure at all n locations
gcaaattgaagaatacgctgaaatcttcaatccaaaatgcctaagcagattcatgagatcaaggacttccttctgactgccagaaggaaagatgcacgctctgtaaagatcaagaagagcaaagatgtcgtcaagttcaaggtccgctgctccaagtacttgtacacactttgcgtgtcggatgctgagaaggctgacaagttgaagcagtcccttcctccaggtttgagtgttcaagacctgtgaaaatatggcagccccgggtttgtcacctgatttataggtgatgaaagctaggtttttagttntgggtttattgtatttctggtcattctgcaacagtgagctcaattttctgtaatttgatctatgtttttttggtgattaaggattttagtgatatat

SEQ ID NO: 215348 - DNA, 395 bp, Gossypium hirsutum
gaccaaaaggcattccaagttctgcgccacacagggcaagcggtggtgggaccaaaaggcattccaggacctcgacgcctatcagtggcgcagattgcgttgggtccgcaaaaagttcaccatttacaactattgcagcgatagggtgaggtaccccacgatgtcgcccgagtgcaagagagacagagacgcttgattcatttgcatcaccgagtccaagttccccccttatattcttcactaccatatgagatccgtcattgtcctttagatttcaattgcttgttggccttcacttatctccacatcaatttcattatatgtaattttactcttaaaacattggttttcgtgataatattatttaaatatagatcacaataacattatcttgt

SEQ ID NO: 215349 - DNA, 435 bp, Gossypium hirsutum
cttgaactttttgatgactcttgctggtctggcaatggttggatacgggatctatttgtttgttgagtacaaaaatgctgccgatactgcaatgcttttgtcacctgttggtagtgatcgagatttgatacagtttggtcgccccatgctcatggctgtgtctctttcgtctagtatttttgataatctgccaaaagcatggtttatatatttatttattggagtaggggcgggtctctttgttatctcttgttttggttgtattggagctgcaacacggaatatatgctgcttgacttgttattcagttttggtgatcttgctgatcttggtggaacttggatgtgcagctttcatattctttgacaaaaactggaaagatgaactttctacggataaaactggagattttgatatgatatacgactttctgga

SEQ ID NO: 215350 - DNA, 430 bp, Gossypium hirsutum
ggctgaatatcgagctgcctttttggggatgaaatatgctcttagaaaggggttcaaacatgttcgtgtacaaggggactctaaccttgtctgtatgcaggttcagggtcggtggaaaattaaaagtcagaatttggttgagttaaataaagtggcaaaggatctcaaggataagttcatatcattccagatcaatcatgttgacagggaatttaactccgaagctgatgctcttgcaaaccaagctgttaatctcatgaatggtcaggttcaagaggactggctcttgaagtaaacccaagtttaggccaacactatggaagatgcctacgaagtactcgaggttttaactggttcataacatttgtcaatgccctagcttgcacagacatgtttttcgttcattaacctttaatgtaagttttatgat

SEQ ID NO: 215351 - DNA, 401 bp, Gossypium hirsutum
  unsure (1)..(401): unsure at all n locations
gtccaacctggtgttcgttgtcccaccggagaagcaaggattaccccaggatttaaactgcctgcatctcatgtgattcacactgttggaccgatttatgattccgacaaggaccctaaaggctcactgagaaatgcatacaaaaattgcttaaccgtggctaaagagaacaacattaaatacatcgcatttccttccatatcttgcggtgtatacgggtacccttatgaggaagcagctacagttgctttatctactatcaaagaatttgccaatgacattaaagaggtgcactttgttctatttgctgatgatatatacgatatttggacgaaaaaagcaaaggaattgctctaggtttagtgcatgctangaactagaattgagaacttcttcatgct

SEQ ID NO: 215352 - DNA, 267 bp, Gossypium hirsutum
ggaaatggatatgctccagtccttgactgccacacatcacacattgctgttaagtttgctgagcttttgaccaagattgacaggcgatctggtaaggagcttgagaaggaacccaagttcttgaagaatggtgatgctggtatgattaagatgattcctaccaagcccatggttgtggagaccttctctgagtacccacccctgggtcgttttgctgtgaaggacatgcgtcagaccgtggctgtgggtgttatcaagagtgtcgag

SEQ ID NO: 215353 - DNA, 389 bp, Gossypium hirsutum
cgagactatagtaaaccaagtgaaatgtcgaaggaagagatgaagatcggtagaagatttgagggcaaagtcgcaattgtgacggcttctactcaaggcatcggcttcagcatcgccgagcgtctcgggttggaaggcgccgccgtcgtcgtttcttctcgcaaacagaaaaatgtggatgaagcagttgaaaagcttaaaaataaaggaattcaagtgttgggagttgtttgccaggtctcaaatgcgcaacaaaggaaagatcttattaacaagactgttgagaaatatggaaaaatagatgtggttgtatcaaatgctgctgcaaatcctactgtcagtctattgttagaaacaccagaatctgtccttgacaaagtatgggaaat

SEQ ID NO: 215354 - DNA, 359 bp, Gossypium hirsutum
agctaagagttttaagttaacgaagcatttgggtcgtttcgaagtaatggaaacttcaggaaaagtaaagaagggagccggaggaaggaaaggtggtggcccgaagaagaagcccgtttcaaggtctgtcaaagctggtctccagttccccgttggtaggatcggccgttacttgaagaaaggaaggtattcacagcgtgttggaaccggagccccggtttacttggctgctgttcttgagtacttggctgctgaagtcctggaattggctgggaacgctgcacgtgacaacaagaaaaacaggatcattccaaggcacgttctacttgccgtgaggaacgacgaagaattagggaagc

SEQ ID NO: 215355 - DNA, 435 bp, Gossypium hirsutum
cccacgcgtccgaccaagtttcaaggataatggaggcactgttacagctggcaatgcctccagtataagtgatggtgctgctgctttaatcctagtcagtggagaaaaggcacttgagctgggattgcaagtgattgcaaagattgcaggatatgcagatgctgcacaggcaccagagtttttcacaacagcgccagcccttgcaatacccaaagccatttcaaatgctggcttggatgcttctcaagttgattactacgaaatcaatgaagcctttgctgttgtggctcttgcaaatcagaaactgcttggccttaatccagagaaggttaatgtgaatgggggagctgtatccttgggacatcctttggggtgcagtggagctcgtatcttggtcacgcttttggggggtttgaagcagaaaaatgggaaata

SEQ ID NO: 215356 - DNA, 346 bp, Gossypium hirsutum
tgcaattgttaaaaatctaacctatattgaggaggaggatttggttaacaatggatctcaatccttcgcagtatttggaggtaaccaaagctggctgcaaagagaagagaattttaatttgaagccaagtatgaaggtgcactgtggatttctgaaaaatggaggtgctgacatgaatcccgtggatatcgaatatgtcaagagatgtaggtttttggttgcatctgggatttttgatggatatgatgtacctcatcagccatcgaatataaatattcgttctaagaagctcttctggtttctgatgggtggtgaggaagtatctctcacatttattaaagaaaat

SEQ ID NO: 215357 - DNA, 396 bp, Gossypium hirsutum
gaaggcttgctgcgaccggatcctgaccttgaacatcatggctcgaaccacccctgaccggcaaaccgtgtgtgggtgcttgcaagctgacgctaacgctgcccaaatttaaggcagcttggctgcgaccctaccagccacatgttgtgcctacatccctcacaagatcagcacttacactaactgcaaaaatgtgtaacgagataggataatagaggggttcgcgtcagctcgcatgagataaaatatatgatctacaagaaggagaaagaacaatgactcccgatgttgggatggaatattcaaaatccaaaattagtctccaccatagtgtagtgaggcattgattatcatagaaaatgttttggtccctgcatgttggctctaattttatat

SEQ ID NO: 215358 - DNA, 370 bp, Gossypium hirsutum
gacatactgcagaattcatcagcgcattgatatgggggtgctttttgagaaactgaatttaaattacgaagagggtgaaaaatggattgtgaatctcatcccgaactctaaacttggtgcaaagattgattcaaagactggaaccgttattatggagcctaatcaaccgaatgtttacgagcagctgatcgaccacactaaagcccttcaagggcggacctacaagctagtcggccagcttctcgagcacgcacaagcacagcctgcacgttaagttggacggacaaggaagatcttttgaatttatatgcaattttgagctatttgctgattggttatttctttcagacaaatttaacagtgatttaag

SEQ ID NO: 215359 - DNA, 313 bp, Gossypium hirsutum
ggtgaatcgatcgccaaagagcgagctgccgttaggtttaacgatttgttgggatcgagatcactggacgtggtcgccggcgagccgactcttcttaatccacggaggttcaggcaaaccctagtttggcaagaattgaataagcattggcgaaacaattcgaaggtcaagggcttttttattgataaagtgagaggtggttattcagtagccatagcaggctacgttgcttttcttccgtacagtcgttttgggagaaaaatggtcagggatgcagataaaagatcgattcatcattgaacgcgattgcccc

SEQ ID NO: 215360 - DNA, 331 bp, Gossypium hirsutum
cccacgcgtccgcccacgcgtccgcccacgcgtccgctctctctctcttcaacaagccggcgagggaaggaaaaccagagagggtgaaaaatgccagctggtcacggtctccgatctcggaccagggatctgttttccagacccttcagaaagaagggttacatcccattgtccacttatctcaggacctacaagattggtgactatgtggacgtcaaggtaaatggcgccgttcacaagggcatgccccacaaattctaccatggccgcactggtcgtgtctggaacgtcaccaagcgcgccatcggcgttgaggtcaacaagcaggtgg

SEQ ID NO: 215361 - DNA, 284 bp, Gossypium hirsutum
cccacgcgtccgcccacgcgtccgggggctatatatgcttccaacaaagctgccatgaaccagcttgcgaaatacttgtcatgcgattgggcaagagataatattagggttaatgctattgtaccttcggtcgtcaaaacagccctccttgaaaagtatttcgaagttaataaagaaggattagaggttaccctaaaccgaacaccattaggacggcttggacagccgaaggaagtgtcagctatggtggctttcctgtgcctaccggcggcttcatatataac

SEQ ID NO: 215362 - DNA, 356 bp, Gossypium hirsutum
tggacgcgtgggcggaaagattcccaggaaagggcgaataaaagctggttggaacggagtgccgagtctttagaattagtagttgagaattacgatagtgaggaggaacgagtgaagaatttcaagcaaaagaaagccagctctaatcacttaaagaagttacaacaggagctcaatggattgctttcacgaccactgcgcccgaaaacattttcacatcgctatccaactgcagccggtgttacacatcttatacagcatcaatttgaagaattggctaagcaaaatggagatgacaacttggttttgggtgaaaacaagagacggaagatggtggttatcggtcaagattgcgt

SEQ ID NO: 215363 - DNA, 372 bp, Gossypium hirsutum
gtggagtttggaagaactgtgactaatgtcggagatggaagctttacatacaaagcaaatgtgacacctatcaatggacttaaggtaacagtggaaccagacacattggttttcaagacaaaatacgagaagaaaagctacaagctgagcattgaaggtccaaaacaattgcataaagctgtgttgtttggttatctcacatgggaagatagtggaaaggaacatgttgttacaagtccaatagttgccacaagctacaaaattgaaaaatgacaaaactcccattgtttttttctttaaattatcttaatgtttttttgctgaacatttataattgctttattcattaccataaaaacattaagataattt

SEQ ID NO: 215364 - DNA, 358 bp, Gossypium hirsutum
gcaatatgcaaaggagtacgaggctcatgaaaaagagttgattcaattgaagcgggaggcaaagttgaaaggaggattctatgttgatccagaagctaagcttttgttcattgttagaatccgcggtatcaatgccatgcacccaaggaccagaaagatcttgcagctcctacgtttgagacagattttcaatggtgtttttcttaaagtgaacaaggcaacaatgaacatgcttcaccttgttgaaccttatgtgacttatggatacccgaatctcaagagtgttagggaactcgtttacaaaataggttttggaatgttgaacaagcagcgagttgccttgaccgacaacgcaatt

SEQ ID NO: 215365 - DNA, 242 bp, Gossypium hirsutum
cccacgcgtccggtttgctttactttatatggagtattttgaacttacaagactgtaatggaattttgttaaatttgcttagtttcttctgatgatgttttgcagttttctaactgttgaaaaaaaaacattaatatatgataaaaacgaaacaatgccaaaaacatttttggaaaaaatcatatgaaaatactgaaaaaaacactgaaaacacataaaacgacaaacgctaatgaacatag

SEQ ID NO: 215366 - DNA, 358 bp, Gossypium hirsutum
atctttggcttctctttcagatttcaaagatgtatacatcaaggaagaagatccacaaagataaggatgctgaaccaacagaatttgaggagtctattgcgcaggcattcttcgatttggagaataccaatcaagatctgaaaagtgaccttaaagatctctatattaattcagcagtccaaattgatgtttctgggagccggaaagctgttgttatccatgtcccgtatagattgaggaaagctttccgcaaggttcatgttaagcttgtgagggaacttgaaaagaagttcattggcaaggatgtgattcttattgccaccaggaggatattaaggccttcaaaagaaagttctgc

SEQ ID NO: 215367 - DNA, 385 bp, Gossypium hirsutum
accagagtctcagttgtggttcttggtgtagcaccccagaaagcacactttgagggagctgagatggaattcggggctgagaacggctgcaagtgtggagacaactgcacctgcaacccttgcaattgtaaatgattagagaccaaagccaaagctccctggaagcagagacgcctttgtctttaagaaataatatgttttgttgtttatgtgtttttagaataaagtagccatggcttgtcgtaagttttgcctgttgccgccacggttacttggtgcttgccaataaatagagtgaagtactaatatttacttgtttttctgtccagtgtgagcatctctgctatctcaggatatattgtgactattacataattaatgtaag

SEQ ID NO: 215368 - DNA, 383 bp, Gossypium hirsutum
gcttagcaaggggagctagagcagtgctccaagtatatcctgaaaatctagcccaacatgagctaattttgagttatgcaatgcgctctggatttgctggtggcgtggttgtcgattacccgcacagtaccaagaagagaaaagaataccttgtcctcacttgtggcccgccgtccctcagctctgtcgttcccagtggaaaaggtgaagacggagagagttgttctgatgatgagagcagtggagatgaagaaaatcagacggtttgcatttcggacaggcatagacctcagaaaaagcagaaagtaaacaagaaagggaagggcagagaatgggtgttgaggaagaatgaccagatgagaagggaagggatgtcgtccccc

SEQ ID NO: 215369 - DNA, 398 bp, Gossypium hirsutum
cttgctttcaagcaatctaaacactgattttctcatcaaatcgctttgacatatggctcgtaccaagcaaactgctagaaaatcaaccggtgggaaggctccacgtaagcagctagccactaaagctgctcggaagtcagcaccggcgaccggaggagtgaagaagcctcaccgtttcagaccaggaactgtggctcttagggaaatcaggaagtaccagaagagcaccgagctcttgatccgaaagcttccattccagaggcttgtgagagaaatcgctcaagattttaagactgatttgagattccaaagcagtgccgttgccgctcttcaagaagctgctgaagcttaccttgtcggactgttcgaggatactaatctgtgtgctatgcatgcta

SEQ ID NO: 215370 - DNA, 323 bp, Gossypium hirsutum
tgttactgcatctctcgtattatttctcgtatattaatggcgggtcggggtcagactctcggatccggagcctcgaagaaggcaacatcaaagcagttcacggctgggcttcagtttccggagggtccgtattgctcgagtacttaaagctgggaaatatgctgagcgggtccgagctggagctccggattacctcgccgccgatctagaatatctcgccgctgacgttctcgagctagccgggaatgcgaccaaggacaacaagaaaacctcaatcgtgccacgtgacatccaacttgccgtaaggaacgactaaaagctga

SEQ ID NO: 215371 - DNA, 386 bp, Gossypium hirsutum
tcgcagagggaaagggcttgggaaagggggagcccagatgccttgtaaggggcttaagggttacattccaggggttacttagccggccatccgtcgtttggctcgtcgtggaggagttaagagaatcagtggcttgatctatgaagaaaccagaggagtgttgaagattttcttggagaacgtcattcgcgatgcagtgacttacactgagcacgctagaaggaagaccgtgacggccatggatgttgtttatgctttgaaaaggcaaggccgtactctctatggatttggtggttaagttttcggtttcttgttcgtgttatattgtactatgtaatctttgattatcatcaatggatttcgttaagaaaaatctattctcgctt

SEQ ID NO: 215372 - DNA, 337 bp, Gossypium hirsutum
ctttttctttccttttcctctctaaaaccctaatttgatctccaaataccttcgagatctccaagcttcgtcaccccaaaatggccacgacacgcagatcccttcctcttctgagaaccctcatagccggaaaaacccaaacccgaaacgtgacgtacatgccccgaccaggagatggagccccaagacccgtaacgttaatccccggagacgggatcggacctttggtgacgaacgcggtggaacaagtgatggaagcgatgcacgctccggtttacttcgagaagtacgatgttcacggtgacatgaaacgggtaccacaagaagtgttggattc

SEQ ID NO: 215373 - DNA, 306 bp, Gossypium hirsutum
cccacgcgtccgcccacgcgtccggagagctttttgcagagttttatttattgattctcttagttctcgttttcatcggagaagaaaagtcaaaaaacaaaaatttcatggctcggaaattctttgtcggtggcaactggaaatgcaatgggacaactgaggaggttaaaaagatcattacaacattgaatgaagctgaagttccttctgaggatgttgtggaggttgttgtgagccctccatttgttttccttacctttgtgaaaagtctgttgcggtctgatttccatgttgctgctcagaact

SEQ ID NO: 215374 - DNA, 402 bp, Gossypium hirsutum
  unsure (1)..(402): unsure at all n locations
gatggtgctgaggcaggtcgtaaaatggagcaatggctgatcaaaaaccatagttttgagccacagtatgcagcgtcggagctgaacgagaaggatttctggaggatgttcgatgctgacctgtatgagcatgtgcgtaagaagtacggagctgtgggaacattcatgagtgtgtactacaaatccaacaaaggaaggaagaccggaaaagaggtccaagaagcggagcaagcccaccttgaaactgcctatgcagaggctgattagtgagcatgggggagtttggtagattttatgtgagaggaatctttgcatgctctttggtgtctctttaattgagtatttgctttcagcgatggtattatggagggtcggaactgangttatgggatatgtttaagc

SEQ ID NO: 215375 - DNA, 357 bp, Gossypium hirsutum
  unsure (1)..(357): unsure at all n locations
ggcacacctgatggagatccaagtcaatggtggaacaattgctgacaaggttgattttgcttacaagttctttgagaagcaagtccccattgatgctgttttccagaaggatgaaatgatcgatattattggtgtcacaaagggtaaaggttatgaaggtgttgtcactcgttggggtgtcacacgtctgccccgtaagacccatagaggtctgcgtaaggttgcttgtattggtgcctggcatcctgccagagtctcctttacagttgccagggcaggtcnaaatggataccaccaccggactgagatgatcaagaaggtctacaggtgtggcaaggttggtgatgagacccactc

SEQ ID NO: 215376 - DNA, 380 bp, Gossypium hirsutum
cccacgcgtgcggagaaacccaaaaagggctcgaaccccattactcagttgtggcacatgaatggtaaatgtcctgatggaaccattcccatcagaagaactaaagaagaagatgttttgagggcaagctcagttaaaagatatggtaggaagaagcatagggccatccctcagcccaagtctgcagatcccgatctcatcaatgaaagtggtcatcagcatgcaatagcatatgtggaaggggataagtattatggagctaaagcaaccataaacgtttgggaacccaaaatacaacagcctaatgagttcagcttatcccagttgtggattctgggaggttcttttggtgaagatcttaatagtattgaaactggttg

SEQ ID NO: 215377 - DNA, 372 bp, Gossypium hirsutum
ccttaatgttgcagccattaaagctccgagtttcggcgaaagaagaaaagctggccttcaagatattgccattcttactggtgccgagttccaagcaaatgatctgggtttgttaatcgagaacacctctgttgagcagcttggtatagccaggaaagttatcatcaccaaggattcaacccaaataattgctgatgccgcttcgaaggatgaaatacaagctagggtgcaacaattaaagaaagaactagccgagacagattctgtttacgacacagaaaaactggcagaaaggattgccaaactatctggtggtgttgcagtcattaaggttggggctgcaactgagactgaactcgaggatcgcaagct

SEQ ID NO: 215378 - DNA, 333 bp, Gossypium hirsutum
  unsure (1)..(333): unsure at all n locations
ccataanccactccaagactctnccactgcagcagctgccactccctatgatcatggagctggtcatatcaaccctttgaaagctctagacccaggtttgatctatgacatttcagcccaggattactttgaattcctctgcacacagaaattgactgcaatgcagctaaaagcttttagcaagcattccaacatgtcttgccatcacaatacccttgccactccaggagatttgaactacccagcaatctcagttgtcttcccagaagatacagccatttcaactttgactctccatagaacagccgcaaatgttgggcctcctgcttcaca

SEQ ID NO: 215379 - DNA, 353 bp, Gossypium hirsutum
aaacactcggcttctcccagatcttcaccaacctcccaaaatgacaacccgcttcaagaagaaccgcaagaagcgcggccatgtgagcgccggtcacggtcgtatcgggaagcacaggaagcaccccgggggtcgcggtaacgctggaggcatgcaccaccacaggatcctcttcgacaagtaccatcctggttatttcggtaaggttggtatgaggtacttccacaggctccgtaacaagttccattgccccatcgtcaacatcgacaagctctggtctcttatcccggaggacgtgaaagccaaggccatgaaagatgccgctccgatgatcgacgtgacacagttcgggt

SEQ ID NO: 215380 - DNA, 326 bp, Gossypium hirsutum
cccacgcgtccgcccacgcgtgcgcccacgcgtccgcccacgcgtccgcaggattataaccaggagaaagtaatttctagaggatcaaagaagtatgccgaggatcttgaaagtggtttcacctcagatgttgaatccaagtacaagaagatatatgaggatgatattaatccctttgcagcattctcaaaaaaggagagggatcaaagatacaaggagctgggcttcagagacagaatcacactcagcagcggacgttttcttctgggaaacaagtgtgctcgaacatttgcatttttctacacaattgggtagcatatcctagt

SEQ ID NO: 215381 - DNA, 71 bp, Gossypium hirsutum
cccacgcgtccggccgggatcaacctcttcgaggcaaagcgaacaaacccccggcgcgaatcgcgccaagg

SEQ ID NO: 215382 - DNA, 366 bp, Gossypium hirsutum
ctactgttcacgaggaagcaatgcttgctataggtgctcttgcctatgccactggatcgcagtttgagaagtacatgcctgagttctataagtatcttgagatgggactgcagaattttgaggaataccaggtttgtggaatcacagttggggttgttggtgatatctgccgtgccttggatgacaaggtcttaccttattgtgatggcatcatgggtcttcttttaaaggatcttgctagttcagaacttcaccggtctgtaaagcctcctatattctcttgctttggggacattgctcttgcaataggagagcactttgagaagtatgttccgtatgctctgcccatgatgcacggagcaactg

SEQ ID NO: 215383 - DNA, 378 bp, Gossypium hirsutum
  unsure (1)..(378): unsure at all n locations
tgaagactacagtgaaactatgcaaagtattgccactggatgtgcagcacaattttcacttattcctcctgtttccagcactttctcatcccctaatatgactgatgaattgcaaactggagagatagaagcagatggaattttgatagatgaaaatccggcattgatcgtctacacgagtggtacaacaggtaaacctaaaggagtagttcatacccataagagcatctctgcacaggtgaaaatgctagctgatgcctgggagtatacgtctactgatcagattctggatttgctaccactacataatgttcacgagactttttaatgctntacttgcccctttgtatgctggctcaactgttgaatttataccca

SEQ ID NO: 215384 - DNA, 314 bp, Gossypium hirsutum
  unsure (1)..(314): unsure at all n locations
aggggctatcatccctnccaagcgnctccgcaacaagaacgccggcttttccacccatctcatgaagcggatccagaagggtcccgttcgtggcatctctttgaagctccaagaagaagagcgtgagcgtcgcatggatttcgttcccgacgaatccgccatcaaggttgatcaaatcgaagtcgataaggaaactctcgatatgctttcggttctcgggatggctgatattcccggccttgttaaggtcgatccggttgctgttgcggttccccaaatcgggttcggtcgcgggggtggacccggaaggagat

SEQ ID NO: 215385 - DNA, 350 bp, Gossypium hirsutum
  unsure (1)..(350): unsure at all n locations
gaaaaaaaacgatgggtgttttcacatttgtttgcaggagcaaaggcggtgagtggtctgccaagcagttggagggagagattgagagctctgctgcttccacttacgagctccagcggaaacttgtccaggccgccaccgcctgcgactcctctggtggtgtcacctcctctttctctgtcgttacccctaattctgccgttttccaggtggttattggaggtgctgtaggcggagccttcatcgggggtggaggagctgctgccgctccggctggaggcgctgccgctgccgctgaaactactgcaagtgangagaaaaaggaagagagagaggggagtgatgacgat

SEQ ID NO: 215386 - DNA, 349 bp, Gossypium hirsutum
cccacgcgtccgctgaaattcacaagcagcagccgctaccgtgtcgctggcctcgtacttagccaaatttaaggatggattcacaaattaagtttgccgtggtggtgaaaattatgggaaggacgggatcgagaggtcaagtgactcaagtgagagtcaagtttttggatgatcagaaccgttttattatgaggaacgtgaagggaccggtcagggagggagatattctcaccttgctcgagtctgagagggaagctaggaggcttcgttgatcacttgctcttatctgcggtttgcagctttattaatggttatgttgcgcaagtagctggctgtatgatatttctga

SEQ ID NO: 215387 - DNA, 381 bp, Gossypium hirsutum
  unsure (1)..(381): unsure at all n locations
cggacgcgtgggctaagtctcttttatttgcttctttcaccatgaccaagcagcaggctaactggtctccttacgacaacaatggaggatcttgcgttgcgatcgctggagctgattactgtgttatcgccgccgatactcgaatgtcaaccggttacaatatactgacccgagagtactccaaaatctgtaaacttgcagataaatgtgtcatggcatcctcaggatttcaagctgacgtgagggctttacaaaagcaactggcagctaggcacttgatttatcagcatcagcacaacaagcaaatgagctgccctgcaatggctcaattgctttccaacacactntattacaagcgtntctttccttattattctttta

SEQ ID NO: 215388 - DNA, 395 bp, Gossypium hirsutum
  unsure (1)..(395): unsure at all n locations
cccacgcgtccgccggctccagccccagtagctgagccccatcacgaagaggagtcaaaggaaaagaagggaattttggagaaaatcaaggagaagcttcctggttaccactccaaatcagatgaagaaaaagaaaaggcttgagattcaagttcacataaaaatactgatgggattgtgtgtttcttaaattgttcaaaaattatctgcttttgtttttgaggttgtatttgttgtatatttcatatttaagtttcttcttttcccagcatttttagtacaaatcataaggaaaaaaaaagtttgctttcggtatgtgagaaatgacatgtttccattctgtctttttgtgattcgaacagtattttatgaatcaattnnctggcttctttgtt

SEQ ID NO: 215389 - DNA, 403 bp, Gossypium hirsutum
gcggcgactactactcgagcttcataacacacgaagcttttaactatggcgggtgtagagacagaggttgcggcggccggtgtgcccaagaagagaacattcaagaagtttagcttccgaggtgtcgatttggatgctctccttgatatgtccactgatgagcttgtcaagctcttccctgctcgagctcgcagaaggttccagaggggtttgaagagaaagcccatggctctaattaagaagcttcgcaaggcgaaaagggaggctccacctggtgagaagccggaaccagttagaacccacctgcgttacatgatcattgtacccgaaatgattggaagcattatcggtgtgtacaatgggcagacattcaaccaaagttgaatcaagccttgaatgatta

SEQ ID NO: 215390 - DNA, 303 bp, Gossypium hirsutum
  unsure (1)..(303): unsure at all n locations
aacgggagctccagntnaccttgctgctgnncttgaatacctagctgctgaggttcttgagttagctggcaatgctgcaagagacaacaagaagaataggatcattccaaggcatgttctattggcagtgaggaacgatgaagaacttgggaagcttttagctggtgtgaccattgctcatggtggtgttttgcccaatattaacccagttcttttaccaaagaaaaacgaaaaggtggcgaccaaggagcctaaatcgccatccaaggctaccaagaagtctcctaagaaggcgtagtttca

SEQ ID NO: 215391 - DNA, 395 bp, Gossypium hirsutum
  unsure (1)..(395): unsure at all n locations
ctctttctctattctctttggcttatctatcgctttgatttcgcgtccttactgtgcactcgatggcaaatcgatggttgaggcctgaggtgtatccgctgttcgcggccgtaggtgttgctgtcggaatctgcgggtttcagttggtgcgaaatatctgcatcaaccctgaagtcagggtaaccaaggagaacagggctgctggggttttggacaactttgctgagggagaaaaatattctgaacatttcttgagaaaatatgtccgcaacaagacgccataaatcatgcccagtatcaacagcttcttcactgacccaaagtgaggcttcactcttgctttatgctgaaactaaaataagagaatagaagaactaagnctnattcaatcaata

SEQ ID NO: 215392 - DNA, 350 bp, Gossypium hirsutum
cgttcgtctcttaattttggttggatatcgaagatgtcaggaagaggaaagggaggcaacggtcttggcaagggaggagctaagcgccaccgtaaggtcctccgcgacaacatccagggcatcacaaagccggcaattcggcgccttgcccgtaggggaggagtgaagcgtatcagcggcttaatctacgaggaaacccgtggagttctcaagatcttcttggagaacgtcattcgcgatgcggtcacatacaccgaacacgccatgagaaagacggtgactgccatggatggggtttatgcgctgaagaggcagggtaggactctgtatggatttggcgggtagttgat

SEQ ID NO: 215393 - DNA, 408 bp, Gossypium hirsutum
  unsure (1)..(408): unsure at all n locations
atgctggtgtctacgaggctattcgtggttttgattggactcaacaaacacaagttcttgttgctgctttctcagagctttacactaagaggatgtttgaactgctgcaatctgcttattcgacaataagcatcgaagatgcagctcaatttcttggaatgagtgaggaagatgcctcgaattatgtactcggacaaggttggacagtcgatcctacttctcgaatgataaccgtgatgaagcaggctatcgtgaaggagcagaagttagacccgggcaaattgcagcgactaactgaatacgtcttccacctcgaacattaaatcatgtctgtaatttctgtgattntttgactgtcttgctgaaaatttcttttaagcaaagctaatggttctaatcattatgagt

SEQ ID NO: 215394 - DNA, 332 bp, Gossypium hirsutum
cccacgcgtgcgggaaaactggaatccaaagtgtattgttacatggccttaaccaaggaaagaaggatttgacgtggcagaaatggtcataccaggttggcttaagaggagaagcaatgaatttggtctctccccatggagcctcttctgttgaatggattcgaggtgaacggattcaaggttcactagcagcacggagccggcagtctatgacatggtataagacgtatttcaatgccccaggaggtaatgaaccactggctttggatatgcggagtatgggaaagggtcaagttttggttaacgggcagagcttataaggatattggatg

SEQ ID NO: 215395 - DNA, 433 bp, Gossypium hirsutum
  unsure (1)..(433): unsure at all n locations
cccacgcgtccgcccacgcgtccgggcgggattacccgctgagtttaagcatatcaataagcggaggaaaagaaacttaccaggattcccctagtaacggcgagcgaaccgggaaaagcccagcttgagaatcggtcgccatcggcgtccgaattgtagtctggagaagcgtcctcagcgacggaccgggcccaagtcccctggaaaggggcgccggagagggtgagagccccgtcgtgcccggaccctgtcgcaccaagaggcgctgtctacgagtcgggttgagtgggaatgcagccgtaagcgggcggggagttccgtccaaggctaaagacgggcgagagaccgatagcgaacaagtcccgcgagggaaagatgaaannnctttgaatcttttcctcttggattacagtaatggttcacatgtcattga

SEQ ID NO: 215396 - DNA, 367 bp, Gossypium hirsutum
cggacgggaagcttcgagttcttttaggtgattttctgttagggctgtttggtaggtgatggctccaagtcaacctaaaactggcctttctgtgggcttaaacaaaggacatgttgttaccaagaaggaattggctccccacccttctaatagaaaggggaaaactagcaagagagtccactttgtgaggagcctaattcgggaagttgctggtttcgctccgtatgagaagaggataactgaacttctcaaagttgggaaagataagcgtgctttgaaggtggcgaagagaaagctaggcactcacaagcggaccaagaagaagcgtgaggagatgtctagcgttctccgcaagattaggtcagct

SEQ ID NO: 215397 - DNA, 407 bp, Gossypium hirsutum
  unsure (1)..(407): unsure at all n locations
caggaaaccggtccagaggaagcgagtcgggtcggagcagcgggtttcgaagagatctggctccgtcgatgacttgaaggcggtggcgaacaatttcaagatggagaaggttacgattttgaggcgtggagagtcgttggattcgaagatcaagagcaacagcggtggtggaaaggaagacgggttggttgtcacgggtacggatcggttaggtccagatccagaaatggtttcgaaacagatcagatttgtggatatcaagtctccggtgacaggaaaatccgacgtgtacgctggatcgtctttcgctgcctgtccggaaccgagttctattcctttgccttctttctcgaagaagaagcatgttccgatcgatgattcnnncnttagagatctcatgcgtatac

SEQ ID NO: 215398 - DNA, 406 bp, Gossypium hirsutum
  unsure (1)..(406): unsure at all n locations
ctcttcttccaagccaacaagcgtaaaggttgaatcttttcccccatttctccactcctaaagtcagggtttcgagcaacaatagaacaaaaatggggttctcaatgcagccttatggcatacaatccatgctgaaggaaggtcacaagcatctctcaggtctcgacgaagctgttctcaaaaacattgatgcttgcaagcaactatccaccatcacccgcactttcctcggccccgaaggcatgaataagatggtaattaatcatttagacaagctctttgttaccaatgatgctgctactattgtcaatgagctcgaggttcaacatcctgcggccaagattntagttctagctggtaaggctcagcaagaggagatcggagatggcgctnacttgacgatttc

SEQ ID NO: 215399 - DNA, 426 bp, Gossypium hirsutum
  unsure (1)..(426): unsure at all n locations
cagaaccccactgaggcagaactgcaagatatgattaatgaagtcgatgctgatggaaatgggaccattgattttcctgaattccttaacctgatggcaagaaaaatgaaggatacagactctgaggaggagcttaaagaggcattcaaggtgtttgacaaggatcagaatgggttcatatctgcaagccgagctgcgccatgtcatgacaaaccttggtgaaaagcttacagatgaggaagtcgacgagatgatccgcgaagctgatgttgatggtgatgggcagatcaactacgnaggagtcgtcaaagtcatgatggccaagtaaaggacctctccaactataaccaggatttaaaattggnngttaaaaaaaaaggaagaaagggacagggcagantagtttgctagatatctattaatgat

SEQ ID NO: 215400 - DNA, 321 bp, Gossypium hirsutum
cggacgcgtgggtggggaagattttttgatatggccccagacagggtacccaaaggaacgtgttcaaagtgacttcacgacacagcttgtttgctattgtcaatggaaggtgtgtggaggaccctagatcaatggcatcagattttactggtacttcactgttagggcttgagatagctacaaaccgggatattattgggattgcattagccaatttgattaagcttcactggaaacgtgcttcaagacaaatcatggattgatgctgacttctcccttaggcatgttaatgatgccagtgagaaacccaacatgatggat

SEQ ID NO: 215401 - DNA, 357 bp, Gossypium hirsutum
  unsure (1)..(357): unsure at all n locations
cccacgcgtccgcccacgcgtccggtaagaaacagcacacggtgactcgagaaaaacaagagatagaactactagcccgtggtcgtcatgatccttgtgttgtccctcgagcggtgccgatggttgaagcgatggtagcgttggtgcttgtggaccaattaatggcacaatatgcacaatgtaaccttttccctatcaattcagagttacaagaaccgttgaacttggaaccggcaaatatatagacttgaatggttgcagaaccggcaacatcggcccttgctttcatcaacttgaattttcttaaatactccatttttcatgagaatgttgtggttntaatgtttttgtcaacac

SEQ ID NO: 215402 - DNA, 410 bp, Gossypium hirsutum
gccgctcttggagggagctctggacactttcagttagtattcagttaatgaagaagacgtcgatgttgtttgggtcccgggtagttttgaaataggtattgttgcagaaagactgggcaagtctcgaaattatcatgcaattttatgcattggagctgtgataagaggagatactactcactatgacgccgtggctagttctgtagcatctggggtgctttcagctggcctaaactcaggtgttccttgcatatttggggttttgacttgcgagaacatggaccaggcgttaaatcgagctggtggtaaatctgggaacaaaggtgcagagtgtgctttaacggcgattgagatggcttcctttgttgatcaccatcttaagtagtggccgcattattcattacatgatg

SEQ ID NO: 215403 - DNA, 277 bp, Gossypium hirsutum
gacatactgcagaattcatcagcgcatttatatggttgtgctttttgagaaactgaatggaaattgcgaggagggtgagagatcgattgagaatctcattcgaaactctaaactagatgcggagattgagtcaaagactggaaccgctattatcgagcctaatcaaccgaaagtttacgagcagctgatcgaccacactaatgcccttcaagggcagacctacaagctagccggccagattctcgagcactcacaatcacaatctgaacgttaagtt

SEQ ID NO: 215404 - DNA, 361 bp, Gossypium hirsutum
cgatgggttagtgaaggtttacctgtttattgtggtaggttcaagcatggggagcctgagagcattgaagatcgtcttatgttttcccatttgataagttgggaaaaaggaccatatagagatacctataagatatatccaagaaaaggagaggtttgggccctttttaagaactggaatgtcaactggaagtcgaggaccgagaaacatggatatgaatttgttgagatcttatcagagaatggtgaaggtgtaggtatacatgttgcttacttgactaaggtcaaaggctttgtgagtgtcttctgtccaatgagtaaggatggagttaatacaattctaattccgcccaatgaactac

SEQ ID NO: 215405 - DNA, 434 bp, Gossypium hirsutum
ctcttcctcgctttcgcgctccgctatagaccaacctgccgtttttgtgagcagatcacgccagcctccagatgtgcaaaaagtacatggacacgaaactccagatcaagctggatgcaaatcggatggctgttggtactcttcgagggtgagatcagattatgaatctagtggttgacatcacagtagaggagaatggccatgagaaaactgtcataagcatggaggtgataagaggaaatagcgttgttactgatgcagcccttgaacctgttggcaaaaggcagtgatcatggtttgtttatggattcattactgtgatgtatctcttcgcttcgatgatccaatggcatccctgctagtttgagattgagattgagctattttatgtagttgagaatttgtcggaggttagatgggactacatggaatct

SEQ ID NO: 215406 - DNA, 351 bp, Gossypium hirsutum
  unsure (1)..(351): unsure at all n locations
agcaaaactaataaacatcaacaataaatcggaattccccagcagcaatggctactccaagtgtagagtatttgcctcctccattggatgctactgcacagcaacccgctatctttgatggaacaatcaggttgtatctggcttatccttgcccttacgcacagcgcgtgtggatcgccaggaattgtaagggtttgcaagacaagattaagttggttcctttgaaccttcaaaatagacctgcttggtacaaggaaaaagtttaccctgaaaacaaggtgccgtccttggaacataatggcaaagtcattggggagagtctngatttgattaaatattttgatagcaact

SEQ ID NO: 215407 - DNA, 317 bp, Gossypium hirsutum
agctaaactaatgaatatcaactatatttttgttttccccagcagcaatggctacttcgagtgtagagaattagccttcggcattggctgctactgcacagcatcccgctatctatgctggaacaatcaggtcgtatctggcttatcctagcccttacgcacagctgcgtgtggatcgccaggaattgtaagggtctgcaagacaagactaagttggttccttagaaccttcaaaatagacctgcttggtacaaggaaaaagtttaccctgaaaacaaagtgccgtccttggaacataattgcaaactcattgaaga

SEQ ID NO: 215408 - DNA, 309 bp, Gossypium hirsutum
gtcaatggtcacattttcaatgtgggtttcccaaacaatgaagttacagttaggcaacgtgctgaaatgatgactaaggtctataccaaggttagtggagaatctgcactggagactccaacaattgacgtcagctccaaggaattttatggcgagggatacgatgatagtgacaagagaattccagacatgaccataataaataaacaacttggttggaaccccaagacatagctttgggacttgcttgaatctacactgacctaccaacacaggacttatgctgacactattaagaagtcgatggca

SEQ ID NO: 215409 - DNA, 383 bp, Gossypium hirsutum
gaagctgctgttctctctctctctcttttccatagtttcacccatcttttaaggcatcgctcacaaaattatgggtttgaaggaggaattcgaggagcatgccgagaaagttaagaccctcccggccgccccttcgaatgatgacatgctcattctctatggactgtacaagcaagctactgttggaccagtgaataccagccgtcctggaatgttcaacatgagggaaaagtacaagtgggatgcatggaaggctgttgaagggaaatcaaaggaggaagcaatgggggattatatcaccaaagtaaaacaactgtttgaggctgctggaagttcttgatgtgtgtgtgtatgaccaatgaaactggtgtaatttcaagccc

SEQ ID NO: 215410 - DNA, 339 bp, Gossypium hirsutum
caaaccgaaaatgaagatcaataaagaggcgttcagataattcaggatgctcttaaggcacctactttaactatagcttctaatgctggttatgatggctctctggttcttgggaaactactggaacaagatgatgataatttgggttttgatgcttcaaaaggtgcatatattgatatggtgaaagctggaatcatagaccctctcaaagtcattagaacagccttagtcgatgccgccagtgtctcattgctattaacgacaaccgaggcatctgtcctcgaaaatccagatgagaagaaaccaccaagtcgtatgccagacattgataacgactac

SEQ ID NO: 215411 - DNA, 255 bp, Gossypium hirsutum
gcgcacacgcgtccggactatatttcagaatttgtgtcacaggtacatcaataaagagttgagagatgcatacgtatcgaatagtctgactgacattagtcaaaggttcaatggatcaatcattaacaacagaattctaaaagctgatgttgaaacattgaaagcaaaggtaaaaatggctgaagaggcagtcaaaagaactactggtttgaaccctgtgttccatgcattacctagaataccaagcctgtcatc

SEQ ID NO: 215412 - DNA, 340 bp, Gossypium hirsutum
cccacgcgtccgcgctcggatttttcttatacgttaaaaaaatggggctgtctttcacgaagctattcagccggctatttgccaaaaaggagatgcgtatactgatggttgggcttgatgctgctggtaaaaccaccattctttacaagctgaagttgggagagattgtcactaccattcccaccatcggtttcaatgttgagaccgttgaatacaagaacatcagcttcactgtttgggatgttggtggccaggacaagatccgaccattgtggagacactatttccaaaacatgcaaggacttattttcgtggttgatagcaatgatcgtgaccgtgt

SEQ ID NO: 215413 - DNA, 357 bp, Gossypium hirsutum
acgctgctcatactattactttcgtacttcttgagtggtcgctttggactcgtgatgttgaggaagaactaattcccctttgcagggaactcggaattgggattgttgcatatagtcccttcgatcatggattctttgcctgtaaagcaaaagaggatacctctaatagttctctggaagtgtacccaaggtttcaaggagaaaacttggagcaaaatatgatcctatattcgaaagtagagaagttggctgaaaagcatggatgtacaccggcacaacttgcacttgcctaggttcttcaccaatgggatgatgattctactattccctgtacaaccaaaattaaaaatctagaca

SEQ ID NO: 215414 - DNA, 419 bp, Gossypium hirsutum
tccacgcgtccgaaagaacgatatcagactatgagaagcgtgagcttgtcttgaaggaagacgggcaagagtatgcccaagtgcttcgtatgctcggcaacggcaggtgtgaagcaatgtgcatcgatggtactaaacgcctttgccacatccgcgggaagatgcataagaaggtatggattgctgctggtgatataattcttgtcggccttcgcgactatcaagatgacaaggccgatgtgatccttaagtacatgcctgacgaagcaaggctattgaaagcctatggtgagcttccggagaacacccgtctcaatgaaggcattgttgatgaggaagacgaacgcggtgtagatgattatgtcgagttcgaagatgaagatatagataaaatctaaggtaactattatggggtcatg

SEQ ID NO: 215415 - DNA, 343 bp, Gossypium hirsutum
cccacgcgtccgcttacttttagtcgtgttaaacttggggacgaagataaacatgggaagaagaagagaaaactttcaaagttaaaggagcttgaaaatgcaatgaaattagaagcagctaagaaagatcccgagaaaggtgaggttatcgcgaagaagcattcatggaaggcagcaatggatagagctgccgggattaaggttcacgatgatccaaaattgttgaaacaaagtatacagaatgagaaaaagaggcataagatgaatgctgagaagtggaacgagagagttgaaacaacccagaagttgaaagtggagaaacaacagaagagatcggagaata

SEQ ID NO: 215416 - DNA, 305 bp, Gossypium hirsutum
gataaacgcgggtttggcggcgaggattctatttaacacggcggcctcggtcagtgaatgcgtcggagaagggattccggtcggatctccatggtggtttatctacgccgggattccttgttttttagtacttttcgcggggatgatgtcgggtctcaccctcggactgatgtcgcttggtctcagcgaactcgaaattcttcaacggagcggcactttcaccgagaaaaaacaagcagctgctattttgccggttgttcaaaaacagcatcagcttttggtgactttgctatcttgcaatgctg

SEQ ID NO: 215417 - DNA, 354 bp, Gossypium hirsutum
cccacacctacagcttatgaatttggtttttgcagaccgcacccgtgggaagggtagcgtgagaagaaagaagaaggctgtccacactacaactaccaccgtctacaaacggttacaaagtaccctcaagagaataggagtcaatgctattcctgcaatcgaggaaggcaacatcttcaaggacgatgttgctatccagcttattaatcccaaagttcaagcatctattgctgccaacacctgggttgtaagcggttctcctcaaacaaagaaattgcgagatattcttcctggaatcattaaccagttgggacccgataacttgtacaacttgaggaaattggcagaacaatt

SEQ ID NO: 215418 - DNA, 425 bp, Gossypium hirsutum
ccagagtcaacgtaggaattacggttgtgtctagatatggcggtggcagcgcgcttcagatccggtctccctatctatcacaggctctcgagatccgattccctgccttctcacactcccagagctactcttcaccgaactctactttgccccgagctgtcgaggaaatattctacttctctgaagaacgacgagaatgataaggtgcctttggctatgtttggtggatctggaaactatgcatctgcactgtaccttgcagccgtaaaaggaaatgctctggacaaggttgagtctgaacttcttgaccttgttcaggcatcaaaaaacagtcaattgttttctcaattcactaaggacttgtcagtacctgcagagacactggtcaaagccattaatgagatatgtgggcaagctaaattttc

SEQ ID NO: 215419 - DNA, 360 bp, Gossypium hirsutum
cccacgcgtccgttcactttcagatcatcaaaaccttcaacaatggcctttgttaaggctcaaggaaccaaagcttactttaagcgttttcaggttccattcaagagaaggagagagggaaagactgattacagggctaggattcgcttaaccaatcaagacaagaacaaatacaacacgcctaaataccgattcgttgttcgatttagcaacaaagatatcactgcacaaataatttctgctaatattactggtgatatgattcttgcctcggcttactcgcatgagcttcctcgttatggacttgaagtcggtcttacaaactatgccgctgcttattgcactggattacttttgggg

SEQ ID NO: 215420 - DNA, 312 bp, Gossypium hirsutum
cgcaaaccatacatcctctttatctgtttcatctcagaacctccgtaattcagtgagaagtggatgacgaagggaaggctgaggttcctgagtcactcttgaagaaacagtatatgactgaggaatgggatcttgccaaaaagcacgagcttgaagttgcaaacaagaagatagtcaaaaaccgcaagcttatttacactatggctgatcagtatgcataggagtacgaggctcaggacaaagagctgattcaactgaagcgggaggctaagttgataggaggattctatgtagatccagaaactaaactct

SEQ ID NO: 215421 - DNA, 342 bp, Gossypium hirsutum
caggaagaagaatctgcaatactatgatttatcggccaagagtaactacaaggtcgaggaacctttcttgtaccttgctaggaagcttgcaggtgatcctaatctccacttcgtggagtctcctgcacttgctcctccggaagtacacattgacttggctgcacagcaacagcatgaggctgagcttgcagcggcagccagtcagccccttccagatgatgacgatgatgcatttgaatagaggggtttcccttgccacagagctatcaacaatatctgttgctttttcattcactcccatttggatctgtgctatctttaaaaaaattttcgtatttaaat

SEQ ID NO: 215422 - DNA, 408 bp, Gossypium hirsutum
attcacaaaccaggtcacatatgaattgtttctcgatctggcactttaacataggaaggaggttttcaaacaactgcagttggtttggggcaatcaacctgcgtaggaattggtggagatccttttaatgggaccaactttgttgattgtgtgaccaaattccttgctgatcctcagacagaaggtattattctaattggtgagataggaggcacagcagaagaagatgctgctgcactaataaaggaaagtgggactgaaaagcccattgttgccttcattgctggacttactgctcctccaggacggcgtatgggtcatgcaagagctatagtatcagggggcaagggtactgcacaggacaaaatcaagactctaagggaagctggagtgacagttgctgaatct

SEQ ID NO: 215423 - DNA, 341 bp, Gossypium hirsutum
cccacgcgtccgcttttgcagatttgcttatctcttcaggagctgatgcaacagttaaggaaaacatcgatgggggtttaacagtgttttgccccaccgaccctgttattaaggatttcatgcccaaatacaagaacttgacagcatccaagaaagcgttcctgctgttgtaccacggcgttcccgtgtatcagtccatgcatatgctggaatccaacaaccggattatgaacacattggccactgatggagcaaacaagtatgatttcaccattcataacgacggcgatgtggtgacattggagactaaagttatgactgcccagattacatggactttg

SEQ ID NO: 215424 - DNA, 365 bp, Gossypium hirsutum
gaagaggttgcttctcctctcatagttttccagatcgaaggcctggtgatattgaaaataatcaagcactgcaaggaattttcacctgctctggttaccggccaacttcttggattagatgttggcattgttcttgaagttactaactgtttccctttcccgatccgcgaggaagatgaggagattgaagctgatggagctaattatcagctcgagatgatgagatgtctactggaggttaatgttgataacaacactgttggatggtaccaatcaacgattttgggttcatatgaaacagctgagctcattgagacttttatgaattctcaggagaatataaggaggtgtgtatgcattatcta

SEQ ID NO: 215425 - DNA, 277 bp, Gossypium hirsutum
tcgactaggacgctctacgaggcccattttcaattcctaggggaatgagtcatcaaaaggataaaaatttcaaggacagaaagtgagtaaacccagaatatcagaaggtttctgaaccactagcacttgtgatatggataacagcgctgtgcagtcacagggaagcatctgctcaatcagcacaagccaccagacacttgatccaaatggcaatgctgcaagtgctaatggcccctccgaatttgtaaatcatggccttattctctggaaccagact

SEQ ID NO: 215426 - DNA, 353 bp, Gossypium hirsutum
  unsure (1)..(353): unsure at all n locations
cccacgcgtccgtcaatatccgccatttttgctttagaggactgctgctatctagctggcttgaacatggatttcctttcgagctcctttaaaaccgtcaatggcactagtgaaactctaccccccgtggaagctgaggatgtacaaactcttcttagtgctattttaactaaccagcaaacctgtttggacggcatacaatccactgcttcaactcgaggcataagggaaaacatcacagttcctatgtctaatgacacanagctttacagtgtttctctcgctctttntacanagggatgggttcctaaggagaaaaaatcagcctcacggcatccgagtagtaagcagat

SEQ ID NO: 215427 - DNA, 426 bp, Gossypium hirsutum
cccacgcgtccgcccacgcgttcgattttccccatgacaatgttcattcccgaggccgagcttccggcatgggtagtctgttatatccctgctacaatgtcgctcctaaacatccttccaaccccgaaatcattcccattcattgttccttaccttcttttcgagaataccatgtcggtgaccaagttcaatgccatgatctccggtcttttccaacttggtagcgcatatgaatgggttgttacgaagaaatcaggtcgatcatccgagggtgatcttgtatccttggtcaagaaagaaacaaagcgacagcgcggtgaatccgaacgcaatctcgacgaaacataaaccaatattcttcgagaacaaaagagtagcccaaagaagcataatatgatgtatacaaaggaactagctttagcattc

SEQ ID NO: 215428 - DNA, 396 bp, Gossypium hirsutum
cccacgcgtccggctattattggtggtttcgtaagtaatacactacgaccagcggttgcagaaggctgtgacccagaatggagatcattaatggagagatgctggtcatccgagctaccaaagagaccgagtttcaccgagatagcaaatgagttacggtcaatggcagcaaaaattcaaccaaaggggcaaatcccataaaataaagaaagcagacaactcaaccctcaattttcaaaatgattttggacaatctggttattgatggcatctcttgtttcctttgcattttgcatggcagatggaggaagaataatatggtgttcgtcaatgtgctgctccttggcatgaatgttgacagcacaaagaaaggaagggaaccatgatttctttttc

SEQ ID NO: 215429 - DNA, 370 bp, Gossypium hirsutum
cccacgcgtccgaaaaaagctcaccttgtgtttggttacagcattgacgttctcccctgattcaagggctttggtttctgcatcattggactcaagtgctaggttgaccctaatcaaggacaagacgagtagtggcgggatgacatggatgatcatattaatggtactacttgctattgctgtgtattttatgaaggagaaaggaattataccctaatgcaggcctgctaaaattgcgatcgaagatttgaccattgtgttaaaacttttgaaattgcttgtggcaaactttacaaagattcttatcactgttcagtcaacttaaaactgtgatatggatttctgatttaaatagtctaatcagctgact

SEQ ID NO: 215430 - DNA, 344 bp, Gossypium hirsutum
gtccatttgctggttggaacccccggcttaatactagaccttgccaaaaagggtgtttgcattttgaaagattgttcaatgcttatcatggatgaggcagataaacttttgtctcctgaatttcagccttctatagagcagctgatacgtttcctttcagcaaatcgccaaattttgatgctttcagccacatttcctgttaatgtgaagtactttaaagacagatatctacaaaaaccttatattattaatctgatggatgaacttactataaagggtattacgcaatattatgcttttgtggaaaaaagacagaaagtccactgcttaaatactcttttctc

SEQ ID NO: 215431 - DNA, 359 bp, Gossypium hirsutum
cggacgcgtgggcggacgcgttcgcggtcgcgtgggcggacgcgtgggcgggggagaagatcttcctagcacaaaagatgatgatatacaagtgtaatcttgcaggcaagcctgttgttaccgccactcaaatgcttgaatccatgataaagtctccgaggccaacccgagctgaagcaaccgatgttgctaatgctgtcctggacggtaccgattgtgtcatgctcagtggtgagagtgctgctggagcctatccagagcttgccgtgaagatcatggctcggatttgtattgaggcagaatcttcccttgactatggagcaatcttcaaagaaatgatccgatcgacttcactttca

SEQ ID NO: 215432 - DNA, 325 bp, Gossypium hirsutum
cccacgcgtccgcaaatactactcctttaacgatctccaatttgttagcaaccccgttagaacccaagctggtgaggatttcggcctcaacgtaactggcctgaacaaccaggttaacgtctcaagcggggttgtcgagactcagattaacaacgcattatatcaaaagaaacctctggcaatttatcaagcggacaaggtgttgttgcctgaggagttttttgaagctaaatccccagcggctgcaccttcaccggcgacaaagaaatcatcaacagggtctaaatcgaactcaagagcatcagcaaccgcagatgagccagct

SEQ ID NO: 215433 - DNA, 333 bp, Gossypium hirsutum
cagaagtgtctcgatacaaatccaagatcgactgttggcttgtcatcgatggccgagttctgaacgtaacaaagttcctggaagaacatccattaggagaagaggtgttgttggaatcaacatggaaggatgcgacgaaagaattcaacgatatcggacatagcaagtcgggtcagaatttgctcctcatgtatcagattggtgttctccacggtcacactttaaagaataatgaacaggttggttcaaccgaggagcccaaaaagaaagagatgagtgcattcgatatcaaggatgacctgacgcctaaatatgctgcagtcgtctagttcg

SEQ ID NO: 215434 - DNA, 355 bp, Gossypium hirsutum
aagatatcgaaaacgggctacctagctctccagtagttcatcctgccatgcaaagacagccatcacagacggagcttgataaaactttgaggccaatcacggtcgggaccattgttcggtacgaggaggaaaaaattgaattgcagtacagcgagtgtgttatatgcttggaagagtttaaaggcggagattgctgtagggttcttcctaactgcaaacatcaataccatcaacattgcatagatgaatggctggttaaggacaggcattgccctctttgtcgtggttcagtccatggtttagaaccgacaccaatcactgtgtagcattgaaactaaattggctggtaatggtt

SEQ ID NO: 215435 - DNA, 344 bp, Gossypium hirsutum
aaaggggtgtccactggtcccagatttctcctttggtcagtcatatgcgttcaagtgggggaaaccacgtagcaagtttctcctgcaactttcaagagctatcaaattcgtccctatgttattttggggatcttttggaactcctataccgtatcaacatccgattaatgtggtggtggggaaacctatttacgtaaagagaaatccccaacctactactgaagaggtacttgaagtacatggccaatttgtgaaagctcttcaagatctctttgagagacataaaggtcgggtgggatatgctgatcagtcattaacgattctttgatttgactcttattcga

SEQ ID NO: 215436 - DNA, 399 bp, Gossypium hirsutum
aaaagaggaagggcctcaggttccgactatcgatttgacagaaatcgagtcggaggacaaagaggtccaggagagatgtcggcaggagctgaaaaaagctgccatggaatggggtgtgatgcaccttgttaaccatggcatctccgaggagctcatggatcgtgttaggaaagttgggcagaaattctttgaactccctgtggaggagaaagagaagtatgccaacgaccagagctctgggaatgttcagggctatggtagcaagcttgctaataatgctagtgggcagcttgagtgggaggactacttcttccatctaatttttcctgacgataagagagacttgtcaatttggcctaaaatccccagcgagtacactgaaggtacaagtgagtatgc

SEQ ID NO: 215437 - DNA, 266 bp, Gossypium hirsutum
ggcggtggtgccaaagtccatgttatgtttcatgcgagcaagtcaggctcgggtgaagctgaatctgcaccaattccattcaactgcgaagcgtggagatataatcggtgtcactgggtttccaggcataactaaaagaggagagttgcccatttccaacgtcatttttagcattatcccattgtctccatatgatgccattgcaaaaagcaggccctgatgccagcgtgaagaaaactgatgtatggatcccaagaagcactaag

SEQ ID NO: 215438 - DNA, 367 bp, Gossypium hirsutum
cccacgcgtccgtgacaaagaagcttctactagttatcttgaaggtgtgatcgaaaagcttgaggctactaaagagcagcgcatagaagagccaattatttatattaagatgcaaattgccaaatttaagcttgagcagggtgaccaaaaggagtgcaagaaacttcttgatgatggaaagagtactcttgacagtatgactgacatagatccttctgtatatgctagctattattgggtttcatctcaataccataaatttcgtcaagaatttgctgacttctacagaagtgctctcctttatcttgcatacacatctgtggcgtccctgtcagaatcctttaagctgggattggcaatttgatct

SEQ ID NO: 215439 - DNA, 400 bp, Gossypium hirsutum
cccacgcgtccgatagagctgctgttgttatacaaaagtggattaaaggcaggaatgtgaagaaaacattcaagaaaattaacgatgcatcaattgtgatacaatcagttattcgtggctggttggtcagaagatgctctcaagatataggactagtcaaacctgggggctctaaggaaaatgaatcagatgaggtgctggtcaagtcatcatttctctctgaagtacagcgccgagttctcaaagccgaggctgctctgagggagaaggaagaggaaaatgatatcctccatcaacagctccaacaatacgaaagccgttggtctgagtgtgaggtaaaaatgaagtccatggaagaagtatggcagaaacaaatgaggtcccctacatccagtctctc

SEQ ID NO: 215440 - DNA, 398 bp, Gossypium hirsutum
cacaggtgaaccttaccttctccagaccaatgtgtacgtgaatggtgtagggaagagagagcaaagaatgaacctttggtttgaccccaccaaggacttccactcttacactctcctttggaaccagcgccaagttgtatttctagtggatgagacaccaataagagtgcacaccaacatggaacacaaaggaattccttttcccaaagaccaagccatgggtgtatatagctcaatctggaatgctgatgattgggccacacagggtggcctagtcaagactgattggagccatgcaccatttgttgcctcctacaaaggcttcgaaatcgacgcatgcgagtgcccggtttccgtgacagcagatgagatcgccaagaaatgcaccagcagtgctg

SEQ ID NO: 215441 - DNA, 353 bp, Gossypium hirsutum
ctctgatgtagccatcgcctgcgtctatctattcatcactctgcaccaaaaagtgtgtaggtgtgggcttcgagagagaccatgtcggtttaccaggatctcatctacgctgacgagcttgtttctgactcattcccctacaaggaaatctagaacgggatgctgttgtacgttgacggaaagtggctcgtgcatggagctgtccatattgtcattgctgccgatccttaagccgaaggtgcagaggacgatgaaggagtcggtgaccaatcatgagactgttgtgacattgctgacactatcatgcttcaggagctacctcctttagacaagaagcacgttgtcgtgttcat

SEQ ID NO: 215442 - DNA, 418 bp, Gossypium hirsutum
  unsure (1)..(418): unsure at all n locations
ctggatttcagtgccacctgaccaaacctcattcttcatcaatgttggtgactccttacaggtaatgaccaatggaaggtttaaaagtgtaaaacatagggtagtgaccaacagtgtgaaatcaaggctatcaatgatttattttggtggaccaccattgagtgagaaaatagcacctttgccatctttgatgagaggtgatcaacaaagcttatataaagaatttacttggttcgagtacaagaaatctgcttataattccagattggcagataataggctcattcactttgaaaaaattgctgcttcttaatctctttttttatttttcacttttgagtagattttttttatacttcanataaaaaaataggattagggaaaaagtttgtagtatcaaaaaaggcttgtgtgatct

SEQ ID NO: 215443 - DNA, 348 bp, Gossypium hirsutum
agcaaagcagcctcatttcatttctccaatatggctagagggttgaagaaacatttgaagaggctcaatgcccccaggcattggatgcttgacaagcttggtggtgcttttgcacccaagccatcgtctggtccccacaagtccagggaatgcttgccattgatccttattttgcgaaaccgattgaagtatgctctcacctatagagaagtcattgctattcttatgcagaggcatgttatggttgatgggaaggttaggacggataagacctatccagctggtttcatggatgttgtgtccattcctaaaacaattgaggacttccgtctactttacgacaccaaa

SEQ ID NO: 215444 - DNA, 446 bp, Gossypium hirsutum
cccacgcgtccgctcctcgagagattgaatctccaaagaaggtggcatgtcatcgaatgccgtatctttatgcagttcatttttgccactttgatgccactgagaccaaagctttcagactccaactagttggtgacattagtggagataaagtcgatgctcttgttgtttgccatatggatacttctggttggagcaccgatcatgctgcttttcgcatgcttggtattaagcaaggaaacgctgtttgccatgtcttttctcagggtaatcttgtttggattcagccaccggtcgtcactgtgagtgccatgtaaatgtttggctgttcgaaggagctctcatttgcttcaagtagtttcgttcatggtatgctagttccttctttctatctgtactaactatcaagtaattaagcaataaaattatgtatcttgggtctcagg

SEQ ID NO: 215445 - DNA, 406 bp, Gossypium hirsutum
agacccttctctttggtgaaaagcctgtcacagttttcggtatcagaaaccctgaggaaatcccatgggctgaggctggagctgagtatgttgttgagtctactggtgtttttactgacaaggacaaggctgctgctcacttgaagggtggcgcgaagaaggttatcatttctgctcccagtaaggatgctcccatgtttgttgtgggtgtcaatgagaaggaatataagcctgaccttaacattgtctccaatgctagttgcaccaccaactgtcttgccccattggctaaggtgatcaacgataaatttggcattgttgagggtcttatgaccaccgtccattctattactgctacacaaaagactgttgatggtccttccatgaaagactggagaggtggtag

SEQ ID NO: 215446 - DNA, 334 bp, Gossypium hirsutum
aagaagtacccgagcaaggtcatccgcaaggattccgccaagaaaacagcaaagaaatcgcgcgtcaagtgcttcgtcaagctcgtcaactaccagcacctgatgcccacctgctacaccctcgacgtagacttgaaagacgtggttaccgtcgatgcacttcagaccaaggacaagaaagtggcggcttgcaaggcgaccaaggagaggttcgaagagaggttcaagacttggaaagaacaggtggttctttactaagcttaggttttgagggtatttacctttattatagtatcttttattgagagaaaaaagtttgaatttggatctagtg

SEQ ID NO: 215447 - DNA, 435 bp, Gossypium hirsutum
accggtgtcactaaaggataccgttacaagttgaggttcgtctacgctcacttgccgattggcgcctccatcactaatggcaacaagtcgatcgagatccgtaacttccttggcgagaagaaggtccgtaaggtggatatgttggaaggtgtttccattgttcgatccgagaaggttaaggatgagattgttttggatggtaatgacatcgaacttgtatcccgatctgcagctttgataaaccagaaatgccatgtgaagaacaaggatattagaaagttccttgatggcatctatgttagtgagaagggacgggtcgctgaataagaatgattaccatcttcttgaatcatagatatagtgctgctttatttttttgtcgtggtaatatcttgggactccgttttttgtctcgtctttcctgtttccctggat

SEQ ID NO: 215448 - DNA, 367 bp, Gossypium hirsutum
aatagacggaccgacccacgcgtgcggttgggacttctctcgaactggtttaagatctcatctcaatgaacaatggctgggctttacgagaggggcatcaaggaaagacaagcagaagggaatacaccatggattaagccaacacaagaagcaagagaataaggaagcatttgaactgtttgacactgatggctcatgtaccatcgatgccaaagagctgaatgttgacatgagggctcttggtttcgaaatgacagaacagcaaattaatcaaatgattgcggatgttgacaacgatggcaatggtgccattgactttgatgaatttgttcacatgatgactgccaccatcggggagagggacact

SEQ ID NO: 215449 - DNA, 394 bp, Gossypium hirsutum
ctctgttacatgttgaaaatggcatctccgtaccccgcaaaacctgctgtgtgaaggaacactccctaaaaagatggtccacggactcttcctcagatctgcataccgggcataaaggattgacagccaattgacgagcttttagattatgcaaagtgggtaaatagttgttagcaattctccacataaaaatacgaattttgcatggcacttggagctcccataattttgtaaaaaaattagtaggaagttcattatgtattctagtacccccctctgtaattagccatctgtatccgctcttagctgtatatgtcccagtattatcccctcgccataccaatgcatcttgtggtctactatttgccaatggaattgtgagaatgcgcttcaa

SEQ ID NO: 215450 - DNA, 289 bp, Gossypium hirsutum
cccacgcgtccgaacggctacagctctagaattcaagcctttcgaccatggcggatgttgagacggaggtagcggcggctggagtgcccaagaagagaacattcaagaagtttagcttcagaggtgttgatttggatgctctccttgatatgtccactgatgagcttgtcaagctctttcctgcccgtgctcgcagaaggttccagaggggtctcaagagaaagcccatggctttaatcaagaaacttcgcaaggcgaaaaggggaggctccaccaggtgagaagccag

SEQ ID NO: 215451 - DNA, 465 bp, Gossypium hirsutum
  unsure (1)..(465): unsure at all n locations
cttgtattcaactgggtatggaaccaggactgctgctttaagcacagccttgttcaatgatggagcttcatgtggacaatgctacaagatcatgtgtgattaccaagctgaccctaaatggtgcataaaaggaacatccgtcaccatcacagccacaaacttttgccctcctaactttgctcttcccaacaatgccggaggttggtgcaaccctcctctccagcactttgatatggctcagcctgcctgggaaaagattggtatctacagaggtggcattgtgcctgttttgttccaaagggttccatgaggaacataacaacagcaacaacaacggtcagaatctgaccaatcacttcaaaactgatagtgttgctcatgttggaactaatggctgctcttcttcttnctcttgatgctgcctgtggtgatgatgatgatcaacttcaatggtctttttaattt

SEQ ID NO: 215452 - DNA, 322 bp, Gossypium hirsutum
aacacaaaaatgggtccagaggttgtaatttatacaacaccatctcagtgcacaaggaggtggggccagacacagtaccataaaccatgcatgttcttctgtcagatatgttgcaggacatgcctttgtgtttcttcaaggtattatgggaacaaacaagtttgctcttgcttcaacaactggtaaaccatcgaaggaggatctatatgccgttgaatgactaaaaagatgaccatgatgattttacataagaattcctatatattttctatttggaacataagtcatttcagaattagggctgactcgaatactaactata

SEQ ID NO: 215453 - DNA, 443 bp, Gossypium hirsutum
cccacgcgtccgccaaaaacgaatcaacctttctctcttgtacaaaataaccaggaaaaagtgatttaaaagagaaagaaaaaaggggaaaaaattctctctttttcatcaatcgtgaaaagcttctaaaagctttttcgatcagaacccaatcgaggaatatggggaagaaaaggaagtccatagcgacgagccttgatgaggtggatcggactatgtatgcttcgttttgcagcgccgctaactctttgtctcaactttatactcaggctatgaaccagcagaaactctcctttcaagccggaaaaggccatagccttaatgagatagactactgtggtgaggagccatcaatgtcacctagagcaccaagccaacagcaccaatcccagccaacaatgcagttcatgaataccagtttcatggtctcttcaggctcatct

SEQ ID NO: 215454 - DNA, 411 bp, Gossypium hirsutum
gacattgacagaagatgaacagggaaatatctattccgaggatcgagtcaaaattgtgaaatttttattcaatatagttataactaatcccaacaatcaaacaattagaaaaaaatctattggaataaaagaaataagtgaaaaagttcctcgatggtcatacaaattaatcgacgatttagaacaacaggagggagaaaacgaggaaaatgtaacagcagagcatgaaattcgttcaagaaaatccaagcgcgtcgtgatttttactaataaccaggcaaacgccgatacttatactaataccaaggatgctaatgatcctgatcaaacagacgaaagtgctgtgatacgctaattcgcaacagtccgattattcggcgcgacataataaaggggttccatgcgtgccca

SEQ ID NO: 215455 - DNA, 468 bp, Gossypium hirsutum
  unsure (1)..(468): unsure at all n locations
gtccgcccacgcgtncggctaacatacgaaacagtgtaaacagcagtgaaaaagagagtagatatgagaacgaaaacatatggtcaagagctaaactttcaactgaatggtgttgcagcagttccagatcctgtgtacaaaatcgagccaagtttagtagctgatctctacggagattggatcatgcccttaacaaaggaagttcaagttgaatacttgttgcgacggttggactaatgtaaagtttccctcacaactgaccaagggaaggggaaaccaaagggtgtatgaacatcactaccttttacatgttaaactacagaatttcagttttctaatttatagcacaactttccaaatacccagtaatgttcttcatcaagaaggcaaagggttcgaatacggaaaaagaactcgtccctcctatgtgatcatctaacagcaatgtgagcttcaagcttgtgttag

SEQ ID NO: 215456 - DNA, 358 bp, Gossypium hirsutum
  unsure (1)..(358): unsure at all n locations
ccgnccacgcgtccggattttnctggggataatcttcgggatttcattgatggctggctggcgtgatatgatgaggtaccgaagcaccaagagaatcgccaaggccgctgatataaaagttcttggagctctcaacagggatgatcttaagaaaatttgcggcgataattttcctgaatggatatcttttcctgtctatgaacaggtgaagtggctgaacaagcaattgagcaaattatggccttctgtagcagaggcagcatcagcagtcatcaaagaatctgttgaaccactcttggaagaatatcgacctccaggaattacttcactgaagtttagcaaattgtctcttggcact

SEQ ID NO: 215457 - DNA, 425 bp, Gossypium hirsutum
cccacgcgtccgagcagcctctcctttaggctgcgtccggatcgcttgcggatttcatgtgctgccaaaccagagacagtggataaggtatgtgaaatagtaaggaaacaactagccctaccaagtgacaaagcagtcacaggtgaatcaaaatttgctgaacttggagccgattctcttgatacggtcgagattgtgatggggcttgaggaagagtttggaatcactgtggaagaggacaatgcccaaagcatatcaactgttcatgacgcagctgagcttatcgataagctctgcggcgagaaaagtgcctagaaacaaaccaaggacctaagtttgggattcatttgccaatttatttgtgaactcatcatgcctatttatttgttgaaatctagtaaaactcataaggtggttggtatttt

SEQ ID NO: 215458 - DNA, 432 bp, Gossypium hirsutum
  unsure (1)..(432): unsure at all n locations
cgggccgacccacgcgncctgtcggcgagaacgccctgttcgtgcggccgtaggtcttctacaacaacccgctgctatcgttcgtgcagctggtgatcgggccctacgcggacgagctcgggaacgtgctcccgaacgcggtggagggcgtgggcgtgcccgtggacccgctggcgttcgcggggctgctgggcatcgtggttacgtcgctgaacctgctcccgatcgggcggctggagggcgggcgcatcgcgcaggcgctgttcgggcgcggcacggcggcgctgctgtcgttcggcacgtccgtcctgctgggcgcgggcgccatcagcggcagcgtgctgtgcctggcgtggggcctcttcgccaccttcatccgcggcggggaggagatcccggcgcaggacgagatcacgccgctcggcaacgagc

SEQ ID NO: 215459 - DNA, 312 bp, Gossypium hirsutum
cccacgcgtccgcccacgcgtccgtggagaaatggcaagaaatcttcccagatgtgggcacgtctttcacttaaagtgcatagatgaatggctaagcaggcaaggaacttgtcccatgtgtagagagcatgttcttgacgatgatggtgaagaagtgtaaatcaggaaattttgattcacaaaaaattgagttttccttttttgttctgaaatctggtgtatatatagagtcatagaccattgcacaagggttttgtagcaactttttgatatttcaaagcagtaaagtagcggtgatattatatattattc

SEQ ID NO: 215460 - DNA, 366 bp, Gossypium hirsutum
cggacgcgtgggcttttcagatgtctaacctaaggttgtaaggtaaggtggctcttatcgggggtggagccagcggtatcggtgaggagacggcgaggttctttgtacaacatggggctttggttgttattgttgatgtccaggatgatctggggaatcaagtcgctgcatcgatcggccttgacaaggttagttaccggcactgcgatgtacgagaggagaagcaggttgaggaagcagtaagtttcacagtggagaaatatgggaagctggatatcttattcagcaatgcgggtaccctaggctcgttaaccggaatcttagaaattgacctggatgactttgacaacaccatagccacgaacg

SEQ ID NO: 215461 - DNA, 301 bp, Gossypium hirsutum
gatgagcaaggaaattaaagcattagccccaagcagcatgaagattaaagtggttgcaccaccagagaggaagtatagtgtttggataggaggctccattttggcatccctcagcaccttccaacagatgtggatttcaaaggcagagtacgacgagtctgggccatcaattgtgcacaggaaatgcttctagagaagagctatacatacagtacacgttttgtatcacagcaaagcttataaatcaagtggttgctttcttttcttttctgctccgttaatttatttccctttttttttc

SEQ ID NO: 215462 - DNA, 374 bp, Gossypium hirsutum
cgaaaaccctaattttcggaggttaggaggaaaagaagaaatggcggtgccgcttctaagtgagaaaatcgtgaagaagagggtcaagaagttcaagagacctcagagcgaccgcaaaatctccgttaagacaaactggcgtagaccaaagggtattgattctcgtgtcagaagaaagttcaagggatgtactttgatgcccaatattggctatggttcagacaagaagacccgacactatcttccaaatggctttaagaagtttgtcgtgcacaatgttggagagcttgaactgttaatgatgcacaacaggacatattgtgccgagattgcccatgatgtttcaacatagaagagaaaggagattgtggaac

SEQ ID NO: 215463 - DNA, 307 bp, Gossypium hirsutum
  unsure (1)..(307): unsure at all n locations
ccgnccacgcgnncggccactctnnncnncaagcgggngagagagaagaagaaaanccnaagagggcaaagangccagcnggncacggnnnacgnnctcgaacaagggannngnncgccagacccnncagaaagaaggggcacatnccctcgnctacttacctcaggacctacaagatcggcgactacgtctaccgtaagggtaacagcgccgttcacaagggtatgccccacaagttctaccatgggcgtactggtcgagctttggaatggaccaaaaacgtgccatcggtgtcgaagtcaacaag

SEQ ID NO: 215464 - DNA, 390 bp, Gossypium hirsutum
cttttatttttacttgctttttctatttctcctttgactggttcagattagccgttgatagtttagtgattaatatatagaactcttttaagctttggaaagatccttttttttcacttggtatcaagcatggaagatcgcaaggagaaaaatgcaccatggctatcagtaccacaatttggtgattgggatcaaaagggacaggtgccagattactctcttgacttctcaaagatcagggaaatgaggaagcaaaacaagagggaagtttcaagagccagtcttggtaatgaagaagagttcattaacccaactgcaaacactgttagcactactcctagtgatgatcatcaccacaattaccctcagaaccatcactcttcatctaca

SEQ ID NO: 215465 - DNA, 319 bp, Gossypium hirsutum
cggacgcttgggctgactctttctatgactcctgggcctgcgccagatcagccgataagaggttactggcacatatgatgatgatatacaagtgtaatctaagcatgcttgcctgttagtaccgccactcaattgcttaactccatgataaagactccccggccatctcaagctgacacaaccgatattgctaatgctgtgctcaactgcaccaattgtgtcatgcttagtgatgaaagagctgctggagcctatccacagcttgccgtgaagatcatgcctcgtatttgtatagagagcagaatattaccttgactgt

SEQ ID NO: 215466 - DNA, 447 bp, Gossypium hirsutum
gaatacccggggcagcaattaaatgtgcaaccataactccagatgaaggtcgtgttaaagagttcaacttaaaggaaatgtggaaaagggcaaatgggactattcgaaacattttaaatggaactgctttcagggaaccaattatctgcaaaaatgtccctcggcttgtcccaagttggaccaagccaatctgcatcggaagacatgcttttggcgatcaataccgagcaactgatttagttgtacaggaatctggaaaacttatgcttgtcttcgctcctgataagagtaatgagaagaaggagcttgaggttttcaacttcaaaggtgctggcggtgtaactttgtcgatgtacaacactgatgagtctattcgtgctttcgctgaggctttaatgactactgcttaccagaagaaatggtcactttatctaagcacaaaaaata

SEQ ID NO: 215467 - DNA, 224 bp, Gossypium hirsutum
cggacacgtggacttactcttcctattacttctttactttattcacatcagccgataatagcttactagcgcatataatgaacatctacaagtctaatcatacatgcaatcctatcactaccgtcactcaaatgcttaaatccatgataaaatctcccaatccatcccaagctcaaacaaccgatattgctaatgctgtcctcaacggcaccaatactctcatg

SEQ ID NO: 215468 - DNA, 444 bp, Gossypium hirsutum
cccacgcgtccgggaacagagagaatggagctgcagttttggttcacctttgttccggagatcaacaacatttagcagaggcccaggaactaggagtgatgggtcctttggtggacttggcacaaaatggtacagataggggcaagcgcaaggctgctcagttgttagagcgcatgaacaggtttgttgagcagcaaaaattggcacaggtgcaagctgaggccgaagtacagcagcccgagtctcagtctcagacacaacagcgacgaccaccctctgtggagaatgctattgagggctgaggtatattttgccatgatatttgttggtttcatcatcttgtttctttctatgtattgaagaaggcagctttgcttggaaagaggaggtcgaagatcacctgttgaacctgtaagatattcaatttgtttgagtggaattaat

SEQ ID NO: 215469 - DNA, 332 bp, Gossypium hirsutum
acccgagcctgaagctctagcttatataacacatgacatttactaatgtactaaaggaagagaactttttgttgatgattcgctacaaagctgtcaatgatcaccatgtcatgctggattgtactgtttagcaacctaacatggcgacccatgttttcgacttctccatagtcaccccagagattaatgctgagtacactgatggtgcattgcattgcacttccaatgttcaacgtgatcctatagaaataacctctgacgaccactgagaagatgaagctacctttaaccttaatgtcattatctatttgcagagcaataaaccatggtta

SEQ ID NO: 215470 - DNA, 406 bp, Gossypium hirsutum
cccacgcgtccggttttcagcaagcttttgctgggagatttgcatataaagtcgtacgattgggtggattctatgccgccacccgaatcccagccgagattggcaaagttaaaagtcgatagcgtgctgaaagcgccatgcaagacctcagtgttgtatcctacaacaggaggtaacatccatgaattcagagccgtaacaccatgcgcggtgctcgatgttctcggccctccttactctaaagacgaccgtgattgttcttattacaaaaagttgcaacactcggctttgtcagatggagaaagtagtacagggaatgaaggaggaggtgattatttgagatggttgaaagaaattgaactgccccagaattcacacatggagagaattgactactgaggtccta

SEQ ID NO: 215471 - DNA, 458 bp, Gossypium hirsutum
agcggctactgttgctgccgactccattagagcttcaagctttggcctcaagattgccaatgcgtggcgtggcttgggttggcctgatgaggccgtggttttcactcttgcaacgctttctattcttgagcttcggggagctattcctcttggttactggatgcaactcaagcctacactcctgacaatattatctattcttgggaatatggttccagtgccattcattgtactttacctgaaaagatttactacatttcttgctgggaaaaaccaagttgcatctcagttacttaacagtctctttgagaaaaccaaacaaaaggcttggccaatggaagaatttcaatggcttggcctaatgctttttggggctgttcctttccccggaactggagcatggactggagccattgtagcttccattcttgaaatacccttctggtcagctgtatcac

SEQ ID NO: 215472 - DNA, 236 bp, Gossypium hirsutum
ccacgcgtccgcccaggcgtacggccgttgatggcctaggcgacttcgtttccctcagcatcgacccttcgggcatccccggtcatgtaaccatctctgagatctctgggtcctctaaactctctcccaatgctctcttccactgcgccggcctcgctgccattggcactatgaaaatggtgcatgatcggtctttggggccttcacttcaactgctaaagggcttaccttcgggc

SEQ ID NO: 215473 - DNA, 253 bp, Gossypium hirsutum
cccacgcgtccgcacaccttctcaacctaactacaatgactaagagaacgaagaaggccggaattgttgggaaatacggtacccgatatggtgccagtttgaggaagcaaattaagaagatggaggtcagtcaacacagcaagtacttctgcgagttctgtggaaagtatgcagtgaagagaaaggctgttggaatctggggctgcaaggattgcgggaaaatcaaagccgggggtgcttatactttgaacac

SEQ ID NO: 215474 - DNA, 262 bp, Gossypium hirsutum
cccacgcgtacggcgatttcttccggcgttattaatcacagaatgctctgaagacgaagcgttaggaggtgcaaaacatgcggcccaataaaggtggcaaggtggctgtgcccgccaagaagaaacaagagaaggccgtcaatccagtgttcgagaagcgtccaaagcatctcggcattgaaggggctctaccttctaagaaggatctgcatcgattcgcgaagtggactaatgttgttcgtatacaaaggaagaagacgat

SEQ ID NO: 215475 - DNA, 418 bp, Gossypium hirsutum
gggttgttcagagtcggtgggtcgggtgaagtccagggtttggcccaatgtgtgggggaccttagcttggcggaatgtcaggattgtttgtcttccgccatccaacggctgaaaagcgaatgcgcggcagccgcttatggtgacatgtatttaggcaagtgttatgctaggttctccactgctggagataatggtcactatcatcctaaatcccataacgaaaaatctggcaacgaaggtgagaagacgtttgcaattatcattggattactggctgggatcgctttgctcatcatttttcttggtttcctaagaaaaggggtgaaccgaaatggtaaataatatttcaactttttcaaaattcaaatcattaaagggagaattggatatcctccaatcctttcctttcttttttttg

SEQ ID NO: 215476 - DNA, 439 bp, Gossypium hirsutum
ctctctcctatactcaacttcttccacttaaaagcaagttagctagctagggttttgtgagccagagagatgggttcaaaaagaacggcatcactagccctcttctttgcactcaacatcctcttcttttccctggtgagtgcttgtggttcctgcccttcccccaaccccaaacctaaacctaaaccaaagccaaaccccactccctccccatcttcttctggcaagtgccctagagatgctcttaaactcggtgtatgtgctgatttgctcggtggcttgctcaacgtcaccattggtacgcctcctgttcaaccctgctgctctctcatccaaggtcttgctgatcttgaagctgccgtttgcctttgcacggcaatcaaagctaatattttgggcatcaaccttaatgtcccactttccctcaacttgcttctta

SEQ ID NO: 215477 - DNA, 371 bp, Gossypium hirsutum
aggccttgtatgacatctgtttccgcacacttaagctaaccactcccagcttcggtgatttgaaccatttgatatctgcaacaatgtctggagttacatgctgcttgcggttccctggtcagctcaactccgatctcaggaaacttgccgtgaatctcatcccctttcctcgtcttcactttttcatggtgggttttgctccactcacttctaggggatctcaacagtaccgagctctaacagtacctgagctcacccagcaaatgtgggacgcaaagaacatgatgtgtgctgctgatcctcgtcacggtcgatacttgactgcatctgctatgttccgtggtaaaatgagcaccaaagaagtggatgag

SEQ ID NO: 215478 - DNA, 430 bp, Gossypium hirsutum
cccacgcgtccgtatcactgcaaggaaaaaaaaaaaaaaaccagacatggcttccaacactgttgcatccgctgctcttcttcttaccttgaacttgttgttcttcactttggttagctctacctacgtgccttgcccaccaccaccaaagagccacaagcctacccacaagagcccaccctcggcacctaaacagccagccacttgccccaaagatacactgaaactaggtgtttgtgctgatttgttgggctcggtgcgcgttggtgttggacccgccaagaccaaatgctgctcactcatttcgggtttggctgatctcgatgctgcttgttgcctttgcactgctattaaagctaatgtgttgggggttaacctaaacgttcctggttcattgtctttgctcctcaattcctgcgaaaagcaaatg

SEQ ID NO: 215479 - DNA, 290 bp, Gossypium hirsutum
gaaatgcttaaatttccaccttctttattagctgctgctgctattttcactgctcagtgtactattggtgggtttaagcattggagcaagacctgtgagtggtatacaaactacaaagaagagcagcttatggattgctcaagaatgatggttactttccatcagaaagcaggtacagggaaacttacaggcgtacaacgcaagtattgcacatctaagtatggttatgctgcaaaaactgaaccagcaacttttctccttgaggcaaaatcctagcacaacttgaaagc

SEQ ID NO: 215480 - DNA, 331 bp, Gossypium hirsutum
caacaaggactcaacatcacccctcgaatccttattattactagacttcttcctgatgctggcggagcaacatgcggtcaacgacttgagaaagtatacggaacagagtactcggatattcttcgagtacccttcagaacagaaaagggaattgttcgtaaatggatctcaagatttgaagtctggccatacttggaaacctacacagaggatgttgctcatgaaatctccaaagagttgcaaggcaagccagatctgatcatcggaaactacagtgatggcaatatcgtcgcctccttgctcgcacataaattgggtgtaacacagtgca

SEQ ID NO: 215481 - DNA, 460 bp, Gossypium hirsutum
ggatctgaaaagtgacctcaaggatctctacattaattcagcagtccaaattgatgtgtctgggagccggaaagctgttgttatccatgtcccgtaccgattgaggaaagcttttcgcaaggttcatgttaagcttgtgagggagcttgaaaagaagttcagtggaaaggatgtgattcttattgctacccggaggatattgaggcccccaaagaaaggttctgctgttcaaaggcctcgcagccgcacattgactgctgtacatgaagcaatgctggaagatattgtcttacccgctgagattgttgggaagcgcactagatatgcaattgatggatcaaagttaatgaaagtgtttttggaccccaaggaacgaaacaacaccgagtattagctcgagaccttttatgcagtttaccggaagcttgcttggaaggatgttgtgtttgagctccctgtt

SEQ ID NO: 215482 - DNA, 365 bp, Gossypium hirsutum
cggacgcgtgggcggacgcgtgggcggacgcgtgggcggacgcgtggggttggcaagcacaatattaccatttttgcccctcgcaatgaagccttggagcgtcaactcgaccccgagttcaagcgcttcttgcttgaacctgggaacctcaagtccctccaaagccttcttatgtttcacattatccccaaaagggttggatcccatcaatggcctgatccgaaaactggtcctgtcaagcacaacaccctttgtaacgatcatatacgcttaacttcccaatccaccggcaaaaaaacagttgactaagccgagtgggcccaacctgccaacgggatccaacccgttggagtattccccggaat

SEQ ID NO: 215483 - DNA, 361 bp, Gossypium hirsutum
ctcttacgtctgccatctctggcttttatttcagatttcaaggatgtatacatcaaggaagaggatccacaacgatcacggtgctgtaccaacagaatgtgacgagtctattgcgcaggcattctccgattgggagaataccgaggacgatctgagaagcgaccttaacgatctctatattaatatagcagaccaaattgatgtttgtcgaagccggatagctgttgttatccatgtcccgtatagaccgatgaaagctctcctcagggttcatgttaagcttgtgacggaacttgaaaagaagttcaatggcaaggatgtgattcttattgccgccatgaggatattaaggccttcaaag

SEQ ID NO: 215484 - DNA, 399 bp, Gossypium hirsutum
gttttgtaattgcttttgatggtgatctacattttgcatttagttggctttttttgtgtgcggtgtcaagtgaactccaaagtctggtttatgtggggggagttggggatcattgtctgatggtgtacttgatattgacgtattattattttagcttttcaccgtatcaccaccattaagatgatgggtcctatggagatggcgtggggcggacaattggtgcttaattccttccttacaatccatctttgaaccatgttgctgcttaaaaggatgtttggagctggagagtggattgtggtgctcttttattatatttaatgctatcattcaacatcaaaggggtttgagaacattaatgttaatagctattattgtacgagattttttttagaaaaa

SEQ ID NO: 215485 - DNA, 449 bp, Gossypium hirsutum
cccacgcgtccggctacttccaccaaggttgacatctcaggggttaacgtagacaagtttgatgacaagtactttgccaaggaagtagagaagaggaagaagaagactgagggagagtttttcgaggctgaaaaagaggataagaaaaaactgcctgaagacaagaaagaagaccagaaagcagtcgacgcctctttgataaagtccattgagggagtcccagacttgaaggcctacctcgccgcaaggttttctctcaagtctggcatgaaaccgcatgagcttgtcttctagaggatattttgcattccttaatgttaaagggcttttacttttgaattctttgggttaagattatctatggttttattatggggtgctattgctatatgtccagaacctaaattggaatagtatcttgtgttatgcaagaacttaaagtttccttc

SEQ ID NO: 215486 - DNA, 284 bp, Gossypium hirsutum
cccacgcgtccggctacttacaccatggttgtcatctcacgggttaacgtacacagggtgggtgacaagtactttgccaaggaagtacacaagacgaacaagaagactgatggagagtttttcgaggctgaaaaagaggataagaaaaaactgcctgtatacaagaaagaagaccacatagcagtcgacgcctctttgataaagtccattgagggagtcccagacttgaatgcctacctcgccgcaaggttatctgtcaagtctggcatgaaaccgcatgagca

SEQ ID NO: 215487 - DNA, 298 bp, Gossypium hirsutum
tccggaatccgccgcgacgcacccacgcgtccgcgagctctgtaaatcttctcatcatatgctccctggcctccagcacggacaggagaaaatgtccaaaagtgatccatcgtcatcaatcttcatggaagatgacgaggcagaagtgaatgtgaaaataaaaaaggcatactgcccccctaaaattgttaagggcaatccgtgtttggaatacatcaagtacatcatattcccatggtttaatgagttcagggtggagcgcaatgcagacaatggtggcgacaagacttacaaggat

SEQ ID NO: 215488 - DNA, 309 bp, Gossypium hirsutum
ccctgccccagcaccggacatccgggttttgaggtgtggccctccacccatgaacaaggccgtgactggacaccttgatgcactcggatattcaccggatatgcagttccagttctgatccttgtagactaagcttaagctcgactccgaatgtcatttgttgggtgcccttctgttataatcggaaccgctgctcagaacttgttataataagttttctatcaccatgattgaaaataatgtagacttgtgaacatactcatgtcggattcataatcagtcggtaatttacacccgataattacagcc

SEQ ID NO: 215489 - DNA, 378 bp, Gossypium hirsutum
agcatccataaagacagtcctgctgcaaaattcctacttgaccgtggggtggagcgcaaggacttcaactcttatggaagtcgtcgcggtaacgatgaagtgatggcacgtggaacttttgctaacattcgccttgtgaacaagctgttgaatggggaagttggcccaaaaacggtacatgtccctacaggagagaaactctatgtatttgatgcagcaatgaggtacaaggatgcaggatatgacaccattgttttggctggagctgaatatggaagtggtagctcccgagattgggctgcgaaaggtccaatgctattgggagtaaaagcagtaattgccaaaagctttgagagaatccatcgaagtaatttggta

SEQ ID NO: 215490 - DNA, 403 bp, Gossypium hirsutum
caacaaccaaagctttttgttggaatgattcttattctcatttttgctgaggctttggctctctatggactcattgtcggtatcattctctcttcccgggctggtcaatcccgagcagaatagagtgcaaagttccgaaacttgggtcattgctagtaggcttcacttggttgtttctccaattcttgccgctagtgcagtatgaaacatttgtcaagttgttcttttgatctcattcatgaattttcttttcaatggttctctgctggttgtatgattagaagacggattccgttcgaatcattcttatttacataacattttttttttcaaatctagtgtggaaaatgcaagtccacataatgaaaacaccattaagttacaaaaaaaataaatttaaaaa

SEQ ID NO: 215491 - DNA, 353 bp, Gossypium hirsutum
gctcattctctgcatcagcttttctttaacaatgcagacaagaactgtacaagtcaagaacctgtcagatctagctactgagagggagattcacgagttcttttctttctctggtgaaattgagcacattgatatcataagtgaagctagtcaatcaaagactgcatatgttacattcaaggatccgaaagctcttgaaatcgccttgttattatcgggggcaacaatcgttgacaagattgtgacgataatttctgttgaaaattatgtaccaaaacttgagattcatgaatcaagagcggcggacaacattgtgtctattgctcctgctgggcatagtgcatcaaatgatg

SEQ ID NO: 215492 - DNA, 313 bp, Gossypium hirsutum
cccacgcgtccgcccacgcgtccgcccacgcgtgcggctgtgtttgagccttcaagcatgatggcaaaatgtgaccctaggcatgggaagtacatggcatgttgcttgatgtatcggggagatgttgtccccaaggatgttaatgctgctgttgctaccatcaaaacgaagaggactgtgcagttcgttgactggtgccctactggcttcaaatgtggtattaactatcagcctccaactgttgtacccggaggagatctcgcgaaggtgcagcgagctgtttgcatgataagcaacaacacagcagtggctg

SEQ ID NO: 215493 - DNA, 325 bp, Gossypium hirsutum
aaactttatatagcatcaatgttgcaggggctttagttaatatggttggaggagttgaggtgtgagtaaagctaattatataaatatagcttaaacatctgcatcagctatgaatagaggggttggtgttattgtagattatacagaacttgaaaatgtatcctactctttaatatcaagtttactggtttaacgtctggcttcaaatgtggtattaactatcagcctccaactgttgtacccggaggagatctcgcgaaggtgcagcgagctgtttgcatgataagcaacaacacagcagtggctgaggtgtttgcacgcattg

SEQ ID NO: 215494 - DNA, 247 bp, Gossypium hirsutum
cccacgcgtccgatttctcccgaaaagttccaccatatgtggtgccacaggccggaccatgtccaccacactagctctgaaaaagtacaaggatgcgatttacatgaaggtgaatttggaactcccggcgtcgttatctgctggagatatgtgcatgatggaaaggctaaaactgcaaagcaggtagttgaagttatggaccatgagaaaaagtcaataactgtcaaaatgcattgaaggagatctg

SEQ ID NO: 215495 - DNA, 380 bp, Gossypium hirsutum
cccacgcgtccggcaacttttgcagaggtaatacagatgaccgatatatttgagggtagcgttattaggagtgctagaaggcttgatgagtttctgaaccagctctgcgctgccgctcaagctgttggagaagtcaatttggagagtaagtttgccgcagcaagtgaaagcctacgtcgaggcatcatgttcgccaactccctttatctgtaagattgtatttttgccatggaaatagacgtaaaaactttgtgcggtctaatgatacattgacacccataaatttctcctcttcatcttttaaaaggtaaccctgccttccgaatataatccctttttttagttaataatccccaggaggggcgcctttaaatttggtt

SEQ ID NO: 215496 - DNA, 293 bp, Gossypium hirsutum
ggaaaaagaatcgaaaatggaaattacggagaaaagggaaggagagagcaataacagcagcaaagatttgagcaacaatgataatattaacaacgatttgacagattctgatggcaataatacgagtaaagaagctgaagaacgccgagcccgtgacctcaaagccggtttgcatcctctcaagctcaagtttgtcttctggtatactcgtcggacacctggagttcgaacccaaacagcctacgaggacaatataaagaaaattgtggaattcaataattgttgaaggtttt

SEQ ID NO: 215497 - DNA, 228 bp, Gossypium hirsutum
tcccacacgttcgggcaggctgatacagcaagagatcatatatgcacagagttacggaacaaatgagagacagaactcttgattaagctcaaggatataaaagccctactttttctccttcgtgttgccaaagtcactggtagtgcccccaataaactatgcaagattaaagttgtgaggctatccattgcacaagtatttactgtgatataccaaaaacagaacgct

SEQ ID NO: 215498 - DNA, 177 bp, Gossypium hirsutum
taaccgagaaaggcattgttaaggaagagacactagaagaccatctaaaaagtttgatttcatcttcaccggtgatgctctttatgaagggtacccccgataatccaagatgtggcttcagctctaaagttgtcaacgccctaaaagaggaaggcattgattttgggtcattcgata

SEQ ID NO: 215499 - DNA, 312 bp, Gossypium hirsutum
agaaaacaacggtaaaccctgtggaaacaagccgactgcaaaacgctgcagctgaaaccctaacttttccgctcacctctctgcaccagccgctcctctattcgcatcttccatggctacgataccagttaacccgaaacccttcttgaacaatttgactggaaagactgttatagtgaagctcaaatgggggatggaatacaaaggttttcttgcatctgttgattcatacatgaacttgcagcttggcaatgctgaagagtatgttgatgggcaattcactggaaaattaggggagattttgatcagatg

SEQ ID NO: 215500 - DNA, 413 bp, Gossypium hirsutum
ggaaaatgccgatgtttttggtggataggaacgatcccaacaaattgattttcttttaccaaggatcggggatgcagcttggggcggaaggattcgcggtgggttttctttatacaatagtgggattattgctagctttcgttacccatttgcttgtttatgttaagaacgcgaaagccaagcgtgtggccatggtttttgcgatttgcgtttctttttgggcggtgcagaaagtgattttcttggacaattggaagactggatatgggattcatggattctggccttccagttggaactgaaggcataatcttttttttttttaaggctgctataatccgaactatggtttcaattcagttgagaatttgatatcaattttagatgttttaatgtactttgggcaaaatact

SEQ ID NO: 215501 - DNA, 319 bp, Gossypium hirsutum
ggaaaaaggaagaagaagcattgaatgttaaaaaacaagacgaagagatgatgacactacaggaacaagaagcacttgaattgcttaaaacgaaagagaaaactgatcatatcattaaaaaaaccaaagagaaacgtcaacaaaagaagcagccgaattcagatcctaataaacctaaaaagcctgcatcttctttccttttgttcagcaaagaagcaaggaaaactctggtacaagaacgacaaggaatcaacaactctacacttaatgccctgatttcagcgaaatggaaggagcttagtgaagaaaaaaagggatg

SEQ ID NO: 215502 - DNA, 472 bp, Gossypium hirsutum
ggccgacgcacgcgtccgtgggtcgtaccaagcaaactgctagaaaattataccgttggtaaggctccgcgtaagcagcgggccggtaaagctgctcggaagtcagcaccggcgaccggaggagtgaagaagcctcaccgtttcaggccaggaactgtagctcttagggaaatcaggaagtaccagaagagcaccgaactcttgatccgaaagcttccgttccagaggcttgtgagagaaatcgctcaagattttaagactgatttgaggttccaaagcagtgccgttgctgctcttcaagaggctgctgaagcttaccttgtcggactgttcgaggatactaatctatgtgctattcatgctaagagggttaccattatgcctaaagatatccaacttgctaggaggattagaggaaagagaagctaagtctgttagtttttagttgattgatcctagaattagaaatctg

SEQ ID NO: 215503 - DNA, 375 bp, Gossypium hirsutum
  unsure (1)..(375): unsure at all n locations
cccacgcgtccgcggaagttctcttactgtttggtcgaccgatcggcttcgtctaaaccatcctccctggttttcggtgatgccgccattcctcgaggtgctctgttcactcccttattaacaaacccaaagctcgacactttctactacgttgaactgctcgggatcagcgtcggtggtacacgtgtccccaagatctcaccttccttgttcaaaatggatcaagacggtaacggaggggtcattatcgactcangcacgtccgtaactcgcttgactcaacccgcttacacggcaacgaaggatgcattccgtctcggagctacaaatctgaagcgggcgcctgatttctctttatttgacacgtgctttgac

SEQ ID NO: 215504 - DNA, 349 bp, Gossypium hirsutum
cccacgcgtccgtttttttctttaagttgtttccaccctgggagaatcacacccggcgccctgttctatcatctattatgcccctcttcgtcgccatcggctctgctgaagatttcttcgaagaacgcttctaagatggatgggaaagtcgttgggtaaaatctgactggaagaaagatgagaacatggctggggaatggaattacacttctggaaaatggaatggagatcctaatgacaaaggtattcaaactagtgaagactacaggttttatgctatttcagctgagttcccagaagttaacaacaagggcaagactctagtcttccaattttctgtgaagcacga

SEQ ID NO: 215505 - DNA, 439 bp, Gossypium hirsutum
cccacgcgtccggacaaatctcaagtgtactccaaatttgtgtttgaggactacatgaatgtctatgctgacctcaagttccaagccaaggagccaaggttcgaagccatgaagaccgtggagtctgcagttaacttgggtcctattgcaactgtttgagtccttcagtgattgaagagcgatgggttttaattagcagtgtgtttctgttaataagtttagtcggctgatggataaattctgttaattatagttctggaattagagagtgcctgcaggtgtggagcttactagtttaaaataagctgaaaaagcttgtactaagaattcctcagttatatatggtgcctggtcgccagtggctgtgctttaaatgagatgttttggctgtccgaagtgaccaaattatatttgatatgaaaaattggccttgagattc

SEQ ID NO: 215506 - DNA, 324 bp, Gossypium hirsutum
gtttgatggccagaagccaggcacttttggtcttcgtaagaaggtgaaagtttttggtcagcctcattattcgcagaatttcgcacaagcaacattcaatgccctaacacccgaaaaagttaagggtgccacacttgtcgtttctggtgatggtcgttatttctcaaaggatgctgttcagattataatcaagatgtcagctgtaaattgagtaaggcaagtttggtttgacaaaaccggattttttattacgccatttgaaccggtttaaaattttctttagggtggtgccacatgaatcaaagccaccgggttctttaattt

SEQ ID NO: 215507 - DNA, 454 bp, Gossypium hirsutum
cccacgcgtccgaagttattgtcagtggatgagctgttggtgaaatggcgttacatttctgtgaacgttacaagttaatggtcttgaaaatcagctcaaaatttgaactgaggcgtttttgccgcactacaggaacttctgctcttttaaaactcagccaaccaaagccggatgatttgggatttattgattcaatttcagtcgaggaaattggtggttctcgggtcactgttgtgagaagcgaagaaggtggtaacaagattgccactgtggttctacgaggaagtactgatagtatattggatgatcttgaaagagctgttgatgatggagtgaacacatataaggcaatgtgcagggacagtcgaatggtacctggagctgcagctactgaaattgagttggctaggagattgaaagagttctcctttcaggaaacaggattggatcagta

SEQ ID NO: 215508 - DNA, 472 bp, Gossypium hirsutum
ggaaaacccgggccgacccacgcgtacgcccacgcgtccggcttgccattcattcatttcaccaaagcccattccaccacctggtgcgtgccctccaccaccagcaaagcctgcttcttgccctaatgacacattgaagctaggagtttgtgctgacctgcttggactggtaaacatagtggtgggagcacctccttcgagcaaatgctgtgctttgctccaaggcttggctgatttagaggctgccctttgcctttgcaccgccattaaagccaatgtgcttggggccaacctcaacatccctattacccttagcttactccttagtgcatgtcagaaggaaatccctacaggcttcaaatgttgatattttttgttaagaagcacaatcagttggtgatgttggctaatggctaagtttgctctactttaaatttatattatggtgctgcaaatcaatgtgtccttgctt

SEQ ID NO: 215509 - DNA, 427 bp, Gossypium hirsutum
  unsure (1)..(427): unsure at all n locations
tagcaaggatctcctgaacgaggttgaaagatatttgcaggatgccttgtctgttgctagaaacataattaagaatccgaaacttgttcccggaggtggtgctacagaattaaccgtttctgccacattgaagcagaagagttcatctgttgaaggcatagaaaagtggccgtatgaagctgctgctcttgcttttgaagccataccacgtactttggcacaaaattgtggagttaatgtgattcggactatgactgctctgcaaggaaagcatgcaaatggtgaaaatgcatggattggcatagatggcaacactggtgccattgctgacatgaaggaaagaaagatttgggacgcatacaatgtgaaagcgcaaacatttaagacagcgatagaagcagcatgcatgcttctacgaatngatgac

SEQ ID NO: 215510 - DNA, 441 bp, Gossypium hirsutum
cggacgcgtgggattaaaccagcgatttttttgaattcgaacgtgtaataatggtggtatgtaatagcaaaactaacagtgggatattgatgaaatgttttggcagtttataacatttggttttgcttgtactccattgtacttcgtgtgggagaaagtgatagggatgcatgacacgagaagcatttgtttgagggcgctggctaggctgccagtggtgattccgatatggttcttggccatcatcttcccattcttcggacccataaactcagcagttggtgctcttttggttagtttcaccgtctacatcatcccagctttagcccatatgctcacctacagaacagcctctgcccgacagaatgctgcagaaaagcctccattcttcttgccaagctggactgcaatgtatgcaataaacgccgtggttgtgatgtg

SEQ ID NO: 215511 - DNA, 413 bp, Gossypium hirsutum
  unsure (1)..(413): unsure at all n locations
agatcgcgagcggccgcccgcgatcttgaactagtcatcgtccattgtgaaattctcttgctttggatctttaaagcccgggtctttgactcaaaggtcctttaagggtttggttgtaaaagcggctactgttgttgctcccaagtacacctcgattaagcccttgggtgatagagtgttggtgaagatcaaagaaacagaagagaagacagagggtggaattttgctaccaacaacagctcaatcaaagcctcaagggggtgaagtggttgccatcggcgaggggaagacaattgggaagaccaaattggaatgttctgttaagactggtgctcangttatatattccaagtatgccggaactgagctggagttcaatggttcaaatcatcttatcttgaaagaagatgaca

SEQ ID NO: 215512 - DNA, 461 bp, Gossypium hirsutum
  unsure (1)..(461): unsure at all n locations
ggcaagtaactggcaagcacaggttcaacatcagcttcagcaacagcaccagcaccagcgggagcgccagattcagactagattaaggaacaatgttgttggtgggagaccactggggctaccacaatcttcatggcctccacttcaagctcagccccaacagcagaaacattcacaaaatgggatgagagctatgtttcttggtggatctagtggtgtcaagagggaatcaactggcactggtgtgtttatacctcgcagatatggcaacaccaccaacaccaccactcatgaacctagaaagaaatcaggctgttcaacagtgttactaccagcaaaggttgttcaagctctaaatctcaacttcgatgataccaaaaaccatgttcaacctcaattcaatcccacttttgcatcanactatgatgcttttgtagcaagaagaaatgcactgttgacac

SEQ ID NO: 215513 - DNA, 372 bp, Gossypium hirsutum
cgatcctgaggtgaagatatcggtgttggttaacactcccgatgatccccgacaagggaggccggacataaccaaagcaaaagaggtgctcggatgggagccaaaggtgaagttgcatgacgggcttccgcttatggaggaggatttccgtcagaggctcggggtcccaaagaagaactgattgaaagttattttacagcaacagaagttacaaatataaagtactattgcttcttttcctttctataatcaaattccaatatgggtatcttcaatgcataataatggcagcaatggagttattttggattttgtttttaatgttgtttgaacgatatttgagttaaatggaacacaatttgtgcctttcat

SEQ ID NO: 215514 - DNA, 423 bp, Gossypium hirsutum
gttacggtcgaggtgattatttcctcgtcgttcatgatttcccagattacatggatgctcgagcccgagtagatgaagcttacaaggatcgcaagaagtggctaaagatgtctatactaagcactgctggcagcggcaagttcagcagcgatcggactatagcccagtatgctaaggaaatttggaatatcgaggaatgccgcgtgccgtaattccgacccaatctattttggcaatcaggttctagttttatgataatgaaaagcatatatatatataagaatgagtaataggatttgcattccaaaaccatatggcttagtaaaaacaaaaaataagcgagaaaccatgcatctcgatttcacctttaaatgtaataaacaaagtaatgtgttttactgaattgcctttactagtttgtgg

SEQ ID NO: 215515 - DNA, 408 bp, Gossypium hirsutum
gtgcgccctatctacgcaaggtggacttgttattattcaagagttaccaagaactatcgggggcctgtgaggcaaaatgtttagctccttcactattggtaactgtgggggttcacaaggaatgaaagatttcatgaatgaaagcaaattaatagatctcttgaacgggtctgaatatgttcctacttatgaagacaaagatggagattggatgcttgttggtgatgtcccatgggaaatgtttgtcgattcatgcaagcgtttacgaatcatgaaaggatcagaagccattggacttgctccaagagcagtggagaaatgcaagaacagaaactgatgctagcttcattacaaaacaacaatctgagttaaaaatcaagtgttagtaagataaaaagaaaagagagc

SEQ ID NO: 215516 - DNA, 436 bp, Gossypium hirsutum
  unsure (1)..(436): unsure at all n locations
gcagctcgcacgctctcatcattttcctccgggaccgtcagtcttcccaaacaccttctttccgagaaaaaaaaagctcaagagagaagaccatggccgatcaacttacggacgatcagatctctgagttcaaggaggctttcagcctctttgacaaggatggcgatggttgcattactaccaaggagctggggactgtgatgcggtcacttggtcagaaccctactgaggcagaactccaagatatgatcaatgaagttgatgctgatggaaatgggaccattgattttcctgaattccttaacctaatggcaaggaagatgaatgatactgattccgaggaagaacttanagaggctttcagggtgtttgacaaggaccagaatggtttcatatctgctgctgagcttcgccatgtcatgacanatctcggtga

SEQ ID NO: 215517 - DNA, 453 bp, Gossypium hirsutum
cattccccagagcttcaacgcattctttcacgggataaactgaaattgagtcgaacggcgggattgaaggggaagaagaagggagttaccttcactatcgattgttcgaagccagtggaggataaaatcatggacattgcccctctggaaaagttccttcaagagagaatcaaggttggaggcaaggctggtgcacttggtgaaaccgtagccctcactcgcgagaagagcaaaattaccgtcacttccgatggcgacttctctaagaggtatctgaagtacttaacaaaaaaatacttgaagaaacacaatgtacgggattggctccgagtaattgcttccaacaaagatcaaactgtttacgagttaaggtacttcaacattgctgagaacgagggagaggaagaagattgatttcttgggtgaacaaccagttttaatgctagctgattt

SEQ ID NO: 215518 - DNA, 438 bp, Gossypium hirsutum
gtaccgtggtgatgttgttcccaaggacgttaatgctgcagtcgcctccattaagaccaagcgcaccattcagtttgtcgattggtgtcctactggattcaagtgcggtatcaactaccaaccacccactgttgtccctggtggtgatctcgccaaggtccagagagctgtttgcatgatttctaactccaccagtgttgctgaagtcttctctcgcattgaccataagtttgatcttatgtatgccaaacgtgccttcattcactggtatgttggtgagggtatggaagaaggagaattctcagaggctcgtgaggatcttgctgcattggagaaggattatgaagaagttggtgctgagtcggctgagggtgatgaaggtgaagatgatgagtactaagaagtacctgtgattgagtgtgcgtatgatgtctttat

SEQ ID NO: 215519 - DNA, 440 bp, Gossypium hirsutum
ggcaactaggctacagtttgaaaattctatgtgaagttggagtgttttccaagctggcgcagggcttattgcttggatgcaattggagggtctgaaaacttctacagcgcttttgagtctgagttaacggatgtcattcctgtcattaagacctctcttggcggcactagaataataggacggctctgtgctggaaataagaatgggcttgttgtccctcacaccaccacagatcaagaacttcatcacttgcgaaatagtctaccggatcaagttgttgttcagcgcatagatgagaaactatctgctcttgggaactgtatagcttgcaatgaccatgttgctctgacgcatacagatctagatcgggaaactgatgagataattgctgatgttcttggagtaaaagtttttaggcaaacaattgctctaaatatttt

SEQ ID NO: 215520 - DNA, 353 bp, Gossypium hirsutum
gagaaagttaagaccctcccggccgtcccttcgaacgatgacatgctcattctctatggagtgtacaagcaagccactgttggaccaatgaataccggccgggctggaatggtcaacatgagggaaaggtgcaagtgggattcatggaaagctgttgaaaggaaatcaaaggaggaagcaatggggggttttatttcccaaaggaaacaaatgtttttggcgtttcgagaaactttatgtgtgtgtgtattggccacaaaaatagtgttatattaaacccttgtgtgttgctagtggggttcattactatgaataaaaaatgtgctctttttctattgcggtatgtgatttat

SEQ ID NO: 215521 - DNA, 475 bp, Gossypium hirsutum
gacccacgcgtacgcccacgccttcggtaaatctcactcattttttcgtttttcactcaaaacaaaacataagaggactgccatggcgcccaaagcctataacaagcctgctgagaagaagccggccgaggagaaaaagactaccgtcgctgagaaatcccctgccgagaagaagccgaaggccggtaagaagcttcccaaagaaggcggtgctgccggagacaagaacaagaagaaggccaagaagagcgtggagacctacaagatctacatcttcaaggtccttaagcaagtccatcctgatatctgcatctcaagcaaggctatggggatcatgaacagtttcatcaacgatatcttcgagaagcttgctcaggaagcttctagactcgcgaggtacaacatgaagccaacgattacttccatggaaatccagaccgcagtttggcttgtacttcccggcgagctcgacaaa

SEQ ID NO: 215522 - DNA, 388 bp, Gossypium hirsutum
  unsure (1)..(388): unsure at all n locations
cccacgcgtccggtcgtcttcctttactggttctacgttttctcatgaattagcatctctttgttcatcgatcttcttatcttgatctaacccgactattaaaaacttcaaatctctaattgccattcaatttgttaattccaatttaaatactcttcccggatataaaaaaacttttcttctatggctgctgtgcaaaggccagcgagttcttctgattccgacgagaggaaaaggaagagaatgctgtcgaaccgtgaatccgcgaggcggtcgcgtattangaagcagaagcagctcgaggatttggttaatgaagtgagcgcattgcagaaagataacagccagctctccgaaaagatcaacgtcacaactcagcgctacgccg

SEQ ID NO: 215523 - DNA, 349 bp, Gossypium hirsutum
cggacgcgtgggtggcgcccaaagccgagattaagcctgctgagaagaagccggccgaggagaaaaagactaccgtcgctgagaaatcccctgccgagaagaagccgaaggccggtaagaagcttcccaaagaaggcggtgcggccggagacaagaagaagaagaaggccaagaagagcgtggagacctacaagatctacatcttcaaggtccttaagcaagtccatcctgatatcggtatctcaagcaaggctatggggatcatgaacaggttcatcaacgatatcttcgagaagcttgctcaagaagcttctagactcgcgaggtacaacaagaagccaacgattac

SEQ ID NO: 215524 - DNA, 298 bp, Gossypium hirsutum
cccacgcgtccgaaaaaaaaaaaaaaaaattatatattctaataaaaaaaaaaaaaaaaaaggggaaggagactaccgtcaattaaaaaattccctgccgaataaaagccgcatgccggtatagaagcttcccaaagaaggcggtgccagcggagacactcacaagaagtatgccaagacgagcgtggggacctacaagagctacagattcaaggtccttaagcatgaccatcctgatatcgggatctgaagcatggctatggggatcatgaacagggtcatcaacgatatcttcgaa

SEQ ID NO: 215525 - DNA, 396 bp, Gossypium hirsutum
actttttctctcaaaatttctccaatttgttctatacttttttgtttgttttaggggttaggcgatggcttcaaagcggatcttgaaggagctcaaggatctacagaaagatcctcctacctcttgcagtgcaggccctgttgctgaagacatgtttcattggcaagcgactcttatgggtccacctgacagtccatatgccggtggagtgtttctagtcaccattcatttccctccggactatccatttaagccacccaaggttgcattcaggacaaaggtctttcaccctaatattaacagcaatggcagcatttgcctcgatattttgaaggagcagtggagccctgccctcaccatattcaaagtattgctctcaatctgctcacttttgac

SEQ ID NO: 215526 - DNA, 443 bp, Gossypium hirsutum
cccaaaacaaaaaacctaaaccccattgcttttgcggccctttttttcctctaccaggtgggtttagctttgtgtgagttcctttaagcaattagccaagatgcagaacgaagagggtcaaaacatggatctttacatccccaggaagtggtatttttatttgcttcgccatgtttatgttcttacgatattgtttatgtaggaagctttatatgtagttcgttgttgttgcagttccgccactaacaggctcatcacctctaaggatcacgcttccgtccaaatcaacgtgggacacttggatgagcttggcagatacactggcacattctccacttttgctctttgtggatttgtccgtgcccaggttcgttcattgtttcaagctcgtgttaagtctatgcttgttgatgttcattattaatgcttgtgatgttttatga

SEQ ID NO: 215527 - DNA, 445 bp, Gossypium hirsutum
cccacgcgtccgcttgcggcgtcaagatgcatatcttcgtcaaaaccctaacggggaaaaccataacccttgaggtcgagtcttccgacaccatcgacaatgtcaaagccaagatccaagacaaggaaggcatccctccagatcaacaacgccttatcttcgccgggaagcagcttgaagacggccgcaccttagccgactacaatatccagaaggaatccactcttcacctcgtcctccgcctccgcggcggtgccaagaagaggaagaagaagacctacacgaagcccaagaagatcaagcacaagaagaagaaggtcaagctcgccgttctccagttttacaaggtggacgagtcgggtaaggttcagaggctgagaaaagagtgtcccaatgccgagtgtggtgctggaaccttcatggctaaaccatttgataggcacta

SEQ ID NO: 215528 - DNA, 487 bp, Gossypium hirsutum
  unsure (1)..(487): unsure at all n locations
ccgtccggggtcggtgcttaataaacgcctttcgantttacttttcggtgttcctatttactatactttatattctgacgtattgcgcgaaattcttatgtaaggccgaagaactgaccagacagtgctattttacagttgcacaatcgcgtcatggcttggtattccaaagtcgcgataatgctctagcatggagagcatttacctgctcgtttgaacantaggaatcacagccgtggatgcgccacgatgccgcaagngacattgacatgtctggagtgaggtgatcgattgcttttaacacgctttttcagtgacaactggtgctcggaaagcaacgtccctcgtgctcgtctttgtggatcttcgagcctactgttattgatgaagagaggactggtacttaccgtcagcttttccacgctgagcaactcatcagcggcaaggaagacgctgccaacaacttcgtgcgtggccactacactat

SEQ ID NO: 215529 - DNA, 456 bp, Gossypium hirsutum
gccgtctcacagctcaaagccctccgtgactacatcacttctggcaacgctaagttcggtggggttgcctctcgccactccgattgcagctccgctaaacgcggcggggaccttggtccttttggtcgaggccagatgcaaaagccatttgaggatgcaacatatagccttaatattggtgagataagtgacatcgtggatactgatagcggagttcacatcattatgagaacaggttgattattggtgataatacctggatatgttggcaattagttcggtgtgttggataactgtattcaagaatgttctgaaattaatgtcgatactgcctatggtcaatttgagtgataatttacacttggcaatgacattttaaatgcttggtataagttgtttggtgagggcatttaatttccgaaccatttgggtgtgatttgagattatttgcttgtt

SEQ ID NO: 215530 - DNA, 452 bp, Gossypium hirsutum
agcattttccaaaagaaatatttcaagtactagtcctcatcttgatcattctagacacaagactgttgatgatggggctttgtcaaagcatgcgctccctgattcagataaaagatgcagttcttctcgatatggtagcacttcaagaagagctgtagtagcaagcaggcctagttcatccgttgaagccaacgacgcatcgcaaaaccgactaacatcaagtggtggccgcatgtctaccacacaaagaattcaacttgcctttgaatctaagacatctagccgagccacccctgttagaggaagccgtgatgatcatcctcttagaaagtttgagttcctctcgattaggaaataatggcattgaatgtcaatcctgactcaatgtttccaagaacttatattctcactctgtatatgggatatctcaccagaatcactggccctacagc

SEQ ID NO: 215531 - DNA, 397 bp, Gossypium hirsutum
cccacgcgtacgaccaaactacgctctcccttgcgacaatggcggctggtgtaaccctcctcgtgctcactttgacctcgccatgcccatgttccttaagattgctgagtaccgtgccggtattgttcccgtttcctaccgccgggtgccatgccggaaaaggggagggataaggttcacaatcaatggattccgatacttcaacttatggttgatttccaacgtggcgggttcacggaatatcgtgaaggctagtgggaaaggatcaaggacagggtggatgagcatgggtcgaaattgcggtcagaattggcagtcaaacgctgtgctagttggtcagtcactctcatttagggtcacaagcagtgacagacgcacttgcacctctaggaacatc

SEQ ID NO: 215532 - DNA, 384 bp, Gossypium hirsutum
gttagccgttcttcttaaaccattaaagctttgaacatgcttaaggaagtgcataaatggggccggagagaggtgtaaaggttgctgccccggccaagaagaaacacgagaaggttgcgaatccactgttcgagaagcgtccaaagcagtttggtattggcggggcactacctccaaagaaggatctacatcgatttgtaaagtggcctaaggttgtccgcattcaaaggaaaaagaggatccttaagcagaggttgaaggtaccaccagcattgaaccagtttaccaagactcttgataagaaccttgctacgagtctattcaagctgcttctcaagtacagaccggaggacaaggcagccaagaaggaacgtctactgaaaa

SEQ ID NO: 215533 - DNA, 434 bp, Gossypium hirsutum
atccgaaagtatcagaagagcacggtacttttgatcaggaaactcccatttcagaggctggggagagaaatcgcccaggatttcaaaaccgatctgaggttccaaagcagcgctgtcgctgctctccaggaggccgccgaagcttacttggttgggctttttgaagacaccaatttgtgtgctattcacgctaaaagggttactataatgcccaaggacatccaacttgctcgtcgcattaggggtgagagagcttagagttatttaagatttattatactaaatggatttccatggatttgttgtaggattgaatatccaaaacgtggagatgtaaagcctttccctggtaaaagtagtaatattatggcaatttcagtactatatgttgatgctatttttggttcttttattaaaataaatattaaattcat

SEQ ID NO: 215534 - DNA, 460 bp, Gossypium hirsutum
aaaagatctcaggagatgctttgaatgatttatacaagtcattcgtagccgagtatccgattgtgtcaattgaagatccatttgaccaagatgattgggagcactactccaaactaaccaatgaaatcggagaaaaagttcagattgtaggagatgatcttttggtcaccaacccaaagagggttgcgaaggctattgctgaaaaaacttgcaatgcccttcttctcaaggtcaatcaaattggatctgttactgaaagtattgaagctgtgaaaatgtccaagcaagctggatggggtgtgatggccagccaccgcagtggtgaaacggaagatacttttattgctgatctttcagtcggtttggccacgggccaaattaagaccggagctccatgcaggtctgagcgtttagccaagtacaatcagcttctgcgaattgaggaggagcttggtgcgga

SEQ ID NO: 215535 - DNA, 464 bp, Gossypium hirsutum
cccacgcgtccgggtttgggaagtttggtctcaggtgctcgctttataactgatggaatggtgcaagctgctgctgaatgccttgcatcttatatgagtgatgaagaaattcagaagggcatcttgtatccatctatcgacagtattcggcatattacagccgaggtcggagcatctgttctgcgagctgctgttgcggaagaactggcggaagggcatggagacgtgggtcctaaagaattggctcatatgtcgaaagaggagacggtgggatacgtatttcgaaatatgtggtaccccatttacagtccacttgttcaggaaaagtaggcttccattttattatctctcacaattgggaaatggaggccatttctatgtggaccgaggagataaataaaattgaattattaatcattaagagttcaataccgtctattgaaccagacagaagattatgttga

SEQ ID NO: 215536 - DNA, 430 bp, Gossypium hirsutum
cccacgcgtccgtacccttttatttttacttgctttttctatttctcctttgactggttcagattagccgttgatagtttagtgattaatatatagaactctttaaagctttggaaagatccttttttttcacttggtatcaagcatggaagatcgcaaggagaaaaatgcaccatggctatcagtaccacaatttggtgattgggatcaaaagggacaggtgccagattactctcttgacttctcaaagatcagggaaatgaggaagcaaaacaagagggaagtttcaagagccagtcttggtaatgaagaagagttcattaacccaactgcaaacactgttagcactactcctagtgatgatcatcaccacaattaccctcagaaccatcactctccatctacaaggagggagttctttagctacttt

SEQ ID NO: 215537 - DNA, 438 bp, Gossypium hirsutum
atgcaggatagtttcttcgctagctttgcttttggttggctcatcacaaatggtgctggcgcttgcatcttacccaattgacactgttcgtagaagaatgatgatgacttctggtgaagctgtcaaatacaagagctcgcttgatgccttctctcagatcttgaaaaacgaaggtggcaagtctctattcaagggtgctggagctaacatccttcgtgccattgccggtgctggtgtgctcgctggatacgacaagttgcagctcattgttttcggaaagaagtacggatccggtggtgcttaaatatagggtggtactatctcccttcttttgttatgttgtaggctctaaagatggcgatgaacagctcgacacattgagaaatttatttcggcaaaaaaaaaatcattaataattcagatttacgggggggaagt

SEQ ID NO: 215538 - DNA, 430 bp, Gossypium hirsutum
gatatatactatagagatcaacaggggtttttcaacaatgattatctcacactaggggtggatcatgttcctctgttatctgggcggactgccctccagtgttatgaagatttcatgcttagttttgttaacaaatttgaatcctttattggaactgtaattgaagaaataagcatcggtcttggtccttctggagaacttagtgcaggtatcctgctcatccttttggtgatggtagatggaaattccctggcatcggtgaattccagtgttatgataagtacatgatggaggacttaaagatggctgcatgccgagaaagaaaacctcaatggggggacaaagggccacagaatgctggctgttacaacagtcttccatctggggtgcccttctttgaaaagggaaaagaaagctttctatctgatta

SEQ ID NO: 215539 - DNA, 405 bp, Gossypium hirsutum
gcacattgtcgattcttcgactcgggtatcgttggaaacctgagggtttttacctactatgacaaggttgattcacaggcatgggaagagactttcactctcttctctagggactcagtatggggcaatgaatgtgaactaccggagaggtgtgggaactttggactctgtgaggagaaccaatgcgttgcttgcccgtcaccaaacggattactcggttggagccggaattgtcagcagaagaaggtgaactgtaggccgaacgatttcagctactacaagctagaaggagtgaaccatttcatgagccagtacaatgaaggagaagggataaaggagagtgattgtgggaggaaatgcacctccgattgcaattggttggggtacttttaccacagggaaaca

SEQ ID NO: 215540 - DNA, 392 bp, Gossypium hirsutum
gcagaagcaaatcctaaggaatagaagaaaaatggcaagatacgacagagcgattaccgtgttctcgccggacggccatttattccaggtggaatacgccctcgaagccgttcgtaaaggtaacgccgccgttggcgtacggggcaccgacatcgtcgttctaggcgtcgagaaaaaatccgccgccaaactccaggactcacgatcggttaagaagattgtgaatttggatgatcatattgcattggcatgtgctggactcaaagccgatgctcgtgtcctcatcaacagggctcggatcgaatgtcaaagccataggctgactgttgaagatccggttaccgttgagtatattactcgttacattgcgggtcttcagcagaagtatactc

SEQ ID NO: 215541 - DNA, 416 bp, Gossypium hirsutum
cccacgcgtccgcttaatgctaagagatcatcattttggggaagaagtaacgctagaaagacaccatcaatggaatctgttgattcttcgggtgaagaagagcttgctatacagaggcttgagatcacaaagaatgatctacaacatcgtatcgcaaaagaggctagaggaaatgcaattttgcaagctagcttggaaaggagaaaacaagctctacttgaacgtcgtttggcacttgaacaagatgtctctagattacaagagcagctacaagctgaaagggatcttagagcggctctagaagttggattaagcatgtcatctggacaattttctagttcccatggaatggattccaagacaagggccgagcttgaagaaattgctcttgccgaaactgatgtggctagattgaa

SEQ ID NO: 215542 - DNA, 424 bp, Gossypium hirsutum
aaaaaatcaaacctttttcatcgtagagcatagctaaaccagaagaaaggggaaatggacgcaattgactcagttttcgatccactgagagagtttgctaaggacagtgttcgtctcgtcaagagatgccacaagcccgatcgcaaagaatttaccaaggttgcgttacgaacagcgatcggattcgttgttatggggttcgtaggatttttcgtcaagctcatctttatccctattaacaacattattgttggatccggttaggccttgtcaacgtttgctgaaaaccggtagaatgtttaagttgagaggtacgtcatgagtttatgaagtaattccaatttagacttgggtttgtctttaaattcagttttgttgaaaaagggttcaattttggtgtttgtaatagaatcttgttgaagct

SEQ ID NO: 215543 - DNA, 384 bp, Gossypium hirsutum
cccacgcgtccggtcagattacgttctacggcaattccttcatagcaggaccaactggggaaattgttgcagctgctaatgacaaagatgaagcagttctcatagcacagtttgatctagacaaaatcaaatccaaaagaagttgctggggtgtgtttcgtgatcgacgccccgatttatacaaggtgcttctgacatcagatggaagcaaaacttcatcgagattcagagctccccttttgcttatcatcactatgttgtcgaggagataatcagtgagttcccttccatgccatgtatttggttgactgcaaagaacgaaatgacatatatgtaggcaaatttccatgaatacaaaattaagaatatcaataagaagaaccg

SEQ ID NO: 215544 - DNA, 447 bp, Gossypium hirsutum
cccacgcgtccgggagagatccctattccttacaagccggatatcgatatggagaggatgcgctttgagagattctcttgggaggaaactatagcagttcttcatttgaaattggagaatatgaatgactttgacttgggactcaatgcccttgactatgaggtctggctatctgaggtcagcattggatctgcagaacttgaaaaatctgcaaagataggcaaaaacggaatcagttatattgagattcctatctctttcaggcctaaggatttcggatctgctctgtgggacatgattaggggaaaaggaacaggttactctatgaaaggtcacatcaacgttgacactccgtttggagctatgaaattacccatcagcaaggagggtggcacaacccgccttaagaagatagggaagacggtggtgatgatgatgatgatgatg

SEQ ID NO: 215545 - DNA, 376 bp, Gossypium hirsutum
ggagctccataaggcgaaaacaatggtgtccggatctggagtgtgcgctaagaaagtggtggtggatgcccgccaccacatgttggggcggttggcttcgatcgtggccaaggagctgctcaacggccagaaagtggtggttgtgagatgcgaggagatctgcatgtcgggaggactcgttcgacagaagatgaagtacttgagattcctccgcaaacggatgaacaccaagccttctcatggtcccatccatttccgagctcccgccaagatcttttggcgcactgttcgcggaatgatacctcataagactaagcgtggagcagctgcccttgctcgtttgaaagcttatgaaggaattccttccccatatgat

SEQ ID NO: 215546 - DNA, 361 bp, Gossypium hirsutum
  unsure (1)..(361): unsure at all n locations
ccgtgacatgcgccagaccgttgctgtcggtgtcatcaagagtgttgagaagaaggacccaactggtgctaaggtcaccaaatctgctgccaagaagaaatgagagattattgcagagataattatatcagttttcattacagctttggacaattatcttaaatttggactttaaatttactttttgtgagacttgttgatttgctttttaaacaaattctagttttatgttttaatgtttttcanaaaaaaaaaaaaaaaaaaaaaaaaaaaaaaaaaaaaaaaaaaaaaaaaaaaaaaaaaaatggttaggggttgtcgaggtacaaaattcaagttcacgtgcacgcgcatgcaaagc

SEQ ID NO: 215547 - DNA, 430 bp, Gossypium hirsutum
  unsure (1)..(430): unsure at all n locations
cagaaagctaaactggtttttcatattgggagaagatctgctagatgttagatcttttggtggtctatttaaattttctaaatcttgaaataatactctaaatagaaggatcaattgtttttggactttgccccgccattggaagttgtaataaggaacagtgtgatatagctagtttacaagcatgtgaaaaacatatttaaaaaacttcttgtaggttataatattttggattgtcagcatcattccactctttgtactgacataaataaataaatttgcacaataaaactggatttctgtcgcgatggtgaaagtggaactataatattcgatgaaagagttcgttctcttctgagacaagggcttattcttcagcttgngcgcctgaccctgttacggggtattaccggccggagaactgtggggc

SEQ ID NO: 215548 - DNA, 428 bp, Gossypium hirsutum
tgcgaaatttcatttccgttttcgattttttcctccaatttgtatttgaagtgatggatgccggatcaaaggtgaagaaaggagctggaggaaggaaaggcggcggtccaaagaagaagccggtttctcgttcggtgaaagccggattacagtttcccgttggtcgaattggacgatacttgaagaaagggcgatactctcaacgtgtgggaaccggtgctccggtttaccttgctgctgttcttgaataccttgctgctgaggttcttgagttagctggtaatgctgcaagagacaacaagaagaataggatcattccaaggcatgttctattagcagtgagaaacgatgaagagcttgggaagcttttagctggtgtgactattgctcatggtggtgttttacccaatattaacccagttctttta

SEQ ID NO: 215549 - DNA, 422 bp, Gossypium hirsutum
ggcgcctgatttctctttatttgacacgtgctttgacttgtcagggcagacttccggggggtaccgacgctggtgttgcattttagaggagctgacttgtcactgccggcgaccaactatttgatcccggtagatagcagcgggaccttttgctttgctttcgcgggtacaatgaacgggttgtccatcattggaaatatccagcaacaaggtttccgggttgcatatgatttagcgggttctcgtgtcgggttttctccccgtggatgcgcctaaaaatggcggtgcttttaatttttatattaagggacaaagctctatccctatctctatattaatttccttggatatttttgggggagggtaagaaaggaagaaacataataatgttttcatagataaaaatgtatgggaaagatgat

SEQ ID NO: 215550 - DNA, 427 bp, Gossypium hirsutum
ggaaaacaagaaaagcagagccgcatcactttttgctagctaagctactgtgggagttattgttcttcagaacagcttctgcagtagctaataataacgttatatattatataaattttatacatcctttttaccctacgactccatatataagcaagtaaaaataaatatggctcgctctgtttcttcctttaagttccttggtgcttctgtttttgatgctctttatgtctccatatcaaggagaggttactcaggtgcaccgccggcggcagtgacggctagctttggtaggcctggagcgatggggaaagtggaacgaagatatgcgatgaaagagtcgtcgtcgtcggagacaagggcttattcttcagcttgggcgcctgaccctgttacggggtattaccggccggagaactgtggggct

SEQ ID NO: 215551 - DNA, 423 bp, Gossypium hirsutum
  unsure (1)..(423): unsure at all n locations
tgcggctatagcactaagaaagtgcatgctattctcacctacaatgggacaaaccacttgatcaaaaaggaagttccttgtgagactgaccaactcactcatgtttatacgttcattctccgtccggatgctacctacagtatccttgttgacaatgttgagaaacaaactggtnncttgtacactgattgggatcttctcccacctaagaaaataaaggatcctgaggccaagaagcctgaagattgggatgacaaggaatacatccctgatcccgaagacaagaagcctgagggttatgatgacattccaaaagaaattccagatcctgatgctaagaagcctgaagattgggatgatgaagaagatggtgaatggacaccttcaactattcccaatcctgaatacaagggcccatggaag

SEQ ID NO: 215552 - DNA, 394 bp, Gossypium hirsutum
ggacgttggaattgctaggtcatccgagtatcccgaagtgcagagaattacggataagcttttgggtacacttgaaggatttttgaaggaaatggccaatggccggaagagtccggagagaatcaaggaagagaaaccaccggttaaggaggagcctgaaacaaacatgaatgaaataaaggctcttcctgcacctgagaattataacccacctcctccaccacctgaacctgaacagcctaagactgtcccaccgcaggttacggaggaccttgtgaatctaagggacgatgcggtttcagctgatgagcaagggaacaaattggcgttggctttattctctggatcacccaccttaaatgctaatgggtcgtgggaagcattttctttaaat

SEQ ID NO: 215553 - DNA, 415 bp, Gossypium hirsutum
gcactcaacttcgatgatgttgatgtcggtttggttagtgattctatggttgcaaatagcctttacctgcaaaatgggagctgtgcatcctcatccggtgcacctttaaaatccgagcaaccagaatcttagcccagcacgcttgtattccttgtatattctgcctcactcccgtattcttgttagatcgtacgtatgaatgtaagttcatcacacggggtacgtatgagcggtgagttactgtagaatagccgccacctccccaatgtgtttactgatgttagctaacagtactttgaagcttggcctaacaaattgaataaatttttgcctttaccggattgtagccaaatagtaccactgatcatttatattggaatcacagtgctccttcaagggggtaattttctttggg

SEQ ID NO: 215554 - DNA, 433 bp, Gossypium hirsutum
gcacatgtaccatgacatgtacatgaaagtcaagggtaatgtgtttaagaacaagagagtcctcatggagagcatccacaaatccaaggctgagaaggccagagaaaagacattggctgaccagtttgaagctaagagggctaagaataaggcaagcagggaaaggaaacatgctaggagggaggagcgattggcccagggacctggaggagtagagaagccagttgcagcaccacctgccgccactgctcaaccagctggtggttccaagaagtccaagaaataaggaggccatctggcgaagaagtgtgagccatgaatttagaaacatgtccaagtggtttttttgtcgagccagtctgctgttttggtcattatgaacttgttttaagttggattaaggtttcatgattttgttctcagtttccatgct

SEQ ID NO: 215555 - DNA, 436 bp, Gossypium hirsutum
cggacgcgtgggcaagctgctgtcagggatgtccaggaagcctgcgtctatgacacgtacactctgcccaagctgtatgtgaagatgcaatactgtgtttcatgtgcgatccattcccacgttgtgagggtccgatcccgcactgacaggaggaaacgtgacccgcctcagcgcttcattagacgcagggatgatatgccaaagcccggtcagcctggtcaggctcctcgtcctggtgttgcggctcctgctcgtgcataaggcttttgaagtttaagatgaatttgtatttcgtgttttgctttgagatatggttgcttgaattttgagaacttggatcatgtagggagtttttttttattgttttaaagttcgatactttgttaaatcttggaaggtattgagtggttgggaatacttgttggaacttggaact

SEQ ID NO: 215556 - DNA, 439 bp, Gossypium hirsutum
cccacgcgtccgcgagagatagaaagaaaaccaaagcgtcgtggttcttttcttgttaagtacactgtaaaagatggccgatactgaggagattcaaccccttgtctgtgataatggaactggaatggtgaaggctggttttgctggtgatgatgctcccagggcagtttttcccagtattgttggccgaccccgacacactggtgttatggttgggatgggtcagaaggatgcatatgtaggagatgaggcacaatctaaaagaggtatccttactttgaaatatcccattgagcatggtattgtcagcaactgggatgatatggaaaagatctggcatcatacattctacaatgaactccgtgttgctcccgaggagcacccagtgcttctcacagaggcacctctcaaccccaaggccaacagagaaaagatgact

SEQ ID NO: 215557 - DNA, 429 bp, Gossypium hirsutum
ggacgttggaattgctaggtcatccgagtatcccgaagtgcagagaattacggataagggtttgggtacacttgaaggatttttgaaggaaatggccaatggccggaagagtccggagagaatcaaggaagagaaaccaccggttaaggaggagcctgaaacaaacatgaatgaaataaaggctcttcctgcacctgagaattataacccacctcctccaccacctgaacctgaacagcctaagactgtcccaccgcaggttacggaggaccttgtgaatctaagggacgatgcggtttcagctgatgagcaagggaacaaattggcgttggctttattctctggatcacccacctcaaatgctaatggttcgtgggaagcatttccttcaaatggagagccagaggtgacttctgcatggcaaacacc

SEQ ID NO: 215558 - DNA, 430 bp, Gossypium hirsutum
aaaagactgttgatggtccttccatgaaggactggagaggtggtagagctgcttccttcaatatcattcctagcagcactggagctgccaaggccgtcggcaaagttttgccagcactgaatggcaagctgactggaatggctttccgtgttcccactgttgatgtctctgtggttgacctcactgtgagacttgagaagaaggctacatatgatgaaattaaggctgctatcaaggcggaatctgaaggcaacttgaagggaattcttggttatgtggacgaagatttagtctcaactgacttcatcggagacaacaggtcaagcatttttgatgccaaggctggaattgctttgaatgacaactttgttaagcttgtgacttggtatgacaacgaatggggttacagttcccgtgttatcgacttgat

SEQ ID NO: 215559 - DNA, 431 bp, Gossypium hirsutum
agagatggtcctcaattatacatggttgaaccatctggcatctcttatagatactttggtgctgcaattgggaagggaaaacaagctgccaaaacagaaattgaaaagttgaatctgtctgaaatgacatgcagagaaggggttattgaagtagccaaaatcatctacaaggtacatgatgaagcaaaggataaggcctttgaacttgagatgagttgggtctgcgatgaatcaaagcaacaacatcaaaaggttcctgatgacctgttagaggaagcgaaggttgctgctaggactgcactagaagagatggatgctgattaaattgttagtgaagccagaatagtctttgttattgatattttcatcttcatgaatccccattgttatggtttaaactttcctcgtatcattttcatataagatccctg

SEQ ID NO: 215560 - DNA, 434 bp, Gossypium hirsutum
cccacgcgtccgcaaaactaaaagtccagaattagggtttcgataaccctaaccccagcatagcccctacaactccgacatcatttgggtccctttgtccttcaattagatcacagcttttcgttcaaaaatatattctcttgttattgttcttaatttcaagcaacaatggcggagcacttggcctcaatctttggtacggagaaggaccgcgtgaattgccccttctatttcaagattggagcatgccggcacggggacaggtgttcacggctccacaaccggccgacgatctctccgactctcctcctttccaacatgtaccagcgcccggacatgatcactcccggagtggatgcccagggccagcccatcgatccccgcaagatccaggagcacttcgaggacttctacgaggacatcttcgaggagct

SEQ ID NO: 215561 - DNA, 424 bp, Gossypium hirsutum
gacacagagagagagacagagagagagatgtcgggaggaatagcgcgtggtcgactcgccgaggaacgtaaggcatggaggaagaaccatccccatggttttgttgcgaaaccagagacgttgcctgatggaacggtcaatttgatggtgtggcattgcacgatccctggtaaagcaggaactgattgggagggtggctacttcccgctcacgctccatttcagtgaagattatcccagcaagcctccaaagtgtaaatttccccagggctttttccacccaaatgtttatccatctggtactgtttgcctttcaatcctaaatgaggatagtggttggagaccagccataactgtgaagcagattcttattggaatccaagatcttctggatgctccaaaccctgctgatcctgctcaaactg

SEQ ID NO: 215562 - DNA, 429 bp, Gossypium hirsutum
cccacgcgtccgcccacgcgtccgcccacgcgtccgagggttcacatttccatccagacggtgatttatttgtcccaaatgaaaggaaagatataatcacctcaactgcttgttggacagcaatggttggcttgcttgcatatttgtcgtttacaatgggaccaatgccattgcttaaactctacggcatcccttatgcaatatttgtgatgtggttggatttggtgacatacctacatcaccatggtcatgacgagaagcttccatggtatcgaggaaaggagtggagttacctgagaggagggcttacgacgcttgatcgggattatggatggattaacaacatccaccacgatattggaactcatgttatacatcatctcttccctcaaatcccacattatcacttgattgaagctaccgaagcag

SEQ ID NO: 215563 - DNA, 434 bp, Gossypium hirsutum
agctcttgcaaggtatggttagttggagatgacttgaccgaagaagagcaaagaaaggcaaataaaggaacactatttattcccttttcgcaacttccaccaaaaaaattgcgcaaggactgcttctatcacacaacaccagcgatgcagactccgacggcccttgagaatgtggattcttgcgagaactggttgccaaggagagtgatgagcgtatggcgcatagctgggatactgcatgctctggaaggatgggaagagcacgaatgtggttacaccatgtctaacattgacaaagtttgggaagcatgtctcaagcatggatttcagcctctgaaggtcccaactcaatcaaagtcctagaagatatttggcgatttatctaattaatctacttgatatctatgtttaatgtataagcatttacctaaata

SEQ ID NO: 215564 - DNA, 415 bp, Gossypium hirsutum
gaaattcttcgtcggtggcaactggaaatgcaatgggacaactgaggaggttaaaaagatcgttacaacattgaatgaagctgaagttccttctgaggatgttgtggaggttgttgtgagccctccatttgtttttcttacctttgtgaaaagtctgttgcggtctgatttccatgttgctgctcagaactgttgggttcgcaaaggtggtgcttttaccggagaaattagtgctgagatgcttgttaatctgagcattccatgggttatcatcggtcactctgaaagaagggctctcttgaatgagtccaatgagtttgttggagacaaagtagcgtatgcactttctcaaggcttgaaggttattgcctgcattggggagactcttgaagagcgagaatctggctctaccatg

SEQ ID NO: 215565 - DNA, 432 bp, Gossypium hirsutum
cagagccgcagctgccgccatcgccatggtgaagtttcttaaaccgaacaaggcagggagcgttctccagggtcgatacgccggccgcaaagccgtcattgtcagatctttcgacgatggcacacgtgaccgcgcctatggccattgtttggttgcagggataaagaagtatccgagcaaggttatccgcaaggactccgcgaagaaaaccgccaagaagtcacgcgtcaagtgcttcatcaagctcgtcaattaccagcacctgatgcccacgcgctacaccctcgacgtggacttgaaagacgtggttaccgtcgatgctctccagaccaaggacaagaaagtggccgcttgtaaagcaactaacgagaggtttgaagagaggttcaagactgggaaaaacaggtggttctttactaagctcaggtttta

SEQ ID NO: 215566 - DNA, 430 bp, Gossypium hirsutum
cccacgcgtccgatccaatcttaatgatttcctcctttattgccccagtgctggatcagatgcactaagtccatgggagacaattggatcacaaggggcaaggaatttcatgctgtgcaagaagccaaggactgagaaagtgaaagacgacgggaaggcagctgaatcaattaataggaaggcaagtgggaattggaaggcatggtttaataaatccctcaatctcaagatttcctcccattaattaaacaattcccaaccctttatgatcctttatttcttgggttagctttacttataaataaagccttggaagttagtctattatcattgatggccatggtagagtattgcttatgtttttcaccttatttctcatttaggtgagaaaagacctgcaggaataaatttgaacttgtttttcagtatt

SEQ ID NO: 215567 - DNA, 421 bp, Gossypium hirsutum
gccaggctcgcagactttcagaggaaggtttttgatgtcttatacaaggttgctgacattcctttcttaagcaaatacaagcatcaaattctcgatcttattgagcatgctgagacacagccgaacctcaccattggtgtcttggtctctattgtggtgattattctcacgattttcttcaagctcatttttggtgggaagaaacaaccaatagtagagaagaaaccagaggttgctgaaacatcaaatggtgaaggaagcagtggagaaaaggctgaagaggcggagaaggaagaagctgctgccgctcctcgccgaaggcgccgtgacaattgagcaaatcttaaaacaaaggtggctggtggcgactagcagtttgagttttggctaatttttgcactgtaggtggttttcgtagctg

SEQ ID NO: 215568 - DNA, 401 bp, Gossypium hirsutum
cttcccggacccctgggaatttgaacagcctgctaaaacaatatgggctggcaaagggcaccaatgaagccatgtttatcatcgaaacatatcggacccttcgcgaccggggtccgtacccggctgaccaagtccttaaagatcttgaaggccgctatggatttgtggggtatgataacaaaactggaagtgtatttgctgcactgggtgcaaatgaaaaggttaaactctattggggtgtagcaactgatggatcaataattggttcaaataacttgaagcttataaaaaaaagctgggctaaatcatttgcaccattttcaccttggtgtatgttccacaatgagcaaggaatgacgaagtttgagcatccgaagagcaaaatgaaaggcatgcccaaa

SEQ ID NO: 215569 - DNA, 433 bp, Gossypium hirsutum
ctccatcagacaccttggtccttccatgatccaacagatgcagcacccttgcaatgattgtaagggtactggtgagaccatcaacgataaggaccgttgcccccaatgcaaaggcgagaaggttgttcaggagaagaaagtcttggaggttaatgttgaaaagggtatgcagaacggacagaagattactttccctggagaagcagatgaagcacccgacacagttactggggatattgtatttgtcctccaacagaaagatcatccaaaatttaaacggaagggtgatgacttatttgtagaacatacgttgacacttactgaggcactttgtggcttccagtttatactgacccacctagatggcaggcaacttctcattaagacccatcctggtgaagtggttaagcctgatcaattcaaggccataaat

SEQ ID NO: 215570 - DNA, 436 bp, Gossypium hirsutum
cggacgcgtgggttcggaggcattgcagatagtaaacatatgctacgagcgagccgaagagatcttacagcagaaccgaaagctgatggatgcagtggttgatgaactggttgagaaaaagagtttaacaaaacaagaattctttggacttgtggaattgcatgggtcacttcagccaatgccacccagtatagttgacattagggttgccaagcgaactcagttccaagaaatgatgatgaaccccaatgtgaaggttacagggagtagttcttcataaaccaccacctatctacttcctattcacatgtataactttgcatcaatcacttccaggtcataccatcaggcattgcttggtataagattttgatttctttttcttgtacttagaaatttcacttattttatctttttaaattaaattacaactttt

SEQ ID NO: 215571 - DNA, 432 bp, Gossypium hirsutum
  unsure (1)..(432): unsure at all n locations
gtccgacggtatacatgggatattcctccatgatcctgttagtttcatggctctagctcgggccgatctcttcacatacaagaagggagtggtgagggtcgaaacgcagggcatatacaaggggcataccttgttggatcaaggattaaaaagatggaatggaagcaatccatggacaggctattccccagtatccgttgcatggacagtcaatgtggatgaagtccttaattatattaaacaacagttgatgaaaccatgaaacaaaaagctggaaatactcacttgacaattaaaaagatgtcctcaagattagatcacctttgaaattgatttctgcttaaaggtccctttgtagtttattcccttcttgctttacccatttctggggttaaaaagctaataattgttctcgtatcntgtctttaatgg

SEQ ID NO: 215572 - DNA, 436 bp, Gossypium hirsutum
cccacgcgtccgcgacatcacggtggtgcttgaccagcccctggttggccaaggcatgtccgataaccccatgaacgccgtcttcatcccatctcctcttccagttgaggtttcgcttatccaagttgttggtatcactcattttggaagctatattgaagccgccagtggtgaaaacttcgcaggtggtgcttcttcctctccagctgttgaatacatgaacaatcttgacgagacaacttttcgaggtgggtttatcctagaaaaagttatgggtccgatttcgacaggccatttggagcttcggacccgaaatccaaacgataacccatcagttaccttcaattatttcaaggatccacaagacctgcaaagatgtgtccaaggaattcaaaccattgagaaaatcatcgaatcaaaggctttctttagattc

SEQ ID NO: 215573 - DNA, 432 bp, Gossypium hirsutum
gaaaaaaatgagctattcacataataccatgggctcaggtagtagaactgctagaaggacatttgattttggaaggacacatgttgttcgacctaaagggaaacaccaggcaactatagtatggcttcatggccttggtgacaatggctcgagctggtcccagctcttggaaagtcttcctcttccaaatataaaatggatttgcccaactgctcctactcgtcctgtggctttacttgggggatttccttacacagcatggtttgatgttagtgagctgtcagaaaatggtccagatgattgggagggtttagatgcctcagcagctcatattgcaaacttgttgtcaacagagccatgtgatgttaaggtcggaattggaggcttcagtatgggtgctgcaatggcactttactctgcaactgcttgtgc

SEQ ID NO: 215574 - DNA, 373 bp, Gossypium hirsutum
ctttgctcgtaattcatttcgttgtaaatttgtttccgtagtaatcatcaaatctgggggagatgtcatgcagaggcaagggtggcaaggggctcggcaaatgaggtgccaagaggcatatgaaggttttaagagacaacatccagggcattactaagcctgtcattcgccgtttggctcgtctaggaggtgtcaagaggatcagtggcttgatctatgaagaaactaggggagtattgaagatattcttggagaatgtgattcgtgatgctgtgacttataccgagcactccaagaggaagaccgttaccgccatggatgtagtttatgccttgaaaaggtatgtcatgactttctatggttatggtggtta

SEQ ID NO: 215575 - DNA, 433 bp, Gossypium hirsutum
cccacgcgtccggcagaatgccaattcagctttacgacaggtcaaaacatgggcaaagctgttaaattcgttctgcagcagtggaaaacttgaactggagcttatgtataaggttcagatgcaatgctatgaggatgcaaaattgatgaagctattcccggagattgtgaagtctctctatgaccaggatgtccttgcggaagacacgattctttactggttccgcaaaggattaaacccaaagggcaggcaaaccttcgtgaaagccctggagcccttcgtgaattggctggaggaagccgaagaagaggaataagcgcgtggataataatagtgttatcaacaatcaagaagttatgataattaaccttgttatcttttccttgtctttattgagctatatgtttgccgaactcttttgacatttggtgtg

SEQ ID NO: 215576 - DNA, 428 bp, Gossypium hirsutum
gttccctaggggaatgtttggtgaagatatattcggctcgtttaggggtggtgctggtgagggttctaccactatgcctcgaaaaggtgcccctattgatcggccattgccttgtagcttggaagatttgtataaagggactaccaagaagatgaagatttctagggatgttatcgatggtagcgggagacctactacagtggaagaaattcttaccattgatattaagccggggtggaaaaaaggcacaaaaataacttttccagagaagggaaatgagcaacgaggggttattccctccgaccttgtcttcatcattgatgagaagcctcacagtgtgttcaagagagacggcaatgatcttatcgtaactcagaagatatctctggtggaagctctaactggttatacagcacagctgacaacac

SEQ ID NO: 215577 - DNA, 429 bp, Gossypium hirsutum
ggtctcgaaaatgtgaggcttatcacagtgggagcatttcataatttggctctccaggaggatgggactttatgggcatggggtaataacgaatacggacaacttggaactggggacactcagccaagatcacaacctatacccgtccaaggattatctggtctcactttggttgatattgctgctggtggatggcattccactgcattgactgatgatggagaggtgtatggttggggaagaggagaacatgggaggctcgggtttggagataacgataagagcagtaaaatggtgccgcaaagggttcaacttttagctggggaagatattgttcaggtatcttgtggtggaacacattcggttgcattgacacgtgatgggcgcatgttttcgtttggacgaggtgaccatggacgactaggttat

SEQ ID NO: 215578 - DNA, 421 bp, Gossypium hirsutum
cgaatatgtctctgattccaagcttttttggcaaccgtcgcagcagcatctttgatcgcagtctttcttgacgtttgggatcctttcaaggacttccctttctcttctccttcttcatcactctccacgcgctcttctgaaacctcggcttttgtcaacacccgaatcgactggaaggaaaccccataagctcacgtgttcaaggctgatgttccagggcttaagaaagaagaagtgaaagtggaggttgaagatgacagggtgcttcagataatctgggagaggaatgcatagaatgaagacaagaacgactcatggcatcgggtggaacgcagtagtggcaagttcatgaggagattcagactgcccgagaatgctaagattgatcacattaaggctttcatggaaaacggagtgctta

SEQ ID NO: 215579 - DNA, 428 bp, Gossypium hirsutum
ctatgctcgtgaaggtcggcgcccggttctaggatccgctatcagtggtttcttcctttattgccccagtgctggatcagatgcactgaatccatgggagacaattggatcacaaggggcaaggaatttcattttgtgcaggaagccaagcaatgagaaaatggaagatgatggaagatcagcaaactcagttactgggaaaggaagtgggaattggaaggcatggatcaacaaatcactcaatcttaagatttcttctcattattagataattctcataccctttatcatcgtgtgcttcttgggctagctttactttcaagctaaggacttgtacaatggatatgaccatgttagaatcttggttatcatccatgggatgtttattcaggaataaaatcaagctgttattcggtgtttttgctttg

SEQ ID NO: 215580 - DNA, 428 bp, Gossypium hirsutum
gcggctgtggtttcttccggctttcgattcaaatcccttttggaactgtccttcaatggaaaacaagcagccaacatggggaagacacgaggtatgggagctggacgtaagctgaggacccaccgaaggaggcaaaggtgggccgataagtcatacaaaaaatccaaccttggtaatgaatggaagaagccatttgctggttcttcccatgccaaaggcattgtccttgaaaagataggtattgaagctaagcaacctaactctgctatccgaaagtgtgctcgagttcaattgatcaagaatggaaaaaagattgccgcgttcgttccaaacgacggttgtttaaactacatcgaagaaaatgatgaggtgttgattgctggatttggacgaaagggtcatgccgtcggtgatattccccgtgttag

SEQ ID NO: 215581 - DNA, 428 bp, Gossypium hirsutum
cccacgcgtccgacagaattcaaacaataataatatattaaatcttcttcatttccggcggacccatggagacagttatcggaaatccattcatcaaggcattgattattcttttcttggtatctgcaactaccgccgctggcgacgctccgttcattatttcccacaagaaggcttcgctcaccagacttaattcctgcgctgaacgcgtctccgtctctatcgacatctacaatcaaggcttctcgacggtgtatgatgtgagtcttgtcgatgatagctggcccaaagatttatttgatatcatcagcggtaacacttcaaagtcatgggagagacttgatgccggtggcattttatctcattcatttgaattagatgccaaaagacaaggaatgttccatggtgcaccagcagttattacttac

SEQ ID NO: 215582 - DNA, 419 bp, Gossypium hirsutum
tgaagctgctgctcttgcttttgaagccataccacgtactttggcacaaaattgtggagttaatgtgattcggactatgactgctctgcaaggaaagcatgcaaatggtgaaaatgcatggattggcatagatggcaacactggtgccattgctgacatgaaggaaagaaagatttgggacgcatacaatgtgaaggcgcaaacatttaagacagcgatagaagcagcatgcatgcttctacgaattgatgacattgtaagtgggattaagaagaagcaggctcctggagctggccaaggtccatcgaaacccaaggtcgagactgaagcagatgcggatggtgagcaaattcttcctgattgaagatactgaatcacttaaactcacccttcgctttcaaactgtttgatgaaatgat

SEQ ID NO: 215583 - DNA, 436 bp, Gossypium hirsutum
gctttggctcgcaaatacaaccaagacaagatgatttgccgcaataccataaatgggactacaagttgaaccctcttttgagctaaagaatgaaaaggagggcatcttagttcccaaaattcaaatttccattctcaactttgtcaactggtctaaactttacttggcagttgattttctagtgtggtacatgatgatcaattctctgtttcgtacttatgtagcttgataaatcccaagatcgatttcttctgagtaatgagaatttttaagatcaaagtgaaggagctaattagtagtctgcccattgcatgttatcttaaaagacgcatgtgcatggaagttatttgataattgagaatgtgcgttgctaggtgttatgctcgtcttcatccaagagccgtgaactgccgcaagaagagtgtggtcacagcaa

SEQ ID NO: 215584 - DNA, 411 bp, Gossypium hirsutum
ggagttcatggctttcctactcttttccttttaaattctaaaatgcgtgttcgttatcatggaaaccggtcttttgaatcgctcagcacattctataatgaagtcaccggctttcagataaaatctctggataaaacatcgcgggacaaaaccagacatgtaccaaagcatgagaatcataaaagctctgagcaggagagctggtcattctcatgggcaagatctccacagaatttgcttagacaagagacctatttggccttagccaccacatttgtgcttttcagattgctttatctattttatccaactttgctggtatttgctcgcttcacttggaaacggatcaatcgagatgtaaagttgggaactatgttggaacatcctttgctgatctgaaacgaacaattc

SEQ ID NO: 215585 - DNA, 411 bp, Gossypium hirsutum
  unsure (1)..(411): unsure at all n locations
cccacgcgtncgaaggaattggaatgtaataatattgattcatataggaggaaaaggttctgtattgattcaaatgctgtacctatgggatagggatagagaaagaggaaaaaccgaagatttcacatagtgcttttgatcgaaaaatcaatctgatttatttcgtacccctcgctcaatgagaaaatgggtcagattctataggatcaaacctatgggacttagggaatgatggaagggaataaaataaaaaaaaaaaagaaatcaaaaaaagaggggaaaaaaataataaaaataataaataagtaaataaaaatgaagtagaagaacccagattccaaatgaacaaattcaaacttgaaaaggatctttctgattctcgaagaatgaggggcaaagggattgatcgag

SEQ ID NO: 215586 - DNA, 433 bp, Gossypium hirsutum
gccggaatcccgggcgcccacgcgtcgccaccgtcgtcattttcaagtctgcaaaaccctagccagcccttccccgccgcgctccgaaccatgggccggtccgtaccaagacggtaaagaatcctctcgccatgtgatcgagaggtactactctcgcatgacgcttgatttccacaccaacaagaagatcatcgaagaagtggctatcatcccttccaagcgtctccgcaacaagatcgccggcttttccacccatctcatgaagcggatccagaagggtcccgttcgtggcatctctttgaagctccaagaagaagagcgtgaacgtcgcatggatttcgtccccgacgaatccgccatcaaggttgatcaaatcgaagtcgataaggaaactctcgatatgctttcggttctcgggatggctgatattccc

SEQ ID NO: 215587 - DNA, 413 bp, Gossypium hirsutum
cattttcagttgaggaacctggtatgggctacatcaaaacatgatgtttatctcatgtcacaattttctgtcatgcattggtcttcattgacacacaagaagcgtgaaattcttaatgtttctgggcatgtggcaccatctgagaaacatcctggaagtctgatggaaggttttacgcaaaccttagtcagtactcttgcagtaaaggataagctgctagttgctggaggattccagggtgaactaatatgcaagcatttagatcgacctgaaataagcttctgctccaggacaacttatgatgacaatgccattacaaatgctgttgagatttatgtcactccaagtggtgcagttcactttacggcctcaaataatgactgtggagtcagagattttgatatggagaaata

SEQ ID NO: 215588 - DNA, 430 bp, Gossypium hirsutum
gcgccacccgcatctcgtctctcttatcgggttctgcctttcagaaaaggagatgttcggtgtgttagagtacatgagcagagggtcactcgctcatgttctctacgggaaggatcatgttccactggcttggaaacataggctacacatatgtatcggtgcagcacgtggattacattaccttcacactggagcgaagcgtgctgtaatccaccataacatcaagagctcaaacatatttttagatgaagaatggtgttctaaactttcagattttggattgtccaaactgcctcttagcacgtcaaaagccttgacaagaatcgacacagatcatgcggtgggaactagtggatatatggccccagagcatcgcgtgcgtttactgaaagaaaaatccgatgtcttctcatttgggattgttttgtac

SEQ ID NO: 215589 - DNA, 389 bp, Gossypium hirsutum
cagaatgtcgaagcgaggacgtggagggtcagctggaaacaagttcaggatgtcactgggtgtaccagtggcagccacagtgaactgtgctgataacactggtgctaagaacctttatatcatctcggtgaaaggaatcaagggccgtctcaaccggttgccctctgcttgtgttggagatatggtgatggctaccgtcaagaaagggaagcctgatctcaggaagaaggttttgcctgctgtcattgtgagacaacgcaagccatggcgcagaaaggatggtgtttacatgtactttgaagataatgcgggtgtcattgtgaatccaaaaggagaaatgaaaggttctgctataactggtccaattgggaaggagtgtgccgatcttt

SEQ ID NO: 215590 - DNA, 437 bp, Gossypium hirsutum
cccacgcgtccgtgtcagtggaggagctgttggtgaaatggcattacatttctgtgaacgttacaagttaatggtcttgaaaatcagctcaaaatttgaactgaggcgtttttgccgcactacgggaacttctgctcttttaaaactcagccaaccaaagccggatgatttgggatttgttgattcaatttcagtccaggaaattggtggttctcgggtcactgttgtgagaagtgaacaaggtggtaacaagattgccactgtggttttacgaggaagtactgatagtatattggatgatcttgaaagagctgttgatgatggagtgaacacatataaggcaatgtgcagggacagtcgaatggtacctggagctgcagctactgaaattgagttggctagaagattgaaagagttctccttcaaagaaacaggat

SEQ ID NO: 215591 - DNA, 415 bp, Gossypium hirsutum
ggctaactctatcctgtttgattatcgtatccctgctgttggcacctgtggagccggtgccgccatggacagtcctttgcagatgaacgggctgccaatcagtgtctacgctccggagacagtcgggtgcgtggtggttgacaagcaaggccgatgtgctgccgccacctccaccggtgggctcatgaacaagatgagtggaaggatcggtgactcgccactaataggatcgggaacctacgcatctgagttatgcggggtgtcgtgcaccggcgaaggggaagcaatcatccggaacacactggcgagggaagtgtctgctgtgatggaatacaaagggttgaatctgcatgaggcggtggattatgtgataaagaataagttagatgaaggcaaagcggggctgatcgcggtg

SEQ ID NO: 215592 - DNA, 427 bp, Gossypium hirsutum
gtttcaaacaagaagattgctatcttagggttcgcctttaagaaggataccggtgacacgggggagacccctgccatcgatgtatgcaaaggactcttgggagacaaagctcggttgagcatatatgacccgcaggtgaccgaagaccaggtccaacgggatctttccatgaacaagtttgactgggaccatcctcttcacttgcaacccatgagtcccacgactgttaagcaagtcagctgggtgtgggatgcttatgaggcaaccaaagatgcccatggaatttgcattctgaccgagtgggacgaattcaagaaactcgacttcaagaggatatacgacaacatgcaaaagccggcttttgttttcgatggaaggaacatcgtgaacgcggatgagctgagggagatggtttcatagtgtactc

SEQ ID NO: 215593 - DNA, 430 bp, Gossypium hirsutum
cgctttttctctccaatttatgctcaacttggcattgaaatatttggtcttggatttgtaacttctataacattcatcttcttggttggggtattcatgtcatcatggttgggagcatctgtcctaggccttggtgagtggtttatcaagcggatgccatttgttcgtcatatctacaatgcctccaagcagatcagttccgctatatcaccagatcagaacacacaggcattcaaggaagtagccatcataaggcatcctcgaattggtgaatatgcatttgggttcattacttcatctgtttctctacagagctacactggtgaagaagagctatgctgtgtctatgttcccacgaatcatctttacatcggtgatatattcctcatcaatacaaatgatgttatcagaccaaatctatcagtccgtg

SEQ ID NO: 215594 - DNA, 393 bp, Gossypium hirsutum
  unsure (1)..(393): unsure at all n locations
agctttctcagctttttatatatttttacttattttctataaaaatcaaaatggcgtctttccttactcaaagtgggctcaaacttttccttgtcatctctttgtttcaaatctctttggccgttaggaagctgagtgaagtggtgcaagaccagcctcagctcttgacataccacaatggtccccttctttctggcaaaattactatcaatttgatttggtatggcaagttcaagccttccgagagggctattgtctctgattttgtcacctccctttcctccacggctccatcgcaaagcaaccggccttcggtgcccaatggtggaaaaccactgagaaatactaccacctcacctncaagaatctttcctttccctgtctttgggaagc

SEQ ID NO: 215595 - DNA, 289 bp, Gossypium hirsutum
  unsure (1)..(289): unsure at all n locations
acgcgtacgctggctttctttgttttaggcatgtattgntatttaaggccaattctattacaacagcggggaaacaaagatcccgacgatgaaaatctttggtacaatgcataatggtaagggaaaactgaactacgcccagcacatgaagaggagcaagtactgcatttgtcctagaggttacgaggttaacagtccacgcgtggtggaggccatattttatgaatgtgtttccggtatcatatctgacaatttcgttccttcttttttcgagggttttgaattggga

SEQ ID NO: 215596 - DNA, 329 bp, Gossypium hirsutum
ggaaattaagaaagttgttgacctttattatgagcttgacattgatgtcctggttcatggagagcctgagagaaatgatatggttgagtactttggtgagcaattatctggttttgctttcactgttaacggatgggttcaatcttatgggtctcgctgcgtcaagccaccaatcatctacggtgatgttagccgccccaaaccaatgaccgttttctggtcatctactgcccaaagtatgactaaacgcccaatgaagggaatgcttactggccctgtcaccattctcaactggtcctttgtcagaaatgatcaaccgagattcgaaa

SEQ ID NO: 215597 - DNA, 400 bp, Gossypium hirsutum
  unsure (1)..(400): unsure at all n locations
ttctctcgcggataatcaccgccggtctttatcgccggggggatcggcgctgccggggggaacccaaccgacgtggcgagggtgcgaatgcaagctgacggacgcctccccgtatctcaacgtcgtaactataccagcgttgtcgacgccatcactcgcatgaccaaacaagaaggcgtcacctccttgtggcgcggctcatcgctgacggtgaatcgtgcgatgttggtgacggcatcgcagcttgcctcctacgatcagatcaaagagatgattttggaaaacgggctgatgaaagatgggctggggacacacgntgcagcgagcttttcagccgggtttgttgcggcagtggcgtcgaatcccgtgatgtgataaaaacaagggtgatgaacatgaa

SEQ ID NO: 215598 - DNA, 145 bp, Gossypium hirsutum
ttatcacttcccgggatctctcgaggggtatgttcatagcagggggcggacacgaaaggctgcggcaaaaggaacagcctatactttcttcacagctgcaaatgcaagattcgccaaagaacttatcgccatactggaggaagct

SEQ ID NO: 215599 - DNA, 295 bp, Gossypium hirsutum
  unsure (1)..(295): unsure at all n locations
ttttaaaatctcaaagatgtatacatttaggaagaagatccacaaagataaggatgctgaaccaacagaatttgaggagtctgttgcgcaggcattctttgatttggagaataccaatcaagatctgaaaagtgaccttaaagatctctatattaattcagcagtccaaattgatgtttctgggagccggaaagctgttgttgtccatgtcccatatagattgaggaaagctttccgcacggttcatgttaagcttgtgagggaactngaaaagaagtcagtggcaggatgtgat

SEQ ID NO: 215600 - DNA, 408 bp, Gossypium hirsutum
aaaataatttccctcccacctgagattgttactgtgcaaaaaccggcgagttcctgcgaatccgacccaagatgcgcgaacatcgacgagaagaaaaggaagaggatgctgtcgaaccgtgaatcagcgaggcgatcgcgtatgaagaaacaaaagctactcgaagatttagttaacgaagtgagtgcattgcagaaaaataacacccagatctgtgaaaagatcaagttcacaacccaacgcttcgtcaaagtggaagcttccaacagtgtcttaagagctcaaataattgaattgaccgagagcttgcagtccttgaactcgatactgcacatggcggaagacggaagcgggtacgacgtcgatatcccggagatcttcgttcttctgatgaagccatggcaactc

SEQ ID NO: 215601 - DNA, 321 bp, Gossypium hirsutum
gcccttttgttatatcgacaaatatcctagtcgcttgccttttcctcatctgctgtctcattgaaaaataatgacgtggagaaccagtgaaccccaaagcatacccactagcggatgctcagttaacaaccacgattttagatcttgttcaacaagctgccaactacaagcagctcaaaaagggagctaatgaagctactaagaccctgaatagaggtatctcggagttcattgtgatggctgctgataccgagccccttgagattctgcctcatcttcctttgcttgctgaagataagaatgttccctacgtatttgttc

SEQ ID NO: 215602 - DNA, 339 bp, Gossypium hirsutum
ggaaacccgcggcgacccacgcgtccgcccacgcgtcctgtgaagggatttcttttgccaccggtgcggcttttacatccgggggtaatatggaggttttgaagagaaccaattgcgatcacgtcactttggcatttttcggggatgggacttgtaacaatggacagttctttgagtgtttgaatatggcagcgttgtggaaattgcccatcgtgtttgttgttgagaacaatttgtgggctattgggatgtctcatttgagggctacttctgatcctcagatttataagaaaggaccggcgttcgggatgccgggtgttcatgtgaatgggatggatg

SEQ ID NO: 215603 - DNA, 390 bp, Gossypium hirsutum
  unsure (1)..(390): unsure at all n locations
gtgactcgtatgaccaggatttttgttgtggcgtacaatgcatccaacaatgagcgggttcgcactcaaactctggtgaagagtgctattgttcaagttgatgctgctccattcaagcagtggtatctccagcactatggcattgacattggtcgcaagaagaaatcagctgcagccaagaaagaaggagaggaaggtgaaactgctactgaggaggtgaagaaaagcaaccatgtattgaggaagctggagaagcgtcaacaaaatcgcgctcttgacccacatattgaggaacaatttggcagtggtcgtctgttggcttgtatctcttcacggcctggtcaatgtggccgtgcagatggttacatcttggnagggcaagagctggag

SEQ ID NO: 215604 - DNA, 265 bp, Gossypium hirsutum
tcggaaacccgggcgccacgcgtccgtcgatttcaagccttttcaccatgttagctaagtggaagaagaagcgtatgaggaggttgaagaggaagagaagagagatgaggcaaagatctaagtagtttaattttatcttaaagcaagcaatttgttctatgtttctttagattttctgttgtttgatggatactttactttaaaaggatttaagttatctttatcgaaaccttttgaatattctggaaacttgttattttctatt

SEQ ID NO: 215605 - DNA, 342 bp, Gossypium hirsutum
gcaaagcgatggggataatgaacagtttcatcaacgatatctttgagaaattggctcaagaagcatcgagattggctaggtataataagaagccgacgattacatctagggagatccaaaccgccgttcgattggttttgcctggtgaattggctaagcatgccgtttctgaaggaacaaaggcggttactaagttcaccagttcttagatttctttttctttttgttttgagattggattctgattagggtttccgatttgggattttagggttttttaaatgatggtttaataatgttcttgagttgtaggctttcggattcaatgatggttgttttgat

SEQ ID NO: 215606 - DNA, 369 bp, Gossypium hirsutum
  unsure (1)..(369): unsure at all n locations
cccacgcgtncgctctcctatactatcttcttccacgttattagcacgttagctagctagggttttttgagccatatagatgggttcggggggaacagcatcactagccctcctctttgcactcaacatcctcttcttttccctggtgagtgcttgtggttcctgcccttcccccaaccccaaacctaaacctaaacctaaaccaaagccaaaccctactccctccccatcttcttctggcaagtgccctagagatgctcttaaactcggtgtatgtgctgatttgctccgtggcttgctcaacgtcaccattggtacccctcctgttcaaccctgctgctctctcatccaaagtcttgcctgatcttg

SEQ ID NO: 215607 - DNA, 351 bp, Gossypium hirsutum
gtcaaaccctacaaaaaatgctgagtgcaccccagaggaagctttctcgattgtaggcgacaacattatatttgcaagtggaagtccatttagagatgttgatcttggaaatcgtcaaattgggcatagcaaccaaggaaacaacatgtatctctttccaggtattggccttggaactcttctgtctggttctaggatcatatcggatggcatgctacaggctgcagcagaacgtctggctgcctacatgacagaagatgaagttctcaagggcatgatattccctccaatatcaaagataagagatataacaaaggaggtagcagcagcttgtgtgaaggaagctataga

SEQ ID NO: 215608 - DNA, 284 bp, Gossypium hirsutum
gtataaccgttttcttgacccagatagttacgatcaatacactagtggtacggcgctggtttgtatctgttcaccgcgctgaacaaccggccgagctgacaggtatatcttggaaggcaaagaactagagttctacatgaagaagatccagagaaggaagggaaagggagctgcctaaagttttgttacttgagatatcatatttcagaccaaatgtcccttttttaaccattctttcatcattttcagtacattttgagattgtgatagtggctacacatttt

SEQ ID NO: 215609 - DNA, 316 bp, Gossypium hirsutum
  unsure (1)..(316): unsure at all n locations
gaatggatncggcccgcaagtgtgcatttttgaagatgttggcgatcggtgctaaccctccattcaaggtgaaaggactatggcttttccgtgggcaagagattcctcaatttgtgattgacgagtgctatgacatggaactctacgagtggaagaaggttgacctgtcagatgcagcccagaaggaacgggtgaatcagatgattgaagactgcgagccatttgaaggagagcctctcttggatgccaagtgctttaagtgatagaatatgttcttaattttacttnttttattatttcttggtaccttttttgc

SEQ ID NO: 215610 - DNA, 395 bp, Gossypium hirsutum
ctaatggactattatgggggcattgttatcgggaaccgaccgagaacccgaaccgggggactggctgacccctggatgctcgattcattagggtcggggatggatggaaccaatcagaagtgcaaatcgcgcaagcgaagccgggaaacggaccgcagcgcaacgactaggactcgtgtcggaggagctttgagcgtgagctaccactcatgctgcggcaaggacccgcaactctcgaaggggccaccaaccgcccgaatcactgtagcaaaccctccctttactcaatggatagcgcttatcctctttcaatcaacaaaatgagaaataagaaaaaaagaaaagatagaggtctttattgaggaggctttgcacctgaaataggactaatgaaa

SEQ ID NO: 215611 - DNA, 407 bp, Gossypium hirsutum
gtttgaagttagttccactccttatatggtgatgagacagtagctgcagaaggcggtggtgtcccgtacgtgtgcgtttgcaccgaaaccataaagaagaggagcttgccggagagttcagtgtactttagagaagaagaggtgctagacatgcaggatgttacggttctttggctacctggcggtgttacaagttatgtggatgtaagtaacgatggcactcttactatcggagtcggatggtactcagatgagggaatcaaccttgttatggagcgagattacggcatcgatgggaagttgaaggaagttagatggaaatcagaggtcaagagactgtggtctcatccagtttctttgtaaatttattactttttgaatgctaacttcacaacagcaaatgctta

SEQ ID NO: 215612 - DNA, 365 bp, Gossypium hirsutum
  unsure (1)..(365): unsure at all n locations
gcgtacgtccacgcgtccgttttgtgctcgtggctcatgctcttcacccacccctaaaccaaggcgcgaatccaaaacccaacagcgggcacccctactgcatccgcacgaggcangtgccctagagatgccctcaaattaggtgtatgtgccaatgtgcttaacttagtcaatgtcaccgttggttcacctccagtgatgccatgctgttcccttctcaatggccttgtcgacctcgaagctgctgcttgcctttgtactgctatcagagctaacatcttangcatcaaccttaacatcccagtttctcttagcttgctcctcaacgtttgttcaaggaatgttccaactggctttccaatgct

SEQ ID NO: 215613 - DNA, 409 bp, Gossypium hirsutum
  unsure (1)..(409): unsure at all n locations
cacgcgtccgcccacgcgttcgttcacgcgtttttttacgcgtccgctgaaggatctgacactggaggaaagtatatttagctgtaacagggaaaagcgaaaaggctgctttctaacattctattttgaaaagagagagggaggatggaaggagacgatgtagtcatggcagcgccggaatccactgaagctgacctggatgacatgaaaagaaggttaaaagagatggaggatgaagccgctgctcttcgtgagatgcaagctaaggtcgagaaggagatgggttccgtacaagatcctgcttctgctgctacatctcangctaatcgagaggaagtagattcccgatcaaatcttgttggcaatgtggattattcatgtacactcgangaagttcaacagcattttc

SEQ ID NO: 215614 - DNA, 393 bp, Gossypium hirsutum
gcaattcctcaagagctgccacattttcgtcggggatggcaacgtgggcaccctgggtgaggtacacgtggtgtccggcctcccagcggcatccagcgtggagaagcttgagatccttgacgatgaacgtcatgtgcttagctttagcgtggttggaggtgatcatcggttgaccaattacaggtctgtcacaaccctacaccattctcccaagggtaacgggacacttgtcgttgaatcattcgtcgtagatataccagtcggaaacagtagagaagatacgtgcatttttgtggataccattgtacgttgcaaccttcaatctttggctcgaatggcagaaaatatggcaagaacagaataatcatcatcatcatccgcataatgtataaa

SEQ ID NO: 215615 - DNA, 149 bp, Gossypium hirsutum
catgtctatccttggttcttataaggcgcctgtataaagaaagggctggtttttgttccgcaagaaaatggacaggtacaagttaattaaggaagttggagatggaacatttgggagggtgtggcgagctattcataagcagtctgggg

SEQ ID NO: 215616 - DNA, 372 bp, Gossypium hirsutum
  unsure (1)..(372): unsure at all n locations
cccacgcgtccgtccacgcgtccggtactaagaaaaaggacacgaacttagcagaagaagatgttgatttgagtcctgctgtatcaactacacctgtcactgcacctccggttactgaaaccccatcacctgtatcatccatcacacagcctttgaagttgcctgaaccgattccggagagccaacagcgtgaactttttaagtatatattggaagagaagaggaaagtgaaaccaaaagatcccgaggagaagaagcggctggacgaagagaaagctatactcaaacaatttatccgagctaaatccataccacagttatgacttgataatccattgttgaaactngnatatattaccttttgttgttggt

SEQ ID NO: 215617 - DNA, 364 bp, Gossypium hirsutum
gccacgcgtccgtttagaaggaatttttattgaccaacaacgtctcatattcgccggaagacagctcgaagatggcggtaccttggctgactacaacatccagaaagaatcaacacttcatcttgttctgaggttgagaggtggaattattgagccttctttgatggctttggctcgcaaatacaaccaagacaagatgatttgccgcaagtgttatgctcgtctgcatccaagagccgtgaactgccgcaagaagaagtgtggtcacagcaatcagttgaggccgaaaaagaagatcaagtagacactgactagtgttatactgtctgctttaaaaagaattgaatgtcagactaggaaaata

SEQ ID NO: 215618 - DNA, 271 bp, Gossypium hirsutum
  unsure (1)..(271): unsure at all n locations
gacccagcgtccggatggtcngtttttaccaccggtttgaacgncacagatgccccgaaatgcccgcccatttatacaagagtggggtggaaacaaaangcatccatgaaactacatacaattcaataatgaagtgtgatgtggatatcaggaaggacttgtatggtaacattgtccttagtggtggtacaaccatgttcccgggtattgcggacagaatgagcaaggagctttctgcactccctcctagcagcatgaagatcaaggttgt

SEQ ID NO: 215619 - DNA, 387 bp, Gossypium hirsutum
gaaacccgcggcgacccacgcgtccggtcttttataccttgggaagctggtaatagcggaggcgactgcggaggtctcaggggcgtttaatgaaaaaatgggggaatattgtgatatgacactactttcttgtgcttatgctggaactgggaatgttctgaaggcaaaaccttcttggtcattgtgctcagcatcttgagaagggcgaaacccaccaaggtccagctgtgcttggtatcgccatggtagcaatggctgaagaattgggtcttgatatgtcaattcgttcactagagcatcttttgcagtatggtgagcagaaaatccgtcgtgcaagttctttggctcttggtcttctttggatatcaaacccaaaggttaatgtta

SEQ ID NO: 215620 - DNA, 365 bp, Gossypium hirsutum
tatcgttctatcttttaacgttgtttaacacccgcgtgagcttcctaagctgcgcagggtttacatcatgtcgggggggatttacaacgtcaattctcctctcttccgctctttcctcagccagaagggaggctcctccgacaagagaaaaatggaggagcagaagcctaaggaacagagacccaaagcaaatgagaataagcctgtcatgacagagtaacagctgcttttgtttagtatgaatggcaagttggtggatggttgttcttaaaactctgatatgttcgagattggaaatgcttgttgatgtattcaaatactatcacaacgatttttcttctttgaaatggaatgatattcaactt

SEQ ID NO: 215621 - DNA, 422 bp, Gossypium hirsutum
  unsure (1)..(422): unsure at all n locations
aggggcgacccacgcgtncgcccacgcgtccggtgttcctaagtgtcttgttactggaaagcgaattcagggtatgccgcacttgagacctgctgggtagaagcggtctcgattgcctaggaaccgtaggacggtgaatcgtgcctatggtggtgttttgtctgggagtgctgttagagaaaggataattcgggccttcttagtcgaagagcaaaagattgtgaagaaggttctgaaaatccagaagactaaggaaaagcaatcatcaaagagctaggaattttaaatgctgatgaagctgaattgtgtttggcttgttagatttatctgagagaaatttttgtttgttattatggtgaattgatgaaatgtggaactgagtttgagtacttttctcattttgtaggttcatactgatatta

SEQ ID NO: 215622 - DNA, 436 bp, Gossypium hirsutum
aaaacccgcggcgacccacgcgtccgcgcatcttgcagtatttggctactatacagtctgaaagacccacagacaaaaccgggtttgatgcactaaacaagcgactttcaaaagttaattcagggattgagggtgccactgagaaaattttgatggaggaggagaaattcaagaagtggagaactgaaaacattcgaaggaaacacaactacatacccttcttgttcaacttccttaaaattcttgctgaaaagaagcaactgaaaccccttattgagaaagctaagcagaagaatagcagctctaggtgaagtgtatcttgttttgtttttattttcttgggttgacaagatgcttaatgcaaattcaaagaaaactggagtcacgtaaaggacccttttatgataaaatcaactctgctgttttcaaatgactt

SEQ ID NO: 215623 - DNA, 230 bp, Gossypium hirsutum
  unsure (1)..(230): unsure at all n locations
gcatgagccacacagcnttttatagaactgatgctgtttatactacangaaacaccactgctgctattggaaagggtttcgccattggttcagcagcccttgtgtcccttgccctctttggtgcctttgtgagccgtgctgctatttcaacagttgatgtattgacccctaaagtttttattgggttgcttgtcggggcaatgcttccttactggttctttgttatgacc

SEQ ID NO: 215624 - DNA, 368 bp, Gossypium hirsutum
  unsure (1)..(368): unsure at all n locations
cacgcgtacgggagagctgaggtaatctattgagtcttctctcatgaatcctgagcttttccttagaggaggaattaaacctgccaagggtgtcctcctctatgggcctcctggtactggcaagacattgttagccagagcaatagcaagtaatattgatgccaacttcttaaaggttgtttcaagtgcaataattgacaaatacataggagaaagtgcaagactgataagagaaatgtttggatatgcacgtgatcaccaaccttgcattatctntatggatgagattgatgctattggtggacgccgtttcagtgagggaacaagtgctgaccgtgaaatacaaagaacactaatggagttactta

SEQ ID NO: 215625 - DNA, 315 bp, Gossypium hirsutum
aacccgcggcgacccacgcgtccggttttgataatagttacccgtctttatcttgcttcccacaaggtatatggcgggggagctaggatttccaccttacgagagctattcccgaagatggaaaacaaaaagagccttgcctcttcagaggaaagggtccttataaaaggaaaagcttcattgttagcagcagttgattactatgttggtatgcatagtgatatctttgtctcggcctctcctgggaatatgcacaatgcgttggttggacaccgaactttcgagaacatgaagaccataagaccaaacatgcca

SEQ ID NO: 215626 - DNA, 347 bp, Gossypium hirsutum
cccacgcgtccgcccacgcgtccgcccacgcgtccgcaagattgcagcagctcgtggaatggggggcatgtaatcaagacactacactttcagtggttcaactctaattaagtggactgttatttcaggacatagaccctaaactgacgggtacgtactggctgtatttagatttagactaatcattatttatgttgtgcttgtgattctgtgatgtactaaaagttttaaacctcatgaagctacctttgaagcttccgcttggtgtactgattgtagcattgccatgtcctgattggataatgttcttgataataacttgcaattatataaaaccaatgttgtgc

SEQ ID NO: 215627 - DNA, 233 bp, Gossypium hirsutum
  unsure (1)..(233): unsure at all n locations
acaggangatgcgtgggacatgaagcacggcaggctgataaaggacttcacgctccctaagctgactgttacgctgaagtacttggggggctccacgacgtgctttgagagggccagtgagccggtgagaaaactgagaacataccccgcttcctttgcctgtgaatagtgtaaagctcgcccaggatggacaagatgcccagcgtagtttacttgcattgaccctcgggtga

SEQ ID NO: 215628 - DNA, 409 bp, Gossypium hirsutum
  unsure (1)..(409): unsure at all n locations
cccaatggggggtgcagccaactgaggcaagggtttgccagtcacaaagccataagttccgcggtgcatgtgtgagtagccacaactgtgcgatggtgtgcagggacgaaggtttctccggcggcagatgtcgaggattccgtcgccgctgcttctgcactaagctttgctaatgcaagcttgcccttagttcatattttaaggatttttcttgagtaaaagacctttatgttttttcgtgcatgcatgtcaatgtttcaataaggtatctcctaattacttctgttttgggagatcattttcgtctctttttcatgcctttaagggggttctctntgtgttctttgctgtactcgaactgcatttgcagctactttttcatctataagctccatcaaaatctgttatc

SEQ ID NO: 215629 - DNA, 359 bp, Gossypium hirsutum
  unsure (1)..(359): unsure at all n locations
tctctctactcaactccacgcaaatggccctctttctttgcgtcttattccttctcctttcgctctgcttctgcttgtgatcgctgcctgcaccagtccaaggctgcttatttctccaaagcctctgctctttcagcgggagcttgtggatacggntccttggctttaggtttaagtggtggacaccttgctgctggtgtttcttctctttacaaagatggagccggttgcggtgcctgcttccagataaggtgcaagaattcaactctgtgcagcagtgaagggactaggatcacactaactgatctcaatcataataatgaaacggaatttgttcttagcagcagagcattcatggc

SEQ ID NO: 215630 - DNA, 420 bp, Gossypium hirsutum
cccacgcgtccggaaattccaagagataaaccagcaggggagagtgataatagaagcagcgggttatctggggtagtcaataaggaagctaagagtagtgggactaagaatctggtgtttttcgggaaggcgtcgatggcttttgatctggaggatttgttaagggcatctgctgaggtatcggggaagggaacattcgggaccacgtataaagccactttggaaatgggagtggttgtcgcagtgaaaaggttaaaggatgtgacagcgtccgaaaaggaattcaaggagaagatggaggtagttggctccatggatcaccagaacttggtcccattaagggcctactactttagtgcagatgagaaacttctagtttatgattacatgcctgagggcagcttgtcttcacttttacat

SEQ ID NO: 215631 - DNA, 432 bp, Gossypium hirsutum
ctaagagacgcccaaaccaggttaaaaggacttgttacgctcagtccagccagattagacggatacgccgaaagatgagggaaataatgactgcccaggcaacatcttgtgatttgaaggaactggttcaaaagttcatccctgagatgattggaaaagaaatcgagaaggcaacatctagcatctatcctttgcagaatgtgtttattcgtaaggtcaaaatcttgaaggctcccaagtttgatctcgggaagttgatggaggttcatggtgactactcagaggatgttggtgtgaaactagaaaagcctgctgatgagacaatggctgaggctcctgcagaagttgttggagcttgaacgaaaaacaatagtccatgaatgtctttttttttttatgcttctaggaagttttgctgatcattttaatttt

SEQ ID NO: 215632 - DNA, 430 bp, Gossypium hirsutum
ccgggctcacagaacacaagtatccagtctagtcctccaatcaaacgccctttttgttaactgtctcaactttatccattggccttgtttttagcaaaacaatgtctactttagttcctgatttcccaaatctttcttaatttttcttccgattttcattttcgggttttacaaatagatttcgtcttccaattttccctagaaaaagaaataaaaaaatgatgccaagtgaacagcaaagtcatgatcaacatcgggatccgttatcgagtgttatttacgagctgtcggcgctagtactgaatctcctacgatcgccaccgacgccggttccgactaagatatcggcggtgggattcgcttggctgatgctagggatatcggtttctttaatgctttgtggatcagtgactttctttttagggttcga

SEQ ID NO: 215633 - DNA, 303 bp, Gossypium hirsutum
agaacactgaattcctggcgtctcacccgagggtcaagcaagtaaactacgctgggcttactgaccatcctgggcgagctttacactattgggaggcatagggagcgggctctgttctcagttttctcaccggctcactggccctgtcaaagcacgtcgtggagaccaccaagtacttcagcgtaacagtcagcttcgggagcgtgaagtccctcatcagcctgccgtgcttcatgtcccatgcatcaatccctgcctcggtccgcgaggagcgtggcctaaccgactacctcgtccggatat

SEQ ID NO: 215634 - DNA, 341 bp, Gossypium hirsutum
  unsure (1)..(341): unsure at all n locations
cccacgcgtccgnccacgcgttcgcccacgttttcgaagaaccagtatctgtgtgggaagatcgatatgaacattaaactggtcccaggcaactctgctggcactgttaccacttattatcttcgttcggaagggtcgacatgggatgaaatcgacttcgagttcttggggaacctaagcggagacccatacatagtccacaccaatgtatatacacaaggcaaaggtgacaaagagcaacagctctacctttggttcgatcccaccaaagactttcacacctacttccttctttggaaccctcaacgtattatcttctcttgttgatgggactccgatca

SEQ ID NO: 215635 - DNA, 451 bp, Gossypium hirsutum
cacaatccaagataaggaacgcatacctgtataccagcagcgtttgatcttcgccggcagggagctcgaaaacggccgcgccttggccgatttcaacatccaaaaggagtcaactcttcacctggaactccctatgcgcggtgggatgcaaatctttacgaaaaccttgactggcaagacaatcactctcgacgtatacagctccgacacgatcgacaacgttaaagcgaacatccaagacaaggaaggcattcccccagaccaataacctctcatctttgccgaaaaacaactacgaaacggccgtacctttgccgactacaacatccagaaggagtcaactctccaccttgtacttcgtttgcgcggcgggatgcaaatcttcgttaagacgcttaccggaaagacgatcactctcgaggtcgagagctctgacacgatcgacaacgtg

SEQ ID NO: 215636 - DNA, 318 bp, Gossypium hirsutum
gcgggcatacaaaaaatccaaccttggaaatgaatggaagaagccatttgctggtgcttaccatgccaaaagcatctggccctgaaaagataagaattgaagctaaccagcgcgaactctgttaataagaagtgtgctagagatcaattgatcaacaatgggaagaagattgcggcattcgcaccaaatgatggttgcttaaactacattgaacagaatgatgaggagttgatggccgcaattggacaaaagggtcatgctgtgagcgatatacatggtgttaggttcaaggttgtgaacgaatctgacgtttaactg

SEQ ID NO: 215637 - DNA, 447 bp, Gossypium hirsutum
gagaaatcgtatgaagaagctcgaagattcgtatgtgccgtcttttgagcccggatcgcctatatccggctatggaggggccaaagtcgtggattcgactcatccggaatacaaaaatggcgatctcgtgtgggggacgaccggttgggaagagtattctctcttaacggcgcctggtcttttgttcaaaattcaacacacagatttgcctcttacctactatactggacttcttggtatggctggtatgactgcttatactggtttttacgaaatctgcaccccgaagaaaggggaatatgtctatgtatcggctgcatccggagcacttggtcagctttgttgggcaaatttgcgaaattgttaggctgttatgttgttggaagtgccggaagcaaagagaaaattgatctgctgaagaataagtttgggttcgatgaggcattc

SEQ ID NO: 215638 - DNA, 399 bp, Gossypium hirsutum
  unsure (1)..(399): unsure at all n locations
acagangaggcagggggtgatgcgtgggacatgaancacggcaggctgattagggactttacgctcccgaagctgactggtactcttagatacttggtggtctccacgacgttctttgagagggccagtgagccggttagaaaactgagaacagagcccgctccctttgcctgggaatagtgtaaagctcgcccaggatggtcaggaagcccagcgtagtttacttgcttgaccctcgggtgagacgccaggaattcagcaatcttctgggcattagcctgttgtgtcttcacccgcagagacatggttttatttcccttaaaccaaacccagcagtaaaatgggcccagaccttacctttaaccattttgcaaaaaccctacctttttatccaaactt

SEQ ID NO: 215639 - DNA, 487 bp, Gossypium hirsutum
gacccccaattgaagcactcttgagcagcaacagaggcttcattcagatcacatatcagtagccatggtgaagtattcgaaggaacccgataatcccaccaaatcctgcaaggcaaggggctctgatcttagggttcatttcaagaacacaagagagacagctttcgccattagaaagttgccattggtaaaggctaaaaggtatttggaggatgttattgcccacaagcaagccataccgttccgacgcttttgtggtggtgttggacgtacggcacaagcaaagaacaggcattctaatggacaaggtcgctggcctgtaaaatcggctaagttcattctagatttgctgaagaatgctgagagtaatgccgaggttaagggtttagacgtcgatgcactccatatttctcacatccaggttaaccaggcccaaaaacaaaggcgtcgtacttaccgagctcatggaagaatcaacccttacatg

SEQ ID NO: 215640 - DNA, 479 bp, Gossypium hirsutum
gcgagaaacccttgttattaatcggcggaagcagatagcctctagccatgactttcaagcgttggaatggtggccgcaacaagcatggccgcggccatgtcaaattcatccgatgttctaactgtggcaaatgctgccccaaggataagtcaatctagaggttctttgtgaggaacatagaggaacaagctgctgatagagatgtgcaagaagcctgcgtttatgacacttatactttgcctaagctgtatgttaagatgcaatactgtgtctcgtgtgcgatccactcacacgttgagagagttcgatcccgcaccgataggaagaaacgtgatccacccgcccgcttcatcagacgcagggatgatatgccaaaggctgatcagtctggtcaagcaccacgtacaggtgttgcagttactgctcgtgcttaacgactgtgaaagctcttaagataaatattctatatgcgtatttag

SEQ ID NO: 215641 - DNA, 438 bp, Gossypium hirsutum
ctttggtgcagagcagtcagatgatgactgttgtaactcctgcgaagaggttcgtgacgcatatcgacgaaaagggtgggcaatgactaatgcatacttgattgaccagcgcaaaagagaaggctttttcgaaaggataaaagagcaggacggtgaaggatgcaatgttcaaggatctcttgaagctaatagggtatgctggaaattctcattttgcacctggcaaaacttttcatcagccgaacattatctttgatgacttgatgtctgaccataaggacagttacaatataagtcacagaatcaatcgggtagcttttggtgaatactacccgggtgtggtaaatcctcttgacgggggacattggacccatgaaacctcaaatgggatgtaccagtacttcataatgctgtacccacaatatatactgacattag

SEQ ID NO: 215642 - DNA, 479 bp, Gossypium hirsutum
cccacgcgtccgcggacgcgtccgagatttgcagagtggaatcctccatgcagaggagaaagactataaaactgcttatagttatttcttcgaagcatttgaagctttcaatgctcttgaagatcctcgagctgtctttagcctcaagtatatgctgttgtgcaaaataatggtgagccaggctgatgatgttgctggtataatatcatcaaaagctgggcttcaatacgtggggcctgaacttgatgccatgaaagctgtcgctgatgcccatgcaaaacgttccctgaagcttttcgagattgctcttcgtgatttcaaggctcaactagaggaagatcctattgtccacaggcacctttcttccctctatgacactctactggagcagaatctctgcagattgattgagccattctcaagggttgagatcgctcatattgccgaactcattgaactgcctgtagaccatgtggaga

SEQ ID NO: 215643 - DNA, 464 bp, Gossypium hirsutum
aaagcgtttgtcttagatctcagaagatggcccgtaccaagcaaactgcgcgtaagtcgactggtgggaaggctccaaggaagcaacttgctaccaaggctgcccgtaaatctgccccaaccaccggtggtgtgaagaagcctcatcgctaccgtcctggaactgttgctcttcgtgaaattcgaaagtaccagaagagtactgagcttcttatcaggaaattgcctttccagaggcttgttcgtgaaattgcccaggacttcaagactgatttgcgtttccagagccatgccgttcttgctcttcaggaagctgcagaagcataccttgtgggtctctttgaagacaccaacctgtgtgcgatccacgccaagcgtgttactataatgcccaaggacatccagttggctcgtaggatcaggggcgagcgtgcttaatttccaagtgttttgatcacttaactt

SEQ ID NO: 215644 - DNA, 341 bp, Gossypium hirsutum
cccacgcgtccgcccagaaatgcaaggcttgtgaaaaaactgtttacttggttgaccagcttactgctgacaacaaagtttatcataaagcttgcttcaggtgccaccattgcaagggtacccttaagctaagtaattatagctcctttgagggtgtcttgtattgcaagcctcactttgatcaactatttaagatgactggcagcttggataaaagttttgaaggaactcctaaaaccgttagggtagaccgatcagctgaccaggtcaccaacagcaaattttcgggcttgtttgccggaactcaagagaaatgtgttgcttgcaagaaactgtgtacc

SEQ ID NO: 215645 - DNA, 471 bp, Gossypium hirsutum
cccacgcgtccgcccacgcgtccggtgcgagcagccgcagccagcaagcagcagtagcaacagcaggagcggaagaatgtctcacaggaaatttgagcacccaaggcatggttcccttggatttcttccaaggaagcgagcctctcgtcacagaggaaaagtgaaggcattcccaaaggatgaccctaccaaaccttgcaagctcactgcctttctggggtacaaggctggtatgacacacattgtcagagaggtcgaaaaacccggatctaagcttcacaagaaggagacatgtgaagctgttacaatcattgaaacccctcctatggtgattgttggggtggttggatatgtgaagacaccacgtggccttcgctccttgaacaccgtctgggctcagcatctgagtgaggaagtcaagcgccggttctacaagcactggtgcaagtccaagaagagggctttgcaagt

SEQ ID NO: 215646 - DNA, 409 bp, Gossypium hirsutum
  unsure (1)..(409): unsure at all n locations
ccgggaccaacgcagtcctcccacccatgctatcacaaaaacaatgtttgtaaaaaaactttatacttggatgaccataatggtggtgacaacaaagtgcatcataaaacttgcttcangtaccaccattgcaagggtacccttaagctaagaaattatagctcctctaaaggtgtcttgtattgcaagcctcactttgatcaactatttactatgactagcagcttggataaaaatttagaaggaactcctaaaaccgttaaggtataccgatcaactgaccaagtcaccaacaacaaattttcgggcttgtttgccggaactcatgagaaatgtgttgcttgcaagaaaactgtgtacccaaatgaaaaagtggctggtgatggcacttcatatcacaaagcttgtt

SEQ ID NO: 215647 - DNA, 467 bp, Gossypium hirsutum
  unsure (1)..(467): unsure at all n locations
atttccttcttttcttgttttacacattcctcgaaactagtcttgtgactttggccttatggggtcatttcatagcattctttagtgatgtataaattccaggaacccctggaaccttggctaccactttcctttcctttgttttgaatctggcatttgcattaagtgtcttgggctttttgatcatgcacatatctttggtggccgctaatacgactactattgaggcctatgagaagaaaaccactccaaaatggcgttatgaccttggtcggaagaaaaattttgaacaggtgtttggtacagacaagcgatactggtttattccagcttattcggatgaggatttacgacggatgccagcgctgctgggccttgaatatccatcaaagcctgattttgattcgcaggagttctaaaaggttgatataataggaacaataaanacctcctccgtgccaaacaat

SEQ ID NO: 215648 - DNA, 490 bp, Gossypium hirsutum
cgtacgccacgcgtccggttgatttggatgctctccttgatatgtccactgatgagcttgtcaatgtcgttcctgcccgtgctcgcagaaggttccagaggggtctcaagagaaagcccatggctttgatcaagaaacttcgcaaggcgaaaagggaggctccaccaggtgagaagccagaaccagtcagaacccacctccgaaatatgatcatcgtacccgaaatgattggtagcattatcggtgtgtacaatggcaagacattcaatcaggttgagatcaagcccgaaatgatcagccattaccttgctgagttctctatttcgtacaagccagttaagcacgggagacccggtatcggtgctactcattcttcaaggttcatccctctgaagtgaagccctttcatgctgcttggagcctcaatttggggtttactatttgagagttaaattttgtttgttgcactcctagtaatgaaaatttcaca

SEQ ID NO: 215649 - DNA, 489 bp, Gossypium hirsutum
ctgcgaagtttacctttatccatgggcaatgagtttcgatttattgggggtacccgtattcatagggtcttttattttcgtgcttatcctaattgttggtttaatttatgcatggcgaaaaggagcattggaatggtcttagttcctgaatattcagataataaaaagaaagaaaaaagtcaaaataataataacattgagtatgaattccatcgaatttcccttacttgatcgaacaacccaaaattcagttatttcaactacattaaatgatctttcaaattggtcaagactctccagtttatggccgcttctttatggtaccagttgttgctttattgaatttgcttcattaataggctcacgcttcgactttgatcgttatgggctggtaccaagatcgagtcctagacaggcagacctaattttaacagctggaacagtaacaatgaaaatggcgccctctttagtgagattatatgaacaaat

SEQ ID NO: 215650 - DNA, 454 bp, Gossypium hirsutum
attctgcatcatttcttattagtgcatttacaaccttgctgatgctgccctgtataggtgtggccatgaaactcatggatatatcaggcaggaggcggctgctactcaccacgatcccggtgcttatagtgtcactgatcattctagtttttagtgaacttgtggatttgggcacggttgtgaatgctgccatctcaactgcatgtgttattgtttacttctgctgctttgtgatgggctatggaccaataccaaatatcctctgctctgagatctttccaacaagggtccgggggctttgtattgcaatctgtgctttggtttattggatcggagacatcattgttacttacacactgccagtgatgctgagttctataggcctagcgggcatcttcgggatatatgctgttgtatgtctgatatcgtgggtgtttgtgttcttgaaagtacc

SEQ ID NO: 215651 - DNA, 470 bp, Gossypium hirsutum
cggtttttctttatccatgggcaatgagtttcgatgtattgggggtacccgtattcatagaagctttcattttcgtgcttatcctaattgttggtttagtttatgcatggcgaaaaggagcattggaatggtcttagttcctgaatattcagataataaaaagaaagaaaaaagtcaaaataataataacattgagtatgaattccatcgaatttcccttacttgatcgaacaacccaaaattcagttatttcaactacattaaatgatctttcaaattggtcaagactctccagtttatggccgcttctttatggtaccagttgttgctttattgaatttgcttcattaataggctcacgcttcgactttgatcgttatgggctggtaccaagatcgagtcctagacaggcagacctaattttaacagctggaacagtaacaatgaaaatggcgccctctttagtgaga

SEQ ID NO: 215652 - DNA, 454 bp, Gossypium hirsutum
cccacgcgtccgaaaacatttcagagtaattacaatcaattgaaaccttccagtcaggaacggtctccatcagcaaagccggtgcctacaaaggggagagaatcaaggctttccactttgacgactccgcaaaaggagaacggagggtcttctaaagttagtagtatggagaaaagaatgctaaggctgctccatcttattctggcttgaaaagtgatgaaagacctgagagaagaaaggagctctccaagaaactggaaggaaaatccaatggaagggaagccgaaaggaaaaatctccagacaaaatcaaaggataacagagacgcagagatcaaaaaattaaggcagagccttaattttaaagctacaccactgcctggtttttatcatggacagagaacatcaaaaagtcctctcgataagataagttccaagagtgacatccattggca

SEQ ID NO: 215653 - DNA, 490 bp, Gossypium hirsutum
ggcgaagatgggtttttcgtcgacggtgatgccaccgtcgtgttccaggacgacgaagcgagtgatgatagggtcaccgggttataccgaccctcattacttgagaaccgggttggcttccaaaaagaacgatgtttacagcttgggtgttattattttagagcttgttactgggatggaagctttttgtcccgaaaggggacaattattgacgtcgataatggcgcccaatttaaaagccattagtgaagttgggacggcggtcgaagtggcggagctggtggatccacgtttgggtggagaatatgatttggatgaagctaaggctatggtttcaattgctgggctttgccttcaccagtcgccgactgttaggccatcagcttcgcaaatcatgcaaataatgaaggagaaaatgggttccattgacttactcttgtcgcccgccaaagattgccgccataaataactaattgatggtgacaaacat

SEQ ID NO: 215654 - DNA, 503 bp, Gossypium hirsutum
gtcgagcgcgcgtacgcggacgcgtgggcgacgagccgtttctcacttcagcgaccagacagtcagagatcctccggatgaaacaacaatgacaaagagaaccaagaaggctggaattgttggaaaatatggtactcgttatggtgccagtttgaggaagcaaattaagaagatggaggttagtcaacacagcaagtacttctgtgagttctgtggaaagtatgcggtggagagaaaagctgtcggtatctggggatgcaaggattgcgggaaagtcaaagcaggcggtgcttatactttgaacactgctagcgctgtgactgtgaggagtaccatcaggaggctgagggagcaaactgagagctgagccaccactggtgattgatttatattctactttcataggatgttgttttgcatgttttagctatgagacttaattgagacctttttttgacaatgatgttcgtgctatgtgttctcatttttttatctgagtctgg

SEQ ID NO: 215655 - DNA, 463 bp, Gossypium hirsutum
gccatactcatttcttccttcaatggcagcagaaaagttaagaactgcagctgaccagattaaaagagtccttggtgactatgatgctatccatgtccgccgaggtgataaaataaaaacaaggaaggataggtatggggttaaaaggagcctacatcctcatttggatagggacacccgtgcagaatttatccttcacagaattcagaagtgggtaccatctggacgaactctttttattgcttcaaatgagaggacacctggatttttttcgccgctttctgtcaggtacaaattggcttattcatcaaattatagtcatattttggatcctttgattcataacaattaccagttattcatgattgagaggcttatcttgatgggagccaaaacattcattaagactttcaaggaagatgatacagatctcagtctaaccgatgacccaaagaagaacact

SEQ ID NO: 215656 - DNA, 422 bp, Gossypium hirsutum
  unsure (1)..(422): unsure at all n locations
ggacaatagatatctcttgtccttccatgatggactggttcttcggtggtttacagttccagttagagcaccatttgttccccaggttgccgcggtgccatttgaggaaggtttcccctctggtgagggaactctgcaagaagcacaaattgccttaccggagtctgtctttctgggaggcgaataaatcaacgattaggactctgaggactgccgccttgcaagctcgagacttaactaaccctgccccaaagaatttgttgtgggaagcttttaatacccacggctgagttaaaattttttttggcttggcgccggcctagatttactgctttttagaccgtcagattttaaattgctctgcatttcaatacggtgttcagttattctatcttaattntatatgatttttgtttttgttg

SEQ ID NO: 215657 - DNA, 479 bp, Gossypium hirsutum
cccacgcgtccgagagtatgaaaatagtaattgagaggatgaagctaaagaaagtatcgttgagatggagacagttgtatgaggcaaaattgaaggatgttcaggaggccgagaacaaagcaattgaccggcttaaacaattatacaagaaagaagatgctcgaaaacaaagtcggcaggttcagctttgcacaaaggttccaccttcaagcaaaagaagcttttttgctggaagtggacctggttacaatatgtccaatgttaagagcaacataatgaagaaagcgaagatagatcttatgaagagccaggaagtgaaaaacctcgcagccatgaagaaaaaagcagtgcaaagtcatcatagtggtaccaccataacgaaatcaagtggattttgcggaaagaattcagcttcgacatcaaagcatagcaaaccattagagaggagattctagaagaagcagtttgtaaaaatttaa

SEQ ID NO: 215658 - DNA, 469 bp, Gossypium hirsutum
  unsure (1)..(469): unsure at all n locations
accacgcgtccgaatcaattgagctccctctaatgaaccccgagcttttccttagagttgggggtaaacctcccaagggtgtcctcctttatggacctcctggtactggcaagacattattagccagagcaatagcaagcaatattgatgctaactttttaaaggtcgtttcaagtgcaataattgacaaatacattggagaaagtgcgaggctgataagagaaatgtttggatatgctcgtgatcaccaaccttgcatcatctttatggatgagattgatgcaatcggtggacgccgatttagtgaaggaacaagcgctgaccgtcaaatacagagaactctgatggagttacttaatcagcttgatggatttgatcagcttggaaaggttaaaatgatcatggctacaaaccgacctgatgtacttgaccctgcacttcttcgtcctgngcggctatatagaaaaat

SEQ ID NO: 215659 - DNA, 119 bp, Gossypium hirsutum
caaactataatggtctagtgtggttacgaggttttcctgtttttctatgtattaatgcgagggatatgctatccaagaattcgaagtctacttaaaaccatatacaagaggcttttttt

SEQ ID NO: 215660 - DNA, 463 bp, Gossypium hirsutum
ggccaaggcagtcaaaaaccaggtgacagacaactactacaggccggatttaacaaaagctggcctagcaaggttgagtgctgtgaaccgaagtctgaaggttgccaaatccggtgtcaagaagaggaacagacaagcatcgaggatccatggcaggaagtgagcttttttacacaacttcacaatcattttgctgcaattttcgttgtttccgatactttttcatccttgtttcgtggttttagcttgttggtgtattttataactagattttgaaacaaaaaaaaagtgagaatcatggtggtttcgagttttgtttttcggactataatatcctaagtttgataaacaaaactcgaaaccaccatgattctcactttttcatccttgtttcgaggatttagcttgttggtgtattttataactagattttgaaacaaaaaaaagtgagaatcatggtggt

SEQ ID NO: 215661 - DNA, 510 bp, Gossypium hirsutum
gggtcggccgcgcgtgcgcccacgcgtccgggtgggatactggcctgcctttctttttagtcacttgagaagccatgggaggtggtacaatttggaggagaaattgtgaacactagatcctcaggattccacacatcaacacaaatgggcagtggtcattttgcagaagaaggctttagaaaagcagcttatttcaggaacttactgacagttgattgggacaataatttggtcccattgacaaacattcatttaaaggctgatcgtgccaattgttacgacatcagacaaggaagaaaccgtgtttggggaacttacttttattatggaggccctggaaggaatgtaagatgtccttaactatttcatcttttaaccctttaattttttttctctctttttcttttaccccaatttttctgtcccaggtcttaataaggtttgggttattcttagatttttttttttttctttgcttttggcctcgcaagtaatgcattttttggtccc

SEQ ID NO: 215662 - DNA, 491 bp, Gossypium hirsutum
acttgccttatcttgtaaaagtatttgaggggcattcagtgaaagttgtaccaattttggggggtgctcttagtgcggaaaatgaagcaatgtacggaaagttgttggccaaatatatagatgatcctcaaaatttcttctcagtatcatcagatttttgtcactggggttctcggttcaactacatacactatgacaagaagtatggggccatacataaatcaatagaagccttagacaagatgggcatggatataatagaaacaggagatgcagtcgccttcaaggaatatctgtcagagtatgacaacactatctgtggacgccatccaatcagtgttttccttcatatgctaaggaacagttcaacaagaataaagatcaagttcctccgttacgagcaatcaagtcagtgcaaaactacgagagacagtagtgtaagttatgcatcttcagcagcaaaggtggatgcttgaagatgtgaaatacat

SEQ ID NO: 215663 - DNA, 382 bp, Gossypium hirsutum
cccacgcgtccgcccacgcgtccgcccacgcgtccgttcacgcgtccgcaaatgcctaacctgcgggtaatatgaagttatttattatagactaaaaaaaaaaaaaaaaaaaaaaaaaaaaaaaaaaaaaaaaaaaaaaaaaaaaaaaaaaaagggcggccaaaaaaaaggaaagaaaaataaagaccaaaaaaaagggaggggggcgctctaaaataatgaaacttaaaataaactcacatgcaagtgtttattcattttaaatgattggaaaaaccaaaattaaacgcactttatttaaaaaggttgaaatggaaaaaaccgtggcgtggctaaaaaaataaaatgtaagaaaaaaacccctttccaaacagggggtaaa

SEQ ID NO: 215664 - DNA, 478 bp, Gossypium hirsutum
cagagatctccgtctccacaggaatggctaccaagcagccaaatactggcctctttgtgggactgaacaagggccatgttgtaaccaagaaggagttggctccacgtccctctaatcggaaaggaaaaactagcaaaagagtccattttgtgaggaacttgattagggaagttgctggttttgcaccatatgagaagaggattactgaacttctgaaagttggtaaggacaaacgagcgctcaaggttgctaaaagaaagttgggaactcacaaaagggcaaagaagaagcgtgaggagatgtctagtgtgctccgcaagatgagggctcaccctggaggtggagaaaagaagaagtgaagctctctggtgacaagtcaccttgatgatttcattagagaactttgtttagcatatatttcaacttattgggttgagactgaaaactatgcactgaatctcgtttgttaatttataat

SEQ ID NO: 215665 - DNA, 436 bp, Gossypium hirsutum
ctaccattaccggcgtttccgtcaccgtcggctatctctccgggataaaaccaggattaagagtgccttcaatggtgacaggagggttgattgggttaatgggtggatttatgtacgcgtaccagaactcagcgggtcgactcatgggatttttccctaatgatggcgaggtcgctcgataccaaaaacgtggactcaaaaactagccatttctctctttttctattctcgtctattcacttttatgtttttaggacaatttgaataatcttcattgctgtctttgatttcctgttgttcatttcaaggcatttgtattgctgcttaaaatatgacttatatgggtctaagatcccactgaaatgaggttgtctttgaataactgttagaaggcaccaaccttttgatgcaattgattgtttgcagcattaaaatg

SEQ ID NO: 215666 - DNA, 397 bp, Gossypium hirsutum
  unsure (1)..(397): unsure at all n locations
ctttgtgtgagttcctttaagcaattagccaagatgcagaacgaagagggtcaaaacatggggctttacatccccaggaagtgttccgccactaacaggctcatcacctctaaggatcacgcttccgtccaaatcaacgtgggacacttggatgagcttggcagatacactggcacattctccacttttgctctttgtggatttgtccgtgcccagggtgatgctgacagtgctctcgacaggctttggcagaagaagaaagctgaagtccgacagcagtagttggatacctttttaccctagtctatctccgagcttgggaatgaaaaatctcatggcagtgactattatgttctangtcttttcaaagtaaactatgtcaaaattaatatttttg

SEQ ID NO: 215667 - DNA, 494 bp, Gossypium hirsutum
cccacgcgtccgcggacgcgtgggaaaaatatggatccaaatgatcaacaaaatgagaaggcaggggggcagcttgtcttggaagccttgtacaaacctttcaaggaggatgagataccaaaagacgttgacgactcaattatggtacaaaaggctccagaaggaacacctgcaggtggaggtttacttgtagttattgtgcatgaagctgaagatatcgaagggaagtaccacacaaacccacatgtgcggctgttattcagaggggaggagagaaaaaccaagcgtgtaaagaaaagcagagatccgagatgggaagaagaatttcagtttatggtggatgaaccacccacgaattataaaattcacattgaagcgttcagtacatcctccaggatagggctactgcatcccaaggaatctttgggttatgttactataagcctagctgatgttgtgaataacagaagaatcaatgaaaagtatcatctgat

SEQ ID NO: 215668 - DNA, 486 bp, Gossypium hirsutum
ctaatagcagatcccagcaagagccactctctctaccttaagaatcgccatggactacgcttctcgaagaagtcaaggaggcctattcgaaggtctctacagagtcatcatgcgccgtaactctgtctacgtcacatttgtcatcgccggcgctttcctcggagaacgggctgtggattatggagttcataagctctgggaatacaacaatgttgggaaacgatacaaagacatttctgtgctaggacagaggcaatcagaggaatgaactcatccttttctttctctttgtggatgttttgaagtttttatttgaggaatgggtatgagcatatatctatgatgtagcaatgctcattgttgcaataaaatgtcacttttttttttttgggggggggaggggaaacgtacatctttattaacaatgagtcgattgattgtctttgaaaatattgaatgattcagaatcgcggattatatgcaatg

SEQ ID NO: 215669 - DNA, 492 bp, Gossypium hirsutum
cccacgcgtccgcggaactctgagattcctcacgaaggcccattctgtgatctcatgtggggtgatcctgaagatattgaaacatgggcagtcagtccacgcggagcaggttggctatttgggtccagggtcacatcggagttcaaccacataaataatctcgatcttgtttgtcgagcccaccaactcgtgcaagaaggccttaagtatatgtttgaagataaaggccttgtaactgtgtggtctgcaccaaattattgttaccgttgtgggaatgtagcttctatattgagcttcaatgagaatatggagagaaaagtgaagtatttcactgaaacagaagagaataatcagatgagagggccgaggaccggagtcccgtatttcttgtaatcgaaaagagataacatactgcagtacttgtaatattatccaagcatttgattattgaaagaaggtgtcaaaggaggaagccttgaaatacataaaatg

SEQ ID NO: 215670 - DNA, 438 bp, Gossypium hirsutum
  unsure (1)..(438): unsure at all n locations
gtcttttaatccatcgctcacaaaattatgggtttgaaggaggaattcgaggagcatgcggaggaagttaagaccctcccggccgccccttcgaacgatgacatgctcattctctatggactgtacaagcaagccactgttggaccagtgaataccggccgtcctggaatgttcaacatgagggaaaggtacaagtgggatgcatggaaggctgttgaagggaaatcaaaggaggaagcaatgggggattatatcaccaaagtaaaacaactgtttgaggctgctggaagttcttgatgtgtgtgtgtatggccaatgaaaatggtgtaatttcaagcccttgtttgttacttggggttttcattactatgaataaattatgtactctttttctattgctatatgttatntatagtagaaactccttgatttactttt

SEQ ID NO: 215671 - DNA, 361 bp, Gossypium hirsutum
gctagaaaatcagggcagaaggttattggagagcccgtggtttctggattggtcctcaatgagtctgggctttgggatcctgacttcgtcactgcagcaaagtatgtcatgagtcctcctataagggaatcaggacatgacaaggctctgcaagctgccctttcaactggagttctgcagctggtaggaactgatcattgtacttttaattctactcaaaaagctcttggcattgatgatttccggaaaattcccaatggtgtcaatgggattgacgagaggatgcacctagtttgggatacaatggtggaatctggccaaatttccgtcactgattttgtacggattacaagcactgaat

SEQ ID NO: 215672 - DNA, 489 bp, Gossypium hirsutum
  unsure (1)..(489): unsure at all n locations
cttcactccacatttcacactctttttcaactttctcttcttctctttgttttaaagaggggcgtgggagttttagccaaagaaaactccatggctaaacttgttgctactttcttcttggctctcattgccatctccatggttcaaactttggttatggcatcacatggacatggtggtcaccattatgataacaaacgttatggacctggaagtctcaagccttaccaatgtccatctcagtgcacaaggaggtgtagccagacacagtaccataaaccatgcatgttcttctgtcagaaatgttgcaggacatgcctttgtgttcctccagggtattatgggaacaaacaagtttgcccttgctacaacaactggaaaaccaangaaggagggccccaatgcccttaaattactcanaagaagaccctnttttttttacaattatatccctataaanttcctatttgaaattcaagtcatttaagc

SEQ ID NO: 215673 - DNA, 479 bp, Gossypium hirsutum
aggttaacgtctcaagcggggttgtcgagactcatattaacaacgcattatatcaaaagagacctctggcaatttatcaagcggacaaggtgttgttgcctgaagagttttttgaagctaaatccccagcggctgcaccttcaccggcgacaaagaaatcatcgacagggtctaaatcgaactcaagagcatcagcaaccgcagatgagccagcttctgctgataattcacgctcaaccggaaggaatatggggctgggattcgttgttgggcttgcattggcttgcatgggatttctctcatgagcggatatatatgaagttggtctgcattttttactataaatcttcgtttttcaaatggatcgataagggtctgattggtcgttgaacatattcttgttatccacattatttgtatatccagaattttttgtcgattttgcttctgcgcgctgctagatgttaataataatatat

SEQ ID NO: 215674 - DNA, 482 bp, Gossypium hirsutum
cccacgcgtccgcccacgcgtccgcggaagagctttcctttttttctctctatattttctcatgtgcttttccaccgccgtcgatctcgatccttatccccgttttcaaaaaagctccaaaaagatggccaatgctgcatcgggaatggctgtgcatgatgattgcaagttgaagttcttggaacttaaggcaaaaagaacccaccgctttattgttttcaaaatcgaggagaagcagaagcaagttattgtggagaagcttggtgagccaaccgagagctatgaggattttactaaatgtcttcccgctgatgaatgtcgttatgctgtgtacgattttgattttctaacggccgagaacgtcccaaagagcagaatctttttcattgcatggtctcccgatacatcaaggatcaggagcaaaatgatatacgctagctccaaagacagattcaagcgagaactggatggaatccaagtgg

SEQ ID NO: 215675 - DNA, 373 bp, Gossypium hirsutum
atcgagcgttctttgatggctttggctcgcaaatacaaccaagacaagatgatttgccgcaagtgttatgctcgtgttgatccaagagccgtgaactgccgcaagaagaagtgtggtcacagcaatcagttgaggccgaagaagaagatcaagtagatactgactggtgttatcctgtctgctttaaaagaaattgaatgtcagacgaggaaaatatttccatttggttcttttgctattattctattttgttaagattttgttttgggttccggatttgatgttccaatctatgtttggacaatcttatgtgttttgtcttggaaattttaagaacactgttttagaaatattatttaaaaatgttagtgtt

SEQ ID NO: 215676 - DNA, 465 bp, Gossypium hirsutum
gcgtccgcccacgcgtccggagaaagtcaatagaaagttacctgatggtcatacaaagatcgaagatgggtggctttaagagtgaggcaataataagttttgaagagatccctgccctgctgaataccccaaaagaggaaccagactctcaaaatgacaaggttgctgataatattaaaagcaaaatcataaatgtagacaagatattggtgcccaaagaagatctgcaacaggaagtaggcactggaaagttaccaaaagctgtagatggttccgctggtagcacgagaatggaatttgatgctattgagaaggatgaaaatagggagcagaacgatttgaaaaagatttttgagcccggctgtgtttttgttcaatatagaagaacagaagcatcatgcatggctgcacactctatacatggacggttatttgataaccgggtgtgacagtagagtacatcaa

SEQ ID NO: 215677 - DNA, 481 bp, Gossypium hirsutum
cccacgcgtccgtttttttggacagagtagacaaaccactctttttttcttttgatattgcgggaccgctgaaacgaatatctcgaaattggatatgtaaaaacaaagaatcaaaaatttctgattatacagaaaaaaagatcgagaaaaaagacgaggccaaaagagaaaaatacaaaagagaagagaaaatgaggatagaaatagcagaagcttgggatagtcttttacttgctcaagtaataaggggctccgtgttaataacccaatcaattcttagaaaatatattatattaccttcactgataatagttaaaaacattgcccgtatgttattatttcaatttcctgagtggtctgaggatttaacggattggaatcgagaaatgcatgttaaatgcacttataatggtgttcaattatccgaaaccgaatttccaaaaaaactggttaacagacggtattcagataaagatcctat

SEQ ID NO: 215678 - DNA, 447 bp, Gossypium hirsutum
gtacttctgcaacaggtagctgcagatttattgaagcaatacaaggacaagttccaaggtggtgctctttctgtcacatggaactacttgagagaatctatgaacacatacttgtctcagccaaatcctgtaactgcccgttgggaaagtgaagatcacttgcgagaccctaaatttcagttggatgctttccggtaccgaacgtcaagacttcttcaaagtgtagcagcacgacttcaaaagcacaccaaaactcttggcagctttggtgcttggaataggtgtctgaatcaccttctcacacttgcagagtctcatattgaatctgcattctcgcaaaatttattgaagctgttcagaactgtcctgatgcaagcagtcaagctgctctaaaactctatgcgatctgtatgcgctggatcggatctggaaagacatacgaacata

SEQ ID NO: 215679 - DNA, 482 bp, Gossypium hirsutum
aagagccgagtgatcaaaacacagataggaaaggactgaaaaagaaaaacagaaatggctccgaaagcagatacccaatctgccggcgctgtcgctgcagctgacgcatcctctcaattctcaatggacccactattccacatcttgaaagtcgtcccttactccttccttcgcgctccgcgcctccgcctcaagatcccctccgtctcccttccttccgccatgactgtcttttctctcgtcctcctcacttacttcatggtggtctccggcttcgtctacgacgtcatcgtggagccccctggcattggctctacccaagatcctgccactggcgccgtccgacctgttgttttccttccaggtcgagtcaatggtcagtacatcatagaaggactctcctctgggtttatgtttgtgcttggtggcattgggattgtcctcctggatcttgcccttgataaaaacagggctaggagtgt

SEQ ID NO: 215680 - DNA, 382 bp, Gossypium hirsutum
aaccaaacaaggcattgcttcacccgatatatcgagtaccatcgttgtgtagctgcaaaaggggaagatgcttcagagtgtgacaagtttgccaagtactatcgtgccctatgtccgggagaatggatagatcgatggaacgagcaaagggagaacggtacttttccaggtcctctgtaagatggtacattacgggaaatccagtgaagttgtcaactgagaaacggcattttcaggaaataagaaattttggcatgtacccgttttgactggatcatgattgataaaatggagttatatatagcctatgttacatgggttcaagtgttggatattgatatctgtccgacaccaataaatttaatttctttttgagagctat

SEQ ID NO: 215681 - DNA, 466 bp, Gossypium hirsutum
gggacccggaggcgtacaaaccaagtgatcaaaacacatatcgtaaatgactgtttacaaaaaacagaaatggctccggaggcagattctcaatgtggcggcgctatctctccatctgacgcatcctttcaattctcaatggacccactattccacatcttgaaagtcgtcccttactccttccttcgctctccgcgccttcgcctcaagatcccctacgtctcccttccttccgccatgactgtcttttctctcgtcctcctcacttacttcatggtggtctcctgcttcgtctacgacgtcatcttgcaaccccctggcattggctctacccaagatcctgccactggcaccgtacgacctgctgttttccttccatgtctagtcaatggtcaatacatcatacaaggactctcctctgtgtttatttttgtgcttgcttgcattgggattgccctactggatc

SEQ ID NO: 215682 - DNA, 492 bp, Gossypium hirsutum
  unsure (1)..(492): unsure at all n locations
cgtacgcccacgcgtccgccgagatctcgtcttcctgtgttatgttagctgatctccaaagctctatgttgtgttgagttctggacttcatttgcaatggcggacgaggaacctgttgatcagaaaaaatatcttgaagatggttgcaagcctaaatgtgtgaaacagcttctttcatatgaggcatgtgttaagagaatccaaggtgatgaaagtgggcacaagcattgcactggtcaatattttgactattggtcttgtgttgataaatgtgttgcaccatctctattcacaaaactgaaataaccagggccagagttgtacaacggtagcatcatgtcatgctgttgaatgattgtttcagacaatttggctccataaacttgacaagtgttaaaatttttttgtgttactttggaagcatntaaataaatttggatcctgggatacatccctcttgtgaataggatcacaagtgttttgacaagtttg

SEQ ID NO: 215683 - DNA, 436 bp, Gossypium hirsutum
  unsure (1)..(436): unsure at all n locations
gcagacgtgaagaatggggctgtctttcacaaatctgttcagccggctttttgccaagaagtagatgcgtatattgatggttggacttgatgctgctggtaaaaccaccattctttacaagctcaagttgggagagattgtcaccacaattccaaccattggtttcaatgtggaaactgtggaatacaagaacatcagctttactgtctgggatgttggtggccaggacaagattcgtccattgtggaggcattacttccaaaacacacaaggactcatttttgtggttgatagcaatgatcgtgatcgtgtggtcgaagccagggatgagttgcacaggatgttgaacgaggatgagttgagggatgctgtgctactggtatttgcaaacaagcaagatcnttcaaatgctatgaatgctgccgagatcactgac

SEQ ID NO: 215684 - DNA, 486 bp, Gossypium hirsutum
aataaagagagattttacgccatggttgaaggaaatgggtgttgcaagcttgcaggaccagtatatggcttccaacactgttgcatccgctgctcttcttcttaccttgaacttgttgttcttcactttggttagctctacctacgtgccttgcccaccaccaccaaagagccacaagcctacccacaagagcccaccctcggcacctaaacagccagccacttgccccaaagatacactgaaactaggtgtttgtgctgatttgttgggctcggtgcgcgttgttgttggaccgtcgaggaccaaatgctgctcactcatttcgggtttggctgatctcgatgctgctgtttgcctttgcactgctattaaagctaatgtgttgggggttaacctaaacgttcctgtttcattgtctttgctcctcaattcctgcgaaaagcatatgcctgctggttacaaatgtgcttaagcaatgtttgggtt

SEQ ID NO: 215685 - DNA, 483 bp, Gossypium hirsutum
ctttgagcaaagcagcctcatttcatttctccaatatggctagagggttgaagaaacatgggaggaggctcaatgcccccaggcattggatgcttgacaagcttggtggtgcttttgcacccaagccatcgtctggtccccacaagtccagggaatgcttgccattgatccttattttgcgaaaccgattgaagtatgctctcacctatagagaagtcattgctattcttatgcagaggcatgttatggttgatgggaaggttaggacggataagacctatccagctggtttcatggatgttgtgtccattcctaaaacaaatgaggacttccgtctactttacgacaccaaagggcgatttcgtctccatgccatcactggcgatgaaaccaagttcaagctctgcaaggttcgatctgtccagtttggccagaacggtattccatacttgaatacatatgatggtcgtactatccgttacc

SEQ ID NO: 215686 - DNA, 388 bp, Gossypium hirsutum
gtgcttatggtggagttctatctggaagtgctgttcgagaaaggatcataagggccttcttggtggaagagcaaaagattgtgaagaaggtactgaagattcagaagacaaaggaaaagcaatcatccaagtgagagctaggatttgctaatggattgatagtgaatcttggaatagtagtttgaggggatttaagatttggatttatgtttttacatttgttatgaatcatgttctactttttcatcttgtcgacaaatcaactttcatgtcaaaattttgtttttggaacactcactttgtttgctcttctccaaatttggtatttccactgaatgtgcaatgttgcctggttatgcgattgcccccaaaaaaaaaaaacactttt

SEQ ID NO: 215687 - DNA, 256 bp, Gossypium hirsutum
catccccaaagtatccacctttttctgattttagaaacttgtaaagtggtgtagcattctttgcatttacttccacctacaatggtcagatcatatgacagtattacaaaacataagtttgtataccaatcaactggtttcattttcatgctaaggaggtgattgctggcataaggcactcaatcaaacatatttataaccttatcaaaaattgggaattcagctttgaacattgtgcatgcaacttcctgaatct

SEQ ID NO: 215688 - DNA, 283 bp, Gossypium hirsutum
cccacgcgtccgcccacgcgtccgcagatctgattttccgggaaaacatacaacgagaaggaaaaattcgtagagagagaaaaaaaatgtttggataccatcgcgtaagccactcgagtgccaacaaggcggatgagatagatttagaatcaggggagactttgtacccgggactcagctacagcgagaaccaacttcggtggggttttatccgcaaggtgtactgcatctaggcggcacagctggttctaaccaccgaggtctccgccttagtggtctttct

SEQ ID NO: 215689 - DNA, 418 bp, Gossypium hirsutum
ctagagtcgtcggacgccaaagcatcaacgaaagctttcacaaaaccctagtctctaacgtacgttgttttgcctaagccatgtcgagaaggaaggttcgagagcccaaggaggagaatgctaacctatgacctgctgttccaaagggcgagcatgtttttgggggggctcacatctttgcttcatataatgacacattcattcatgtgactgatttgtctggaagggaaacaatggtacgcattactggtggcatgaaggcgaaagctgatagggatgagtcttccccttatgcagccatgcttgcagcccaagatgtttctcatcgcttgcaggagttgggtcttacttgccttcatataaagcttacagctactggagggaataagaccaagacaccaggttctggtgcacagtc

SEQ ID NO: 215690 - DNA, 435 bp, Gossypium hirsutum
  unsure (1)..(435): unsure at all n locations
gagaaaaggctggcttgttttcagagtctcaacggattaaatacaccatcgaaacacgaactcagggcattccagatgtccgaacatatttattgacactgaaggaaataagatccaagagaggactcactgatgaacttggtgctgaggctatgatgatgggtgcgttggataaagttgaaaaagaaatcaagaagcctcttatgagggatgacaagaaatcaatggctcttcttactgctgagtttgataagatcaataagaagcttgggatccggaaggaagacctgcccaagtatgaagaacaactggagctaaaaattgccaaggcgcaattggaggagctgaagaaggatgctcttgaagcaatggaaacacanaagaaagcggaggaattcaaggatgagggcatgcctgatgtgaagtcatttgaca

SEQ ID NO: 215691 - DNA, 447 bp, Gossypium hirsutum
agcccccggacgccacgcggcatcatgaattcgcgtcgtgtaacgcctgacatgcaggagggggtcggagtccctgaaattccccgaactcaagcccttaagcagatttgggcttacattaaagagcacaatcttcaggaccctgaaaacaagaagattataaactgtgatgagaagctgaagaagatatttggtgggaaagatcgcattggatttcttgaaattgctgggctgattagtcctcactttctttgatgaatcctagcgagagagagtgttggtttggagaataggtaggtaaaaacttcagttggttgatcctctctttgaagaaaataatgcttttttgttttcaattttaacagtgctacttggttactacacaagtacctttttaagggttttgttttatttacgcattccctaatatgtagactggttttatga

SEQ ID NO: 215692 - DNA, 383 bp, Gossypium hirsutum
ctccgccggacgagctggtggcggccggtttccgaactccatcacctaagataacggcgggggctctggtgaaacggttccttgagaccaactcctccggcgtgtccatgcagatcggagaccatgtccaattcgcttattctcaccataaagagtctcctttacggcccagatcatttgctgtgaaagatgaaatcttctgcttgtttgagggagcccttgataacttggggagtttaaagcagcaatatggtctggcaaagtcggcaaatgaagtgattttggtcattgaagcttacaaggcccttcgtgaccgagcaccttattctccaaaccatgtggttggccatctaattgggagctttgctttcattgtctttgac

SEQ ID NO: 215693 - DNA, 467 bp, Gossypium hirsutum
  unsure (1)..(467): unsure at all n locations
ctgatttgtctggaagggaaacaatggttcgcattactgctggcatgaaggtgaaagctgatagggatgagtcttccccttatgcagccatgcttgcagcccaagatgtttctcaacgctgcaaggagttgggtattactgcccttcatataaagctaagagctactggagggaataagaccaagacaccaggtcctggtgcacagtcagcacttagagcccttgctcgttcaggcatgaaaattggacgcatagaggatgttactcccattcccactgacagtacccgtagaaagggaggcagacgtgggagaaggctgtgattctttgcttcgtatctgttgctcactgttgctgctcctccaatatgcgtggaatttcttttttaaacaatttttggtttagattgaagctngttttgccctgttatgtngttgcacattagttccagaattgattttgatcgt

SEQ ID NO: 215694 - DNA, 411 bp, Gossypium hirsutum
cttttaagcctccaaaggttaagtttgagactgcctgtttccatccaaatgttgatgtctgtggcaacatttgcttggacattcttcaggataaatggtcatctgcttatgatgtaagaaccatactgctatccatccagagtctgcttggagaacccaacattagctcacctttgaacacccacgcagctcaactttggagcaaccaagaagaatataggaagatggttgaaaagttgtacaaacctcctaatgcataacttgagaaaccagaacaggagttttgttatgtttttttcttcttattattaatttttttttcttattgaagaaacgagaacatgaaatttgtcatttttctacagcatgtatgattttactttactattgaatgtgataatgataaaagct

SEQ ID NO: 215695 - DNA, 361 bp, Gossypium hirsutum
gtgaaaaggctggatggttaacaaaggcttttatgactgattgcatgatcgtaacagcagcggcaggatgtggcatacgtccgtgcatacatactggcactcaaagatgtatgataccgcagaggggtgactgatgaacctgccgctgatgctatgatgatagctgctgtgggtaatgagaccaaaacactaagtactgctgctctgacggatgacaaagcattaaggggtctaggcactgatgaggttcacatgaacgatgagactcttatgatcactgacgaagacctgcccaagtgtgacaaacaactgaaactgctgagagtcaatgctcaatatgaggagctgactgatgatgctc

SEQ ID NO: 215696 - DNA, 334 bp, Gossypium hirsutum
gggcggttcgctgcccgcgacgtcgcgagaagtgcactcgccatatatcattgagaggcagaggcggaagcaacatcaggcgcagagaagcaaccacataaacttgagagaaagtggaccttccggtttgatatccaatcaaagcctaaacaaggcgccgcttgaggtacctatctacgcaaggtttacacatttgacaccgtagaagaattttggagtttgtatgaacaaatattcaagcgcaccaagctgctcgtgaatgcttatttacacttgtttaaggccggaatagaacccaaatgggaagataccgagtgtgctagtggatgaaagt

SEQ ID NO: 215697 - DNA, 367 bp, Gossypium hirsutum
gaataatgactagaacgtttacaaacttttctttgcaagttagagctgggggggatggggctaacattgaggcacctgagcatgcagaacgggttcttgatgcaaacattgggggctacatggtaagtgtacacctttggcaaaacgtggctgatgcatattacaatagggatacacaatctacacatgataaaatactagatgttggcatcatatgttgaaccaggccaccttgaagcactgaagtggtgacttccagtgccctaagacttgcacatagacagtcggtaaaatacagatcttgcttgcatggctgttcaaatgatggagaaccttggtctcatcaccatgacattgccatatacat

SEQ ID NO: 215698 - DNA, 410 bp, Gossypium hirsutum
cttttaagcctccaaaggttaagtttgagactgcctgttttcatccaaatgttgatgtctggggcaacatttgcttggacattcttcacgataaatggtcatctgcttatgatgtaagaaccatactgctatccatccagagtctgcttggagaacccaacattagctcacctttgaacacccacgcagctcaactttggagcaaccaagaagaatataggaagatggttgaaaagttgtacaaacctcctaatgcataacttgagaaaccagaacaggagttttgctatgtttttttcttcttattattaatttttttttcttattgaagaaacgagaacatgaaatttgtcatttttctacagcatgtatgattttactttactattgaatgtgataatgataaaagc

SEQ ID NO: 215699 - DNA, 64 bp, Gossypium hirsutum
aaaggattctacccgccgctcggtgggaattacgctccagggaggcgcccgcgacttgtgggcc

SEQ ID NO: 215700 - DNA, 461 bp, Gossypium hirsutum
cccacgcgtccggtataatggatagaacgtttgcagactttccttggcaagttagagttgaagtggatggtgttgagatagaggtccctgaggatgcagaaggggtacttgttgcaaacattggaagctacatgggaggtgtagacctttggcaaaacgaggatgatacatatgagaattttgatcctcagtctatgcatgataaaatactagaggttgtaagcatatctggaacttggcaccttggaacactgcaggtggggctttctcgtgcccgaagacttgcacaaggacagtcgattaaaatacagctctttgctgcattgcctgttcaaattgatggagaaccttggtctcagcagccatgtacattggccatatcacatcacagccaggccttcatgttgaggaggacagccgaggaacgtctagggcatgcagctggcataataccaatgtgc

SEQ ID NO: 215701 - DNA, 445 bp, Gossypium hirsutum
gtgatgtcggaaagggttgtgctgctgccttgaagcaagccggtgctcgtgtcattgttgctgagattgatcccatctgtgcccttcaggctctcatggaaggacttcaggttttgaccctagaagatgttgtctccgaggctgatatcttcgtcaccacaaccggtaacaaggacatcatcatggttgatcacatgaggaagatgaagaacaatgccattgtttgcaacattggtcactttgacaatgaaatcgatatgctcggtcttgagacctatcctggtgttaaacgcatcaccattaagcctcaaaccgataggtgggtcttccctgaaaccaaaaccggcatcattgtgttggctgaaggacgtctgatgaacttgggatgtgccactggacacccaagttttgtcatgtcctgctcgttcactaaccaggtgattgc

SEQ ID NO: 215702 - DNA, 353 bp, Gossypium hirsutum
cccacgcgtccgatcctctaattctaaagcttagagttttaagttaacgaagcatttggagcgtttctaagtaatggaaacttcacgaaaagtaaagaagggagccggaggaaggaaaggtggtggcccgaagaagaagcccgtttcaaggtctgtcaaagctggtctccagttccctgttggtaggatcggccgttatttgaagaaaggaaggtattcgcagcgggtctgaaccggagccccggtttacttggctgctgttcttgagtacttggccgctgaggttctggaatttgctgggaacgctgcacgtgacaacaagaaaaacaggatcatcccaaggcaccttctac

SEQ ID NO: 215703 - DNA, 377 bp, Gossypium hirsutum
cagacgcgtgggcagacgcttgggcagactcgtggactgacgcgttgtcaggaaagaagggttcgaaagattctaatctcgggggcgatatgttatccaagatcgacatggaacgagctggagtgctagttggaactggcatgggtcgtctaacggtattatgtgacggaattcaaaatctgatggagcaaggctattgaacaataacatcattcttcattccctatgctataacaaacatgtcatctgccttgctagccattgatctaggactcatgggaacaaattattcaatgtcaactgcttgtgctacctccaattattgcttctatgctgctgccaaacacatccgtcgaggtgaggcttgaatgatgatt

SEQ ID NO: 215704 - DNA, 385 bp, Gossypium hirsutum
cccacgcgtccggtataatggatagaacgtttgcagacttttcttggcaagttagagttggagtggatggtgttgagatagaggtccctgaggatgcaaaaggggtacttgttgcaaacattggaagctacatgggaggtgtagacctttggcaaaacgaggatgatacatatgagaattttgatcctcagtctatgcatgataaaatactagaggttgtaagcatatctggaacttggcaccttggaacactgcaggtggtgctttctcgtgcccgaagacttgcacaaggacagtcaattaaaatacagctctttgctgcattgcctgttcaaattgatagagaaccttggtctgagcaggcatgtacattggccatatcaca

SEQ ID NO: 215705 - DNA, 437 bp, Gossypium hirsutum
gggatgttcttgatgacctcaagacaaatgttgagttgtctcatcctggtgctgaacttagattacttgaggttttttatcacaagatttacaagatcttccctctcagtgaaaagatagagaacataaatgatcaatattggacattacgtgcagaggagataccggaagaggagaaagagcttggtccccatgatcgcttgattcatgtttaccatttcatgaaagatgcaacacaaaaccagcaggtacagaattttggggagccatttttccttgttattcatgaaactgaaacattagctgaagttaaagtgcgagttcagaaaagattacaggttccagatgaggaatttgcaaagtggaagtttgcatttttatcactgggtcgtccagagtatcttcaggactcttatgttgtgtctacctcgtttcag

SEQ ID NO: 215706 - DNA, 404 bp, Gossypium hirsutum
cttccaatttagggtttgcacgagccggagtgcgccgttcgcatcaggaagaaatggcggtccctttgctgtctaagaagattgcgaagaagcgtgtcaagaagttcaagaggccccaaagtgaccgcaagatctccgtcaagacaaactggcgaaggcctaaaggtattgactcccgtgttaggaggaagttcaagggatgcactttgatgcccaatattggttatgggtccgacaagaagactcgccactatcttcccaatgggtttaagaaatttgtcgtgcataacgtccaagagctggagcttctcatgatgcacaacaggacatactgtgctgagatagctcatgatgtttcaacaaagaagaggaaggaaattgtcgagcgggcagcacagttggat

SEQ ID NO: 215707 - DNA, 427 bp, Gossypium hirsutum
ctcacgcttccggattgtcatgctcagcacggcacgattcgtactaagaaaaaatgacactcagattggtgagtaataagagtgccagctaacgagaatggacactcatctagtcacatagtgaatcacaagatcgtgggtcacgacagactggctatggcatcagagtattgactctggtcttaagacgaacttcagggaatgcactttcatgcccaatattggttatggctccgacaagaccactctccactatcttcccaatgggtttaagaaatttgtcctgcataacgttcaagagctggagcttctcatgatgcacaacaagacatactgtgctgagatagctcatgatgtttcaacaaaaaagaagaaggaaatttgtcagcggtcagcacagtttggatgtttgtgtgaccaacaaatt

SEQ ID NO: 215708 - DNA, 404 bp, Gossypium hirsutum
cccacgcgtccggtaatcattgacggatcgacggtgagagccttcgtgactgacgaccaagagttcacgaagagcgtggatgagcgtttcgaagctcttgacctcaacaacgacggtgtcctcttcaggtccgagcttcgcaaggccttcgagtctatgcgtctcctggagtaccactacggtgtcgacgtcgccactcacaccgacgagctcactcaggtgtacaactacattttcgagaggtttgattgcgatggcactgacacctgtgacctatatgagttcacatctgagatgaagaagattctgcttgctattgatgacggatcgtgatcttgccctatacacatggttcttgacgatgatgaccaacggtttctgaacaacgctgctgatcttgaggc

SEQ ID NO: 215709 - DNA, 377 bp, Gossypium hirsutum
cgctttctgaccattagcacaggcaataaatcttggctctgtagaatctagagaagatggggtccatgctgcacgtgttgcttacagtgcaatgggcatggtaactttgctgtctggccaacctaaagaaggtgtctgaattgacgcccgctcagagtcaaaaggctactatgaggtgacagtgactgattcatctgggacttatcgtctgcgaggactggttcctgatgcattgtattcaatcaaagttgtgaagaaggatggcttgggtagtgctaaaattgagtgagcatatcctgaatcttgtcctgtaaaggtttggaataacgatatcaagggactggactttttggtctttgaagaaccaaagatgacta

SEQ ID NO: 215710 - DNA, 387 bp, Gossypium hirsutum
  unsure (1)..(387): unsure at all n locations
gcgtgacacctgccgtggcatcggtttcacatctgacgatgtgggtctggatgccgacaactgcaaagtgctggttaacatagagcaacaaagccctgatattgcccaaggtgtccatggccatctcagtaagcgtcccgaggaaatcggtgctggtgaccagggccatatgtttggttacgccacagatgaaacccctgaactgatgcctttgacccatgttttggcaaccaggcttggtgctcgcctcactgaagttcgcaagaacggaacttgcccttggctcagacctgatggcaagactcaagtcaccgtcgagtattacaacgacaagggtgccatggtgcctgttcgtgtccacaccgtgctcatctncactcaacatga

SEQ ID NO: 215711 - DNA, 422 bp, Gossypium hirsutum
tgctttctcaccatcagcacaggcaatagaacttggctctggagaatctagagaagttgttttccatgctacacgtgttgcttacagtgcaatgggcatggtaactttgctgtctggccaacctaaagaaggtgtctcaattgaggcccgctcagagtcaaaaggctactatgaggtgacagtgactgattcatctgggacttatcgtctgcgaggactggttcctgatgcattgtattcaatcaaagttgtgaagaaagatggcttgggtagtgctaaaattgagtgagcatctcctgaatctgttcctgtaaaggttgggaataacgatatcaagggactccacttttttggtctttgaagaccagaaatgactatcttaagtgccatgttgaagcgaataggacaggggaattacattc

SEQ ID NO: 215712 - DNA, 452 bp, Gossypium hirsutum
tgaaatctttccttcctttctttgcattcctctcacttctcctgtttgtagacaccattgcagcagctaggaaagatgctggagagtactggggagctgtaatgaaagatcagcctatgcctgaggcactccaagagcttgttcggattgaggctgccgttgccaaccccgatgagaaaaccaagtgccatacatcaggtaacattgagcttaaggaagagaagattattgttaatgaggagttcgaaccaaggccaaacatttcagcttacggtgatgacgctaatctaaaaggagataaatcatcatcttttgcagaagattttgaaccgagacctaacatttcggcttacgggggcgatgatgctggtcttaaaggacagaaagaatcattcactaaagatttcgatccacagccaaatatctccgcttacaataactaattaaaagcg

SEQ ID NO: 215713 - DNA, 302 bp, Gossypium hirsutum
cccacgcgtccgttcacgcgttcggaaagcttgagcgtaacaaaagcgtagacaccgggcgggcggtgcttgacacctgccgtggcatacgtttgacatctgacgatatgggtctcgatgcctacagctgtaaagggctggttaacataggacagcaaatctctcatcttggctaaggcgtccatgtccatttcatcatgcgtcctgggggcatcggcgctggtgaccagcgccatttgcgtgtttacaccacagataaaacctccgaactgatgccattgaccaattttttaccaacccaa

SEQ ID NO: 215714 - DNA, 411 bp, Gossypium hirsutum
gcttcacagaggtactccctgcttccgtgggtatggtaggagaaatggagagcgaaggaggaagtcagttcgcggatgcattgttagtcaagatctttcagttctgaacttggttattgttaagaagggtgaaaatgatcttcctggattgaccgacactgagaagccaagaatgaggggtccaaagagagcttcgaaaatccggaagttgttcaacctctctaaggaagatgatgttcggaaatatgttaatacatatcgccgaacctttacaaccaaatctggtaaaaaagtaagcaaggctcccaaaattcagaggttggtgactccgttgaccttgcagaggaagcgtggcagaattgcagagaagaagaagagagttgcaaaagccaaggctgatgctgctgaata

SEQ ID NO: 215715 - DNA, 349 bp, Gossypium hirsutum
cccagtcatcctggcatatcagcagagcgtttgcgcgtattgaggaccgtcaaacagaaggggatgtagatggtcataggtgtcgaagcgtgcctgcctctgaccgctgccagcgcctctgcaatgcagatgccctgcccctgcgcggggctgcagggcttgtacggcgcttgcgccgacctgaccacgatcatgggcgcctgtgggctgtacccctacgcgtagtacctgatgcagccgcagtgcagcccggtagcagcagcgccctactacgctcggtgtgggcagacgagcgccatgtaccatcctctgcggcgacagggctgacagcagcaaatgacgatgatgg

SEQ ID NO: 215716 - DNA, 454 bp, Gossypium hirsutum
  unsure (1)..(454): unsure at all n locations
tcttcctcattttacctttagcttctttcctcctcctcctccctcttctcctccgccaccggcgtcaccgccaccgtcgtcaccatctccatccctcctctgggttttcctcgaaacagctcaaaaagcttccccaattcagattctctcacgaaacggaatccgtcgggtcggattcggattcttgtgtgatttgcttagatgggttcaggcaaggtcaatggtgtagaagcctcgttgggtgtggccatttgttccataggaagtgtttggatggttggttaatcaaagttgctgcttgcccaatttgtagaacgagggttcgatttgaaaatgaagataattgcaattccggtccttgttgttcgaggagagcagagtttcagggcttgtttgatttgtaagtttattgcatatttagtcccntctttttgtattataaaaatggacagct

SEQ ID NO: 215717 - DNA, 481 bp, Gossypium hirsutum
  unsure (1)..(481): unsure at all n locations
aataacggtcgaagtattccacaaatgagaacacgtttactgttggaggggcttttgctgttgatcatctcactctgattaaaggtaagctcaggagtcatgggaggcttggagcactgctgcaacatgaagttgtaccgaagtcgttgttgacaatcttcagtgagcttgacacaaaggccttggaaaaaagtccccggttcggattggcgcttgctctgaagccctaattaggttttttcatttttggctattcaatgatgcttttggaatttgatacgttaaaattttttttcttggagattgattaagggtggcaataaatagttccacagatgataaatattcatttctagggtcttcaaagctgtggatggatgtttgatgatactttangcttttccatgattcaatattgaaagttttgaccatttgataatggtcatttaagccttgttttgctaaggttttcttttaaaaa

SEQ ID NO: 215718 - DNA, 444 bp, Gossypium hirsutum
gagattgttgagattggctacctaaatgggctctttgtgctagcacgatccattggtttgattgggcacactttcgatcagaagagactgaagcagccactataccgtcatccatgggaagatgttctttacactaagtgagagaacattacgagcagtaggtgcaaatctcctcgagcattgttgttactggagtccttttgtctgcatttttatggggtatggttgtttggttcttagattattgtttgtaaggcaaggctaaatggtggatcaccatcatttctaagttgtattcaaggtccacataggagaaaaaaaatctcaaaaatgctgcgtgattcgtttttagattttttaccagtttcacggataaataagacatgtcttgcacattgaattgtaatattttatgagaaatttcgaaattaggaatcatttatt

SEQ ID NO: 215719 - DNA, 413 bp, Gossypium hirsutum
gcagcattggctttttacatcctttcagctctctttttcaacagctttgtgatcatattgggggtgactgttcttctttcccccttgatttttgggtggttaagaatgttagtgggcgcatattagtcggtttgaggtggtggaatgaaattaacgatctcggcgagagtgtatggagatttgaatgtcttgaccaagagtcgttggctcggatgaacaagaaagattcatggctattttggtggaccctttacctttcagcggttgcgtggattgtgcttggaatattctctctcataaggtttcaagctgattatctccttgtcattggagtttgtttgactctcaacattgccaatatcgtcggcttcaccaaatgtcgcaaagatgccaagaagcagattcaacagttt

SEQ ID NO: 215720 - DNA, 474 bp, Gossypium hirsutum
cgaagtttttccacaaatgagaacacgtttactgttggaggggcgtatgctgttgatcatctcactctgattaaagctaagctcaacagtcatgggaggcttggagcactgctgcaacatgaagttgtaccgaagtcgttgttgacaatctccagtgagcttgacacaaaggccttggaaaaaagtccccggttcggattggcgcttgctctgaagccctaattaggttttttcatttttggctattcaatgatgcttttggaatttgatacgttaaaattttttttcttggagattgattaagggtggcaataaatagttccacagatgataaatattcatttctaggttctcaaaagctgtggatggatgtttgatgatactttaggcttttccatgattcaatattgtaagttttgagccatttgataatggtacatttaagccttgtttgtcgaggtctttcttttaaaa

SEQ ID NO: 215721 - DNA, 401 bp, Gossypium hirsutum
cacacgatgagaacacctttactgttggaggtgcgtttgctgctgatcatttcactctgattaaaggtgagctcatcagtcatgggaggcttggagcactgctgcaacatgaagttgaaccgaagtcgctgttgacaatctccagtgagcatgacacaaaggccttggaaaaaagtccatggctcggattggcgcttgctatgaagccctaattaggactcttcatttttggctattcaatgatgcttttggaatctgatacgttaaaagttcttttattggagaatgattaagggcggcaattaatagttccacagatgataaatattcatttctaggatctcaaaagctgtggatggatgttcgatgatacttcaggcttttccatgattcaatattgc

SEQ ID NO: 215722 - DNA, 384 bp, Gossypium hirsutum
cccacgcgtccggtactcactcaacattcctatttccaatctccagctgcgagggtaaatatgccgatcagaaacatagcacttggccggccctaagaggcgactcaccccgatgctctcaaggcagctttggctgagatcatctcaaccttgatcttcgttttcgctggatcgggctcaggaatggcttttaacaagttgaccgacaacggatcaacaaccccggccggtctcgtagccgccgctctagctcatggcttcggtcttttcgtcgctgtctccgttggcgccaacatctcaggtggccacgtcaaccccgccgtcaccttcggtgctttcgttggcgggaacatcactctcttgcgcggcattctttactggatc

SEQ ID NO: 215723 - DNA, 433 bp, Gossypium hirsutum
cccacgcgtccgctcccttactaacaacatttacccggaaatgtcggacgacgatcatcgtttcgaatccaaggctgatgccggcgcatccaaaacctatcctcagcaagccggtactatccgtaagaacggctatatcgtcattaaaggccgtccctgcaaggttgtggaagtttccacctccaagacggggaagcacggtcatgctaagtgtcacttcgttgggatcgatatcttcactggcaagaagttggaagatattgttccctcctcccataactgtgatgttccgcatgtcaatcgtactgactaccaattgattgacatttctgaggatggatttgtgagtttgctgactgagagtggtgacactaaagacgatctgaagctcccaactgatgagaacttgttgatacagatcaaggatgggttt

SEQ ID NO: 215724 - DNA, 358 bp, Gossypium hirsutum
cccacgcgtccgctcccttactaacaacatttacccggaaatgtcggacgacgatcatcagtgcgaatccaaggctgatgccggcgcatccaaaacctatcctcagcaagccggtactatccgtaagaacggctatatcgtcattaaaggccgtccctgcaaggttgtggaagtttccacctccaagacggggaagcacggtcatgctaagtgtcacttcgttgggatcgatatcttcactggcaagaagttggaagatattgttccctcctcccataactgtgatgttccgcatgtcaatcgtactgactaccaattgattgacatttctgaggatggatttgtgagtttgctgact

SEQ ID NO: 215725 - DNA, 393 bp, Gossypium hirsutum
cccacgcgtccgcccacgcgtccggaaagatcgaaagtcaccattctcgcctaaaacaatggatttcagagtcatgggtttcgattcaccactgttccataccctccaccacatgatggacctcaacgaagacggcgataacaagaacaaccccaacgccgcgtcaaggacctacgtacgagacgccaaagccatggcggtgacaccggcggacatcaaagaggactcgaagtcgtacatgttcgttgtcgacatgccagggctaaaaccgggggacataaaggtgcaagtggaggaagagaatgtgctgttgataagcggagaacggaagcgagaggaagagaaagaaggggcgaagtatattcggatggaaaggagggtggggaagttgat

SEQ ID NO: 215726 - DNA, 431 bp, Gossypium hirsutum
ctctcctctctgagaacaatcctctcactggtagcaagggtgagatcaggaagcaatgcaatcttgcaaacaagcttcactaaaatgcctcgccaaagagaaagccgagagtggccgaataaaatggttgtttacttgtttcttttccaagagacaagtttgttaatgtgcagtgagtaatggtgcaatggtactagtttgatacgatcgacccattgcatttttttttagcataagccaggttgccttctcttgatgttggtcatgggcgtagtggatgtagggatggatgtaatgtatgtatgtaaggatggtgttgactgtgtatgatgcatgaatttcaaagatttaaaagttatgatgattcatgcataatcccttccttctccattacgatgcaatactatgagcaatattattgtatttggatc

SEQ ID NO: 215727 - DNA, 423 bp, Gossypium hirsutum
cccacgcgtccgcggagatggaagccacattgaacttgcatgcaatgaatcagagccccagcccatggcacgtttctttctcttacgcacgtgcattgcagaacactgtgcttaagacatggcaaggacgtccagagaatgttgaagctgcacagaaggctcttttggtgcgtgcaaaggcaaactctctggctcaactcggaaaatactctgccgagggtgaaagtgaagaagccaagaaaggaatgtttgttaagggctatacctattaaggcgtaagacactgtaatatctggtttttgggcatctatggctttttgtgcgaggattattacttgctgttagataagttttttacatattattgttatgcctcctgaaactagggaggttgaataagttacttgggagattaagagaaac

SEQ ID NO: 215728 - DNA, 414 bp, Gossypium hirsutum
gggcggttcgctgcccgcgacgtcgcgagaagtccactgaaccttatcatttagaggaagggtctattgactcttaatccatatcattctgaccgctttttgctatcaccgactgcacttgctggtttggttacaatgttgcacgcatgcctcgatatgaaagctatggtactgggaaaataccattatgtcctctacttcattgttctggcaatgcagccaaggatgttgatgaccgtcgacgaaaacctcaaacctctatcggtcccagtccgtgtaggtcaagctgttgatgttgttgggcaggctggtcgacccaagactatcactggctttcaaactcattccactccggttcttcttgctgccggtgatagagcagaactggctaccgaaaagtatatttccctttca

SEQ ID NO: 215729 - DNA, 347 bp, Gossypium hirsutum
cggcaagacacaaactgtgaacttaacagcctaatttttccattattgctagaggcttgaagaaacgggtcattgtgctctattcccccaggcattgaatactacacaagcttggtggtgctttcgcacccaagccatcgtctggtccctacaagtccaaggaatgcttgccattgatccttattttgcgaaaccgattgtagtatgctctcacctataaacaagtcattgctattctcatgcataggcattttatggttgatggaaaggtttggactgataatatctatccagctggtttcatcgatcttatcttcatttactaatacaaatgaagacttccctct

SEQ ID NO: 215730 - DNA, 485 bp, Gossypium hirsutum
ccattggtttcaatgtggaaactgtggaatacaagaacatcagctttactgtctgggatgttggtggccaggacaaggcattacttccaaaacacacaaggactcatttttgtggttgatagcaatgatcgtgatcgtgtggtcgaagccagggatgagttgcacaggatgttgaacgaggatgagttgagggatgctgtgctgcttgtatttgcaaacaagcaagatcttccaaatgctatgaatgctgccgagatcactgacaagcttggccttcattctctccgtcagcgccactggtacatacagagcacatgtgccacttccggtgaaggactgtatgagggactggattggctctcaaacaacattgcgaacaaggcttaaatgaaacaattgaaccgacggtcacactaacaatggccccattttgatgttctggatgtccatctcgttcaagtgttctggctttctttttttatatt

SEQ ID NO: 215731 - DNA, 479 bp, Gossypium hirsutum
  unsure (1)..(479): unsure at all n locations
attggtttcaatgtggaatttgtggaatacattaacatcttctttactgactgaaatattaggggccaggtgtgggctttacttccaaaacacacaaagactcatttttgtggttgataacaatgatcgtgatcgtgtggtcaaaaccagggatgaattgcacaagatgttgaactaagatgatttgagggatgctgagctgctggtatttgcaaacaagcaaaaacttccaaatgctatgaatgctgccgaaatcaatgacaagcttggccttcattttctccgtcagcgccacttttacatacataacacaattttctctttctgttaaagactgtatcaaggactgtatngtctctcaaacaacattgcgaaacaagcttatttgaaacaattgaaccgacttttatactaacaatggccccattttgatgttcttgatgtccatctcgtacaactgttctggcttttttttttta

SEQ ID NO: 215732 - DNA, 378 bp, Gossypium hirsutum
cggacgcgtgggctcatttttaagtctgcaaaatttctagtttgccacttccccgccgcctctccgaaccatgtgccgagtccgtaccaagacggtaaagaaatcctctcgccatgtgatcgagaggtactactctcgcatgacgcttgatttccacaccaacaagaagatcatcgaagaagtggctatcatcccttccaagcgtctccgcaacaagatcgccggcttttccacccatctcatgaagcggatccagaagggtcccgttcgtggcatctctttgaagctccaagaagaagagcgtgaacgtcgcatggatttcgttcccgaccaatccggcatcaaggttgatcaaatcgaaatcgataaaggaactct

SEQ ID NO: 215733 - DNA, 463 bp, Gossypium hirsutum
  unsure (1)..(463): unsure at all n locations
ctttaagaagccacgacgtccgtatgagaaggaacgattggatgctgagttgaggcttgtaggagagtatgggctccgatgcaagagggagctgtggagggttcagtatgctttgagccgcatccgtaatgctgctagggaccttctcactcttgatgagaagaaccctcgtcgtatttttgaaggtgaagcccttcttcgtaggatgaacaggtatggacttttggatgagagccagaacaagcttgattatttcttggcttttaattgtgaaaactttctttagcgtcgtttgcaaactctcgtgttcaagactggtatggccaagtcaattcaccatgcacgtgtgttgatcaggcaacgacacataanggtcgggaggcaagttgtgaacatcccgtccttcatggtgagggtcgactcccaaaagcatattgatttctctcttactaatccgtttgga

SEQ ID NO: 215734 - DNA, 330 bp, Gossypium hirsutum
gggaaacagcccatggctttgtctgtggaccatataccaaatcgagaagatgaatatgaaaggattgaagccgctggaggcaaggttatccaatggaatggtcatagagtttttggtgttcttgcaatgtcaaggtccattggtgatagatatttgaagccgtggatcattccggatccagaagtagtgtttgttcctagagcgaaagaagatgaatgcctcattttggccagtgatggtctatgggatgtaatgtcaaatgaagaagcatgtgacctagctcggagacgaatacttcaatggcacaaaaagaacggtactacactgact

SEQ ID NO: 215735 - DNA, 483 bp, Gossypium hirsutum
gaaccagcttgatggctttgatgctcgtggaaacatcaaagtcctgatggcaacaaacaggccagacacactagatcctgcattattacgtcctggacgtctggaccgcaaggtcgagtttggtcttcctgatttggagagtcggacacaaattttcaaaattcacacaagaacaatgaattgtgagcgtgacattagatttgagcttttagccaggctttgtcctaattccactggagctgacataaaaaagcgtgtgcacagaagctggaatggatgccattcgggctcggaaaaaaactgggaccaaaaaaaacttccttgatgctgtgaacaaagtgatcaaaggttatcaaaagttcagtgcaactcccaaatacatggtttacaattaaccgggttttacctctaccaactcctaaagacatgttctacattcaaaccaaaacatatatacctttttcaatgtattggaatagatat

SEQ ID NO: 215736 - DNA, 358 bp, Gossypium hirsutum
cccacgcgtccgcccacgcgttcgggtcgatactttactgcttttgctatgttccgtggtaaaatgagcaccagggaagtggatgagcagatgttgaatgtccagaacaagaactcctcatactttgttgagtggatcccgaacaatgtgaaatcgaccgtttgtgacatcccacccactgggctgaagatggcatcaacatttattggcaattcaacatccatacaggagatgttcaggcgtgtgagtgagcagttcacagctatgtttaggaggaaggccttcttgcattggtacacaggggaaggcatggatgagatggagttcactgaaacttagagcaacatgaatgatctgg

SEQ ID NO: 215737 - DNA, 275 bp, Gossypium hirsutum
gacaacggagcaacaaccccggccggtctcgtagccgccgctctagctcatggcttcggtgttttcgtcgcgggctccgggggcccaacattttaaggggcccacttaaccccgccggcacctttggggctttcgttggcgggaacattacttttttgcgcggcattctttactggatcgcccaacttctaagcttaaccgtcgcttgcctggtgcttaaagtccgtatccggaaaccggcttgaccaacttttggattggaattaagggggggc

SEQ ID NO: 215738 - DNA, 427 bp, Gossypium hirsutum
  unsure (1)..(427): unsure at all n locations
gtgcattagagtacctccatgaagtttgctcgccatctgttgttcacaaaagtatcaagtgagctaacatcttacttgatgctgaactcaaccctcacctttcagactcgggcttggcgacgtttattccaaatgcagatgaggtactaaatcgtgacgatgtggggtctggacacagtgcacctgaggttactatgtccggacagtactctcttaagagtgatgtttatggttttggagtggttatgttggaacttctcactggacgtaagccatttgacagcacaaggcctagactggagcaatctttggttcgatgggcaacacctcaactccatgatatcgatgctctatccaagatggttgacccggcacttaaagggctttaccccgttaaatctctctcacgttntgccgatgtgatcgc

SEQ ID NO: 215739 - DNA, 431 bp, Gossypium hirsutum
atgtaaaggcttgttgggggataaggctcggttgagtatttacgatccgcaggtgactgcggatcagattcagcgggatttgacgatgaacaagtttggttgggatcatccaattcatcgtcagcccatgagtccaaccggtgtgaagcaagtaagtattgcttgggatgcttatgaagcaagcaaggatgctcatgctttgtgtattcttactgaatgggatgaattcaagacgcttgattaccggagaattttcgacaatatgcagaaaccggcatttgtgtttgatggccggaatgtggtgaatgtggagatgttgagggacattggttttattgtgtattccattgggaagccgcttgatccttggcttaagaacatgcctgctgtggcatgatcgacctatctttctctttataactatactacta

SEQ ID NO: 215740 - DNA, 300 bp, Gossypium hirsutum
tacactgagtagatagaacattatcgagcagcaggcgcaagtgttctgaagcattggtggagcaggtggacttggttgcgtatgctgtttaatggggtgtgctgactggcgacgaaaggaaccgtctgtctggagctgacaaaaaggtgaatgacgctaggagggcttcatggaggattgtctcttctattgagcagaaagatgagagctgatgaaatgaggatcatgtggcatccatcaagaagtctgggagctagatcgtagctgagctcatgaagatgtgtgatgggagattgagcc

SEQ ID NO: 215741 - DNA, 392 bp, Gossypium hirsutum
gacgcgtccgggggtcccgtcggcggcggttcttgtaatcaaggcgttaaaggagccagagagggataggaaaaagaccgagaacatcaagcacaacgggaacattaacctcgacgacgtcatcgaaattgccaaggtaatgaggccgaggtcgatggctaaggatttgagagggacagtgaaggagattttgggcacgtgcgtctccgttgggtgtactgttgatggaaaagaccctaaggatctgcagcaggagatcgatgatggagatgttgatgttcctttggagtgagaaagcttgttcttctcgttttttacgtctatcctcatgcttgcctcttttagaaaaatgttcaatataaaagattttgaacaaatttgcttatatttaa

SEQ ID NO: 215742 - DNA, 411 bp, Gossypium hirsutum
  unsure (1)..(411): unsure at all n locations
cccacgcgtncggatgagactgtgccaactgttgtaacttatccttattgtcacagccaggtaatattacatccagaccaagaccgagttctcacagtccgggaatgtgcaagattacaaggttttcccgattattatagattctgcgggacaattaaagataggtattgtcaaattgggaatgcggttgcaattccggttggtcgagccttgggatacacaatgggaatggcatttcagaaaggaagcgggaatgaaccactgatgatccttcctcctaagttttctctttccaccaatatccagttagcaaaatcattgtcccaaagcactgatgattgaaccaaaactgatttcttaactttatatgtgtatctctgacataaaagtttcatgcaaaagctcttatgc

SEQ ID NO: 215743 - DNA, 440 bp, Gossypium hirsutum
agatatcactgcaagaaaaaaaaaaaaccatacatggcttccaacactgttgcatccgctgctcttcttcttaccttgaacttgttgttcttcactttggttagctctacctacgtgccttgcccaccaccaccaaagagccacaagcctacccacaaaagcccaccctcggcacctgaacagccaggcacttgccccagagatgcactgaaactaggcgtttgtgctgatttgttgggctcagtgcgcgttgttgttggaccgtcgaggaccaaatgctgctctctcatttcgggtttggctgatctcgatgctgctgtttgcctttgcactgctattaaagctaatgtgttgggggttaacctaaacgttcctgtttcattgtctttgctcctcaattcctgcgaaaagcaaatgcctgctggttacaaatgtgctta

SEQ ID NO: 215744 - DNA, 396 bp, Gossypium hirsutum
gctgcagttacagagtctttggagttacacaagataaaaaaccgacaatgggctattttgaaaacttcagcaataaaaggggaaggtctttttgaaggcttggattggttgagtaatacacttaaatccggaagcggctaactcttagcatgaagaatttgaagcattgctgctatgtgatccagatggagtggggaacgagcaatggtgttttgcttagtattatgatctgatagaaatttgagccatgagaaaagttgtgtcaattgaccttcctaaatttctgcttttattattatttttttggggtaaacatctggtatacatgtaaaatttttgttaaacatttaaccatttccttttattttatgttagcctctcttttagtttttcaaa

SEQ ID NO: 215745 - DNA, 402 bp, Gossypium hirsutum
tgtgactcgtaagaccagaattttggatgtggtgtacaatgcgtctaacaatgagttggttcgtacacaaactctggtgaagagtgctattgttcaagtcgatgctgctccattcaagcaatggtatctccagcactatggtgttgacattggtcgcaagaagaaagcagcagcaggagccaagaaagaaggagaggaaggtgaaactgctactgaggaagtgaagaagagcagccatgtcttgaggaagctggagaaacgtcagcagagtcgcacacttgacccccatatcgaggagcaatttggtagtggtccgttactggcttgcatctcttcacggcctggtcaatgcggccgtgctgatggatatatcttggaaggcaaagagctggagttttacat

SEQ ID NO: 215746 - DNA, 382 bp, Gossypium hirsutum
  unsure (1)..(382): unsure at all n locations
gganngacgcgtccgcggacgcgtccgcccacgcgtcctcccactcgtgcgctcggttacgtacatgaagactcggtatcaactgactctgttggggacagcaggggaagcatctttgatgccaaggctgttattgcattaaatgacaattttgttaagcttgtcgcgtggtacgataacgaatggggttacagttctcgtgtgatcgacttgatccggcacatggcttctgcctaagtgagtgattttggtgaaccaaactcatttcataatggactttttaataatagcctcgttcttcagctttagcaaaatatggaagagatgctatgggaataataatagaaattgctcgggattctacgaggcactaattgtacac

SEQ ID NO: 215747 - DNA, 419 bp, Gossypium hirsutum
cccacgcgtccgcccacgcgtccgcccacgcgtccgcttggctacgtagatgaagacttggtatcaactgactttgttggggacagcaggtcaagcatctttgatgccaaggctggcattgcattaaatgacaattttgttaagcttgtcgcgtggtacgataacgaatggggttacagttctcgtgtgatcgacttgatccggcacatggcttctgcctaagtgagtgattttggtgaaccaaactcatttcataatggactttttaataatagcctcgttcttcagctttagcaaaatatggaagagatgctatgggaataataatagaaattgctcgggattctgggagtttctaattttacactgtaattgtgttctgtctgaaacacttgtaatatatataattacaaggaacc

SEQ ID NO: 215748 - DNA, 402 bp, Gossypium hirsutum
ggagaaagatgaatccatggaagaagcagtcattagagagacggttgaggaagccggtgtagttggcgtcatcgaatgtaaattaggtaaatggtgttataagagcaaaaggcaaagtatataccatgaaggccacatgtttggtctgcttgtgaagcaagagttagatggatggcctgagaaaaacatccgaaaacgggaatgggtgacagtgtcgaaagctagagaagaatgcccgcatttgtggatgatagaagccttagaagagttggtttggcgacaaacgcaggcaggtgcggcccaaggaggaagtaaatgaagtagcaactatggagttttgttgtttgaatttgtagggttaggaaaatagatcattgtaattaagaagacatcaaaacgtta

SEQ ID NO: 215749 - DNA, 352 bp, Gossypium hirsutum
  unsure (1)..(352): unsure at all n locations
cccacgcgtncgattggccgttgctgtcgcaactgagtattccttccctgaggctgatagagtgaaggagtacttggcggatccaagtaagtttgctgttgccgctgcccctgttgctgctgctggtggtggtgctgctcctgctgctgcccctgccgaggaggaaaagaaacccgaacctgaagaagagtctgatgacgatatgggattcagtctcttcgactaagtttatttgtgttaaagcataaacatataagattggtgacagggtacattatctgctttattggttctcataantctccgtgatggactttgattgcttctaagtttggatgatttgtgaaggttt

SEQ ID NO: 215750 - DNA, 438 bp, Gossypium hirsutum
gaaccacggtatcctttatttggaggttggaaagctacttttgtcattggttatgggctaccattacaagacttccttttcgagacatctgatgacaggcgttatctcaactttacttttggatgcccccttcttgagacagtggttgacaagttaaccgtcaaagttgtgttacctgagggttcaaaagacccttctgctgtggttccctttcctgtggagcagcatttggagaccaaatattcttaccttgatgttgtgggaaggactgtggtggtcatggaaaagaaaaatcttgttcctgcgcacaactctcatttccaggtttactacaccttcaagccaatcttcatgcttgcggagcctttgatgttggcgtccgcgttcttcttgtttttcgtggcttgtgtggcttacctgcacatcgatctttccata

SEQ ID NO: 215751 - DNA, 278 bp, Gossypium hirsutum
  unsure (1)..(278): unsure at all n locations
actgccacaaggttntnattgggagggctttaagggcaacaggcctttaacctatctaacattgcatcggtgatgaatgtagccgcgaaattgaactcaaggcacgagtttccccctgataagtttgttgagactatgaagctcatggagcataggtacggagccaacgatttcgtgacaagcaaagactcgagccttttgtctcccggaacatactaccttacccaagatgattccatgtacctgagattttacccaaagaaagacagggactttgc

SEQ ID NO: 215752 - DNA, 403 bp, Gossypium hirsutum
cttctccagtgaccaaaaaagcttcattgtctcttctatcgaaaaccccatggctgctcttaagctagtttgtgctctagtgttgtgcatgttggtggttgagcccattgccacaaccaccataacatgcggcgatgtgacaagcaaagtggccggttgcttatcatacttgcagaacggagggaacgtgccgaaggcttgctgcgacgggatccggtccctgaacaacatggctcgaaccacccctgaccgccaaaccgtgtgtgggtgcttgcaagctgccgctaaggctgtcaaaattaaaggcaacttggctgagaccctcccagccaaatgtagtgtcaacatcccttacaagatcagcacttccactaactgcaaaaatgtgaagtgagatggatga

SEQ ID NO: 215753 - DNA, 382 bp, Gossypium hirsutum
acttgatcccgtgcttgtcctacgtacaaaacggcggtacacccgctgctgcatgctgcagtggggtaaaagcactctacggcgaggttcagacctccccggaccgccaaaacgtgtgcaagtgcatcaaatcggcggtgaacggaattccgtacaccagcaataacctcaatctcgcagccggcctacctgctaaatgtggtctccaactcccttacagcatcagcccctccactgactgcaacaaggtgcagtgaggttgatgatgatgatatggaaggagtggaagaaggttccagctcagctagataaagtagctagctaaggttaaataagctgtgttggtgtgttgttttttagaaaattccatatataatcgggg

SEQ ID NO: 215754 - DNA, 357 bp, Gossypium hirsutum
cccacgcgtccgcccacgcgttcgtatccctgaaaacagaaagaggccgccgttgtcgtccctgcagcagaacagcaaaagaagcaaagcaatggcaaggatcaaggttcatgagttgcgacagaaatcaaaaaccgatcttttggctcagttgaaagatctcaaagctgaacttgctcttcttcgcgttgctaaagttaccggtggtgcacctaacaagctttctaagataaaggtggtgaggctgtccattgctcaagttctgactgtaatctcacagaagcagaagtctgcattgagggaggcttacatgaagaagaaattcttgcctgtcgatctccgtcccaagaagacccg

SEQ ID NO: 215755 - DNA, 445 bp, Gossypium hirsutum
aggttttgagggaaagatggtgtcttgaggtggaaaggttagggttgagtgctgttataatggggagtagaggatttggagctgagaaaagagggagtgatggcaagttgggaagtgtcagtgattattgtgtgcatcactgtgtttgtcctgtttgttgttaggtatgctgacgataaagatgtcggcaatgcccagcccgtcgtgacggttaggcaggctgaggtggaagaggaaggtggcaaagatgcttagggtaatttcagcttaatcttatcagagtaccaggaattagccggaatgaagagaagtcgtgaaaatgtcttagtagttcatggttaaaatggaattgaacccaagggttttttttctcctttcatctgctctttatataaactcttaacgatgatgatgttgtatggttaatgaggtttcttgatacatt

SEQ ID NO: 215756 - DNA, 369 bp, Gossypium hirsutum
cccacgcgtccgccttgaccgagaaggatgaaacagctgaacaacttcacatttcgaagggagctatcgaagatggaacacagaaaattacttctgaagggcagagtttacaatctcagatttcttcactaatggaggagaataatttgctcaacgaatcacatcatatcacaaagaaagaacttcaatctgtaatatcacagcttgaagaacaattgaaaaacgtaaaagaaaatgaagaatctctaaaatcagagattaacaatctcaaggccaagattacggagagttccttactgcaaactcgtatcaaagaacttgaagaacagttggtgacagttgacgctcaattgaaagaagaggttgaaa

SEQ ID NO: 215757 - DNA, 345 bp, Gossypium hirsutum
agcctgacctaatcaagggactcagggctcacactgatgctggtggaatcatcttactcttccaagatgacaaggtcagcgggcttcagcttctcaaggatggtcagaggattgatgttcctcctatgaaacactctattgtcatcaaccttggtgaccaacttgaggtaatcacaaatggtaaatataagagtgtgatgcaccgtgtgattgctcaaacagatgggaccagaatgtccattgcttccttctacaacccgggcagtgatgctgctatatatccagcaccagctttgctagaaaaagaagctgacaaatctcaagtggaccccaaatttgtgtttg

SEQ ID NO: 215758 - DNA, 476 bp, Gossypium hirsutum
  unsure (1)..(476): unsure at all n locations
cggnntggaatggccggcccgacgcacgcgtccgcccacgcgtccgcccacgcgtccgcagcatatgagagggataagggtgaaggtaaggaagggcaacttggagcgggcgttggcggtgatgcancgggtgatgcaatctagcggaatcgaacggctgataaagcaggaacaaactcatcacattaagaattcggagaaacggattttggcacgcaagattttggagcgtaagatcaaatcacaggaccacgctcgcaagctgcaaaccatcctcatcaagaaagtcaggggtctgtgagggcagctttggtgtagttttctgggtaaacttttgttttcttacggaattccaggattgttcaaaactttatttccctttttttagttcaactggatgaattgggcattggcatttgcactttgtactgggttgacattccttcgttcgtggttgagaattgatgaatgatgat

SEQ ID NO: 215759 - DNA, 266 bp, Gossypium hirsutum
gaaaaatgtcttgctgtggtggaaactgtggctgcggttctggctgcaagtgtggcaggggctgtggaggatgcaagatgtacccagacctgaacgttgccgagatgaccacaactgagactctggttcttggtgtagcaccccagaaagcacactttgagggagctgagatggaattcggggctgagaacggctgcaagtgtggagacaactgcacctgcaacccttgcaattgtaaatgattagagaccaaagccaaagctccc

SEQ ID NO: 215760 - DNA, 434 bp, Gossypium hirsutum
tctctctttcccatagtttcacccgtcttttaatccatcgctcacaaaattatgggtttgaaggaggaattcgaggagcatgccgagaaagttaagaccctcccggccgccccttcgaacgatgacatgctcattctctatggactgtacaagcaagccactgttggaccagtgaataccggccgtcctggaatgttcaacatgagggaaaggtacaagtgggatgcatggaaggctgttgaagggaaatcaaaggaggaagcaatgggggattatatcaccaaagtaaaacaactgtttgaggctgctggaagttcttgatgtgtgtgtgtatggccaatgaaaatggtgtaatttcaagcccttgttggtactttggggtttcattactatgaataaattatgtactctttttctattgctatatggtaatt

SEQ ID NO: 215761 - DNA, 385 bp, Gossypium hirsutum
gtccgcccacccgtccgaaaaaaccctagttattaatcggcggaagcagaaagcctctagccatgactttcaaacgtaggaatggtggccgcaacaagcatggccgtggccatgtcaaattcatccgctgttctaactgtggcaaatgctgccccaaggataagtcaattaagaggtttcttgtgaggaacattgtggaacaagctgctgttagagatgtccaagaagcctgcgtttatgacacttatactttgcctaagctgtatgtgaagatgcaatactgtgtctcgtgtgcgatccactcccacgttgtgagagtccgatcccgcaccgataggaagaaacgtgacccacccgcccgcttcatcagacgcagggatgatat

SEQ ID NO: 215762 - DNA, 363 bp, Gossypium hirsutum
  unsure (1)..(363): unsure at all n locations
gcgngcgggaggtgtacctaaaatatgagttggagtttctgattattttgacggctagcaggtgtgtttnttttcgagaagtacgtgaggggctttgcnataatgtgtctgcactctttcatgatcttgataacggcatgctccctatcagtgatatcttcccttacctgcccatccctgctcatcgccgtcgtgatcaagctcgaaagaagcttgcagaaatctttgcaaatatcatttcctctcgtaaaaatgctggcaagtacgagaatgatatgttgcaatacttcattgactctaagtacaaagatggtcgtccaactacagagactgaaataactggcttgctcattgctgcgctct

SEQ ID NO: 215763 - DNA, 377 bp, Gossypium hirsutum
ggactttgaagaaggaccgtaaccctaagtatcctcgcatcagtgcaacaccaagaaatgagttggatcgatatcaaattctcaagtatcctttaactactgagtctgcaatgaagaaaatcgaggacaacaacaccttggttttcattgttgacatccgtgctgacaagaagaagattaaagatgctgtgaagaagatgtgcgacattcagacaaagaaagtgaatacgttgatcaggcctgatggaaccaagaaggcgtatgttaggttgactccggattatgatgctttggatgtggcaaacaagattggaattatctaagcagatcaaccaatgtcttccttgatttcaacagttttgttagaacgattgact

SEQ ID NO: 215764 - DNA, 360 bp, Gossypium hirsutum
cgtccacgcctgccctaatcaaagcactcaggccttttacttatgcttgtggaatcatcttactctgccaaaaatgcgagggtaaaggccgttaactttttaaaaatttgcaaaggatttatttttctcctataaaacactctattgtcatcaaccttggtgaccaacttgaggtaatcacaaatggtaaatataacagtgtgatgcaccgtgtgattgctcaaacagatgggaccagaatgtccattgcttccttctacaacccgggcagtgatgctgttatatatccagcaccagctttgctaaaaaaagaagctgacaaatctcaagtgtaccccaaatttgtgtttgaagactaca

SEQ ID NO: 215765 - DNA, 439 bp, Gossypium hirsutum
caatcatgccgataatgaaattcaactcagatgaagaggttgtcaagcttgcaaatgattcaagatatgggcttggctgtgctgttttctccggcagtcaaaggcgtgccaaggagatagcttcccaaatacattgtggagttgctgcagttaatgattttgcatcaacttatatgtgccagtccctgccttttggtggcacaaaagatagtggattcggccgatttgctggtgttgagggattgagagcttgctgtttggtaaaggcagtcgttgaggatagatggtggccttatataaagaccaagataccaaagcctattcagtatcctgttgctgaaaatgggtttgagtttcaagaatcactggtggaggcactttatggcttgaacatttgggaccgtcttcgagcactggtcaatgttctaaagatcatttc

SEQ ID NO: 215766 - DNA, 276 bp, Gossypium hirsutum
cccacgcgtccgcttgaattggaggaaagagagaaggtagtgaggaagatgtgggatgtgtatacacatagcacaggcattcgtttgcctagattttggcttgatgcttttgaagctgcttatgagaatttatcaagtgatgttaatggagttcgcgataatgccatatctgaaattgctaaattatctatgcagtccctaaatcttgttcccccctcggttcaatcaaagattagcagcagtcaagggagaaaaaagactaataaagaagcttat

SEQ ID NO: 215767 - DNA, 408 bp, Gossypium hirsutum
  unsure (1)..(408): unsure at all n locations
cccacgcgtccggtaccgttgagcttaacggaaccaaccgcgagactttgacccanggtgtggatggccttgcacagcgatgccagaagtactatgaagctggtgctcgctttgctaaatggcgtgctgtccttaagatcagtgctaatgagccaaccgagcttgcaatccaagaaaatgccaacgggctagctatgtatgctgccatctgccagcaatgtggccttgttccaatcgtcgaacctgaaattcttgttgacggatcacatgacattcaaaagtgtgctgcagtgacagagcgtgttcttgctacctgctacaaggctctaaatgaccaccatgtcatgcttgagggtactctnntgagcctaacatggtgacccctggttcggactccccgaaggtgcc

SEQ ID NO: 215768 - DNA, 387 bp, Gossypium hirsutum
cccacgcgtccgcccacgcgtccgcccacgcgtccgccgcttcgcaagtagccagccgtgtcacacactcaagaagagcgagagctcgtaaatcatggcggaacagaccgaaaaagcttttttgaagcaacccaaagtgtttttgagctcgaagaaaggtgggaaagggaagaggccaggaaagggtgggaatcgcttctggaaaagcattggattgggcttcaagactccccgtgaagctattgaaggaacctacatcgataagaaatgccccttcactggcactgtttcaatccggggtcgtatcttagccggtacttgccacagtgccaagatggtcaggacaatcattgttcgacggaactaccttcattatatcaagaaata

SEQ ID NO: 215769 - DNA, 401 bp, Gossypium hirsutum
  unsure (1)..(401): unsure at all n locations
ggaaaagctccgaggaagcagctagcaacaaaggccgcgcgtaagtccgctccggcgaccggtggagtgaagaagcctcaccgtttcaggccaggaactgttgctttgagagagatccgtaagtatcagaagagcactgagctgttgatcaggaagcttcctttccagaggttggtgagggaaatcgcgcaagatttcaagaccgatctgaggttccaaagcagcgccgtcgctgctcttcaagaagcggcggaggcttatctcgtcggactgtttgaagacactaatttgtgtgcaatacatgccaagagagttacaatcatgcctaaggatatccaacttgctaggaggattagaggtgagagagcttangttgcttgtatttgctcgatcgattttaa

SEQ ID NO: 215770 - DNA, 285 bp, Gossypium hirsutum
cgcctgcgtctctctgttcatttctctcaaccaaaaagtctgtaccttggcgcttccagagagaccatgttggtttaccaggatctcatctacggtggcgagcttcgttctgactcattcccctacgaggaaatcgagaatgggatgctgtgggacgttgaaggaaagtgcgttgtgcaacgcgctgcccatgtatacatggacgccaatccttcagccgaatgtgctgatgaagatgaaagtgttcatgaccaagctgtcaagcgttgttgacattgttgacac

SEQ ID NO: 215771 - DNA, 443 bp, Gossypium hirsutum
taataaagcgtttgtctcatatttcagaagatggcccgtaccaagcaaaccgcccgtaaggctactggtgggaaggctccaaggaagcaacttgctaccaaggctgcccgtaaatctgccccaaccaccggtggtgtgaagaagcctcatcgataccgtcctggaactgttgctcttcgtgaaattcgtaaataccagaagagtactgagcttcttatcaggaaattgcctttccagaggcttgttcgtgaaattgcccaggacttcaagactgatttgcgtttccagagccatgctgttctagctctccaggaagctgcagaggcataccttgtgggtctttttgaagacaccaacctttgcgcgatccatgccaagcgtgtcacaattatgcccaaggacatccagttggctcgtaggatcaggggagagcgtgcttaatt

SEQ ID NO: 215772 - DNA, 444 bp, Gossypium hirsutum
cgtgcgggcaaaacatgccgaatttgggatgttcgaaacttgtcaaagtcaattgctgttctaaagggaaaccttggagcaatacggtccattcgctacacatctgatggtaagtacatggccatggctgagcctgctgactttgtgcatgtgtatgatgtcaaaagtgggtacgagaatgagcaagaaatcgatttctttggtgagatatccggcctatcctttagtccggacacagagtctctctttattggcttatgggatcgtacatatggcagccttcttgagtatagccggcagaggaactacttatatcttgattccctaatgtgagttgattgtgatgcgggcaaaacaagtatgttggtgtagtttatgatatttgaagaacttgtatcatttcaatctgtagaagagggtttactgtagatgtaaatgtaaaat

SEQ ID NO: 215773 - DNA, 391 bp, Gossypium hirsutum
cgcgtccgaggaggtaatgtatgacttggaagacaaaattaatcaagctgtctttcctggtcttcaaggtggaccacatgatcacaccatagctggtttagcagttgcattgaagcaggtcagaacacccgagtacaaggcttaccaagagcaagttcttagtaattgctcgaaattttctcagaggttgctggagaacggctatgaactagtatctggtgggaccgagaaccatttagtcttggtcaatttgcgaaacaagggtattgatggctcaagagttgagaaggtattggaatcagttcatattgcagccaataaaaacactgttccaggggatgtgtctgctatggttcctggtggtatccgcatgggaaccccagctctcaca

SEQ ID NO: 215774 - DNA, 404 bp, Gossypium hirsutum
gtacactcttaaccaaacatccggtaacttcgccattgatctcggtggcacgtgcaagatcacgctcccgcctgacaactacctggctacttactcgaagcgggtaacgggaaagattgaaaacggaaagatagcggaactcgatgggatcagggtacgggctttgttcaaatggtggtccataaccgggattcgatccaacggggataatttggtctttgaagttgggatggttacggctaaatatcctgctaagaactttgatgaaagccctctctgtgaaggccgtcattcgtcttcttaaaaagctaaaaccaaagtgaaaaataaagggcttctcagtttgctgcaaggattaagttattacgtacgtgtttctgaatcgtaagtatgtttgtctcgtc

SEQ ID NO: 215775 - DNA, 445 bp, Gossypium hirsutum
  unsure (1)..(445): unsure at all n locations
cgggntggaatggangggtcgacgcacgcgtacgcccacgcgtccgaaactttgaattattcatacaaaacaatgaaaacccacttttttcccgggggttttctcctgatttttttcttancccaaggtctgaaccccaaatgtgccatccaagaccatggctcaaacctgcaagtgttccatgtttacagtccatgctcacccttcaaaccctcaaaaccactctcatgggaagaggatgtgctgcaaacgctagccaaggaccaagccagggtgcagtttttgtccagcctggtggctaagaaatctgtggtgcctatagcttcaggcaggcagattgtgcaaagcccaacttacattgtgaaggccaatattggaaccccacctcagcccatgcttatggccatggatacaagcagtgatgctgcttgggtgccttgcactg

SEQ ID NO: 215776 - DNA, 424 bp, Gossypium hirsutum
  unsure (1)..(424): unsure at all n locations
ataggctgcagacacgtgttcattcagatcctgcttggcttgaaactggagatgcagtcgcaaatttataccctgaactgcgggaagacgctcaagaccatgcacgatctcgtaacgcatattttgaccaggcacgtcaaggatttctcactggcaataaggctttaacaaaggaacttagtgtgaaaggacaactgcaaaatatgcatatgaaggcaactcatggaaacactcaagaatctttatttcgccagaggaaccaagttcctcctgagattgttggagggcaggaacggatcatagacctgcatggattgcctgttagtgaagccattcatatgcttgaactatgaactatcagtgctcaggagaacagnctcggctgcagatcagcgccttcaggtttacataagtgttggaactg

SEQ ID NO: 215777 - DNA, 376 bp, Gossypium hirsutum
gaccgacgcgtccgcccacgcgtccgctcggctagattgacagtccctggaggagctagcgtggcatgcagcactgctaaagctgttgagtgggatgttgtctggaagaacaaccttgatccttcagggagggctgccctgggagtccatctctcggcttacgatgcagaggctcctctcatcagcaacgtgccatccaaggttatcgatagtataccacggatggtggaagttccaggagttgccatacacacttagtacctgcctgcctactggaaagggatcggaatcgatgaaatcaataagtgatagtagtatgttgtggcatattcatcaaaattctcatttactaaaatactttatgattggttggatc

SEQ ID NO: 215778 - DNA, 365 bp, Gossypium hirsutum
  unsure (1)..(365): unsure at all n locations
ccgggntggaangangcgtcggcgctttcttattctcaatatcacaaatcctcctataaaaaccaaactcctaaaccctcatactccactccgctcatcttcggtcgctccgccgtttcgcatttcgtctttctctctccaatggcttctattgctggttcatccatctccatgcaacctcgcccctttgctaaaggcagtgtttctgggttgaaattgggttcatttatgaaccagggaagaagcaccctctcatttacgatgcgtccaatgcctgctcgcttgcagatctgctgtgctgccaaacaagagaccgtggataaggtatgtgaagtagtaaagagacaattagctttagacaatga

SEQ ID NO: 215779 - DNA, 440 bp, Gossypium hirsutum
actaaacccaattcttctctttctcctgatcttcaaagactttctttttcctctcttcgcatctcaatcaaaccaagaacccacaaaaagcttcagatacaagcagctgggagcacatttggaaattatttccgtgttacaacttttggagaatctcatggaggtggtgttggttgtatagttgatggatgtcctcctaggattcctctctcagaagctgatttgcaaggtgatcttgatcgaaggaggccaggtcagagccgaattaccaccccaaggaaagagacagacacatgccgaatatattctggagtttctgaaggagtgactactggaacaccaatccatgtacttgtaccaaatactgatcagagaggacatgattacaaggaaatgtcaatagcttataagccatctcatgctgatgccacttatgacat

SEQ ID NO: 215780 - DNA, 376 bp, Gossypium hirsutum
tgaatttgcgagcagtatcttcggatccaacactcgtttcaagaccctcggaacggagcatcttaccaagtcaagcacccttttccaaaactatactgttttaacaacaccagaagagataccagctccgatgatggtggcttgtcacaccgtgccttacccttatgctgtcctgtattgccatagccaagtgactgaaaacagggtgtttaaggtatcattggacggtgagaacggagataaggtgaccgcggtggctgtttgtcacaaggatactacgcaatggaaccgtaaccacgtgtcgtttcgtgtgttggggattgagccaggaacgcccggtgtctgccatttcttcccggcggataacttcgttctg

SEQ ID NO: 215781 - DNA, 406 bp, Gossypium hirsutum
  unsure (1)..(406): unsure at all n locations
gaaaacaggacaaccccagccttatggctatggtaataaaaggattggaccaaatggtgatgttggttgggtggaatatcttctcctcacaaccaaccaagacccgaatctccttggaactgaaaacccagagagtttcaggattgctttggataattatatggcagcagtgaagaaaatggcatgtgagatacttgaaatgatagctgatgggctaaaggttcagccaagaaatgtgttaagtaagctgatgatggatgaacagagtgactctgttttcaggctgaaccattaccctccgtgccnagaggtggttcagtccttgaatggaacgagcagtaatgtgattggattcggtgaacacactgacccacaaatcatttcagtcctaagatccaacaacact

SEQ ID NO: 215782 - DNA, 403 bp, Gossypium hirsutum
  unsure (1)..(403): unsure at all n locations
ggtagatattgttgctagctctgttgggtatttcattagggtcactcaagaaattatggggcgaaatctgctgggagctgacaaatttccccaattattccaatggtctgaagatttcgcaaattgcagcattgttaaggaaagtttgcctccaagagacaaactacttccctttgtcaaaggtctcattgccaaatatcagcaagataatgctaaggcctaagccctcccaatgaacgtctttcacaatgattgtcgcatgcattttgccatttttgtatttgctgcttttgtgtgtaatgacctacttgcttttatgttcgagtgaaaaaataaattaactcattgtactcttaaataaaattggttattaaagtatcaatgagtttttcccttttnnaaa

SEQ ID NO: 215783 - DNA, 377 bp, Gossypium hirsutum
caaaaactctctcattttatcactgcccctttgccagcagccgcgccacactcgagagagagcgcgtcaaccatggccgaacagaccgagaaagcctttttgaagcaaccaaaagtgtttttaagctcaaagaaatcttcgaaagggaagagacctggaaagggagggaaccgcttctggaagagcattggtttgggcttcaagactcctcgtgaagctattgaaggaacctacatcgacaagaaatgcccatttaccggcactgtttcgatcaggggtcgtatcttagctggtacctgccatagtgctaagatgattaggacaatcgttgttcgacggaattaccttcattatatcaagaaataccaaaagtatga

SEQ ID NO: 215784 - DNA, 412 bp, Gossypium hirsutum
  unsure (1)..(412): unsure at all n locations
cgcgccacactcnanagagggcgggttttttatagccggtcggaccgataaatcctttttgaancaaccaaaagtgtttttaagctcaaagaaatcttcgaaagggaagagacctgtaaagggagggaacctcttctggaagagcattggtttgggcttcaagactcctcgtgaagctattgaaggaacctacatcgacaagaaatgcccatttaccggcactgtttcgatcaggggtcgtatcttagctggtacctgccatagtgctaagatgattaggacaatcgttgttccacggaattaccttcattatatcaagaaataccaaaagtatgaaaagaagcattcgaacatacctgcacatatttctccatgctttcgtgtaaaagaaagggatcatgtcattattggg

SEQ ID NO: 215785 - DNA, 301 bp, Gossypium hirsutum
cacccacttcttgcagtgctggtccagtagctgaagacatgtttcattggcaagcaagggggatgggaccctgagatagcccgtatgctggaggtgtgtttttagttactatccatttccctccagattatcctttcaagcctcctaaggttgcatttaggaccaaggtcttccatcccaacatcaacagcaatggaagcatttgtcttgatatcctcaaagaacaatggagccctgcactaaccatttccaaggttctgctctcaatctgctcactgctgaccgatccaaaccctgatga

SEQ ID NO: 215786 - DNA, 262 bp, Gossypium hirsutum
cccacgcgtccggtccttgactgccacacgttacacattgctgttaagtttgctgagcgtgtgaccaatattgacgggcgatctggtaaggagcttgagaaggaacccaagttcttgaagaacggtgatgctggtatgattaagatgattcctaccaagcccatggttgtggagaccttctctgagtacccacccctgggtcgttttgctgtgagggacatgcgtcagaccgtggctgttggtgttatcaagagtgtcgaga

SEQ ID NO: 215787 - DNA, 177 bp, Gossypium hirsutum
tcacttcttcaaggagttcaaccaaaactcttggaaactttgtcaaccccacctttgaatttcttctgaaaacatatcctttctttacacctgatttctccaaaaagactcttttcacaatgtctccattccatgaatatactcatctgttaacaaagccatccaagacccttgtac

SEQ ID NO: 215788 - DNA, 432 bp, Gossypium hirsutum
aaagaagtcaacgaaagacaagaaagcgatgaggagagctgaaaaggagagactcaaggagggtgaggctgctgatgaagagctgaagaagattaaaaaggaggcaaaaaagaaaggttcctctactacttcaaaggttgttgcttccaagggtgcagtaaccaagaagaaaagcaagcattctgatgaggatcattccccttcacaaagccaggttgatgagaatgaacaggtagccagtgatgacgacgatgatgtccagtggcaaacagatacttcactggcggctgctcaacaaaggattcaagagcagttaagtgctgttactgcagatatggtgatgctatctaccaatgaagagaagaaaaagtcagtgaagaagactccggagtgtgatgtcaaagtacatgagaaaagtttcaatacccatga

SEQ ID NO: 215789 - DNA, 409 bp, Gossypium hirsutum
  unsure (1)..(409): unsure at all n locations
ggaaacagttanttacaattgangttatccagtttacatccctgtggaatttatacaacgaggagggtttttaatgagacgaacgtgcttgnnaattctttgggtgacaaagctgcagaagatttgagaatgagaattattgaacataatatccttgttgtttcaaagtactactcgaggattacattgaagagacttgcagagttgttgtgtctcactatccaggaagctgagaagcatctttctgaaatggttgtctccaaggcactggtggcaaagattgaccgaccaatgggaatagtctgcttccaggtagcaaaggatagcaatgaaattctcaattcgtgggcttcgaacttggaaaaacttcttgatcttgttgagaagagttgccaccaaatacacaaag

SEQ ID NO: 215790 - DNA, 385 bp, Gossypium hirsutum
cggacgcgtgggttccgatatgagggagaggaggtgaacatgacattggcaaaatctgaggctaagatacttgatgataaaatctcggacaagcattataccgatgaggaggtgattaggattgtatcaacaaggagtaaggcacagctcaatgcaactctcaaccattacaatacctcattcggcaatgctatcaacaaggatttgaaggctgatcccagtgatgaattcctcaaattactaagagctgtgatcaagtgcttgaccaccccagagcaatatttcgagaaagttctacgtcaagccatcaataagttgggatccgatgaatgggctcttacccgagtcgtcacaactcgtgcagaggtcgacatggtacgtatta

SEQ ID NO: 215791 - DNA, 432 bp, Gossypium hirsutum
cttcgctctcaggcacaagatttcaggcagcagggaacccggatgaggagaaagatgtgggtgcggaacatgaaggtgaagctgagagttttgggaatcctgatcgcattgattctcattatcgtgctgtccatttgcggtggcttccattgttgaagagaatacgctcatctgctctgctatggactctatttccacttcatggatcagaggtattgttgcagtcgcacaactgtattgatgctcgtgtgcctatacatttcttgattacacgttcttttttattttctggtgtagcctaaatcacaagactgtgtgctgtatattacagtttggattcttttgattgcattaagttcattgatgtgtggaaattcattatccgtctttttgaaactggattttgatatataaaaattgataattataatt

SEQ ID NO: 215792 - DNA, 447 bp, Gossypium hirsutum
  unsure (1)..(447): unsure at all n locations
gatgttgccgcgtctgaattttatggaacagataaaacttacgacctgaacttcaaaggggagaacaatgacggtggatgagggatctcangagatgctttgaaagatttatacaagtcattcgtagccgagtatccaattgtgtcaatcgaagatccatttgaccaagatgattgggagcactactccaaactaaccaaggaaatcggagaaaaagttcagattgtaggagatgatcttttggtcaccaacccaaagagggttgcgaaggctattgccgaaaaaacttgtaatgcccttcttctcaaggtcaatcaaattggatctgttaccgaaagtatcgaagctgtgaaaatgtccaagcaagctggatggggtgtgatggccagncaccgcagtggtgaaacgaggatacttttatgctgatcttcagtcggtttggcacgg

SEQ ID NO: 215793 - DNA, 434 bp, Gossypium hirsutum
cggacgcgtggggaaatttcaagaaactgctctctctgtcttaacgctataatcataggagaaaaatgggttggagggaggaattcgaggagtatgcggagaaagctaagacccttcccgagaacactaccaacgacgacaaactcattctctatggactcttcaagcaagctactgttggaccagtgaacaccagccgtcctggaatgttcaacatgaaggaaaagtacaagtgggatgcatggaaggctgttgaagggaaaccgaaggaggaagcaatgaacgattatatcactaaggtaaaacagctgcaagaggctgctgctgcatcttcttgacgtgtgtgtgaatagaaaatggtgtaaatttcaagccctttgatacctatgggtttgaaaaggtctaaaactatgaataagcatgtactatggttt

SEQ ID NO: 215794 - DNA, 415 bp, Gossypium hirsutum
caaaacccctccaccaaaaaccctcttccatttcgtaatataaaccatggcggctcaacccgaacgcggcggagtttccctacgcgagaggcggtctgccggcaagccggaatccaacatcctcgccaggatcagttcctcccctatcgtttctcgtggtaagcaagccgcgtgcgacgccgctttcgtctccaagaagctcctccttagcaccggaaaggctgcttggatcgccggaactactttcttgatcttagctgtccctttgatcatcgagatggaccgtgagcagcagctcaatgagcttgagctacagcaagctagtcttctcggtgccccgcctactgcgtccgtcagtaagtgatcaggtccgattgggtcatttcaggtcagagcttggtggttcatcaatttt

SEQ ID NO: 215795 - DNA, 355 bp, Gossypium hirsutum
  unsure (1)..(355): unsure at all n locations
ccacgcatccnnacctcttaaacattcggttttatcacaaggtggccaaaaaggtttaacgcgctttttaatcgggaagcgcgcctgcataactcttttttcatcatgctcaccacaagaacaaactcgtccactttcattgtaatgcatctgatccatctactgttgttagtgtatctgattactgtgataacactgctggaagaaggacattacaaatataacccatcagtgatctgatctacactccataagacgatgttttgccatatctgcacaaattcaaataccatatcatttcatgctcctcaaagccatgaaacatgaaagcgccccaacatatttccacattgac

SEQ ID NO: 215796 - DNA, 438 bp, Gossypium hirsutum
  unsure (1)..(438): unsure at all n locations
ggaanacccggggcgagcgacgcgtacgcccacgcgtccgcccacgcgtccgacgatgtattcaacaagcatgttgagagtgcctccccggattttaatggggagttggggaaaccaacataaatgccaacagaagttttaaatcgtagcctaaaccttgcaagggtgatggatgtactttacagggaaggagatggatatacatatgttggaaaagcggctaagggtggaatcacttcattgctcattgaaccaattgcactttaaaattatgttaatttttcctctccaagcttgtttcctaagaaatagttattaagttctaattaataatgttttataatattcatatattataaaagaaagtccaaatctattgtctntgaacttatcggctcatattaattcaataaagttctatccaaacttttcattgtg

SEQ ID NO: 215797 - DNA, 427 bp, Gossypium hirsutum
agcagccgaactccgaatccagaaacaccaactgaaacataacaacaaaaatggcggccggcgagaagacaaagaagacccatgaaagcatcaacaacaggttggctctcgttatgaagagtggaaaatacactcttggttataaaacagtgcttaagtctctaaggtcctccaaagggaaactgattattatttccaacaactgtccaccattgaggaaatctgagattgagtactatgccatgctttgtaaagttggggtgcatcattataatggaaacaataatgatctgggaactgcttgtgggaagtacttccgcgtatcctgcttgagtatagttgatccaggtgattccgacatcatcaagtctctacctggtgacagctgagtcgtttgacagcagaaacaatgttcgttcttattata

SEQ ID NO: 215798 - DNA, 365 bp, Gossypium hirsutum
aaaaaaaaaaaaaaaaaaaaaaaaaaaaaaataaaaaaaaaaaaaaaaaaaaaaaaaacccgcgccatataaaaaccgcccacccccgcccaaaaaaaaaaaaaaaaaaaaacaacaccctccctcccccatcctatctccacattattctccccggccctccccctaaaaaccctcttttttaacaactccaaaaaccaaaaaccactcccactcctcacaaaaacctcctattacaccatgagacctcttgctatcccctccgttgctcctcatatgcccatgtaccctcctggtgcaccaagtcttggccaacaatttttatatgggcaagcacctccagctatcattcctcaaacttgttt

SEQ ID NO: 215799 - DNA, 437 bp, Gossypium hirsutum
tctcaggcttctgccttggaacagcatgcagctcctaactgcaaggttttggttgttggggaccctgccaacgccgatgcagtgatcctgaaggaatttgcaccttcaatccctgcaaagaacattacctgtttgacaaggctggatcataacagggcactaggtcaaatctcagagaaactaaatgtccaagtttctgatgttaagaatgtgattatttggggtaatcattcatcatctcaatatcctgatgtcaaccatgcaactgttatgactccatctggagaaaagccggttcgcgagcttgttaaggatgatgcatggttgaatggagaattcataaccactgtccaacaacgtggtgctgcaatcatcaaagctaggaaactctcaagtgcactatctgctgctagtgctgcttgtgatcacattcgtga

SEQ ID NO: 215800 - DNA, 460 bp, Gossypium hirsutum
  unsure (1)..(460): unsure at all n locations
cccacgcgtccgagattggctctcgttatgaagagtggtaaatacactttgggttacggggctgttcttaaagctctcagagactccaaaggtaagttgattataattgccaacaactgccctcctcttaggaagtcagagattgaatattatgccatgttgtgcaaggttggagttcaccactataatggaaacaatgttgacttgggcactgcctgcggcaaatatttcagagtgtgctgcctcagcattatcgacccgggcgactctgatattattaagagcatgcccggagatcactgagcaacagcggacgacacatcatactaggttttgttccaatttagtttatatttcttttgggtttctggaaacattgatgttaaaggcatcttattccgaaatttggaacttcctttgttatttgacttgtgtactangaaatttgtgaagtaatttc

SEQ ID NO: 215801 - DNA, 403 bp, Gossypium hirsutum
  unsure (1)..(403): unsure at all n locations
gtgatttttaacaaggcaagggatgagaagaaaacaggtagcaaacctgagtcaccagcaagagctgatgctcacggtgaacggggaccggatcctagcaaaccccagagtaagaaatggctttgctgcgttcaagcaccaccggctgaatcttgatgaagtccggcacgtatacgagctttcacaagtacattcaagcccctcaccatggattcttaaacaaagataagatttaattatggtgggagggggagaaaaaaagataaacacacatactgtatctatatgtactaatttggtgggttattatattattagaagctaagctgagtttatttgttgttgtcatttgccttgatcatgttataagctgtaaagcttgtattgacanttctttcttctc

SEQ ID NO: 215802 - DNA, 421 bp, Gossypium hirsutum
  unsure (1)..(421): unsure at all n locations
accggaatcaaaaagccatctcaccgaggaacctgccaaaaagaaactgaagaagaaaatgagcctgacatggctggcggatggcagcgagatgaagaaatccccctcccgacagcctatcgaagttaggaaatgcttgcactgcgaagttacaaaaaccccacaatggcgagaaggaccaatgggcccaaaaaccctttgtaacgcatgcggcgttcgtttcaggtccggccgtctcctccctgagtatcgccctgctgcaagtcccacatttgttccagcattgcactccaactctcataagaaagtggtagagatgagaaaacaggccaacttgccaacgaccggaacaccacccatgctgtcgatcccgcangccccgattagtatgtagttgagagaaagcttcacatagggagct

SEQ ID NO: 215803 - DNA, 374 bp, Gossypium hirsutum
agttcttggagctcaagacaaaaagaacccaccgcttcattgttttcaaaatcgaggagaagcaaaagcaagttattgtggagaagcttggtgaaccaaccgaaagctacgaggattttactaaatgtctccccgctgatgaatgtcgatatgctgtgtacgattttgattttctaacggccgagaacgtcccgaagagcagaatctttttcatcgcatggtactgcaaagtttcttaatcgtggtgttaaattgtttccttttattacttactatatgttgttgtcgtcctatgaaggtctcccgacacgtcaaggatcaggagcaagatgatttacgccagctccaaagacagattcaagcgagaactggac

SEQ ID NO: 215804 - DNA, 428 bp, Gossypium hirsutum
  unsure (1)..(428): unsure at all n locations
cccacgccgtccgcccacgccgtccgcagaactgttgggnttcgcaaaggtggtgccttttacgcggagaaattagtgcgtgagatgctgtgttaatcntgagcanttccatggngttatcnatcggtcacttctgaaagaagggnctctcttgaatgagtccaatgagtttgttggagacaaagtagcgtatgcactttctcaaggcttgaaggttattgcctgcattggggagactcttgaagagcgagaatctggctctaccatggctgttgttgctgcacaaaccaaagcaattgctggaaaagtaacaaattgggacaatgttgttttggcttatgaacctgtttgggccattggaacaaggaaagttgcaacccctgctcangctcaggaagttcattgcgagttgaggaaatggcttcatg

SEQ ID NO: 215805 - DNA, 465 bp, Gossypium hirsutum
cttgtccacatcggctggtcctgtcatgggagttttatatgtatctacagcaaagcttgcgtatggcagtgacaggccgctttcctatcaaaatggtagcaagactgaatggagctactacaaggtagttatcccattacatcaacttaaagcaattaatccttcaacaagcagagtcaatccttctgaaaagtacatccaagttagctctgttgatagtcatgaattttggttcatgggcttcttaaattacgagagtgctgttaaatgcctacaggaagctttgcaacagcatagcttacaatctgtgtgataatgatttgaccagtatatcggttgcaacatgttgtcatgcaagcatttggtctgctgcttcgaggcatttgatagtaaatgctccttcggaagctcttcaatattctgtggcaatgaaaaaataagtgaaaacatagagtgatatctgga

SEQ ID NO: 215806 - DNA, 432 bp, Gossypium hirsutum
ccttaagccattcaaggttcttctacttgatgagataacggtggaccttgatgtgctagcgagagctgaccttcggaagttgggtaggaaggaatgcgaagagcgaggtgccacgatcatctacgcaacacatatattcgacggtcttgagaagtggccatcacatattgtttacgttgctcatgggaaattgcaattagcaatgccgatggataaggttaaggagattagcaattcgtcgcttatgagaacagtggagagctggttgaggaaagaacgagacgaagagagaaagaaaagaaaagagcggaaatcacaggggctcccggaattcgaaaaccaaaccgagggaagccgtgtgacaggggatcctgcccgagccgctgttcgttcactaaacaacggttgggctgccgggcggttgaactcgac

SEQ ID NO: 215807 - DNA, 406 bp, Gossypium hirsutum
  unsure (1)..(406): unsure at all n locations
ttgaggttatctttggntggatcgttgcaccacannatgctatccgcgggtgactccaagaatgggactggagcggtgcaatccggttcacaagcacangggaacttcgaaggacttacatcntgctggtaaagaaaaacaggnggtctccatggaaagggtcatttgcaccacaagaaccgtccttctcgcagggcaacctggaagagaaacaacactctctcccttcgccgctaccgctgagttactgtgttccttagactttttatcctagttgattttagaagtcattgttttgagtttgaaatttttggaagttttaaaaaactgactctttgaatttacatgcaatttatttttgtttttggatgctatgaatttctgaagttattgctacttgcttttc

SEQ ID NO: 215808 - DNA, 391 bp, Gossypium hirsutum
atagtactgttgctccccctacccccctcttttttttttttcttttctttttgatttagatggactgaagcaagtgggtgatagtgattaacaatttgctatttgatatgggtgaaaacaatttgctatttcaggtttggcttttcacccagtggacggaatactgcaggcagtacctcatgtgatagcactcttcattataccaactcattttacaacacatgtcggactgctgttcctcgaggccgtctggacggcaaacattcacgattgcatccatggcaaactatggcctgtgatgggtgctgggtaccacactattcaccacactacgtatcgccataactatggccattacaccatttggatggattggatgcttggaacccta

SEQ ID NO: 215809 - DNA, 405 bp, Gossypium hirsutum
  unsure (1)..(405): unsure at all n locations
ctaatatataggagttaattgactcgtttttaataaaaggataaaatacaaggtgtctttttttgacgcatagcgagtactttttatttaagctaccaggaaatgtagagattccgattggttgggctcaaagtatttaattgatacagctaaatacgagcgggatagggccagttcgggtttggaaatatagagttgagtcaggtgcggcggcgggcaaagcacctgctttatgcattctttctctaagcaataatatgatgatagaaatgtcaaggtttctcannctataatgggtgctgggtaccacactattcaccacactacatatcaccataactatggccattacaccatctggatggattggatgctttgaaccctaccgttcccttttgaccaata

SEQ ID NO: 215810 - DNA, 384 bp, Gossypium hirsutum
  unsure (1)..(384): unsure at all n locations
ggctattgccgagcatcttcgtcgtgcttgttgcggtcaagacgccccactcctttctcgtcgcattgttgggcgggctggcgttactgtcccatcttcaaataacaagttgaagcttaagcgacttgcacctggtcttgtggaattatcttcaatgtctaaaactaagaccatggatgccctctccactattgatttacaaggagaagccgctacagttctaaccccaaagcatttctctacaatgtggccttttgcgtccatcaatggttccaatgctaatttaattggtttcgagagactgctatcatctgtgctggattcaaaggcaaacaaaaaaagatactttaagttactgaangctgatgtgtcagctcaaacatt

SEQ ID NO: 215811 - DNA, 393 bp, Gossypium hirsutum
cggaaaaaccggggcgggcgacgcgtacgcccacgcctccgagttaatccacccatttactctccctccggttacggtccctccaatcggggtttcttcaaggacggttgctccagtaactaagccaccaagtgggaaaccctgcccaacaccaccaaccaaggacacttgccccattgacacactgaaattgggtgcttgtgtggatctgctgggagggttggtgcacattggactaggtgacccggttgtgaaccaatgttgtccggttctttcaagactcgccgagctcgaagctccggtctgcttgtgcaccaccctcaacttaaggttctcaaccttaaaattatgtcccactgcttttcaactccttgcacaattggaaaaccaccc

SEQ ID NO: 215812 - DNA, 460 bp, Gossypium hirsutum
  unsure (1)..(460): unsure at all n locations
gaccgacgcgtccgcccaagacgacntcaccctcatctgtctccttctggtggcgaatgactgccaaatacaggggaggtttcagcagcgtcgttggggggaagcaaactctcgatgacaagtactctttaggcaaagctcttaaaacttcccaactcgaagttttggctttcaaatatggatatggagatggtaaagcggtcaacgttgttctgacttccgctgacgtggcggtcgatggtttctgcatgagccggtgcggtacgcatggttcggttcaggttaagaagagcaggttcccttacgcttgggtaggtaactcggtgagtcagtgtcctggttattgcgcgtggccgtttcatcaacccgtgtatgggccgcaaactccccccatggttgctcctaacggagacgtangggtggacggaatggtgatcaactcggcaacggttttggcggg

SEQ ID NO: 215813 - DNA, 345 bp, Gossypium hirsutum
atgaggcgggctcggggaacctcaagcttggtatccatgaagactctcaaaacaggactaaaattgccgaattgctccgctaccactccaccaagagtggtgatgagctgaccagcttgaaagactatgtgaccagaatgaaagagggtcagaatgatatctactacatcactggtgagagtaaaaaggcagttgagaactctcccttccttgagaagctgaagaagaaaggttatgaagtcctttacatggttgatgctattgatgagtatgctgtcggacagctcaaagaatttgagggcaaaaagcttgtgtcagctaccaaagaaagtcttaaacttgatg

SEQ ID NO: 215814 - DNA, 345 bp, Gossypium hirsutum
caaagatctgctgaaaaatgaatgcccccacattgttgttgggacacctggaaggatatgggctctggctagagacagggacctttcattgaagaatgtcaggcatttcattcttgatgaatgtgacaagatgcttgaatcacttgacatgaggagagatgtgcaggaaattttcaagatgaccccccatgataagcaagttatgatgttttctgctacgctcagcaaagaaattcgcccggtttgcaagaaatttatgcaagatccaatggaaatttatgtggacgacgaggccaagttgacccttcatggtcttgtgcagcactacatcaaattgagtgagct

SEQ ID NO: 215815 - DNA, 392 bp, Gossypium hirsutum
  unsure (1)..(392): unsure at all n locations
tccatcttcactccccctcctcacccaaaccctacanaatggccgccgccgcgcgccctcttgtctccgtccaaaccatagagtccgacatggctactgatgccactccaaccgttcctctcgctgatgtgatgaaagcctcgattcgacccgacatcgtcaccttcgttcacgacaatatatccaaaaacagccgtcaaccctatgccgtctccaaacgcgctggtcaccaaacttcagctgaatcctggggtaccggtcgtgccgtctcacgtatccctcgtgttcctggtgggggtactcaccgtgcaggccaaggtgctttcggaaacatgtgtcgcggtggacgcatgtttgctcctaccaagatctggcgccgctggcacccggaa

SEQ ID NO: 215816 - DNA, 477 bp, Gossypium hirsutum
  unsure (1)..(477): unsure at all n locations
ggggctgatgagctttgagcatttaatgaataaaatcagggcaatgccgagggtggacagtgaaggagtgatttgtggtgctaatttcaaggttgatgtttacagtagagttaatagcattccacgagtgggcagtgcaaccaattggactgatcactgggattcccattaattagtatttaaaaagaggagagagaagcaaaattaaacataagagagatgccatgaatatgctctagacaaacaccggggtttcttctgtttttcatcctagttgttggtttttcttttggtacttttctatgttatatgttggttgtgttggtttaatttctttgggatattatagtttcaatcttaattccaatttattaaatgtgtacccaatatccaaatcaatgcgtttgtgatccaaactgtcctttggtcccaatacatattatgattnttcaaattaaacattatcattatttcaca

SEQ ID NO: 215817 - DNA, 430 bp, Gossypium hirsutum
gaaggcctcgaacgaccgcacgcgacccgcgcgtcggaccctgcttacctggaaaaaagttttttatgttttccaaagggctcaactttcggtgccaaggggagcaattatcctccatgccccaaacctgacctaatcaagggactcagggctcacactgatgctggtggaatcatcttactcttccaagatgacaaggtcagcggccttcagcttctcaaggatggtcagtggattgatgttcctcctatgaaacactctattgtcatcaaccttggtgaccaacttgaggtaatcacaaatggtaaatataagagtgtgatgcaccgtgtgattgctcaaacagatgggaccagaatgtccattgcttccttctacaacccgggcagtgatgcttgtatatatccagcaccagctttgctagagaaag

SEQ ID NO: 215818 - DNA, 433 bp, Gossypium hirsutum
catttctttactatctttcctcctcaaaaaacttctctactacccagtataagccatgagtcgtcatcctgaggtgaaatgggcacaaagaaccgataaggttttcattacggttctattacctgattcaaagaatgcaaaagttaaccttgagccggaaggagtgtttaatttctctgctactgctggaactgacaataacacatatgagttgaagttggatctttttgataaggtcaacgtggaggaaagcaaaattaatattggagttaggagtatattctgcatcttggagaaggctgaaaaagtgtggtggaaaaaattattgcgcggggatggcaaagccccccattacgtcaaagtggactgggacaaatgggtggatgaagatgaagacaagggtcttggtgatcttgacttaagaggaatggac

SEQ ID NO: 215819 - DNA, 374 bp, Gossypium hirsutum
  unsure (1)..(374): unsure at all n locations
gaaagcaacatcgagcatctatcctttacaaaatgtgttcattcgtaaagtcaaaattttgaaggctccgaagtttgatcttggaaagttgatggaggttcatggtgattactcggaagatgttggtgtgaaaatagagaggcctgctgatgaaacaatggctgaggctgccccggaggtcattggagcttgaatgaaacaccccttgaatttgtgtgttcttttctttctgatttcaacagatttgatgattttgtttaaaactaggagaaattttccatggttttgatttgatctctaggatatggttttgcnnannaaaaaaaaaaaaaaaaaaaaaaaaaaaaaaaaaaaaaaaaaaaaaaaaacccccc

SEQ ID NO: 215820 - DNA, 471 bp, Gossypium hirsutum
cccacgcgtccgctaattaagtatgtgccgtctgctccgttctttgtagcaaagcaaagttggtgaagcatggccgtcgggaagaacaagaggatttccaagggaaagaagggaggaaagaagaaggcagcggatccttttgctaagaaggattggtacgatatcaaggctccttcagttttcactaccagaaatgtggggaaaactctcgtctcccgtactcagggtaccaagattgcttctgaaggactcaaacaccgtgtgtttgaggttttccttgctgatcttcaaggtggtgatgaggatcatgcttacagaaagattcgtttgagagctgaagatgttcaaggaaaaaatgttttgaccaacttttggggaatgaattttacaactgacaagctgaagtctttggtccgtaaatggcaaaccctgattgaaactcatgttgatgtgaagacaactgacaattac

SEQ ID NO: 215821 - DNA, 479 bp, Gossypium hirsutum
  unsure (1)..(479): unsure at all n locations
ccaacgcgtccgccaacccttccggcttgggtcaatgctcgatttcctaatggaccaaatggttattctctggatattctggctcgaattcctttgtggaggtatggtcttgattatcgacatggtactggtcatggaattgggtcttacctaaatgttctcgaagggccacatcaaattagtttcagaccacangctcgtaatgtgccacttcaagtttccatgacagtaacagatgaacctggatattatgaagatggcaactttggtataagattggagaatgtactcgtaatcaaggaggctgataccgaattcaactttggtgataagggatatttatcatttgagcatatcacatgggcaccgtatcaaataaaatngatagacttaagcatcttgacaccggaagaaatacagtggttaaataggtaccattcgaaatgtcgggaaattcttgcaccttacttggataaaaa

SEQ ID NO: 215822 - DNA, 301 bp, Gossypium hirsutum
  unsure (1)..(301): unsure at all n locations
ggagctaaaacccagnctaanccggagaatacggnggggatnnngactatggcgggcaaaggagnacgngnattggctactcctactagcgatcttggaaaaatcttgtcttgcatgcacggtcttgaaatggggggtgagatgaacctagcagctggaattcagattgctcagttggctctaaagcatcgccaaaacaaaaatcagcagcaaaggattatagtttttgctggaagtcctattaagcatgaaaaaaaggcattggagatgattgggaagaagctgaaaaaaaatagcgtac

SEQ ID NO: 215823 - DNA, 433 bp, Gossypium hirsutum
cccacgcgtccgaagatcaatgttttgattttaacaaaaaggggaaaagagccagtgatctgggggtatttttgtgaatggtggaaacaatttggagctgtagtatattgatgctctccccttgcaaatcgagggcgagcactctccttcctctttctgctgcttctgctttcgcattcggttcttgcaaagaaggctggtactaccgctgccttggccttgacccataaacaaccccacctcaatacctctattcctttccaccaataacccagatttgttttttttttgttatacgccccacaaaataacaaaacaaacccattgtttctcttttcgcggttgttggtgaattgttcattcatctgtttttggttttgattccttttcattttgaattttgacaaaaaaaattgaaagaatgttgctttac

SEQ ID NO: 215824 - DNA, 481 bp, Gossypium hirsutum
  unsure (1)..(481): unsure at all n locations
cccacgcgtccgccaagatatgattaatgaatttgacgctgacggaaatgggacgcgatcgatgtccctgaatttctcaaccttatggcaaggaaaatgaaagataccgattctgaggaggaacttaaagaagctttcagggtgttcgataaggatcagaacggtttcatatctgctgccgagcttcgtcacgttatgacaaatcttggcgagaagcttaccgatgaggaagtcgatgagatgatccgtgaagccgatgttgatggtgacggccagatcaactacgacgaattcgtcaaagtcatgatggccaagtaaggatctctccaaccaaaaaaaaaaaaaagaacagagtagataagtttgcaaagatttcaatctcgtaattggttcttgggtcgttcgtttatcngttgcattatttcgtcgaccggcttggttgctcttgttttttccttttaagagtctgggttttaatttt

SEQ ID NO: 215825 - DNA, 391 bp, Gossypium hirsutum
gagaacaaaggatttacctttggtttgacctatcaaaagaataccactcctactgtgtcctgtggaacatgtatcagatagtgttctttgtggacgacataccaatcagagtgttcaaaaactgcaaagatttgggagtgaggttcccattcaaccaaccaatgaagatatactccagcttatggaacgccgatgactgggccacaaggggtggtctcgaaaagaccgactggtccaaagccccattcattgccacatacaagagcttccacatcgacggctgcgagtcgtcggtggaagccaagttctgcgccacacagggcaagcggtggtgggaccaaaaggcattccaggacctcgacgcctatcagtggcgcagattgcgttgggt

SEQ ID NO: 215826 - DNA, 405 bp, Gossypium hirsutum
gacagggctacactctatcttaatacacttggtggtgatggtgcagttgttgaaactgatgaaggtgtaaaggagtttctctttggttcactagatgtccctctggtgaacttggagaacagtttgaaaaattatgatccgtcagaaaaggcatttgacattaattctgtgccaaaggacgtcaagactcagccacttgctgagaagaaagctacaagtaaaaaaccaactggtcttggtgctcctccccctggccctccatcaactgttgatgcttacgagaagctgctttcatcaattcccgagttcgcaagctttggcaagctcttcaagtcctctgcacctgtggagttgacagaagcagaaacggaatatgcaagtaatgtcgtcaaacatatttttgat

SEQ ID NO: 215827 - DNA, 409 bp, Gossypium hirsutum
ggccgacccacgcgtgcggtttcgatttgttgatgtcggattacttcttccaccggtactgcagtttgtgggggttactgtcggatacacgcctgagaatctgatctacaagaacttggactttggggtagacttggactcaaggatagcattagtaggacctaatggtgcagggaagagtacactgctgaaactgatgacaggtgaattgactcctattgatggaatggtccgacggcataaccatctgcgaattgcgcaattccatcagcacttggcagagaaactggatatggaaatgtcagctctccagtacatgataagagaataccctggaaatgaggaagagaagatgagaggtgcaatcgggaaagttggattgtcagggaaagcgcaagtgatgccaatg

SEQ ID NO: 215828 - DNA, 479 bp, Gossypium hirsutum
gttgagctttggattgctgatcgagctgttttaccggtggaaaattcactcggcggttcgggtcatcggaactatgatcttctcctccgtcaccgactccatatcgtcggtgaagttcaattacctgtccatcactgtcttttagctctcccgggagttaggaaagagtatttgacgcgcgtcatttctcatccacaagctctgtcacagtgtgaaaacactgtcaccaaactcggcctcaacgtcacgcgcgaagcagtcgatgatacagccggagccgccgaatatatcgcgacaaacaacctccgtgacacagcagccatagcgagcgcacgcgccgccgaactctacggactcaacgtcctcgctgacgggatccaagacgattcaagcaatgtcacgcgcttcgttatgttagctcgtgatccgatcattccacgcacggaccggccgttcaaacgagcatcgtcttcgcacac

SEQ ID NO: 215829 - DNA, 402 bp, Gossypium hirsutum
gtttctataaacaaagagaaactaggtgtgtaacaatggcgtcctcggatcttattggcaagctcgagactgatgtcgagatcgatatttctcccgaaaagttccaccatatgtggtgccacaggccgcaccatgtccaccacactagctctgaaaaagtacaaggatgcgatttacatgaaggtgaatttggaactcccggcgtcgttatctgctggagatatgtgcatgatggaaaggctaaaactgcaaagcaggtagttgaagttatggaccatgagaaaaagtcaataactttcaaaatgcttgaaggagatctgatggaggaatacaaaagcttcgtgattacaatccaaacttcccccaagagcgacggtaaaggcagtatagtgcactggactc

SEQ ID NO: 215830 - DNA, 367 bp, Gossypium hirsutum
cggcaactgtaactgccctgatcgaagccatggcacgaagggaaacagcaccaccatgagcattgaaactgaaaaaagctacatcaacactgctgtgatggatgctccagctgaaaacgatggcaagtgcaagtgcggtactggctgcagctgcacagactgcacctgtggccactaagccaacatacaatggtcatgcttcaggtcatggcatatatagggatctaaataatgaatttaaggttgaataatttgtctgttgtagtttgtgtggtgacttatatctgtcagttaacctttgtatcctttactatgatgtaatggctatgcttatggccttatctggttaatgaagtatccttactat

SEQ ID NO: 215831 - DNA, 419 bp, Gossypium hirsutum
taattttaaagctaagagatttattttaacgtagcatttggtcggttcgaagtaatggaaaggaccggaaaagtaaagaagggagccggaggaaggaaaggtggtggcccgaagaagaagcccgtttcaaggtctgtcaaagccggtctccagttcccagttggtaggatcggccgttacttgaagaaaggaaggtattcacagcgggtcgggaccggagccccggtttacttggctgcagttcttgagtacttggccgctgaggttctggaattggctgggaacgctgcacgtgacaacaagaaaaacaggatcatcccaaggcacgtgctacttgccgtgaggaacgacgaagaattagggaagcttctcgccggcgtaaccatcgctcacggtggtgtgttgccgaacattaaccc

SEQ ID NO: 215832 - DNA, 467 bp, Gossypium hirsutum
aagaatcaaactctaccttcaaaactaggataaaaaactaaaaatggacgcaattgactcagtttttgatccgctaagagagttcgctaaggacagtgttcgtcttgtcaagagatgccacaagcccgatcgtaaagaatttacgaaagtagcggtccgtacagcgatcggattcgtggttatgggattcgtaggatttttcgtcaagctcatctttatccctattaacaacattattgttggatccggttagccttgcttcatgttacagactcacaggaaggacgggaactggtagaaattttcaacactgagataaaagaagaactgtatgtttttagatcaagagctatatcatgtgagtttttgaactagttttaatttaagccccgggttgtcttatatttggttttgttggaatagaatcttgttgaagcaagtgagttttggtctaaatgaattttatg

SEQ ID NO: 215833 - DNA, 459 bp, Gossypium hirsutum
cccacgcgtccgcccacgcgtcttagcgaattcatttcacagagctgaaccaagtggctgaggaagccaaaaggagagcagaaattgctaggttgagagaactgcatacactgaaagggcatgtggaatcggtggtgagattgaagaacctggacatagacacaatccagcaagcgtacacggtgtaaggtgggggaatggtattccgaaggaatagtggaaaatgtaatgagagggagcgttttcctgagagtgaagctctaatatatgtatcttttattaccttaatcccgtccgccattttacaagggaaaggttattgtttatggcattttatgtttatattagtagtaaaaaaccatatgttttgcttttgttgtagtaaaaaaaaaaccaaaaaaaaaaaaaaaaacaaaactgtgatagtagaaataagaacccaaattaactttttcggat

SEQ ID NO: 215834 - DNA, 250 bp, Gossypium hirsutum
ggaaaacagaggatttggtgtcgttgaaaggtcaatgatggtgtgtaaatgttgtgattctcgaaattcctgcgttttgttccttccttgcagacatctttgtacatgtaaggattgtgcagcttttcttgattgttgtcctgtttgtagaacagtaaagaaagctagtattgaagctttggtttcttagatgcttgagcagaaaattttctaggaaaattgaaaaggaaaaacaatgatgatataagac

SEQ ID NO: 215835 - DNA, 471 bp, Gossypium hirsutum
cggagaaaaagttcaaattgtaggaaatgtttttttggtcaccaacccaaagagggttgcgagggctatggccgaaaaaactggtaatgcccttcttctcaaggtcaatcaaattggatctgttaccgaaagtatcgaagctgtgaaaatgtccaagcaagctggatggggtgtgatggccagccaccgcagtggtgaaacggaggatacttttattgctgatctttcagtcggtttggccacgggccaaattaagaccggagctccatgcaggtctgagcgtttagccaagtacaatcagcttctgcgaattgaggaggagcttggtgcggaagctgtctatgctggagccagcttccgtgctccagttgcaccctattaagatgcttgtttagatgataatttgctgagactggatgcgtgcggcagaacttcagtggtttattgtgaccctaaacatgttcaataatt

SEQ ID NO: 215836 - DNA, 402 bp, Gossypium hirsutum
  unsure (1)..(402): unsure at all n locations
gctaaatcctgatatagaggatgggaaaggtgtgaaattgaattatgatactcgcacttgtatggcactttttcgaacattcactgcatcagactatgttgctgcccagtgtcttaggcgaaggataatgcaccatcacctggagatcttcaagaaggttgatgtcatagtgaccccaacaactggcatgacagcaccaaaaataccacctagtgctctggaaaatggagaatcgaacatgcaggtttcaggttatctcatgcggttcattcttgctgctaatcttcttggtcttcctgccattactgtccctgttggtcatgacaaacaaggacttccaataggtttacaactaataggccgtccatggngtgaagctacaattctacgtttggcttctgc

SEQ ID NO: 215837 - DNA, 365 bp, Gossypium hirsutum
gcatgttcccgagacacaaagagttattggtcaagaaagtagttgacgtggctcgggaaatggccaaggcagaattgcctccttaccgatcccacctggatgtggtggtggcatgcgaggatgatgatgacaatgatatcgacattcctcaggtatccatctactatggctgagttatttcgttcgaacctccaaattatttagagttgaggatgagaaaattctcagagcaggctggcttccattccggttttatagtgatttgagcatacacaatggagtacattgtgcaaactttatatgaaatttgaagtacttttagttgcagaatatttatataatcttgtcattttaccttttctttt

SEQ ID NO: 215838 - DNA, 432 bp, Gossypium hirsutum
gtgacgagtggaagcttgctcttgaacgtgttcctgacactgtagcttctgaagggatcaggggtttcatcaatgttgtccgtgtgatatctgccaaacaaactgaagagcttaagattaagaagcaaacagaaaatgcatcaaaggagcttgagaaaaaggcatcatctctccggaacatagaaaggaagttctaccactcgtactctatggttggtatggggcctcctgatttaggatctgatcatggaccggttctggatgctcgggatcccctttctgaaaagaaatcagagcttgcagcctgtcaaaggcgggtggaagatgaaatgatgaggcatgccaaagcagtagaggtaactagagcaatgaccctgaataatcttcaaacaggctttgcccggcgtttttcgagcattaaccagctttttt

SEQ ID NO: 215839 - DNA, 403 bp, Gossypium hirsutum
cccacgcgtccgggagaagtagtatttagatagaatgaacgtaagtctccaagtgctgagcgggatgatgataccgaaagtttgtcgtttgctgtagaaatggccaaggtagcaagtgatgtgaaggctgctgatataagggtcctctttgtgaagcctcttgtgtattggtctcggtttttcatcattgcaacagcattttctcgcccgcagattgatgccattggatccagaataagagatttggctgagaagaagtacggaaaagttccatctggagatgcaaaaccaaactcatggacacttttagactttggtgatgtcgttgtccacatatttcttcctcaacaaagagctttttacaatttggaagagttttacggaaatgcaacactcattgagc

SEQ ID NO: 215840 - DNA, 468 bp, Gossypium hirsutum
taaaacaggaaattcaaatctttcaatggttttttaattcacatccatattcattaaaatctgaaattagataattaccacttggggtttttctaatggcgttgaatatggattatgaattaaagaaagattgtcacgatggaattgtcgttaatggcggaagcgatggccttttactctcacatgccaacaggaacaagctcattatcgataccgatcccgggattgatgatagcatggcgatctttatggcatttcaaaatccagaatatgagatcttaggtttgaccaccatatttggcaatgtccaaaccgaagatgccactcgtaatgccttacttctgtgtgaaatcgcagggcgtcctgatgttcctgtagcacaaggcagccccgagccgcttacgggtgggaggccgaatgttgccgactttgttcatggctctgatggactggggaatatattcctat

SEQ ID NO: 215841 - DNA, 484 bp, Gossypium hirsutum
cttcttcatcctttctagcatctggctgggttggttcttttatgtatttggcttcttgcttatagttcgtctactgcttatcattgtttgtgctgaagtttcggtggtccttacctacatgcatctctgcgttgaggactggcgatggtggtggaaggctttctttgcttcgggttcagttgcactctatgtgttcctatactccatcaattacttggtgtttgacctacagagtttgagtggtcctgtgtcagctattctttatcttggctactcaatgatcatggcaattgcaatcatgttgtctacaggcaccattggcttcatcacatcattctattttgtccattatcttttctcatctgttaagatcgattaaaaaggttccattgcgatcttcagctaccatcctgaagaagactttggcctgtaagaggatgatttctctcaagttgcctttggtagccgatcatgcatcactgta

SEQ ID NO: 215842 - DNA, 354 bp, Gossypium hirsutum
  unsure (1)..(354): unsure at all n locations
cccacgcgtccgtgctcttgttattcagtctctggctgccaatttgggtgttgggacaggggagcatttagcagagcactgtagaactgaatatcctagaggcccaaacttcgtgttatgggttcttgctgaaatcgctattgttgcatgtgatattcctgaaggtgaccataagatcttaaaagctaaacaagctgagttcttcattgccacttgatgaagatcttaatgtaattggaaatatctcaaaagtgaaataagacaaaaaactatattttgtatcatcnaataaaaaaaaattaaataaaaattaatatattattattaatatatattttaaaatatatataataa

SEQ ID NO: 215843 - DNA, 410 bp, Gossypium hirsutum
cgcatgcgagtgcccggtttccgtgacagctgatgagatcgccaagaaatgcagcagcagtgctgagaagaggttctggtgggacgagccgacaatgtcggagttaagtttgcaccagagccaccaactggtgtgggttagggcaaaccacttggtctatgactattgtactgatactgttaggttccctatcaagcctgtagagtgtgagcaccatcgtcactagtagaccagctaaggcaaaaggggttcttttgggtacattgtaaaaatatgttgtatggggcactgggcagtggaagaaccttagtcataaaaaaaaacatgtactcatgtttcatattttggtttcttttagtttccattttgtatgagaatcacattagattaatagtattaacctttttttt

SEQ ID NO: 215844 - DNA, 442 bp, Gossypium hirsutum
ggctttgccttcgttactttccgggatgagaaatctatgaaagatgctattgaaggagggaacggtcggagtctcgatggaaggaatataaccgtcaacgaagcacaatctcgccgaagcggcggcggcggtggtggtggaggatttggaggaaacggtgggtacaaccgtggaggcggtggatatggtggtcgccgtgaaggtggatatggaggtggtggttacggaggtggacgccgtgatggtggtggatacggtgacggtggatctcgttactcaagtggcggcggttcttgtgcttaggttaaggcgttttaggatttgagtgagcttcggctcttattttacggtttaatgggtttgtttgttagtgtgtggtttctatcgatattttttcttgtatcatcaagagttttaaaacataaaaatggaatgaagtata

SEQ ID NO: 215845 - DNA, 206 bp, Gossypium hirsutum
  unsure (1)..(206): unsure at all n locations
cttggtaaagttgacatcttcgtattgggtttagggagtggtggtactgtttcgggtgttggacagtacctcaaatcccaaaatcctaatgttcanatatacggagtggagcctgctgaaagtaatgtattaaatggtggcaaaccaagtcctcatcatattactggtaacggagttgggttcaagccaaacatattggacatgga

SEQ ID NO: 215846 - DNA, 467 bp, Gossypium hirsutum
  unsure (1)..(467): unsure at all n locations
aaccaccgagccgacccacgcggccgggcgaactgtctaaacataagttttacgctttatatctgcttcaacagctattcggcgcgaggaatatacatttaagggagggggaaacttttaagggagtagtagaaaatcatttggtttttgaagagcccttaaaagagcaaattgatgggctctatcaaatctgttgtgatctcattctaaatggggccaacagtagctactttctaaaaattgtggaattttatggatccacgcttggtatgtagccaagcccaagaaaaaaggaacgaggggaagaatcgacaaggaatccataacaaaaaaaaaattgtgaatgaaaaaaaaagcgtgacgagaataattntctcaacccaagataaaaggaacgaggggaagaatcgacaaggaatccataacataaaataaaattgtgaatgaaaaaaaaaaaaaaagggcgg

SEQ ID NO: 215847 - DNA, 477 bp, Gossypium hirsutum
gaatgaaccacaacccgcaatctatcgatggtaagcacgatgatgactctgctcgctccgggttccttgcctctcttatggattatgctcccactatacctgacgaattggtggaacattacttagccaagagtggatttcaatgtcccgatgttcgattaataaggctcgttgctgttgccactcagaagttcgttgcggaagttgcaagtgatgcacttcagcattgcaaggcaaggcaagctgcagtcgtcaaagacaaaagggagaagcagcaaaaggataagcgcctaatcttgacgatggacgatctttcaaagtcattgcgcgagtatggggtgaatgtgaagcaccaggagtattttgctgacagcccgtcaaccggtatcgatcccgcttctagagaggaatagttgggccatgttatttacatgtttgtatttagttgatctacatttttttgcaaatctatgaaat

SEQ ID NO: 215848 - DNA, 461 bp, Gossypium hirsutum
  unsure (1)..(461): unsure at all n locations
cggacgcgtgggcggacgcgtgggcggacgcgtggggtttgctgggttctccaaggacaacaagcagcttgatgctgangttcatagcaagtacatatatggtggccatgttgctgcatatatgaggactttgatggaagatgaacctgagaagtatcagtctcacttcagcgagtatattaagaggggaattgaggctgataacatcgagtccttgtacaagaaagttcatgctgccatccgagctgatccaactgcaaagaagactgaaaaggagcctcctaagcagcacanaaggttcaacttgaagaagctaacatacgaggaaaggaaatctaaattgattgaacggttacacacccttaatgccgctgctggtgctgattcagaggaagaggattgaatgtangaatgctcatttcaaagcactaaaaatattccatgcttttctttaatataca

SEQ ID NO: 215849 - DNA, 486 bp, Gossypium hirsutum
gtccgcccacgcgtccgttcgtgaaaaccctaaccgtcaagaccataactctcgaggtcgagagcagcgacaccggcgataatgtcaaagccaagatccaagacagagaaggaattcccccggaccagcaacgtttaatttttgctggtaaacaacttgaagatggccgtagattggctgattacaacattcaaaaagaatcaacgcttcatcttgttttaaggttgagaggcggaattattgagccttctttaatggctttggctcgtaaatacaaccaagacaaaatgatttgccgcaagtgttatgctcggttgcatccgagagcagtgaactgtcgcaagaagaaatgtggtcatagcaatcagttgaggcccaagaagaagatcaagtaaaccatgactgacgatggtggtttatgtcatttgcttcaaaagaacttgaataccagacttgtcaaatattttttttcccatttggttcttt

SEQ ID NO: 215850 - DNA, 487 bp, Gossypium hirsutum
gggccgacccacccgtccgcccacgcgtccgtcaccatggttttagatcttccaagtgtagatttcaaaaaagttgatgctgatgttcatcaattgaagggtagcagttccagcattggtgcacagagagttaaaaatgcttgcattgcttttcgtagcttctgcgaggagcagaacatcgatgcgacactgagatgtcttcaacaagtgaaacaagagtattaccttgtgaagaacaagcttgaaactatgctcaggttagagcagcaaatcgtggcggctggtgggtcgattccgatgattgaactgggtttttgaggaccataaacatgaaagggggaaagaatgattttgggggtggtttatacaataagaacatatggtgtttaagggttctcttttttatttaatcttaccagtgagtttgtgggtggttgatgttcatgaaagaagagatttcatactaatttcactccaaataacttct

SEQ ID NO: 215851 - DNA, 417 bp, Gossypium hirsutum
  unsure (1)..(417): unsure at all n locations
ggtaaaagaagacctaacgggggaggaggcatttgaagccaaaaagcgtaagctagctaaccttgaaatggcactacttgcaaacccagaggcaaacattaagtctctgaaagagatgttgcaatttgccaaagatggtgatcactcaattctaaagcttggactgctgtccttgttggctgtcttcaaagacattattccaggctatcggattaggctacctactgaaaaagagctagaaatgaaagtttccaaggaagttaagaaaatgcgattctatgaatcaacacttctttctgcttacaaaggatacctgcaaaagttgttagcattagaaaaacaacccangtttcatcaatgttggggttcgtgtatttgtactttgcttgatgcctgtcctcactttaacttcaaaaa

SEQ ID NO: 215852 - DNA, 352 bp, Gossypium hirsutum
cggacgcgttttaccatatcatttctccagtttgggaaatgcttaccaagcctggtttggaggtctgcttgttgattttgccagtcctcgataagttcggatctgctatgagccttgtgaagagtgatgttggtggtaacatatcgaggttggaaaagaaatatgaaactgatcccgctaaatacaatcacttgtacagtatggtgaaagaagaggttgattgttaatcagctacagattcatctagttgtactaatgggcttctttggttgacacgatctttgtaattttttgtataatttgttctcatcttacttgaatctttcttatgtgtttaatgatttatttctta

SEQ ID NO: 215853 - DNA, 496 bp, Gossypium hirsutum
  unsure (1)..(496): unsure at all n locations
cggattgaataccgggccgacccacgcgtgcgaagtattgagaaaaatcgctttttttcacttccttatttgctaatatgtcgctggttacagatcttgttaaccttaatctctccgactgcactgacaaaatcattgctgaatacatatggatcggtggatctgggatggacctcagaagcaaagcaaggacactttctggtcctgtaagtgacccttcaaagctacccaaatggaattatgacggttccagcacaggtcaagcccctggtgaagatagtgaagtcatcctatatcctcaagctatcttcaaagacccattcaggaggggaaacaatattcttgttatgtgcgatgcttacacaccagctggtgagcccatccncacaaacaagagatgcaacgctgccaagatatttagccatcccgatgttgctgctgaagagcccttgtatggaattgagcaagagtacacccttgtgcagaaagatgtaag

SEQ ID NO: 215854 - DNA, 278 bp, Gossypium hirsutum
ggccgacccacgcgggcggataagcctgactttgagcctattgctgcttttggtatcgagatttggacaatcgaagatcgcatattgtttgacaatattttgattgccaaaaatgacaaggttgctgagtcatatagggagaccacatggaagcctaagtttgaggttgagaaagaaaaacagaatgctgatgatgagtccactgattcatatggacttttatgctttcatatgtatgtctttgatgttccttttacttggtttctttttttttactt

SEQ ID NO: 215855 - DNA, 351 bp, Gossypium hirsutum
  unsure (1)..(351): unsure at all n locations
cccacgcgtccgcccacgcgtccggttcaatatgggatgcttcatcatgggcaactgaagatggcgaatataaagctgattacaattaccaaccctttgttgcaaagttcaccagtttcaaagctggcggttgctcggcttactcgtcacctcggtgccggccggtctttgcctcgcctcatcgatccggcaggttaaccatgcaacaatataaagcaatgaaatgggttcaaaggtaccatttggtctatgattattacaaggaccccaaaaggaaccatgccttaaccccagagtgttggaattagcttttgaaatgaacttaagtgatagctntgtgggaaaaaaata

SEQ ID NO: 215856 - DNA, 492 bp, Gossypium hirsutum
  unsure (1)..(492): unsure at all n locations
gttaaagaanttgttgtaagatctctgcttgtttctctatccttccatgcctatcagcagggagaatatatgatactgcaaagggtgtcccctgttactcattcagtgggcaactgagtaaagcgggtggttgttattgtcagctctgttattttcttcaagacacctgtctcactgatcaattctcttggcactggaattgctctcgctggagttttcctgtattctagggtgaagcgatttaagccgaatgcaaaggcagcctaatttgtttgctttgctgataaattccagttattacatatgttttacgccactgattttaagcagagaacttaattttgggtattatttctccattctattccattttcatctttggataattttatatcttctctttaaaaaaaaaataaaattcaaatcgtcaattgattttgaaaaaaacaatttttagattaacctttataacttttgcccccatttaaaaac

SEQ ID NO: 215857 - DNA, 438 bp, Gossypium hirsutum
  unsure (1)..(438): unsure at all n locations
gctgacaaccttgtctccttccttaacaatgcctaaggagcaactgttggggatgctgtgaggaagcttggattatggggtctgtttacccgtggtcttcccctccgtattgtgatgattggaactctaactggagctcagtggggtatctatgatgctttcaaagtgtttgtgggctgccaactactggtggtgttgctcctgctcctgcggctgtggagcttgccaaggcatagaatgttggaaatcctgttgtcatgggggacaagtaaacataggattgctggaatggtttgtcaagctggtggaaggatattcttttttgcgttgagaacattnttatcaagtcgctctgttttgaaaaaaaactgttggttctaggagaggatggntttgatctcatcctccanactacggagactaatttttttggaatag

SEQ ID NO: 215858 - DNA, 233 bp, Gossypium hirsutum
aatttaacactttgccactgtctgttctgatgatgaatcgtaaaaataacacccaggttcttaataactgccggaacaacaaaaaacttctaagccgggtgagagcctttgatcgtcactgcaacatggttcttgaaaatgtctgggagatgtggactgtagtgccaaaaactgggtaaggcaagaagaaagccctccctgtttacaaaaacagattcatcattaaaatgttc

SEQ ID NO: 215859 - DNA, 400 bp, Gossypium hirsutum
ggtggatagcctatcagatcttagttttgattttagtaggagatagtactgaacttccatagtggaaaatgagtcgaccaatggaggaagatacagtcaagaacgaggaagaggaatttaacactgggccactgtctgttctgatgatgagtgtgaaaaataacacccaggttctcatcaactgccggaacaacaaaaaacttctaggccgggtgagagcctttgatcgtcactgcaacatggttcttgaaaatgtcagggagatgtggactgaggtgccaaaaactggtaaaggcaagaagaaggcccttcctgttaacaaagacagattcatcagtaagatgttccttaagggagattctgttataattgttctcagaaatcccaagtagagtatcac

SEQ ID NO: 215860 - DNA, 325 bp, Gossypium hirsutum
gggaccacccacgcgtccgggcacattgtaccaacaaatctatccaaacgacgttcacaggtgaattaatggcgtctacctctaagagcagggaccgacttctaattctcgcaaccaccttcctactatgcttgctcgcggctatcagctccatctccccgacctacttcttgccggagtggtccatcccgcacaacccgctccctagctatcgctactacgtgaccagcccaacctgcagaatcgtgccacccctcccacttccggagctgaaaagaagattcttcctataactgtcggacatcccggcttactgtcggtacac

SEQ ID NO: 215861 - DNA, 385 bp, Gossypium hirsutum
gttgggtttcactgtctacccatcaccccaggtctccacatctgttgttgagccctacaacagtggcctctcaactcactcccttttggagcacactgatgtggctgttcttcttgacaatgaggctatctatgacatttgcaggcgctctcttgacattgagcgacccacttacaccaatcttaaccgtcttgtctcccaggtgatctcctctttgactgcttcacttaggttcgatggtgccttgaacgtggatgtaacagaattccagaccaacttggtcccttacccaagaatacacttcatgctttcttcatacgctccagtcatctctgctgagaaggcttaccatgagcagctatcagttgctgaaatcaccaatagt

SEQ ID NO: 215862 - DNA, 411 bp, Gossypium hirsutum
atttgaagctgcatttagttccacaaagaaacatcatatagattataagcacctccccataagcagaccacaaaggaaagcttggagagagacccaaaaacaatgtctaaagaagtgagtgaagaaggacagggtcgtaaggactatgtggaccctccaccggcacctctgattgatatggctgaactcaagtcatggtctttttacagagccctcatagctgagttcatagccactctcctcttcctctatgtcactgttgctaccgtaattggtcacaagaaacaacaagatgcatgtgatggtgttggtctcttgggtattgcatgggcttttcggtggcatgatctttatccttgtttactgcactgccggtatctcatgtggacacattaaccctgcggtgacttt

SEQ ID NO: 215863 - DNA, 383 bp, Gossypium hirsutum
cccacgcgtccgctggatatgaacgtgaactcttttcactcaatgggcacaacaatcatcggagggacctacaatggcggtgtcgtcctcggcgccgactctcgtaccagcaccgggatgtatgttgctaatcgggcatctgacaaaattacacagctcacggataacgtctacgtttgccgttctggatccgctgctgattctcagattgtttctgactacgtccgttatttccttcatcaacatacgatacaacttgggcagcctgcaactgtcaaagttgctgctaaccttatcaagctactatcctacaataacaagaacatgcttcaaactggtcttattgttggagggtgggataagtatgaaggtgggtaaatata

SEQ ID NO: 215864 - DNA, 483 bp, Gossypium hirsutum
cgtgcgttgccagtgaaagaagtcatcttaaggctgttttttttaaacaccacaaagtcgtcctaacaaatgaaacctgctttgtacaggattaatgatcacttgcaatactcagttgagatctatgagtggtctggaactagctgggagccatacattactgacgatgtccaagtccagttttacatgatgagcccctatattttgataactttgtcgaatgacaaaaagggtctctattctgcgtcatttaaggttccagatgtttatggtgttttccagttcaaggttgagtaccaaaagctagggtatacaagcttatccctttgaaagcagattccagtcagaccatatttacacaatgaatatgaaagattcataccaactgcttatccctactacggagctgcattttctacgatggcaggattcttcatcttttcttttgttcatctatataacaaagaaagtgtggcatatcta

SEQ ID NO: 215865 - DNA, 309 bp, Gossypium hirsutum
aagaacgggacgacccacgcgtgcgggcacatggcaccaacaaatctatccaaaggccgtttacaggtgaattaatggcgtctacgcctgggggcagcgaccgacgtctcatgctcgcagccaccatcctactctgcttactcgcggctatcagcgccagcgccgggacctacttcttaccagggtgggccataccgtacaaccagctcactagctaacgctgctacatgaccagccgaacctgcagaatcgtgccacgcctaccatggtcggagctgaaaaggaaatgctgcctatagctggcggaca

SEQ ID NO: 215866 - DNA, 488 bp, Gossypium hirsutum
  unsure (1)..(488): unsure at all n locations
cccacgcgtccgaacttcttctctccaatctctctatctttcatccccattcctccatggctcaacgtccctgcctcttctctcaaaacccaactcttctccccctcaccaacccctccgatccccggcttttctccctccaatcagggcaatgaaatccatgcaaggccaggtcgtttgtgccacaaatgacaagacagtggcagtggaagtggtgcgtttagccccgcatcccaagtacaagaggcgtgttaggaagaagaagaagtttcaggctcacgacccaaataaccaattcaaagttggcgattatgtgcagcttgagaagagccggcctattagcaagaccaagactttcattgcggtggctgtaccaagtaggaatgggaagcangagaaggaggaggcaggggagcttgggattccattggagtctaaacagactcaagagcagccgcaggcttagtgttaagcccttcgcgtgggct

SEQ ID NO: 215867 - DNA, 372 bp, Gossypium hirsutum
cccacgcgtccgctcatgttgtcataatccctttgtttcaacagctttcctgtcatccaacaaccccacacaactcaacgacccctgttctaatctcaaaaaccaacacatcttccccttaccaaaccctacgatcccccgcttttctccctccaatcatggcaatgaaatccatgcaaggccagttcttttgtgccacaaatgacaagacaatcgcaattgaaattgtgcctttaaccccccatcccaagtacacaaaaccttttataaaaaaaaaaaaatttcaatctcaccacccacataaccaattcaaagtttgcgattatattcacctttataaaagcccccctattatcaataccaaaactttca

SEQ ID NO: 215868 - DNA, 366 bp, Gossypium hirsutum
ccgatctggaccttactcgccaatccgacgtcttattcttcttcgccgatgagaaacctcactatgtggtactagctgccgctaaagttggtgggatccacgccaacaacacttaccctgccgatttcattgccatcaacctccaaatccagaccaacgtcatcgattcctcttaccgccacggcgttaagaaaatcctcttcctcggttcctcttgtatttatcccaaatttgcgccgcaacccatccctgaaaacgcgctcttatccggtcccctggaacccaccaacgaatggtatgccgttgccaagatcgcggggatcaaaatgtgccaagcgtacagaattcagcacggcttcgatgcta

SEQ ID NO: 215869 - DNA, 434 bp, Gossypium hirsutum
gctgaccacttgatcaccaaaagaataatgtccgtgactaaaactaggaagttcttgaacactggggggtttatagtctcttctcttgcattgatggcactaccaatcttcagaacatcagctggagccattttctgttcttctgtggctcttggtttcttggcgctcggaagggctgggtttgcggtgaatcatatggatattgcacccaaatatgcaggaattgtaatgggtgtctctaatacagctggcaccctagctgggatcattggggttgatatgactggaaagcttctcgaagctgctaaagctgaatattcagatctttctagtccagaaagctggagaacagtctttgtcatcccgggattgctctgcgtatttagctctttcatattcttgctattctcaacgggggagaggatttttgactg

SEQ ID NO: 215870 - DNA, 400 bp, Gossypium hirsutum
tctttacccattcctcaaagggttgatggggaaacaagacaggcttcccaccatcattgtggttgggtgaatacttttagcttcaattctctctcttttatgggctcgagtcaacccctttgtttcaaaaggagatattgttttagaagtgtgcggtttggactgtgactaaaatacaggaaaagaaaaaaaagggggtcgtatttcatgaagaaaggttgtatgaaaattgcataaaatcaggcagcccttttggtggaaaatgaagacatgctgggatggcgacattgttgccctcagcatgtaataaggtaagcaaaagggaaacatgttgcatgatgtagatcatagactgcgaccccatattgtctgtgagtttcatgatcttcattgaatatag

SEQ ID NO: 215871 - DNA, 442 bp, Gossypium hirsutum
  unsure (1)..(442): unsure at all n locations
ccgggcgacccacgcgtcgaactcaggcagaaaaacatgggacagcccattgcagaccgaccctaaccaaaacacgggcgtnggatccagaaatgtggataggtgccactttgatttacagcctgttcgaaaaacttccacatatcttggcaggccctgaaggagtactcgaggactgtggtatgcaatcaacaatcatgacgtgattcaacctgctggttncacgagtggagcgggagtttcgccctgaaaacactgttttatgccgagtaccagaacaccggggctggtgcctcaacttctgcgagagtgaaatggggagggtacaaggtgatcactagtgcaagtgaagctcaggcttttactcctggcaggttcattgctggaggaagttggttaagctctacaggctttcctttcgctcttgggtngtaataaattt

SEQ ID NO: 215872 - DNA, 326 bp, Gossypium hirsutum
  unsure (1)..(326): unsure at all n locations
aaaacattgtgacaccccatttcattaccgaccctaaccaaaacacnggcagggtgatttanaaatgtaggataggccccacttctgatttacagcctgttcataaaaacttcccaacatatcttgtcatgccctgtaaggattactcgaggactgaggtaatgcaatcaacaatcattgacgtaattcaacctgcttgttgccactacaggagcggtagtatcaccctgaaaacactgttttatgccgagaaccacaacactctctctggagcctcaacttctgccatagtgaaatggagatgatacaaggtgatcactactgca

SEQ ID NO: 215873 - DNA, 432 bp, Gossypium hirsutum
  unsure (1)..(432): unsure at all n locations
tgaatctaacatgtctgaaattcctgatcttgttgaagattacagaaaggtgatgaaagaatttgcggaggagttggagaagcttgcagagcaacttttggaccttttgtgtgagaatctggggttggagcctggttacctgaaaaaagtgttttatgggtccaaagggccaacctttggtaccaaggtcagcaactatcctccatgccccaaacctgacttaatcaagggactcaaggctcacactgatgctggtggaatcatcttactcttccaagatgacaaggttagcggccttcagcttctcaaggatggtcagtggattgatgttcctcctatgaaacactctattgtcatcaacccttgtgaccaacttgagggtatcacanatgggtaatataagagtgtgatgcaccgtgtgattgctcaaac

SEQ ID NO: 215874 - DNA, 341 bp, Gossypium hirsutum
gtttcaattatgttcttacgcaatgcatttcttgttgttatcgttaatgaaaaagataggcgagtggtggaactaaactccattgagaatggacgaatttggaaaggatatgacgtcttgatctttgacacttggcattggtggcttcttaccggtagaaaacaaccatgggattatgtccaagacaataatataactcgcaaaaacatgcatcgtacggttgcctataagaaagcattgagcacatgggctagatgggtgaacctcaatgtagatcctgctaaaaccaaggtgttcttccaaggggtctcccccgatcatgtggattcaagggattgggc

SEQ ID NO: 215875 - DNA, 376 bp, Gossypium hirsutum
cacccacgcgtccgcccacgcgtccgagcttaagttatttactttgtctttacctcccctaccaatgctctagaagaagagcatttctttcctttttaccacacggaaatcagaatacaatatgcaaaaactaaatctgacataatagcaaaagcatatggctcttttgtcccccgagagaagcgaaaaatgcatgactaaaatggagggaaaaaaccgaaacaacatcttgatcctaatcaagctgcagcaagtttgaatccatcttatgcggatgcttacggtgcaacaccttctctatcacaaataccctacctgggtgctagacctatagttgcagaagcacctgcaccaccaaataacattctatttgttc

SEQ ID NO: 215876 - DNA, 377 bp, Gossypium hirsutum
atggatttcacgatttctcaccaactacatcttttcttaaccaactcttgcaagcaatgctggagaggttgctgcacttgtggcattgtctggtgacaagtcaactggaattgacaagaataccatattttctgcagttccaccaatgtttcccacaccgccaccacctccagcaccttggaagccataaatatgcttttagatcctttaaatatttcctttttgtgtgacttagtctcatgattttgtaagtgttttttggcaccttgatgaccttgaaagtgaaagtagtgcaaagggcaaggaaggagatgtgcaatggaaaaaagctgcactaaactagatggtggtttggctattagattggagaatatgac

SEQ ID NO: 215877 - DNA, 459 bp, Gossypium hirsutum
cgcgtgcgcccacgcgtccgggttcatgcaatgcaatggtcttttctaaaagaatttgtagcatcgccagaaggtcgatttgtggttgatgggtcagaagcaagagtcttgaaaactcatggacctcttggttttcttaaggttcatgatgctggtcacatggtgcctatggaccagcccaaggcagccttagaaatgctgaaaagatggaccaagggttcactagctgaaggtggtaaggcagagaaactgtttgctgaaatgtgatttttttttttcacttttcactgcttgcagtcagtcttagttacccgctgctcttatagtgggaacaacgaaacaaaataaacttcgaatacctgtatatatatgtatgtggatgccatatgatcctggtcatcttggggttttgaatatacatactaaaaaatatgaagtgatttgaacttttttgtggtt

SEQ ID NO: 215878 - DNA, 390 bp, Gossypium hirsutum
  unsure (1)..(390): unsure at all n locations
cccacgcgtccgcccacgcgttcggggatctactttctgtacaatgtggacatacctggtactcgagttgttgaaggggaaaataccatcttctttaaacaaccaagatgcaacagtcctttccaaggattcatgtatgactacatccggttagaaggtccctcaactccatgttaattcaggattctgttacacacttttctatatattcatcgttaccattcatatatgtaggatccgtataatgttatatttgtgaatgatgattagtgatgtattgaaaaggaataaactacaaattgatggaagagagccagatttgtccgtagctaanatattttatacatatatgtaatgtacttgttttatgtaaaagaatagttcctttta

SEQ ID NO: 215879 - DNA, 463 bp, Gossypium hirsutum
cccacgcgtccgaaagtcgacgacgaaactgccattaaactttggcgacccaactttacactgctcgtggtcacccttggtgaaaagggtagccgatactacaccaagaatttccgtggggcagtcgatgctttccatgtcaataccgtggacacaactggcgccggtgactcctttgttggtgcattgctatgcaagattgttgaaaacccaaccattcttgaggatgaagcaaaattaagggaagtgttgaaatttgcaaatgcatgtggagccatcacgacgaccaaaaagggagcaatccctgcactaccaaccgtggccgatgcccttgccttaatcaatggagcttagattttaagcaacttgaataatttgcacgtttgttttgcctcccgtgattatcctttcatttcaaagaattctcaaattattcccctttgatatgcgacctttgttcccc

SEQ ID NO: 215880 - DNA, 363 bp, Gossypium hirsutum
  unsure (1)..(363): unsure at all n locations
gcaagaattgaagctcgaataggggtgatgttttacattcttgtgaggtatgatgagtcaaggaagtcttttgagagtgcagtaacaaagcttanagcaagtggggagaggaagtcagccttctttggggttgtcttgaaccagatgggcttggcttgtgtccaattattcaagattgacgaggctgccgagttgtttgaagaagcacgagcaatactcgaacaagaatgcggcccatgtcatcaagataccctgggagtattacagcaatcttgcagcaacttatgatgctatgggaagggtcgaagatgcaatcgagatattggagtatgtactaaaattacgagaagaaaaacttggaat

SEQ ID NO: 215881 - DNA, 425 bp, Gossypium hirsutum
tggcatcggaaaagaagctgtcgaacgaaatgagttagatttaagttcataaacttgtcctcaacatctgtgtctgtgaaagcagtgatcgtctcacccgtgccactaaagtcttggaacaactcattgatcatacccctgtcttctccaaagctaggtacactgtgagatcttttcgaatcaggcataatgaaaagattgcttgctacgtgacgatgaggggagagaaagctatgcatcttctcgagagcggtttgtaggtttaggaagttctactttttgaagaaaacttctaagatactcgattctttcgaatggcattcaagagcacattgatcttggcatcaaatacgacccttcaactggtatctacagtatggacttttacgttgtcctgtaacgagctgggttccgcgttggtcgtc

SEQ ID NO: 215882 - DNA, 346 bp, Gossypium hirsutum
  unsure (1)..(346): unsure at all n locations
tggactttntgcatagtataagacggagataattggatccaaaagcagttgatcaaaggttctctcgtcatcaacatcggngatgcattgcatataatgagcaatggaaagtacaagagtgtggaacatcgtgtggttgccaacggaagcaataacagaatttccgtccctattttcgtaaacccaagacctattgatatgatcggaccattgcccgaattaatcgaaaacggtgagaagccgatttataaacaagttctttattcagattacgtcaaacattttttccgttaagcacatgacgggaagaaaacagttgcgcttgctgaattataaatattttaat

SEQ ID NO: 215883 - DNA, 419 bp, Gossypium hirsutum
aggagccattaaagcttgatattgttataagttttccagatcatggcttccatctccgttttgaccgttggtctcagaggttgcgccttatcgaaatttttgatatcaaacgtcttcaaatgcgctatgccacttctttgataggaggaccatctactcttgctacgtttgtagctgtctatgcactttttggtccaacctatcctggaacttatgacaaggatagaggtgtttataccctattctacccaggtctttcttttgcttttcctattccaagtcagtattcagattgctgtcacgatggggaagcggaattgcctttggagtttcctgatggcacaactcctgttacctgccgcgtatccatatatgatagttctgcgggcaaaaaagtgggtgtggatccttatggataa

SEQ ID NO: 215884 - DNA, 384 bp, Gossypium hirsutum
cccacgcgtccgagagcttctttctatctatattcttatcagctttcaaagatggcaggaatcgggtttggtcgcttcgatgattccttcagtttggggtctgtcaaggcctaccttgctgagtttatctcaactttggtgtttgttttcgccggcgttggctctgccattgcttacaacaagttgacaactgatgcagccctagatcccgatgggctagtcgccattgctgtttgccacggatttgctctctttgttgcagtggctatcggtgccaacatctcatgtggcatgtcaaccctgcagtaacttttgggttagctcttggtggccaaatcaccatactcactggcatcttttactggattgcccaacttcttggat

SEQ ID NO: 215885 - DNA, 408 bp, Gossypium hirsutum
agagcttctttctatctatatccttatcagctttcttagatggcaggaatcgcctttggtcgcagagatgattccttcagtttggggactgtcaaggcctaccttgctgagtttatctcaactttggtgtttgttttcgccggcgttggctctgccattgcttacaacaagttgacaactgatgcagccctagatcccgatgggctagtcgccattgctgtttgccatggatttgctctctttgttgcagtggctatcggtgccaacatctcaagtggccatgtcaaccctgcagtcacttttgggttagctcttggtggccaaatcaccatactaactggcatcttttactggattgcccaacttcttggatccattgttgcttgcttcttgctcaaggctgtcact

SEQ ID NO: 215886 - DNA, 492 bp, Gossypium hirsutum
  unsure (1)..(492): unsure at all n locations
ggacgcgtcctcccactcgtccgcccactttttctcccacgcgtccgcaaaacccagattcaaagaagatggccaaattaaagacgattaccatgattatcaatgaaactttacggctttatcctcctttaagtggcgtgataagagaagtaggaagagaagtccaattaggaaaacttgtcctgcctacacattcagaggtcgacatgcgaatcatagcacttcaccatgatcctgacttatggggagatgatgttaatcttttcaagccagagaggtttgctgaagggatagcgaaagctactaagtacaatgcagctgcatttatgccttttggattgggacccttaacctgcagtggcatgagcttttcaatcactgaggcgaaactgcacttntcatgattctgcaacgctcacttttaccgtcttccctacttatgttcacgcacctgcactacgtcttacactcaagccacaacatgggatgcat

SEQ ID NO: 215887 - DNA, 252 bp, Gossypium hirsutum
attcccgggcaagaaggcgcggccgcctaccaggaagctgaagaccacttacaaggcatttaagcctaacttgtttatgtaagttctctcagtgcaatgaaaagagagttgatgtggtttatagttctaaaatttttggtagtgaacatctggcagtcttgctgattgggtattgtttttcatttgagaagcctaggccacatctgactggttgaagttgaattttctttaatttactatcacattttgttt

SEQ ID NO: 215888 - DNA, 393 bp, Gossypium hirsutum
cggacgcgtgggctccaacccagaaatcctccatcgtcaaccaggaggaactccaaaaagtcttgagccagttcgacgccaacagggatggcaagatctcggtgacggagctccgcgatgtgttgaaatcaatgggctccagcatcactgaggaagaactcaaacgtgtcttggaagacatcgacaccgacaaagacggcttcatcaacctctccgagttctcctctctcttccggtcttcatccgatgaagtcaccgccgccttggagctgcgcgacgccttcgatttgtacgaccaggacaagaacggcctgatttcgacgagcgagttgcacctggttctgaatcagctagggatgaagtgttcggttgattgattgtgctaagatgatc

SEQ ID NO: 215889 - DNA, 412 bp, Gossypium hirsutum
aaccaacaacaatggctaccagaatttgtcccttcttgcgctggttgcgctatttaccaccacaacaaatgcatccattattccacaatgctcacttgctcctagttatcattattccacaattcctaccaccagatacttcaatggccttcgaacacccatatgtgcaagcctatatgctacaacaagctattgcgtcgagcgtcttacaacaaccaattgtccaattgcaacaacaatccttggcacatctaacaatacaaaccatcgcaacgcaacagcaacaacagtttctaccagcactgatccacctatccatggtgaaaccctgtcccctactttcaacaacaactgcttgcattcaacccacttgctctatcaaacttattttcaaaccaataacaacaacaac

SEQ ID NO: 215890 - DNA, 244 bp, Gossypium hirsutum
  unsure (1)..(244): unsure at all n locations
cccaacaacaaccnctacgagaactgtgttgtacctttacaaggaggccgcgctctatcccaacaacgactacaatcctttctaagcacccgcatatctatgtgcccaacctctcattgatcaagctcatgcacaactttcattacaaggagtatatcacgcagaccttctcctgccataactactactaggatctcaccaacaatgtcattcaacacctactcaactacctgaacctcccttc

SEQ ID NO: 215891 - DNA, 443 bp, Gossypium hirsutum
  unsure (1)..(443): unsure at all n locations
ctattcctcagatggcaatggcaggtttcttgctattcagtgctatctatattgaactttactacgtagttgccagcgtgtggggacataagatctacaccatatacagcatcctgtttattgtctttatcattctcttgattgtcactgcttttatcactgtggctttgacttattttcaacttgctgctgaagaccatgagtggtggtggaggtccttcctttgtggtgggtctaccgggctgttcatatacacctactgtttgtattattacaatgcacggtcagacatgtcaagcttcatgcaaacttcgttcttctttgggtacatggcctgcatttgctatggcttcttcctcatgctcagggctattggcttccgtgcatctctgctctttgttcgacacatntatccgtcaatcaagtgtgagtaggaagttgga

SEQ ID NO: 215892 - DNA, 490 bp, Gossypium hirsutum
  unsure (1)..(490): unsure at all n locations
cgcgtccgattttgagcattcanaaacacaccaaacgaagctttctaactacaacctaacaacaatggctaccagaatatggtccctccttgcgcttcttgcgctatttgccagcgcaacaaatgcattcattattccacaatgctcacttgctcctagttccattattccacagttcctaccaccagatacttcaatggccttcgaacacccatctgtgcaagcctataagctacaacaagcgattgcggcgagcgtcttacaacaaccaattgcccaattgcaacaacaatccttggcacatctaacaatacaaaccatcgcaacgcaacatcaacaacagttcctaccaacactgatccacctaaccatggtgaaccctgtcgcctacttgcacaacagctgctttgattcaacccacttgctctagcaaacgtagttgcaaaccacacacaacaacaactgcaacagtttctgtcaacgcttaatt

SEQ ID NO: 215893 - DNA, 400 bp, Gossypium hirsutum
ccctacctctccaagttacaatccgcaatcagccaagtacagtccatctctagcatactcaccaagcagtccaaggttgtctccttccagtccttacagtccaacatcaccgaattatagcccgacgtcgccatctcattcgcctacttctccatcttattccccttcaaacccaacctatagtcctagcagcccatataattctggaggcaatcctgactacagcccaagttcgccacagtacagtccaagtgctgggtactcccctagtgctccagggtattcgccatcctcaactggtcagtacactccaagcaacaaggatgatcaggcagctaaagacggaaaaacatgacaggagttaatgataaggcacgccgtttttgaaaagctcgagaaa

SEQ ID NO: 215894 - DNA, 265 bp, Gossypium hirsutum
cattctcttgcctcaggaaagatttatgggggaggtgggttcaactacatcaaagaatcttttgaaaatggtactcttcaccttattgggttgttgagtgatggtggtgtccactcccgccttgaccaactacagttacttctgaaaggtgtcagtgagagaggagcaaaaaaaattcgtgtgcacatccttaccgatgtgcgtgactttattgatggaagcagcattagtttcgctgataccctatatattgatctgttggagc

SEQ ID NO: 215895 - DNA, 397 bp, Gossypium hirsutum
ggttgatggggaaacaagacaggcttcccaccatcattgtggtttggtcaatacttttagcttcggttctctctcttttatgggctcgagtcaacccctttgtttcaaaaggagatattgttttagaagtgtgcggtttggactgtgactaaaatacaggaaaagaaaaaaaagggggtcgtatttcatgaagaaaggttgtatgaaaattgcataaaatcaggcagcccttttggtggaaaatgaagacatgctgggatgcgacattgttgccctcagcatgtaataaggtaagcaaaagggaaaaacatgttggcatgattgtagatacatagaactgcgatccccatatttgttctgttgagtttttcattgattctttcgatttggaattcat

SEQ ID NO: 215896 - DNA, 400 bp, Gossypium hirsutum
cccacgcgtccgtagctgaagaagatcttaatctggttgctgctgcaactggtggaaccatacaaacaggtgttaacaatataattgatgaggttctaggaacatgtgttgtttttgttgttatgcaggttggaaatgaaagatgtaatatattcagcgggtgcccgtcaagacggacagctactatagttctacgcggtggagcagatcagttcattgaagaagctgagaggagcttacatgatgcaattatgattgttagaagagctttgaagaactctactgtagttgctggaggtggtgctatagatatggagataagtcgatacttgaggcagcatgcacgcacaatagctgggaaatctcaactatttattaactcttattcaaaaagcacttg

SEQ ID NO: 215897 - DNA, 288 bp, Gossypium hirsutum
  unsure (1)..(288): unsure at all n locations
cggtnatcctgaaacaacgggcatagggnccgccgaccaggaaagtcggcaaaagaacgaccggcccaccgggcaagagggcacantgtgttttaccgcccagcaagggaacaacaccgccgaaancaccagnggaggannaagccccggccggaagaagaacaaagcaaagggatatgggaaaccaggattacacaaggcaggcaccaaagcaaagaagtaggtaagaggaaaggcccatgacggagtagtcacaaaaatgccctaaatacccacaaaacactacaa

SEQ ID NO: 215898 - DNA, 350 bp, Gossypium hirsutum
  unsure (1)..(350): unsure at all n locations
ccagcaaaccttacttaactacagagccgcagcttctcttcatcgaatcccaaaaaggtagcttggaggccccancaataccaagtggtttttttatgtcttcctacagacgcagatgagcatcccaagatttaccggatgaagctttgggccactaacgaagtccgcgccaaatccaagttttggtattttttgaggaagctgaagaaagtgaacaaaagcagcggacaagttttggccatcaacgagatcttcgataaaaaccctaccaagatcaagaactatggcatttggctgcgatatcaaagtcaaactgggtatcacaatatgtacaaggaataccgagacac

SEQ ID NO: 215899 - DNA, 426 bp, Gossypium hirsutum
ggcatgtggtggtgcagctggtgcttcttcccttctctttgtctactccttggattatgctcgagctcgtcttgcaaatgatgcaaaggctgcaaagaatggaggagagagacaattcaacgggcttgttgatgtctacaggaaaaccctaaaatctgatggtattgccgggctttaccgtggtttcaacatttcatgtgttggaatcattgtttaccgtggtctatattttggaatgtacgactctctgaagccggtgcttttgactggaaacatgcaggatagtttcttcgctagctttgctcttggttggctcatcacaaatggagctggccttgcatcttacccaattgacactgttcgtagaagaatgatgatgacttctggtgaagctgtcaaatacaagagctcgcttgatgccctctc

SEQ ID NO: 215900 - DNA, 395 bp, Gossypium hirsutum
  unsure (1)..(395): unsure at all n locations
agggnncacccacgccgtccggaccaacgatcaacataacattttgaatccacgttctacattttagcacccatgcaaaccaccagagtgccggtgcttattctcattgctctttctgcatctgtactaacgctacaattttccctcaatgctacacaagctcctatacctacccttcttgcctcataccttacatcaatgatagcttcagtctgtgaaaacccaactcttcaaccctataggctccaacaagcaatctcagcaagcaacatacctttatcaccctcttttcaacaatcttcaaccctatctatggtgcagtcattggtacaaaacatcatggcacagcaactgcagcaactcctgctacctgtgatcaaccaaataactttttc

SEQ ID NO: 215901 - DNA, 192 bp, Gossypium hirsutum
tgtatttacagaagaagagtctagacttctatctgattatgtgtaccatacctcagctgccaaagcaagtggagagctctgcttaaaatatatatttgcatttggagcatttaatcgggcacttttaaacagtgcatctgagtggaaagtgccaaccacttttatatatggggctgaagattggatgaacta

SEQ ID NO: 215902 - DNA, 481 bp, Gossypium hirsutum
  unsure (1)..(481): unsure at all n locations
cccacgcgtccgcccacgcgtccgtttcccatagtttcacccatcttttaatccatcgctcacaaaattatgggtttgaaggaggaattcgaggagcatgccgagaaagttaagaccctcccggccgccccttcgaatgatgacatgctcattctctatggactgtacaagcaagctactgttggaccagtgaataccagccgtcctggaatgttcaacatgagggaaaagtacaagtgggatgcatggaaggctgttgaagggaaatcaaaggaggaagcaatgggggattatatcaccaaagtaaaacaactgtttgaggctgctggaagttcttgatgtgtgtgtgtatgaccaatgaaactggtgtaatttcaagcccttgtcggttacttggggttttcattactatgnaataaatatgtactctntntctattgctattatgttatttacagnagaaactctttgattactttta

SEQ ID NO: 215903 - DNA, 397 bp, Gossypium hirsutum
  unsure (1)..(397): unsure at all n locations
gnggtttgttaggctcggctgttgattacatggtctgtcttctttcggacatttttatgccaacgtatgatggaccgagcaactttgccaacaacctacttggtcaccgtctctattatggctttcgaactacaataagaccggacagaaaaggtcttgctccaatattcattgatcgagagaatggacagactgctggttttgaacaagcagttaggcgtgtcatgctcaaaacgaatttcggtgggcctcacaagcgtgtgccaccggaatcattttatacgaattcttggccggaattgcttctgtcaaatatcacctagcaatcctgcagacaaatgccctccggataatgttttggaaattttagaaagccagttggagaatgaagtgaata

SEQ ID NO: 215904 - DNA, 372 bp, Gossypium hirsutum
  unsure (1)..(372): unsure at all n locations
ggccgacccacgcgttcggctacaangattatactaaatgttttcctgttgatgaatgtcgatatgctgggggcgattgtgattttctaacggccganaacgtcccgaagagcagaatctttttcatcgcatggtctcccgacacgtcaaggatcaggagcaagatgatttacgccagctccaaagacagattcaagcgagaactggacggaattcaggtggaattgcaagcaacagatccaactgagatgggtctcgatgtgttcaaaagccgtgctaactgaatacggttcttttaggcatctgcaaccgggaagctttcttccttcctacctacagtatgtctttacttaagtgaaatgtttataggtt

SEQ ID NO: 215905 - DNA, 489 bp, Gossypium hirsutum
  unsure (1)..(489): unsure at all n locations
gtccattaaaatatctaaatgttagtggctgcaaccaaataggtgatgctggaattgtagccgttgcaagaggatgtcctaatctcacttacctcgatgtcagtgttctccagaatttgcgcgatatagcactaaccgagttaggagaaggttgccccttactcaaggatatagtactgtcccattgccaccaaataactgacattggtctttcccacctcgtcaaaaactgccaaatgctcgagtcatgccacatggtgtactgtccgagcataaccgcggcaggagttgccaccgtggtctctagttgtcccaacataaagaaggtcctggtcgagaaatggaaggttagtcccagaaccaaaagaagagccagttcagttctttcttatctctgtgtagacctctaattaggaccatccgagttgtgtattaaccaagctcgtcgcttctcaaaacaacctaacattatatgannatattatgtac

SEQ ID NO: 215906 - DNA, 407 bp, Gossypium hirsutum
  unsure (1)..(407): unsure at all n locations
ngttccaaggtttacatcattcacaggagggatacgttcagggcattcaagattatgcagaacagggttatttcgaaccctaagatagaagtcatatggaactcggtggtcgtagaggcctacggcgatagggttttgggagggctcaaggtgaagaacttggtcaccgaagaagtttccgatttgaaagtcaatggtctattctttgccatcgggcacgagcctgccaccaagtttttgggaggtcagctggagctcgactcagatggctacgttgtcactaaaccaggtaccaactcagaccagcgtgcacggcgtttttgctgccggagatgtccaggacaagaagtatagacaagctgttactgcggccggcaccgggtgcatggcagccttggaagccgaac

SEQ ID NO: 215907 - DNA, 459 bp, Gossypium hirsutum
  unsure (1)..(459): unsure at all n locations
cccacgcgtccgcccacgcgtccgtgaaaattagctttttcctggccaaaagataactcagcaagtgctgttattgcttgccctggtttctgtgccatggatgctattaccaaagccttttcttctaaagagacaacacgaaaataggcaccaaggccaatcctacgcaccactcgaaagcacagatgaaactctcctttcagtggcaaataatgattcccatggtcatgaccatgaggaatttgagtttagtgaagtctttgtgcatcaactgatccataccatagagtttgtgcttggtgcagtttcaaatacagcttcataccttcgtttatgggccctcagtcttgctcactcagagttgtcagttgtgttctacgagaaggttcttcttcttgcttggnggtataacaatataatcatcctcattgtcggcataatcgtctttattttcgcaac

SEQ ID NO: 215908 - DNA, 468 bp, Gossypium hirsutum
gcgatcaaccaaccaaaatagatatttaagatggtttcagggtcagggatctgcgcgcaagagagtggttgtggatgcaaggcatcacatgctaggaaggttggcttccattttggccaaggagttgttgaatggccaaaaagtagtggttgttcgatgcgaagagatttgtatgtcgggtggtttagtgaggcagaagatgaagtacatgaggttcttgaggaagcggatgaacactaagccttctcatggccccatccattttcgtgctcctgctaagatcctctggcgtaccattcgtggcatgattccccacaagaacaaagcgtggggcaagctgctcttgctcgattgaaggcttatgaagggaatcccagcttcatatgataagacaaagaggatgggtatttcctgatgctctcaaagttttggaggtttcagaaaggacacaggtactggttgttgggc

SEQ ID NO: 215909 - DNA, 341 bp, Gossypium hirsutum
  unsure (1)..(341): unsure at all n locations
tttacatcactgttggagatggtggaaataaagaaggtttagcaggaaagtttagagatccccaaccggattattcagcattccgggaagccagttacggccattcgacactggagatcatgaacagaacacatgcagtctatcactggaaccganatgatgatgggaaaaaagtggcaattgactcatttgtattgaacaatcagtactggtcaagtaacgttcgagaaaggaaactgaagaggcattatttgaatgggatgaggatgattgcttcttaatgaaaagaaaatatgaaaaatatcatctctggtagtgcttgatgaagtttcattgcaaga

SEQ ID NO: 215910 - DNA, 415 bp, Gossypium hirsutum
gtcggccacgccgtcggccaagccgtcggccaagctttcggtggacatttcaagcaggtggaaaagaaggggcgattagctatggaaatggcggcggtgaaaggagttgtgctaaagcacctgagagtgaatgcaacatccttgtccctgcttcgtaaccctaaacccatccctaacgaccactgtgctctcaccttcaacgccatacggcgccgatattccgacgacgtcatgggctcattccttgacaaatctgaggtcaccgatcgcgttgtctccgtagtaaaaaacttccagaaaattgatccatccaaggttactccaaatgcccattttcaaaaagatctcgggttagatagtttggacactgtggaggttgttatggctcttgaagaagattttgggtttgagatac

SEQ ID NO: 215911 - DNA, 463 bp, Gossypium hirsutum
ggaacttggaaatgtccgctatgctggtgttgctttcagatctccttagaggagttaacttacaggaacaagatgctcagcatattgtcaatgctgcaagaaatgcaaaaatggctagactgaaacaggccaaggaagaggcagagaaagagattgctgaatatcgtgctcaagtagagtatgagttcaagaagaaggtggcggagagtagcggatactcgggggctaatgtgaagcggctcgagacggaaacagatgcaaagatcaatcacttgaaaaacgaagctgcaaggatatctcatgatgttgtacagatgcttttgaagaatgtgacaactgtgaggaactagggggtcttccatgaagactgatggtttaattttctactacattctatcaattcccaaaactcagctcatgcttggaacaattttatgtcattattttatcatttggtgttatt

SEQ ID NO: 215912 - DNA, 361 bp, Gossypium hirsutum
cccacgcgtccggccaaatgttgacctgttaggcattgttgcccccacttctaattctgggggttattttctcaatcttcacaaggcaacaggccatcctattcttgtctatatggctgctggaagatttgctgacgatctggagaagttttctgatgaatatgcctgtgaactttgtgatgtcgcagttgaagaaaatgtttcctgatgcaactgagccggtacaatatctggtgtcacattggggaacagatccaaattcccttggctgttattcgtatgatccagtcgggatggcaagagatgtgtatgataagcttagagaacctttggataatcttttctttggaggggaagcagt

SEQ ID NO: 215913 - DNA, 443 bp, Gossypium hirsutum
  unsure (1)..(443): unsure at all n locations
nncgccacgcgntccgcccaacccggtcgaattaacggtacccgtacggtcgtcatcaaccgtcggatcggcaggctgatttttttacgtagaaccccccgacgttaatgggtccctccccgcccgtgggcttttcacgtgggactaggaacccgcagggttcttcaaagtcgttaccggggttttcacttttcttcctccaagacacancccggaatcntgccatcgaatggtgctgtttggtctgtcggaatttgaagaaannacgaatcgggtcgnggtattacccaaatgtaaacatagttttcattcagagtgtatcgatatgtggtttcattctcactccacgtgtcctctttgtcgaacctccgttgaaagatccgtacccgtttctgataacgcgggagatttggttattacgattaatgaaccgtcgggtggag

SEQ ID NO: 215914 - DNA, 496 bp, Gossypium hirsutum
  unsure (1)..(496): unsure at all n locations
cgcccacgccgtccgatcatgtgttaacttacatgtatgaagatgnaagaaccaatgccattggggtgcaagcatcggtcactttcgacaatganaattgacantgtcttggtctcgagaattatncctggttgtcaagcgcattaccatcaagctctcaaaccgataggtggggtcttccctgaaaccaacaccggcatcattgtgttggctgaaggacgtctcatgaacttgggttgtgctactggccaccctagctttgtcatgtcatgctcgttcactaaccaggtgatcgcccagctggagctgtggaaggagaaggcaacaggcaagtacgagaagaaggtgtacgttttgcctaagcaccttgatgagaaggtggctgctcttcaccttggaaagcttggggctaacctcaccaagctcaccaaggatcaagctgactacattagcgtccccattgagggtccttacaagccctctcactacaggtact

SEQ ID NO: 215915 - DNA, 465 bp, Gossypium hirsutum
gcgttttcttcttttcaattagcttcttgatagctttattttcttaagaacaggaaaccgctgaagagatggcaccaccaattgagactccaaccaagtcctctggctctcaccacgcatcacatcctcctttgaatgaaaggattctttcatcgatgagcagaaggtctgttgctgctcacccatggcatgatcttgagattggacctggagctccaatggttttcaactgtgtgattgaaatcccaaaaggtagcaaggtgaaaatatgaacttgacaagaaaactggtctgatcatggttgatcgagtgctttactcatcagttgtgtatcctcacaactacggattcatccctcgtactctttgtgaagacaatgatcccatggatgtcttgatcattatgcaggaaccagttattccaggatgctttcttcgcgctaaagctataggtctgatgcctatg

SEQ ID NO: 215916 - DNA, 456 bp, Gossypium hirsutum
cgacgtcgagtccaaatttgcatgtgtcttcttcatccttttcaggttctttggctagatggaggtcaccgtggaccttgacgttgttgcgaggatggatttacttgatttctttaaggaagaatgtgagcagagaggagccacagtcgtatatgctacccatatttttgatggtttggagacatgggcaacacatttggcttacatccaagatggtcaattgaagagatctgagaagttaacagaaattaatgagttgaaaagctcagaaaatttgctctctgttgttgaagcctggcttcgctctgaaaccaagtgtgagaaaaagaaatcttccaattcccctgcccaagtccagaagtcctcgccttttggtacttcgcctttcatgtcgtcgaggcacatggcatactaccgttgatctttctgaatccagctatttttcaataatttttg

SEQ ID NO: 215917 - DNA, 418 bp, Gossypium hirsutum
  unsure (1)..(418): unsure at all n locations
cccacgcgtccgcccacgcgtncgnccacgcgtccgataaaggagtaaaagccatatccagggattggaaggaagagaaaacgcatgtttcttcattaaaccaggaaagacaggctttagagaatcagattgtgaaagacaaggaagcaaganaatcactcanaaccaacctggaagaggctaccaactcacttgatgaagtgaaccaaaaaatattgaaactttccagagatctggaaatcgctaatgctaaaatatcgagtctcgaggatgagaaaatggttctctataaaacacttaccgagcagaagaatgcatcgaaagaagctcgagaaaacatggaagatgctcatagcattgtgatgacactgaacaaggaaagggagagtcttgaaagcgagtgaagaactcgaggaga

SEQ ID NO: 215918 - DNA, 393 bp, Gossypium hirsutum
ccacgcctccgagagggagaagaaggagcccggaaggggaggaattatttttttcgttggcacttgttaaaccaaatacctttaactatcctccaaaatggaatccaggtcaggcctccttgaccaggtttaatggccaccatcctttgaaagaaaggccaaggaaaataaatcaaggctttttgattataaggtccgaaatgcctttcaatatttgggggggggggggcaattctatgatagcaaaaggtgtacggttcaatcctgaaaaaaagcaagtgggaaattatttttctccaaagatatggagctttaccatgaagtctgcgtgctgcaaacatgagatagtcattcagacggaccccaaaaaatggtgagtatgtgatcattagt

SEQ ID NO: 215919 - DNA, 456 bp, Gossypium hirsutum
cccacgcgtccgcagactcccccaaaaccctcacgacaaaagaattctctattctatttttgaccactctcctgcaaaaatgtttcgatccgtcgctagatcggccgtcggtaagaacctacttcgacgaggatatgcaaccgccgtacctgaacggaaagtcgctgtcttgggcgcagctggagggatcggtcaacccttggctctcctcatgaagcttaaccctcttgtttctcaactggctctctatgatatcgctaacactcccggtgttgccgatgatgtcagtcacatcaactctagatctgacgttgccggatacgttggtgaagagcaattggagaaagctttggagggatgtgatgctgtcatcattccagctggggtgcctataacgcccggtatgactcgtgatgatcttttcaacattaatgccggaatcggcaagggtctatg

SEQ ID NO: 215920 - DNA, 463 bp, Gossypium hirsutum
  unsure (1)..(463): unsure at all n locations
aaaaaagaaaaagtttgaaacccggaaatgtcggacgaggaacaccattttgaatccaaggccgacgccggtgcctccaaaacctacccacaacaggccggaaccattcgtaagaatggttacatcgtcataaaaaaccgtccctgcaaggttgttgaagtttcgacctccaagactggaaagcagcagtcaagtgggtggaatccaaaaaccaaacagaaacaagcaactcaaggatctaaaattaaagggatcatctctcagattcccactaaaatcaagtatttttggcaaggagaaaacaagcaaaccataggagaggattggcacggtaaagtatactgtagatgaacagacacacaaaaagaaaaagatttaatttaagatgcatgatgattttgaggttttgattntgttaaatccgtgttggaataaaattttcatagaaatattcatgggattc

SEQ ID NO: 215921 - DNA, 300 bp, Gossypium hirsutum
gagcatataacttggactatcctccacaatgggatccaagtcagggctccttgaacaagttccatggacaacatgctttgagagagagggcgaggaaaatagatcaaggcattttgattataaggttcgaattgccttttaatatatggagtggggggtgcaattttatgatagcaaaaggagtacggttcaatgctgaaataaagcaagtgtgaaattattattctacaaagatatggagctttaccatgaagtctgtcttgctgcaacatgagatggtcattcatacggaccccaaaa

SEQ ID NO: 215922 - DNA, 465 bp, Gossypium hirsutum
ccctatagcagctgcagcagaagcttaagcttagggtttagagacgaaatggcagcgaaaaggaagactcccgtcaagaccagaaacccggatctgatccgtggtgtgggaaagtattccaggtctaagatgtaccacaagcgtggcctttgggcaatcaaggccaaaaatggcggtgctttcccccgccatgatcccaaacctaaggcccccgctgccgctgagaaacctcccaagttttacccggctgaggatgtcaagaagccgctccttaacaagcgcaaacctaaacccaccaaactcagagcaagcattacaccagggactgtgttgattttgttggctggaaggtttatggggaagagagttgttttcttgaagcaacttacttctgggctccttttggtcaccggaccattcaagatcaacggtgtttctttaaggcgcgcgttaccaatcctatgt

SEQ ID NO: 215923 - DNA, 465 bp, Gossypium hirsutum
cccacgcgtccgcccacgcgtccgctattccattcaggcgcttctgtggtggagttgggcgaaccgcacaggctaagaatcgccattctaatggacaaggccgttggcccatgaaatctgcaaaattcattctcgatttgctcaagaatgccgagagcaatgctgaggtgaaaggcttggatgtagattcacttatcatatctcacatccaagtaaaccaagcacagaagcaaaggcgccgaacatatcgtgcacatggaagaaattaacccctacatgtcttcaccgtgtcacattgaactgatcctgtctgagaaagaggaagccgtcaaaaaagagccggagactcagttggctccgaggaaatcaaagggtgcttcgtcttaaactgctgagtgatggattgttagtcggaagcttttaatttgttgtctctgtaatgagaacatttttgtttacttcaca

SEQ ID NO: 215924 - DNA, 454 bp, Gossypium hirsutum
  unsure (1)..(454): unsure at all n locations
cggacgcgtgggcggctttaagcgactgcgtggaacaaatggctgagtcggtggatgagttaagcaaaacgttgagtgagttgaagcatttgagaggcgaaacgttcgagttccagatgagtaatgcacggacgtgggtgagtgcggcgctgacgtatgaggacacgtgtattgatgggttcgaaggggttgatcggaaggtgaaaggtgatgtgaagaagaagatcacaaatgtggctatggttacaagtaatgctttgtatctgattcgtaggcttgacgaaagtggtggtctgaaccgttgatcatgatgaattggacggttgtgattntatctggcttattgatggttatcgnggtcttttttttttttatcttaattccggagaagttgtatgtaactgtaatgtaatattattttcgtggtaaatacattcaatactatttctctagt

SEQ ID NO: 215925 - DNA, 456 bp, Gossypium hirsutum
cccacgcgtccggacagagattgccaaaccattacagcaactccaagaaagtgcaagaaaaatagcagagatacaacatgaatgcaaattggatgtaaacatcgacgaatatgtagaatcaactgtgagaccatttttgatggatgtgatttattgttggtcgaagggtgcaacttttgcagaggtaatacagatgaccgatatatttgagggtagcattattaggagtgctagaaggcttgatgagtttctgaaccagctccgcgctgccgcacaagctgttggagaagtcaatttggagagtaagttcgctgcagcaagtgaaagcctacgtcgaggtatcatgttcgccaactccctttatctgtaagatgtgtttttgccatggatatagacgtaaaagctgtgtgatctaatggtacattgacacccatagatttctccccttcatcttct

SEQ ID NO: 215926 - DNA, 368 bp, Gossypium hirsutum
cccacgcgtccggagcaagttggtttaatatttgctgcgacacctgaccatggcaatgctgaggacatggtgaagaggaataagtccgggcaacctctttatgacaagagcggcaagctccaaagcctaactctccacacttgtcaggctgtgcctattgcaatcggaggtccaggatcggcagcaggcgttagattcaggaatgatgttccggatcgcggactcgcgaatgtggctgcacctgtcatgaacctgcatggttatgtagctccaaatgactatgagccaacactcattgaagtagtgaaccattatgcatatgatgccatcgctgaatgggctaaacgagtttataacactgatatatt

SEQ ID NO: 215927 - DNA, 455 bp, Gossypium hirsutum
  unsure (1)..(455): unsure at all n locations
cccacgcgtncggctgtaccagcttttggaattggcatcaggtgggggccgtgtctaacgcatgggttttcgaaatcgtgatgaccttcggatgggtgtacacagtgtacgccacagccgttgatcccaaaaagggaagcttgggaacaatcgcaccattggcaattggtttcatcgtgggggccaacattttggcaggaggtgccttcgatggagcctcaatgaacccagctgtttcattcggaccagccttggttagctggacatgggacaaccactggatctactgggtcggaccccttaatcggtggtgggctcgctggtctcatctacgagttcatcttcatcagcaacacccacgagcagctcccaaccaccgattattaagcctaatcagggtttaattgatttgtctgtcactttgaaaccggattttctccgatcacatttgagtc

SEQ ID NO: 215928 - DNA, 453 bp, Gossypium hirsutum
gcaggatacatgggaagaagttgatcctgattagctttcgtatgaggtaaactgggtagagtctactgcatttaactttctgcttaaacactctaagtatgattctatcatccaggaactccttgcacttggtgaagttgttggaactgagagcagagggctttcggctgattcacttgcctccttgccttccataaagtacaaggcaggaagcagtcagacaggaagcaatgattcgtgtggtcatatgccgtgtagactacgatgatggtgactccctgacagtgctttcttgcaagcattcatatcatcccgagtgcataaataattggttgaaaataaacaaggtctgccctgtttgtagtgttgaagtctcaacctcgggtcagagctagtactttgggaatactcctccatcgagccacaaggtagcagcgtcttgttttaatacac

SEQ ID NO: 215929 - DNA, 451 bp, Gossypium hirsutum
cccacgcgtccgggagcatttgccaggggttcctaagaagaagctggaagatgagaagcaaaaagggtccataaagttgctgccattaacttcccccggccactcaccaacttcaaaaggaacaattttggaaaagattttagcccggaaaaaagcatcaatgccagccggaaggatacatttttcgcggcgatggtggaatgttgcaaagatgataatgatgaagaatcacgaagcaatttatggagtggagttaaagtaacaaggagtatcagtgacaggttgggatttattaatctctactcttcttgtaaaagaacctgtgctgtctcggaatcagtagtgtatctgccaaggtctagcagagcagctaattacagcatacttactactcgtcgctcaacttaaacagatccagtgatcacattctgctgctcttaatttctctttc

SEQ ID NO: 215930 - DNA, 389 bp, Gossypium hirsutum
cccacgcgtccgctctcttcttttttccttttttgaatggtgttgttgcagacatgggcgttgaactcatgatgagttgcaggaacggtgacagcttcgcagccaaaatggaagaaaacgccgtcaaagaagccgcgtccgggctcgaaagtgttgagaaactcatcagattactttctcaactcaacagcagcagcaaagtaacagtaataatcaagagaaataccaggcttcctctatctcaacaacatctaattccctggatttggaaatggactgcaaagctgaggctgatgccgccgtttcaaggttcaagagagttatctctcttctggatcgaaccaggaccggacatgctcgtttcagacgagcccttgttcaacccaatc

SEQ ID NO: 215931 - DNA, 379 bp, Gossypium hirsutum
cccacgcgtccgaattggtaaccatttagggttttaggcattgtcaagcttgatgccgatttcaagatgcctgaacccaagcccgatcaccgcaaaggaatggccttgaactgtgaagaagctccgttggacaccgacatcaagaatgccggcaacgtcgtgctcttgaacactaaaaacctccctttggtcggccaggtgggtatgggggccgatctcgtcaggctggaaggtaatgcaatgtgctcccctggcttttcttgggaattcagccttgcaggttacgtacatagtcaacggcagtggtcgtctccaagtggtgggcgtcgacggcaaaagggtcctggaaaccattgtgaaagccggcaatctgttgatt

SEQ ID NO: 215932 - DNA, 490 bp, Gossypium hirsutum
  unsure (1)..(490): unsure at all n locations
cccacgcgtccgaaaaaatccaaccttggaaatgaatggaagaagccatttgctggttctggccatgccaaaggcattgtccttgaaaagataggtattgaagctaagcagccgaactctgctattaggaagtgtgctagagttcaattgatcaagaatgggaagaagattgcggcattcgtcccaaatgatggttgcttaaactacattgaagagaatgatgaggtgttgattgccggatttggacgaaagggtcatgctgtgggtgatattcctggtgttaggttcaaggttgtgaaggtatcgggtgtttcactgttggcactcttcaaagagaagaaagagaagcctagatcataaattttgagagaggtctctcatcgtgttctgttagttctatttataacaaactatagagatttttattgctatgtagctatttggtcaaccttgtcactntatcttaatattttgtgcttttgtactgatg

SEQ ID NO: 215933 - DNA, 467 bp, Gossypium hirsutum
  unsure (1)..(467): unsure at all n locations
ggggtatctccagcactatggtgtcgacattggtcgcaagaaaaaaacagcagccaagaaagaaggagaggaaggtgaaactggcactgangaggtgaagaagagcaaccatgtcttgaggaagatggagaaacgtcaacagaatcgcaagctagatccacatatcgaggatcaattcgcaagtggtcgtttgttggcttgtatctcttcaaggcctggtcagtgtggccgtgctgatgggtatatcttggaaggcaaagagctggaattctacatgaagaagatccagagaaagaaggggaagggagctgcctaaaaattttgttatgtgagcttttatatatcatgatagaatctcctctttgctacttnttatctttttacaggacattcaagatngtattagtttttgaactttttagtttgaatgtcaactagtgnggttgtgtgtaatggtgaacaatata

SEQ ID NO: 215934 - DNA, 325 bp, Gossypium hirsutum
gggcgggccacgcgtccgcccacgcgtccgcccacgcgtccggaagagttcatgatcctcttcattgatggaaaagctcgcctatatgtttcttagatcgtacattatatagtccccattcagtccttgtataactatgaccctcatatgttcagattcatctgtgtatgctttcataagatagggaaaaaaatctcaatactttttcttcctgtaattgagaaaacctatgatgtggccatgaaaattgaaaatggaacacaattacagttttttgtctaaaaaaatagatgattattttgcctgttataaacattaaaatata

SEQ ID NO: 215935 - DNA, 420 bp, Gossypium hirsutum
aaaatccctaatttcccccgctgctactgctagggtttctttctcttctctctcgcaactcagcaggtttctttggagaaaaaaagaaatgtctcgagtttacgtgggtaaccttgacccacgagtttcggagcgagatcttgaagacgagtttcgtgtctttggagttattcgaagtgtgtgggttgctagaaggccaccaggttacgctttcattgactttgatgatcacagagacgccgaggatgcaattcgtgaattagatggcaagaatggctggagagttgagctttctcataattctaaaggcagaggaagacgtggaggcggaggctgaagtggatgtgggtcgggacggtcgggtggttctgaattgaagggctactaatgtggtgagggttggtattttgctcgagaatg

SEQ ID NO: 215936 - DNA, 459 bp, Gossypium hirsutum
  unsure (1)..(459): unsure at all n locations
cccacgcgtccgccagagttcaccgtgccacaatgttattatgctaagcaaccacctgcttggcatcaaggctatttctcgaagtttacagtggatgcgttgttctatatattttacagcatgccaaaagacgaagcccaattatatgctgcaaatgaactttataatagaggctggttttaccacaaggagttccgattctggttcatgagggtccccaatgtggagccactagttaagacaaacacatacgagagaggttcataccactattttgatcccaactcatttgaaataatccgcaaggataattttgttgtccattacgagttgttggaaaagagaccgtcgctacctcaacattaatattcttccccctcatttacacttgtaagcacaagcatgtaattcattccttataacatcagttngccagcgttggtgtttttgcaaatttaa

SEQ ID NO: 215937 - DNA, 493 bp, Gossypium hirsutum
ggagaatgctgcaaatgaagccgaggagaccgagcctgaaaataacgagatgacattggacggggatgataagattctcgaggagaagacgaaagctttcgatgccctcaagactgaacgaaggaaagttgatgtcaaccagttcgagtccatgcaacaactttcgaacaagaagagcaatgatgacatctgtatcaaactgggatctgaaaaggacaagcgcaaggatgctgataaagaagaaaaagccaaaaagtctgtgagcatcaatgagttcctgaagccagctgaaggggagaagtactatggacctgggcgtggacgaggccgtggccgtggtcccagaggtggatatggaggcaacacagccagcaatgtgcaagctccctcaattgcagatcctggacacttcccctcattgggtggcaagtgatgtcccccaccacattctcccgaatgggtttcacttggaatccattggggtttattctat

SEQ ID NO: 215938 - DNA, 416 bp, Gossypium hirsutum
cggacgcgtgggctcgatttctctctctccccatttccgagaaaatagtacaaagaaaagagaatggccgatcagcttaccgacgaacagatctctgagttcaaggaggcctttagcctcttcgacaaggatggcgatgggtgcattactaccaaggagctgggaaccgtgatgcgatcacttgggcagaacccaactgaggcagaacttcaagatatgataaacgaagttgacgccgatggaaatgggaccattgatttcccggaattccttaacctgatggcaagaaagatgaaagataccgactcagaagaggaacttaaagaagcattcaaggtgttcgacaaggaccagaatggtttcatatctgctgccgagctccgtcatgtcatgacaaattttggtgaaaagcctac

SEQ ID NO: 215939 - DNA, 475 bp, Gossypium hirsutum
cccacgcgtccgcccacgcgtccgaaaagcagtacggaaagctcttgaaggacttcaacaaaggtttggagaacaacaaggagatcgaaaagctgaaggccgatgtcgaaaagtttgcatcctcatttgacatgccgggtttcaagatgtccgaaatgaagtacaagaattagatcttatagatatttatggttttattcatgcttattgctgttattatcggcatatgtgtcatctggaaatttgcctctgctgatttccaaggagttgatgttagaaaaaaaaaatggaaaagaaaatgaagtaaaggcttccatctatggtatgtttttttaaagttttttaagcccattacttgtgagagcttccataaaaaccatgtaacaattttatatattgtttttgttgctggaaagtttagggttttaattaccaataaacgagatattggggtttaaaaaaaataaattctatt

SEQ ID NO: 215940 - DNA, 471 bp, Gossypium hirsutum
ttctccttcactcccctcttatctatatatctccttttcttcttcttcttcctctcctcacgaaggaaatcacaatttagcttctaactttgcctctttttttttcttttcatctgcaaatctggtcctttttttctgatgctggagagtttgggtattagatttaaattagtttgaagggctttcgagttctgggttttccattttggggtaacacccaggttagtcaaattgtggacatcacggctatacacagagtttaccggcctcttcttattcatgcccgatctgtacgacgtaagagttgtgtgatcgagaggaaccctgcgccgcacggcgggcgtggagctttgccttctgaaggcggtagtccttccgatctcctcttccttgctggcggcggtgttgtcttttagagtttcagtagttggtataggtagcttttagtatacaaaaaaaaaataaaaaggg

SEQ ID NO: 215941 - DNA, 367 bp, Gossypium hirsutum
cccacgcgtccgcgttaattcaatttaaataatttaattttatttaatttttcaagtgaaggaagttgtgctcaccgttcactactttaaaaaaaagtgtgaattggaacagattgatcaaggtcaactgggagaagatttagttaatccttttttggaatgtaaggggttttaacaatcccctcaaatacattagggttatgaatagaatgaaggagttgagagttgatatagtttgtttgattgaaactagagtgaatgaaaataatgtgacaactattggaaaagtggtttcagggttggaggggcattaacaactacaatgatgctgagatgtataggaggaagatgagcaaagatcttgagc

SEQ ID NO: 215942 - DNA, 403 bp, Gossypium hirsutum
  unsure (1)..(403): unsure at all n locations
cccacgcgtccgctccattggaatcttatgccgatataggaggtttggatgctcaaatacaggagattaaagaggcagttgagctccctctgactcatcctgaactgtatgaagacatcggtatcaaacctccaaaaggagttatcttgtatggagaacctggcactggcaagaccttgcttgcaaaggcggtggctaattctacatcagcaactttcttacgtgttgttggcagtgaattgattcagaagtacttgggagatggtcccaagttagttagggaactcttcanagttgctgatgacctttccccttcaatcgtcttcattgatgaaattgatgcagttggtactaagaggtatgatgcccattctggtgtgaacgtgaaattcagaggaccatg

SEQ ID NO: 215943 - DNA, 438 bp, Gossypium hirsutum
gttcagatgagaagctcctgtcagtcttccgtgaaggagtgaagtacggtgctggaattgggggcggtgtctatgacaggcactctcccagaataccatcaaccgaagagattgctgacagaattaacaagatgcttgccgtgctcgagaccaacatcttgtgggttaaccctgactgtgggctcaagactcgcatgttcgctgaggtgaaaccagccctgagcaacatggttgctgctgtcaagctgttccccacccaactcgccagctccaagtgataggctccccagatattggatatccgaatcccataccattccatagagattaaaaagaaaattggcataaaaagttctcctatcctaatatttgaataactcttgttgtgagaaatatttgtacatccccttggcgtcctttgattttcctattttgggt

SEQ ID NO: 215944 - DNA, 449 bp, Gossypium hirsutum
  unsure (1)..(449): unsure at all n locations
cgattacaataactcctaacttcccggttgacactgggaatgggttatccgctggagctattgctggtattgtgatcggttcatgtgtgattctcatcttgctcttgatcatcctccgactgatgggttacttggggggcaaacacgatgaatacagtgaacttcatggtctagaacttcagactggctatttcagtttaagacaaataaaggctgcaacaaataattttgattctgcaaataagatcggcgaaggaggatttggaccagtttacaagggtatactgccagatggtagagtagttgcagtcaagcaactatcttctaagtcaaagcagggaaatcgtgaatttgtgactgagatanggatgatttctggattgcaacaccctaatcttgtgaagctttatggctgttgtattgaaggaaataattgttgctaatttatg

SEQ ID NO: 215945 - DNA, 449 bp, Gossypium hirsutum
aaagcgaatgcaaggtcctctccataagcggcatgggtggtctggggaagaccactctggccaagaaaatatataggcaaagccatgttgttggtcatttcaagcactaggcttgggcatacgtttctcaaaactgtcataaaagaaaagtatgggaagacattttatctgattttaacctcttaagtgaagttgacaagaagatgaacgttgaaaaattagcatagaagttatctaatttcttggaggaaaataagtgtttggtggtactcgatgatttttggaacaccgagtcttgggatagcttaaaaccagcattttcagcatgggatacgagaagcaagacattactcacctttttgaacacatagatattttcacatgctgacagtcaaggtttcctatatgagtcgcagtatctaaactaccatccaaactgggaactattt

SEQ ID NO: 215946 - DNA, 494 bp, Gossypium hirsutum
agaaactgtgcaagtggctagttcaactcctgatggctcttgactatttgcatgtgaatcagattcttcatcgtgatgtcaagtgttcaaacatcttcttgacaaaagaccaagacattcgtctcggtgattttggactcgctaaaattttgacttccgatgatctcacatcctctgttgttgggactccgagctatatgtgtcctgagcttctggctgacataccctatggttctaagtcagatatctggtcattaggatgctgtatatatgaaatgacttctctcaagcctgcatttaaagcgtttgatatgttggcactgataaacaagatcaataaatcaatagttgctccacttccaacgaaatattctggggcctttcgtggtcttgttaaaagcatgccgcacaagaattctgaactcatgccaagtgctgatgaactgctcagacacccggaccttcagccatatgttcttaaggctcaaaataaa

SEQ ID NO: 215947 - DNA, 339 bp, Gossypium hirsutum
ttcttgttcaagtggtgggatcatgtcgaaaaagggacccttaaggaagtaagtgacatgggaaccattcataagctgtgatttaagattttagaagcaaaaaggacatgaaacaaagtttgtcaatgggtacttccagaaagaaaaaaaaaaaaggttttaattccaataaattgcaggtttgaaatagttcttagacatgctggatgcttgcttttgagaatccaactatgccaaatgcctcaaatgttgaaaaatcaaatgttcttactgtctcgcctgcttaattttttttgcttatgttctttaaataattaaattggacctttgttcggaatt

SEQ ID NO: 215948 - DNA, 497 bp, Gossypium hirsutum
  unsure (1)..(497): unsure at all n locations
cccacgcgtccggctatttcaaccattgtagcccagtcaaaggagaaacagcgcaaatttactgagaccattgaactccagattggtctgaaaaactatgatccccaaaaagacaagcgtttcagtgggtctgtgaagcttccacatattcctcgccccaaaatgaagatttgcatgcttggagatgctcaacatgttgaagaggcagagaagataggtttggattatatggatgtggaagcattgaagaaactaaacaagaataagaagttggtgaagaagcttgccaagaagtatcatgcctttttggcttctgaatctgtcatcaagcaaatccctcgtcttttgggtcctggtctcaacaaagcaggtaaattcccaacccttgtcacttcaccaagaatcactagaagtcgaggtgaatgagacanaggcaatggttaagttccaacttgaaaaggttctatgcatgggagttgctgtgggaaatgtgcaat

SEQ ID NO: 215949 - DNA, 366 bp, Gossypium hirsutum
gtgatgtcggaaagggttgtgctgctgccttgaatcaagccggtgctcgtgtcattgggactgagattgatcccatctgtgcccttcatgctctcatggaaggacttcaggttttgaccctagaagatgtttcctccgaggctgatatcttcgtcaccacaaccggtaacaaggacattatcatggttgatcacatgaggaagatgaataacaatgcctttgtttgcaacattggtcactttgacaattaaatcgatatgctctgtcttgagacctatcctggtgtttaaccgcatcatctttaagtctgatatctgattggttgggtctttcttgaaacctaaactcgcattcattttttggctt

SEQ ID NO: 215950 - DNA, 418 bp, Gossypium hirsutum
tttatctttttatcttttctttcttttttttctcctcgttttatttttttggggggttaccattgaactgcagagtggtctgaaaaactatgatccccaaaaagacaagcgtttcagtgggtctgtgaagcttccacatattcctcgccccaaaatgaagatttgcatgcttggagatgctcaacatgttgaagaggcagagaagataggtttggattatatggatgtggaagcattgaagaaactaaacaagaataagaagttggtgaagaagcttgccaagaagtatcattgcctttttggcttctgaatctgtcatcaagcaaatccctcgtcttttgggtcctggtctcaacaaagcatgtaaattcccaacccttgtcactcaccaggaatcactaaagtcgaaggtgaatga

SEQ ID NO: 215951 - DNA, 487 bp, Gossypium hirsutum
ctctccaagaataccatcgaccgaagagatcgccgataggatcaacaagatgcttgcggtgctcgagaccaacatggggtgggttaaccctgactgtggactcaagactcgcaagtatgcagaggtgaaaccggcactcaacaacatggttgctgccgctaagttgctccgaacccaacttgctagtgccaagtgaaagagggctttatgaaagaatggaaatgtccatgaatgattaagaaaaatctctcaattgtgtcaattacttagttttcttgatgaaatatttgttagcaaataatatggccttcaaggccaattgattttctcaaagtacttcgtatccaaatacatgaaaaaaggtacaaaaattcaattatcctcattaaatacatatctgtatctgatattttagacatcatgattttattggaaaaatgcctatgattcaattagattaggaataaataaaaataaaaaagggcgg

SEQ ID NO: 215952 - DNA, 305 bp, Gossypium hirsutum
ttgccgttgagtcgtacgtcgttgatgtaccgtcgggtaatactaaagaagatacatgcacgtttgttgatatgattgtaagttgtaaccttcgatctttggctcaaatggccgcaaattcggctaaaaaagaaaaatattcatcatccccataatcattcaacaaaaagaaaacatatttctcttagtttcaacatataatcatacatacagacatacatacatacatacatatatatgaagaaattttggcttggatgatgacaattaatttttatttcatttccctatgcaattattgagta

SEQ ID NO: 215953 - DNA, 481 bp, Gossypium hirsutum
cccacgcgtccgagctaacataacctcattgatagaaaagcttagtaaaatccccgggatggacaaaaaatggagctcactttccctgtaatcgacttctccaaactcaatggtgaggagagagcagccgccatggaaatgatcaaagatgcctgtgagaattggggtttctttgagttggtgaaccatggaatatctcatgagctgatggacactgtggagaggctgacaaaggagcactacagaaagtgcatggagcaaaggttcaaagaaatggtggccagtaagggtcttgaggctgttcaatctgagatcaatgacatggattgtgaaagcaccttctttttgcgccacttgcctgaatctaacattgtctgaaattcctgatctcgaagaagattacagaaaggtgatgaacgaatttgcagtggagttggagaagcttgcagagcaacttttggatctgttgtgtgagaatctg

SEQ ID NO: 215954 - DNA, 477 bp, Gossypium hirsutum
tgatggaggaactgttaccttataggatcatggacacggtggtaactctcaggatactggggaggaagttgatcccgatgagctttcatacgaggaactccttgcactcgctgaagtagttggaaccgagagcaggggcctttcagctgattcaattgccttcttgccttcactgatattcaaggcaggaaatagtcaaactggaaccaatgattcgtgcgtcatttgccgtgtagactacgaggatggtgactccttaacagcactttcttgcaaacattcatatcatcccgagtgcataaacaattggttgaaaataaacaaggtctgccctgtttgtaaagccgaggtcttgatctaatggcaacttgactgcttggttttaatatgcaaaatgtgtcttctcttttggatgggaaagaaaataatttggtatcagttttcttaagtacttttggtgtgaaccaactttggaat

SEQ ID NO: 215955 - DNA, 390 bp, Gossypium hirsutum
ctcaagcgctccggcaagattgagcttcctccatggaccgatattgacaagggtggtaaattggaggagctttcaccgtattgaccctgattggtactatataagagctgcttccatggcaaggaaaatctacttgaggggaggtcttggtgttggtgccttcaggaggatatatggaggagccatgaggaacggtagccacccacgccatttctgcaagagcagcgggtctattgctcgtcatattctccagcaattgcagaatgtgtacattgtcgattttgatactaaacgtgggaggaaaatcacattgaaaggccaacgggatctcgaacaagttgttggaaggatttgaatttgccctttgagaaatttcattatatggatttg

SEQ ID NO: 215956 - DNA, 300 bp, Gossypium hirsutum
cttcggtgcactttctgaacttgtggttgctttttcacgcgagggacctaccaaggaatatgtgcgagataaaatgatggacaaggccttggacatctggaacatgatttctgaaggatgttacctatatgtgtgtggcgatgccaagggcatggctaaagacgtgcatttaaccctactcactattttgcatgagcagggttgtctatacagctcatatggctgtaagcatggtgaaaaatctgattcgaccggcaggtatctgcttgatgtatggttactgactacaccatgaatatg

SEQ ID NO: 215957 - DNA, 419 bp, Gossypium hirsutum
  unsure (1)..(419): unsure at all n locations
ggcgttgctccatttcatttactgggatgccttgccagacatggaagagctcatgggttcaacttgtaaatgggcttctacgcttgtagctcagcatctgcttgccgctgctgaccgttatgcgcttgagagaatgagattgctttgtgaggctaaactttgtgagggtgttacaataaacacagttgcaactacattagccttggcagaacagcacaactgtttgcatttgaaaggtgtatgcttaaaattcattgcattgccagagaatttaaaagctgtgatgcaaacagatggatttgagtatttgagggaagctgcccgggtgttctacctgaactgctgcatatgtngcgaaaatcggggagcattcttgtatttctttgggatatcngaaaagaagggatcgtggatgggtc

SEQ ID NO: 215958 - DNA, 402 bp, Gossypium hirsutum
  unsure (1)..(402): unsure at all n locations
tccaccccgccccacgcgtgcggccacgcgtccaggccgatctccgcgcttttctttcctaatccagaacatgattcaccgcgttagatgaccgatccatcggccaattcttaacctccctcaaaacccctcacccttactctatactcatctgctttgacgccacccaactccacaaaaaaaccggactccacctccgggagctccaccatgaggatgcactcacccactcttcggtcatcaccaaccacatcaactccaacaccaagctgttgtctggcgacatcgagttcggggaatctcaatcttgctttcaccaaataaagcgaaagactacgtctctcacattcgcctcgacggnccaaccgcaaaatcgttgaaagatgagtcggaacagatgga

SEQ ID NO: 215959 - DNA, 448 bp, Gossypium hirsutum
cccacgcgtccgggaagaagccgttcgatctgttgaaatgcctggacttttatggggagcatcaaaattggttgcggtcggatatgggattaagaagctccagatcatgcttacaatagttgacgatcttgtttctgttgatacccttatcgaagaacacttgacagtcgagcctcgcaatgaatatattcagagttgtgacatcgttgcattcaacaatttagacaaggacgacccggtttttcttcttcttcttcaagaaatgttgaagcgtaagccgattttccgccatgttttaacctttttggtcgttgctttacccttattattagttttattttgcaatctgaattgctacttgatttgctttagatttgagaattagatgtatgggtaaagaataacttcttgtttttgctgaaatggtggtattgtggtattaatgctc

SEQ ID NO: 215960 - DNA, 455 bp, Gossypium hirsutum
ggagtaacttcgtatgatatcggaaccggtttcgggcattttgcgattgcgacagccgatgtgtacaaaatggtcgaggacattcgtgcgaaaggcggtaatattactagagagcctggtccggttaaaggcggatcgacggtcattgcttttgttaaagatcctgatggttatgtttttgaactcattcaaagagattccattcttgatccactctgtcaagtaatgcttcgtgtcggggatttggatcgcgctgtcaaattctacgaaaaggcactcgggatgaagctactgaagaaggttgataggcctgaatacaagtactccattgccatgatggggtacgcggaagaacacgagactaccgttctcgagttgacttacaattacggagtgactgaatataccaagggaaatgcatatgcacaggttgctattagtaccgatgatgttac

SEQ ID NO: 215961 - DNA, 456 bp, Gossypium hirsutum
cccacgcgtccgaaaaaccgatttgttaaccgtgttgtttcctcgatgtttaacaccgtttcaagcgaagagattgctatcttagggttcgcctttaagaaggataccggtgacactagggagacccctgctatcgatgtatgcaaaggactcttgggagacaaagctcgattgagcatatatgacccgcaggtgaccgaagaccaggtccaacgggatctttccatgaacaagtttgactgggaccatcctcttcacttgcaacccatgagtcccacgactgtcaagcaagtcagctgtgtgtgggatgcttatgaggcaaccaaagatgcccatggaatttgcattctgaccgagtgggacgaattcaagaaacttgacttcaagaggatatacgacaacatgcaaaagccggcttttgttttcgatggaaggaacatcgtgaacgcggatgag

SEQ ID NO: 215962 - DNA, 439 bp, Gossypium hirsutum
ggacccccacgcgtgcgcccagactgtggtctcaagactcgcaagtatgtttaggttaagccagccctgaacaacatggttgcgggggccaagctgctccggacgcaaggtgcgagtgccaagtgagaggcatatctgaggtcggacatcatcctttatatcgaagatggtccagaggaaatttgtcttaaatcatttgaataactgtgtgttggaagtatttgttaggcgtatcatatgcccctcttttaggccaattgttttcctttttcttttttggttatttaccctctaaatttttgtattttcgggaatatatgaattgccttcaattactttgaaaggcacgaaatttggtagtgtatcttttatgagcctaatgaaaatgtcagtactggctgtggctgtggactgactatattagcttctttctctaaaa

SEQ ID NO: 215963 - DNA, 327 bp, Gossypium hirsutum
  unsure (1)..(327): unsure at all n locations
cccacgcgtccgcccacgcgtccgcacaaactcgacattttcaagatccaaggcaaagataaacgcggccacaagattcttcgcattaccggaaagtccttccccgctcggtttttgagcgttgatgttttgaaagagtatttagatgagtatatatttccaaggctttcaaagaagccgttttcggtgttgtacatgcataccggagttcaaaggaccgacaactttccgggaatctcagccctccgatcaatctatgatgctattccggtcaccgtcaaagataatctccaatccgtttattttctgcaccctggcctncagtct

SEQ ID NO: 215964 - DNA, 433 bp, Gossypium hirsutum
  unsure (1)..(433): unsure at all n locations
gtcaaaccacgcatcggatgaagtgtatcttggacagcgaacacccaactggaccactgatgcaggtccgctacaagcttcggatgctttcaataggagacttgctgaaatcgaaggggtaatcttaaagatgaacatcgacaagaaactgaagaaccggatcggtcccgttaatgttccttataatttgctccatcccaccggtgaaattggaatttctggtaagggaattccaaatagcatctcaatataatttaagtaaaagatgaataaggaataatttgcatgaaataaatgttggtgcagcacatcaaaagtattgttgtccatacttttgtgtaattttctcgaatgatagtgttattccaagtttgatgtaattgtgcgatgttattattatgaatannatcaaaatatcatgatggggtgggtg

SEQ ID NO: 215965 - DNA, 328 bp, Gossypium hirsutum
gaaaaaaacagcaagcaagattgtttttttgtttttcccctcgatttattttatttttggcctataaaaggccctttgaaatctgtaaaagggacggagggtattaacagagaaagaggcaaagaaatcgaaaagaaattctttttaagcattgaggcaacatgtgctgcacatccaactgccgatgtttttattaactttgcatcatatcgaagtgctgctgcttcgtccatgtctgctctgaaacaacctaccattcgagttgttgctataattgctgaaggtgttcctgaatcagacaccaaacagttgattgcatatgcacgtt

SEQ ID NO: 215966 - DNA, 361 bp, Gossypium hirsutum
agcacatgttgtggaggagtatcttccttaccataacgagaccatctccggcgttcctgacaggcttcccgccatgggtattgacacccctggagtcgctgccctcctaggagctcacagtgtcatcagaactcactgtgtgatgctgagccatcgcttgtacccagatgttgaccatgacctcatccctgaccatgttgcacacatactccataaatgcgctgatcagatcccagaccccatggccgtccagtatgtgataaacgacgcgtggtcacccttggttttgtataacagctactactggaacatactggacaacatggctttgttgattgttgatcaccaactgtcgtacgac

SEQ ID NO: 215967 - DNA, 437 bp, Gossypium hirsutum
accacgcgtccgcccacgcgtccgcccatgcgtttgattctgttgagaacgccaagaagtacgagcccaagtacaggctgatcaggaatggactcgataccaaggtagaaaaatcgaggaaacaaatgagagaaaggaagaacagggctaagaagatccgtggagtaaagaagaccaaggccagtgaagcagcaaagaagaagtgagagctaaaaggcaaaactcgtgcttatcacagagccaatgcttttcaacattgttttttagggatcttgaatcttttgttttggaaaccagattttcggtgttgttatctgatgcttagttatattattacgatctgatttttcttattttgagaattctttcatggcagattttgaaatatcccatgttctgccattgatattgtcaggcagtacttgctatatcattct

SEQ ID NO: 215968 - DNA, 493 bp, Gossypium hirsutum
ggtaacaggtggtgaaattgcttcaacctttgacttacccagagtctgttaagcttggacattgcaagcttattgaagaaattatgattggtgaggacaagttgatccacttttccggtgttgaaatgggtcaggcttgtactattgtgttgagaggggcaagccatcatgtgctggatgaagctgaaaggtctctgcatgatgccttgtgcgtgctgtctcatacagtcaatgatactagggtattgctcggaggtggatggcctgagatggtaatggcaaaggaagtggatgaatctgcacggaagactcctgggaagaagtctcatgctatagaagctatctcgcgtgcgcttttgaccatcccaacaattattgctgacaatgctggtctagacagtgcacacttagtagctaagcttcgtgcagagcaccacaaggagggatgcattgcagggattgatgtcatctctggatctgtaggagatatggc

SEQ ID NO: 215969 - DNA, 485 bp, Gossypium hirsutum
cccacgcgtccgcccacgcgtccgcccacgcgttcgagaaaaatggagctgttaattattcgctgttgatccaaggttacgatagtatgttgcctcctgaaagagttaaagccaagatgaaacttcaacttgctgaagcagctgaaaaggatccaacaacaggccctggttgggaacggttcgagtttgacaaagatgcccctgttgacgatgatgaaattgaagttgctgaagatgatgcatcattagtgaagcatattggtcagagctttcggttttctgccatagagaaaaggagggaggagcaactgaaagctgctcatgatgaggccatttttggcacatcaacagcttctctttctgttacagcagatagtgaaccagaagaggaaaatcttaagaaggatagcaacgataatgctgttgctactggcctcttaagtgagaaggtgatagcaaaagcaccaggttcgtggcgagatcgg

SEQ ID NO: 215970 - DNA, 418 bp, Gossypium hirsutum
  unsure (1)..(418): unsure at all n locations
cccacgcgtccgcccacgcgtccgcccacgcgtccggggatgacaaggaatacatccctgatcccgaagacaagaagcctgagggttatgatgacattccaaaagaaattccagatcctgatgctaagaagcctgaagattgggatgatgaagaagatggtgaatggataccttcaactattcccaatcctgaatacaagggcccatggaatccaaagaaaatcaagaaccccaactacaagggcaagtggaaggcaccaatgattgacaaccctgatttcaaggatgatccggatctctatgttttccccagcttgaagtatgttggtattgagttgtggcaggtgaaatcgggaacaatgtttgataacatcttantcgctgatgatgtagagtatgcccaagaaactaggctgaa

SEQ ID NO: 215971 - DNA, 482 bp, Gossypium hirsutum
cccgggcttggttcagtcagccagcacgaaaggctagaagaagaatttcaaggcataagaaggctgtgaggatctttccaaggccaactgctggaccccttcgccctattgtccatggccagactttgaagtataacatgaagttgagagctggaaagggtttcacccttgaagagcttaaggctgctggtatttcaaagaaacttgcaccgaccattggtatcgctgttgatcaccgccgtaagaacaaatcacttgaaggtcttcaagccaatgttcagaggcttaagacctacaaggccaaacttgttgtcttcccaaggcgtgctcgcaagttcaaggctggtgattcaactgccgaagagctcgcaactgcaacccaagtccaaggaccatacatgcctatttctcgtgagaagccttccgttgagctcgtgaaggtcaccgaggacatgaaatcattcaaggcatacaacaagctt

SEQ ID NO: 215972 - DNA, 458 bp, Gossypium hirsutum
ctgagtttaagactggtgctgagaggaaggaagctgccgagagcactttgttggcttacaagtctgctcaggatattgctcttgctgagcttgctcctactcacccaattaggctgggacttgctcttaacttctctgttttctactatgaaatcctcaactcacctgatcgtgcctgcaatcttgcaaaacaggcttttgatgaggctatttctgagttggatactttgggtgaggaatcttacaaagatagtacattgatcatgcaacttctccgggacaacctgaccctttggacatctgacatcacggatgaggctggggatgagatcaaggaagcttcaaagcacgagtcaggcgagggacagcagtgataagttcataaaaattgttctctgtaccttatatttgcaggtttacagtacatagatgcaatgtgagttatcgtagtgggtttt

SEQ ID NO: 215973 - DNA, 204 bp, Gossypium hirsutum
gccctttagaaaaacacaatttggattacagaacatgaataaaaaagaaaagaaaaagtccaaactattctctgaatattttattcatatagattacttacaggtccaccttgtaaccaaagaatgattggccatggctttgaaggctgttcaactctgtaaggacttctgtaaagccaccaaaacatatgtgcttctatttat

SEQ ID NO: 215974 - DNA, 406 bp, Gossypium hirsutum
cccacgcgtccgcccacgcgtccgcccacgcgttcgcccacgcgtccgggaagctggagtctgatctcaagagtctttcagatgcttacaatagtcttgaacagaccaatatccacctagaaaaagaggcgaaaactttgaagagtggagggacatcaacatctcccgatatcgaggcaataaaagctgaagctagggaagaagcccagaaggaaagcgaagcagagctgaatgatttactcgtgtgcctcggacaagagcagagcaaggtggaaaagttgagtgcaaggttatctgaattaggcgaggatgtagacaaactgctcgaaggtattggagacgatatggcgcttcctgaagatgaagacgaagaagattgatggaagctggtgtagtactactagta

SEQ ID NO: 215975 - DNA, 409 bp, Gossypium hirsutum
aacccttacaagtcttacccattgagttacatggacaatttattttcattcataaaccagtgtcccaactcaaatgttcaaaagtagactacaaaacaagcagaatctttttgtagcacaattgaaaataaattcaaacaaacagtaaaaagggtttcaatgtccacttcccatttgtagatcaagctccaaaccatctgctaatggcttatgattcctcagtttcgtttggaggaagacgcataactgtcttgaagaaggtcatcataaggatccctgcggccggggacttggctaatctgaggatcccaacggagctgagcattgtggcgctcaaatgtccaaaacccataaggccgcagtggataactccacatctccttggtttttgcgcatcgatccttcatag

SEQ ID NO: 215976 - DNA, 350 bp, Gossypium hirsutum
ggcgagactggaaaagtataccgagcaaattttcacgaccgagacggtaggactgttcttatattgcgaccgggaaaacagaacactacatccttagacaatcagctccgtcatttggtgtatatgattgagaatgctatattaaaccttccagagggtcaagaacagatggtatggttgatagatttcaccggctggagcttgagcacgagtgttccgatcaagtccgctcgcgacaccattaacgtgttacaaaaccactatcccgaaaggttggcgatggcggttctatacaatccgccaagaattttcgaagcattttggaagattgttaaatatttcctcgatgc

SEQ ID NO: 215977 - DNA, 417 bp, Gossypium hirsutum
  unsure (1)..(417): unsure at all n locations
cccacgcgtccgtgctgcgatgacatgcagagctgttgtataggtctctttttcccctgctatttgtttggaaagaatgcagaatttttgggttcgggtactctagtcggatcctgcatcacccatttcattctttgggcccttgtcaacactctctgctgcgtcttaactcaaggcttctatttggctttacctggatttggatgctttatctcttgttatgcttgtggctatcggagggcacttcgctccagatacaatttgcaggaagcaccttgtggggactttgctactcactttttcttgccatctttgtgccatttgtcaagagtacagggagattcgtgaaagggcagaggaccctanacccctgatctaatctgctgtcgtactgcacagacgtcagacaatggatca

SEQ ID NO: 215978 - DNA, 478 bp, Gossypium hirsutum
  unsure (1)..(478): unsure at all n locations
ccgggccgagcccacgccgtccgcaaaagagtaagaganaaatgagtgatagtaaatagcattaagtcttgcggatagtcttttaccttgctcaagtgaataggggggccctccgtgttaataacccaactcaattcttagaaaatatattatattaccttcactgataatagttaaaaacattgcccgtatgttattatttcaatttcctgagtggtctgaggatttaacggattggaatcgagaaatgcatgttaaatgcacttataatggtgttcaattatccgaaaccgaatttccaaaaaactggttaacagacggtattcagataaagatcctatttcctttttgcctgaaaccttggcacagatttaaactacaaccctctcataaagatccaatgaaaaaaaagaaaggtcaaaagaatgatttttgctttttaacagtttggggaatggaaactgaactacctttcggc

SEQ ID NO: 215979 - DNA, 444 bp, Gossypium hirsutum
  unsure (1)..(444): unsure at all n locations
cttaacacaaaggtgccagaactacctacaacatgtcaggcaggaaggaaacagtgttggatttggctaagtttgttgacaaaggtgttcaggtcaaactcaccggtggtagacaagtcacagggaccctaaaaggatacgaccagctactgaatcttgtcctggatgaagctgtagagtttcttcgagaccaggatgatccgttgaagactactgatcagactaggcgtcttggcttgatagtttgtaggggcacagcagtcatgctggtgtcacctaccgatggcacagatgagattgccaatcctttcatccagccagatggagcctgatctgatccgttttcaaaatatggcatttcctttgctctactacttatatattctcttaacattttcaagtctgtatttctatgagcatgtngntatctcttttgaagctacc

SEQ ID NO: 215980 - DNA, 363 bp, Gossypium hirsutum
aaatcatccaagatttcaggacgcaattcttaagtgccctgaacagagccggggtgatcaactctccatctaaaggaatgttcatagattcgtgctatgcccactgtcaagtaggaaagcagatacaatggtcaagcgatagttctccggtagtgagtaacatgaaaattgccaaggctgttggagactggtattatgagcggagccccatcaaaaagcttgactgcccttatccttgcaaccctacctgcccaaaagttgactctgattcataaatctatacatataattatggactgcagtttatttattagatggatattagtcaattgttcatgtctaattatccatctatgaatctct

SEQ ID NO: 215981 - DNA, 235 bp, Gossypium hirsutum
accacacgtacgaccacacgtccgggaagcctgttgaggttatgggtatgctggtgacaaccggttggtcaccaggagggatgatcaagacattctccacacatttgaaggagacaatgcagatcctctgcaacaggtagcggcatatgtattgaagcaacacaaggacaagctccacggttgtgctcttgttgtcacatcgaactacttgagagaatctaggagcacatacttg

SEQ ID NO: 215982 - DNA, 483 bp, Gossypium hirsutum
tccagggacgacgccacgcgtccgcccacgcgtccgcccacgcgtccggccattcaatttgagaatcctggcccacgggtattggagggcttcactgttggatttcatccgcgatcatgggaaattgttcacaatggtctgactcagttgggttttgaaaaatctcaccctgattttagtttcagcactgaacagcctcatgttaccctttatttgactgccattgcatcccaatccaacctcgtaaaaaaacctggagtcgaggtgtttccagaaaacggactggaggtcaagttatcagggactgctgcaactgggaatccacctacaacattatcaccatcaactttgcttttagattggagatgtgtaaaggcccgtgataccccgtatgaagttaagatcactatcccagtggaaggttatgaatcaatcgagtttgttctaacgaagatgtgtgactctgcacaaaatcaggaagaa

SEQ ID NO: 215983 - DNA, 518 bp, Gossypium hirsutum
  unsure (1)..(518): unsure at all n locations
gggacgcgccacgcgtccgaaacacttctccagtgaccaaaaaagcttcattttttcttctatcgaaaaccccatggctgctcttaagctagtttgtgctctagtgttgtgcatgttggtggttgagcccattgccacaaccaccataacatgcggcgatgtgacaagcacagtggccggttgcttatcatacttgcagaacggagggaacatgccgaatgcttgctgcaacgggatccggtccctgaacaacatggctcgaaccacccctgaccggcaaaccgtgtgtgggtgcttgcaagctgccgctaaggctgtcaaaattaaaggcaacttggctgagaccctcccagacaaatgtagtgtcaacatcccttacaagatcagcactttcactaactgcaaaaatgtgaagtgagatggatgaacagagggttttgcaacagcttgcaggagataaaatatttgtttaanaagaagaggaggaagattgaatctggtttttgggatggaatttt

SEQ ID NO: 215984 - DNA, 427 bp, Gossypium hirsutum
ggttgaactcaatgggagactcaacatgtgtggtttgattagtcctcgtttcgatgtcggggtcagagagatcgagggttggaccgctaggctacttccttccagacagtttgggtatattgtgcttaccacatctgctggcatcatggaccacgaagaagctagaagaaagaatgttggtggaaaagtacttggtttcttctattgaggcaaatttcttagatttttcatttttgtttgaagtttctcttcatctagaacctctgttggtaccgatttcaattcatatttaggggatcacgaggttttggttcgcttgcctttttgtcatctgatagctagaagttggctcgttaaggtttctgtaccctgttttttcacaattttataactgtgcatattatcctttttcttttgctcaaacaaa

SEQ ID NO: 215985 - DNA, 491 bp, Gossypium hirsutum
  unsure (1)..(491): unsure at all n locations
atgccgatgtcataaccattgagaactcacgttcagatgataagctcctgtcagtcttccgtgaaggagtgaagtatggtgctggaattggacccggtgtctatgacatccactctcccagaataccatcaaccgaagagattgctgacagaattaacaagatgcttgccgtgctcgagaccaacatcttgtgggttaaccctgactgtgggctcaagactcgcaagtacgctgaggtgaaaccagccctgagcaacatggttgctgctgccaagctgctccgcacccaactcgccagcgccaagtgatcccacgcgtccgaatggtaaaggtttcttttaccttaaccaatagtcaattctcatctatttatacaatatttgtcatgttagtaaaaaagaaggcttctcgcctttccaatcccataaatatgtaccctacanatccagtgaataattgggatgaaaaataagtaaattatattttggttc

SEQ ID NO: 215986 - DNA, 452 bp, Gossypium hirsutum
cttcaccagtttgtgacatggatgcttcagccttatgctgctgttcgcccacagatagatgatatgataggtcatgtagacaagttgatctcaaagttttcacagtgataccatataggggagtgaagattagagcattccaaccattaatgcatacaagttaagtccattgaaatacttccggaagtgaacagcgtttatcaaagcaatagcagttctttagtaatgttacatggtttggacttagctgtcttagttgtgtcgataactctatgacgtcatgttctgtaatttattgaagtccagatttctacattcatgattcgatttgatagaaaaaccctaataatttgtgttatccatttagtttaatgtttcagatatcccagtttttctgagtgtttcaagctattagtcatttagttctgcaatatcgagtgaatatccgatat

SEQ ID NO: 215987 - DNA, 346 bp, Gossypium hirsutum
  unsure (1)..(346): unsure at all n locations
caaaactgatcttgtggacaaaaggcaagtctcagttgaggaagccgaagccaaggctcgtgacctcaacgtaatgtttattgaaactagtgccaatgctggcttcaatatcaaggctctttttcggaagatcgcagccgctttacctggaatggaaacactttcttcaacanaacaagaagacatggtcgacgtcaatcttaagtctacanacgcanattcatctcagtcgcagcaagaagcttgaggatgtgcctgctgaggatacatacatacattacactcactcacacacatcatttgatccgaggtatgtatggttttctcaacatttagtgttttctgt

SEQ ID NO: 215988 - DNA, 422 bp, Gossypium hirsutum
  unsure (1)..(422): unsure at all n locations
tggagatatggaccagaatacgcgtgatgtcatcatgcgggaattccgttctggttcttcccgtgttctcatcactaccgatctgttagcccgtggtattgacgtgcagcaagtctcccttgtcataaactatgatctgcccactcaaccagaaaactacctccaccgaatcggacgaagtggaaggttcgggagaaaaggtgttgccataaactttgtgactgtagatgatgaaagaatgctgtttgatatccagaagttctacaatgttgtcatcgaggagctgccatcgaatgtcgcggatctcctttgatgagattacgttttctgaaggttgtcagaggcgagcgctntcattgttngaaatgtcaantaaagtgtgctctttttttcttttttgttntccctttttagcattttaa

SEQ ID NO: 215989 - DNA, 408 bp, Gossypium hirsutum
  unsure (1)..(408): unsure at all n locations
cccacgcgtccgcccacgcgttcggctcaagcttttagagattgtcaccactattcccaccatcggatttaatgtggaaactgtcgaatataagaacatcagtttcactgtctgggatgttggtggtcaggacaagattcgtcctttgtggaggcattacttccaaaatacacagggtctcatcttcgtggttgacagcaatgacagagaccgtgttgttgaggccagggatgaattgcatagaatgttgaatgaagatgaactgcgagatgctgtgttgcttgtttttgcaaacaagcaggatcttccaaatgcaatgaatgctgctgaaataactgacaagcttggcctncattctcttcgacagcgtcactggtatatccagagtacgtgtgcaacatctggtga

SEQ ID NO: 215990 - DNA, 448 bp, Gossypium hirsutum
cccacgcgtccgcgaacctgtattatgttgatggaatgtcttagctttttgttaaggaatatggatatggtttctgtttctgctttaatctcagaagatgttagggggcaagcaaagttaattgctgaggaatggaaaccaaagttggatgctcttgacatggatgctagtaatggtaattcattggaagctcatgcattcctgcaacttcttgccacttttggtattgcttctgacttcaatgaggaagaactggcaaggctgataccaatggtctctcgtcgtcgtcaaacagctgatctctgccggtcccttggtttgtctgaaaaaatgccaggtgtaattgaagttctggcgaataatggaaggcagattgatgcggataatctggctcttgcatttgatcttacagtgcagttcttgcctgtacctttactgaaggcctact

SEQ ID NO: 215991 - DNA, 331 bp, Gossypium hirsutum
ctctttctttcttgttcctgtttcctgtttttttattgaaaaatcagggtttccgtctgcggtggtgagaatcaagggcgtggacttacctgaaaataatgttgaggagctccgacggagagacttttgaggtggacgaagcggtggcattcgattcacatacgatctagcacatgatcgaggacgattgcgccgacaacgagatccctcttcgaaacgtcaccagcaagatcttgctcaaggtacttgagtactgcaagaagcatgtccatgctgctgtcgacaaggaaaaaactcctgatgacgaactcacggtgtgggatgctgattt

SEQ ID NO: 215992 - DNA, 381 bp, Gossypium hirsutum
cccacgcgtccgcccacgcgtccgcatcaagaagctacagatcatgcttaccatagtggatgatcggggtggggttgatactcttatagaggagtacctcacgacagagccacgcaacgaatacattcaaagctgtgacattgttgcattcaacaagatttagaggactcagtttttttctacagcagttgagagtgccattggccatgttatcaccttttgccccttgctttcccctcgaatatatatatttttgcttgaaccgtgctttgctagcgcttctgctctatagtgagcatagatgaaaaggattttcaagtatttaaggatgttctatgttttttatttacttaaagcttgcccaaagtagttttagtgaca

SEQ ID NO: 215993 - DNA, 412 bp, Gossypium hirsutum
aacaaaccactcccatattaaacattgttggtgaaacaatgacgtcttcagctctgacaggtaagcttgaggcagatgtagagattaaggcttctcctgagcagttccatgaaatgtttgcccacaaaccgcaccatgtgcaccatacttgctatgacaagattcaaggatgcgatttacatgaaggtgaatgggggaaagtcggtaccattgtccattggagttatgtgcatgatggaaaggctaaaaaggcaaaggaagtagtggaagcagtagaccctgataagaatttggtcactttcagagtgatcgaaggagatctaatggaagagtataagagctttgtaatcacgattcaagtttcgcccaagagcgagggtagtggcagcgtaatgcactggactttggaata

SEQ ID NO: 215994 - DNA, 462 bp, Gossypium hirsutum
cccacgcgtccgccggaaaatacgtgtgcttcatcaataagtggttcttgtgtaatagacaatgagaatgacttggggcttatgataagacaactggaaactgctatgctaggcatcgattcaggtgatcttgaccttcatgcaatagcagcttctggcagagccactaaagtttccgtagaagcggagaggtggaaatacatgaaagagatgatcgccagaggggacctgaaagaactgctttgtacttgtgccaaagctatagaaagtaacgatatgtatatgactgactgtttgattgcgcaattacgtcaaatggtgtcagtttcgggtgaaccaatgcaacgactaggagcctacttgttggaagggcttgttgcacggttggcttcttcaggaagttctatttacaaagccctaagatgcaaagagcctgccagtcctgaactgctttcatacatg

SEQ ID NO: 215995 - DNA, 318 bp, Gossypium hirsutum
  unsure (1)..(318): unsure at all n locations
tctcgcttctagcttccctgggaaagctgttggcgtttcacttggtggcaaagctgatccagctgaatctgctgaagctaagtctcctgctgcggacgatgacgatgatgacttggatctgtttggcgatgaaacggaggaggataagaaggcagcagaggaaagagaagcagctaaaaagtctgctaagaagaaagagagtggaaaatcttcagtactgatggatgttaaaccatgggatgacgagaccgacatgaagaagttggaagaagccgctcgatctgttgaaatgcctggactnttatggggagcatcaaa

SEQ ID NO: 215996 - DNA, 495 bp, Gossypium hirsutum
cccgtatctacccgatggaaggtttgatctcgaatcatacgatgacttgatgcacatgcaaattgaaaacggtgcagaagctgtaattgttggtggcacaaccggtgagggccagctgatgagctgggacgaacacataatgcttattggtcattacagtcaactgttttggtggatcaattaaggtaatcggaaacactggcagcaactcatccagggaagcgattcatgccactgaacaaggttttgctgttggaatgcatgctgctcttcacatcaatccatattacggcaaaacatctatggatggcctgatttatcacttcgatagtgtgctgccaatgggacctaccatcatatacaatgtaccatcgcgaactggccaagacattcccccacgtgtcatatacaacgtatcacatagtcccaacttggctggtattaaagaatgtattggaaatgaccgaattgagcagtacacaggtgatggaattg

SEQ ID NO: 215997 - DNA, 451 bp, Gossypium hirsutum
  unsure (1)..(451): unsure at all n locations
cttgttgtttcacttttttttttaaaaaataaatataaaaaccccattaaggcttgaactcttcttcagccaaaatgggtatttctcgtgattcaatgcacaagaggcgtgccactggtggcaaaaagaaggcttggaggaagaagagaaagtatgagcttggaaggcaacctgctaacacaaagctgtcaagcaacaagacagtcaggaggattagggttcgtggtgggaatgtgaagtggcgcgctttgaggctcgacaccggaaactactcatggggaagtgaggctgtgactcgtaagccaggattttggatgtggtgtacaatgcatccaacaatgagctggttcgcactcatactctggtgaagagtgctattngtcaagtagatgctgctccattcaagcagtggtatctccagcactatggcattgacattggtcgcaagaag

SEQ ID NO: 215998 - DNA, 446 bp, Gossypium hirsutum
cccacgcgtccggaaacataagcggcataagagttttaaggaaaatgcagatcttcgtgaaaaccgtaactgggaagaccataaccctagaggttgaatccagcgacactatcgacaatgttaaggctaagatccaggacaaggaaggtatcccgccggaccagcagaggttgatcttcgccggaaagcagcttgaggatggtcgtacacttgccgactacaatatccagaaagaatcaacattgcatctggttctgaggcttcgtggtggcattatcgagccatctttgatggcattggctaggaaatacaaccaggacaagatgatctgccgcaagtgctatgctcgtctacacccccgtgctgtgaactgcaggaaaaagaagtgtgggcatagcaatcagctgaggccaaagaagaagatcaagtagattggatatcttgat

SEQ ID NO: 215999 - DNA, 319 bp, Gossypium hirsutum
aagccaacaacttcctttggccatttaagctcatggcaccattgggtggtctgaagaagaagaggaaccatgatgtcgaaggtggagatgccggcaaccgcgagaattacatcaacgaattaattaggagaatgaattaaaaaaccaaacttgggttttgttttaaaaaactagtggttgatgtcttttttggtttattttgtaagggattctgatgttaatattctgttggaagttggaatcacttttttgttatcggagacgcgaatatttttgctttgtgttgccagtgatatactttgtgactgagagctttctc

SEQ ID NO: 216000 - DNA, 458 bp, Gossypium hirsutum
  unsure (1)..(458): unsure at all n locations
atctacgcaaagtggacttgaaactatacaagagttaccaacaactctctgatgccttgagcaaggtgtgcagctccttcactattggtaactgtgggtctcatggaatgaaagatttcatgaatgagagcaaattgatagaccttttgaatggttctgagtatgttcctacttatgaagacaaagatggagattggatgcttgttggagatgttccatgggagatgtttgttgattcgtgcaaacgcttacgaattatgaaaggatctgaggcaattggacttgcaccaagagcagtagagaagtgcaagaacagaagctaaggtaggtttagaaacaacaatcccaattaaaatcaagccagatcaaaatcagattgtatgtgaaaccagttgaatcgagaaccgaggtctgaagaagaagaaatattaataaaangtagtagggatatattttga

SEQ ID NO: 216001 - DNA, 456 bp, Gossypium hirsutum
aaaagccaaaacccagaaagctgactcatcgcattcctctgaaaatgacaccaagttcccagcttggtcggctcggttcctccttcgtctgttgccatcaccatccacgccaaacccggcgccaaatcttcctccatcaccgatttcagcgacgactctgtaggggtccagattgatgcgcctgccaaagatggtgaagctaacgctgcacttcttgattatatcagctcggttttaggggtgaaaagaaggcaagtttcaataggttcaggctctaaatcaagagataaggtggtagttgttggggatatcactctacagagtgtatttgatgctttgaacaaagcgtccaagtgctagcgatggagagacaccttttgaagtgctagttattgtaagatggttagttcaagccagggatgatacttggttgcttcctggattcaacatgagaat

SEQ ID NO: 216002 - DNA, 461 bp, Gossypium hirsutum
  unsure (1)..(461): unsure at all n locations
cgtcgacgaaactgaagcaagaaccttctcaaaggtttttggctgggagactgatgatgttgcagagatggccgtgaagatttcacagtgggcgaaagcttctggaacatacaagaggactactgttattactcagggtgcagatccagtaattgttgccgaggatgggaaagtgaagcagttccctgttattttgttacccaaggaaaagcttgttgatacaaatggtgcaggtgatgcctttgttggaggctttctttcacaattggttcaagggaagtccattgaggattgcgtaagagctggttgctatgcatccaacgttatcatccaaaggtctggctgcacatacccagaaaagcctgaatttaaataaagctagtccactttcctgatctcctctccgctgttgttttcaagtttctgattgttaagaaccctcttgctagcnattgatcttt

SEQ ID NO: 216003 - DNA, 347 bp, Gossypium hirsutum
ctgccctcaaccccgaccatgttccacacatactccatatatgccctgatcagatcccagaccccaaggccgtccagtatgtgagaaacgaccgtgggacacccatggttttggataacaactactacaggaacatactggacaacaagggtttgttgattgtggatcaccaactggcgtacgacaaaaggaccagaccttatgtgaagaaaatggccaagagccaagactatttcttcaaggagttctcaagggccattactctcctctctgagaacaatcctctcactggtagcaagggtgagatcaggaagcaatgcaatcttgcaaacaagcttcactaaaat

SEQ ID NO: 216004 - DNA, 361 bp, Gossypium hirsutum
cccacgcgtccggctgctttgagagaggggttgcctcttagaaagtcggagcacgccttctacttgaaatgggctgtccactccttcagaatcaccaactgtggtgtacaggacactacccagatccacactcatatgtgctactccaacttcaatgacatcatccactcaattatcgacatggatgctgatgtgataaccatcgagaactcacgttcagatgaaaagctcctttctgtattccgtgaaggagtgaagtatggtgctggaatcggccctggtgtctatgacatccactctcccagaataccatcaaccgaagagattgctgaccgaattaacaagatgcttgctgtgcttg

SEQ ID NO: 216005 - DNA, 479 bp, Gossypium hirsutum
cccacgcgtccggtgcagatccgtcaatatcaatgcacgagctgcagccacatgatcagttcgtgatatttgcatctgatgggctttgggagcacctaagtaaccaagaagctgtcaatatagttcaaaatcatccacggagtggaagtgcaaagcggctcgtaaaaaccgcactacaagaagcagcaaagaagagagaaatgagatattccgacttgaagaagattgaccgcggtgtccgccggcatttccacgacgatatcacagtaatcgtggtgtttctcgactcaaacctcatgagcagggctagctcagcaaagggccctaatctatccattagagggggcggagttaacttccctccgaatatactagccccgtgtgccacgccaaccgaacccggcggcacttgatcatatatatatctatgtccctcgggtttttttttctttggtggatcattttcttatgtgaatacc

SEQ ID NO: 216006 - DNA, 345 bp, Gossypium hirsutum
gccacgcgtccggagcaactgccacattcccaattcaggttgtgtcacggctagagcaaatcaggagtataggcatctattggccctctgtgagcagcttcttaaccaagaagctgtgcatctacagcagaatcatccacggagcggaagtgccaagcggcgcacatcatgcgctctacgcgaatctgcgagcaagagagaaaagagatattccgacttgaagaagattgaccgcggtgtgcaccggcatgttcaccacgatatcacagtaatcgcggtggttctcgactcaaacctcatgagcatggatagctcagactagggccctaatctatgcattagagg

SEQ ID NO: 216007 - DNA, 325 bp, Gossypium hirsutum
  unsure (1)..(325): unsure at all n locations
cccacgcgtccgcccacgcgtccgcccacgcgttcgtgacatggctgggcctgtcttgaatgatgagaagcatgtggcaactggatttggcatctcaactttggtggaatgggttctgaagaactcttcttcttaaatgaaagcttggaacatgctctgtcgtgacggtggcagaccgaaaaaggagaacaacctgttcgaggttgttgggttctgtaagatctgtctcatgaataagaagcttgttgttggaatactgctctgttttcctttgctttttgtagcttgttcctacaatgttataactacataaagctnttttacc

SEQ ID NO: 216008 - DNA, 378 bp, Gossypium hirsutum
cccacgcgtccggaagaatgggagcttgccaaaaagcaggagcttgaagctgcaaagaagaagaaagtcgagaaccgcaagttgattttcaatagggctaagcaatacgcaaaggagtatgaggctcaggagaaagagttgattcgattgaagcgcgaggcgaagttgaaaggaggattctatgtggatccggaagctaagcttttgtttatcgttcgaatccgtggtatcaatgctatgcacccgaggacgaaaaaagattttgcagctcttgcgattgagacagattttcaatggtgttttccttaaagtaaacaaggcaacaatgaacatgcttcacctggttgaaccttacgttacatacggataccctaatct

SEQ ID NO: 216009 - DNA, 356 bp, Gossypium hirsutum
cccacgcgtccggaaaaagtaacatttcccaaaccaaactagggttagggttatccctaatccgcataaagttttttttacacgctctattcttgctacttaattatcaaatatgggcgcaccaacagactcagccctcgatctcgatgaacagatctcgcagctcatgcaatgtaagccactttcggagcagcaggtcagagcattatgcgacaaggcaaaggaaatattaatggaagaaagcaatgtccagcctgtaaaagcccctgttacaatttgtggtgatattcatgggcagtttcatgatcttcaagaactttttcgaattggggggaaagtgtccggatacaaactac

SEQ ID NO: 216010 - DNA, 383 bp, Gossypium hirsutum
agtcaactctccaccttgtccttcgtttgcgcggcgggatgcaaatcttcgttaagacgcttaccggaaagacgatcactctcgaggtcgagagctctgacacgatcgacaacgtgaaagccaaaatccaagacaaggaaggcatcccgccagaccagcaacgtctcatcttcgccggaaagcaactcgaggacgggcggactttagccgattacaatatccagaaggaatcgactcttcatctggttctacgtcttcgaggtgggatgcagatcttcgtcaagactttgaccggtaagaccattactttagaagtggagagctcggatacgattgataacgtgaaagcgaagattcaggacaaagaaggaattcaccagatc

SEQ ID NO: 216011 - DNA, 494 bp, Gossypium hirsutum
gttctagaaatggaatcatctgttctgaattacttgaagtttgaaatgactgccccaacagctaaatgtttcttaagacggtttgttcgtgctgctcaagggatcaatgaggttccatcaatgcaattagagtgcatggccaactacattgctgaactgtctctccttgagtacagtatgctttgctaccctccatcactcattgctgcatccgcaattttccttgctaaatttatacttcttccatcaaagaaaccttggaattctaccttgcagcattacacactgtataagccctccgatctatttgagtgtgttaaggaccttcatagactatgcttgaacaacaacaattctactttgcctgcaatcagggagaaatacagtcagcataagtataaatgtgttgcaaagaagtattgccctccttcaataccttcagatttcttccacaactgaagaaggcattggacaccatcagcaacagcacaact

SEQ ID NO: 216012 - DNA, 402 bp, Gossypium hirsutum
  unsure (1)..(402): unsure at all n locations
cccacgcgtccgcccacgcgtccgattatttgttgcaaagattattatctttaggaaaagaagttttgatgcaaagatcgaaggttgaaaagcaaagaagcaagttaggagaagaagaacaagctgctgttcttttaatggctctttcttatggctctgtttatgcttagtgttttcttacttttattctaatttaaaaatatatatttagaacagacataataggatctttaatgggtatctaaccattttgaaatgtaaatctttggtaaattagaagctgtctttttaatggctactattgtggtaattggaggtggttggagaagaaggcttggacggaaggaagtggaataagaatganggtttattctaattttccttgaataacttggattgggt

SEQ ID NO: 216013 - DNA, 460 bp, Gossypium hirsutum
gcggatcagtccaaggacaaggaagcttgaactattttctcgcatgcataatactcatgcaggatggatatcgcttgggaatcagttaaatggggttagactggttgatgaaggcctaagagcaaggtacaaggctgcctacccacatgtagaagtacaacctctctctcctcccaaagcttctgccatggaactagactctacttctgctagaagtccctttgcaacagagtcaagatcacaatttgcggatccagctgctcccgatgctggccatgctcccgaagagagggcaatggctgtagatactgatatgaccacctgaaaacctgacctaccttggttaattcccagatactagttcaagggccgatgtaccattacttaatagttcttttgtttcttttgtaatgattctactgtatcagtcccattttactgtttttagttaatttttgac

SEQ ID NO: 216014 - DNA, 455 bp, Gossypium hirsutum
ctggtccccacaagtccagggaatgcttgccattgatccttattttgcgaaaccgattgaagtatgctctcacctatagagaagtcattgctattctcatgcagaggcatgttatggttgatgggaaggttaggacggataagacctatccagctggtttcatggatgttgtgtccattcctaaaacaaatgaggacttccgtctactttatgacaccaaagggcgatttcgtctccatgccatcagtggcgatgaaaccaagttcaagctttgcaaggttcgatctgtccagtttggccagaaaggtattccatacttgaatacatacgatggtcgtactatccgttaccctgatcctttgatcaaggctaatgacaccatcaagctagaccttgaaagcaacaaaattgttgatttcatcaagtttgatgttgggaatgttgtcatggtcact

SEQ ID NO: 216015 - DNA, 329 bp, Gossypium hirsutum
ctggtccccacaagtccatggtatgcttgctttttatccttattttgcgaaaccgattgagggaggctctcacctatagagaagtcattgctattctcatgcaaaggcatgttatggttgatgggaaggttaagacagataaaacctatccagctggtttcatggatgttgtgtccattcctaaaacaaatgatgacttccgtctactttatgacaccaatgggcgatttcgtctccatgcgatcagtggctatgaaaccaatttcaaactctgcaagggtcgatgcttccaatttgggcaaaaaggtatttcataactgaatacatac

SEQ ID NO: 216016 - DNA, 456 bp, Gossypium hirsutum
cccacgcgtccgcccacgcgtccggaaaacgccatagtccttaaagaaggattggagaaaacagggcgttttaacatcgtgtcaaaggacaatggggttccactggtggccttctccctcaaagacaacaagcgccatgacgagttcgagatatcggagatgttgcgtcgcttcggttggatcgtgccagcctacaccatgccagccgatgcacagcacatcactgtgctccgtgttgtgatcagggaggacttctcccgcaccttagccgagcgtctcgtcattgacatccaaaaagtgctccatgagctcgataccccccccccggccccgcttccctttttccttttaatttttagtttttgtttctcgccatgtttgttttccccatttttttcaagcttcagcatgttgaggaaactagcttaaagactaccaatgaatgcatttgaatcg

SEQ ID NO: 216017 - DNA, 443 bp, Gossypium hirsutum
  unsure (1)..(443): unsure at all n locations
cccacgcgtccgcggacgcgtgggttggtccagtaccagctaggtgtttctcttgggctcatatggccgatgttccccaagtgcctacactcagcatcccggaggtgaaactgagctcctcctccggcggccggaacatgccggtgatcggaatgggcacggcggccgatccatttgatgaaactgctttgaaagaggcgattctggaggctatcagtgtcggttaccgtcacttcgacgctgcatcgctttacaaatcggagaagccattgggagaagctatagcagaagcgattaagttcggttttatcgcatctcgcgatgaacttttcatcacttccaagctatggtgcactgatgctcatcccgatcttgttcttcccgctctcaaaaattctctcaggatgcttcagttggaatactnggacctttatctcattcac

SEQ ID NO: 216018 - DNA, 440 bp, Gossypium hirsutum
ggagtcgtccgcatgataagcagtacgatacaattctttgtttgagtgtgacaaagtggattcacctgaactggggtgatgatggcttgattactgcgttcgcaaagatttggagacttttacgtccgggtggcgtttttgtattggaacctcaaccttggtcatcatatgaaaggaaccgcacagtctctgagacaacaagaagtaattttcgagatatcaagtaccgacctgatttttttagggaaatgcttctagacaagatcggattcagaagggttgaagttgtaacttcagatctgtcgggaactagaaccggtttcaatagaccgatctttgcatactacaaatgaccaattttgatagttcgattttgttgaaggggtaccgagactaacttggacgtgatttttgcctgttaccacacatggatttacata

SEQ ID NO: 216019 - DNA, 444 bp, Gossypium hirsutum
caagctcaggccttgagcatgagttggatggtcacaactggtgcagcggctccacttgtaacggaccttccactatacctagctgtggatgaaagtggtgagggaagaagaaaccaaccaacctgcgagaaatggtcaaatgatggcacagatagacacgcagctaaactggtggatgaagatgtcggagctgacatgcaatttcttctatcaaaggctctttgcgtggtgccaatttcactgcccaccgcactttaccacacgctatatcacaatacctcctctgatgctaagcctgatacaaatcctgcttcatatactcctctcttgacgcatagagggaaagaaaacggtgtatcatacggtggatgagactgtggacaaagacggaagcacttaccttgtgtattggcgtggcatggatttttgcatttggtgttatgt

SEQ ID NO: 216020 - DNA, 313 bp, Gossypium hirsutum
ggcgatgtctagatgcagggcaagtgctgattgagagcgcatgctcggtggaccgagtcgaggaaacactgaatacattgttgcctatgcaccccaagatccgttacttccggttcaatccagtggatgaacgttgtgacatgaagctggacgagactgatccagcagtttggcagaagttggaagctgctacaaaagattacattgaaaataattcggaatactttaatatagcatgtgaaacactggttcaagcctctgctaatagggatactgagaaataaaaaaacacttgatcttaaaataaaacaaa

SEQ ID NO: 216021 - DNA, 462 bp, Gossypium hirsutum
gattccgttgcccggaagtcctcttccagccatctttcatcgggatggaagctggtggaatccatgaaactacctacaactctatcatgaagtgtgatgtggatatcaggaaggatctctacggtaacattgtgctcagtgggggttcaaccatgttccctggtattgcagaccgcatgagcaaggagatcactgcacttgctccaagcagcatgaagattaaggtcgttgcaccaccagagagaaagtacagtgtctggattggaggatctatcttggcatcactcagcaccttccagcagatgtggatttccaagggtgagtatgatgaatccggtccatccattgtccacaggaagtgcttctaagttttgtaattgcttttgatggtgatctacattttgcatttaggtggctttttttgtgtgcggtgtcaagtgaactcccaagtcttgtttatgt

SEQ ID NO: 216022 - DNA, 457 bp, Gossypium hirsutum
gattatttggggtaatcattcatcaactcaatatcctgatgtcaatcacgcaactgttatgactccatctggagaaaagccggttcgcgagcttgttaaggatgatgcatggttgaatggagaattcataaccactgtccaacaacgtggtgctgcaatcatcaaagctaggaaactctcaagtgcactatctgctgctagtgctgcttgtgatcacattcgtgattgggtccttggaactcccgagggcacatgggtttccatgggggtttactctgatggttcatacaatgcaccagctggggtcatctattccttccctgtaacttgtaagaatggagaatggacaattgtccaagggctggcaattgatgaattctcgaggaagaagttggacttgaccggagtggagctgaccgaggagaaggaattggcatactcgtgcctctcatgaatg

SEQ ID NO: 216023 - DNA, 424 bp, Gossypium hirsutum
tgctttcactggtgaagttagtgcggagattcttgtcaatttgagcatcccttgggttattattggtcattctgagaggagacttatttcgatggagtcaaatgagttcgttgcggataaggttgcttatgcactttctcaaggcttgaaggtgatagcttgtattggggaaacacttgagcaacgtgaagcaggatctactgtggcggttgttgctgaacaaactaaagctattgctgcaaaaatatcagactggactaatgtcgttttggcatatgagcctgtgtgggctattggaaccgggaaggttgctactccatgctcaagctcaggaagtacattttgagttgaggaaatggcttcaggctaatgttagtcccgaagttgctgaatcaacccggattatttatggagggtccgtcac

SEQ ID NO: 216024 - DNA, 381 bp, Gossypium hirsutum
gagaaagttaacacccttccggcttttctttctaacgatgacatgctcattctctgtggagtgtacaatcaagccactgttggaccaatgaataccggccgtgctggaatgttcaacatgagggaaaggtacaaagagaattcatgaaatgctgttgaagggaaatcaaaggaggaagcaatggcggattatattaccaaagtaaaacaactgttttaagcatctggaagttcttgatgtgtgtgcgtatggccaataaaaatggtgttaatacaagcccttgtttgtactagtggttatcatgactatgatataaaatatgtactctttatctattgctatatgttatttataaaagaaactccttgttttacttttatt

SEQ ID NO: 216025 - DNA, 453 bp, Gossypium hirsutum
cccacgcgtccgcccacgcgtccgatcgacaagaaatgcccattcaccggcactgtttccatcaggggtcgcattttagccggtacttgccatagtgccaagatgataaggacaatcattgttcgacggaattacctacattatatcaagaaataccaaaggtacgagaagagacattcaaatatccctgcacatatttctccatgcttccgtgtgaaggaaggagatcatgtcattatcgggcaatgcaggccgttgtcaaagactgtgaggttcaatgttttgaaagtgattcctgctggatcttctggtggagggaagaaagcttttactggaatgtaaggtgtaactgttttcaatcatagttcgggttgtaggaacataaggagaagacattaaaatccctgaactgcctctagatatgaagaacctgggactattagatgtttttat

SEQ ID NO: 216026 - DNA, 441 bp, Gossypium hirsutum
  unsure (1)..(441): unsure at all n locations
aagcatttagtgatactattgatttgtttgttgaaaggtacaaagggcaaaatatatctgttgttgcaggtatagaagcaaggggattcatatttggtccacctattgcattggctattggtgccaagtttgttcctatgaggaagcccaataagttgcctggggaggttatctcggaggagtattctttagagtatggaaaagacaaaatggagatgcatgtcggtgccgtgcaagctggagaacgtgctttgataatagatgatctcgttgccaccggtggaaccttgtctgctgcgattaggctacttgagcgagtcggcgtgcatattgtggagtgcgcttgtgttatcgaattatcaggtttaaagggtcgggaacggttaggagatacaccgctgtttgntcttgtaaactcggcttgatatcacnaagtgtgtg

SEQ ID NO: 216027 - DNA, 453 bp, Gossypium hirsutum
cccacgcgtccgttagtttctcatcgagacaaccttcatcattaggcattttgtctcagatttctgaaatcgaaaatgaaaaccttggggctaatagctttgatggtggcaaacctgaataccaatgtggttcttggaatgaatctgcacaattgactgagaagcacaagttgtttaccaataaccagaatggagatattggaagtggtgttcatgtattaccgcgccatttgagtctgccaaaaacttcgaacgagatggctgtcatggagaagtatctacagttccaagattcagtcccttgtaagattagagctaagcgtggttgtgctactcatcctcgaagcattgcagaaagggtgagaagaactcgtatcagtgaacggatgagaaaacttcaaaagcttgttccaaacatggacaagcaaacaaacacagcagacatgttggatt

SEQ ID NO: 216028 - DNA, 422 bp, Gossypium hirsutum
gcgagggccgccctttttttttttttttttttttgtatattttggccttttcatgcactttgttgaatgcaagtttccatcgttgagctctaaaaaaaaaaaaaaaaaaaaaaaaaaaaaaaaaaaaaaaaaaaaaaaaaaaaaaaaaaaaaaaaaaaaaaaaaaaaaaaaaaaaaaaaaaaaaaaaaaaaaaaaaaaaagggggggccgttttaaagaatcaaagctaaccaacggggtcttgcaaagaaataggttttttataggggccccaaaattaaatccactggccggggtttaaaaacgttgtaactggaaaaaccctggggttaccaaatttaatggctttgaaaaaaatcccctttttgacagttggtttaataaaaaaaaggcccaaacaaattgcctttccaaacatttgc

SEQ ID NO: 216029 - DNA, 457 bp, Gossypium hirsutum
cattgttgctctttctggtggccacactctgggaaggtgccacaaggagaggtccgggtttgagggaccatggactaccaaccctctcatctttgacaactcttacttcaaggagcttttgtcgggagagaaggaaggccttcttcagctaccaactgacaaagttctcctgtcagatcctgttttccgtccattggttgaaaaatatgctgccgatgaggatgccttctttgctgactacaccgaagctcacctgaagctctctgagctaggatttgctgatgcataagctgatggttgcggaatagaatgaagccaacaacatttgcctccacaaaatgaatgtattgggttttgtcgtctcttagtagtttataggcagttgttgcttgatgaatatgggtatttgcagttttattttgttgaacatgttgaattgagtttgtgggagatttcg

SEQ ID NO: 216030 - DNA, 331 bp, Gossypium hirsutum
gtcattattggtcaatgctggccattgtctttaaccgtgaggttcaatgttttgaaagtgattcccgccggatcttccggcggtgggaagaaagccttcactggaatgtaagctgcgagtgttattctgtgtttttgtctggggtcgtaggagcctatgtttcactgctagatttctcttgttattgttcttctttccatttactttttatgtttggatgctgacatctggaattttgaagatatcacttgaatatgcttgaatttttgcattactagatattcccattttcagatgctgaatctattatttaattatgatattatggatg

SEQ ID NO: 216031 - DNA, 465 bp, Gossypium hirsutum
acgacggttcatggcgaacacaaggtatggtgttttgggtggtggagctaactctgtgaatcatggctacaccaagggagatgggcttggtgctgaaattgttggtacctttgttcttgtttacactgtgttctcagccactgacgccaagcgcagtgccagagactctcacgtccctattttggcaccattgccaattgggttcgcagtgttcttggtacacttagccaccatcccaatcacaggaactggtattaacccagctcgtagccttggtgcggccatcattttcaacaaggacaagggctgggatgaccattggattttctgggtgggtccattcattggtgcagcactagcagcactttaccacgttgttgtgatcagagccattcctttcaaatcaaaatgatctacatcaatggtcatgatcatatgatttcaagaaagtgaaagttccactca

SEQ ID NO: 216032 - DNA, 449 bp, Gossypium hirsutum
atttggaactttcttggtcgtgttggtgggggttacttctcagagattatagtgagggatgatgcttatccaaggccagtatctatggctgttgctcagcttgttatggctgttggccatgttttctttgctatgggatggcctggggccatgtacattggtactttattaatagggcttggctatggtgctcattgggcaattgtcccagctgctgcctctgagttgtttggcttgaaaaagtttggggctctgtacaatttcctcacgctggcaaatcctgcaggttcacttgtcttctcaggtgtaattgctagcagtatttacgaccatgaagcagagaagcaagctcatcaacatcatatccagctgcagatgtcaggcttacttttctcagggttgtatggtcaggatgaagtgctcaagtgtgaaagttctgtatgcttctt

SEQ ID NO: 216033 - DNA, 444 bp, Gossypium hirsutum
gccaaaggatccgatggcaaactcaagactttcttctgcaatgatcaatctcgatcatctgtagcatctgatgttaataaacaaatttatgggaacttggttccagtactggagggcgaaaaattatccctcagagtcttggtggatcattcgatcgttgaaagctttgctcaaggtggaaggacagtcatcacatctcgggtttatccgacgaaagcaatctatggagctgctaagctgttcttattcaacaatgctactgaagccagtgtcagtgcctcacttatgatctggcaaatgaactctgctttcattcgaccttatccaaacgattaggagtcccaataggaccgaatagaagttaatccaaaagtcaccattgattaattaattattgtacctcctgctattcaaaagaaaatgaaatttcttgttttttgtact

SEQ ID NO: 216034 - DNA, 455 bp, Gossypium hirsutum
cggacgcgtgggcggacgcgtgggcggacgcttgggcggacgcgtgggttgcacttttaactctaagccaagaaagcaagtcactagggttttaagagaagatcaaaaatggcatcaaaaagatcagcttccatggccctctttttggcactcaacattctcttcttttccctggtcagtgcttgtggttcttgctattcacccacccctaaaccaaagccaaagccaaaccccaaccccaaccccacccccactccatcttcacaaggcaaatgccctagagatgcccttaaattaggtgtatgtgctaatgtgcttggcttagtcaagcccgtcattggttcacccccagtgatgccatgctgttcccttcttgatggcctcgtcgatctcgaagctgctgtttgcctttgcaccgctatcaaagctaacatcttatgcatcaaccttaacat

SEQ ID NO: 216035 - DNA, 460 bp, Gossypium hirsutum
cccacgcgtccggatttggagagaatcaggcccagggctatccttgacatcattaaatcaggtgaggattttcgaatttccactacaaccaaaatgcctgagcagggaacctgtgaacgatgtggttatatttctagccagaaatggtgcaaagcttgtgtcttgctggaggggctgaatcgaggtttaccaaagcttggcattggtcgtaatcaaggcctaaatagtgatggtaagaaagatagaaaaagagatagcagaacgccaagtattgagagcaagcaatgtggaagtttggaattctgatccagagttttagattgcttatggaattatcaaattgttgtttgattggccacccaagatctcatatcttctctttttagagcttccaaatgaatagttaggcaaacaaaagcagttaatcgcactgtttgagctattagaactaatcatggaa

SEQ ID NO: 216036 - DNA, 449 bp, Gossypium hirsutum
cacctctgtctatgtccccaccacaaccacctccatcggcaccgtcgttgccacaactggaaccatcagatcattcaccacaacttccggcgttgacggggctgatgctggtgccgcctccggttccgcttttcaaacatccatcatggtcgccagacattttccgggacgaagcatggcttagaaggaaaggaaacagcaagaaaaggagaagcaagagcgtaacagatgaagaccttgatgaactcaaggcttgtattgagttgggattcgggtttgattcccctgaggtggatccacgtttgtccgatacttttcctgctttgggtctttattatgctgttaataagagctacaacgacgccatctccaagccttccacctcccctccttcagttgtatcggattgtgatagtattcattcccctattggcagcccccacgccatt

SEQ ID NO: 216037 - DNA, 457 bp, Gossypium hirsutum
cccacgcgtccgatcaaatgaagagagcaaatcacttcacaaacaggagtctttaaaggccttgcggaacaaaatcaacaatgacattgtcaccgtgcaaaagaaggcaaggactatcaaggcacagctcgaagaaatggaccgtgccaatgcaactaacaagcgcctctcagggtgcaaagaaggcacgttagattacaggactaggattgcagtaaccaatgggttgcgcaataagttgaaggagctgatgatggatttccaaggtttgaggcagaagatgatgaccgagtataaggaaacagtagggagaaggtattttacagtgactggcgaaaaccccgatgaggaaatcatcgagaagataatatcagatgggaatggaggggaggggttcttaacaagggcgatacaagaacatggtcgagggaaagtgctggagacggtggttgagatt

SEQ ID NO: 216038 - DNA, 461 bp, Gossypium hirsutum
cccacgcgtccgctttttgattaatataatttaaaaaggagtagtgacagatcttagtacagtttaaaaagggcaagtagacacggtgtcctggcgaatcaaaggaggggaatgccctgaacaatcaatgtatctgcaaggacctgattagcagcctgcgatggatgaacactgtcccaaaacacatactgggaggcattgggacaagttcccagtgtatgcggattgcataagaattcagttgtctctacagtccctgtgccacagcagcctctcgttgcttctacgaaaccatagtttgaaggggtattaacaacatcaagaagggccttgtaaatgtcaaaaaccacaatcttgagatcagggtgttgcttctggagattggttgctgctgcgttgagctttttgttgaattgctgagcgtcggaatttgaacctgctcacacatcccttctcatggt

SEQ ID NO: 216039 - DNA, 465 bp, Gossypium hirsutum
cgagacgattcagaagacaagccgagtcactaaaaatgttgaaaagactcagcgagactcggaaaaacttttaccgaggaataagacaaaggccatggggcaaatgggcagctgagattagagaccctcaaaaaggcgtccgagtttggctcggtacccataacacagccgaagaagcggctcgagcctacgatgaagccgccaagcgtatccgtggtgataaagccaagctcaacttccctcaaacgcccaccaaaaatcaagcagcttcaccagctcttactcagcttcctcctgctaagaaaaggtgcatcgttcccgagttaactcaaccgagtttccagactgactcaccaccttatcctatgggtcttgggtctggaagaagtgaagattataagccgattgaagtggtggagagtgagttggagttgaaaagacaaatctggagcctggaatcatttt

SEQ ID NO: 216040 - DNA, 465 bp, Gossypium hirsutum
gctcatgttcatggcgagttcgcttcgctttaaacctcaaagggatttcgtatgagtacaaagctgtgaatctttcaaaaggagagcagtttacaccagagtttgagaaattgaaccctctgcattttgttcctgttcttgatgatggtgatgttgtcgtgtctgattcatatgcaatcttgttgtatttggaagaaaaataccctcaaatagctctcttaccagctgatccccagcttaaagctctgaatcttcaggttgccagcatagtcacctctagcatacagcctcttcatatgctgtcaaacttgaaatatcttgtgcaaaaagttggtccacaagaatcacttttgtttgctcaaactaatgtggaaaaaggtttcaatgctctcgagaagttgcttgaagacattaacggcaaatatgcaagcggagacgaagtatacatggctgatgtatttatgg

SEQ ID NO: 216041 - DNA, 408 bp, Gossypium hirsutum
agttgtagggtattagtcattagccatttaaagccactctaaactgtgtactcgcttgatttgtcccttcaccatattataacatccggttgagtcctgctcaccaatggagtagacaggactgccttggcttgatccctttctagtaagttctagattacctcgtagtttcataaaaatgagtctttgttaattagatctgctacttttgaatggttgatatttatgtcttgattctttactcttccatcagtaggggtaggtagccaagaatcattttaggggcacgtttggttgagaggaatagaatagagctgtaatgtaatagagttgtaatggaatagagctctaatagaatagatctgtaatgaataattcagttgtttggttgaatggaatggaatagag

SEQ ID NO: 216042 - DNA, 349 bp, Gossypium hirsutum
atttctctctttaatgaatctcaaaatcgatttttaaggccaaaaagacacaagggttactgggtaaattaatcttcagcgaatatgttggtttatcaggatcttcttacaggtgatgagctcctctcggactctttcccatacaaagaaatcgagaatggaatgttatgggaagtcgagggaaagtgggttgttcaaggagctgtcaatgtagatattggggctaacccttctgcagaaggcggcgatgatgatgaaggtgttgacgatcaagccgtcaagggtgtggacatcgtcgacacttttagacttcaggagcgacctgcgtttgacaagaagcagtttgtga

SEQ ID NO: 216043 - DNA, 445 bp, Gossypium hirsutum
  unsure (1)..(445): unsure at all n locations
cccgttcgtgaatcttaagaaagaatacaaaggaatttactggcaagaagagttgatcccgttcttccagtctgttacccttcctaaggactgcacctcggttcagaaatgctacatcgaaatctccaagcaggtcaaggcaaaactaggcaaggtagatgactacttcaacaagctggctgatgctatggtgacctggatcgaagcatgggatgagctgaatccatctggtgcaaaatccgccgagctgtccaatggtgcttcgaagtaggcttgttcagtaagcagctaacatattgtttagcagccctaggcttgtttggggatcaccgacacttgccaaagctccattgcttggagtgcttattttgcangttggaggaggatggacacattgttattttatcatattattactgagtttagaacaataaaaaaatggatg

SEQ ID NO: 216044 - DNA, 317 bp, Gossypium hirsutum
gaaaactttgactggaaaaactataacaatggatgtggatagcacttatacagggcgcttggctaaggtctcctctaagtaggagagcctacgtcataatttgtggcagtgggggcctgcgttcgcgcggcccctgttcaatttcagttagttttttttcagttgataactctcaataagattatcagatgccgtagcttataaaattatgatcttcagttaataagaaaaaatcaaaaatggaaaaaattaacttgttatcaagtgtttcattacttaaaaaagatacaatgtttacaagggagattaattaagtt

SEQ ID NO: 216045 - DNA, 427 bp, Gossypium hirsutum
  unsure (1)..(427): unsure at all n locations
cccacgcgtccgcccacgcgtccgaaaaccctcagttcagcaaccggggagcactcattcgacaagtccgccatgggtaaggttcatggatctttagctcgtgccggtaaggtgagaggtcaaacacctaaagtggctaagcaagacaagaagaagaagccccgtggccgcgcttacaagaggatgcaatacaaccgtcgtttcgtcaccgcagtggtcggattcggcaaaaagaggggacctaactcatctgagaagtaagaactatgcaatttaaaaaagttattgtttgaagcttttatggatttaatctgtatttttccctgtttttttgtaatgttttatgatacttatttttatccactggtagtaaggatcaagttgaactngaagttttgttatctaaatattatgtgattttgatatt

SEQ ID NO: 216046 - DNA, 421 bp, Gossypium hirsutum
atcctctaattctaaagctaagagttttaagttaacgaagcatttgggtcgtttcgaagtaatggaaacttcaggaaaagtaaagaagggagccggaggaaggaaaggtggtggcccgaagaagaagcccgtttcaaggtctgtcaaagctggtctccagttccctgttggtaggatcggccgttatttgaagaaaggaaggtattcgcagcgggtcggaaccggagccccggtttacttggctgctgttcttgagtacttggccgctgaggttctggaattggctgggaacgctgcacgtgacaacaagaaaaacaggatcatcccaaggcacgttctactcgccgtgaggaacgacgaagaattagggaagcttctcgccggcgtaaccatcgctcacggtggtgtgttgccgaacatc

SEQ ID NO: 216047 - DNA, 446 bp, Gossypium hirsutum
gaaaactttgactggaaaaactattacattgttttttgagagctcagatacaattgataacgggaaggccaagattcaggacaaggagggtatcccacctgaccagcagaggttgatttttgctggaaagcaactcgaggatgggaggacgcttgcggattatagcatccaaaaggagtcaaccctgcacttggttctgcgccttcgaggagggatgcagatattcgttaagaccttgactggtaaaaccataacactggatgtcgagagctcggacaccattgacaatgttaaagcgaagattcaggacaaggagggaattcctccagaccagcataggttgatttttgctggaaagcagcttgaggatgggaggacactcgcggactataacatccattatgagtccaccctgcacttggttttgcgacttcgaggagggatgc

SEQ ID NO: 216048 - DNA, 463 bp, Gossypium hirsutum
gggcgtattgtgtcgatttttttgagtaatatacctggaaatacccgttgattcggtattaacgccttttcgaacacaactggtacattccaaaataatcgttactcggacatctttactcttggccatgaacctcctttgagtttttaattcacccaacttttctattttccgatcaaaagcgaagaagaaaggaatgaaaaaaaaaagaaataaaagttgctaactcaaaaccaaatcttgaaagattttgttgcaatcaatatagtaaatcaatatagatttatagtaatagtaaataataagaataagaataagtaatacaacgatttcgaactctatttagaatcaaaccaccgtacggtattttctttaagtatcttgtaggatactgttgttccagccacatttctcttttcgctctactagtaatttaattggagcttgaacccgagtttcggtg

SEQ ID NO: 216049 - DNA, 463 bp, Gossypium hirsutum
ggaagaagaagaagaggaagaggaagaggaagagcagattgaagaagaggagttggaggatggaatccaatctgtcgatagcctttcaagtacccccactggagttgagactcctgatgtcattgaccttcgtaaacagcagagaaaggagcctgagaggcctctctatcaagtgcttgaagaaaaagaagagaggattgcccctgggactttacttggcacaactcacacatatgtagttaacactggcacccaagacaagtcggcagccaaaagggttgatcttctgaagggtcaaaaatctgacagggtggaagtcagtttacagccagaggagttggaagttatggacaatgtgttgcctgcaaagtatgaagaaactagggaggaagagaagctacgcagtcagcgtgaggactttaatgatatggtggctgagaatgagaaaaaaagaagcgaaaga

SEQ ID NO: 216050 - DNA, 434 bp, Gossypium hirsutum
gttggtccaacgaaacgtggtgtttttggaatgtcgacgttctatttcttttcgggcggaatcgcattgctctcgggcatagcgtacatttttccttcatggcgtgcgctttacgttgcctcgtctgtcccctctatcctttttcttgtcctggtggtccctttcatctctgagtccccacgttggtatcttgttcgtgggaaaatgaatgaagccatgaaaattatgcgcaccatagctaatgccaacggacatcaccttcctgatgaggtcatccttgcactggatgatgaatctaatgatgccttaaatggtaatcaaatttgggaagcagccacagttgataaagaagccatcaatggttccattgtaaatgtaatccgatcaccaaatactctaattctactattcttagcagtgggaatcaactttac

SEQ ID NO: 216051 - DNA, 407 bp, Gossypium hirsutum
catagaatttatcaacgttgccatgtctatagaccctgaatcaaagatgatcaaaaaggatcaaggacgcatcgagaaatggattcttagaaaggcctttgacgatgaagagcgtccatatttgccaaagcacatcctctaccgacaaaaagaacaatttagcgatggcgttggttatagttggatcgatggtcttaaggcgcatgctgccaaaaatgttactgataagatgatgcttaatgcttcttacatatttcctcacaacacgccaacgacaaaagaagcatattactacaggatgatattcgagagattcttccctcagaactcggctagattgacagtccctggaggagctagcgtggcatgcagcactgctaaagctgttgagtgggatgttgtctgga

SEQ ID NO: 216052 - DNA, 410 bp, Gossypium hirsutum
cccactcgtccgcctaacctcacctcactttttttattcttactcattcactcctacacgggagaaaaaccctttaattttaagaaggatattttggttttatactgagaaatccaacttcttttgtatctttatctttttggtacttcaattatcaaatgagagaaatgcacgatcaaaaaaaaaaataacatacaactaagtgaaaaaccagacacgagagaaaactccaaaaatgggtgttctggatcatgtttcatatctgttcgactgttctcacagttccaagcacaagacacgtaagcagttgcagacggtggaaatcaaggtgaaaattgactgcgaatgatgcgaacggatagtgaaaaaatcactggaagggatgaaaggggtgacacaagtggacgtgg

SEQ ID NO: 216053 - DNA, 455 bp, Gossypium hirsutum
aagaggaaaaaagtaaaagaaccctaccgacgatgttccggcaagcgtcacgcctcttggctcgaactaccaccccatggaggagaagtcgagcattttcgtcagatctaccagccacacccgctcaagattcgaacttcatcgaatcatggtccaaagtcatacccaacatagaccctcccaagacaccatcttctttcatgacccctcgccccgccaccccttctgctatcccttctaaactcactgttaactttgttcttccttatgcatctgagctctccgctaaagaggttgacatggtaatagttccagcaacaactggacagatgggtgttttgcctggtcatgtccctacaattgctgaactgaaacctgggatcttgtcggtgcatgaaggaaatgatgtcacaaaatatttccttagcagtggttttgctcttattcatgccaac

SEQ ID NO: 216054 - DNA, 289 bp, Gossypium hirsutum
cttgatctacgaggaaactcgtggtgttctcaagatcttccttgaaaacgttatacgtgatgccgtaacctatacggagcacgctaggcgtaagactgttaccgctatggatgtcgtttatgctctcaagagacaaggaaggactctttacggtttcggtggttgattttggattttagggtttctattttgtaacagtttcttgtaggcttttttttcttggattttctctttagtttaatgtattttcgtttcgaattacgatgaatttctctgaaaatctcgtttc

SEQ ID NO: 216055 - DNA, 443 bp, Gossypium hirsutum
cccacgcgtccgcttttcctctcctcccccaaaagccctagtcagagccgcatcttcttcttagcctcagaaatggcgaagtcaaagaaccacactgcccacaaccaatcttacaaggctcacaagaatggcatcaagaaacccaagaggcaccgccacacttccaccaaagggatggatcccaagttcttgaggaaccagaggtatgcaaggaagcacaacaagaagagcggtgagtctgccactgaagaagagtaaatttttaatggcaaaagatctagctttgattagtgttttctaattgttgtttttcccccgatggaattgagtgttcgtttactataatcaccttagttgaaatgttattttgggattggtgaatctcattttcaaaagagatttgaagctgtgagcttattaatattaagaacatgttttgagct

SEQ ID NO: 216056 - DNA, 440 bp, Gossypium hirsutum
cccacgcgtccgcccacgcgtccgtggatatttaaggagctgcaggatatgggaaacatggacttccgttttgctgaggaagaacctcaggatgattatgctgcagagcttgcagaaaatttgcttgtttatccaccagaacatgttatctatggagactatgtctttgagttctgggatgaggaaatgataagaaagattcttggttacttcactcccaaaaacatgagagttgatgtagtatcaaaattcttcaaatcacaagatgtccagttggagccctggtttgaatcacattattctgaggaagaaatttcttcatctttgatggaattatgggaagatcccccagatattgatgtttcactgcatctgcctttgaaaaatgagttcattccatgtgatttctccattcgagctgacacttgcgaaatcaattc

SEQ ID NO: 216057 - DNA, 413 bp, Gossypium hirsutum
agcttacctacgatcagatctctgaattctttgacgcctttacactgctcgacacggacggagatggttgcattactaccaaggagcttgtaactgttatgcgatcacttcggccgaacccctctgaggcagaactgcaagacctgattcatgaagccgttgctgttggaaatgagaccattgattatactcatttccttaacctgatggcaacacaaatgaaggatacagactctgaggaggagcttaaacaggcattcagggcgttagacaatgatcagaatagcttcatatctgtagccgagatgctccatgtcatgacatacgttgcgcaaaagcttacatatgaggaagtcgacgatatgatccgagatgctgatgtcgatggtgatgggcacatcaactacgaggag

SEQ ID NO: 216058 - DNA, 447 bp, Gossypium hirsutum
cccacgcgtccgcccacgcgtccgcccactcgtccgcccaaatagaagaaatctcaagctgctgggttttggccatccaccacaccttccacttcttcttcccaacttttatggcccaaccaacattgattgctgctatttgtgttcttactctgtcccatgtagttcaagcaacaacctttaccatagtaaacaaatgcgattatgtggtatgccctggaattctctcaaacgctggtgttccaacacttgctacaacaggtttcaccctccaaagaggtgaaaccaaaaccattaccgcccccacatcatggggcggtcgcttttggggtagaacgcattgctcgcacgattccgacggaaaattctcatgtctcacctgtgattgtggctccgggaagcttgaatgttctgggaatggggctgctccgcctgccactttggctg

SEQ ID NO: 216059 - DNA, 455 bp, Gossypium hirsutum
agatcttcgttcaaccacgcctaataaccgctcggatttttctcagacgtgaaaaaaatggggctgtctttcaccaagctattcagccggctatttgccaaaaaggagatgcgcatactgatggttgggcttgatgctgctggtaaaaccaccattctttacaagctgaagttgggagagattgtcactactattcccaccatcggtttcaatgttgagaccgttgaatacaagaacatcagcttcactgtttgggatgttggcggccaggacaagatccgaccattgtggagacactatttccaaaacacgcaaggacttattttcgtggttgatagcaatgatcgtgaccgtgtggttgaagctagagatgagttgcacaggatgttgaatgaggatgagttgagggatgctgtgctgctagtatttgcaaacaagcaagatcttgcaaatgc

SEQ ID NO: 216060 - DNA, 457 bp, Gossypium hirsutum
aacggctacgccgagttcaccgaaccaaaggtcgtgagcgcaaatgcaaaattcgaagtggagtttgctaaagatgggctggtgcacataaggagttgtaccaacaacaagtacttgaagcgaactcataatccttatatcaccgaaaaaccaaatgaggagtattggattactgtaaccgccgataagccggaagaagaccaatccaaggagtcatgcacattgttcaagcctatcttggaagaccctgtatataaaaattttcgatttgtccatgttcaatctggatgctatttatgcttatggccattggctaaatcggaactcggtcgtggcgtgctggcaaacaacaatcatgttgatgctaatcgcgatgatatcttcaaagttattgattgggagtcgttggtgattctgcctcggtacgttgctttcaaaggaaacaatgatatgttcc

SEQ ID NO: 216061 - DNA, 417 bp, Gossypium hirsutum
cccacgcgtccgcccacgcgtccgaaacaagggaaagaggtaatgtatgacttggaagacaaaattaatcaagctgtctttcctggtcttcaaggtggaccacataatcacaccatagctggtttagcagttgcattgaagcaggtcagaacacccgagtacaaggcttaccaagagcaagttctcagtaattgctcgaaattttctcagaggttgctggagaacggctatgaactagtatctggtgggactgagaaccatttagtcttggtcaatttgcgaaacaagggtattgatggctcaagagttgagaaggtattggaatcagttcatattgcagccaataaaaacactgttccaggggatgtgtctgctatggttcctggtggtatccgcatgggaaccccagctctcaca

SEQ ID NO: 216062 - DNA, 462 bp, Gossypium hirsutum
cttccaccgtacgaccctgattggtactatataagagctgcttccatggcaaggaaaatctacttgaggggaggtcttggtgttggtgctttcaggaggatatatggaggagccaagaggaacggtagccgcccacgccatttctgcaagagcagtgggtctattgctcgtcatattctccagcaattgcagaatgtgaacatcgtcgatcttgataccgaaggtggtaggaaaatcacatcgaatggccaacgggatctcgatcaagttgctggaaggattgcagttaccctctgagaaatttcactatatggattgagttaagaaaaattagtttgtttgcaagattactgttttatgagatggtgttaaaatcagttctggttgtgtccatgtctggtatcttccattctatatctagaatttttgttttcaagttcattatggtttttttggtgacta

SEQ ID NO: 216063 - DNA, 407 bp, Gossypium hirsutum
cctgcaaacacaaagggatggggcaacaagacagtcaggaggattagggtccgaggtggaaatgtgaagtggcgtgccttgaggcttgacacaggaaactactcctggggaagtgaggctgtgactcgtaagaccagaattttggatgtggtgtacaatgcgtctaacaatgagttggttcgtacacaaactctggtgaagagtgctattgttcaagtcgatgctgctccattcaagcaatggtatctccagcactatggtgttgacattggccgcaagaagaaagcagcagcagcagccaagaaagaaggagaagaaagtgaaactgccactgaagaagtgaagaagagcaaccatgtcttgaggaagctggagaaacggcagcagaatcgcacacttgactccca

SEQ ID NO: 216064 - DNA, 460 bp, Gossypium hirsutum
cctaaaggtaacaaagctggcgatatactactacggtggctggcatacagatgactttgtttctttcatcaacgagaaatgtgggaccagtcgtgatgcaaaagggcagttaacttcaatggctggtattttgtcaagtttggatgcattagtgaaggagtttgtggctgcttctgccgacgagaagaaagcagtcttctccaagattgaagaggaagttgagaagctcaagggttctaccgcgaggcatggaaagatatacttgaaagctgctaaaagctgtttagagaaaggtgctgactaccccaacaaggaaattgagcggctgcagcgcatgcttgacaagtcactaagcccagcaaaagctgatgaattcacgatcaagaagaacattctatcaacatttgcatcttcttagatcaatgtatttcacctcgtctagtgctgcggtgggttcaag

SEQ ID NO: 216065 - DNA, 454 bp, Gossypium hirsutum
gtgccttgcaggcggacttgcacttgcttcgcttgctgactccactcttggccgcaaagacatgctcttattctcatgtctcatgatgtctttttcttcaatcttcaccgttttttcacccaatatttggatctattctgtcctgagattcattaacgggtttggccgcgcaactgttggaacttgtgccctcgtgttatcaaccgagctagtaggaaaacggtggcgcggccaggtcggcgttgttggtttcttttgttttactttagggtttctttcattgccggtaatggcatacgtaaatagaggttcttcatggagaacactgtatctgtggatttcggttccaacaattttgtactgtatattagttcatttcttagttcatgagtccccaagatggctgttcgtccgaggacgcaaagaagaagcagtgttaacactcaagagcatg

SEQ ID NO: 216066 - DNA, 459 bp, Gossypium hirsutum
cttgaagccgatgttgttctcgtctctgctggtagatctccattcactgccggacttggcttggacaagataggagtggaaactgataagataggacggattttagtcaatgacagattcgctacaaatgtggccggtgtttatgccattggagatgtaattccagggcctatgctagcccacaaagcagaagaagatggtgttgcttgtgtcgagtttatagctggtaagcatggtcatgttgattatgacaaggtccctggagttgtctacactcatcctgaggttgcatctgtcgggaagaccgaggagcaggttaaggcacttggtgttgattaccgtgttgggaagttccctttcttggcaaatagccgagccaaggctattgatgatgctgaaggaatagttaagatattggctgacaaggagacagacaaaattcttggagtccatattatg

SEQ ID NO: 216067 - DNA, 462 bp, Gossypium hirsutum
cttttgaaaaaaaaaataatggttgtgcaggttctttgtggacgacataccaatcagagtgttcaaaaactgcaaagatttgggagtgaggttcccattcaaccaaccaatgaagatatactccagcttatggaacgccgatgactgggccacaaggggtggtctcgaaaagaccgactggtccaaagccccattcattgccacatacaagagcttccacatcgacggctgcgagtcgtcggtggaagccaagttctgcgccacacagggcaagcggtggtgggaccaaaaggcattccaggacctcgacgcctatcagtggcgcagattgcgttgggtccgcaaaaagttcaccatttacaactattgcagcgatagggtgaggtaccccacgatgtcgcccgagtgcaagagagacagagacgcttgattcatttgcatcaccgagtccaagttcccccc

SEQ ID NO: 216068 - DNA, 471 bp, Gossypium hirsutum
  unsure (1)..(471): unsure at all n locations
acgaggttaagcctgcatgctctttcacccaaaaagaaatcgagtatctgacaaaccgcattcagaatggtggtacagaagtcgttgaggcaaaggctggtgctgggtctgcaacattatcgatggcatatgctgcggttcaatttgccgatgcatgtcttcggggcttaagaggtgatgctgacattgttcgatgtgcatttgtggcttctcatgtgactgaattgcccttcttcgcatccaaggtaagactcggtcgttgcggagttgaggaaatataccctcttggcccactaaatgagtatgagagggttggcttggagaaggcaaagaaagaactagaaactagcattgagaaaggggttgcctttgtcaagaaatgaataggtactccaatacccncaaatctaccttttctctgataaccaaagtttgtaagaataaggggtaactctcctcttttgttctaca

SEQ ID NO: 216069 - DNA, 448 bp, Gossypium hirsutum
ggagtccactaaaatctcacctctctttctcatttgcatgcttttcatttcctccgccactcccattcttggttgtggttcatgtggcactggcaaagcaccaccaaagccccctaaaggccccattacaatccctcccattgttaatcccccaatcaacctccctcccattctaaatccccctgtgacagtccctccggtgacggtggttcctcccataattactaagccaccaagtgggaaaccttgcccgtcggccacttgccccattgacacattgaaattgggtgcatgtgtggatctgcttggagggttggttcacattggccttggtgacccacttgtgaatgcatgttgtccagtccttgcagggcttgttaagctggaagctgctgtttgcttgtgcaccactctgaagctaaaggttctcaaccttaacatttatgtg

SEQ ID NO: 216070 - DNA, 461 bp, Gossypium hirsutum
  unsure (1)..(461): unsure at all n locations
gattgccgatatgccgtctacgactttgattttgttacttctgagaattgtcaaaagagcaagattttcttcattgcatggtgcccttcatcctctcgaatccgtgcaaagatgctttatgccacatcaaaagacaggcttagaagggaactggacggtatccattacgagattcaggctactgaccctacagagatggatcttgaagtggtgagggatcgtgctcattgaacagtttgcagttttagctgttccatttgaagagattacccaactctgcgttactccttccttcataaagctaggtgcaggatcattttcgcatacaagttagtgtatatttagtccttgaataaccagaatctggtaaaaagctgatctgaagctctaggctaaaagtaactntgttgccatgaattcagattctttaccattcacatatatnnggccaattgcatgtc

SEQ ID NO: 216071 - DNA, 431 bp, Gossypium hirsutum
cggacgcgtgggcggacgcgtgggttgaaaggttccgtcttcagaatgaagcacttaaagatttagattcagcactttcctttgagcaggataatcctgatataatctttgagttgggagctcattatgcagagcagtggaatttgaatgctgctttgcgttttgcgaagaagtacattgatataaccggtggttctgtaatgaagggttggagattgcttgctctaattttgtcggctcaacagcgtttcacagaggctgaggtggtcactgatgctgcattggatgagactggcaaatgggagcaaggaccactgctcaggctgaaagcaaaattgaaggtctcccagtcacgacccatggaagctattgaaacttactgttacctccttgctttggttcaggcccaaagaaaatcatctggtcctatg

SEQ ID NO: 216072 - DNA, 459 bp, Gossypium hirsutum
gatacaccagtacaatgtaagttactatggagacagttcaaatcagagactgaatatacagttactcaagctatttcagcacaggaggcatacaagcgaagtaacaactggttacctcctccatgggcaattgtggcaatggttgtccttggatttaatgaatttatgcttcttctaaggaatcctctctatctcatgtttctatttgttgcatttttactctcaaaagctatgtgggtacagatggatgtcccagggcagtttcaacatggcactctggctgggctaatctctatttcatcaaggtttcttcctactgtcatgaatcttctaaagcggcttgctgaagaggcccaaggccatcgaaccccagagtcccccaggcaacaggaatcatcagtagcttttcagagctttaggaatcaaagtcagctaaatccaacaagctcgattgcacag

SEQ ID NO: 216073 - DNA, 446 bp, Gossypium hirsutum
  unsure (1)..(446): unsure at all n locations
cccacgcgtncgcccacgcgtncgcccacgcgttcggggacgcgtgggtcgcccacgcgtccgcttcgccattgccagcgatcggagactcggagttcaactccaaactatcgccaccgatttccagaggatttataaagtccacgatcggctcttcctcggtctctccggcctcgccaccgatgctcaaaccttgtatcaaaggcttgtctttcggcacaagctgtatcagctaagagaagaaagagacatgaaacctgagacttttgctaaccttgtttctgcgattctttacgagaaaaggtttggtccatacttctgccaacctgtaattgctggattaggagatgaagacaagcccttcatttgcaccatggattccatcggagccaaggagcttgcgaaagattttggtgtagctggcactgcctcggagtctctctatg

SEQ ID NO: 216074 - DNA, 457 bp, Gossypium hirsutum
  unsure (1)..(457): unsure at all n locations
catattcgccactttcatgttggcttctatgttgggaacctcccttgcatctcgtttgatggctcgatcatcacctagggtagaaagctacatgcaaatcgtttttgtgatttcctcagcctctctcacgcttccgattataaccaatttcttggtagcaccttcgaaagtgaaaggcgaaagcatctcattcgcaggttgtcttcaacttcttggtttctgtacttttgaggcttgcgtagggatattctggccatcaattatgaaaatgagatcccaatacatcccggaggaggctcggagcaccatcatgaactttttccgcattcctctcaacatcttcgtctgcattgtgctatacaatgtcgacgcattccccatcnaccgtatgtttggtatgtgctcgattttcctccttgttgcatccatcttgcaaagacggctgatgggcatttca

SEQ ID NO: 216075 - DNA, 464 bp, Gossypium hirsutum
  unsure (1)..(464): unsure at all n locations
ccacgcgtccggtgcaaaactactgctttatggtagaaatgtcgnggttccgggatatgagcaaggaaattttattggtccgacaattttaactggtgtcacagctgacatggaatgctataaggaggaaatcttcggcccagttcttgtttgcatgaaggctgacagcttggaagacgctttaaacattgttaacagaaacaaatatggtaatggtgcttctatatttactacatccggtgctgtagcgaggaaattccagacagaggttgaggccgggcaggttggcatcaatatccccataccagttcccttgccatttttctcatttactggcaataaagcatctttcgcaggcgaccttaacttttacggcaaggctggagttaactttttcacccagattaaaacagttactcaacaatggaaggatttacctagcggcagcagagtttccctagcga

SEQ ID NO: 216076 - DNA, 440 bp, Gossypium hirsutum
  unsure (1)..(440): unsure at all n locations
tctcatattcctgcaaattccctttttttcccctcccacccaagcctaaaaaatcatggcgacagctcanatcagcaaaaagcgaaagttcgtcgctgatggagttttcttcgcggaactcaacgaggtattgaccagggaactggctgaggatggatactctggagtcgaagtcagagttactcctatgcgtaccgagatcatcatcagagccacccgcacccaaaacgttctcggtgaaaaaggtaggaggattagggagcttacctcagtggttcagaagcgattcaagttcccagaaaacagcgtcgagctttacgctgagaaggtcaacaacagaggcctttgcgctattgcccaggccgagtctcttcgctacaagctactcggaggtcttgccgttcgcagggcctgctatggtgtactgagattcatcatgg

SEQ ID NO: 216077 - DNA, 447 bp, Gossypium hirsutum
  unsure (1)..(447): unsure at all n locations
cccgcagatcaacatgtctaattaccattttacgacgtttttatccaaggtggatcgtaaatttaggttgccacatcacttataaatcaggagccttttcttccttgaaatcaaaataaataggagacacaggcttggaagggaactaagctagaggtagagagaaagaagggagttgccaaaatgtcgtcgttcttgcagtcatttctggatcccaagaaaagctggttggcagctctgcacatgaaatccctttccaagcgcctccgcaaatacggccttcgctatgacgatttatacgaccgttactatgatttggatatcaaggaggcgttgaatcggctgccccgtgagatcgtcaatgcccgcaaccaacgccttaagcgttcgatggacctctctatgaagcacgagtatcttcccgaaaaccttcagcanatgcaaaca

SEQ ID NO: 216078 - DNA, 460 bp, Gossypium hirsutum
cggacgcgtgggttttcctgcttctgcttcccaaaaaccaagtcacacccgggcttgttgggctctctctttcctacgctttatcactgaccggtacgcaaatttttgcatcccgttggtactgcagcttatggaactatatgatttcggttgaaaggataaaacaattcatgcacatacctgaagaacctccagcgattatagaagacaacaggcccccatcttcatggccttctaagggtaggattgaattgcaagaactgaagataagatatcgctcgaatgctccttcagttctcaaaggaatcacttgcactttccaagaagggaacagagtaggagttgttggacggaccggaagtggaaaaactacgctcataagcgccttgtttcgcctagtagagcctgcaagtgggaaaattcttatagatggacttgatatatgctctatgggactgaa

SEQ ID NO: 216079 - DNA, 466 bp, Gossypium hirsutum
  unsure (1)..(466): unsure at all n locations
cccacgcgtccgcacagtcatagttgtttttcttgattcgaatctcgtgagcagagccagctcagcaaaaggcccttcattatccctgagaggaggtggaatcaaactgcctgcaaaaaccaaggctccctgttaatggggttggccacatatgctgttgtactgtacctaccaagtgcgggatccttttctgaacttccatgatgccagcagttattataaggcaatagagaagtttataagccgttgagctggaaaggaaagaagcaggaaaatagaggtgcaaaggtgacagaagaaagattcttttctgtaggactatcatcgttagcattcatttcgtatatttgctggcattttggagtgtttttgggtttgtaaattatgttttacatcccctaaaatcaatcaaaattcctgtaatcgttgtttgcatgtngacatgaatggacactagtggaacaat

SEQ ID NO: 216080 - DNA, 443 bp, Gossypium hirsutum
ctttctcatcttgtgatttgagcttcgtgtttgtgtggggttaagcaattcgccaagatgcagaacgaagagggtcaaaacatggatctttacatccccagaaaatgttcggccactaataggctgatcacctcgaaggatcatgcttctgttcagattaatgttgggcatttggatgagcttggcagatacactggaactttctccacttttgctctttgtggttttgtccgtgcccagggtgatgctgacagtgcacttgacaggctttggcagaagaagaaagctgaagtccgacagcagtagtgggagttggattgctttttactacttgcttggtctctgaattttggagggaaaatgtgttttttttttaaatcagtgacctttaagttctatcttggtttttttaaaatggattatgttgaatttgatctgaaaaa

SEQ ID NO: 216081 - DNA, 473 bp, Gossypium hirsutum
cccaaacctaccaagctttacagaggtgttaggctacgtcactggggaaaatgggtcgctgagattcggctacctaagaaccggactcgcctttggttaggcacttttgaaacagccgagcaagcagccttggcttatgacaaagcagcctataaacttagaggtgactcagcgagactcaacttccctaaccttcgccaccaaggttcccacattggtgaatacaagcctttgcattcctccgttgatgccaagcttcaagccatttgtgaaagcttggaacaagaccaaaagcaagggaacaagaaaaaaacatcaaaggaaatgaagaaggacaaggttcaagtggcaacgcctgaacctgaggaaaagacagttaagttggagaactcctcttcatcttcgtctccggttgtgtcggagaacgaggtgtcagcagaatcttcacctttaccagatcttacattctcgaa

SEQ ID NO: 216082 - DNA, 463 bp, Gossypium hirsutum
cgctcgcttctctctttcgtcgttctcctcgtaataatcgctcatatttctcgcagacgtgaagaatggggctgtctttcacaaagctgttcagccggctttttgccaagaaggagatgcgtatattgatggttggacttgatgctgctggtaaaaccaccattctttacaagctcaagttgggagagattgtcaccacaattccaaccattggtttcaatgtggaaactgtggaatacaagaacatcagctttactgtctgggatgttggtggccaggacaagattcgtccattgtggaggcattacttccaaaacacacaaggactcatttttgtggttgatagcaatgatcgtgatcgtgtggtcgaagccagggatgagttgcacaggatgttgaacgaggatgagttgagggatgctgtgctactggtatttgcaaacaagcaagatcttccaaatgc

SEQ ID NO: 216083 - DNA, 462 bp, Gossypium hirsutum
cccacgcgtccgctaacgagatctctgtttcagcggaagaggaattcaacatcgagaagctccagttggtggaggcagagaagaagaagatcaggcaagagtacgagaaaaaggagaagcaagttgaagttcgaaagaagattgagtattcgatgcagcttaatgcatctaggattaaggtccttcaagctcaagatgatgtggttaatgaaatgaaagagtcggcagccaaggaacttctgaacgtgagccgtgatcaccatgtgtacaaaacgcttttgaaagatgtaattgttcagagtttggtcaggctgaaagagcctgctatcttactgcgctgtcgcaaagatgatgtgcccttggtggagtctgtcctggattcagcaaaagaagaatatgcttccaaagtgaatgttcatccaccagagatattcattgacaatgtccatcttcctcctgcac

SEQ ID NO: 216084 - DNA, 447 bp, Gossypium hirsutum
  unsure (1)..(447): unsure at all n locations
cgacaatgcagtccgccgtttttaaaaatatggtggagagcctttcagtgcccacatttcgagtggggtatcctgtgactacggacgcgcttgatgccttgtatgagaaggtgaaaccaaagggtgtgacaatgactgctttgttagccaaagctgccgcaatggcacttgcgcagcaccctgttgtgaattcaagctgtaaagatggcaagagttttacttacaatagtaacatcaacattgcagtagctgttgctatcaatggtggcttgattacccctgttcttcaagatgcagataagttggatttgtatctactgtctcaaaaatggaaagaattggtggagaaagcccgggcaaagcagcttcagcctcaagagtataattcggngacattcactctgtccaatctgggcatgtttggagtggacaggtttgatgccattc

SEQ ID NO: 216085 - DNA, 468 bp, Gossypium hirsutum
gaagaattctccagggtcatgagtcaacatatggtacatttttcaactgatcccaatgctgatagattaaaccggttgaaaggggaaatgagccaggtacgtagtgtaatgattgacaacattgaaaaagtattggagagaggcgaccggttggagttgctggttgaaaaggcaagcacaatgcaggggaattcacttcgattcaaaaagcaatctcgtcgttacaagaatgccatgtggtggagttattgcaagatcacggtgacattgatactgctgctttcgctgatcatcgcttatattctgttcgcatttgttttttgatggactcttttttttgtcgtcctggttgatgtaacaaggcagtggcttttcctgatttgtcccatctttttatttttcacatatatacatacacatctatttgtaacatatttttaaaaccagttgatgaatccataaacaaac

SEQ ID NO: 216086 - DNA, 419 bp, Gossypium hirsutum
cccacgcgtccggaggcaaaacaggccttttctttactggatccgaatgcgcaccgacaacacggttaggtacaatgctaagcgtaggcactggcgccgtaccaagctagggttctaagttcgatgggcttatttgtttccagtattttctttaagttttctaagtttattttcggacttattttatttgggatttaatattgggaaccatcgagaatctttgtattagggattttgatgagattgttagtggcttcgttttagtttgattttatattatctcatcttaatgtgagtgcatggtattgaactttcctttggtaattgctttaatttaccttatatgttaaacaattctcacctgcatgatagctatgtgcttgagggtggctttatcaaatttattactttattttaac

SEQ ID NO: 216087 - DNA, 442 bp, Gossypium hirsutum
ccagaaaccgggtccgggaactgagcgttatttcgggttgttgtatcctaacgggacaaacatatacgggatcgatttgactgggaagactccggattcgtgtttcgagccgttgccgaggccagataataacgagccgtataaggggaagatttggtgcgtggcggctaaaggtgttaacgagactgcgcttagttcagcattgtcatacgcgtgttcgcaggggaataagacttgtgacccgattcaacccggaaagaaatgcttcaaaccggattcattgttttggcacgcgagctacgcgtttagttcttattggtcacaatacaggaagactggcgccacctgttattttaacggcttggctactcagacggctaaagatccaagttttggtcactgtaagtttccaagtgttactctttgatgaatacccaatcac

SEQ ID NO: 216088 - DNA, 432 bp, Gossypium hirsutum
ttgagagatgctgacacaggcgatgttttcaatgtagaagttagaaggccggagcttccagagggatcccaagattcagtgaaagataaagggttggtggtgagagattgggcacctcagctggagatattagcccaccctgccattggtgggtttgtaagccactgtgggtggaattcatgcatggaaagcatcaccatgggagtaccaataggggcttggcctgtgcattcagatcaaccaagaaacgcagtactaatcacaaagttgctcaaactcggcattaccatcaaggactgggcacgtcgagatgaagtagtgacagcagcggtagttgaagatgctgtgaaacgtttgatggcttcaaaggaaggagatgagataaggaagagagcggcagaagtaagtggtgcggtgcgccaatcggtggct

SEQ ID NO: 216089 - DNA, 458 bp, Gossypium hirsutum
aactgaacctgtcaggacatacctcgttttcctttcgattttcacttcgatccccgatgtttggagtattggtcaaatttttcctatcgtccccattcatcgtttggatcaaaagccagaagtgaaggctattttgtcggatttaacttgcgatagtgatgggaagatcgataagttcattggaggtgaagccaacctgcctttacacaagccgggtaatggccagtactatttatggatgttcttgggcggggcttatcaagaagctctcggcggtgtccacaacctattcggcagtccgagtgttgttactgtcttgcaaagcgacggtccacatagcttcgcaataacacatgcaatgtccggcccatcatgcgcggatgtccttcgagtcatgcaacacgaacccaaactcatgttcgaaaaccttaagcaccgtgccgaagaattttgcggca

SEQ ID NO: 216090 - DNA, 460 bp, Gossypium hirsutum
  unsure (1)..(460): unsure at all n locations
aaccctgccaacaccaatgcattgatcctgaaggaatttgcaccttcaatccctgcaaagaacattacctgtttgacaaggttggatcataacagggcactaggtcaaatctcagagaaactaaatgtccaagtttctgatgttaagaatgtgattatttggggtaatcattcatcaactcaatatcctgatgtcaatcacgcaactgttatgactccatctggagaaaagccggttcgcgagcttgttaaggatgatgcatggttgaatggagaattcataaccactgtccaacaacgtggtgctgcaatcatcaaagctaggaaactctcaagtgcactatctgctgctagtgctgcttgtgatcacattcgtgattgggtccttggaactcccgagggcacatgggtttccatgggggtttactctgatggttcatacaatgcaccagcntgggtca

SEQ ID NO: 216091 - DNA, 462 bp, Gossypium hirsutum
aagagttgatgtctcttaagacatattacgagtgttaaggacgtgagccttttttgtcagactcagtcattaatggtgtagtgtggtggagtgaaagaggttttagaagaggaggttagctaaagaagaaagcacctacaccatgacaaaggtagctttggttttcaagtgctccctcttattaatgacctgctgttttctagtgcaagacaaggcagatgcagggattccagtgacaaccctttcacccccagaaggaaacacaactttccttgatggcaccacatggtgtgtggcactggcaggtgtctcccagattgacttgcagaatgcattagactgggcatgtggactgggaatgtctgattgtggtgcaatccaggagggaggaaaatgttatgagcctgacacactcctttctcatgcttcttatgcctttcataattactaccaacagaatgg

SEQ ID NO: 216092 - DNA, 465 bp, Gossypium hirsutum
cttctgaagatctttttgactcatcgattagatgcctacctggaatttcaggctgcaaattctaccttaatgaaaagctatggtcttgttcacgaagattgtataacaaagatgaggttgatgtcattggttgatcttggctcttatgaatctggacaaattccatatgccctcatcaaggatactcttaggatcaacgatgatgaggtggaattgtggattgttaaggctataactgctaagttaatcgactgtaaaatggatcagatgaaccaggttgtgattgtaagccgctgtactgagcgcatttttggacagcatcagtggcattctcttcggttgaaactagcaacatggaggggtaatgttgctagcctcatcagcaccatccaagctaacaaggctgtggaagaaggctcacaagctatgcaagggatggcaattcggtagagctattatttataa

SEQ ID NO: 216093 - DNA, 351 bp, Gossypium hirsutum
  unsure (1)..(351): unsure at all n locations
gcgttaaggctaaagaaggagaagcttgtcaagattaggaagcccatttctaaggaggagggcaaccgcaatcaagtcggcaggcaaagcatggtatcaaactatgatctcagacagtgattacaccgagttcgagaacttctcaaaatggttgggcgtatctcagtaatttagttcttccttaagaaattatggcagacaatcatttttatcagttttgttttaatgtttttgacatgttatatgttgatggccttttggaatagtttcatttatcttgaagacaaggattaaatagttttcttccattctccttttatgataattttgagatgttggttgtgtgccgna

SEQ ID NO: 216094 - DNA, 459 bp, Gossypium hirsutum
  unsure (1)..(459): unsure at all n locations
ggaattcgggtcgacnacgcgtccgcccacgcgtccggattgacaggcgatctttgtaaggagcttgagaaggaacccaagttcttgaagaatggtgatgctggtatgattaagatgattcctaccaagcccatggttgtggagaccttctctgagtacccacccctgggtcgttttgctgtgagggacatgcgtcagaccgtggctgtgggtgttatcaagagtgtcgagaagaaggacccaaccggtgccaaggtcaccaagtctgctgctaagaagaagtgaagaggccaaaaggttttagccgtgaagcagattgagtgttttatctttggttatatgtggtttgaagtttttgcctgttttatgtaggatttttaaaagttgagatgctttggtttgccaaggcgtcttagtcaagttttgtgtctgatcttgcggaactatactttgtttttt

SEQ ID NO: 216095 - DNA, 427 bp, Gossypium hirsutum
cccacgcgtccgcccacgcgtccgcccttgcgttcgcccacgcgtccgcccacgcgtccgaaaaggtgtcgtcgtcggggaggaagatcacccttaagagctcggacggcgaatcattcgaggttgatgaagcggtggcgttggagtcgcagacgattaagcatatgatcgaggacgattgcgctgataacgggataccgttgcctaatgttacgagcaagatcttagcgaaggtgatcgagtactgcaagaaacacgtcgaggctcctaagacagacgatcgatccgccgatgacgagctcaagagttgggacgctgactttgtcaaggtcgatcaagccactctctttgatctcattctggcagcgaactatttgaacatcaaaggtttgctggatctcacttgccaaactggtgctgacatgat

SEQ ID NO: 216096 - DNA, 463 bp, Gossypium hirsutum
cggacgcgtgggcggacgcgtgggaaatgtgaaaatggagtgcgtgttcggcttcgtaggcaatggctttgccgtagtggcggcggacacatcggcggttcacagcatcctcgtccacaaatccaacgaagacaagatcatggtcctcgattctcacaaactcatcgccgccagcggtgaatccggtgacagagtgcaattcacggagtatatacagaaaaacgtggccttgtatcagtttcgcaatggtattcctttgacaactgccgccgctgccaatttcactcgcggtgagcttgccactgcattaaggaagaacccatacttcgtgaacattcttcttgctggctacgacaaagagacaggcccctcactttactacattgactacatcgctacacttcacaaagttgataagggagcattcgggtacggatcctatttttctctctctatgatggac

SEQ ID NO: 216097 - DNA, 456 bp, Gossypium hirsutum
  unsure (1)..(456): unsure at all n locations
cccacgcgttcgtgtacagttgtatatttctacccccgggtttcaaaagatgtagtcctgcaacggaacagccttggagttgaatggcgttaacaatactatattcatgcaaggtcttcccgggttaaactatattgttgcagaaaccgatgcagctaaccctcagaaagatcctagggtgcccggaaaacaacagacagttatctcattcaccaagaaaacgaccccttccattaacattgctgcaggtgatggattcccctctaaagtgttcttcaatggcgaggagtgtgcactcccttcaatgctgccaacaaacagcggtaatcgaaagggctcaacgactgtaatctcgatcttgatagcagttcttgtgttcatgctggttcaacagtagctacaaatgtgccattactttgtggttgtgttggtcttttctgcangttcttctctttt

SEQ ID NO: 216098 - DNA, 401 bp, Gossypium hirsutum
cccacgcgttcggtagtgagcatgatgtcaagggaaagggctctcccgttgacggcatggctcagcctggtgcattgatcacacttccacctctaagggcagttgctaggccagagatacagaggaactccgtacctacagcaaatctagatgaggaagaatgggttactgtttatggattttctcctgctgatacaaatttagttttgcgagagtttgaaaagtgtggtgtgatattgaaacatgttcctgggccaagagatgctaactggatccacattctttattcgaaacgatccgaggctcaacgggctcttggcaggaatggaatgcaaattaatggagtaccaatggttggtgtgaagccagtggatcaaatgcaacgcgaggcattaaatgaa

SEQ ID NO: 216099 - DNA, 465 bp, Gossypium hirsutum
cccacgcgtccggccctcaaagtccaattcgctaacaatggcagccgccgccgcccgtcctctggtttcggtgcaaaccatagagtccgatatggctaccgacgctacacctactgttcctctcgctgatgtcatgaaagcctcgatccgaccagacattgtcatcttcgtccacgataacatttccaagaacagccgccagccttacgctgtctccaagcgtgctggtcaccagacctcagctgaatcgtggggaactgggcgtgccgtctcccgtatcccgcgtgttcctggtggtggtactcaccgtgctggccaaggtgcttttgggaacatgtgtcgtggaggccgtatgtttgctcctactaagatctggcgccgttggcaccggaagatcaatgttaaccagaagaggtacgccgttgcctcggcaatcgccgcttctgctgttccttcactcgtgat

SEQ ID NO: 216100 - DNA, 462 bp, Gossypium hirsutum
  unsure (1)..(462): unsure at all n locations
cccacgcgtccgaaaactcattacatattcggctttctttctatatcccttgtctgtttatatttgagagcttgaattatggctttgaggaactttggcttcgattctccactctttacaatcctggaagacatgctggacatcccggaggaacaagagaagtcccgaaacaacccatctcgagcctatgttcgagatgcaaaggccatggctgccactccagctgacgtgatagagtacccaacatcttacgtcttcatcgtggacatgcccggcataaatcacggcgagatcaaagtgcaggttgaaaacgagaatgtgcttgtggtgagcggggagcgaaagcgtgagaaaatcaactacgagaataagtttgaagcaactgtangtggaagaagtgtgtgcaagagctcgatgaaattttacacttttggtgactatgtaatcactgaagatgaaatc

SEQ ID NO: 216101 - DNA, 417 bp, Gossypium hirsutum
cggctcactcgcgtgctaaagtcgtgggtatcacgatcaacgattaccaagtgaaccgcgcccggatgcacaacaagaaagccgggctagattctctttgcgaagttgtttgcgggaacttcctggagatgccgtttcaagacaacagcttcgacggcgcctactccatcgaagcaacatgccacgcgccgaaactggaagatgtctacgccgaggttttccgggtattgaaacccggatctctctacgtgtcttacgagtgggtcacaactgaaaagtaccgagcagataaccccgagcacgtggaggttattcaaggtatcgaaagaggcgatgctttgcctggcctcaggagctactccgatattgccgaggctgcaaaaaaagtaagatttgagattgtgaaagaagaagatc

SEQ ID NO: 216102 - DNA, 450 bp, Gossypium hirsutum
ggtgttcgtacgatggaaggctttcgtttgaacactcgtgtcgggatccaatacttaggggcttggttaaccggttcgggttcggtcccgctttataacctaatggaagatgctgcgacagccgagatcagtagggttcaaatctggcagtggttgaaatatggtgttgaattagacggtgatggacttggggttcgagtgaaccatgtgttcgggcgagtggttgaagaagaaatggctcggatcgaacgtgaggtcggaaaagagaagtttaagaaaggaatgtataaagaagcatgcaagatttttactcgccaatgcactgcttcaactttggatgagtttttgacacttgatgcttataattacattgtcattcatcatccaaaggatgtttcttctaagctttgatgaagctttcatgaaatcttaaactatggggtttgagtg

SEQ ID NO: 216103 - DNA, 460 bp, Gossypium hirsutum
ctcttggcaacactccaccttgtcagatcaagattgtatcaactggtcctaatccagagtgggatgaaagttttgcatggacttttgagagtcctccaaaaggccagaagctgcacatatcttgcaagaacaagagcaaaatggggaagagttcctttggaaaagttacaatccaaattgatcgagttgtaatgcttggatcggtagctggtgagtacacgttattgccccaaagtaaaagtgggccatcacggaatttggaaatcgaattccagtggtctaacaagtgaagaaggtgagagagataattatcattattattattattactattattatttttcccggaaatttgatgattgatcaagtagggaacatacgttttggtttttccaattttatatcataatattacagtgtacatagtcttccggtgattttgacgtgtgtagaaatgttt

SEQ ID NO: 216104 - DNA, 453 bp, Gossypium hirsutum
  unsure (1)..(453): unsure at all n locations
aaaacaatttcttattaagtatatcatttctctaacactcgctaaaacgccttggttccccttcccggcccctcccttggttttatgcttctccatttcgaatcccttttaagctcccacagccctaatctctttatttcctttttgtttttctgcacttatttgaattggtaatcgtttcattaaattgggttatcgatgagagcaccaaacatggcaacgatcacagaatcattggagaggtccttacagaacttttctttgaaccatgaaagaagcaacgaaggtggggctgaagaagggataatagggaggtcttccacatcaggtgacaacaacaaccttccaaacaccgtttctgacactagctnggagctcaactctcatctctctcttccttaccattgggaacaatgcctngatctcaagacaggggagatttactacataaac

SEQ ID NO: 216105 - DNA, 429 bp, Gossypium hirsutum
cgcgtgggcccacgcgtccgcccctctggatatgtttcttcaagagagaatcaaggttggaggcaaggctggtgcacttggtgaaaccgtagccctcactcgcgagaagagcaaaattaccgtcacttccgatggcgacttctctaagaggtatctgaagtacttaacaaaaaaatacttgaagaaacacaatgtacgggattggctccgagtaattgcttccaacaaagatcaaactgtttacgagttaaggtacttcaacattgctgagaacgagggagaggaagaagattgatttcttgggtgaacaaccagttttaatgctagctgatttgccaccttttttttttgtttgattgttggggctttagacaaccaggtttataaaaacttttgttatttactgaaacatgagactttgcaatggct

SEQ ID NO: 216106 - DNA, 284 bp, Gossypium hirsutum
ctcatgtgtcatcgttttgtttttgactggtttcctggccaccattcttatgcgagtcgtgaagaatgatttcatcaagtatgcacatgatgaggaatcggcagatgaccaggaggagtctgggtggaagtatattcatggtgatgtgttcagataccccaagcacaagtccttgtttgccgccgcccttggttctggcacccaactcttcactcttacaagtttcatttttatccttgctctagttggggtcttttatccatataaccgaagagcttttttta

SEQ ID NO: 216107 - DNA, 446 bp, Gossypium hirsutum
ctgcaattgcatacgcactctctctagatacagaaaaaacaggggaagatgactgaggcagtgataaggaaagaagccaggaatggcgagtgtgaaagacatgccaattctccaagatgggcctcctccgggtgggttcgcccccgtcagatacgcccgtcggatacccaacaagggcccaagtgctatggctatctttctagctgcttttggtgccttctcttatggaatgtaccaagtcggccaagggaacaagatccgcagggcactcaaggaagaaaagtttgctgcacgtagagcagtattgcctgttcttcaagctgaagaagatgaaagatttgtcaaagagtggaagaagtatctcgagtatgagggcgaagtgatgaaagatgtccctggtttgaaaagaggcgaaaatgtatacaattctgggagatggatgcccc

SEQ ID NO: 216108 - DNA, 441 bp, Gossypium hirsutum
  unsure (1)..(441): unsure at all n locations
agaagtcaggaagctctccacanagcttctaccgaaaatgccgaagcaaattcatgagagcaaggacttccttctcactgccagaaggaaagatgcacgctctgtaaaaatcaagaagagcaaagactttgtcaagttcaaagttcgctgctcaaagtacttgtatacacactgtgtgtccgatgctgagaaggctgataagttgaagcagtctcttcctccaggtttgagtgtccaggacctgtgaaaatagggccgcttcgagtttatcatccaattactaggtgaaagctagattttgactttgcttttatcatatttcatgcctttcaaactcaaaatttactggaatggatttgtattctggttatttttatggatatgagtaaggtcgagttactgtttaatggttaatgaatgtgttttgcttttggttgtcct

SEQ ID NO: 216109 - DNA, 425 bp, Gossypium hirsutum
cccacgcgtccgtcgaagaatggttcatccatcacaaagttgatgtaatcttttctggtcaggtccatgcttacgaaagatcctatcgaatctcaaatataaggtacaatgtatcaagtggtgaacgtttccctgtaccggacgaatcagctcctgtttacatcactgttggagatggtggaaatcaagaaggtttagcaggaaagtttagagatccccaaccggattattcagcattccgagaagccagttacggccattcgacactggagatcatgaacagaacacatgcacactatcactggaaccgaaatgatgatgggaaaaaagtggcaattgactcatttgtattgaacaatcagtactggtcaagtaacgtgcgagaaaggaaactaaagaggcattatttgaatgggatgaggatg

SEQ ID NO: 216110 - DNA, 344 bp, Gossypium hirsutum
cggacgcgtgggacctgaagaaaggaaaatccaagtctctctctctctaaccatgagtcgcttcggtctgggcagaaatcagcgaacattccgtccaaaaaaaagtgcaccttcaggaagtaagggtgcacagcttaaaaagcacatcgatgccaccttaggcagtggaaacttaagggaagcagttagactacctcctggggaggatttaaatgaatggctcgcagtcaatactgtggatttcttcaatcaggtgaatctgctctatggtaccctcactgagttttgtactcctgagaattgccccacaatgactgccggaactaagtatgaatatagaatgg

SEQ ID NO: 216111 - DNA, 439 bp, Gossypium hirsutum
  unsure (1)..(439): unsure at all n locations
ggcaaagagtataatgtccgtgtggcttctaggtactttaaagggcctgagcttctgggggatttacaagactatgactattccttggacatgtggagccttggttgcatgtttgctggaatgatattccggaaggaaccattcttctatggccatgacaaccatgatcaattagttaaaattgccaaggtcctaggtactgatgagttaaatgcttatctcaacaaataccatttggagcttgatcctcaacttgatgctcaagttggaaggcacagccgcaaaccctggtccaaatttattaatgcagataatcagcatcttgtttctcccgaggctattgattttcttgagtaagtgcttcggtacgaccatcaggacaggctaactgctagagaggctntggcccatccttactttgcacaagtcagggcagcag

SEQ ID NO: 216112 - DNA, 362 bp, Gossypium hirsutum
  unsure (1)..(362): unsure at all n locations
actcagtcaggggacctccccttgcagaccttgtacagtagtatgggtgatgacgtttatgcttggggtttcattcccaaaaccaagtatgttactgttaaattccataacccaggtgttcaagaggatcccacctgtggtccattgttggatgcggttgctattaaggagcttgtccgtcccagagctaccagatataatctggtgaagaacagtggctttgaagagggtcctcatcgcctagtcaactccaccaatggtgtcttgcttccccctcggcaagaggatttcacatccncacttccgggctggatcattgaatcactaaaagccgtaaattcatcgatgcaaagactttaacg

SEQ ID NO: 216113 - DNA, 243 bp, Gossypium hirsutum
  unsure (1)..(243): unsure at all n locations
ctnnnggagcaggcagaggannnnataaaagaaaggcctatggaaccnggagcagccatgctaggagcaatgtagccgggtctcgagttcataataatgttgaagtaggtgaacgaatagcaaagaaacttattagtctagagccagagaaagcaggttatatgtgttgttgtcaaacatatacgccgctgctagcaagtttgatgaagctgaaaaagtgagggagctaatgaaggggaaaaa

SEQ ID NO: 216114 - DNA, 442 bp, Gossypium hirsutum
tggtagcctatacactgattgggatctccttccaccaaagaagatcaaggatcctgaggccaagaagcctgaagattgggatgacaaggaatacatccctgatcctgaagacaaaaagccagagggttatgatgacattccaaaagagattcctgatcccgatgctaagaagcctgaagattgggatgatgaagaagatggtgaatggacaccctcaacaattcccaacccggagtacaagggccaatggaagccaaagaaaatcaagaaccccaactacaagggcaagtggaaggcaccaatgattgacaacccagatttcaaggatgatccagatctctatgttttccccaccttgaagtatgtcggtattgaattgtggcaggtgaaatctggaacaatgtttgataacatcttagttgctgatgatgtagtgtatgcc

SEQ ID NO: 216115 - DNA, 439 bp, Gossypium hirsutum
cccacgcgtccgataaacccctacattccctccccccccatgttgcagcaaccacattggggaacgcaaacgagccgattctaaatgcatcatacatcaaagccggaccgttcagctatggatcgggacatatacaaccaaactttgctatggatccgggacttgtttatgacttatccactaaggattacctaaactttctatgcacattggggtacaacgacacactaatatcaacattctcgcaggacaactacaagtgccccggttcgctcaatcttgccaacttcaactacccttcaatcactatccctaaccttgttggatccattacagtgaccaggactgttaaaaatgtaggaacaccaggcacttacagagctcaagtgcagaaaccagtcggaatttcggttaaagggtaaagccgaaaaatttgaag

SEQ ID NO: 216116 - DNA, 296 bp, Gossypium hirsutum
cttcaaggtaagagtcgattgattcttcgaaaaccataaacgaaaccaaatatggcggagaaagcaatcgagtcggttcaatgctttggccggaagaagacggcggtagccgtaacacactgcaagagaggccgtggtttgatcaagatcaatggttgtcccattgagcttgtcgagcccgagatcctccgtttcaaggccgtcgagccaatccttctcctcggccgtcagcgttttgccggcgttgacatgaggatccgagtcaaaggtggaggtcacacttctcagatctacgc

SEQ ID NO: 216117 - DNA, 433 bp, Gossypium hirsutum
  unsure (1)..(433): unsure at all n locations
cccacgcgtccgcggacgcgtgggctccgtatgtagccagccgtttcacacactcaagaggagagagagctcgtaaatcatggcggaacagaccgaaaaagcttttttgaagcaacccaaagtgtttttgagctcgaagaaaggtgggaaagggaagagaccaggaaagggtgggaatcgcttctggaaaagcattggattgggcttcaagactccccgtgaagctattgaaggaacctacatcgataagaaatgcccgttcactggcatggtttcaatccggggtcgtatcttagccggtacttgccatagtgccaagatggtcaggacaatcattgttcgacggaactaccttcattatatcaagaaataccaaaagtacgagaagcgccattcaaacatccctgcacatatntcaccatgcttccgtgtg

SEQ ID NO: 216118 - DNA, 445 bp, Gossypium hirsutum
accatggaggagaatctcagaagacagctttttggtttgcctccacgttaccgtgattcagtccgggcaataactccgggcctgcctctgttcctctacaactactccacccaccaactccatggtgtttttgaggctgcaagctttggtggaacaaacattgacccaactgcctgggaggacaagaaatgccctggcgaatctcgattccctgctcaggttcgcgttattacaaggaaaatctgcgagccacttgaagaagattcatttaggccaattctccatcactacgatggtccaaaattccgccttgaactcaacatcccagaggcgctttccctgttggatatatttgctgatcaacaagattcttgtatttcttaagcaacaagatgcttgagcaaaacttaaacactaggcatatcgatacaaatacagatacaca

SEQ ID NO: 216119 - DNA, 348 bp, Gossypium hirsutum
cccacgcgtccggggttttctattccctccccactccaacactttaaaaactaattaggtgccgactgctccgttctttgtagcaaagcaaagtttgcgaagcatggccgtcgggaagaacaagaggatttccaagggaaagaagggaggaaagaagaaggcagcggatccttttgctaagaaggattggtacgatatcaaggctccttcagttttcactaccagaaatgtgggaaaaactctcgtcacccgtactcagggtaccaagattgcttctgaaagactcaaacaccgtgtgtttgaggtttccctggctgatcttcaagggggtgatgaggatcatgctta

SEQ ID NO: 216120 - DNA, 369 bp, Gossypium hirsutum
  unsure (1)..(369): unsure at all n locations
cgcaagggaagatgggacgtgtcattggaagaaaaggggtttccatctggtcaattaaggagtcttgcaatgcggaaattcattttgggggtgccaagggcccaccggacaaggtattcatcttagggcccgtgaggcaagtgaggaaagcggcagccatgctgaggggaagaatgatggattgatatttgatgtcttgtagggctttcctctcaaaaactaaaactgaaaactgttatcagaatgatctttaaactccttacaccgtttgtgttttgccttatcttcctatattttgtacagccgtcactgtttttacccattgngttagaactgctttgatctgatggctgaaaatacttgggacaa

SEQ ID NO: 216121 - DNA, 288 bp, Gossypium hirsutum
aatgaaaccatccgcgatctgttatcaaataatcgatcatcaggctcagatccaacacgtcctgaaaattcagtttccggaaagcaatacacaattaaacatgatgcaaacggtaatacatatgtcagtgacttgaccatcgttgatgttagcagcatatcagagatttcctcacttttacggcaggctgctcaaagcaggtctgtgggaaggacgcaaatgaatgagcaatcatcaagaagtcacatggtcttcacattaaggatatcgggaaataaagagagcact

SEQ ID NO: 216122 - DNA, 445 bp, Gossypium hirsutum
gttcacatcatcagctggaactattgatgttgcagaacaacaaaagccctgttatgatgaaacctgttggagcgatcttgaattcatccaggccaaaaaaatgactggttggatgtattttgtctccaagacgatggcagagcaagcagcctggaaattctttaaagaaaataacattgattttgtcagcataataccacctttggtggtcggtccatttattatgcaatcaatgccgccaagcctcatagctgcactttctcctatcaccgggaacgaagctcattattcgatcataaaacaaggccaattcattcatttggatgacttgtgcagagctcatatctttctattcgagaatacaaaagcggaaggtcgctacatttgcgcctctcaccatgctaccattatcgatcttgcgaaatgctcaatgaaaaataccctg

SEQ ID NO: 216123 - DNA, 423 bp, Gossypium hirsutum
cgatcaaatttatcttttctggtttcgctatggcatcgaagcgaatcttgaaggaattgaaggatttacaaaaggatcctccaacatcttgcagtgctggtcctgttgctgaagacatgtttcattggcaggcaactatcatgggtccaccagacagtccgtatgctgggggtgttttccaagtgaccattcattttcctccagactatccttttaagccacccaaggtggcatttagaacaaaggtattccaccctaatattaacagcaatggaagcatttgcctagacatcttgaaagagcagtggagtcctgcactaactatttccaaagtattgctatcaatatgttcattgctgaccgatccaaaatccggatgatcccatggtgccggagattgcacacatgtacaagacagacagg

SEQ ID NO: 216124 - DNA, 333 bp, Gossypium hirsutum
tctcattgttcaatcaacaggtcatgcagtacacatctttatcaatggacagctttcaggttctgcctttggaacgagggaaaataggagattcacattcaccgggaaggtcaatctgcgtgcaggaacaaacaaaattgcgctgctgagtgttgctgttggattaccgaacgtaggtggccacttcgagacatggaacaccggaatcctaggtccagttgcattgcatggacttgaccaaggaaaacgggacctatcatggcaaaagtggacataccaggtcggactcaaaggagaggccatgaatcttgactcaccgaatggtatttcgtc

SEQ ID NO: 216125 - DNA, 303 bp, Gossypium hirsutum
  unsure (1)..(303): unsure at all n locations
gngaaancnaactggaaagggaccagcngngcataaagatacgnngggcgccccactgggcccttggaggcattatgatgacaaagctgctgaggtagggcagggattctggaattgtccatgcgttcctatgagagaaaggaaagaatgtcactgcatgctctttctcactcctgataatgattttgctggccaagatcagtccatcacactggaagagatcaaggaaacaacaacgaacatgtagttcaagacattcataacttggatttcccaatccccaaagaaataccaggagaaaat

SEQ ID NO: 216126 - DNA, 315 bp, Gossypium hirsutum
ggaaacgcatcgaaaagttagggttttcgctccttacgattatcgagggggtccttttgaattgaagtatgggaaagaggaaatcaagagcaaagcctgctcctaagaagcggatggataagcttgacactgtgttcagctgccccttttgtaaccatggaaccagtgttgagtgccgccttgatatgaagaacttgattggcgaagcctcttgcagaatatgccaggaaagctttagcactgttataacagctttgactgaaccaatagacatatacagtgaatggattgatgaatgtgaacgtgttaacaacc

SEQ ID NO: 216127 - DNA, 300 bp, Gossypium hirsutum
cccacgcgtccgcccacgcgtccgggaagcatcatttgtacggcgagcacgactgctagctgcggtagtgaaagggacactgattataacatgtcgaagcatgcggtgattggattgatgagatcggcaagcaaacaacttggagagcatgggattagggtgaacagtgtcgccgttcattgtgggaaccccattactctatcattacctggggacggaggcggaagtggagcagttgtttgagccctacgcacggttgaaaggggtggtgctgaaagcgaagcatgttgctgatgctgt

SEQ ID NO: 216128 - DNA, 414 bp, Gossypium hirsutum
agaacagcaaaagaagcaaagcattggcatgtatcaaggttcatgagttgcgacagaaatcaaaaaccgagcttttagctcagttgaaagatctcaaagctgaacttgctcttcttcgcgttgctaaagttaccggtggtgcacctaacaagctttctaagataaaggtggtgaggctgtccattgctcaagttctgactgtaatctcacagaagcagaagtctgcattgagggaggcatacaagaataagaaattcttgcctcttgatctccgtcccaagaagacccgagccatccgcagaaagcttaccaagcaccaggcatctttgaagaccgaaagggagaaaaagaaagaaatgtactttccaatgaggaagtatgccattaaggtgtagggcaagatctcacattcta

SEQ ID NO: 216129 - DNA, 291 bp, Gossypium hirsutum
  unsure (1)..(291): unsure at all n locations
cccacgcgtccgggaaaatggcaagggcattgncaccaatgcctatttcctcatctggggcacccggtacagctgagtttccaagtggaggaaagccagggagagggcgaggcagtgcttaccagattaagcatcataaaggaatggacatagataatttaggtgagttggccggcacttctattggaacaaattttatgccgcatgtcatcactgtcaatcccggcgaggatgtaacaatgaagggtgatatcgtttctcaacaaggaccacgagccatttgcatcctat

SEQ ID NO: 216130 - DNA, 436 bp, Gossypium hirsutum
aaaccaacagatccgttgttgaatttcaatgttgtttgttacaggaaatggctggtggaacagctccccctagaggaagtgcagcagcagccgcaagcatgcgtaggcggagaaccacaagtggtgcagcctcaggaggggctgctgggaccatgcttcaattttacacggatgatgcaccaggtctcaagatctcgccgaatgttgtgcttgtcatgagcatcggtttcattgcttttgttgccgttctacatgttatgggcaagctgtattttgttcgtagagaggcttgaaaggaatttgtcggccagaaaaagaaaatatcaacaggatttatttaggagtctgagttgcaaagcaaaactgtttctttttattattaaaaacaagtctattgtcaaaagtgcaattttgtttacattgttctacttgtttg

SEQ ID NO: 216131 - DNA, 450 bp, Gossypium hirsutum
  unsure (1)..(450): unsure at all n locations
cggacgcgtgggtgaaggccggaatcatgttccaaaggcaatgaaaatgaagcggtcggggtcacatgtcggagctgccgaaaagaactcccagtaccagtatcagtatcagtacccttggtccatcaaactcgatagatcatcggtttcacttatagacagtgagtgcggttccaccagtacggtattgacaaacaccaactactgcagatcccatttcgggtacgatgtaagagtatgaaataacaccaaatggaatctcgaaaataaattcgctcgattcaactgagggaaagtaatcaggagccaaaaaatgacttctatgactaatgtagaaggtttactgtgaacaatgacctgcgaaaattgcagggactagtgatgtagtaacattgtgtcaatagaaattctctgtttgatttattttctgatgattangttttttattta

SEQ ID NO: 216132 - DNA, 342 bp, Gossypium hirsutum
  unsure (1)..(342): unsure at all n locations
cccacgcgtccgctttgctgtttggtttgtggttggcaacgtctggatctttggtgggcactcatctgccagtgaggctcctaacttgtacaggttatgtatagtttttcttacaattagttgtatcggatatgcaataccctttattctatgtgccacgatctgctgttgcctgccttgtattatttctgtccttggatttagagaggatctatcacatgcaagaggggccacacctgaatccatcgaggctttgccaacttacaagttcaaggtgaagaaaaatagaaatagtgatggtaaggatgtcaactcangcgccagtgagggtggggttgtggc

SEQ ID NO: 216133 - DNA, 336 bp, Gossypium hirsutum
agacaactgagatggcaaacaaggatctcgacagatactacaacgcacttgacaaagcacttatgcgcttccattctatgaaaatggaggaaataaacaaaattataagagaattgtggcagcaaacatacagaggacaagatatagattatattagcattcattcggattctgaaggtgctggaactcgttcttacagctacaaggttcttatgcaaaccggtgatgctgagcttgaaatgagagggcgatgtagtgcaggtcaaaaagttcttgcttctctaatcatacggttggctttagccgagacattttgcctcaactggggaatcttag

SEQ ID NO: 216134 - DNA, 444 bp, Gossypium hirsutum
  unsure (1)..(444): unsure at all n locations
ctcgaagaacaaaagaaaatgggaaaaggttctggaagctttggaaagagaaggaacaagactcacacgctctgcgttcgatgtggtcgccgaagcttccatctacagaagagccgttgcggtgcttgtggctaccctgccagtcgcatccgaaaatataactggagtgtgaaggctattagaagaaagaccaccgggactggccgcatgaggtacctccgacgtgttccccgaaggttcaagactggctttagagaaggtactcaagcaactccaaggaagaagggagctgttgctgcttcatgagttaatttgtgatgttttgttttgttcagagagattcctgaatttagaaacaataggttttgggtctctttcaactgtgtgttactttttcatttttcacctaatgtctacaaacgggaagttntgttttatattatg

SEQ ID NO: 216135 - DNA, 447 bp, Gossypium hirsutum
  unsure (1)..(447): unsure at all n locations
cccacgcgtccgcccacgcgtcctcggactcgtgggtggaatgatgtccaaccaaggagggggtgactttgacaggatgaggcatagaagccccagtcccatggcttcttcaaacattatgtcaaatgtttctggaactggattaagcaactggaatagtcttcctcaggagagactaagtggacctcctgggatgacaatggactggcaaggtgcaccggcaagccctagttcatacaatgtgaagagaattttgcgtcttgaaattcctgtcgatacatatccaaatttcaattttgttggacgactcctangccctagaagcaattctttgaagcgggtagaagctactactggttgccttgtatacatcagaggcaaaggatcaataaaggatccagacaaggaagagcagctcagaggtagatctggctatgagcacctcaa

SEQ ID NO: 216136 - DNA, 448 bp, Gossypium hirsutum
  unsure (1)..(448): unsure at all n locations
cgaagatctctctcctttatttctgtagtgtatttttcgcggccaccaacaaccaccgannaaaatggcttcgaacgcggcggtgccgttctggcgtgcagcggggatgacatatatcacctactccaacatatgcgccaacctcgtcagaaactgcttgaaggaaccttataagactgaagcccttttttgtgagaaagtccattnctccatcnccaagtggactgatggaaagcctgaaaagcccaccatccgctcagattcgcctgaagaatgagttgtgtggttggtcatcaaagtcgccaattgggaaggactcgaggagtttaatttttgtttnatntgtaattcttgtacaatacctgttaacaaatttcagggttttagatgctgctgcattttcgtaanaatctctactttgcaaataatagactgaggtttcattgga

SEQ ID NO: 216137 - DNA, 426 bp, Gossypium hirsutum
  unsure (1)..(426): unsure at all n locations
cccacgcgtccgctcctgataactttgcttttgcaagagaatgcaaagatgttgaagtaggcggagtttatattggatcttgtactggtggtaaaactgaagattttcttgctgctgctaaagtctttctagcttcaggaaagaaggtcaaggttcctacattccttgtcccggctacacaaaaggtttggttggacttatatactctccctgtacccggatctggtgggaagacatgctcccagatatttgaagaagctggctgtgacacacccgcaagccctagctgtggtgcttgtttgggtggcccgaaagacacatatgcacgtatgaacgaagcaaaagtctgtgtctcaacaacaaaccggaacttccctggtcggatggngcacatagaacgccagatatatcttgctttttcgtata

SEQ ID NO: 216138 - DNA, 445 bp, Gossypium hirsutum
cccacgcgtccgattgaaaaggacaaaatttttgaattgtccaatgctttgtacaagaatgatgggacaacaatggctggccttagggctattggttatgactttgactatgatgaataccacagttatgttcatggaagactcccttatgagaacttaagacaagatcctcaattaaggagtctattgcttagtttgcctgttagaaaaattatctttacaaatgcagacaaggaccatgctaaaaaagctcttaaaaaactgggattagaggactgttttgaagggattatttgctttgaaacccttaatcctatccataagaacacagtttctgatgatgaagatgacattgaattcttgggatcatctgtcacaagaaatgatagtcttaaaacccccgaaattttcgacataatcggccacttcgataacccgaaccccg

SEQ ID NO: 216139 - DNA, 431 bp, Gossypium hirsutum
  unsure (1)..(431): unsure at all n locations
cccacgcgtccgtaatttcattttatcatttatatccataagatgtcaagcagagggtccgtatcaatgcaatcagcaagtaattcaagaataactgatgatcagatcaatgatcttgtttctaagttacatcaacttcttcctgagattcgtaactcccactctgataaggtttcagcggcgaaagtgttacaagagacctgcaactacattagaagcttacacagagaggttgatgaccttagcgagagattatcagaactattagcgaccactgacaatgcccaagctgccgtaattcgtagtttgcttatgcaataatagatcacttaattaataaaaatgaaggttaatttttgtattacgacttttatggcttcactactttaattgtatanttttagagttttcttaatttgccttctttatat

SEQ ID NO: 216140 - DNA, 358 bp, Gossypium hirsutum
  unsure (1)..(358): unsure at all n locations
cattgcacaagtattgacggtgatatcccaaaaacagaaggctgctttgagggaagcttataagaacaagaagtttttgcctcttgatctccgtcccaagaagaccagagctattcgccgccgccttaccaagcaccagcaatctttgaaaaccgagcgggagaaaaagaaggagatgtactttccgatgaggaagtatgccattaaggtataagcttgaaatttgacttaggatggatacctttatgttagtttcaaagtgactactcgaggttattgttgaagttttgtgttgttgaattttcgttttcttcataacattccctattatgtttaagtntcttacaattctgaatta

SEQ ID NO: 216141 - DNA, 342 bp, Gossypium hirsutum
  unsure (1)..(342): unsure at all n locations
cccacgcgtccggcaaaccatgcaancctggagctcattgcattactcttgataagctatatgttgcagagcagaagctttacaaggaagtaaaggaggaagaagttaccaaattggagcttgaaaagaaattgatgttgctccaaaagcaagatgaaaaccatgactggaccaagactcagaaaatcaaatcaagtgttgagaatctggagaatgacatgacacgcttgcaacattcaataagtacagcctgttcatctatattggagctcattgatgaggagctttacccacaactggttgcattaacttcagggtaagatctggttgctatgctacatg

SEQ ID NO: 216142 - DNA, 321 bp, Gossypium hirsutum
cgtgcctttgttcactggtacgtgggtgagggtatggaagaaggagaattctcggaagctcgtgaggaccttgctgcacttgagaaggattatgaagaagtcggtgctgagtcaggcgagggtgatgaggaaggtgaagatgagtactaaataagtaatgtttgagtggagggcttgcattttgctacccaatgatttgtttccttttatcgtgtgtttttgcttattctattgtgtgaacttcgactcttctaagctttgttcaagactatatggactgcaatagatttgacgagtagttcggctaagtttctagtgttc

SEQ ID NO: 216143 - DNA, 330 bp, Gossypium hirsutum
cccacgcgttcgcccacgcgtttttccacttttccgaaaaccttcatgatcaagaagaaggtggccaagaagatgaggcaaaacaggcccatcccttattggattcgtatgcgcacagataacaccatcaggtacaacgccaagcgacggcactggcgccgtaccaagctagggttctaagctcgatggggttctttagattaaagagtttaattttgttttttccaagtaattttgctgaattttatttatgtgggattaatattattaggaagagatattgatgaaattattggcagtatttgaattcatgattttggtttagcttac

SEQ ID NO: 216144 - DNA, 293 bp, Gossypium hirsutum
tttgaaacaagccctgattatggacacttggcaagcaaaatgggatcagagtatcttgcaaaacttttatctcagcatttagagcttgttatcaggcagcgcataccaagcatcatttctatgattaataagacaattgatgagctcaacgcagagttggatcgcattggcaggccagttgcagctgatggaggggcccagttgtacatgattttagaactttgccgtgcatttgatcgtgttttcaaggagcacctggatggagggcgacctggcggtgataggatatatgg

SEQ ID NO: 216145 - DNA, 295 bp, Gossypium hirsutum
caacgatatgctaaagtttttaaagaacgatacaaggagttaaatgattatgatcggataataaagaacattgaaagaggggaagccagaatctctagaaaagatgagatcaagaaagcaattggcaagaaattggatcgctacaagaatccatggctggaaatgaagatccagtatggtcaaaacaaagggaagctgtacaatgaagaatgtgatcggctcatgatatgtatggttcacaagcttggatatgggaattgggaggaattgaaggcagcattcagaatgtctcctt

SEQ ID NO: 216146 - DNA, 286 bp, Gossypium hirsutum
  unsure (1)..(286): unsure at all n locations
ccaaaacaagaaatatnggggatgttcgaaatttgtcaaagtcaattgctgttctagagggagaccttggagcaatacggtccattcgctacacatctgatggtaagtacatggccatggctgagcctgctgactctgtgcatgtgtatgacgtgaaaagtgggtacgagaatgagcaagacatcgatttctttggtgagatatccggcctatactttagtccggacacagagtctctctctattggtgtatgggatcgcacatatagcagccttcttgagtatgg

SEQ ID NO: 216147 - DNA, 288 bp, Gossypium hirsutum
actacacgtcgtattagggaagttttcattttttcgaaaccgattgatgttctagggggagaccatctagcgaggcggtgcattcgttacacatttgattgaaagtacatagtcatgggctgatcacattgactcgtgtgcatgagcctgatgtggaatgtgcctactagtctgatcaatacaacgagttctttgccgagatatcctgcctatcctttatgccgtacacagagtctctgcttattggtgtatgttatcagtcatatggctcacttttcgagtatggtc

SEQ ID NO: 216148 - DNA, 438 bp, Gossypium hirsutum
cgctgttgatcaccgccgtaagaacaaattttttgaaggtcttcaagccaatgttcagaggcttaagacctacaaggccaaacttgttgtcttcccaaggcgtgctcgcaagttcaaggctggtgattcacctgccgaggagctcgcaactgcaacccaagtccaaggaccatacatgcctatttctcgtgagaagccttccgttgagctcgtgaaggtcaccgacgacatgaaatcattcaaggcatacaacaagctccgtgttgaacgtacgaacaaacgtcatattggtgctaggttgaagaaggctgccgaggccgaaaaggaagacaagaagtaaggttacccttttggggacagtgttttgttatttggcttgctaaaaagaccttaaattttgtattcattttgtcaagtgaactgagacagctttagaaa

SEQ ID NO: 216149 - DNA, 454 bp, Gossypium hirsutum
  unsure (1)..(454): unsure at all n locations
gggagccgaaaagctgttgttgtccatgttttctacttattgaggaaagctttccgtaagggtcatgttaagcttgtgagggaactcgaaaagaaattcagtggcaaggatgtgattcttattgcaactcgaaggatattgaggcctccaaagaagggctcagctgttcagaggccacgcagccgtacactgactgccgtacacgaggcaatgctcgaagatgttgttttacctgctgagattgtcgggaagcgtactagatatagaatcgatggatcgaagataatgaaggtctttttggaccccaaagaacgaaacaacacagaatacaagctcgaaaccttttcagcagtttaccggaagctcgcanggaaagatgttgtgtttgagttcccagttacagaggcataaagaaagcctttttaaaagatatgacaccttctgtctggtcctt

SEQ ID NO: 216150 - DNA, 471 bp, Gossypium hirsutum
  unsure (1)..(471): unsure at all n locations
cggaanaacggggtgacgctgttggcaagcttagggttttctctaatggtgaccttgttatcacttgtgaatgcacccctggttgcaatgaagacaagttgactcctgctgcatttgagaagcattctggaagagagacggctagaaagtggaagaataatgtttgggtgatagttaatggggagaaggtttctttatcaaagactgcattgctgaaatactacaaccaagcgtctaaaaatgccaatggtactaacagatcccataatggaagagtttgtcaccgtgatgagtttgttcgctgtagcaggtgtaacaaggagagaagatttcgattgcggacaaaagaggaatgtcgaattcaccatgatgctttagcagatgtgaattggaaatgttcggatcttccatatgacagaataacttgtgatgatgaagaagaacgagcaagtcgcagggtatacaggggct

SEQ ID NO: 216151 - DNA, 447 bp, Gossypium hirsutum
cccacgcgttcgcgcttgttataagccggtttctgatcggacttgtaccatagagattttgatggtgagatcgaatcttactggaagtttcactgaagagaacttggcttttcaaaagaagatactggagaggtctggtttagggcaaaagacgtatttgcctgaggcggtgttgcgtgtaccgacgaacccttgtatggcggaagcaaggaaagaagcggaggcagtgatgtttggtgccattgatgagctggtggagaagactggtgttaacgctaacgatatcggtatccttgtggtgaattgtagcttgtttaaccctacaccgccgctttccgccatgattgttaatagatataagcttagaagcaatattttgagctataatcttggtggaatgggttgcagtgctgagctgacttctattgaccttgctgctgatatttc

SEQ ID NO: 216152 - DNA, 259 bp, Gossypium hirsutum
atttgttaatcttgttttttcctcgatgtttaacaccgtttcaaacaagaagattgctatcttaaggttcgcctttaataaagataccggtgacactatggagaccccctccatcgatgtatgcaaaggactcttgtgagacaaagcctagatgaacatatattacccgcaagtgaccatagaccatgtccaacaagatctttgcatgaacatgtttgactgtgaccattctcttaacttgcatcacatgaattccacg

SEQ ID NO: 216153 - DNA, 292 bp, Gossypium hirsutum
atttccccacttccactctctcttgctgctcaatgtcaccctcgttggtaaagatcacgcgggtgctgctatttatgtcaatgattattcctcaaaaatcagttggggaatacgagcaatggtgcatagcagatgaacaaaccccagatgaagagtcgaaggtagccctggattgggcatgtggcgaaggtggtgcacattgcactaagattcacgtaaaccaggcttgttattttacaaacactatgacagaccatgctctctatgccttcaatgattacttccaaaggtt

SEQ ID NO: 216154 - DNA, 290 bp, Gossypium hirsutum
gaacttgacaccaaaactggatgcggaaaagcaagagtccttcaagaaaaacattgagggagcaaccaagtttttgctttcaaaattgaaggaccttcaatttttcgtaggagagagcatgcatgatgatggatgcttggtgtttgcttactacaaggatggtgctgttgacccaacatttttgtactttgcatatgcattgaaggaggtcaagtgctgaggtttgaagcaaagaaaaaaaaagtggttgctgaagaatttagtcctttttattattgcttttgtctctt

SEQ ID NO: 216155 - DNA, 291 bp, Gossypium hirsutum
agcaaccctgtcaattcaactgttcctatttcagctgaggtttttaagaaggcaaggacatatgatgagagaaagttgtttggcgtaaccacccttgatgtggttcgggctaagactttctatgctgggaaggctaaagtaaatgttgcagatgttaatgtccctgttgtcggtggtcatgctggaattaccattctcccgctattttctcaagccacaccaaaagccaatttacccgaagaggatatcaaggctctcacaaagaggacacaagatggaggcactgaagtt

SEQ ID NO: 216156 - DNA, 364 bp, Gossypium hirsutum
gacccacgcgtgcggaagtttcctttctcgattttctatttattctaactttatgcagatcttcgttaagactgtaacgcgcaagacgatcactctcgaggtcgagagctccgatacgatcgacaacgtgaaggccaaaatccaagataaggaaggcatccctccagaccagcagcgtctgatcttcgccggaaaacagctcgaagacggccggaccttggccgattacaacatccaaaaggagtcaactctccacctcgtcctccgtctgcgcggtgggatgcaaatcttcgtgaaaaccttgactggcaagacaatcactctcgaggtcgagagctccgacacgatcgacaacgttaaagcg

SEQ ID NO: 216157 - DNA, 339 bp, Gossypium hirsutum
gggcaggaagacgatatgtcaattgagttgtttttgtaagatgtaaagaagattgcttttgactacggattcaagttagagaaagaacagaccattgaaacaacgtatactacaaatcctcgatccatgatgcaaaaccattaccatgctgcattctggacaatgcgaaagaaaagaacaactacgacatagcatgcaagaagatgatatgcattcctctcttaaacatactctcaggttttattcctcatttggatattttttatatataagacttaatttcccctgagattttcttgttagtttggattattacaaaacataatcagttctttgggg

SEQ ID NO: 216158 - DNA, 295 bp, Gossypium hirsutum
  unsure (1)..(295): unsure at all n locations
gaaaaggccaggcttttgaaagatttgggggttgttcgagtcatagactacanaactgaagacatcaaaaccgttctgaaaaacgagtttcctaaaagagttgacattgtctacgaatctgttggtggtgacatgtttgatatgtgtttgaatgctntggctatccatggacgtctcattgtgataggaatgatctctcagtatcaaggggagcatgggtggaagccaaaaaattatcctggtcttgtcgagaagctcttaaccaaaagccaatctgtgggctggcttttccctg

SEQ ID NO: 216159 - DNA, 288 bp, Gossypium hirsutum
cccaccgtccgggttttagcagagctaaattatagaaaagaaggaagtaggtcggcatggggaagctcacggccgacttgatttgcaagtgtcctcacttattcaatgccctcaaagagcgagaattggatcttcgaggtaacaaaattgctgtaatcgaaaacttgggtgctaccgaggaccaattcgataccatagatttatctgacaatgagattgtgaagctggacaacttcccttatcttaaacgcttgggtactttacttataaacaacaaccgagttactc

SEQ ID NO: 216160 - DNA, 290 bp, Gossypium hirsutum
gagaattgctggagctgatgttcccatgccttatgcagcaaatcttgagaggatggctgtgccacaggttgaagatattgtccgtgctgcaaagcgagcatgctacagagctgtaccattggctgctgctgcataattgaaccaatataggaactaaaggaatgcacgattgtttgtcctctcaactgttttgggaaggagccgtttcatttaataactgagacattgttggaaaggctggaaatttggcgacttcatttgtcatgtgaacataacctgttcaaccctgc

SEQ ID NO: 216161 - DNA, 289 bp, Gossypium hirsutum
cacaaacccaaatctccaattgatctgttttatttctcagcaaagctagaaaaacaatggcgtaaggatatcgagactgcagagcaacatggaggggagttctcggccaaggactaccatgatccaccacctgctccattgattgatgctgaagagttaaccaaatggtcgttttacagggcagagattgccgagttcattgctacacttctcttcctgtatgtcactgtgttgaccgtgattggttacaaggtccaaaccgaccctgctaagaacactgttgaccccg

SEQ ID NO: 216162 - DNA, 291 bp, Gossypium hirsutum
cccacgcgtccggagattttgaatattgttttcgccgccagggccaggaggcatgtactgcaattacccgccgcctatgctggtcaactgctccggctgccacacccctttgcagcttccgcaaggtgcccgatccatccgttgtgccatctgtaaagccgttaccaacatcgctgaccctcgatccctccctcccgagttccaatcacctgctccttccacccacgcgcttgcttctccctccccttacaatcatgctcctcccggggcacctccccacgcccacggtcg

SEQ ID NO: 216163 - DNA, 443 bp, Gossypium hirsutum
cccacgcgtccgatcaatctttaggtttattgcattttatagatcatgaaatctttcctggcttttggtgcattcctctcacttctcctgtttgtagacaccattgcagcagctaggaaagatgctggagagtactggggagctgtaacgaaagatcagcctatgcctgaggcactccaagagcttgttcggattgaggctgccgttgtcagccccgatgagaaaaccaagtgccatacatcaggtaatattgagcttaaggaagagaagattattgttaatgaggagttcgaaccaaagccaaacgtttcagcttatggtgatgacgctaatctaaaaggagataaatcatcatcttttgctgaagattttgaaccgagacctaacgtttcggcttacgggggcgatgatgctggtcttaaagacaaaaaagatcattcact

SEQ ID NO: 216164 - DNA, 425 bp, Gossypium hirsutum
caatcccagcgcttgaatgtggttccaacttttacattgcttggaatcatgaaagctaggcttgtgggtgctacaagaggtcatgcacttctcaagaaaaagagtgatgcccttactgtacaatttcgtcagattcttaagaagatagtatctacaaaagaatcaatgggagagattatgaaaacctcttcattttccctaactgaggccaagtatgttgctggtgagaacatcaagcatgttgtccttgagaatgttcaaaatgcttctcttaaagttcgatcccgacaagagaatgttgctggagtgaaacttcccaagtttgagtatttcactgaaggtgagaccaagaatgatcttgactggtttggccagaggtgggcaacaagtccaacagtgtcgtgctgcttatgtgaaaactattg

SEQ ID NO: 216165 - DNA, 379 bp, Gossypium hirsutum
cccacgcgtccgacaacatactggaactttttaaccataagaaatgcaacatgagaaggagctttttacgttacgcttcaatagaatgaattcagtaagggtagagccccatggttgatcgaaggtcctatgccacttaaactcaaatctatcttaccttcaatccatctttgttcagccagctcataacaaaatgttagaccgggctgacacaaccaaattggttgaagaaaaggaaaccccagcgaccaagcactcccacccccaaaagtggagaccgaacaccgccaggttgtcgaggacacgtctgaagaggaagcgggcgcactctaagttgaccaccctacccactaatggactatgaggggggcaggcgaac

SEQ ID NO: 216166 - DNA, 378 bp, Gossypium hirsutum
aaactccctcccgaaatctcagatctaatattttttaaaacctaccatctctttcgctatctgcctgtttccctttctctctatctgattcctatcgacaatggccgccgccgccacttcttcaccccgcgaggaaaatgtctacatggcgaaactcgccgagcaagccgaacgctacgaggaaatggttgagttcatggagaaagtctctgcctccgccgacaacgaggagctcaccgtcgaggaaaggaacctcctctccgtcgcttacaagaatgttatcggcgctcgccgtgcttcctggcgcatcatttcctccattgagcagaaagaagagagcccgggtaacgatgaccacgtcgctacgatccgtgatta

SEQ ID NO: 216167 - DNA, 296 bp, Gossypium hirsutum
gctaagacccttccccagaacactaccaacgacgacaagctcattctctatggactctacaagcaagctactgttggaccagtgaacaccagccgtcctggaatgttcaacatgaaggaaaagtacaagtgggatgcatggaaggctgttgaagggaaatcgaaggaggaagcaatgaacgattatatcactaatgtaaaacagctgcaagaggctgctgctgcatcttcttgacgtgtgtgtgagaatagaaaatggtgtaattttcaagccctttgatacctatgggtttgaaa

SEQ ID NO: 216168 - DNA, 259 bp, Gossypium hirsutum
ggaacatggaaaggttcagattacatcattgtatacaattcgtgtggaccaaaatggtgagaaagagggttcatatggatgaagaggaacactggaaaacctgagggtctctgtggtgtcaataaaatagcttcttaccctaccaatgacaagtgaagagctctaacctcagcatacggcttcaaccaaaatgtgttcaatcattttatctatgctgcagactcgcttgtattgataaaatttgatggcccttcttcgg

SEQ ID NO: 216169 - DNA, 292 bp, Gossypium hirsutum
ttcctccaaatttgctgcaaaagcttggcacggattgcctagtcatgcaaaaccatcgttatggcatttcaccagagaagcttcaaaatactccaaatctgtccagattcttcaagatcttaacaacaagcacagataaaaataacaaggtatatgtctccactgcggaagcacatggctatcctgtcactgccttccagtggcatccagagaaaaatgcttttgaatggggcttgcctatgattccacacacagacgacgccattgaagtgacacaacatgttgcaaactt

SEQ ID NO: 216170 - DNA, 314 bp, Gossypium hirsutum
aaaacccggcccgacccacgcgtccgttcatacaaacatgctgcaaaagcttttcttgtatggcctagccaagcaaaaccagcggggtggcatttcaccagaaaagcttccacatactccaaatctgtccagattcttcaagatcttaacaccaatcacacatacaaataacaaggtatatgtctccactgcgcaaacacatggctatactgtcactgtcttccagtgacatccatagaaaaatgcttttgaatgggacttgcctatgatcccacacacagacaacgccattgaagttacacaacatgttgcaa

SEQ ID NO: 216171 - DNA, 290 bp, Gossypium hirsutum
caactttgttaagcttgtgacttgttatgttatacgaatggggttacagttcccgtgttgtggacttgatccgacacatgtctaaagcttaagtgagtgagtgattgtgctttgtgtatccaagctttagcaattttaatttagaagagatgttatgagagaataaacgaattgtacggagcatatttttgtgtgaagaagggttgtttcagttttattacccaagtacttgaatgtttcaagtttcattgcagttgtttctctactttaatgcatatgttgtgattatg

SEQ ID NO: 216172 - DNA, 443 bp, Gossypium hirsutum
  unsure (1)..(443): unsure at all n locations
ctacttctctactgaatgcatttattctcctaatgcatatcgngggtttgctcgtgaattcataaaagatttggagagaatcaggcccagggctatacttgacatcattaaatcaggtgaggattttcgaatttccactacaaccaaaatgcctgaccagggaacctgtgaacgatgtggttatatttctagccagaaatggtgcaaagcttgtgtcttgctggaggggctgaatcgaggtttaccaaagcttggcattggtcgtactcaaggcctaaacagtgatggtaagaaagatagaaaaagagatagcagaacaccaagtattgagagcaagcaatgtggaagtttggaattctgatccagagttttagattgcttatggaattatcaaattgttgtttgattggccacccaagctctcatatcttctctttttagag

SEQ ID NO: 216173 - DNA, 435 bp, Gossypium hirsutum
cggacgcgtgggctataaacaaagagaaatttggtgttaaacaatggcgtcctcggatctggttgggttgctcgagactgatgtcgagatcgatatttctcccgaaaagttccaccatatgtggtgccacaggccgcaccatgtccaccacactagctctgaaaaagttcacacaggtgattcacctggtcgtaaaatctcgacgaatggtgtgcttgtcatgagcatcggtttcattgcttttgatgccgatctacatgttatgggcaagctgtattttgttcgtagagaggcttgaaaagaatttgtcggccagaaaaagaaaatatcaacaggatttatttatgagtctgagttgcaaagcaaaactgtttctttttattattaaaaacaagtctattgtcaaaggtgcaattttgttacattgttctactt

SEQ ID NO: 216174 - DNA, 451 bp, Gossypium hirsutum
cccacgcgtccgatccacttcccacccaatttcaactttccgacgagggaaaggtacttgctgagcgtgattcattcgatgatagtactagcgaaactacaacttcctctgttggaggaggattttccgaatctccaaacaaaaatataaataggcgaatagcaataggctctacccttgcagcagtgggacttttcatgtcatcgcgattagattttggtgtttctctgaaagacttatctgctgcagcagtgccttatgaagaggctctttcaaatggaaagccaactgttgtagaattctatgcagattggtgtgaagtatgccgggaattagctccggatatttacaaagtagaacaacaatacagggatcgtgtgaattttgtaatgctgaatgtcgacaacacgaaatggggacaaaaacttgacgagtttggcgtggagggtat

SEQ ID NO: 216175 - DNA, 296 bp, Gossypium hirsutum
cgcccacccccttcccccgaagcagcagtgatcaccggcaatgggtatcgatttggtcgccggcggcaagagcaagaagacaaagagaactgctccgaagtccgatgacatctacctcaagctcctcgtcaagctttacaggtttctagtaaggaggactgggagaaaattcaatgccgtgattttgaagcggcttttcatgagcaaagtcaacaaaccgccgttgtctctatccagattgattcaatacatgaagggcaaggaggataagatcgctgtggtagttgggacggtca

SEQ ID NO: 216176 - DNA, 290 bp, Gossypium hirsutum
cgaggttctcaactttctcgggctatgtgctttgatgtgcatgggagtaacggcgggtgcttacatccttactatatttgctataaaatacagagaacgcgtccttggtttgatacttgtatccccgctttacagagcaccttcttggactgaatggttttataacaaggcgatgactaacttgttatatttttacggaatgtgtgaactgcttaaagaaattttagcttcaacgatactttactaaggaagctcggggtaatgcataagttcccgaatcagatattgct

SEQ ID NO: 216177 - DNA, 420 bp, Gossypium hirsutum
ggcctgagagctctggttttggtgatgcatttgatttttctttgaagtctgggagtgagcatagggtgtttctgaatcgcctcaagaaggtatggaaggccatggaaggcctagtcgattccggtttagttcgagctatcggtgttagcaatttcggtgttcatcagatcaaagaattgcttaaattcgcaaaaatcgtacctgctgttaatcaggtggagttgcatcctttttggaggcaagatgagctggtgaagttctgccaaatgaagggtatccatgtatcggctcatacacctttgggagtacctacttcaagtcctggagtgtccgatagtggatcgggtggggaagatgaacccggaactcctcggatttcatttcggaagtctagatcagtacatggaccgatgctgaaat

SEQ ID NO: 216178 - DNA, 430 bp, Gossypium hirsutum
cccacgcgtccgctgcttcgttaacaggcttttgatctacaatttccctgaagaactctttgccgatgcaagcatacttgcaatcgagcatgctgattttgatgggatagagcgtctggctttggtaacaggtggggaaattgcttcaacctttgacaacccagagtctgttaagcttggacattgcaagcttattgaagagattatgattggtgaggacaagttaattcacttttctggtgttgaaatgggtcaggcttgtactgttgtgttgagaggtgcaagccatcatgtgctggacgaagctgaaaggtctctgcatgatgccttgtgcgtactgtctcagacagttaatgacactagggtattgcttggaagtggatggcctgaaatggtaatggcaaaggaagtggatgagctagcacgcaag

SEQ ID NO: 216179 - DNA, 295 bp, Gossypium hirsutum
cttagagacaactatgcatatcttttacacgacgtggacacaggcacggttggagtcgttgatccttcaatagctatgcccattatcgatgctttgagtcggaaaaactggaacttgacttatatattgaatacccatcaccatcacgatcatactggtgggaatgcagagctgaaagcaaggtatggagcaaaggttatcggttcgggaatagacaaggataggattcctggaattgatattgttctaaatgatggggacaagtggatgtttgcaggtcatgaggtgcatgtca

SEQ ID NO: 216180 - DNA, 290 bp, Gossypium hirsutum
cccacgcgtccggaaactccctggacaactcaagaaagctgaagaggccagtagcccggctccagccccagcagctgagccccatcacgaagaggagtcaaaggaaaagaagggaattttggagaaaatcaaggagaagcttcctggttaccactccaaatcagatgaagaaaaagaaaaggcttgagattcaagttcacataaaaatactgatgggattgtgtgtttcttaaattgttcaaaaattatctgcttttgtttttgaggttgtatttgttgtatatttcata

SEQ ID NO: 216181 - DNA, 291 bp, Gossypium hirsutum
cccacgcgtccgcccacgcgtccggtaatgagtaagtctcccaacaagcacaaccgattatacatggaagctcgacccttggaggaaggtctggctgaagccattgatgaaggtcgtattggtccaagagatgatcccaaggttcgttcaaaaattttggctgaggagtatggatgggacaaagatcttgctaagaagatatggtgttttggccctgagaccacaggtcctaacatggtggttgatatgtgtaagggagttcagtacctgaacgaaattaaggattctgta

SEQ ID NO: 216182 - DNA, 293 bp, Gossypium hirsutum
gtacctggcatcaaagtagataagggtttgtttcctctacctggatcaaacaatgaatcgtggtgccaaggcttggatggattgtcatcaatatctgccgagtactacaaacaaggtgctcggtttgccaagtggagaacagtagttagcattccttgtggtccttctgctctggctgttaaggaagctgcatggggacttgcacgttatgctgccatttctcaggacaatggtcttgtgccaatagtggaacccgagattcttctggatggtgaccaccctattgagaggac

SEQ ID NO: 216183 - DNA, 463 bp, Gossypium hirsutum
  unsure (1)..(463): unsure at all n locations
cacgcgggcgcagacgacgtgagcatgactttgacttgcgtatttttcttgtgtgtcaagacagatgatattgctgcgtgcaacgtgtgatggatgcaacaacctccaaaatacctccaaggcaaggtattgatgaaaattgtgaagggaagtctcctcatatcttaagaaagttggttacaaccctgacaagatcccatttgtcccaatctctggatttgagggtgataacatgattgagaggtctaccaaccttgnnntgtacaagggtcccactctccttgaggctcttgaccagatcaatgagcccaagaggccttcagacaagccactccggctaccacttcaagatgtcttcaagattggtggcattggaactgtccctgttggtcgtgttgagactggtgtccttaagcctggtatggtagtgacctttggcccctctggtctgaccactgaaatt

SEQ ID NO: 216184 - DNA, 297 bp, Gossypium hirsutum
ggggtattgaagttaagtctggacagcctattaaagcagatcctggtgctaactacgttatccatctttcccaggcttcacttggagagtccaagaacaaagcagaatccgttccactctatgtgaatgttgatgggaagaaacttattctgggaaccctttcccaccagagttgccctcaattatcttttgatttagtatttgacgaagagtttgagctctcccacaactggaaaaacgggagcgtatatttcctcggttacaaaactttcataccagaggaaggtgatgattttg

SEQ ID NO: 216185 - DNA, 436 bp, Gossypium hirsutum
  unsure (1)..(436): unsure at all n locations
acccacgcgtgcgnccgcttgttgtaccacaaacgtatccatttatcctttgccaatgagcaccaaaaggcgtggtgcggggatagctggccggaaaatgagtcagggggcattcaagaaggtccttgagaaacttgcagttgaaaattacaacttcagtaatccgattgatttgaggagtcattgggcaagacacggtaccaacaagtttgttactatcgtaggtttaatattggtggtaatgatagttgaactccatcaattatggtctgcttcacttgtatatattcccatggccatctttgttcgaaccttgtagtttttcatttgtgctcatgctttaagaacatcccgtttattccggtttaaagttgtggacgagtttttagttgttggattttgttccgatattcttctttcgccacccggaaagtgt

SEQ ID NO: 216186 - DNA, 297 bp, Gossypium hirsutum
cttttaataagctgaccgacggcggtgcaacaactccggctggtctcgttgccgcctctctagctcacggatttgcgcttttcgtcgctgtatccgtcggcgctaacatctccggtggccatgtcaatcccgccgttacattcggtgctttcgttggcgggaacattactcttttacgtggtatcctttattggattgctcaactccttggctcaaccgtcgcttgcctgttacttaagttcgccactagtggcctgggagtaccagctttcggactatcatccggcgtgggagcaa

SEQ ID NO: 216187 - DNA, 296 bp, Gossypium hirsutum
cccacgcgtccgctttgctacaaggaaatttaacaaggcactgcgattcctgcttgagacttgaaaagatgcttgcaatcaatggcatgtgtgaagggaaagaatgttcttaggaaagaacctatgaggaaagatattggcgaggatgattcattttttgttaatgaaaagtttgcaagcaaattttacaaggtgaaggtaggaactgtggttgcacaaaaggaatcagaacctgaaaagcaggagacccgacaaagagtggaggaggacaggaagccgcatattgaagctgcaat

SEQ ID NO: 216188 - DNA, 388 bp, Gossypium hirsutum
cttttcttctgcttctggtcaagccaatatcaaaagacttcccttttagctcacgactcctctcttgagtactataatgggtaaggagaaggttcacatcaacattgtggtcattggccatgtcgactccgggaagtctacaaccactggtcatttgatctacaagcttggtggtattgacaagcgtgtgattgagaggtttgagaaggaggctgctgagatgaacaaaaggtcatttaagtatgcatgggtgcttgacaagcttaaagccgaacgtgaacgtggtattactatcgatattgccctctggaaagttgagactaccaaatactactgcactgtcattgatgcccctggacaccgtgacttcatcaagaacatgattact

SEQ ID NO: 216189 - DNA, 229 bp, Gossypium hirsutum
ataagtacatcatcataacatttgcattggtttacacaatgattgctaccgcatatgacccaaacaagtgatcactcaggaccattacatcccattgccatcggcttcattgctggtgccaacatattggccactggtccattatctggtggatccataaacccaaatagcttcttatgaccaataataacctagagcggacttcaactgcatatggatctactggatg

SEQ ID NO: 216190 - DNA, 428 bp, Gossypium hirsutum
cccacgcgtccgcatgattctcatggtgtgcatgacgatgatgagtgcacccaaggcagccaaagccgccatcacgtgcagcgacgtggtgaaccacttgatcccgtgcttgtcctacgtacaaaacggcggtacacccgctgctgcatgctgcagtggggtaaaagcactctacggcgaggttcagacctccccggaccgccaaaacgtgtgcaagtgcatcaaatcggcggtgaacggaattccgtacaccatcaataacctcaatctcgcagccggcctacctgctaaatgtggtctgcaactcccttacagcatcagcccctccactgactgcaacaaggtgcagtgaggttgatgatgatgatatggaaggagtggaagaaggttccagctcatctagataaagtagctagctaagggtaaat

SEQ ID NO: 216191 - DNA, 440 bp, Gossypium hirsutum
cccacgcgtccgaaatttgcccccaaatatcccaagtgtacccaactctttcatttaccggcgtgggttctctgaaaactcaagcattccagtttctttctccttcattaatccaacaccaaattcaacccaaacgcaaaaatatccatggcagtaaaaaattcaacctctgctcatgccaaacgctctcggaaaaaagctgctgcttcatcttctttgatccccaaattcatgaaaaaccccataacaacaatggcgttggctttactcatcattgactccctcctcgtctacttcatcatcgtatacgtcccttatacgaagatagattgggacgctcacatgtctcacgtaagtgggtttcttggaggagaaaggtattataagaactcgaaaggagacactggaccgcttgtttacccagctggtttcctttatgt

SEQ ID NO: 216192 - DNA, 445 bp, Gossypium hirsutum
gaaacgaaagggtactcaagggcttattgagattgagaatccaaatttggccaaacaaaagaatgtcaaagctaaagatgttgatatggggagaacaactgaactatcaaggcgtgaaagagaggaaatagaaaagcaaaaagcacatgaacgatatatgaagctgcaggaacaagggaaaactgaacaagcaagaaaagatttagagcgcttagccctgatacgacaacaaagggcagaagctgctaagaagagagaggaagagaaggctgcgagagaacagaagaaaactgaagctcgcaaataatccaggttgagaaaaatctgtgacagtttctctctttatcttctatattgacttctgcatctgtatacttgagctcttatcccataaaaaaaaagagtttggaatctgattgttggatattctaaaacataaatatat

SEQ ID NO: 216193 - DNA, 437 bp, Gossypium hirsutum
ttatttttctccctctcgataccagcttactttcatcagtatggcatctctccgaattggaattggtctgttccaagttattttcaaccatatattgtgacatcacatgggcctttccgcactaaatatgaaggggtaaattacattatgaacacattgctatcattacacatggtaatagctttcattgtggctgttatactcgacaacactgtacctggaagcaggcaagaacgcggggtttacgtatggtctgagtctgaagctgcaagaagggaaccagcaggcgtcaaagattacgagttgcctttccgggtcggtcggatcttcagatgggtaaaatgggttggtctttgacttgaacaccaacatcgcgaagagctggacgacaacgaccattagtaagacccattctctgtaatttatattgtagaaat

SEQ ID NO: 216194 - DNA, 432 bp, Gossypium hirsutum
acgctatttttctccctctccataccagcttactttcatcagtatggcatctctccgaatgcgaattggtctgttccaagttattttcaaccatatattgtgacatcacatgggcctttccgcactaaatatgaaggggtaaattacattatgaacacattgctatcattacacatggtaatagctttcattgaggctgttatactcgacaacactgtacctggaagcaggcaataacgtggggtttacgtatggtctgagtctgaggctgcaagaagggaaccagcagtcgtcaaagattacgagttgcctttccgggtcggtcggatcttcagatgggtaaaatgggttggtctttgacttgaacaccaacatcgtgaagagctggacgacaacgaccattagtaagacccattctctgtaatttatatt

SEQ ID NO: 216195 - DNA, 454 bp, Gossypium hirsutum
gaggtccgggccacgcgtacgggaacgccgacgactgggccacacggggtggtctcgaaaagaccgactggtccaaagccgcattcatagccgcatacaagagcttccacatagacgggtgcgagtcgtcggtggaagccaagttctgcgccacacagggaaagcggtggtgggaccaaaaggcattcgaggacctcgacgcctatcagtggcgcagactgcgttgggtccgcaacaagttcactatttacaactattgcagcgatagggtgaggtaccccacaatgtcgcccgagtgcaagagagacagagacgcttgagtcatttccatcaccagcgagtccaagttccccccttatattcttgactaccatatgagatccgtcattgtcctttagatttcaattgcttgttggccttcacttattgccacatcaatttcattatatgtaat

SEQ ID NO: 216196 - DNA, 428 bp, Gossypium hirsutum
cggggcacgcgcacgcgtacgcccacgcgtacggattaacaagtttttgattgtcttgatagagctgtgttgagggtgaggaagggtgaaaattcgctcttgaccattgcaccagagtacgcgttgaggtcatccgggtctaatcaggcattggctgtagggcctgtgaactctactgcaatctatgaaggaaacgtgctatcacttgtcaaggtaatgctattatgggatgccatctcccgaaagaaattcgaagcttctggtacaaagatggaagtaagcaacgtattattcatagcttgcaaatatgttagagcttctaagagatatgagaaggctgttaagcatattgattatgatactttcttcagtgaagaggagaaaaagcagtccacggcgttgaaggtagcttgcaatctgaacaatgc

SEQ ID NO: 216197 - DNA, 428 bp, Gossypium hirsutum
cccactcgttctcgtacgcatgtacagattcttgttatgagcctgtatcgtctattggggccgggaagggtgatactccacctcaaactattgaagtacattttgagttgaggaaatggcttcaggctaatgttagtcccgaagttgctgaatcaacccctattatctatggagggtccgtcactgctgctaactgcgaggaactatcatctcatcctgacacccatgaataattggatgctggagcttaacttaagccggagttcattgatatcataaaatcagctgaagtgaagaagaatgcctaacgttttcggatggaagctttgatagtacttacaatacctgctgcttgggaatggaaagtttaagatctgttccataataagagttttataaagaaaattaaatactaattttcaaggaat

SEQ ID NO: 216198 - DNA, 325 bp, Gossypium hirsutum
tcgcgttatcattgctgttcaaatcacgactcttgcaataaaccatgaacccgctgcaatgcgaaacggggctgattagacaatcttctatacctacagtatttaacgataccaagatactgtatatactcattcctttagacacatctatatacaatgtgatatatatggtactatggattacatattctataacgccgacgatgcttttgataactgcaacatatatgctgttcctccgtttaatggccaaatcaatgccattactgctcagagtcggacgaatacaaaccacgacacaggcacatctattcataactactac

SEQ ID NO: 216199 - DNA, 425 bp, Gossypium hirsutum
gaatacccctgaagttgttcgtgtttacattggctcttttaacgataaccaaattaacggagctgatgttgatcaattggggcaagacctttttgagaaagaacaagatgatcttctcaaggacttattagacattccaagaaaggcttgtgatcgtcggatcaatgaatttgtgaagcgtgctagagctgcaaaaattaatgcttatatagttagccatctcaagaaagagatgcctagtatgatgggcaaagctaaagctcaacaacggcttattgataatcttcaagatgaatttgccaaggtccaacgtgaataccatttgccgccgggtgatttcccgagtgttgagcactataaggaggtgttgaataattacaatatagataaatttgaaaaactgaaacccaaattggtacaagccg

SEQ ID NO: 216200 - DNA, 454 bp, Gossypium hirsutum
gcttcttggtaaccaagatggttgtacttgcggcttcaattgtatgcaagtctggaaaagtgcttctctccaggcagttggtggacatgactcgcataagaattgaaggtcttcttgctgcttttcctaagttggtgggaacaggaaagcaacacacatatgttgagactgagaatgtgcgatatgtttatcaaccaatagaagctctttatttgcttcttgtaacaaacaaacagagcaacattcttgaagatttggagactttaagactgctctccaagctggtaactgagtattcttactctctagatgaggagggtattggcaagactgcttttgaactgatctttgcttttgatgaagtcatttgtcttgggcacaaggaaaatgtgactgtcacacaagttaagcaatactgtgaaatggagagtcatgaagagaagttgcacaagct

SEQ ID NO: 216201 - DNA, 436 bp, Gossypium hirsutum
gaaatctttcacagttacatcctgccgtgtagcaacagatttgggacttgaagctgttggaaaaagttgcccgaatttgaagcagttatgcctcagtaaatgccctttcttatctgataaggggttgtcgtctttagccaaagcagccagttcactagagtgcttgcaactggaggagtgccacagaatcactcagtttgggtttttttgctcccttattaactgtggtgcaaagttgaaggttatttcttttgcgaactgtttaggcattaaggacctaaactcgggattgccacctctatccccttgagaatcccttagatctttgtccatccataactgccctggtttcggtgatgctagcttgtttgcgttggggaagttgtgccctcatctgcagcatgtggagttgtgtgggcttcatggaataacagat

SEQ ID NO: 216202 - DNA, 421 bp, Gossypium hirsutum
  unsure (1)..(421): unsure at all n locations
cggnttggaattcccgggcacgacgccacgccttctaatggaaccacaaagcttgttctctgggttttgctcaaactcaactaccccagggtatagaaagtcctcaaaatccattatcttcctcaccaccttctatttctattccttgtttcaatcaatccaaacatgaagtttgttttgaaatgcaataactcctatcttcacaaagagtcgaggtcagtaagaagattactgtgtaaaaacagtgtagaaaaagtaagtaatcttgtctctgagaaagaaggttcaaaatcatgggttaagcggaaaacgctagctgcttttgactctggtggaggctcgaatttcaggtcaattaaccaagcatgcgtcgaaagctttgtcaatggagatgttgtaattttgggcactaataaacatg

SEQ ID NO: 216203 - DNA, 412 bp, Gossypium hirsutum
atcgaattcccaatgccttttggaagagttatgagtgcaaccgaaagctatattcacgggctagacgagaagaccagtgcatcgttgaaatttacggtgttgaaccctaagggacgcatttggacaatggtagctggaggaggtgcaagtgtcatctacgctgatacggttggagatcttggttttgcttctgagctcggaaattatgcagaatacagtggagcacccaacgaagaggaagtattgcagtatgccagagtagttattgattgtgcaaccgcagaccctgatggtcgcaaaagagccctcgtaattggcggaggaatagccaactttactgatgtcggtgctacatttaacggcattattcgagccttggaggagaaggaatcaaagcttaaagccgctcgga

SEQ ID NO: 216204 - DNA, 443 bp, Gossypium hirsutum
ttgagacgtaaaagttagacaatggagcatacattcatcatgatcaagcctgatggcgtgcagaggggtttggttggtgaaatcattggcagatttgataagaaaggtttctatttgaagggtttgaaactcatcaccgtggatcaatcttttgctgagaagcactatgcatacctctctgcaaaacccttctttaatgggctcatagagtacattatctctggtcctgttgttgctatgatttgggagggtaagaatgttgttaccactggtcgcaagattattggagccacaaaccctgctgagtctgctcctggaacaatccgtggcgactttgcaattgacattggcaggaatgtgattcacggaagtgattcggttgagagtgctaagaaggaaattgcattgtggttcccagaaagccctgttaactggcagagcag

SEQ ID NO: 216205 - DNA, 391 bp, Gossypium hirsutum
cccacgcgtccgctcttgggctcttgttacttaacctagggctgctctttatgggccttttctctctgttcttttgtccctttgctttacttctttttgcttccatgtcgcttagaggattcagtcggccaaatgctacatcaggcatggtcgtttctgatcagaccaaggatactttcttggagctgaataggaagaaagtctatcggcatgtgatctataggatcgatgagaagataagggaggttgtggttgagaaaactggtgcccctgctgagacctattatgacttcactacatctctgcctgagactgattgccgacatgccgtctacgactttgattttgttactcgtgagaattgtcaactgagcgagattttcttcattgc

SEQ ID NO: 216206 - DNA, 438 bp, Gossypium hirsutum
cggacgcgtgggcaagttcataatgtctcttggtttaccggtggcggctacggtgaactgcgcggacaacactggggccaagaacctttacatcatttctgtcaaaggaatcaaagggcgtctcaacaggctcccatcggcttgcgtcggtgacatggtcatggccaccgtaaaaaaaggaaagcccgatttgaggaagaaggtgttgcccgccgtcatcgtccgacaacgcaaaccttggcgtagaaaggacggcgtctacatgtacttcgaagataatgctggtgtcattgtcaatcccaagggagaaatgaaaggatctgctatcactggtcccattggaaaagagtgtgctgacctgtggcctacaattgcaagtgctgccaatgctatagtttgaaaggtttccatggttttgattgctacttgtgatgttat

SEQ ID NO: 216207 - DNA, 434 bp, Gossypium hirsutum
tctactgcaattgaattgttcactctattaattattgtctttaatgatatttattgtcctttcagtgatatattgctttgcttgctatgtatattcttctctgaagtaatgtcttctgttttctgcataccagaaaggatcttttaatgttcacttatgcttacctcagactcttgaggctataaagaggatatgtccaaaacgagctctattaatcggaatgacacatgagttcgatcaccacaaggataatgagtttcttatggaatggtctgagagggaaggaatccatatacaacttgcacgcgacggtttgagggttcccatagacctataatgagaagcctctcaaatgcaagtgctgagaagatagcatccatccaaagaagctctttaccaacccagtacatgtcaaacagagatacatggtgtgc

SEQ ID NO: 216208 - DNA, 439 bp, Gossypium hirsutum
atttcccgatccattggcgatgtatatttgaagaaggccgagttcaacagggagcctttggatccgaagtttcgactccgcgaaccttttaaaaagccaatattgagtgcagacccgtctatatcagtgcacaagctgctaccacacgataaatttgcgatctttgcatccgatgggctctgggagcacttaaccaatcaagaagccgttgacatagttcaaaagcattcacgaaccggaagtgcaaggaggctcgtaaaaacagctctacaagaagcagcaaaaaagagagaaatgcgatattccgacttgaagaaaatagaccgtggcgtacgtcggcatttccacgatgacatcacggtaatcgtgctgttccttgactcgaacctcatcagcaaggctagctccgtgaagggtccgaacatatcggttagagggg

SEQ ID NO: 216209 - DNA, 435 bp, Gossypium hirsutum
aagaaatccaagttgggtttcactgtctacccatcaccccaggtctccacatctgttggtgagccctacaacagtgtcctctcaactcactcccttttggagcacactgatgtggctgttcttcttgacaatgaggctatctatgacatttgcaggcgctctcttgacattgagcgacccacttacaccaatcttaaccgtcttgtctcccaggtgatctcctctttgactgcttcacttaggttcgatggtgccttgaacgtggatgtaacagaattccagaccaacttggtcccttacccaagaatacacttcatgctttcttcatacgctccagtcatctctgctgagaaggcttaccatgagcagctatcagttgctgaaatcaccaatagtgcctttgagccctcatctatgatggccaagtgtgatcct

SEQ ID NO: 216210 - DNA, 420 bp, Gossypium hirsutum
ctccaattgttcatcccttcaaaaaaaaaaaaactaaaaatccagcagtgaggtgcagggaaacagaacacaaaatggcgacagttccaggacagttgatttgggaggtagtgaagaagaacaattgttttttggtgaaacaatttggaagaggaactgctggcgttcgattcatcaaagagcccaacaatctctacaatgtcaactcttacaaacactctggtttggcaaacaagaaaactgtcaccattcatcctgcaggcaaagaccagtctgtactcttagccacaaccaagtctaagaaacagaacaagccttcgagcttgctccataagtctgtcatgaaaaaggagttccctaggatggccaaggcagtcaaaaaccaggtgacagacaactactacaggccggatttaacaa

SEQ ID NO: 216211 - DNA, 430 bp, Gossypium hirsutum
caagttggttactggaaagcttagagcaatgcttcagagatcagacgaacaagttaggagcttgaaaaaacagagcacgttcttgagtcaattggctgccaaaacaattcccaatgcgatccattgcttgtctatgcgtttgaccatagaatactatctccttcccttggagaagagaaagttccctagaagtgagaacttggaaaatccaaacctctaccattatgctctcttctctgataatgtcttggctgcatcagttgttgtcaactcaactatcatgaatgccaaggatccttcaaaacatgttttccatcttgttaccgataaacttaattttggagcaatgaacatgtggtttctgttaaatccccctggaaaggccaccattcatgttgaaaatgttgatgaattcaagtggcttaattca

SEQ ID NO: 216212 - DNA, 435 bp, Gossypium hirsutum
atttttcctgaggataagagagacttgtcaatttggcctaaaatccccagcgaatacactgaagttacaagtgagtatgcaaggcaactgcgaggcctagcgagcaaaatactttcagcactatcaatttgcttgggattagaagaaggaaggctagagaaggaagttggtggcgtggaagagcttcttcttcaattgaaaatcaattactaccccaagtgtccacaaccagaactcgctctcggtgtcgaagctcacaccgatataagtgcactcactttcattctccacaacatggttcctggcctccaactcttttaccaaagcaagtgggtgaccgctaaatgtgttcccaactccatcatcatgcacattggagacaccatcgagatcctcagcaatggaaagttcaagagcattctccacaggggtctg

SEQ ID NO: 216213 - DNA, 328 bp, Gossypium hirsutum
gaaccagtcaacgaaccttctcttgacaattgtttcatatcaacaagttatgatgctacaacacattttgaatcaactgtcagtgatgtacttaacatgtataccatgataactggaaaggttcttgacctcagtgtggatttgagtgctgctagtgctgcggaagaataattaccctgaagcatggtatttgccaatgtttgtgcttgtttaagcttcttaacagtgttgaatgttgctggtgggatttatgtctattacaccatgtttttttttactactcaagacactatatttaatgatttgatgatatttaaacgtttgttgg

SEQ ID NO: 216214 - DNA, 308 bp, Gossypium hirsutum
accacgcggacgcggacgcgtgggctgtctcctttgtagctttattgtttattagacgaagcaaagcctccggcatggttctgtaatctgtcaaggaatgtcactaggctttaatgatcgctaacttcattgctttgatgtatagaatactagaatatatctatccattaaaatattgtaccttatgaaattaaaggcactgagattcacccttcatttcctatgactatattttaacctctaacaataaatctctaccaccatacacttaaacttctgaagtattacacattataatacattttcat

SEQ ID NO: 216215 - DNA, 436 bp, Gossypium hirsutum
acggtgatgtggatatcaggaaggatctctactgtaacattgtgctcagaggtggttcaaccatgttccctggtattgcagaccgtatgagcaaggagatcactgctcttgccccaagcagcatgaagatcaaggttgttgcaccaccagagagaaagtacagtgtctggatcggaggatctatcttggcatcactcatcaccttccagcagatgtggatttccacaggtgagtatgatgagtcgggtccatccattgaccacaggaagtgcttgtaaatttacaagtcattttatggtgaggtacatgttctggtaggtggcttttactgtcatgtgtcaagtgaactcaaggtcgggttgatgtgggaaatggattattgaaagagggttgtactttgatcttgatgtaatattagccattcattctgctgtga

SEQ ID NO: 216216 - DNA, 395 bp, Gossypium hirsutum
ctcaatgacccgagtcctaagggctctgatcgtcccccgaaggagacaatattgctcgacggctgtgattttgagcattggctcgttgtggtggagccccctaaagaggatgctactagggatgaaattattgatagttatatcaaaaccctagctcaagtagtgggcagtgaagacgaagctagaatgaaaatttattcagtttctactcggcattattatgcctttggagcccttgtttctgaagagctctcgtacaagatcaaggaacttcctggagttcgttgggttcttccagattcttacttggacgtgaaaaaaaaagattatggaggtgaacctttcattaatgggcaagctgtgccttatgatcccaaataccatgaagaatgggt

SEQ ID NO: 216217 - DNA, 431 bp, Gossypium hirsutum
cggacgcgtgggttcaggtttatcctaaatgctggacttcaattttggtctcattggagaacaaaggaatgtggaacttgaggtcgcaaacctggtcaaagcggtacttaggccaagaagtctatcttagagtctggaacgacgagaaaagcttgtatactgaaactgatattcctccaaatgcactattttgtggcaaggcagttcaatcttagaacaccattaatgtcgtcttggtgtaatctacatcagctaatttattttctgatttttttgttctttttttaggagggtgggactgtttaggaagggaaataagacttaaaaatatagtaaatttattgaggctagattttaaaaaaaaattatattaaatcacaataatgagtttcttttatttatcatgtataaaataatgtggtgcgtgccat

SEQ ID NO: 216218 - DNA, 434 bp, Gossypium hirsutum
cccacgcgtccgcccacgcgtccgcccactcgtccgctctcaatgacccgagtcctaatgactcgaatcgtcccccgaaggagacaatattgctcgacggctgtgattttgagcattggctcgttgtggtggagccccctaaagaggatgctactagggatgaaattattgatagttatatcaaaaccctacctcaagtagtgggcagggaacacaaacctagaaggaaaatatatccagcttacactcgcctttttaggcctgtagagcccttgtttctgaagagctctcgtacaaaatcaaggaacttcctggagttcgttgggttcttccagattcttacttggacgtgaaaaataaagattatggaggtgaacctttcattagtgggcaagctgcgccttatgatcccaagtaccatgaggaatgggtga

SEQ ID NO: 216219 - DNA, 426 bp, Gossypium hirsutum
gaagagttacgaatttaaccaggtgaaagtccaggccggatctgttgttcctctagatgttggtccagccacacagttggatatcatagcggagtttgagatagataacgaggcgttagagaaaacaacagggtccaatgtaacattcagctgcagcagcagcggtggaactgtagaacgtggggcattgggaccatttggtctgttggtgcttgcggatgacagcctcagtgaacagacacctgtatacttctacatcgccaaaggatccgatggcaaactcaagactttcttctgcaatgatcaatctcgatcatctgtagcatctgatgttaataaacaaatttatgggaacttggttccagtactggagggcgaaaaattatccctcagagtcttggtggatcattcgatcgttgaaagctt

SEQ ID NO: 216220 - DNA, 314 bp, Gossypium hirsutum
acgctcctttgcgccgcattcgctatcaaagctccatttcaccggcgaccatgcctgcgcacaagacgggcatgatcaagaagaagttggccaagaagatgaggcagaataggcctatcccttactggatctcgatgcgcactgataacaccatcaggtacaatgcgaatcgtatgcattggagccgcaccaagctagggttctaagcaccatgagctaattagggttcaagcttttcttttttcccaagtttattggcagacattgtgatgtggggcttaatatatgaacctaccacggatgaaggatcctta

SEQ ID NO: 216221 - DNA, 476 bp, Gossypium hirsutum
atttggatgctctccttgatatgtccactgatgagcttgtcaagctctttcctgcccgtgctcgcagaaggttccggaggggtctcaagagaaagcccatggctttaatcaagaaacttcgcaaggcgaaaagggaggctccaccaggtgagaagccagaaccagtcagaacccacctccgaaatatgatcatagtacccgaaatgattggtagcattatcggtgtgtacaatggcaagacattcaatcaggttgagatcaagcccgaaatgatcagccattaccttgctgagttctctatttcgtacaagccagttaagcacggtagacctggtatcggtgctactcattcttcgaggttcatccctctgaagtgaagccctttcatgctgcttggagcctcaatttggggtttactatttgagagttaaattttgtttgttgcactcttagtaatgaaaaattcacatcctttt

SEQ ID NO: 216222 - DNA, 328 bp, Gossypium hirsutum
tcgacacacgcgtcagatggcgatgcttactatggtatgttcactgatgttctgggcaagctatctttgggccagcctatcagaaggttccggagggaactcaactactaagctacatcttacgctatgaacaaaactcttgcacgatggaaaagggaggcctcaactgctcagacgccataaatattcagaaccttgctccgaaatataaccattgaagcagaaactatagacagtataatcggtgtgtccaacgctgatactttcaatcacgttgatatcaatcgcgaaactattagtcgttatcttgcaaaccgatctatttaac

SEQ ID NO: 216223 - DNA, 370 bp, Gossypium hirsutum
  unsure (1)..(370): unsure at all n locations
cacgattgataatgttaaggccaagatccaggataaggaaggaatcccaccagaccagcagaggctgatttttgctgggaagcaacttgaagatgggaggacccttgcagattacaacatccagaaggaatccactttgcacctggtccttcgcctccgcggtggcttttaagtgtggtgccgaacacctgtccagttattgctgatgtgttaagtttgtatgtgtgtgggtcgtatgctaatgtgagctggccactaggctggggaagcttacgagtaaaaataattgcttttatcaacgcttttagttgttctttaggtttcaaggttctatggcattgaatanatatgtttttgcattttgcagtca

SEQ ID NO: 216224 - DNA, 347 bp, Gossypium hirsutum
gattttattatttcatcagtgaaagcaagatgtcttcctagagaaagtttggatgagcattttgtaatacacatggagggtgtaaatgttttggctgtcaattatggctctcccgggtcatgcccttatcctcggaatttgaaacttcctgcaaagtggtccttcagttcacatacagttttgaagaacagtggagcaggcacccagggctcctgtatttactgaagaaattcttggtggagagaatgctgaaggtgaagttgtgcagccggctgaaaggtctttttgggctaatactggatgtattgatcctctggactcatgtatgatgcatacacagcatgaca

SEQ ID NO: 216225 - DNA, 466 bp, Gossypium hirsutum
cgacccacgcgtgcggagaatgagaatacgatctttcgatagaatttgcgtctgggtgttcgatatggaaatatagcaggtccttatcatggtggtgtatggaagatcagggtggaactcccagatgcttatccttataaatctccatcaattggctttataaacaagatctatcacccgaatgttgatgaaatgtaaggttctctgaatgttgaaatgctctatatttggcttttaaatgctccgctattgtttaatatgtctttgaactatgagtatcacgtctggtacagtttgtttggatgtcatcaatcacacttggagccctatgtgcgacctgaaaaatgtcttcgaagagcttcttcctcaactactttgatatgccaaccgatcggatccattgaatgcagaagctgctgctcttatgatgcgtgatcgtgctgcctatgaacacagagttaaagag

SEQ ID NO: 216226 - DNA, 459 bp, Gossypium hirsutum
acactacgcgtccggagacggtttttcctgatgctatcaaatgggaaatccgcagggatgaaaccaggagaaatcccagatctgggctagttttgacgggaagtacagatagttcaagtatgattaatttggaagtggatcataaatatgatggttctaggcaaactttctatgccagcaacaatacaaagccagcagtgaccaccattgtcggttacaaagacatgtgcttgctagcaagtggaagtcgggtgtggctggaagactgcatgagcaacgatgctgaacaacaatgggcgatatatccagatgggaccatcaggcctcaaaagaatagaaacgggtgcctcaagtattcaaatgattatagtgggttgcacaacgtggctacgtgtgatggatttgttgaggaacgatgggtatttagaagcgatggaaccattttgcataaaatgactg

SEQ ID NO: 216227 - DNA, 394 bp, Gossypium hirsutum
  unsure (1)..(394): unsure at all n locations
gtcggcggcggctcttgtaatcaaggcgttaattgagccagagagggataggagaaagaccaagaacatcaagcacaacgggaacattaacctcgacgacgtcatcgaaattgccaaggtaatgaggccgaggtcgatggctaaggatttgagagggacagtgaaggagattttgggcacgtgcgtctccgttgggtgtactgttgatggaaaagaccctaaggatctgcagcaggagatcgatgatggagatgttgatgttcctttggagtgagaaagcttgttcttctcgttttttacgtctatcctcatgcttgcctcttttagaaaaatgttcaatataaagatnttgaacaatttgcttatatttaattcagaggctgttttgaagttt

SEQ ID NO: 216228 - DNA, 396 bp, Gossypium hirsutum
gtcggcggcggctcttgtaattataggcgttaatttagccagagagggataggggaaagaccaagggcatcaagcacaacgggaacattaacctcgacgacgtcatcgaaattgccaaggtaatgaggccgaggtcgatggctaaggatttgagagggacagtgaaggagattttgggcacgtgcgtctccgttgggtgtactgttgatggaaaagaccctaaggatctgcagcaggagatcgatgatggagatgttgatgttcctttggagtgagaaagcttgttcttctcgttttttacgtctatcctcatgcttgcactcttttagaaaaatgttcaatataaagattttgaacaatttgcttatatttaattcagaggctgttttgaagttt

SEQ ID NO: 216229 - DNA, 254 bp, Gossypium hirsutum
ggattttgtggtgcggcgatgtcactgctgataggttgaaatggggcaatgatttcttgagtaagaggataaagtcaggttcaacctctgagatctctccagaggccttgagaaggatgaaaagggttaagaagttaacaaagatgtcagagaaagtggccactggaattctttcaggtgtggttaaagcgtctggattcttcacaggttcaattgttaactccaaagttggtcagaatatttttcaacctgct

SEQ ID NO: 216230 - DNA, 445 bp, Gossypium hirsutum
  unsure (1)..(445): unsure at all n locations
gcgcccacgcgtccgaccacgcgtccgcccacgcgtacgcacaaatgcggcaggtgggaagcacggatggggcagttcctaggcaaaagggcttatgacaaggcagctatcaaaagtaatggacgggaggcagtcaccaactttgagctgagtacatatgaaggggagatggtctttgataccaggaacaaaggcaatggtcacaaccttgatctgaacctgnggatatctccacctgttagcgatggtcccaaggaaaaggaaaatgcggggcatctccaaatgaataacggaaagagtttaagggcagagaaccctgcagctgcaacatttagtgttccatctttccaagggttagcggggacttcagatcagcctattttctggaatagtgcatatccgagattcttccctagtgaggaaagaactatggtgaaaccggttg

SEQ ID NO: 216231 - DNA, 285 bp, Gossypium hirsutum
cgtgcgggatgctgtggtgcggcgatgtcactgttgtttggttgaaatggggcaatgacttcttgagtgagaggataaagtcaggttcaacctctgagatctctccagaggcctcgtgaaggatgaaaagggttaagaagttcacaaacatgtcagagaaagtggccactggaattctctcaggtgtggttaaagagtctggattcttcacaggttcaattgttaactccacagttggcaagaaattatacaacctgctgccagtagacaacgttcttgattcct

SEQ ID NO: 216232 - DNA, 387 bp, Gossypium hirsutum
cccacgcgtccgatggggtccaaagaggcctggttggtgaaatcattggcagatttgagaagaaaggcttctatttgaaagggttgaagctcatcagtgtggatcgatcttttgccgagaagcactatgctgacctgtctgcaaagcccttctttaatgggctcgtagagtacattatctccggtccggtcgttgctatgatttgggaaggtaagaatgttgttaccacaggtcgcaagattatcggagccacaaacccagctgaatccgctccgggaacaatccgtggtgactttgcaattgacattgggaggaatgtgatccatgggagtgattccgtcgagagtgcaaggaaggaaatcgccctttggttccctgaatgccctg

SEQ ID NO: 216233 - DNA, 439 bp, Gossypium hirsutum
cccacgcgtccgggaaacactgccaatgttattcgttatttccccactcaggccttgaactttgccttcaaggattacttcaagaggcttttcaacttcaagaaagacagagatggttactggaaatggtttgctgggaacttggcatctggtggtgcagctggtgcttcttcccttctctttgtctactccttggattatgctcgaactcgtcttgcaaatgatgcaaaggctgcaaagaagggaggagagagacaattcaacgggcttgttgatgtctacaggaaaaccctaaaatctgatggtattgccgggctttaccgtggtttcaacatttcatgtgttggaatcattgtttaccgtggtctatattttggaatgtacgactctctgaagccggtgcttttgactggaagcatgcaggatagtttcttcgcta

SEQ ID NO: 216234 - DNA, 452 bp, Gossypium hirsutum
ccgggcgaccagcgtcgcccacgcgtccgatggggtccaaggaggccttgtggtgaattcatcgcagatttgagaagaaaggcttgttttaaagggttgaagctcatcaggtggattatcttttgccaagaagcactatgctgacctgtctgccaagcccttctttaatgggctcgtagagtacatgatctacggtccggcctgcgctatgatttgggaaggtaagaatgttgttaccacacctcgcaagattatcggagccacatacccagctgaatgcgctccgggtacaatacgtggtgactttgcaattgacattgagaggaatgtgatccatgggagtgatctcgacgagagcgcaacgaaagacatcgtcctttggttacctgaatgcccatttaactggcagagcaaactttactcttggatctacgagtagaaatcatttggta

SEQ ID NO: 216235 - DNA, 149 bp, Gossypium hirsutum
gggaaagtaaaaggagggttttgaggagggtgaaagatggctggttacagggcataggatgactacgacttccttttcaaggtggtgctgatcggtgattcgggagtaggcaagtctaaccttctctcaaggttcaccaggaaacgagt

SEQ ID NO: 216236 - DNA, 481 bp, Gossypium hirsutum
gcagtccccggcgcgacccacgccttcgaaaaattttcttgctggacctggagcttcaatggttttcaactgtgtgattgaaatcccaaaatgtagcatggtgaaatatgaacttgagcaagaaaactgttctgatcaaggtcgatcgtgtgctttactcatcaattgcgtattctcacaactacggattcatacctcgcactctttgtgaagacaatgatcccatggatgtcttgatcattatgcaactacgctttttgatccacatctgtctctaaaatatcaatctgattcatgatcgagaaccatgttacatgctttggaactctcttgtaatgcctccgattgcctagtgcactatgtttgacacaggattataaattccatacatcggccaatgccacatgcaatacttataaactatcattgatcatagctctaaaaatttttatgatgtgactgatgctaccattaaaacata

SEQ ID NO: 216237 - DNA, 371 bp, Gossypium hirsutum
  unsure (1)..(371): unsure at all n locations
gaganccaggcgtgcggcgagcagtacaaggagggtattcgaggagggttaaagatgtctggttacagggcataggatggcgtacgactgccttttcaaggtggtgctgatcggtgattcgggagtacgcaagtctaaccttgtctcaaggttcaccaagaacgagtttagccttgagtccaagtccactatcggcgttgagatcgctactcgtaacttgaatgttgatggtaaggtcatcatggctcagacttgggacactactggtcaagataggtaccgtaccatcacaagtgcctattaccgaggagctgtttgagcgctactcgtgtgtggtgtgacccgacactccacgtctgagaatgtggaga

SEQ ID NO: 216238 - DNA, 463 bp, Gossypium hirsutum
cccacgcgtccgcccacgcgtccgggtcacttctctccgttcaaattcgctaagttattagatccagaagcttcttgggacaaggatcaattaggagatgtattgcattggattcgacaagttgtagctcttttctgtggcttgttatggggagcaatcccagtggttggaggcatttggatcttcatttttctggccatatccactggtattatatatggctattatgcaatgatactgaagatcgatgaagaagaattcggtggtcatgcagcccttctccaagaagggctttttgcttcaatgactctctttctgttggcatggattctcgtatacagcttggcccatttttgatacgtattttagcatcaactccgcttccctctgtttctaaattcacatttcaaggatctctttagatgaggaacaattcattatctctgaaaacagtgcgaaactt

SEQ ID NO: 216239 - DNA, 444 bp, Gossypium hirsutum
  unsure (1)..(444): unsure at all n locations
cccacgcgtccgtttgaagaatgtcagaactcaagtactacttaagcttataaaaccatatacgagaatccggatccctttcatatcaaaggaactcaatgtgccagaaaaagatgtagagcagttgttggtttccttgatcttggataatcgaatcgatgggcatattgatcaagtgaaccggctgttggagcgtggtaacaggtcgaagggtatgaagaagtacactgctatcgataaatggaacacacaactgaggtccctttatcaaaccgttaacaacagggtttattgagaaagcaaaaatgctatatgatataatccctttggctaaggtactcccctttctttttggggctacaagaatatgcttgctctcttgtgtcaggtgactntagataatctagattcgaaagttatgttttgttttggtagtcaaagttt

SEQ ID NO: 216240 - DNA, 417 bp, Gossypium hirsutum
cccacgcgtccgatttgctgaggactctgatttgagtgtgacaaccaggcttgcttgtggggctgctgctggaactgctgggcaaactgttgcttaccctctcgatgtcatccacagaagaatggaaatggtcggatggaaagatgctgcatcagttgtcactggtgatgggaggaataaggctcctcttcagtatactggcatgatcgatgcattcaggaaaactgttaggcacgagggctttggagcattttacaagggtctggtccctaattctgtgaaggttgtaccttcaatagctattgcgttcgtgacatatgaagtggtgaaagacattctaggagttgaaatcaaaatatcagactaaactggtaccatttctactcaatgtttttagggatgtgtgatgtttttgta

SEQ ID NO: 216241 - DNA, 345 bp, Gossypium hirsutum
gccatgcacatgctgggaagtggacccgtctttgagcgtatccaacctcatgccggaagagggtgcgttttacatgtggacggcactctgtacatacacacatggatgtacaagcatgtgcacagtgatcagcacgagtatgctactacatgtggactgacatctgaagatgctcaccctgccgagatattgaaccttgcctttgcaacaataattggcacagccatcactggccgacacgttattactatgtggttatagatgactgttaaagtcctagagacaggtgaagcacatagtgctatccattttacatggtgcgtctcaaacactctacttttatat

SEQ ID NO: 216242 - DNA, 457 bp, Gossypium hirsutum
cccacgcgtccgcccacgcgtccgcttaaatctctggatattcttggtcttggaactggaccagagatagagaagaagatcaagtatgctgaagttgtttcttgtgctataatatttggaagagagcttgtgaattcaccagccaacgtacttacccctgctgcattagccgcagaggcttcaaagattgcttcactgtacagtgatgttctgtctgcaaacatcttgaccgaagagcaatgcagggaattgaagatgggatcttatctcggagttgctgcagcatctgcaaatcctcctcattttattcatttatgctacaaaccaccaagcggacctgttaaaaccaagttagcattagttggaaaagggttgactttcgatagtggtggctacaatatcaagactggacctggttcctcgatcgaaaccatgaaagtagacatgggaggttcgg

SEQ ID NO: 216243 - DNA, 391 bp, Gossypium hirsutum
  unsure (1)..(391): unsure at all n locations
ggcgaaggcctaaaggtatttactcccgtgttaggaggaagttcaagggatgcactttgatgcccaatattggttatgggtccgacaagaagactcgccactatcttcccaatgggtttaagaaatttgtcgtgcataacgtccaagagctgcagcttctcatgatgcacaacaggacatactgtgctgagatagctcatgatgtttcaacaaagaagaggaaggaaattgtcgagcgggcagcacagttggatgttgttgtgaccaacaaattggctaggttgcgcagccaggaggatgagtgaacatctctccctgatggtcgattctgctttttggtgtatattttatttaccatntaggggttttctttcctgcaattcgatcaaat

SEQ ID NO: 216244 - DNA, 467 bp, Gossypium hirsutum
gggttgtgctgctgccttgaatcaagccggtgctcgcgtcattgtcaccgagagcgatcccatgtgtgcccttcaggctctcatggaaggacttcaagttttgacccttgaggatgttgtctccgaggctgatatctttgtcaccaccactggtcacaaggacatcatcatggttaaccacatgaggaagatgaagaacaatgccattgtttgcaacatcggtcactttgacaatgaaattgacatgctcggtctcgagaattatcctggtgtcaagcgcattaccatcaagccttaaaccgataggtgggtcttacctgaaaccaacaccggcatcattgtgttggctgaaggacgtctcatgaacttgggttgtgctactggccaccctagctttgtcatgtcatgctctttcaccaaccaggtgatcgcccagttcgagctgtggaaggagaaggcaaccggca

SEQ ID NO: 216245 - DNA, 442 bp, Gossypium hirsutum
  unsure (1)..(442): unsure at all n locations
ggcaagggtggcaaggggctcggcaaaggaggtgccaagaggcataggaaggttttaagagacaacatccagggcattactaagcctgccattcgccgtttggctcgtcgaggaggtgtcaagaggatcagtggcttgatctatgaagaaactaggggagtattgaagattttcttggagaatgtgattcgtgatgctgtgacttataccgagcacgccaggaggaagaccgttaccgccatggatgttgtttatgccttgaaaaggcagggcaggactctctatggttttggtggttaagtttaggatcattcttaagttcttaactgtaatgcctttagatcttgactctagatctatatcgntatgtacttgtttgtgtactcgagtgatgttataatgatttgtaaccctaagattgatcgaataattttcatttgca

SEQ ID NO: 216246 - DNA, 454 bp, Gossypium hirsutum
gacccacgcgtgcgggcaagggtggcaaggggctcggcaaaggatgtgccaagatgcataggaaggttttaagaggcaacatcgggggcattactaagcctgccattcgccgtttggctcgtcgaggaggtgtcaagaggatcagtggcttgatctatgaagaaactaggggagtattgaagattttcttggagaatgtgattcgtgatgctgtgacttataccgagcacgccaggaggaagaccgttaccgccatggatgttgtttatgccttgaaaaggcagggcaggactctctatggttttggtggttaagtttaggatcattcttaagttcttaactgtaatgcctttagatcttgactctagatctatatcgctatgtacttgtttgtgtactcgagtgatgttataatgaatttgaaccttaagattgatcgaataatttcatttgc

SEQ ID NO: 216247 - DNA, 321 bp, Gossypium hirsutum
cgtgcgggcagcgggtggcaaggaactcgcccaaggatgtgccaattttcataacaaggttttaagagggagcatcgggggcattactaaacctgccattccccgcttggctcggcgaggaagcggcaaacacgatccggggccttgccctataaagaaactacgtgaagccttcacgacatcctcggagaatgtgattctttatgctccgacttataccgagcacgccaggaggaagaccgtgaccgccatggatgatgcctatgcctcgcaaacgcaaggcaggacgctacactgtttcggtggccaagggtaggatca

SEQ ID NO: 216248 - DNA, 422 bp, Gossypium hirsutum
  unsure (1)..(422): unsure at all n locations
gcgcccacgcgtccgacaaacttacgccgcttccgtatagcagagctttcttcgacgagcagccatctgtaatcaatcatgggtcattctaacgtctggaactctcaccccaaaacctacggccctggctctcgcgcatgccgagtgtgtggaaaccctcatgccatcatcaggaagtacgggctcatgtgttgcagacagtgcttccgtagcaatgccaaggaaattggattcattaagtaccgctgaggaatgtttatatggctagaagttggaaacactttttggctagtatgaacctttttcgaaattgtagcaacttgtaagataacattgctgtgttttgctgaatatagtctaagagctcgaagttttgtttctgcanaggataatttgttgctttctcaatgaagtgatcatac

SEQ ID NO: 216249 - DNA, 464 bp, Gossypium hirsutum
accggcgcggagacccaggcgcgacgcgcacgcgtccgatttgtttcacatcctcttaacgatatcctctgtttgcagttaagaaaagcaaatcatggctgctaccacagtcccagccgccgcaaggcagctatctcctaaagaagccgatatccagatgatgttggctgccgaggtccatctcggtaccaagaactgtgatttccaaatggatcgttacgtcttcaagcgtcgcaatgacggaatttacatcatcaaccttggcaagacctgagagaagcttcagcttgcagctcgtgtaattgtcgctatagagaaccctcaagatatcattgtccaatctgcaagaccctatggtcagagggctgtcttgaaatttgctcagtacactggttgtcatgccattgctggaaggcacactcctggtacattcactaaccaatccagacatctttcagtgagcc

SEQ ID NO: 216250 - DNA, 435 bp, Gossypium hirsutum
caggaaaatgggaacgctgagaaaaatggaaagtattctgagcaaaagagctcgaagaagcagcggaatggttcagttcagccaaagaaaccatttcaaagagtgaatgtggatgaggtagaatttgttgatagcaggcttgaagataattcatactgggcgaaggatggtgctgaaactggatatggtgcaaaagcacaagaagttctaggtcaagtaagaggaaggggtttccggcatgagaagaccaagaagaaacgtggatcatacaggggagggcagattgatctgcagtcgcactctataaaattcaattattctgatgaggagtaaatgttgactttctagttggatgatgagcactgctgtaccctctaaccgtttgcattcatttgagtctattaagtggaactcaatggaactcaatgataatat

SEQ ID NO: 216251 - DNA, 446 bp, Gossypium hirsutum
gcagcttggatctttcaactcactcgagaactcggtcatcgctccgacggtaagaccattgaatggctgtcccgtcaagctgagccttatgtcattgctgccactgggtccggtacggcggcaccaccctcgccgcccatgagatctcttgtgcctctgggctcactacaacttcttcgcctaaggaatcgtgtaagctgcacccagtaggggtcggtagcggcgacgatgtggtgacggggatgtataccatgacaacgctgccaccaagttgccggctggacttgtgctagtcaatagggtttcagttttcagttgtatcaaaatatgccgtttacagcgttgcttttgcagctgacggtggaggttttgagagatattataatttataacaagaacaattataataattatataaaattgatttgcttttggttgatcgaatg

SEQ ID NO: 216252 - DNA, 423 bp, Gossypium hirsutum
gctagggcttttgctacggtaccctctctctatggttttacgatcttcaacgagttagcttcgattctgagtcgtttcgcaatgcctcggtattactgtgattattgcgatacttatttgacccatgactctccatcagttagaaagcaacacaatgcaggttacaagcacaaggcgaatgttagaacttactatcagcaatttgaggagcaacagacccagagcttaatagaccaaaggatcaaggaacatcttggtcaagctgcggctttgcagcaggttggagctgctttcaatcaacatttaatggctcagaggcctcgacttcctgttatggcgattcccggggctccattacctgtaaaccaaccaatggtcccagggatgaggccccctgttctgccaagaccaattccaggtgcc

SEQ ID NO: 216253 - DNA, 284 bp, Gossypium hirsutum
ggggagtgtttaacatttgaccaacttgctcttggagcacctattggacagaacacggctctgcttcgaggtccaaagaatgctcgtgaggctgagaagcacttcggacctgctcctggtgtgccacacagccacaccaagccctatgtgcggtcaaaagcaaggaaatacgagagggcatagaggaagaaggaacagcaaaggcttcagggtttgagattccaactgcactggaaaaaaagaaaactgatcatcccatcatgataatgggaatgcacaaagtt

SEQ ID NO: 216254 - DNA, 395 bp, Gossypium hirsutum
atttctggctacatgttgttggttcttgacaaatgcttaccttcgggaagaggctccaaatagtcatgttgttgaacaacgggttgaatggctgtatgcatttgatgtgcactgcaattctttcttcccgatgtttgtaatgctttacgtaatacattattttgtgtcaccgcttctggtagcccatggttttatacctgaacttctgtccaatctgctgttcatggtggcagctttttaactttaattaccttaccttttaaggtattaagtaccttcctttttggaaaaaaccaacttttttctttaaccaaatgggggcattaatggtctatcccctatcttgattttaagtggcttcaatccttcaagatattttatgaatatgtatttta

SEQ ID NO: 216255 - DNA, 458 bp, Gossypium hirsutum
aatggaaccacaaagcttgttctctgggttttgctcaaactcaataaccccattatatagaaatcctcaaaatccattatcttcctcaccaccttctctttcttttccttgtttcaatcaatccaaacatcaagtttcttttgaaatgcaatatttcctatcttctcaaaggttgaggtctgtaagaagattactgtgtaaaaacagtgtagaaaaagtaagtaatcttgtctctgagaaggaaggttcaaaatcatgggttaagcggaaaaggctagctgtttttgtctctggtggaggctcgaatttcaggtcaattaaccaagcatgcattgaaggctttgtcaatggagatgttgtagttctggtcactaataaacatgcttgtggaggtgcacaatatgctagagataaaggcatcccagttattttgttcccaaaaacaaaagatgaacctg

SEQ ID NO: 216256 - DNA, 438 bp, Gossypium hirsutum
cccacgcgttcggggtgacaacatgattgagaggtctaccaacttggactggtacaagggccctactcttcttgaggctcttgaccagatcaatgagcccaagaggccttcagacaagcctctccgtctcccacttcaggatgtgtacaagattggtggtattggaactgttccagttggtcgtgttgaaaccggtgtcttgaagcctggtatggttgtgacatttggcccttctggtctgacaaccgaagttaagtcagttgagatgcaccatgaagctcttacagaggcacttcctggtgataatgttgggttcaatgttaaaaacgttgctgttaaggatctcaagcgtgagtttgttgcatccaactccaaagatgaccctgctaaggaggctgccaacttcacttctcacgtcatcattatgaaccaccctgg

SEQ ID NO: 216257 - DNA, 406 bp, Gossypium hirsutum
cccacgcgtccgctcatatctctcctttgtttccccttttctctctcttttttcaaccctgaccctacctcaccaaccaggattcaacatgaagggaggaaaatctaagtcagatactaagagtgccaagctatccgtgaaatccaaagctggaaagaaatcggggaaggctgccaaggatccaaacaagccaaagaggcctgctagtgccttcttcgttttcatggaggagttccgtgagcaatacaagaaggatcaccctaaaaacaaatccgttgccgctgtcggcaaagctggtggagataaatggaagagcttgtctgaagctgaaaaagcaccttatgtagccaaggcagaaaagcgaaaggtcgagtatgaaaagaacatgaaggcctacaataagaga

SEQ ID NO: 216258 - DNA, 447 bp, Gossypium hirsutum
gttgctccttggcctgctcgtttgcaaaccccacccgatcggctgcaaagcatacatatggaatcctacatagctagaaaagaactcttcaaggctgactcaaaatactggaatgaaatattggcaagctatgttcgtgctctacattggaagaagtataaactaagaaatgtaatggacatgagagctggctttggaggatttgctgcagcaatgattgacaatcaactcgatgcttgtgttctaaatgtagtccctgttagtgggcccaataccttgcctgtatatatatgatcgtcgattaataggggtcatgcatgactggtgagagtcgtatgatacatacccacggacctatgacttattgcatgcagctggcctattctcggttgagaggaaaagatgcaatatgtctaccatcatgcttgaaatggaccggatattacg

SEQ ID NO: 216259 - DNA, 401 bp, Gossypium hirsutum
acatacccctatatgtatcgggctgcttccctagtgttggaacagaacgctcatgccgcacttgaggagatcagccgatctcttgaaggcatactcacatgtccgtgcgaagctcctgctcttgcttttgaagccatcccacgtagcttagccacacaatagtggaggtaatgagagctcgtgactatgactgctcctgcaggcaagcatgctgatggacaaaatgcatggatcggcatacatggccacactgctgcccttgctgacatgaaggcaacagagatttgtgacgcacacaatgtgaaggcgcagacatttaagacagcgatagaagcagcatgcatgcttatacgaatggatgacattgcaagtgggattaagaagaaacacgctcctggagc

SEQ ID NO: 216260 - DNA, 376 bp, Gossypium hirsutum
cgggccgaccgacgcgtgcgcccacgcatccggctcccggaggtggcgcttcagaattaaccgtttctgccacattgaagcagaagagttcatctgttggaaggcatagaaaagtggccgtatgaagctgctgctcttgcttttgaagccataccacgtactttggcacaaaattgtggagttaatgtgattcggactatgactgctctgcaaggaaagcatgcaaatggtgaaaatgcatggattggcatagatggcaacactggtgccattgctgacatgaaggaaagaaagatttgggacgcatacaatgtgaaggcgcaaacatttaagacagcgatagaagcagcatgcatgcttctacgaattgatgaca

SEQ ID NO: 216261 - DNA, 379 bp, Gossypium hirsutum
gcgctctgacatacccctatatgtatcgggctgcttccctaatgatgaaacagaatgttcaagctgctcttgctgagatcaaccgtgttcttgggtttaaacttgcattagaatgcatggaactccgattttgtctttatttagctattgaggattacaaagcagccattcgtgatgttcaggcaattctaacactttccccagattacagaatgtttgagggacgagtggcagcatcccatctccgtacgcttgtgcgtgagcatgttggcagttggacaactgcagattgttggatgcagctgtatgataggtggtcttctgttgatgatattggatctctcttccgaatctatcagatgcttgaatctggtggggc

SEQ ID NO: 216262 - DNA, 438 bp, Gossypium hirsutum
cccacgcgtccgcccacgcgtccggaagcttccactgaatcatgaaatactgtaccatttacaggatgtgttcaacttgctgccaaacctaaacgtaaatgacctaatcaaggcttttgcagtaaaaaccaatgatatgatgttggttatatatctgtcatctctcatccgaagtgtcattgcgctccataatttgatcaataacaagatgttaaacaaagaacatgagaaggctgaagatgctaagccaacaactgtccaggctacgagttgaatccgaacataaagtcctaatcatgtcaaaaacttgagcatagggtgctattaacttccataggatcctctattcttgagattttgtattcttcatagctcaatcagaagatatcagtaggcttaaaaaatttgagagttttctctttgtttccatacactata

SEQ ID NO: 216263 - DNA, 275 bp, Gossypium hirsutum
aattccaccagatcagcaaaggttgatttttgctgggaaacaactggaaaatggaaaggactttggctgattacaatattcaaaaggagtccactcttcaccttgttcttcgtcttcggggtgggttctaagccttaaagtcttccttaatgtgggttttctggttttacgtgaaagattgtgccctttgatggccttttaaataatttctagtctttgtttaccggttgcatctatgtatggtttctctttgaatggaatttgcatatttacct

SEQ ID NO: 216264 - DNA, 435 bp, Gossypium hirsutum
  unsure (1)..(435): unsure at all n locations
cccacgcgtccgagccgtcaaggttgtggttatcgtcgacactttcagacttcaggagcaacctgcttttgacaagaagcagtttgtgaccttcatgaagaggtacatcaagaacttgacacccaaattagagcctgaaaagcaagagtctttcaagaagaacatcgagggggctactaaatttttgatgtcgaagcttaaagatctccaattttttgtgggtgagagcatgcatgatgatggtagcctagtgtttgcatactacaaggacggtgccaccgatccaaccttcctctactttgcctatggcttgaaggaaatcaagtgctaaatggangtttcacccgataccggaccggctttgttatacctaaagacttagttttaattctagatataangagttcttaactatctatttagncttttttatct

SEQ ID NO: 216265 - DNA, 321 bp, Gossypium hirsutum
ctcgagttggaaagttctgatacgattgattatgtcaaggccaagatccaagacaaggaagggatccctccagaccaacagaggcttatctttgcaggtaaacagcttgaagatggccgaactcttgcggattacaacatccagaaagagtctaccctccaccttgtccttcgtcttaggggtgggatgcagatccttgtaaaaacccttactggtaagaccatcacccttgaggtggagagctccgatactatcgataatgtcaaggccaagatccaagacaaggaagggattccaccagatcagcagaggttgattttt

SEQ ID NO: 216266 - DNA, 380 bp, Gossypium hirsutum
cccacgcgtccggcgggattacccgctgagtttaagcatatcaataagcggaggaaaagaaacttaccaggattcccctagtaacggcgagcgaaccgggaaaagcccagcttgagaatcggtcgccatcggcgtccgaattgtagtctggagaagcgtcctcagcgacggaccgggcccaagtcctctggaaaggggcgccggagagggtgagagccccgtcgtgcccggaccctgtcgcaccaagaggcgctgtctacgagtcgggttgtttgggaatgcagccctaatcgggcggtaaattccgtccaaggctaaatacgggcgagagaccgatagcgaacaagtaccgcgaggggaagatgaaaggactttgaaag

SEQ ID NO: 216267 - DNA, 203 bp, Gossypium hirsutum
  unsure (1)..(203): unsure at all n locations
aaaaaaattcaacggccgaccgtttgtgtcgttccggagacgtttcacatctcatttcaccagatctcaactcttccttcgccggtttatttgntcttccttgttttttggctggtttcaataaatttcttctatttttccatggctgctccacctgcaagagctcgagccgattacgactatctcataaagctccttttgat

SEQ ID NO: 216268 - DNA, 446 bp, Gossypium hirsutum
cccacgcgtccgcccacgcgtccgggaaaatgcagtcttttatgttgccagtccagaagcttgtgctgcaattttgtggaagactgccaaagcttcgcctaaggcagctgagaagcctgcactttcttcaaccagcaaccaagggataagaagtcccaaacagagcatgaaaagcatgtgatggatctgcatggggaagtgatggcatgtgcatacgaagatgtccaagtcatgtggtccattcttgacaagtccaagtccatggcttgtaacatcaagccttaggattccctttttaccctttctctttttttttcttaaatttaaattttctttattttattttgcatgtgatgtagataaagctacaaaatcgattgcaaatttgggggaaattaggagattggggaaaagagggcattattgtaatttttgatggagagaat

SEQ ID NO: 216269 - DNA, 428 bp, Gossypium hirsutum
cccacgcgtacgtccacgcgtccgccgacactccacagcgcagcaatgggtgaggaagtaaaggctttggttcctgagtcactgttgaagaagaacaagacgaatgaagaatgggagcttgccaaaaagcacgagctcgaagccgcgaagaataagaaagtcgagaaccggaagttgattttcaacagggctaagcaatatgcaaaggagtacgaggctcacgaaaaagagttgattcaattgaagcgggacgcgaagttgaaaggaggattctatgttgatccagaagctaagcttttgttcattgttagaatccgcggtatcaatgccatgcacccaacgaccagaaagatcttgcagctcctacgtttgagacagattttcaatggtgtgttgtttaaagtgaacatggcaacaatgaacatgct

SEQ ID NO: 216270 - DNA, 391 bp, Gossypium hirsutum
tggagatccaagtcaatggtggaacttttgttgacaaggttgattttgcttacaagttctttgtgaagcaagtccccattgatgctgttttccagaaggatgaaatgattgatatcattggtgtcacaaagggtaaaggttatgaaggtgttgtcactcggtggggtgtcacgcgtctgccccgtaagacccacagacgtctgcgtaaggttgcttgcataggtgcctggcatactgccagagtctcctttacagttgccagggcaggtcagaatggataccaccaccgtactgagatgaacaagaaggtctacagggttggcaaggttggtgatgagacccactctgccataactgattatgacaggactgagaaagatattaccccaat

SEQ ID NO: 216271 - DNA, 235 bp, Gossypium hirsutum
gccacgcgtccgaccacgcgttcagtattatggcgagcagaatatccaaccggcagatccggtggctcttgatcttgtttgtgtatcaaacccaatcgatgaggttctggacacattgtgcacgcttattcatgattcacattcacaagttgcaatggctgcaaatatctgcttgggtatatataagtgctgaaaccaataatgctcgcattgctggcatgctatgcaaactttc

SEQ ID NO: 216272 - DNA, 326 bp, Gossypium hirsutum
  unsure (1)..(326): unsure at all n locations
cacttttgacggacccaaatcccgatgatttcttggtgccagagattgcccacatgtacaagaccgacagggctaagtacgagacaactgctcggagctggacccagaagtatgctatgggttagtgtgctaatatgcatataataggagggctttattctatgtggctttgatcttcaatttaatatgtatgaatcaatgaaacagtatgtgtgatctgtctctccaactatgtactggaccaatccctccttaaaacacatttgttgccttaattgtttgtatggaaattatgtttcaaaaaaaaaannnntnnnnnntnnnnn

SEQ ID NO: 216273 - DNA, 433 bp, Gossypium hirsutum
gccctctccaacatttcctttttgtttccttaaaaccctaacgcctccatggcatggctacccaaactccgagttgccagcgcctctgttgcttcatccgccgtcaacccactccgacgttggatccgagatatcggctcagccgctgcgttggagctcgactacgactatgactactacgagtatgagcgagctccccgggataggcgcctgcctcagcagaagcttgatgtggatggttcagtgccggagaggggaatccagtgggtgcttataggggagcctggagtgaaacgccatgcttacgccgagaggctttccaagcttctaggaatccctcatatttcaatgggttcccttattagacaagagcttgatccttactcctctctttacaaacaggtcgtaaatgctgtgaatgaagggaagcttg

SEQ ID NO: 216274 - DNA, 285 bp, Gossypium hirsutum
  unsure (1)..(285): unsure at all n locations
ttccaataggtgcgactttggtaactgaattagttgcttctgccatagcccatggggaccatggaagtacttttgcaggttcacctcttgtttgcagtgctgcaatttctgttttcaataaaattgcaaaccccagtttcttgtccagcgtctcgaagaaaggtgattacatgaaagaattgttgaaccagaagctcggagggaatccccacgtgaaagaaatacgaggatggggtcttatgattgngatagagttggatgtgtctgcttcgccccttgtagatg

SEQ ID NO: 216275 - DNA, 440 bp, Gossypium hirsutum
attctatagctttcatctacatttcgccccagaaattatagtaaagcagagacaatgagaggaacattgatgttgagttggattctgatcatctgcctctcccaagtagcagtgcagagccaatactactcgaagagccgaccatatcatcccaggccacctaaggtcaccaatcttcacttctttatgcacgaacatacgggtgttactgcagtcgtggtagcccaagctaacatctcaagcaataattcatcagtgccatttgccaccctagttgccgttaatgatcccctcaggactggtcctgagcctgactcagaggtaattggaaatgttcagggtatttcgctcctggctggatcaaatgcatcgagtacgcagtacatagaatttggatttaataccggtaagtttaatggcagctctcttagcgtattttc

SEQ ID NO: 216276 - DNA, 432 bp, Gossypium hirsutum
cccacgcgtccgaaacctttctacaagtcggaaccaattcctgaaacaaacaatggggatgtgaaagtagtggttggcaataactttgatgaaatcgtattagatgagtcaaaggatgtccttcttgagatctatgcaccttggtgtggccattgccaagcacttgagccgacatacaacaagcttgccaaacatctccgcggcattgactctttggttattgctaaaatggatggtacaacaaatgaacatcctagggcaaagtccgatgggttcccgacaattctgttcttcccggcaggaaacaagagttttgatcccataactgtggacactgatcgaactgtcgtggcattttataagttcctaaagaaacatgcatcaatcccattcaagctccaaaaaccagtgtcagcacccaaagctgaagca

SEQ ID NO: 216277 - DNA, 429 bp, Gossypium hirsutum
cccacgcgtccgcccacgcgtccggtttcaaacgacgacatcaaggaattgttttctgaggttggtgacctgaaacgattttcggtccactatgataggagcgggagatcaaagggaacagcagatattgtcttcacacggcgagcagatgctttggctgcagtaaagaggtacaacaatgttgagctcgatgggaagccgatgaaaatcgagattgttggaacaaacatcgctacccctcctgcacctttaggagctaatggtgcctttcgaagttctaatggagccattaaaggtggccaaggcaagggtggtggatttggtaggcaacgtggtggtggtgctgctggaagaggctgtggacgacggaagggtcgtggagaaaaggtttctgcagaagatcttgacgccgatctagagaagtatcat

SEQ ID NO: 216278 - DNA, 430 bp, Gossypium hirsutum
cccacgcgtccgcattacttcgttttggtttttttgctttgctctgaaactccaagctctcatcaatggcggatccagcgactatctcaccagccacgctgttgaaagatgagcttgacatcgtgattcccaccattaggaacttggatttcttggagatgtggagaccctttttccaaccttaccatctcatcatagttcaagatggcgatccttcaaaggccatcaaagttcctgaaggctttgattacgagctttacaacaggaacgatatcaataggattttgggtcctaaagcttcttgcatctctttcaaggactctgctagtcggtgctttggatacatggtttccaagaagaagtacatctataccattgacgacgattgtttcgttgctaaagatccatctggaaaagacattaatgcatt

SEQ ID NO: 216279 - DNA, 427 bp, Gossypium hirsutum
cccacgcgtccgccggctttacaacaacaaatgatccaacaacttctccaggagatgtctaataacaacacgggagttcaacagcagtccgtgaatgggcagaatgagaatggaagtgcggggagaaacacctctgctctggctacagctacctctaccgtgtctggaagtgttgcagggcctgcactgagtcaaagcaacagtttcaaagccacttcaaacgacaactctttagctgccggtggcgacaacagattcaaccgaggacaacctgatttgccccagaatctccattcacaggacgatacagttccggatatagcaaatgatttcatggataatgggttttttaacaatgaccttgactataatattggttatggctggaaggcatgactaacataattttgccccatatcattgactt

SEQ ID NO: 216280 - DNA, 439 bp, Gossypium hirsutum
attacaattaccatggggatttgccaagggctcttgagcactttctggaatgtgaaaattggcaaaaggctcattctattttcatgacttcagttgctcatgaattgttcttgtctgccaaggactcagaggtatggaggattgccacatccatggagaaccacaagtctgaaattgaaaattgggatttgggagctggaatatatatttcattctatgtgctaagaagttcattccaggacgataacaatactatggctgaacttggttccctcgacagcaaaaatgctgcttgtagagactttcttggctgtttgaatgagtcctcagcagtttggggtggcaggttacatgttgatgctagggtagcatattcaaagatggcggatgaggtatgcaatttgttgctttcagatacaagcggaagtcgaacgcatga

SEQ ID NO: 216281 - DNA, 411 bp, Gossypium hirsutum
  unsure (1)..(411): unsure at all n locations
cggacgcgtgggcggacgcgtgggctggatccaatgtaaacctattgagcataccaaacatgctttgggaacttgccctcatgtctgtcggatacagaactcaaatgtggaaaattaactcctgaggttgggattttcccgaatccatcaagcaaacaatgaatgaagagaagcaattagccgattcgataacattaggttgaaagcattcttttaggaaaaaaggaatttacagtcagctgattgcagcttatcctagcttttttcattatacaatatcacagccagaacatgcagtttttttcagttgtaatagtgaggtaacactttaatgttttcttacatttttagtgttccaacttcttgaattccaaannnnaaaannnnnnnnnnaaaaaaaannnnnccccc

SEQ ID NO: 216282 - DNA, 440 bp, Gossypium hirsutum
gtgcttctaaacaacacatctggccaagcttagaagagtgcagtcccaaatctaacactgaggggctttgatttcattgaaagagtgaagagcctcctcgaagccgaatgccctggcgttgtctcttgtgccgatatcctcactttggttgccagagactctgtagtaaccactggaggtccattttggaatgttccaacaggaagaagagacggtgtgatatccaatatcaccgaagcaaataccaacattccaagccctttccacaacttcactactctccttactcttttcagtaaccaaggacttaacttgaccgacttagttctcctatctggtggtcacaccatcggcatatcccattgcccggctgtttcgcgccgactgtacaattccaccggccccggcggaatcgacccaaccatggacagcgagtacgc

SEQ ID NO: 216283 - DNA, 376 bp, Gossypium hirsutum
cccacgcgtccggtgggatactgtagtttccttggcacggctttatgatctgttgtttggattgattgtcatagctcctgtggcattggtatcgtggttgcctggattccaagccatgcagacaagaatcttattcaatgaggcattcagcagaggtttgcagatttctcgcattatttccggcaaaaagtccacagcatgatgttaaggtaacatttgcatccgtagttcagtttaaacatttgcatttattgtccagtaatatttgttctgtctatgcgtgtatagttggcgtttgctctggatggcatgttttgttttgtgtacatgtatgttttgactcaagttgaatttgccaaagttttttttatgcgag

SEQ ID NO: 216284 - DNA, 412 bp, Gossypium hirsutum
  unsure (1)..(412): unsure at all n locations
cccacgcgtccgttctcgctctctagggttttcgtggtcaagtaaaaaaaatgaaggtggtagctgcctacttgcttgccgtcttgggagggaacctttccccttctgccgatgatttgaaggatattctcggatctgttggagctgaggctgatgatgataggatagagttgctattgtccgaagtcaaaggcaaagatatcaccgagctaattgcatctggaagggagaagttggcttcagtcccttcaggtgggggtgctgttgctgctgctcctaccgcangtggcggtggtgccagtgctgcaccagctgctgaggccaagaaagaggagaaggtcgaagagaaggaagagtccgatgatgatatgggtttcagcctcttcgattaagccaagtaatgcagatgtca

SEQ ID NO: 216285 - DNA, 313 bp, Gossypium hirsutum
cccacgcgtccgggttttgaaacaggtcggagcatatccggatgtcgtaaaggctaaggacagtcaaggaatccgacccgggaaagggaaaatgaggaaccggaggtacatttctcgtaaaggtcctttgattgtttatggaaccgaggggtcaaagctcgttaaggcctttaggaacattcctggagttgaggttgccaatgtggagaggcttaatcttttgaaactcgcccctggtggacaccttgggcggttcattatttggaccaaatcagcttacgagaagcttgactcagtttatggatcattcgag

SEQ ID NO: 216286 - DNA, 441 bp, Gossypium hirsutum
ctttgcaaaaaagttactgattcatgttctttgggatggaacaagaagtaggggaggccgtgattcagctggggaactcagatggttctaattctagcagctcagatcccgtaactcgtgtaaggaagctattgtttcgccggatgctggtggggatcaaagacggccggtttttcttgggcactttccactgccttgacaagcaagggaatatcattctccaagatacaatagagtatcgtagtacccgtcggtcttctccgtctcctatggagcaacgatgccttggtcttgttctcatcccttcctcttgtcagaactcctgtcatgtggattgctccgtcgaggaacagttgtcactgctgaaggtataagaaactagaatcttatgttcccataaaatctatgtttgaaagaaacaacagttttcatgcaagtatt

SEQ ID NO: 216287 - DNA, 407 bp, Gossypium hirsutum
  unsure (1)..(407): unsure at all n locations
cccacgcgtccgcggtgatatttaccctcttggagttaagcaacaggggatcttaataaatgggcagtttccagggcctcatatcgatgcagttactaatgacaacttgattatcagtgtttataactacttaaatgaaccattccttatctcttggaacggtgtgcagcaaaggaggaactcatggcaggatggagtttctggcacaaactgtccaattcgaccggggaaaaacttcacttacgttctccaagtgaaagatcagattggtagcttttactacttcccatcacttttattccataaggctgccggagggtacggtgctatcagaatctggangccgcccaagatccctgtacctttccctagtcctgctggggatttcactgtactggctggggact

SEQ ID NO: 216288 - DNA, 407 bp, Gossypium hirsutum
cattgttgctaatggactagctaggaggtgcatcgtgcaagtctcctacgccattggtgtacctgaaccattgtctgtatttgtggacacttacggtactggaaagatcccagacaaggaaattctcaagattgtgaaggagacctttgacttcagaccaggaatgattgccatcaatcttgatcttaagagagggggcaatagcaagttcttgaagactgctgcgtatggtcattttggtcgggatgaccaagatttcacttgcgaggttgtcaagccactcaagtgggacaaggtccaggcttaattggagcttcatcacattgggtctatgtctgatttatttgatctgctgtctgctaccacatgaggctgcttttcttacaatttcctttaatttctttttt

SEQ ID NO: 216289 - DNA, 372 bp, Gossypium hirsutum
  unsure (1)..(372): unsure at all n locations
catgatcatcccagaaaagaaccgccgcgagatctccaagtacctcttccaagagggcgtttgctatgcaaagaaagactataatttggcgaagcaccctgaaattgatgttccaaatcttcaagtaataaagctgatgcaaagcttcaagtcaaaggaatacgtgcgtgaaacttttgcttggatgcattactattggtaccttacaaatgatggcattgagttcttaaagacttacctgaaccttccttctgagattgttcctgctactttgaagaaacaagctaaacctgctggtcgtcccatgggccctcctggtgaccagccacgcggnccaccacgctttggtgagggtgaagaggagattggtga

SEQ ID NO: 216290 - DNA, 448 bp, Gossypium hirsutum; identical to SEQ ID NO: 197132

SEQ ID NO: 216291 - DNA, 416 bp, Gossypium hirsutum
catgttgttggttggtatagtaccggcccaaagttgcgggaaaatgacctagacattcatagattgttccacaactatgtcccgaatcctgtcttggtcatcatcgatgtccaacctaaggagttgggtatccctactaaagcctactatgatgttgaagaagttaaagagaatgccactcaaaagagccaaaagattttcgttcatgttccttcagaaattgctgctcatgaagttgaagagatcggagttgagcacttgcttaaggatgtaaaagatacaaccattagtacactcgcaactgaggtaactggaaaactcacagcttttgagggtttagatgcaaggttaaaaagagaacgttcttaccttgacctttgtatcgatgagaagcttccactgaatcatgaaatact

SEQ ID NO: 216292 - DNA, 435 bp, Gossypium hirsutum
catcgttgctactggactagctaggaggtttatcgcgccagtcttctaccccattggtgtgcctgaaccattgtctgtatttgcggacacttaccgtactgaaaagatcccagacaaggaaagtctcatgattgtgaaagagaccttggacttcaaaccacgaatgagcgtcatcaatcttgatcttaagagagggggcaatagcaagttcttgaagactgctgcgtatggtcattttggtcgggatgaccaaaatttgacttgggaagttgtcaagccactcaagtgggacaaggtacaggcttaattggagcttcatcacattgattctatgtctgatttatttgatctgctgtctgctaccacatgatgctgcttttcttacaatttcctttaattacttttttgagttttgacatcgattacaatgtatat

SEQ ID NO: 216293 - DNA, 327 bp, Gossypium hirsutum
  unsure (1)..(327): unsure at all n locations
gccgcctaaaagagagccgggaaatgttgctagaagagcanagcgaaaatgaagactatactttcctccgagacaatggacatccccgacggngttagcattaaggtcaaggctaaggtgatcgaggttgaaggtccaaggggtaagcttacccgcaacttcaagcacgtcaaccttgatttccatctcatcaaggacgaagagaccggcaagcgtaagctcaggatcgaggcttggtttggctccaagaagaccagcgccgccatccgtacagctcttagccacgttgagaacctcatcaccggtgtcactaaaggatacctttac

SEQ ID NO: 216294 - DNA, 443 bp, Gossypium hirsutum
cccacgcgtccgggtgctactccagggttgacgagatcaatgcaagaggttcaattggacaagaatgtaaaattattggactgtcctggtgttgttatgcttaaatctagtggaaatgatgcatcaatagctcttcgaaactgcaaaagaatagaaaagttggatgatccggttgctccagtgaaagagattctcaagctttgtccagagcgactgttggtgacaatatacaagatcccgggctttgaatcagttgacgaattccttcagaatgtagccactgtaaggggtaagctcaaaaaaggtggtattgtggatgtcgaagctgctgcaaggatcattttgcacgattggaatgaaggtaaaattccctattacaccatgcccccgggccgaaatcaagaagagccttcggaggcaaggattgtcacagaacttggaaa

SEQ ID NO: 216295 - DNA, 199 bp, Gossypium hirsutum
  unsure (1)..(199): unsure at all n locations
cccacgcgtncganacatagtatattgtctttaggagtcaatggcagggattggtaaaacggctccaaatttcgaggacttattgccgccgatggcggaaaagctggggggagccgggctgatgagggagttgtgtaatgggttcaacctgttgatggacgaggagaaaggggtgatcactgcggcaagcttgaaaagg

SEQ ID NO: 216296 - DNA, 446 bp, Gossypium hirsutum
aaggagatgatgtggtttgtgtgattaagaactctgcaacattggctgggtcattgttcactttgcatggctctcaaattcatattggtttgcctaccctcactgataaagacaaggaggttataagtacttggggagttcaaaacaaaattgacttcctctcactatcatacacacgacatgcagaagatgttcgccaagctcgtgagtttctttcaaagttgggtgacctctatcagactcaaatatttgcaaagattgagaacatagagggattaaaccattttgatgagattcttcaggaagcagatggtatcattctttcccgtggaaatttgggcattgatctcccacctgagaaggtgttcttatttcaaaaagctgctctttataagtgtaacatggctggaaagcctgcagttgtcactcgtgttgtggacagtatg

SEQ ID NO: 216297 - DNA, 251 bp, Gossypium hirsutum
ttatgactggaaggaaacgcggggagcttatatgttcaaagggcgtgtgccagatcttaaaaaagaagaactgaaaatacaggtagaaaatgatagggtgttacctattattggagaaaggtacgtggagaaagaagataagaacgattcctggcaccggcttgaacggtgcatcggcatgtttattacgaggttcacgttgccggaaaatgttaagacgggctacgttaaggcttcaatggaaaatgggg

SEQ ID NO: 216298 - DNA, 402 bp, Gossypium hirsutum
  unsure (1)..(402): unsure at all n locations
cccacgcgtncgcaaaatgaaggtcaaaccgtacattccggatttcaagctagcttttgagcatttctgcattcatgccggaggaagagccgttttggatgaactggagaagaatttgcagctgtctgaatggcacatggaaccatcaagaatgactctctaccggttcgggaacacctcaagcagttctctgtggtacgaattagcttactccgaagctaagggtagaattagaaggggtgacagaacatggcaaatagcatttggttcaggattcaagtgtaacagtgcagtttggaaagctttgaggacgataaatccggtaaaggagaaaaacccatggatggatgagatccataatttcccagttgatgttccaagggtctccaccatctaaatgac

SEQ ID NO: 216299 - DNA, 441 bp, Gossypium hirsutum
ggttccttgagacgaactcctccggtgtgttcatgcagatcggagaccatgtccaattcgcttattctcaccataaagagtctcctttacggcccagatcatttgctgtgaaagatgaaatcttctgcttgtttgagggagcccttgataacttggggagtttaaagcagcaatatggtctggcaaagtcggcaaatgaagtgattttggtcattgaagcttacaaggcccttcgtgaccgagcaccttatcctccaaaccatgtggttggccatctaattgggagctttgctttcattgtctttgacaaatccacctccactttgtttgtggcttctgatcaatttggtaaggttcctctctattggggaatcaccgccgacggatatgtggcctttgctgataatgctgaattgctgaaaggtgcctgtggcaaatctc

SEQ ID NO: 216300 - DNA, 428 bp, Gossypium hirsutum
ctctggcttcgattctccactctttacaatcctggaagacatgctggacatcccggaagaacaagaaaagttccgagcaacccatctcgagcctatgttcgagatgcaaaggccatggctgccactccagctgacgtgatagagtacccaacatcttacgtcttcatcgtggacatgcccggcataaatcacggcgagatcaaggtgcaggttgaaaacgagaatgtgcttgtggtgagcggggagcgaaagcgtgagaaagagaaagatgagaaagaaggggtgaagtatgtgaggatggaaaggagagtgggcaagtttatgaggaagttcgcattgcctgagaatgcgaatatggataagatatctgcagtttgtcaagatggggtggtgagagtgactgtggagaaattacctccacctgaacc

SEQ ID NO: 216301 - DNA, 330 bp, Gossypium hirsutum
cccacgcgtccggcaagtatgtactcagcaatgcttttaaccggatggtcaacctcggtcggagaaagcggcaagttagtcgacgtaggatggccatcggtgtgggttcggattataactgggtgggcaacagcaggtctctatgtatggtctctagttgctcctattcttttcccagagagggaattttaggtctccaaagtaagttattggccattgttgcaataaatttagtttatatgtgtgtgtgtgatttgactgaccaagatggattaaaaaaaaatattatgtgcgtctcaaaagagaagttgaatatatgtgtgattaatg

SEQ ID NO: 216302 - DNA, 437 bp, Gossypium hirsutum
cccacgcgtccgattgacatgattgctctttcttttgttcgaaaaggatcagacctcgtggaggttcggaagctgcttggaaagcatgctaagaatattcttctaatgtcgaaggttgaaaatcaagaaggggtagcaaattttgatgacatccttacaaattcagatgcatttatggtggcacgaggtgaccttggaatggagattcccattgaaaagatatttctggcacagaaggtgatgatttacaagtgtaacatccaaggaaaacctgttgtcactgcaacacagatgttggaatccatgataaagtctccccggccaactagggctgaggccactgatgttgccaatgcagttcttgatggcacagactgtgggatgttaagtggtgaaaccgcagctggagcttacccggaacagcaaagtttccattg

SEQ ID NO: 216303 - DNA, 350 bp, Gossypium hirsutum
  unsure (1)..(350): unsure at all n locations
ccggggtcctgcagaagcagatgagctctttgctaaagccggttatgttcaaacacacggttatatttggattcctcccaccttatagaaacattatatatatttatatatatatagctttgcgatatcctatcaccattgccatagaaagaagttgaggtttgtaacagatacaataaaatgctaagcctaagagctttgtaacttttccctttaaatcatgtttggaacacttttataaagggtctttccttgttatatttacaacttattccaattcggntgagaaaaaagaaagattaaaagaaaaaaaaatacggtaaaggagaaaaacccatggatagataaaa

SEQ ID NO: 216304 - DNA, 438 bp, Gossypium hirsutum
cccacgcgtccggtttacactgcccgtgactatgctgatatagttgaatatctggttgaccgatggaagttgaaggaactcattggactttcacccgagggccgtgaagctcaggaatttgtgtgtggacttgcaccgagaattagaaagctagaggagagagctcaattgaggaccaaggaatcacccagtgttccattcagttgggtttctggtagagaagtgaagctctaaattggctatcctccaagtgacttgtaatacaagaaagaaacaacagggcttagggaggagcatgatgaaaactgcaactctgtgtttagctggaatgcaataagtggaggaagtgtgtgtgtgctgtttcgttgttacttttcttaaaacaagtaatatcaacatcttcctcctatttgatgaaatgataaacgatatctatag

SEQ ID NO: 216305 - DNA, 358 bp, Gossypium hirsutum
cccacgcgtccgctttttctattgctattatgttatttacagtagaaactctttgatttacttttattcttgtggttatttcaaagtagatttttacataatcatccatttatgttatgttatgaatgtcgcattgttacgatgtaacctttttcatgttatttctaacatttaataaggatggtaacgaaacgagatagttatatggatattggcttgtcttatccattctgttttttgtttgcattgatgttgaaaatattcacgttcatacatgttggatatatatgtgtaactccacatgttttatactgttccaccttattttatttttattaatgagatttcgatttaatat

SEQ ID NO: 216306 - DNA, 359 bp, Gossypium hirsutum
agcgaacccatttcacagagctgaaccaaatggctgaggaagccaaaaggagagctgaaattgctaggttgagagaactgcacacactgaaagggcatgtggaatcggtggtgagattgaagaacctggacatagacacaatccagcaagcgtacacggtgtaaggcggtggaatggtattccgaaggaatagtggaaaatgtaatgagagggagcgttttcctgcgagtgaagctctaatatatgtatcttttattaccttaatcccgtccgccattttacaagggaaaggttattgtttatggcattttatgtttatattagtagtaaaaaaccatgtgttttgcttttgttgtagt

SEQ ID NO: 216307 - DNA, 433 bp, Gossypium hirsutum
  unsure (1)..(433): unsure at all n locations
ctgaaatggcgatgaanattttcagcgttttcttctttgctctcctcttcctcgcatctcctttgcttcaagttgctaggtgtcaatcagaagcagaggcagatgttgcagaagctgttgaaggaggtgatctcggtattgttggggaggatgttcaggattttggtgatcctaattacagttcagctcctgaagttaaaactgtttgcgttttccccaaaaatagtgccaaattggttctggctggagaacagactgagctcctcgttgggatggaaaatattggggagtcacctgtgaatgtcattgctatcaaagccagtgttcatcttccttttgatcatcgtatgcttgttcaaaatcttacagcagtggctttcaacaatgctactgtacccccttcagttcaagctactttcccttacgtatttgc

SEQ ID NO: 216308 - DNA, 422 bp, Gossypium hirsutum
gtacactgctgggatcaacttgaacaagccagatttctctgttgctcttttgctgactgataaaggtcaggcattgaaggcatcttatatccattctgtcaaccccttcacttgtgttgccgctgaaatggctcatagattttccacctacgaaaacactttcaccattggaagttctcatgctgtggatccttttaccgtggtaaaaacacggttctctgacaatggaaaggttggaatgctgtgccaacgtgaatggaggcccaagtcacttgtaacattttcggcagagtatgattcaaaggccataaatgcatcccctaagatggggcttgcccttgctctcgagccttgacgggaaggtctcattttggattccatatttttaaattttgatttgaccttttccccgaacccttggg

SEQ ID NO: 216309 - DNA, 334 bp, Gossypium hirsutum
  unsure (1)..(334): unsure at all n locations
aacaaaccctntaattccttctttctttttcttcctttcgattgattttcagagaaaaccatggagtttagacctttagaaatcaaagttatctccgccaaggatcttaaagacgtcaatcttttcactaagatggacgtttacgtcgtcgtttcgatcaacggtgattctcgcacagcgcaaaggactccggtcgacaaggacggtggttcaaacccagagtggaattacaccgtgaggttcaccgtcgatgaagctgccgcccgtcagaatgggcttaccgtcgtgtttacccttaaatcacaacgtcagcttggagataaggatatcggta

SEQ ID NO: 216310 - DNA, 427 bp, Gossypium hirsutum
cccacgcgtccgatccacaacagctgttgatccattgcttccctgtttcctgtaagcaaaaaagagagaaaatgaaggttgttgctgcttatttgttggctgtacttggaggcaatgcctctccttcagctgatgatcttaagaacattcttgccagcgttggagctgacgctgaagaggaaaggctccagcttcttttatctgaagtgaagggaaaagatataaccgagcttattgcatctgggagggaaaagcttgcctctgttcccagcggtggtggtgttgctgtggcggcatctgcacccggagccgccgccgccgccgctcctgctgcagctgagactaagaaggaagagaaagttgaggagaaagaggaatccgatgatgatatgggcttcagtctcttcgactaaaactaccacgcacc

SEQ ID NO: 216311 - DNA, 391 bp, Gossypium hirsutum
  unsure (1)..(391): unsure at all n locations
agctgcaacagttcaccttaataaactagagcgtgaggagcatctcgttgctgcattccgatactttgataaggatggaagtgggtatattacagttgatgagcttcaacaagcttgtgctgagcataacatgacagatgttttgctcgaggatataatcagagaagttgatcaagataatgatggaagaatcgattatggtgaatttgttgccatgatgcaaaaaggcaatgcaggaatcggtagacgaaccatgcgaaacagtgtgaatataagcatgagagatgccccaggtgctatgtaatctccagctgcgcacacatcatgtacagatngtacagcagatccagaagatgatgactcatgacaaaagtgatcgggaaaacgggtt

SEQ ID NO: 216312 - DNA, 398 bp, Gossypium hirsutum
cccacgcgtccgcccacgcgtccttaatcttccactgaatcatgaaatactgtaccatgtacaggatgtgttcaacttgctgccaaacctaaacgtaaatgacctaatcaaggcttttgcagtaaaaaccaatgatatgatgttggttatatatctgtcatctctcatccgaagtgtcattgcgctccataatttgatcaataacaagatgttaaacaaagaacatgagaaggctgaagatgctaagccaacaactgtccaggctacgagttgaatccgaacataaagtcctaatcatgtcaaaaacttgagcataaggtgctattaacttccataggatcctctattcttgagattttgtattcttcatagctcaatcagaagatatcagtaggctt

SEQ ID NO: 216313 - DNA, 371 bp, Gossypium hirsutum
acccacgcgtccgccaaacgggcgctcattttaagacaattttttggtaccctgccccattgagggcgggcacgatgatctgtgcgcaaagcggagcattaatgtttgcactctattcaaaagagcgcgctgctgtatggggatacgctggaggtaacatagccatcatataatacaatggctgtctatattcaacgatcggaactaacaacagatgtggctcgggcaatggcttaccgacactaggcaaacattacagagaagctaatgttgtcgaaaaggagcaatcagagaagtgcattctggtccccaaaacgctaagaattgacaatccaaatgaagcttcaaggagtcccatatgggctacatta

SEQ ID NO: 216314 - DNA, 274 bp, Gossypium hirsutum
aattccaccagatcagcaaaggttgattttttctgggaaacagctggaagatggaaggactttggctgattacaatattcaaaaggagtccactcttcaccttgttcttcgtcttcgtggtgggttctaagccttaaggtcttccttaatgtgggttttctggttttacgtgaaggattgtgccctttgatggccttttaaataatttctagtctttgtttaccggttgcatctatgtatggtttctctttgaatggaatttgcatatttacct

SEQ ID NO: 216315 - DNA, 202 bp, Gossypium hirsutum
ttggtgaccttcatgaaaaggtacatcaagaacttgacacccaaatatgagcctgaaaagcaagagtctttcaagaagaacatcgagggggctactaaatttttgatgtcgaagcttaaagatctccaattttttgtgggtgagagcatgcatgatgatggtagcctagtgtttgcatactacaaggacggtgccaccgatc

SEQ ID NO: 216316 - DNA, 409 bp, Gossypium hirsutum
ctcgagttggaaagttctgatacgttttattatgtcaaggccaagatccaagacaggggagggatccctccagaccaacggaggcttatctttgcaggtaaacagcttgaagatggccgaactcttgcggattacaacatccagaaagagtctaccctccaccttgtccttcgtcttaggggtgggatgcagatccttgtaaaaacccttactggtaagaccatcacccttgaggtggagagctccgatactatcgataatgtcaaggccaagatccaagacaaggaagggattccaccagatcagcagaggttgatttttgccggaaagcagctcgaggatgggaggacacttgcggattataacatccaaaaggagtcaaccctgcacttggtgctgcgactgcgtg

SEQ ID NO: 216317 - DNA, 283 bp, Gossypium hirsutum
cccacgcgtccggcgggattaccctgtttattttaagcatatcaataagcggaggaaaggaaacttaccaggattcccggagtaacggcgagcgaaccgggaaaagcccagcttgagaatcggtcgccatcggcgtccgaattgtagtctggagaagcgtactcagcgacggaccgggcccaagtcctctggaaaggggcgccggaaagggtgagagccccgtcgtgcccggaccctgtcgcaccaagaagcgctgtctacgagtcgggttgtttgggaatgc

SEQ ID NO: 216318 - DNA, 396 bp, Gossypium hirsutum
aaaaaaattcaacggccgaccgtttgttttgttccggagacgtttcacatctcatttgaccagatctcaactcttcctgggccgggtttatttgttcttccttgttttttggctgttttcaataaatttcttctatttttccatggctgctccacctgcaagagctcgagccgattacgactatctcataaagctccttttgatcggcgacagcggtgtgggtaagagttgccttcttttgcgtttttcggatggctcatttactacaagttttatcacaaccattggaatcgactttaagattaggactatagagcttgatggaaaaagaatcaaactgcaaatttgggatactgctgggcaagagcggtttcggactattacaactgcttacta

SEQ ID NO: 216319 - DNA, 377 bp, Gossypium hirsutum
  unsure (1)..(377): unsure at all n locations
cccacgcgtccgcccacgcgtncgggtttattcattcttttatgttgccagtccaaaagctggtgctgcaattttgtggaagactgccaaagcttcgcctaaggcagctgagaagcctgcactttcttcaaccagcaaccaagggataagaagtcccaaacagagcatgaaaagcatgtgatggatctgcatggggaagtgatggcatgtgcatacgaagatgtccaagtcatgtggtccattcttgacaagtccaagtccatggcttgtaacatcaagccttaagattccctttttaccctttctctttttttttcttaaatttaaattttctttattttattttgcatgtgatgtaaataaagctacaaaatcga

SEQ ID NO: 216320 - DNA, 424 bp, Gossypium hirsutum
cccacgcgtacgcccacgcgtccgccgttatttcacagcgcagcaatgggtgaggaagtagaggctttggttcctgagtcactgttgaagaacaacaagaggaatgaagaatgggagcttgccaaaaagcacgagctcgaagccgcgaagaataagaaagtcgagaaccggaagttgattttcaacagggctaagcaatatgcaaaggagtacgaggctcacgaaaaagagttgattcaattgaagcgggaggcgaagttgaaaggaggattctatgttgatccagaagctaagcttttgttcattgttagaatccgcggtatcaatgccatgcacccgaagaccagaaagatcttgcagctactacgtttgagacagattttcaatggtgtgtttcttaaagtgaacaaggcaacaatgaaca

SEQ ID NO: 216321 - DNA, 409 bp, Gossypium hirsutum
tggagatccaagtcattggtggattattttctgacaaggttgattttgcttacaagtggtttgagaagcaagtccgcatggatgctgatttccagaaggatgaaatgattgatatcattggtgtcacaaaaggtaaaggttatgaaggtgttgtcactcggtggggtgtcacgcgtctgccccgtaagacccacagaggtctgcgtaaggttgcttgtattggtgcctggcatcctgccagagtctcctttacagttgccagggcaggtcagaatggataccaccaccgtactgagatgaacaagaaggtctacaaggttggcaaggttggtgatgagacccactctgccataactgattatgacaggactgagaaagatattaccccaattggtgggttccctcacta

SEQ ID NO: 216322 - DNA, 255 bp, Gossypium hirsutum
gccaacgtccgaccacacgttcatcattatagctagcagaatatacaaccggcagagacttttgctcttgaacttgtgtgtgtatcaaacccaaacgataatgttctggacacattgatcatgcttagtcatgattcagattcacaagttgcaaagggagcaaatatctccttgggtataataagggctggaaccaataatgctcgcattgctggcatgctacgcaaacttacaagatattactacaaggatgct

SEQ ID NO: 216323 - DNA, 299 bp, Gossypium hirsutum
cacttttgacggacccaaatcccgatgttcccttggtgccagagattgcccacatgtacaagaccgacagggctaagtacgagacaactgctcggagctggacccagaagtatgctatgggttagtgtgctaatatgcatataataggagggctttattctatgtggctttgatcttcaatttaatatgtatgaatcaatgaaacagtatgtgtgatctgtctctccaactatgtactggaccaatccctccttaaaacacatttgttgccttaattgtttgtatggaaattatgtttc

SEQ ID NO: 216324 - DNA, 408 bp, Gossypium hirsutum
ttccaataggtgcgattttggtaattgttatagttgcttctgccatagcccatggggaccatggaagtacttttgcaggttcacctcttgtttgcagagctgcaatttctgttttcaataaaattgcaaaccccagtttcttgtccagcgtctcgaagaaaggtgattacatgaaagaattgttgaaccagaagctcggagggaatccccacgtgaaagaaatacgaagatggggtcttatgattgggatagagttggatgtgtctgcttcgccccttgtagatgcgtgccgaaattctggacttattgtattgactgcaaggaaaggaaatgtggtgagactggtgccaccattgatcatctcagacgaagaattgaaacatgcagctgagattcttcatgaatgtt

SEQ ID NO: 216325 - DNA, 384 bp, Gossypium hirsutum
cccacgcgtccgaaacctttctacaagtcggtttcaattcctgaaacaaacaatggggatgggaaagtattggttggcaatagctttgatgaaatcgtattagatgagtcaaaggatgtccttcttgagatctatgcaccttggtgtggccattgccaagcacttgagccgacatacaacaagcttgccaaacatctccgcggcattgactctttggttattgctaaaatggatggtacaacaaatgaacatcctatggcaaagtccgatgggttcccgacaattctgttcttcccggcaggaaacaagagttttgatcccataactgtggacactgatcgaactgtcgtggcattttataaagttcctaaagaaacatgcatc

SEQ ID NO: 216326 - DNA, 378 bp, Gossypium hirsutum
cccacgcgtccgcccacgcgtccggttttaaacgacgacatcaaggaattgttttctgagggtggtgacctgaaacgattttcggtccactatgataggagcgggagatcaaagggaacagcagatattgtcttcacacggcgagcagatgctttggctgcagtaaagaggtacaacaatgttgagctcgatgggaagccgatgaaaatcgagattgttggaacaaacatcgctacccctcctgcacctttaagagctaatggtgcctttcgaagttctaatggagccattaaaggtggccaaagcaagggtggtggatttggtaagcaacgtggtggtggtgctgctggaaaaagctgtggacgaaggaaaggtcgt

SEQ ID NO: 216327 - DNA, 412 bp, Gossypium hirsutum
ccacgcgtccgcattacttcgttttgttttttttgctttgctctgaaactccaagcgggcatcaatggcggatccagcgactatctcaccagccacgctgttgaaagatgagcttgacatcgtgattcccaccattaggaacttggatttcttggagatgtggagaccctttttccaaccttaccatctcatcatagttcaagatggcgatccttcaaaggccatcaaagttcctgaaggctttgattacgagctttacaacaggaacgatatcaataggattttgggtcctaaagcttcttgcatctctttcaaggactctgcttgtcggtgctttggatacatggtttccaagaagaagtacatctataccattgacgacgattgtttcgttgctaaagatccatctgga

SEQ ID NO: 216328 - DNA, 407 bp, Gossypium hirsutum
  unsure (1)..(407): unsure at all n locations
cccacgcgtccgccggctttacaacaactaatgatccaacaacttctccaggagatgtgtaataacaacacgggagttcaacagcagtccgtgaatgggcagaatgagaatggaagtgcggggagaaacacctctgctctggctacagctacctctaccgtgtctggaagtgttgcagggcctgcactgagtcaaagcaacagtttcaaagccacttcaaacgacaactctttagctgccggtggcgacaacagattcaaccgaagacaacctgatttgccccagaatctccattcacaggacgatacagttccggatatagcaaatgatttcatggataatgggttttttaacaatgacctngactataatattggttatggctggaaggcatgactaacataatt

SEQ ID NO: 216329 - DNA, 371 bp, Gossypium hirsutum
cggacgcgtgggcggacgcgtgggctgttttcaaggtaaacctattgagcataccaaacatgctttgggaacttgccctcatgtctgtcggatacagaactcaaatgtggaaaattaactcctgaggttgggattttcccgaatccatcaagcaaacaatgaatgaagagaagcaattagccgattcgataacattaggttgaaagcattcttttaggaaaaaaggaatttacagtcagctgattgcagcttatcctagcttttttcattatacaatatcacagccagaacatgcagtttttttcagttgtaatagtgaagtaacactttaatgttttcttacatttttagtgttccaacttcttgaattc

SEQ ID NO: 216330 - DNA, 365 bp, Gossypium hirsutum
  unsure (1)..(365): unsure at all n locations
ccacgcgtacggngcttctaaacaacttatttggccattttttgaatacgcaggcccaaatctaacactgaggggcttttattacattgggcgagtgaaaaacctnctcnaagccgaatgccacaacgttaactattgagccaatatcctcactttggctgccagagactctgtattaaccactttaggtccataaaggaatgttccaacaacaacactagacggtgtgatattcaatatcacctaagcaaataccaacattccaagccctttccacaacttcactactctccttactcttttcaagaaccaaagacttaacttgaccgacttaattcttctatctggtggtcacaccatcggca

SEQ ID NO: 216331 - DNA, 218 bp, Gossypium hirsutum
cccacgcgtccgttctcgctctctagggttttcgtggtcaagtaaaaaaaatgaaggtggtagctgcctacttgcttgccgtcttgggagggaacctttccccttctgccgatgatttgaaggatattctcggatctggtggagcttaagcttatgatgataggatagaagtgctattgtccgaagtcaaaagcaaagatatcaccgagctaattgca

SEQ ID NO: 216332 - DNA, 396 bp, Gossypium hirsutum
  unsure (1)..(396): unsure at all n locations
cctgttatgagcctgtatatagaggcttttgttggctccagcatananaccaangagagtggtttggtgtggcaccatggagatgcanaccctgacttcggatcatgccaagccaaggaattgttggatcatttggaaagtgttctcgcaaatgaaccagcggttgtccatagaggccagcatattgttgaagttaagccgcaaggagtaagcaaagggctggtagcagagaaagttttgtcgagaatggtaaatggtgggaagccacctgatttcgtgatgtgtgttggtgatgataaatccgatgaagatatgtttcagagcatattaacttcagtttctaatccattcttgcctgtggctccggaaatctttgcatgcacaagtgggcgaaag

SEQ ID NO: 216333 - DNA, 409 bp, Gossypium hirsutum
  unsure (1)..(409): unsure at all n locations
cattgttgctaatggactagctaggaggtgcatcgtgcaagtctcctacgccattggtgtacctgaaccattgtctgtatttgtggacacttacggtactggaaagatcccagacaaggaaattctcaagattgtgaaggagacctttgacttcagaccaggaatgattgccatcaatcttgatcttaagagagggggcaatagcaggttcttgaagactgctgcgtatggtcattttggtcgggatgaccaagatttcacttgggaggttgtcaagccactcaagtgggacaaggtccaggcttaattggagcttcatcacattggttctatgtctgatttatttgatctgctgtctgctaccacatgangctgcttttcttacaaatttctttaatttcttttttgg

SEQ ID NO: 216334 - DNA, 387 bp, Gossypium hirsutum
  unsure (1)..(387): unsure at all n locations
catgatcatcccagaaaagaaccgccgtgtgttctccaagtacctcttccaagagggcgtttgctatgcaaagaaagactataatttggcgaancaccctgaaattgatgttccaaatcttcaagtaataaagctgatgcaaagcttcaagtcaaaggaatacgtgcgtgaaacttttgcttggatgcattactattggtaccttacaaatgatggcattgagttcttaaggacttacctgaaccttccttctgagattgttcctgctactttgaagaaacaagctaaacctgctggtcgtcccatgggccctcctggtgaccgnccacgcggnccaccacgctttggtgaaggtgagaggagatttggtgacagagatggctatcg

SEQ ID NO: 216335 - DNA, 212 bp, Gossypium hirsutum
attaaagctaaccttggcctctcagattcacagagaacaccaacgcctgaagaataattgagggatttctataaacgtactaatttgtactggcaaatggctgcccatgaacatactcagcacactggcaaggaactccgtaaagatggttttgatcttgctgaggctcgttaaagggaacttaaaccacttcttgaccagttggccatatt

SEQ ID NO: 216336 - DNA, 401 bp, Gossypium hirsutum
  unsure (1)..(401): unsure at all n locations
gaaanaccggcccgacgcacgcgtccggtttctctttgcgcctttcttctttctttcgcagcactgatattgcaggtaagtcatgggtaagcataacaatgtcgtgcgaaatgggcacttcaagaaacactggcagaactatgtgaagacttggttcaatcagccagcacgaaaggctagaagacgaattgccaggcaaaagaaggctgtgaggatctttccaaggccaactgctggaccccttcgccctattgtccatggccagactttgaagtataacatgaagttgagagctggaaagggtttcaccctcgaagagcttaaggctgctggtatttcaaagaaaacttgcaccgaccattggtatcgctgttgatcaccgccgtaagaacaaatcactt

SEQ ID NO: 216337 - DNA, 419 bp, Gossypium hirsutum
gccgcctaaaagagatccgggaatggttgctagaagagcaaagcgaaaatgaagactgtgctttcctccgagacaatggacatccccgacggggttagcattaaggtcaaggctaaggtgatcgaggttgaaggtccaaggggtaagcttacccgcaacttcaagcacgtcaaccttgatttccatctcatcaaggacgaagagaccggcaagcgtaagctcaggatcgaggcttggtttggctccaggaagaccagcgccgccatccgtacagctcttagccacgttgagaacctcatcaccggtgtcactaaaggatacctttacaagatgaggttcgtctacgctcactttccgattaatgcctccatcactaatggcaacaagtcgatcgagatccgtaacttccttggcgagaa

SEQ ID NO: 216338 - DNA, 412 bp, Gossypium hirsutum
  unsure (1)..(412): unsure at all n locations
cccacgcgtccgcggtgaaaaanttctttttttagcnaagcaacaggggancngaagggangggctaaaaggagggcctgggatcaaaacagnnaccaaagacaacnngannatcagnngggataacnacccaaangaaccannccggancncncggaacggngngcagcaaaggaggaacccaaggcagganggagnnncnggcacaaacngnccaanncgaccggggaaaaacnncacttacgttctccaagtgaaagatcagattggtagcttttactacttcccatcacttttattccataaggctgccggaaggtacggtgctatcagaatctggagccgccccaagatccctgtacctttccctaatcctggtggggatttcactgtactggctggggactggtat

SEQ ID NO: 216339 - DNA, 388 bp, Gossypium hirsutum
cccacgcgtccttgttctactcctttgtttattagaccaatgcaagaggttcaattgggcaagaatgtaaaattattgggctgtcctgatgttgttatgcttaaatctagtggaaatgatgcatcaatagctcttcgaaactgcaaaagaatagaaaagttggatgatccggttgctccagtgaaagagattctcaagctttgtccagagcgactgttggtgacaatatacaagatcccgggctttgaatcagttgacgaattccttcagaatgtaaccacttgaaggggtaagctcaaaaaaggtggtattgtggatgtcgaagctgctgcaaggatcattttgcacgattggaatgaaagtaaaattccctattacaccatgcccc

SEQ ID NO: 216340 - DNA, 190 bp, Gossypium hirsutum
cccacgcgtccgaaacatagtatattgttattaggagtcaatggcagggattggtaaaacggctccagatttcgaggacttattgccggcgatggcggagaagctggggggagacgggctgatgagggagttgtgtaatgggttcaagctgttgatggacgaagagaaaagggtgatcactgcggcgagc

SEQ ID NO: 216341 - DNA, 415 bp, Gossypium hirsutum
gcatgttgttggttggtatagtaccggtcctttttgcgggaaaatgacctagacattcatagattgttccacaactatgtggcgaatcctgtcttggtcatcatcgatgtccaacctaaggagttgggtatccctactaaggcctactatgatgttgaagaggttaaggagaatgccactcaaaagagccaaaagattttcgttcatgttccttcagaaattgctgctcatgaagttgaagagatcggagttgagcacttgctaagggatgtaaaagatacaaccattagtacactcgcaactgaagtaactggaaaactcacagctttgaaaggtttagatgcaaggttaaaagagatacgttcttaccttgacctttgtatcgatgagaagcttcactgaatcatgaaatact

SEQ ID NO: 216342 - DNA, 290 bp, Gossypium hirsutum
aaaagaaacgccgggggcttatataaaaaaaggctgccaaccaaaacttaaaaaataagaattgaaagttcacgtagaaaatgatagggtgttacagataagtggagaaatgaacgtttataaagaagataagaacgatactttgcaccgcctttaactgatcatctgcaattttattacgaagttcatgttgcccgaaaatgttaatattggtcaagttaaagcttcaaatgtaaaatagtgtgctcaccctgacttttcctaaaatctaaattaaaaaacctgatttc

SEQ ID NO: 216343 - DNA, 179 bp, Gossypium hirsutum
  unsure (1)..(179): unsure at all n locations
cccacgcgtncgcaaaatgaaggtcattctttacattccggatttcaagctagcttttgagcatttctgcattcatgcgcggggaagagccgttttggatgaactggagaagaatttgcagctgtctgaatggcacatggaaccatcaagaatgactctctaccggttcgggaacacct

SEQ ID NO: 216344 - DNA, 409 bp, Gossypium hirsutum
  unsure (1)..(409): unsure at all n locations
gaanaccggtcgacgccacgcgtcgtttggcttcattctccactctttactttttggaagacatgctggacatcccggaggagcgaagataagtcccgaaacaacccatctcgagcctatgttcgagatgcaaaggccatggctgccactccagctgacgtgatagagtacccaacatcttacgtcttcatcgtggacatgcccggcataaatcacggcgagatcaaggtgcaggttgaaaacgagaatgtgcttgtggtgagcggggagcgaaagcgtgagaaagagaaagatgagaaagaaggggtgaagtatgtgaggatggaaaggagagtgggcaagtttatgaggaagttcgcattgcctgagaatgcgaatatggataagatatctgcagtttgtcaagatg

SEQ ID NO: 216345 - DNA, 410 bp, Gossypium hirsutum
  unsure (1)..(410): unsure at all n locations
aaggagatgatgtggtttgtgtganttttatttctgcaacattggctgggtcattgggcacgttgcatggctctcaaattcggattggtttacctaccctcactgataaagacaaggaggttataagtacttggggagttcaaaacaaaattgacttcctctcactatcatacacacgacatgcagaagatgttcgccaagctcgtgagtttctttcaaagttgggtgacctctatcagactcaaatatttgcaaagattgagaacatagagggattaaaccattttgatgagattcttcaagaagcagatggtatcattctttcccgtggaaatttgggcattgatctcccacctgagaaggtgttcttatttcaaaaagctgctctttataagtgtaacatggctgga

SEQ ID NO: 216346 - DNA, 272 bp, Gossypium hirsutum
  unsure (1)..(272): unsure at all n locations
gnncgaaaaggatcagacctcgggggggttctgaagctgcttggagagcatgctaaaaatattcttctaatgtcgaaagttgaaaatcaagaaggggtagcaaattttgatgacatccttacaaattcagatgcatttatggtggcacgaggtgaccttggaatggagattcccattgaaaagatatttctggcacagaaggtgatgatttacaagtgtaacatccaaggaaaacctgttgtcactgcaacacagatgttggaatccatgat

SEQ ID NO: 216347 - DNA, 384 bp, Gossypium hirsutum
cccacgcgtccggtttacactgcccggttctatgctgatatagttgaatatctggttgaccgatggaagttgaaggaactcattggactttcacccgagggccgtgaagctcaggaatttgtgtgtggacttgcaccgagaattagaaagctagaggagagagctcaattgaggaccaaggaatcacccagtgttccattcagttgggtttctggtagagaagtgaagctctaaattggctatcctccaagtgacttgtaatacaagaaagaaacaacagggcttaaggaggagcatgatgaaaactgcaactctgtgtttagctggaatgcaataagtggaagaagtgtgtgtgtgcttgttcgttgttacttttcttaaaac

SEQ ID NO: 216348 - DNA, 360 bp, Gossypium hirsutum
agcgaacccatttcacagagctgttcttttatggctgaggaagccaaaaggagagctgaaattgctaggttgagagaactgcacacactgaaagggcatgtggaatcggtggtgagattgaagaacctggacatagacacaatccagcaagcgtacacggtgtaaggcggtggaatggtattccgaaggaatagtggaaaatgtaatgagagggagcgttttcctgcgagtgaagctctaatatatgtatcttttattaccttaatcccgtccgccattttacaagggaaaggttattgtttatggcattttatgtttatattagtagtaaaaaaccatgtgttttgcttttgttgtagt

SEQ ID NO: 216349 - DNA, 380 bp, Gossypium hirsutum
  unsure (1)..(380): unsure at all n locations
agaaagatgtgtattctgtgtgggcacttctttacgaagacgttactgctagggtcaagaagttgatggaaggtttaagatccgagttcggcgggccacagttcgagccccacgtcacggttgttggggccatcagcttaaccgctgatgatgccttggccaagttctggtccgcttgtgatggccgcaaggcttataatgccactgtcgatcgtgtggctaccgggactttcttttatcagtgcatctttttgttgcttcatcccactcctgaagtggcggaaactagtgctcattgtagtagccattttggttacaagagctcaacancaggagagaagaagaaagctcaagaaaagctaatatgctggatgaaagca

SEQ ID NO: 216350 - DNA, 433 bp, Gossypium hirsutum
  unsure (1)..(433): unsure at all n locations
ccacgcgtccgctgaaatggcgatgaaaattttcagcgnngtcntctttgctctcctcttcctcgcatcgccgttttttcaagatgctaggtgggaatcaaaagcagaggcagatgttgcagaagctgttgaaggaggtgatctcggtattgttggggaggatgttcaggattttggtgatcctaattacagttcagctcctgaagttaaaactgtttgcgttttccccaaaaatagtgccaaattggttctggctggagaacagactgagctcctcgttgggatggaaaatattggggagtcacctgtgaatgtcattgctatcaaaaccagtgttcatcttccttttgatcatcgnatgcttgttcaaaatcttacagcagtggctttcaacaatgctactgtacccccttcagttcaagctactttccct

SEQ ID NO: 216351 - DNA, 393 bp, Gossypium hirsutum
  unsure (1)..(393): unsure at all n locations
acgcgtncggtacactgctggaatcaatttgaacattcttttttctctgangctcttttgctgactgatgaatgttatgcattgaaggcggcttatatacattctgtcaaccccttcacttgtgttgccgctgaaatggctcatagattttccacctacaaaaacactttcaccattggaagttctcatgctgtggatccttttaccgtggtaaaaacacggttctctgacaatggaaaggttggaatgctgtgccaacgtgaatggaggcccaagtcacttgtaacattttcggcagagtatgattcaaaagccataaatgcatcccctaagatggggcttgcccttgctcttgagccttgacaggaaagtcttattttggattccatattt

SEQ ID NO: 216352 - DNA, 420 bp, Gossypium hirsutum
cccacgcgtccgatctacaacagtttgttatccattgcttccctgtttcctgtaagcgggaaagatagaaaatgaaggtggttgctgcttatttgttggctgtacttggaggcaatgcctctccttcagctgatgatcttaagaacattcttgccagcgttggagctgacgctgaagaggaaaggctccagcttcttttatctgaagtgaagggaaaagatataaccgagcttattgcatctgggagggaaaagcttgcctctgttcccagcggtggtggtgttgctgtggcggcatctgcacccggagccgccgccgccgccgctcctgctgcagctgaaactaagaaggaagagaaagttgaggagaaagaggaatccgatgatgatatgggcttcagtctcttcgactaaaactacc

SEQ ID NO: 216353 - DNA, 374 bp, Gossypium hirsutum
  unsure (1)..(374): unsure at all n locations
catcaacaaggctgttgtcgcaataatcntgcccatgatcgntgaaggcagtggggggtcaggtttttgtgcttggggggggtgtacaactgacttgaaccgtcaatgcccgtcggagctccgggttggagacggtgacgcttgcaagagcgcgtgtgaggcattcgggagtcccgagtattgttgcagtggcgcgtatagcacacctgccacatgtaagccttcagtttattctgagatgttcaaggccgcttgtcccagatcttacagctatgcatacgatgatgctacaagcactttcacgtgtactggagcagattatacggntaccttttngcccctcttcttctaatcaaaaatctttcgagagatgc

SEQ ID NO: 216354 - DNA, 401 bp, Gossypium hirsutum
  unsure (1)..(401): unsure at all n locations
ccacgcgtncgcccacgcgtccgcccacgcgtccgcctactcgtccgcccacgcgtccggaagaaagtctggcgttccttggagagattggacaaagcacatctttaaggcatgcagttcaactgttatcacctgctagcattgtggcaaaaatgaatggtcgagacaacatatgcaaggcggatcttgaggaagtaagcaagctatacatagatgccaagtcttcggcaaaaattcttcaagagcaacaggaaaaattcatttcatgataatcctatttttatatcttctttcctcttgccctgcagttttaggttgaattttgttgtgcattgttttctctcagttggacaattgatcattagtatgtgcaatgcangatgattaaatgatttattttt

SEQ ID NO: 216355 - DNA, 351 bp, Gossypium hirsutum
attccttatgatcctcggtttaaaccgtctatacttggaaagctttctatgggaaggatcattacatcgtccggtttcaggaacctggagtaatagaagcagagtttgcagagattggtgtaggacgagcagttttggagctgttatcgtatcgggtacccgacccactttatttaccaaagggaaatctattcgggtatccactagattctccggttaacttgccgccatggctgtcggagaaagatgccgattgctatgccacccagttccaaataaccggcatcccggtgccctcaattattaccgcaattttgatcgatactgggaactatttgcaccatggtggaa

SEQ ID NO: 216356 - DNA, 359 bp, Gossypium hirsutum
tgccggaggttggtgcatctctcctctttatcactttgatatggctcagcctgcctgggaaaagattggtatttacagaggtggcattgtgcctgttttgttccaaagggttccatgtaagaaacatggtggagtcaggttcactatcaacggtagagactactttgagcttgttttgattagcaatgtaggtggggcaggatccatccaatccgtatccgttaaaggctctaaaactgggtggatgtcaatgtcaagaaactggggagctaactggcaatccaatgcctacctcaaccgtcaatcgttgtcgttcaaggtcaccactaccgatggtgttacccgactgttccctgata

SEQ ID NO: 216357 - DNA, 384 bp, Gossypium hirsutum
gcttatgatactcgcaatatcttccagtctcttgatttagcgtggactttgcttcgtatcttcccacgtgaactcctgcaccgtataccagcaaagacccttgaccagtattacagccgtgatgcaacaagctaagctgatgaaagctagtctgctctttgcttatctacatatatgtcaattttcatataagtcacccgtgggttgttttatttgccaacgctgcttcatggcctcgaccagaatcaaatctcagtggacggtatctctatgattgcatatgttaattcgggttcccgtttcattaaagttcggggcatgtgattattgtagtagtaagtgtaattctttgtgttggggaaagccattattttgtgattcaaa

SEQ ID NO: 216358 - DNA, 387 bp, Gossypium hirsutum
ccacgcgtccgcaaggctactgtgttgttcatagttccattagatttatccttttgtattcgtttttgaagaggaacatgtccaagaaagtgatggtctttctctcttcatgcaactcagtcaaatttcatgctgaacttcttagatatattcatgtggattgtcttgatatccatggaaagcagaaacagcaaaaacgaaccactaccttctttgacttctgcaaagcagaaaagggcattttgctttgcactgatgttgctgctcggggacttgatatacctgctgtggattggattctgcagtatgatcctccggatgaaccaaaggaatatatccatagggttggtcgaacttgccgtggggaaggtgcaaaaggaaatgctc

SEQ ID NO: 216359 - DNA, 345 bp, Gossypium hirsutum
ggcattcccaaaggatgaccctaccataccttgcaagctcactgcctttctggggtgcaaggctggtatgacacacattgtcagagaggtcgaaaaacccggatctaagcttcacaagaaggagacatgtgaagctgttacaatcattgaaacccctcctatggtgattgttggggtggttggatatgtgaagacaccacgtggccttcgctccttgaacaccgtctgggctcagcatctgagtgaggaagtcaagcgccggttctacaagcactggtgcaagtccaagaagaaggcttttgtcaagtactcaaagcagtatgaaagtgaagaaggaagaagagt

SEQ ID NO: 216360 - DNA, 312 bp, Gossypium hirsutum
gacaactcaacttatttacacgtgctaatatacttcaagaacatgaccattgagggggctttatcccatggcgtgggggatcctaactgcttattgaactttggtgacagtatcacaacagatcacatttctcctgcatgaagcattcataaagacagttctgctgcaaaattcctacttgacctatgggtggaccccaaggacttcaacttttatggaaatcgtctcggttacgattaagagatcgcacgtgaaacttttgctcaccttccccttgtgaacaaactgttgaatggttaatttttcccaaaa

SEQ ID NO: 216361 - DNA, 372 bp, Gossypium hirsutum
cccacgcgtccgcgtgttcgagttatttgtggtggtcgaaagaggcctgttcccaaagggattgtctatggtaagccgacagaccaaggtgttacccaattgaagttccagcgcagcaagcggtctgttgcagaggagcgagctggtcgaaaattaggaggtctcagagttgttaactcatactggatcaacgaggattctacttacaagtactttgaggttatccttgttgatgttgcacacaatgcaatccgcaacgacccgagaattaactggatctgcaatcccgttcacaagcacagggaacttcgaggactcacatctgcaggtaagaaaaacaggggtctgcatgggaagggtcacttgcaccac

SEQ ID NO: 216362 - DNA, 365 bp, Gossypium hirsutum
aggagctcaacttgtaaccacaaactcttcaccagttgtgaatgcaacttcagaatcaactgtctccgagttgcgggaagaaaggactgaggaaggtccctccaacccatctattgtctcatgtgaaaatcaggtgctcccaaaactagtatgccctctatgtcgtggtgaggtaaaagattgggttgttgtagagcctgctcgtcatttcatgaatgccaaatctagaagctgttcctctgaaacatgtaattttactggttcctataaagacctaaggaaacatgctagactagagcaccctgctgcccgcccatctgaggctgatcctgagcgacaacgaaactggaggaggttggagcgtc

SEQ ID NO: 216363 - DNA, 384 bp, Gossypium hirsutum
  unsure (1)..(384): unsure at all n locations
acgcgtccggctcaaagtgaacggttctgtggggaactaaatcngttgttgatgtgaatgtgannggtactcaaagagagattgcttatagccagagggaagagtgcgcttgcatcnnaggtttgtttgagaatnngggcacacgaacnnaaggagtgttgtgcgcccttgtgaagagcttcaacaanggaaaggatgaaacaaaaccttgatatttttgattggaagctcactgctgatgagtcgcataaaataagccaactcccacagtgcaaagggtttccaggtgcggcatttttatcagatgacggcccttacaagtctgttgaagagctttgggatggagagatatgaatttcattatccactggatttattacaaat

SEQ ID NO: 216364 - DNA, 363 bp, Gossypium hirsutum
  unsure (1)..(363): unsure at all n locations
cccacgcgtccgaaaggagctaactggcctttcagccgaggggcgtaaagctcaggactatgtgtgtgcactttcttcgagaattagaaggctggaggagagagcacaagaaaaggccaaggaagcaccctgtattccattcagttggatctttgatagagaagtgaagctctaaaggtcttgaaatgcactcgaggaaacaaacttgaagaagctgaatttaacttgtctttgtattctgatgaaatggtgctggtgtgtgtaagaggaatagtgcctggctttagtggttntagatgttttgttgtattagatgtagcgtctgtctgtcatatcatgtgcgaatagcatgtgctgtgtcgt

SEQ ID NO: 216365 - DNA, 343 bp, Gossypium hirsutum
gttcaaatgcggtggagtttgtcttgtagtagggattcaacatactttaggagacggcgcagcggctcttcatttcatcaatagttgggctgacacttcacggggcttgacgcctgccattgcaccattcattgatcgaactcttcttcgtgctcgggacccaccaacgcctaagctccaccatgttgaatatgacccttcaccggcattgaagtctgcattaaaatctcaatcagatgatcataagccatccattgtctccacctttaagctcacagctgatcaattgaacaccctgaaagccaaagctaatgttgcaaatgcaaacggtggtataaaatat

SEQ ID NO: 216366 - DNA, 394 bp, Gossypium hirsutum
ggcgtggacaaattattcattaaccgaattaaaaaataaaagatctgactaagagaacaaacacaatcaaaaatcaaatacaaaaaattctaattataaaagacaagaaaaacgaatttctaactcaagaaataaatagtagttctaacaaaataagttatcaggataaaatattagaatcatcaaaaaaattttggcaaatagtaaaaagaagaaatattcgattaatccggaaattctatttttttataaattttttcattgaaaagatatacatggatattcttctatatatcattaatattccaagaaccaatacccaactttttcttgaatcaacaaaaaaaatgattgagaacttcattcacaataatgaagcaaatcaagaaagaat

SEQ ID NO: 216367 - DNA, 336 bp, Gossypium hirsutum
cccacgcgtccggcttggaaggcaactttctaacacaaagctgtcaagcaacaagacagtcaggaggattagggttcgtggtgggaatgtgaagtggcgtgctttgaggctcgacaccggaaactactcatggggaagtgaggctgtgactcgtaagaccaggattttggatgtggtgtacaatgcatccaacaatgagctggttcgcactcaaactctggtgaagagtgctattgttcaagttgatgctgctccattcaagcagtggtatctccagcactatggcattgacattggtcgcaagaagaaatcagctgcagccaagaaagaaggaga

SEQ ID NO: 216368 - DNA, 363 bp, Gossypium hirsutum
gctgttccagagggcgagcatgttttttgggtggctcacatctttgcttcatttaaggacacattcattcatgtgacggatttgtctggaagggaaacaatggttcgcattactggtggcatgaaagtgaaagctgatagggatgagtcttccccttatgcagccatgcttgcagcccaagatgtttctcatcgctgcaaggagttgggtattactgcccttcatataaagcttagagctactggagggaataagaccaagacaccaggtcctggtgcacagtcagcacttagagcccttgctcgttctggcatgaaaattggacgcataaaggatgttacccccattcccactgacagtacc

SEQ ID NO: 216369 - DNA, 407 bp, Gossypium hirsutum
cccacgcgtcctcccacgcgtccggtctactggaaaatatgagaagaaggtttacgggttgccaaagcacctcggcgagaaagttgctgcacttcacctcggcaagctcggagctaagctcactaagctcactaaagatcaagctgattacattagtgtgcctgttgaaggtccttacaagcctcctcattacaggtactgagggggacagttaatgagtttttatcgagaaagaaaaagcatccggatggtttgattgtttcttgttttactgaaatttcatgatggttaggtttttgttttatttttagagttcttttttgtgtttgggtgatgggaaagtgtctggggatgggaaaatgatgtgggaattgggcttttcttggttgaagatgaccaaattggtt

SEQ ID NO: 216370 - DNA, 343 bp, Gossypium hirsutum
tcaaagtgttgagttttgcaaggatttttttggcttaggagaagctgctacggtgctaggtgcaagtactgtttcaggtttctttgctgctgcttgcagtttgccttttgattatgtcaaaacacaaattcagaaaatgcaacctgatgcttcgggaaagtatccatatagcggctctttggactgtgccatgaaaaccctcaaggctggaggaccattcaaattttacaccgggttccctgtatattgtgttaggattgctccgcacgtcatgatgacttggatattcctcaaccagattcagaaggcagagaaaaaaataaggttgtagagcgtggtcact

SEQ ID NO: 216371 - DNA, 353 bp, Gossypium hirsutum
cccacgcgtccggtcattccacattttataacgttgagaggtggttaagagagttaagggatcacacagatcccaacatcgtagtcatgctcatcggtaacaaatcagatcttcgtcacctcgtggccgtcccaactgaagacgggaagtctttcgctgagaaagagtctctctacttcatggaaacttccgctctcgaagctacaaatgtagagaacgcatttgccgaagttcttactcaaatctaccatatcgtaagcaaaaaagccatggagacagctgacgaagggactgcatcaaccgttccttccaaaggcgagaaaatcgatgttggtaaagacatctccgcaatg

SEQ ID NO: 216372 - DNA, 372 bp, Gossypium hirsutum
  unsure (1)..(372): unsure at all n locations
ggccgatgatgttgctagtataattatttctcaaggcagggctacagtatgtggggcctgaacttgatgctatgaaagctgttgctgacgcccatgccaaacgttccctgaagcttttcgagattgctcttcatgatttcaaggctcaactagaggaagacccaattgttcacaggcacctttcttcgctatatgacactctattggagcagaacctgtgccgattgattgagcctttctcaagggttgagattgcacatattgctgaactgattgagttgcctgtagaccatttggagaagaaactttctcagatgattcttgataagaagttttcagggacgctggatcanggtgctggatgcctcgtca

SEQ ID NO: 216373 - DNA, 393 bp, Gossypium hirsutum
  unsure (1)..(393): unsure at all n locations
gtaggaaggaagtggataccaatcctgtgctggaattgggtcgtgttttgtccttggattcctctgctaatgtattagatattgaagagacatgcgaggcaagtgattttgagaagcgaatggcagcgaatgcatttaacagcatcttgtctgtgctaaccaactatagtgagtcaactggcagattggtctgtgggacgagatgcagtgtacctggggtatgctacatcagttcatcattaaatatatcacttggtagaatcagacaaagctttgtactaattgatccacatttacccgggatgcctatagtttatgcaagcgatgccttcttaaaaatgacaggctatgataggcatgaaatatngnngcttaatttttgcagtttgaatg

SEQ ID NO: 216374 - DNA, 384 bp, Gossypium hirsutum
taactctccaactgttgtttccactttttctcttccagatctgaatcgcaaaagggaattttcagttgaaaaagatgggtcgcggagttagcagtggcggtgggcagagctcattaggttatttgtttggtagcggagaagctcctaaaccagggacaaacaactcccaagctgctccagctgaagcaccagctgtctccaaacctggccctgctcctgaaccagtagatatttccaagcaaattcctgctggtattaacagtatttccgcaaacaattacatgcgtgccgatggtcagaatactggcaatttccttacggatcgaccttccaccaaggttcattctgcccctggaggcggatcttctctggactacctatttg

SEQ ID NO: 216375 - DNA, 381 bp, Gossypium hirsutum
cccacgcgtccgctttttcggtaacttatagatgagggttgtgatgcttggccttgatgcagctggaaaaacaactatattgtacaagttgcacattggagaagttttatctactgtccccactattggattcaatgtggagaaagttcaatataagaatgtgatgtttacagtttgggatgttggtggacaagagaaactaaggccactctggaggcactactttaataacacagatggattggtgataattaccgctctctctctcctcttaaaaaaatggaatacattttcaccctccaattgttcttctgattgttttggtaatttgtcaaaactgaaagatttatttgtaaagtgatttactccgtcttcactact

SEQ ID NO: 216376 - DNA, 372 bp, Gossypium hirsutum
caaacatggctgcttcacttgttcttttctctcttttgctgcttcatttcactcaagctgaagaattgatgagcattgatggagctccaagcccttcacctcaggcacaacctattgattgtggagtagcatgtgaaggaagatgcagactatcaaagaggccaaatctgtgcaaaaggtcgtgtgggagttgctgtcatagatgcaagtgtgttccaccagggacgtcaggcaactatgaagcctgcccttgctatgccaacttaaccacgcgcaaaaatgttcgcaagtgtccatgattccataaatgttccacttgtttgatgttatttacttagttcaagataagtctttctttctactgggaaatga

SEQ ID NO: 216377 - DNA, 394 bp, Gossypium hirsutum
ctacaaatggttgaagccagggggcatatttcttataagtgattactgcaaaagcgcaggagcttcatcgcccgaatgggcagagtacatcaagcagagaggctatgatctccatgatgtaaaagcttatggccagatgcttaaggatgctggttttgatcaggtcattgcagaggatcgaaccgatcagttcatacaagttctgcagcgtgaattagacaaagttgagaaggacaaggataccttcatcaccgacttttctcaggaagactacgacgatatcgttgggggatggaaggcaaagctgattaggaccagatttggggagcagagatggggtcttttcattgccaacaaaaactaagtcctgcttcttctctaatggtactttctc

SEQ ID NO: 216378 - DNA, 383 bp, Gossypium hirsutum
aatcctgggaaacgaatccaggccgttattacatttggaaaaggtttcagtggatcgaattcaattgtccaaggctgaacagttagatagtgaccaaacactatccatggaccttgagtcagagccaggtcatagtctaccctgcattggaaacggacaaggaaatatccatttttgatatccatcagatgaaaaggttgagagggtttccaaaggctagaaatacgattgtgtaacgccccgtaacctatgttccatcctaacagcttgacaactacgatagtctccatatccctaactaaaaaattccttataagctccgagaagtcaatggcagggattccattaatggaggatcgaagaatgtcaccttcttcaatgac

SEQ ID NO: 216379 - DNA, 396 bp, Gossypium hirsutum
cccacgcgtccgagagaattaagggatcgattgtcaatgtcagtggagagactaaatcagtcaagtgagagaattaaggagagtagaagaactgttctggaaacagaagagctcggtatctcgatacttgaagatttgcatcaacagcgacaaactcttttacatgcccacaacaagctttatgatgtggatagcgccattgacaagagcaagaaagttttaacaaccatgtcaagaaggattaccaagaacaaatggatcgttatctcgataatcgtagcacttgtccttgcaatcatcttaatcctgtattacaagatttcacatggctgatgaaatcttttgaaccattaatggtctgcaattgtattatgtgatccgcatttgatactttca

SEQ ID NO: 216380 - DNA, 375 bp, Gossypium hirsutum
  unsure (1)..(375): unsure at all n locations
gcgaccacgcgtccgtgtaatcaaaanttgccagcgccatgtcagagagcggtgagatcaaggttgaaggacgggtgagggatggaattccccatttgacgaaagtagggtcatttgaagtggatgtgagcttggaaggtagcattatactttgcagacaggttgatcagccaggcatgatcgggactgtcggcagcattttgggcgaggagaatgtgaacgtgagcttcatgagtgttgggagggttgctccaaggaagcatgcagtgatggccattggagtcgacgaacaacccagcaaagaaactttaaagaggattggtgaagtccctgccattgaagagtttgttttcctcaagttgtangctggctgtg

SEQ ID NO: 216381 - DNA, 181 bp, Gossypium hirsutum
cccacgcgtccgaaaaagtggaagaattctccgccgttgaaggggtagactgtattcaaatgggtccgttggatttaagtgctagcctgggttacctctgggacccgggtcacaagaaggtaagggagatgttgaggacggcggaaagagaagtgcttaagtccgaccggaaagacggcgg

SEQ ID NO: 216382 - DNA, 379 bp, Gossypium hirsutum
cccacgcgtccgcccacgcgtccgccctcgcgtccggcttttgcgtggagagaaccggagctactgccgtcgtcgccgccatggtgaagtttctgaaatccaacaaggccgtgattgtcctccaaggccgatatgctgggcgcaaagcggtgatcgttagatccttcgacgatggaacacgtgaccgcccctatggccactgtttggttgcagggataaagaagtacccgagcaaggtcatccgcaaggattccgccaagaaaacagcaaagaaatcgcgcgtcaagtgcttcgtcaagctcgtcaactaccagcacctgatgcccacccgctacaccctcgacgtagacttgaaagacgtggttaccgtcgatgcact

SEQ ID NO: 216383 - DNA, 380 bp, Gossypium hirsutum
  unsure (1)..(380): unsure at all n locations
ggaagccatctttctgatttctactctttttcttcttcttctaacaccattgctatccacatcgaagccttaagtaggaaacccatgtctgttagaggaaagggggaaaaagatgatcgcttcgataatgttaatgatgctttgattttgttcaataagatgattgacaagtacccaaagccttccattgtggaatttaataaattattaggagccattgttaggatgaaacattatgccattgttgtttctatgtatagacggatcgatttattgggcgtttcccgtgatgtttattctttgaacatctngattaattgcttttgtcaattaggtcgaattgattttgagttttctggtttggngaaagtgctgaaatt

SEQ ID NO: 216384 - DNA, 265 bp, Gossypium hirsutum
ctttactagtttctgctctgtttttatggagttgatgagaatttttagctatgcttcgattattctttcgatttcagtttatttgcttccaattatggttaattcgattgggatcaattacgggcaaatagcagacaatcttccttcccctgaaaacgtagtgccgctcgtgaaatctattggggtcaccaaagttaaactttacgatgcagatccgagagtgctcggcgcattcgccaactccggcgttgaattcatgatcgga

SEQ ID NO: 216385 - DNA, 301 bp, Gossypium hirsutum
cggacgcgtgggctgacgcgtggtcttctatcattgacatggatgccgatgtcataagcattgagaactcacgttcagatgagaagctcctgtcagtcttccgtgaaggagtgaagtacggtgctggaattggacccggtgtctatgacatccactctcccagaataccatcaaccgaagagattgctgacagaattaacaagatgcttgccgtgctcgagaccaacatcttgtgggttaaccctgactgtgggctcaagactcgcaagtacgctgaggtgaaaccagccctgagcaacat

SEQ ID NO: 216386 - DNA, 335 bp, Gossypium hirsutum
cccacgcgtccgataagagctttttatataaatccagcaaacagcaggttttctaaaggaatatatattccctggaggaaccctgctttctttggataggaatttatcagccatggctgctgcaacaagattcagtgtggagcatgtggaaaatataggaatgagttattaccacacactgagatggtggagaaaacttttcctggaaaacacaagcaaagttctagctctggggttcgacgagaagttcatgaggacatgggaatactatttcgattactgcgctgccggttttaagacaggaactcttatagattaccaagttgtattttcaa

SEQ ID NO: 216387 - DNA, 347 bp, Gossypium hirsutum
  unsure (1)..(347): unsure at all n locations
aaacttataacgttcgatcgtttaactcatacccatttttaagngggggaaaggtggagagttcttagtcgtaagcaggatcaatggctccttcaactctgacggctcttgcggaagagaaaaccttgcaggcaagcttcgttcgtgatgaagatgagcgtcctaaggttgcttacaaccaattcagtaatgatatccctgtcatctctcttgctggtatcgatgatgttgatggcaagaggggtgagatatgcaagaagattgttgaggcttgtgaggattggggtgtcttccaggttgaggatcatggtgatgatactaaactcgcggtcgaaatgacacgtttt

SEQ ID NO: 216388 - DNA, 354 bp, Gossypium hirsutum
ggaaaagtaaagtatggagccggaggtaatgaaaggtggtggcccgaagaagaagcgcgttttaaggtctgtcaaagctggtctccaattccccgttggtaggatcggccgttacttgaagaaaggaaggtattcacagcgtgttggaaccggagccccggtttacttggctgctgttcttgagtacttggctgctgaggtcctggaattggctgggaacgctgcacgtgacaacaagaaaaacaggatcatcccaaggcacgttctacttgccgtgaggaacgacgaagaattagggaagcttctcgccggcgtaacaatcgctcacggtggtgtgttgccgaacatcaaccc

SEQ ID NO: 216389 - DNA, 361 bp, Gossypium hirsutum
cggacgcgtgggcgttcgcgtggttgttcttctgacagtccatatgctggtggagtgtgtctagtcaccattcattgtggtccggactatccatttaaaccaccaaaggttgcattcaggacaaaggtctttcacccaaatattaacagcaacggtagcatttgccttgatattttgaaggagcagtggagccctgccctcaccatatccaaggtattgctatctatctgctcactcttgacggatccgaatcctgatgacccattggtgccggagattgcccacatgtacaagactgacaagagcaagtatgagacaacggctcgaagctggacccagaaatatgcgatgggttaacgtg

SEQ ID NO: 216390 - DNA, 368 bp, Gossypium hirsutum
caaaatccttcccgttcattgttccttatcttcttttcgagaataccatgtcggtgaccaagttcaatgctatgataggtggtcttttccaactcggcagtgcatacgagtgggtcgttacgaaaaaatccggacgatcttcggagggtgatcttgtttcattggttgagaaaaagccaaaacaccatcgggttggatcagaacccaatcttgaggaaatgaaagctgatctccagcaagaacaggaacaaaaggctcgtaaaaagaagcataatagaatatacacgaaggagctctctctggcgttcctcctcctaacagcttcagctaggagcttactgtctgcacagggtatccatttctatttc

SEQ ID NO: 216391 - DNA, 183 bp, Gossypium hirsutum
cccacgcgtccgtcggatcgcggcgacgtgggcggttcgctgcccgcgacgtcgcgagagagtccactgaaccttatcatgtagaggaagaccatgacagtgggtgttattgaatgtctcatctaattttaaggatgcattgctaataaagcctatgacaagctgagttggacctttgtgggc

SEQ ID NO: 216392 - DNA, 315 bp, Gossypium hirsutum
aaaacccggccggacccacgcttcctaccaaacaacgatttatggctattctatctacggacacattttaaccaaccaagcgggccggttcaaattatgtgttggcacatgaacccccactaccatgcccgggaaaggattcacaattcggtgaggttaacatcggaaggggcaatccattccattaacgtttgccaataagggatggcttaagaaactttttggtcatgtttgattttggcacacccatggatctgcgtatttgttccatcccgacatttataccgaccgaaggatcttcgttcagggtattga

SEQ ID NO: 216393 - DNA, 341 bp, Gossypium hirsutum
aaaaaggggaacgctccatataggatttttaatttggggaatacttccccggttaaggtgccggagctggtgaacatcctggaaagacatttgaaggtgaaagccaaaaggaatatcgtagatatgcctggaaacggtgacgttccattcactcatgcaaatatcagtttggcccaaagagaattcgggtacaagcccacaaccgatttgcaaaccgggttgaagaagtttgttagatggtatttatcttattatggttataacaaccgtaaaggtctacaataaaatttatttttggttttaaatgtagggattctctcggtttcccgatagaatgaaat

SEQ ID NO: 216394 - DNA, 334 bp, Gossypium hirsutum
acccaacgacgaggcaatggcgaagcttacgacggaccagttgagcgaaccaggcgcgccggagcaaatcatatattggcatataatcccagagtaccagacggaggaaagtatgtacaatgcggtgaggagatttgggaaagtgtcgtacgatacattgaggttgccgcataaagtgttggctcaagaagctgatgggtctgttagatttgggcacagcgatggatctgcgtatttgttcgatcccgacatttataccgacggaaggatctccgttcagggtattgacggcgtccttttcccgctggaagagaaagctaaggaagaaaagaaa

SEQ ID NO: 216395 - DNA, 341 bp, Gossypium hirsutum
gcatttccactcgcaatgggagagaaaattaacggaaacaagcaaggaggagcggatgggaaaaagaaggaaatgagttcttcaacctctgttttcaaatttgagtgtctctgtgatggttgtgcttccaaaatcctcaaatgcattaatcaatttgaaggggtggagacggtgaaaccagagatgagctcaaacaaagtgacggtgataggaactgcggatcccactgccattaaagagaaactcgacaagaaaacgaagaagaaagttgagctcatttcttctcaacccaagaaagatgataacaaaagaggaaaaaaaagaaaaaaaaccttgaccac

SEQ ID NO: 216396 - DNA, 361 bp, Gossypium hirsutum
cggacgcgtgggcggacgcgtgggggtgcataccaagtaactgcacaaccgatagttgagttggatttaagctagtgcgccagacattattgctactacaagatcataacccgagaacacgctatggaagtatccgatctgcagcattatactatataaacttcttaatattagcatggaggacagtgtacggtatagtaacagacgggctatcaatgatattccgtatgttaaacgatttcttgggtttgatcggaactgatgcgatgtgtacagtaacaggttactagctgatcgagatgcacattgcgcaagctaatataccaaagtatacattgatgtgggtatggctgaaaatact

SEQ ID NO: 216397 - DNA, 147 bp, Gossypium hirsutum
gaaaatgcaacctgatgcttcgggaaagtattcatataacggctctttggactgtgccatgaaaaccctcaagtctggaggaccattcaaatcttacactgggttcccccgatattgcggtaggattgctccgcacgtcatgatgac

SEQ ID NO: 216398 - DNA, 350 bp, Gossypium hirsutum
accttgtataacaaaattgggaaggccgttttcacttgtccgtcatggctttcgcctggtgcaaagaaattcataaagcgtattcttgatccaaaccctcttacacgtataactatccatgatatcttaaacgatgaatggttcaagaaagggtacaaaccacccaaatttgaggaggaagaggatgtaaatcttgatgatgtagatgcagcttttaatgactcaacggaacactttgtaacagaaaggaaagagaaacccgagtccttgaatgcttttgagtttatctctaggtctcaaagctttagccttgacaagttgtttgagaagcctacgggtcatgtgaagcg

SEQ ID NO: 216399 - DNA, 333 bp, Gossypium hirsutum
cttggaatgtggtagctgttactacagcctttatcaaaggagaaggtccaacaatttggtttcttgccattatatatttcatatctggggtccctggtggctacgtaatgtggtatcgccctctctatcgtgctatgaggactgatagtgcgttgaaatttggatggttttttttgttttacttgttgcatattggcttttgcatctttgcttcagttgctcccccaattattttcaagggcaaatcccttgcaggtattttgcctgcgattgatctcattggccacaatgctttggtggggatattctacttcattggttttggatttttct

SEQ ID NO: 216400 - DNA, 337 bp, Gossypium hirsutum
cacagccttgcccttgtggttaggaagttttgagctcacggtgggctcgcacggggctggcatgaatctgccaaggcaattgaaaagcacaatgcgcatccttgcgttatagctgatgactgcgaccagccggactatgttaagctggtcaaggcactttgtgctgatcataatgttaaagtgctacgtgccccgagcgcaaaaacactcggcgagtgggctggtttgtgtaagatagactctgagggtaaagcacgaaaggtagttggttgttcctgcgtagttgtgaaggattatggtgaacaacatgaggccgtcgaagttgttctgcagcaca

SEQ ID NO: 216401 - DNA, 380 bp, Gossypium hirsutum
cggacgcgtgggctttcattctctctccctaaactctcattctctcgctctctctctctctctctctttcttcacaagaaaagtttttctctcgtgaatccatgtcggaggaaaagggtcggccattgccaaaatttggtgaatgggatgtcaacgatcctgcatctgctgagggattcactgtgatctttaataaggcaagggacgagaagaaaacaggtggcaagcctgagtcaccggcaaagtctgattctaatgttaagcctggagctgatcctggcaaaacccaacctaaaaaatggttttgctgcgttcaagccccgcctgcggaatcttgacgacgccctactcgtataagacataagagcttccacaagtat

SEQ ID NO: 216402 - DNA, 252 bp, Gossypium hirsutum
cccacgcgtccgatgaatagtcatcgactttccggaaagggtagaagaatgggacctatgatgggacctaccatggcttacaagcctattgatcattacgcttcaaccgggttattctattccacctcttaaaacgaaaggaacttaaatcaaaatacttaatagcatggcgatccatttatacaaaacttctaccccgggcccccccatggagccgcagacagtgaaagtggaaatcacaatccatgaaat

SEQ ID NO: 216403 - DNA, 154 bp, Gossypium hirsutum
tacgagaggaaccgttgattcgcacaattggtcatcgcgcttggttgaaaagccagtggggcgaagctaccgggcgctggattatgactgaccgcctttaagtcagaatccgggctagaagcgacgcacgcgccggtcgcccgattgccgaccc

SEQ ID NO: 216404 - DNA, 406 bp, Gossypium hirsutum
agctcctaaatacaagcttatcactcctttaatattctctgatcgtatgaggattaatgggtcacttgcaaggaaggcgatacgggacttgatggcaatagggttgattaggttggtctctgcgcattcaagccagcagatttacactagggcaacaaacaactagatctttagttatatttttgcttaattagttctatgaagtattgccatggttgagttttgacttggataaatgatttttcccccttcaaattaggttgaaaacttctctttggctactttttctagaatgatttagtggttgaatttcagcttctttggcactcagctttcctagatgaaattgataaggttcttaacatgtgctatatgaggaaattgacgccaagcaacacctctttct

SEQ ID NO: 216405 - DNA, 327 bp, Gossypium hirsutum
cttgcagcagctcgaagctattgtgggcaattacaagcttgtggcgtctacctcctgctcgcttctccacactgccgttgatctagtaaacgagactaagctagatgatgaaatcaaatcctggctcgcatttgctgcccagaaagttgttgaagtcaatgctgctgctcaggcttctaggaaatcctccccgagagtgactaatgaggctgttcaaaaggctgctgctgctttgaagggctctgaccaccgccgtgcaacaaatgttagtgctagactcgatgcccagcaagaaaagcttaacttacctgtccttcccaccacaac

SEQ ID NO: 216406 - DNA, 232 bp, Gossypium hirsutum
acagaacccaagatcaaaaagcggtggcgcgtgacttcacttacatcgacgacattgtgaaaggttgcttatgagcgttagacacggcggaaaaaagcaccggtagcggcggaaaaaagaaaggaccggctcaattaaggggttacaactttggaaacactttccctgtttccctcggccgattattctctattttagaaggagttctctacacaaaagcccacaaacatgt

SEQ ID NO: 216407 - DNA, 423 bp, Gossypium hirsutum
agtgatcgaaggagatctaatggaagagtttaagagctttgtaatcacgattcaagtttcgcccaagagcgagggtagtggcagcgtagtgcactggactttggaatacgagaagctgcacggtgggattgcgcatcctgagactctgctgcaattcgttcaagatatctctaaagacattgacgcccacctcacccaagcaagctaaacagtatcacatgttgctattgttgccgctacttgaagcactgttcatctatttaatgaataaagtgacttcctttctcatgtattttgatctgaatatgtatgtttagatcaatattcagtcaaggggagggagctttgtattttcttgcatgttggctttttagtatgtatgaattcaatgtatcctatgctttaattgtgtctaatgaatat

SEQ ID NO: 216408 - DNA, 452 bp, Gossypium hirsutum
cccacgcgtccgcccacgcgtccgcccacttgttcgcccacgcgtccgcccacgcgtccggttttattgatgcagtagccagcattgccaagggattgaggtggagctgccatagagaagacaccgaatatggtgtagcgaaggagaagttattagtttgccagaaaaagctctggtattccgctagcagcagttcaagatgacaatatatgtcttgcctggctaagttaaaaagtactatataatataatattattgttcttacaagcgtaacgttggagctgaaaagatggaagttgcatacggatacaagcatatccatagaaatcaaagagcctctaaattcatattcgtccattgaagggttagccctcccccaataatagtttgatttatagatatatattctttgtaaggcatctatctattctatacacagattttaaattttt

SEQ ID NO: 216409 - DNA, 281 bp, Gossypium hirsutum
  unsure (1)..(281): unsure at all n locations
cccacgcgtncggtgacattgctgcatcaactagaattatatatggaggttccgtaaatggagcaaactgcaaggaattggccgcacaacccgatgttgatggctttttggatggtggagcttccctaaagcccgagtttgttgatatcatcaaggccgcgatggtgaaaaagaattagaagttgaaaagcaggaattaaaggtgaaacagaaacaaccttctgggaaactgtaatttttgcaggtaacaccgttcctttgaacactaagtgtggtgaaaa

SEQ ID NO: 216410 - DNA, 365 bp, Gossypium hirsutum
ctcattcttttcccggttcccagacaaactcttagatcaagaacatggcaccaaaagcggggaagatgccagctgagaagaagccagcggaggacaagaagacggtagctgagaaagcccccgctgagaagaagccaaaggcaggcaaaaagcttcccaaggaaggcggagctgcggccggagacaagaagaagaagagggtcaagaagagtactgagacctacaagatctacatcttcaaggtcttgaagcaagttcaccctgatatcggtatctcaagcaaggctatgggaatcatgaacagcttcatcaatgatatctttgaaaagcttgcccaagaatcgtctatgctcgcaaggtacaac

SEQ ID NO: 216411 - DNA, 392 bp, Gossypium hirsutum
gtgatgttgataaccacattcaaagggtacttgcaagctgctgttgcaaaactcgctgagagtaccatattacagaatgcgacagagttgaaaaagattttccatgattctaaataaacagtgggagaatttgatatacgatgtagaatgtggccactgaaagaacaggtaacaagttcagcctatcacctttatacagtttttgagactcacgttttcattgctatctgccgatggtactgggatcgaatgggacaagatgttctgagctttctggaaaacaggagagagaatatatcatgggataaagggttcagaattgctggatctatactggatgatacttttgcgtcacagatgcatcaggttgttggcaatgcactatcggaaaa

SEQ ID NO: 216412 - DNA, 398 bp, Gossypium hirsutum
gactttcgtggggagcttcaaagctggtatctgttggctatggcatcaagaagctacagggcatgcttaccatggtggatgatcttgtttcactcgatacccttatagaggagtgcctcacgacagagccacgcaatgaatacattcaaagctgtgacattgttgcattcaacaagatttagaggacacagtttttttccacggctgttgagagtgccattggccatgttatcaccttttgccccttgctttcccctcgaatatatatatttttgcttgaactgtgctttgctagagcttatgctctataatgagcataaataaagggattatcaagtatttaatgatgttctatgttttgacttacattaagcatgcccaaagtaattttagtgaca

SEQ ID NO: 216413 - DNA, 408 bp, Gossypium hirsutum
tcgcgcaggaaaacgatggactcttggatgaaaaacaaaatgtgattgaacaaatgaaggacaaagttgggggaacccttgcagaaatggagaatgttatggccagaacacgacgtgaagcagacaactcaaaaaagtttgctgtacagaattttgcgaaggacctattagatgttgcagacaatttaaaaagggcttctgcccatgttaaaggcagtttctctaagatcgacgaatccaatgatactgccggagctgtaccactccttaagacactcctcgaaggagttgaaatgactgataaacagcttggagaggtgtttagaaagtacgggatcggaaaattcgaccctacaaatgaaccatttgatccaaacatgcacaatgcagtattccaagttcctgata

SEQ ID NO: 216414 - DNA, 396 bp, Gossypium hirsutum
caccgagctaactgcatctggaagggagaagttggcttcagtcccttcaggtgggggtgctgttgctgctgctgctcctaccactggtggcggtggtgccagtgctgcaccagctgctgaggccaggaaagaggagaaggtcgaagagaaggaagagtccgatgatgatatgggtttcagtctcttcgattaagccaagtaatgcaaatgtcaaggtttttcttatgcagttagtgcttctatttcaagcggtatatgattctgtatgtttgttactctctggtcgaaagttgtttttttatcatcttttaggttcgagttttctttggaaaatgtagttaaagataatccattcaagttgttactttaattttggattaaaacaaattattatct

SEQ ID NO: 216415 - DNA, 430 bp, Gossypium hirsutum
  unsure (1)..(430): unsure at all n locations
cccacgcgtncggcatggattggcatagatggcaacactggtgccattgctgacatgaaggaaagaaagatttgggacgcatacaatgtgaaggcgcaaacatttaagacagcgatagaagcagcatgcatgcttctacgaattgatgacattgtaagtgggattaagaagaagcaggctcctggagctggccaaggtccatcgaacccaaggtcgagactgaagcagatgcggatggtgagcaaattcttcctgattgaagatactgaatcacttaaactcacccttcgctttcaaactgtttgatgaaatgatgggtttgttttgttgaagatgttttaaaggatttgttgagcatcttgtgcttgtatttttgagaattttaaatctgtggttggcgttagcttttaagtcattttatctttttact

SEQ ID NO: 216416 - DNA, 399 bp, Gossypium hirsutum
ctcctcttcctatacgtcaccatagccaccgtcatcggccacaagaaacaacacgatgcatgcgatggtgttggtcttttgggcattgcttgggcttttggtggcatgattttcattcttgtttactgcaccgccggtatctcaggtggtcacattaacccggcggtgacatttgggttgtttttggctaggaaggtgtcgttaataagggcggtggcttacatggtagctcaatgtttgggtgctatttgtggtgttgggttagttaaggcattcatgaagagtgaatacaactcccttggcggcggtgttaacacggtggcgactggttataacaaagggactgctttgggagctgagattattgggacattcgtgcttgttacactgtttttcagc

SEQ ID NO: 216417 - DNA, 387 bp, Gossypium hirsutum
gaaacaatggttcgaatcactggtggtatgaaggtgaaagctgatagggatgagtcttccccttatgcggccatgcttgcggcacaagatgtttctcaacgctgcaaggagttgggtattactgcccttcatataaagctccgagctactggaggaaacaagacgaagacccctggtcctggtgctcagtcagcacttagagcccttgctcgttcaggcatgaaaattggtcgaatagaggatgttactcccattcccactgatagtacccgtagaaagggtggcagacgtggaagaaagctttgaatctttgctttatatcaattactcactcagctactactgctgtggtgcttggagttttcttttgtaaacagttttctttat

SEQ ID NO: 216418 - DNA, 376 bp, Gossypium hirsutum
  unsure (1)..(376): unsure at all n locations
cccacgcgtnncgaggaacattctngttgacatgggaatctactttcaagtacaggatgactatttggattgctttggcaatcctgagaccattggtaagattggaaccgatattgaagattttaagtgctcttggttggtggttaaagctttggaaatctgtaatgaggagcagaagaaagtgttatatgagaactatgggaaaccagacactgccaatgttgctaaagtgaaggctctatacaatgagcttaatctcaagggcgtatttgaggactacgaaagcaagagctatgggaggctcgtaacctcaattgaagctcatcctagcaaaccagtgcaagcagtgttgaagtcattcttagggaagatctac

SEQ ID NO: 216419 - DNA, 379 bp, Gossypium hirsutum
cccacgcgtccgcccacgcgtccggaaaatgatgaagagttgaagaaaattcgtgaagaacgaggttactcctacatggacttctgcgaggtttgccctgagaagcttccaaattatgaggagaagataaaaaatttcttcgaagaacatattcatactgatgaggagatccgttactgtgtggcaggaagtggttattttgatgtacgggatcataatgataaatggattcgtgtgtgggtgaagaaaggaggcatgatagttttacctgctggaatttatcatcgctttactctggatacagacaactatattaaggcaatgcggctctttgttggtgatccaatttggactccgtacaatcgtccgcacgatcatc

SEQ ID NO: 216420 - DNA, 283 bp, Gossypium hirsutum
cccacgcgtccgctgacactgaagggggttaatgtgaccttaagaccttgcggcgtcactgcgatgctatcatgtgctgcgctctcaaggctttgccagttcatacttttgcaaatcaggctggccttgacatgctggaaacgaccctgggtgctatgcaggacttgactttgggaaaaatatttcaagaacatggacgaaaaaatttttgcaccgagtttccacagaatattcacaaggggtttgcttggtaccaggtgggatctgtttgtcaaacatggga

SEQ ID NO: 216421 - DNA, 421 bp, Gossypium hirsutum
cacggccgacgaaaatgatcgcctcgagtatcataaagtgcgtcaccgtcggcgatggagccgacggaaagacctgcttgctgatttcctacaccagcaacactttccctacggactatgtcccgactgttttcgacaatttcagtgcaaatgtcgtcgtcgatggcagcactgtcaacttaggtttatgggacactgctggtcaggaggattacaatagactacgaccactgagctatcgtggggctgatgtgtttattcttgcattttctctcatcagcaaggccagttatgaaaacgttgccaagaagtggattcctgagctaaagcattatgcccctggtgttccgatagttcttgttggaactaagcttgatctccgagatgatcaacaattcttgacagaccatcctaacgcagt

SEQ ID NO: 216422 - DNA, 399 bp, Gossypium hirsutum
ccgcttcgtgcacgattctgaaattttgtttgccgctccatctctacatcacagtaggaatggcgacagatgttgcagcccccgccaccgccgcacccaaagacccaacccaacctcaccttgaagtaaaactcttcaaccgctggagcttcgaggaagttcaggttgctgatatctccttgagtgattacattggtgtccaagcttcgaagcatgctacctatgtgccacacactgctgggaggtactcagttaagcgtttcaggaaggctcagtgcccaattgttgaaaggcttacaaactcacttatgatgcatggccgaaacaatgggaagaagcttatggcagtcaggattgtgaagcatgccatggatattatttatctcttgactgatcaga

SEQ ID NO: 216423 - DNA, 118 bp, Gossypium hirsutum
cgatccaaggcatggcaagtacatggctgtctgcctgatgtatcgaggagatgtggtgcccaaggatgtgaacgctgctggtgcttccatcaaaaccgaaaaggaccgggcggttggt

SEQ ID NO: 216424 - DNA, 405 bp, Gossypium hirsutum
  unsure (1)..(405): unsure at all n locations
gtttgctacatgcatcccttgccccattgttacgactgaaagctgccccaacactgagctatctggaaactataaaagctttcaatgtccaccaaatcattacaatgatctggcctccctctttctaaatactaatgatgatgctatccgtaacctattgagtcccagtcctacaaaggaatttaatatctcctcccttttcattttcttcattgctatttactgccttggtgttatcacttatgggatagctatcccctctgggctcttcattcctgtcatattggctggagctggctatggccgccttattggtagactttttgaacccgctcactactctcaagttggtctgtttgcccttcttggggcagcnttcttttcttggtggcactatgaaaatga

SEQ ID NO: 216425 - DNA, 442 bp, Gossypium hirsutum
  unsure (1)..(442): unsure at all n locations
cccacgcgtncgcaacattccaggttcacgaatatttaagacccaagttgtgtgatttctatgaaaacgattcaatctttgacaaatttgagtgttgcctaagtggtgatggattgcgagttgcaacaggttcctacagcaatctgttccgtgtatttggttgtgcccctggaagcactgagacaacaactttggaagccagcaaaaatccaatgaggacacaagttcagacaccctcaaggccttccagatccctaaacagcataacacgtgttgtacgacgagaaaccctcggagttgatgcaaatggaaactctttttgatttcacgacaaagttgctgcacttagcgtggcaccccaccgaaaacttgatagcttgtgttgctgctaacagcttgtacatgtactatgcataaaagatggtccaagaagcaatgtatt

SEQ ID NO: 216426 - DNA, 401 bp, Gossypium hirsutum
  unsure (1)..(401): unsure at all n locations
cccacgcgtccgatttagaggaacgagagagttgaaacaacccagaagttgaaagtggagaaacaacagaagagatcggagaatatagcggacaagattcaccagaagaagatgcgacgcattgcaaagagggagaagaagctgttgcgacctgggtttgaaggtcgcaaagagggttttattaatgaagggtcaagttaaggttcctttttttctttcaattttctgcatagcctgtggctttaactgatctgttccttttctgatggtaagattacatgctaggaatgccgttcttacaactggtttcccttctgttttctttttccacctagaagaaaatgtntgaatgtngntcacannactgatttgagttaatatactggannaatgtttgattc

SEQ ID NO: 216427 - DNA, 351 bp, Gossypium hirsutum
cccacgcgttcgtctatatcgcgagcgctttcctttttttttatttttttttttttttggtgggattaacaaaagatgtgtcaaattaccaaaatcctcatccttaacaaccttaataataaatgagcaagcgtaagtctcagtatctaacataacttaaagcatatgacactgccattaaataaaaatactagaggtgcagcaaccaaaatgtctctttcaagtaaagatgcagaaatggacttcatttcagaggaatgaacctagaagaatgggtggcaccaataccaggtctaccatgcttaacgggcttgtacgaaatggaaaactcggcaaggtaatggctgatca

SEQ ID NO: 216428 - DNA, 320 bp, Gossypium hirsutum
ctcttccaaaaaattttccccagggagtgataaggaacaaaaaatcttctactcaagaaaagagagaaagatcttccttagcgaaactatttgcaggaaaatcaaaaagaacagtgatgagttattacaatcaacaacagcctccagttggtgttcctcctactcaaggttatccaccggaaggatatccgaaggatgcttatccaccaccgggatatcctccacaaggatatcctcaaggttatcctcctcaaggatatcctcctccttacgcccctcaatatcctgctcagcctcctcctcagcaacagcaaagtact

SEQ ID NO: 216429 - DNA, 357 bp, Gossypium hirsutum
atcgcttcaactatctcaccaaacacatattcaatggctccgatcgctgtcggcgacgtgttaccggacggtactctctcctacttcgacgccgatgataagctccagcaggtgtccgtacattccctggctgccggtaaaaaggttatcatctttggcgttcccggtgcctttacccctacttgcagcttgaagcatgttcctggattcatcgagaaagcaggggagctgaaatccaagggcgttgatgaaattatttgcattagcgtgaatgatccctttgtgatgaaggcatggaccaaaacttaccctgagaacaaagatgtcaagtttctagctgatggttcagcaacatac

SEQ ID NO: 216430 - DNA, 435 bp, Gossypium hirsutum
  unsure (1)..(435): unsure at all n locations
accagaagaaattctccggtccaagatgtttagctttggtgaagaagggtgccaagaaacagaggttgctctgggcctcaactagtgtcaagaaccctgcctaccctgacaccctatatgttgctcctctcattggacctgacacggtctcaaccatgcctgaccaagcactccaagcctttatagaccacggcacagtttcaaggacgattgacgcaaacgtgtctgaagctgaaggcatctatagtgcacttgagaagttggggattgactggggcaaagtcggttcacagctggaagacgagggagtggagtctttcaagaagagctttgacagccttctcgacacattgcaagagaaggcaaacactcttaaaattgngatttcttagatttgctgtcactgcaaacacaataaaaacaagcgggtgttgg

SEQ ID NO: 216431 - DNA, 348 bp, Gossypium hirsutum
cccacgcgtccggctgagtttaagcatatctataagcggaggaaaagaaacttaccaggattcccctagtaacggcgagcgaaccgggaaaagcccagcttgagaatcggtcgccatcggcgtccgaattgtagtctggagaagcgtcctcagcgacggaccgggcccaagtcccctggaaaggggcgccggagagggtgagagccccgtcgtgcccggaccctgtcgcaccaagaggcgctgtctacgagtcgggttgtttgggaatgcagccctaatcgggcggtaaattccgtccaaggctaaatacgggcgagagaccgatagcgaacaagtaccgcgaggaaa

SEQ ID NO: 216432 - DNA, 403 bp, Gossypium hirsutum
caattgttcatcccttcattaaaaaaaatttccctaaaaaaccaacagtgaggtgcagggaaatagaacacaaaatggcgacagttccaggacagttgatttgggaggtggtgaagaagaacaattgttttttggtgaaacaatttggaagaggaactgctggcgttcgattcagcaaagagcccaacaatctctacaatgtcaactcctacaaacactctgttttggcaaacaagaaaaccgtcaccattcaaccttgagggcaagaccagtctgtgctcttagccacaaccaagtctaagaagcagaacaagccttcgagcttgctccataagtctgtcatgaaaaaagagttccctaagatggccaaggcagtcaaaaaccaggtgacagacaactacta

SEQ ID NO: 216433 - DNA, 210 bp, Gossypium hirsutum
tacccgggccgaccacgcgtccgagagaattgttggggtattcctgaagctctatatcaatatcagggtttttggctcacccgcccttttctacaaggagcattgtcggctcaacaacaattccaggctcaacccactgatatcatcctttgtagctctccaagaacaggtgcagcctggttaaaatccctcacttttcgccactattac

SEQ ID NO: 216434 - DNA, 389 bp, Gossypium hirsutum
cccacgcgtccgcccattcgtccgggttgttatctcaggggttaacgtagacaagtttgatgacaagtactttgccaaggaagtagagaagaggaagaagaagactgagggagagtttttcgaggctgaaaaagaggataagaaaaaactgcctgaagacaagaaagaagaccagaaagcagtcgacgcctctttgataaagtccattgagggagtcccagacttgaaggcctacctcgccgcaaggttttctctcaagtctggcatgaaaccgcatgagcttgtcttctagaagatattttgcattcccttatgttaaagggcttttacttttgaattctattggattagattatctatggatgtattatggcgtgctattgctatat

SEQ ID NO: 216435 - DNA, 281 bp, Gossypium hirsutum
cccacgcgtccgacgagaaactgcatccgctagtccgaagctagctttggcaaacgcaaagcggtacttcgaggatgttattgcccatacgcacgcaattccataccgacgcttctgtggcggagatgggcgaaccacacaggctaacaatcgactttctaatggacaaggccgctggcccgtgaaatctgcaaaattgattctagatatgctcaataatgccgaaagcaatgctgacgtaaaaggtacggatgtagactcacttatcatatctcacatgc

SEQ ID NO: 216436 - DNA, 439 bp, Gossypium hirsutum
cccacgcgtccggctatgagttgggacaaatgtacgattcacatcttgatgcgttccctgtcgaacaatacggtccccaaaagagccaaagggttgctacctttttagtatatctgtcagaggttgaaggaggaggggaaactgcatttccattcgaaaatgggttgaatatggatggaagttatgatttcaagaagtgtataggtctgaaagtgaagccacgcatcggagatgggtttctgttctattcattgtttcccaataatacgatcgatacggcatcacttcataccagctgtcccgtaatcaaaggtgaaaaatgggtggttacgaaatggatcagagatcaaaaagattttttttagggatcgatcccttcccatcagtcaagttgtcccagagtttttgactgggttctcctcatatcgccattaaactt

SEQ ID NO: 216437 - DNA, 439 bp, Gossypium hirsutum
  unsure (1)..(439): unsure at all n locations
cccacgcgtccgcggattaatgtgaagcacatgccatctagtggaaccggtatgctttcagctgcgggattgtctggtagtggaaagcctaagaccttgagccttgctccaccacccagtggtgctggaaaaataaggtctcctctcccaccccctcccaatgaccctgttgctgctcggcttgcctctactagtcaaggtgttggtcaaagagcacccaaagaaaacatgaaacaaaccaacccatcaacatatttttctcaactagaggtatgcctttagcatgtatgatacttaaaccaaatatagatttcgtgtgctctacatacccaaaagatctgcaaattttgattttggttttctcttgaatgtagcattgttagggaattgggtatcataatatgtttaccacatncacattcgttattttcgtagcttt

SEQ ID NO: 216438 - DNA, 421 bp, Gossypium hirsutum
ctctagcgttgtgcatgttggtggttgagcttattgacacaaccgccataacatgcggcgatgtgacaagcaaagtggccggttgcttatcatacttgcagaacggagggaacgtgccgaaggcttgctgcgacgggatccggtccctgaacatgatggctcgaaccacccctgaccgccaaaccgtgtgtgggtgcttgcaaactggcgctaaggctgtcaaaattaaaggcaacttggctgagaccctcccggccaaatgtagtgtcaacatccgttacaagatcagcacttccactaactgcaaaaatgtgaagtgagatggatgaagagagggttttgcaacagctttgaggagatataatatatgattaaaaaagaacaagacgaatgaatcatgattttgggatggaattttcaa

SEQ ID NO: 216439 - DNA, 442 bp, Gossypium hirsutum
agtaaaactaatgggtgaccgtgctaatgcttctaagctcgacttctcagaggtattaccagaagaggttgagactgaattaaaggaggcagcagtcatatccatggggactgaaattagtgaccttgatctgatgaatatcaaagatttatgtgatcaggttctcaatctttctgaataccgagctcagctatatgattatttaaagagcaggatgaacactgttgcaccaaacttgactgctcttgtcggtgaacttgttggtgctcgtctcattgctcatggtggcagcttaataaatcttgccaaacagcctggtagtactgttcagattctaggtgcggagaatgctctcttcagagctctgaagacaaagcattcgactcccaaatacggactcatctaccatgcatccttggttggtcaggcagcgccaaaacac

SEQ ID NO: 216440 - DNA, 348 bp, Gossypium hirsutum
cccacgcgtccgcgaaaatagaaatgggattcgatagcgaagtagagaagacgcagcagaaggagaaggagaggagaagatggtagctatagctcccatcgcaaagccccttgctggcaaaaagctctccaagaaaacccttaagctcgtccgaaaagcatctgagcacaaatgtttgaagagaggagtaaaggaagtggttaaaagtattaggcgtggtcataaaggattatgtgttatagctggaaacatatctcctattgatgtcataactcatgttccgatcctatgtgaaaaagctgaaattccatatgtctatgtttcttcaaaagaagatcttgcaacagc

SEQ ID NO: 216441 - DNA, 283 bp, Gossypium hirsutum
cccacgcgtccggtccctttcttctcccatttggatgatcagctgcttgatgcaatatgttgaacgcctagtgtcgtccttgagcactgagggtacttatcttgttcgtgagggtgaccctgtgacagagatgctcttcattattagaggtatattagagagttctacaacaaatggtggacgaactggattcttcaactcaattgtgttgagacctggaaatttttgtggaaaggaactgcttgcatgggctttgctaccaaaattcaccatgaacttaccc

SEQ ID NO: 216442 - DNA, 378 bp, Gossypium hirsutum
tcgggcgtgtcaagcgtcgaagtttgtggcatattacggaactgcttactacaagcaattgtgggaacagaataagcaatatattcaggagccaccaacagtggagaagtgcaatgagctgtctaagcagctgttttatactcgacttgccagtatccctggccgtgacgaggcattctggaaggagcttgattatgtcaagaatctgtggaagagatggcaagaactgaaagttgaagacgcttgtattgctgcattgtttggactggaatgctttgcatggttttgtgctggtgagatagtggggaagggttttacttttactgggtactatccctaaggaaaatcaactagtagaaggcagggagtctgatggat

SEQ ID NO: 216443 - DNA, 378 bp, Gossypium hirsutum
ctttgtctctcttaagtcttaccataaaacagagcagagaaggtaatacccaaagtttgaaaaccatcaaaaatggttcaaaggctcacttaccgtactcgccatagctacgctaccaaatccaatcaacaccgtgtcgttaagacccctggtgggaaattggtctatcagacaactaagaaaagagcaagtgggcctaagtgtcctgtcactggcaagagaattcagggtattcctcacttgagacctgctgaatacaaaaggtctagattgccaaggaaccgccggactgtgaatcgtgcttatggtggtgttttgtcctgcagtgctgttagagagaggataattcgagccttcttgggggaaagagcagaaaat

SEQ ID NO: 216444 - DNA, 324 bp, Gossypium hirsutum
gccaataaagagaactcagctgcctcaggatcgaataaaagaaggacttggtggtcacctgctctgttaacagctagtatatcatctgcaaagtattttgtgaagcatctcttaagacaaaatactattacacaagctcgtaggaacatttctcgtcattatgatctgagtaatgaacttttcactctatacttgggtaaaatgatgcaatactcttctggagtctttaggacgggagaagaacatttggacgttgcacagcgtagaaaaatcagttctctaattgagaaaagcaggatagagaaatggcacgaagttctcgac

SEQ ID NO: 216445 - DNA, 375 bp, Gossypium hirsutum
atttcaaggcaaaagaaggctgtgaggatctttccaaggccaactgctggaccccttcgccctattgtccatggccagactttgaagtataacatgaagttgagagctggaaagggtttcacccttgaagagcttaaggctgctggtatttcaaagaaacttgcaccgaccattggtatcgctgttgatcaccgccgtaagaacaaatcacttgaaggtcttcaagccaatgttcagaggcttaagacctacaaggccaaacttgttgtcttcccaaggcgtgctcgcaagttcaaggctggtgattcaactgccgaagagctcgcaactgcaacccaagtccaaggaccatacatgcctatttctcgtgagaag

SEQ ID NO: 216446 - DNA, 437 bp, Gossypium hirsutum
cccacgcgtccgccggaattgctcacaatgtggttcggagaaagtgaggccaatgttcgtgaaattttcgataaggctcgccagtctgctccttgtgtccttttctttgatgaacttgactcaattgctactcagagaggaagcagtgtcggagatgcaggtggtgccgccgatagggttctgaaccaacttcttaccgagatggatggcatgtctgccaagaaaactgttttcatcatcggagccaccaaccgaccagacattatagatcccgcacttttgcggccaggtcgtctcgatcagttaatctatattcccctccccgacgaggaatctcgtcatcaaatctttaaggcttgcttgaggaagtcaccacttgcaaaagaagtcgacctccgtgctcttgcaaatatactcaaggctttagcggtgctgat

SEQ ID NO: 216447 - DNA, 403 bp, Gossypium hirsutum
cttccgcagaacggagggaacgtgccgaatgcttgctgcgacgggatccggtccctgaacaacatggctcgaaccacccctgaccgccaaaccgtgtgtgggtgcttgcaagctgccgctaaggctgtcaaaattaaaggcaacttggctgagaccctcccagccaaatgtagtgtcaacatcccttacaagatcagcacttccactaactgcaaaaatgtgaagtgagatggatgaagagagggttttgcagcagcttgcaggagataaaatatatgattaaaaagaagaagaagaagaatgaataaggattttgggatggaattttcaaaatccaaaattagtctccactttagtgtagtgaggggcttgttattttggtttatggtttggcccctgcatg

SEQ ID NO: 216448 - DNA, 417 bp, Gossypium hirsutum
gttgaaaagaataaaaggggtgctatgatctttccgaggcccacagcggaccaccgaatgactaaagtgcagggccagtcaatgccagtccacatgtggaattcaactggatatggttctatccttgaacaactttacactgctggtattagaaacaaacagggaccaaccattgtcttcggtgaagagcaccgcctttagaacaaatcacgtgtgggtcttaagtgaaaggatctcaggcttttgacctacaaggccaaacttgttgtcttcccaaggcgtgctcgcaagttcaaagctggtgattcaactgccgaagaactcgcaactgcaacccaagtccaaggaccatacatgcctatttctcctgaaaagccgttcgtcgatctcatgaaggtcacctgagacatgaaatca

SEQ ID NO: 216449 - DNA, 388 bp, Gossypium hirsutum
tcggccacgcactcatgcacgcgtccgtttagttttaaatctcatgtgcacgaaccgacgacatggggtggaaacctgggccgtgttctctccaaaccaagattaagccataccccaaaacggaatactggcgcggtgtcccaccttcttacatcacaatttatgacgtcgtgcttaagaacaaaggagaagtctaatttacgttttttgtgcatctggggagttgggtgatggaaaccatatcaagtgaagcatataaaactggccgtactgcctgctacaagtacatggactaatttgcagggacggatgcttaacatttgagagtgcgaaaacatccgttgcatgctctgtgtatcaacatgatgccatcctgtgccggcgctga

SEQ ID NO: 216450 - DNA, 428 bp, Gossypium hirsutum
cccacgcgtccgaaactctcaagtgcactatctgctgctagtgctgcttgtgatcacattcgtgattgggtccttggaactcccgagggcacatgggtttccatgggggtttactctgatggttcatacaatgcaccagctggggtcatctattccttccctgtaacttgtaagaatggagaatggacaattgtccaagggctggcaattgatgaattctcgaggaagaagttggacttgaccggagtggagctgaccgaggagaaggaattggcatactcgtgcctctcatgaatgcattcatcatttccataatctgtttggaagaggagtggtttgccttaataggattagctgcagttttgaataaaaaaccgttctagatgaactgttagtgattggtaagcgacgtcctctgatcgagatct

SEQ ID NO: 216451 - DNA, 367 bp, Gossypium hirsutum
  unsure (1)..(367): unsure at all n locations
cccacgcgtccgcccacgcgtccgcccacgcgtccggtataaaccctaaaatttcaaatttcccttctcgcgttctagggttctctttctcttcgccaagatggcggattctcctcgtaaaaggaattctcagtctccctccccatggagagaacagtcaaggtcacgatccagatctagacctaggtctaggtctaggtcaagatcccgctcctggtcgaggccaaggcatatgtccaggtcacatagtcgcggcaggtcaaggtcaagaagtcgaggcagggttgacgctggaaatcctggcaacacactntatgtgaccggtctatctcaaagggtcactgagagggannnctgagagcatttc

SEQ ID NO: 216452 - DNA, 414 bp, Gossypium hirsutum
tcgatatcgaagatgtcaggaagaggaaagggaggcaagggacttggcaagggaggagcgaagcgccaccgtaaggtcctccgtgacaacatccagggcatcacaaagccggcaattcgacgcttggcccgtaggggaggagtaaagcgtatcagtggcttaatctacgaggaaacccgtggagttctcaagatcttcttggagaacgtcattcgcgatgctgtcacctacactgaacatgccaggaggaagacggtgaccgccatggatgtggtttatgctctgaagaggcagggtaggactttgtatggatttggcggttagtcgatttaaggtttaggtttgtaattaggggaatcctttatggcttaatcgaaactacaagttgggtcttggtgttcgatgttatgattt

SEQ ID NO: 216453 - DNA, 398 bp, Gossypium hirsutum
catctacggtttagggtgtggctttagcactttctaacattatcatttgatcatgaacacgaagctggaagttgccaagctgctctatttgttgttcatatagtctcttcctcttcaagcactgtatagccgctctcttgtatctcgctttggcgaattacttggccttttcaacctctgcagcagcctttttgagaagtactgtcaactcctattggagctgcagctgattttgacgaggatgaattggaggcagaactcgaagagcttgaaggtgctgagatagaagaacagcttctccatcctgcaacaacagctcctgcaacaccaattcatgtgcctgctggaaggcaaccggctcgtgctattactgaaaagcacacaggcgaggaagatga

SEQ ID NO: 216454 - DNA, 376 bp, Gossypium hirsutum
ggcagctccaaaatggttcagcggctcacttaccgcacgcgtcacagctacgccaccaagtccaaccagcaccgcgtcgtcaaaaccccaggagggaagcttgtttatcaaacgacaaagaaaagagctagtggacctaaatgtcctgttaccggcaagaggattcaaggaattcctcatttgaggcctgctgagtataaaaggtctaggttgcctagaaaccgtaggactgtgaaccgtgcttatggtggagttctatctggaagtgctgttcgagaaaggatcataagggccttcttggtggaagagcaaaagattgtgaagaaggtactgaagattcagaagacaaaggaaaagcaatcatccaagtgagagc

SEQ ID NO: 216455 - DNA, 425 bp, Gossypium hirsutum
ggcatatcagaagatttctggaccactagcgttttgggatctggacaaccaccgcttggctgtggagaaatgcatctcatcgatcagcacaagcaaccagacacttgatctgcatggcagtgttgcaactgctgatgccccagctgaatttgtaaatcatggccttcttctctggaatcaaattaggcagagctgggtgggaaacaggaggtctcaaaatcggaagcaattggttcaagaacccaagctaaattggaatgcaacttatgaaaatttacttggaagcaacaagccattccctcagcctattcctctttctgaaatgatagattttctcgtggatgtttgggagcaagaagggttgtatgactgagcaacaacagtacaactacatttgagagatggtgagatatcaatatttatcg

SEQ ID NO: 216456 - DNA, 430 bp, Gossypium hirsutum
cccacgcgtccggcccgttatcgtaatcggtgtcttcctcatgctcgtctcacttgcgggactaatcggcgcgtgctgtcgcgtcacttggctactctggctttacctagtcgtcatgttcctcctcatcgtgctcggcatcgtcttcaccatctttgctttcgcggtgacgaataaaggtgctggagaagctttgtctgggaaagggtacaaggaataccgacttggtgattactccaactggttacagaagagagtcactagccagaagaactggaataagattaagagctgtttggctgatagtaaagtctgtactgatttccgcgataagtatctgaatgcttctgcctcggagttttaccagacgcatttgtccgccgttcagtctggttgctgtaagccatcaaacgactgccaattcacgtat

SEQ ID NO: 216457 - DNA, 407 bp, Gossypium hirsutum
ctgagggattggaaaagattgaaagcctccttagtcatgacaacaatgaaatatacgagaaggcagtgaagattcttgaaacttattgggtggaggatgaggacgagcctttaccccctggtgatgctgcacaatctgggctccaatttggaggcaatcaacttcctgtcccctctggtggattcaatttcaattgaaggaagcttggttggagtggaatgaaactcagtggtcagtactttcttggtgtttctcggaattcacatatcgttcaagtaatgcataagtatgtcctcaagaagtcgtcaaataaagacaaggtggtaaagacgctttgagagtccagaagccgtacaaatattatttttctacttatctttgcagagtcatcttttcacatcgtatac

SEQ ID NO: 216458 - DNA, 444 bp, Gossypium hirsutum
cccacgcgtccgcagccgcggcgtttaccaccgtgatttgaagccggagaatcttctcttagacgaagaaggcaacttgaaggtcaccgatttcggactcagcgctttcacggaacatttgaagcaagacgggttgttgcacacgacttgcggaacgccggcgtatgtggcgccggaagtcattggaaaaaaagggtacgacggagccaaggcggatatttggtcttgtggggtgattttatacgttcttctcgccgggtttttaccgtttcaagatgataacttggtggcgatgtataagaagatttacagaggagatttcaagtgtccgccatggttctcacctgaagctcggaggctaatatccaagcttttagacccgaacccgaaaacccgaatcgccatctccaagatcacggaatcatcttgggtcaaaaaatcaat

SEQ ID NO: 216459 - DNA, 392 bp, Gossypium hirsutum
cccacgcgtccggtctccctgaagaagatatggcccgaatgtcagccatgatcgaccaccttcagcttcgtgacagtttgagaatgtacaattcactcgtcgagagatgcttcactgactgcatcgacaacttcactcgcaagacgttgcagaaacaagaggaaacctgtgtgacacgatgtgctgagaagttcttgaagcactcgatgcgcgtaggcatgaggttcgcagagcttaattcacaagcagcaacgcaagattgaagggtaataataagaactgcgagaaggggctcggaatttcttatttcgtaagaattttctttttggattaatcgagttcttcgcaatcttgtttcttggaagaatttgttgattttcactattgaatca

SEQ ID NO: 216460 - DNA, 436 bp, Gossypium hirsutum
cccacgcgtccgccaacaaaacctgtgctgtccttacagttttctctcttcttcttttcaacttatcattcaccaatgcttgccattcatgcaagccaccaaagcccattccaccacctgctgcatgccctccaccaccagcaaagcctgcttcttgccctaaggacacattgaagctaggtgtttgtgctgacctacttggactggtaaacatagtggtgggaacacctccttcgagcaaatgctgtgctttgctccaaagcttggctgatttagaagctgccctttgcctttgcaccgccattaaagccaatgtgcttggggccaacctcaacatccctattacccttagcttactccttagtgcatgtcagaaggaaatccctccaggcttcaaatgttgattttttttaagaagcacaatcagttgttgatg

SEQ ID NO: 216461 - DNA, 358 bp, Gossypium hirsutum
cccacgcgtccgacacatggttggactgcgtgctttgaattttaggtgttcctgcagagtgaggaagctcccctgaaaacttcagttgaaaatgcctaagcaaattcatgagatcaaaggacttcctctcaacgctggaaagaaagatgctcccgtcgttgatctcgcgtaaagcaacaatgttttgaagtttaaagtccgttactacaagtacttgcctgcagagacacgggtcaaagccattaatgagatatgtgggcaagctaaattttcagatcttacgaacaactttttagttatactatacgacaatggttagcttatacatatagaaagcattgcaaagagatttgtggag

SEQ ID NO: 216462 - DNA, 278 bp, Gossypium hirsutum
  unsure (1)..(278): unsure at all n locations
cgtcaatctcgaccatttaaccgaaacctttaatatgtcattctacatgacgtatttagctcgatggcccgattattttcaagtagctgagggccctggcaatcgagtgatgggttacattatgggaaaagttgaggggcaaggtgagtcttggcacggtcacgtaacagcagtcaccattgcacccgaatatcgcaggcagcagcttgctaagaaactgatgaactntcttgaagaaatcagtgataagattgacaaggcatattttggggatcctt

SEQ ID NO: 216463 - DNA, 218 bp, Gossypium hirsutum
aaaccccaattttaaatcctggttatagttggagaggtgctttacttggccatcatgactttgacgaactcctcgtagttgatctgcccatcaccatcaacatcagcttcgcggatcatctcgtcgacttcctcatctgtaagcttttcaccaaggtttgtcatgacatggcgcagctcggctgcagatatgaacccattctggcccttgattttccc

SEQ ID NO: 216464 - DNA, 426 bp, Gossypium hirsutum
cccacgcgtccgcccacgcgtccgctatcttcgaaaggatcaacatgggatgaaattgatttcgagttccttgggaatttaagtggtgacccttacattcttcacacaaatgtgttcagtcaaggaaagggtaacagagaacaacaattctacctctggtttgacccaactgcagatttccatacttattcaatcctttggaatccccaacgtataatgtgagtattcataaaacaaaccatccattagaattttttttttctgttttcaaattgattgattgactaagtttttgatattgttatgctccagcttctctgttgacggtacacccattagagagttcaaaaacatggaatcatttggtgtcccgtttcctaagaaccagccgatgagaatttactctagtttgtggaatgctgatga

SEQ ID NO: 216465 - DNA, 413 bp, Gossypium hirsutum
cgagctgtcgaggaaatattctacttctctgaagaaggacgagaatgttaaggtgcctttggctttgtttggtggatctggaaactatgcatctgcactgtaccttgcagccgtaaaaggaaatgctctggacaaggttgagtctgaacttcttgaccttgttcaggcatcaaaaaacagtcaattgttttctcaattcactaaggacttgtcagtacctgcagagacacgggtcaaagccattaatgagatatgtgggcaagctaaattttcagatcttacaaagaactttttagttatactagctgagaatggaaggctaagacatatagaaagcattgcaaagagatttgtggagttgaccatggctcataagggagaagtgaaagctattgtcacaagtgttattcccc

SEQ ID NO: 216466 - DNA, 386 bp, Gossypium hirsutum
ttttgaaaaaaaaaaaaccctcaaaagccctaattcggaaaaaaaaaatcaaaagcaatggcctcattcgagcaagcaccgcctggtgatgcgaaagctggggagaagatcttcaagaccaagtgtgctcagtgtcataccgtcgataaaggcgccggtcacaagcaagggccaaatttgaatgggcttttcaggaggcagtccgggacaacaccgggatactcgtactctgctgctaataaaaatatggctgtgatttggggagagaatactttgtatgactacttgcttaatcctaagaagtacattcccgggacaaagatggttttccccggattgaagaagcctcaagatcgtgccgacctgattgcatacctgaaggaatc

SEQ ID NO: 216467 - DNA, 273 bp, Gossypium hirsutum
  unsure (1)..(273): unsure at all n locations
ggcattgagttcttaaggacttacctgaaccttccttctgagattgttcctgctactttgaagaaacaagctaaacctgctggtcgtcccatgggccctcctggtgaccgcccacgcggnccaccacgctttggtgagggtgagaggagatttggtgacagagatggctatcgcggtggtcctcgaggaggcggtgattttggtgataaaagaggagctccagctgattatcagccttcattcaggggccctggaacacggcctgcttttggt

SEQ ID NO: 216468 - DNA, 315 bp, Gossypium hirsutum
cccacgcgtccgagaatcctttcgacaatcctccgtgtctcagccaaaagctaccgccatgggaatcgttggaaatctctctccacagcagcgccaatctttcgactctcaaggttttcttgtgattgaatcatttgcgagccctgcagaaattgaagctatgaagaagagaatggacggaatgcttcaagcctttgaccctaccaccaccgcttctattttctccaccaaaaatcaagtaaaattgaccagtgaatacttctatgaaagtgctgaaaacatttcctttttctttgaagaaaaagcaattgatga

SEQ ID NO: 216469 - DNA, 292 bp, Gossypium hirsutum
ctcccgcaagccccaactcttttttatttcttgtttcatataatttcgttgctgatctaaaatggcgggtcggggcaaaactctcggatccggagcctcgaagaaggcgacatcgaggagtagcaaagctgggcttcaatttccggtgggtcgtatagctcggttccttaaggctgggaaatatgctgaacgagtcggcgccggagctccggtttaccttgccgctgttcttgaatatcttgccgctgaggttcttgagcttgccggaaatgcagcgagagacaacaagaaa

SEQ ID NO: 216470 - DNA, 383 bp, Gossypium hirsutum
  unsure (1)..(383): unsure at all n locations
caattcctcgagttcttctttcatttctgattccgttctcaaaaaaccctcgttttccccattctttatatcctatggctccaaaggttggtgggaagaagcccgccgagaaaaaaccggcggaaaaggctccggcggagaagaggccaaaggcggagaagaagatctcaaaagaaggcggcgcagatgagaagaagaaggctaagaagagcgtcgagacttacaagatttacatcttcaaggtattgaaacaggttcatcctgatatcgggatctcgagcaaagcgatggngataatgaacagtttcatcaacgatatctttgagaaattggctcaagaagcatcgagattggctaggtataataagaagccgacgattaca

SEQ ID NO: 216471 - DNA, 393 bp, Gossypium hirsutum
  unsure (1)..(393): unsure at all n locations
cccacgcgtccgcccacgcgtccggggggactgagataggggagtttacgctatctgatctggaatcttgtgaggtaagattaatcggctgctgcaatgcggtttttgtgaacagattgaagaactgcaaggtttatatggggcctgtaattgggtctattttgatagaggaagtggaaggctgtgttttcgtattggcgtcgcatcagataagaattcatttggcgaaaagttgtgacttttatttgagagtgaggagtaggccaataattgaggacagcaatgttgtgaagttcgctccgtactgtttggattatgaagggatcgagatggatttggagaaggcaaggttgagtgaagagacggggaantgggggaaatgtgatgatttta

SEQ ID NO: 216472 - DNA, 441 bp, Gossypium hirsutum
agctagtcgaggtgatttcagccctgaagaattgaaggaaagacaggccaaggcaatgcaagatccagaaattcaaaacattctatcggatccagtcatgagacaggtgttggttgattttcaggagaacccaaaggcagcgcaggagcacaccaagaatcctatggtgatgaacaagattcaaaagctggtcactgctggtattgtccaactgagataaactggaaccaaaatttcaacttttttcttctttttatcctttttcccattttgtcggttgaacttgaatggattgttcataaaagtagttcctgctggaaatgttcaatagttgcctgttatttaaatggtttgtttttgagccgtcaaaactgtcgctggattctattatatcattgattttcaggttttaaaaaatatatgcgtgtatatctcaatata

SEQ ID NO: 216473 - DNA, 411 bp, Gossypium hirsutum
cctttgtcccttggactcgaaactgctggctgtgttatgactgttttgattccgagaaacactaccattcccaccaagaaggagcaggtgttttcaacttactctgataaccaacccggtgtcttgatccaagtttatgagggtgagagagctcgaacccgggacaacaatttgttgggtaaattcgagctctctggcattccaccagcacccagaggcgttccccaaattacagtttgcttcgacattgatgctaatggtatcttgaatgtctctgctgaggacaagactactggccagaagaacaagattacgatcacaaacgacaagggtcggttgtctaaggaagaaatcgagaagatggttcaagaagcggagaagtacaagtccgaggatgaggagcacaagaag

SEQ ID NO: 216474 - DNA, 335 bp, Gossypium hirsutum
cccacgcgtccggagagatgttaaggaaaatctgtcttacattgcccttgactatgaacaggagctagagacctcaaaaacaagttcatcagtagagaagagctatgagttacctgatggtcaggttattaccattggtgctgaacgtttcagatgccccgaagtgcttttccaaccatccttgattggtatggaagctgcaggcatccatgagactacatacaattcaataatgaagtgtgatgtggatatcaggaaggacttgtatggtaacattgtccttagtggtggtacaaccatgttcccgggtattgcggacagaatgagcaaggagc

SEQ ID NO: 216475 - DNA, 426 bp, Gossypium hirsutum
  unsure (1)..(426): unsure at all n locations
ctcttgcggcagtataattggaaagggaggatctaccataaagtcattgattgaagactcccaagctggcattaagatatctgcattggataataatttctatggcttgaatgataggctagtaacacttactggcacactagatgagcagatgcaagcaattgatttgattctttccaagctttgcgaagaccctcattactcacaagctatgcatgctccattttcatatgcagcgacttactattcgatgagctatgcaccaaatgggactggcgggaagtttccaaatcacaatgaggatcgtagcaactccatcacgattggtgttccagatgagcatattgngctggttcttgggcgtggtggaaggaatataatggaaattagtcaggtaaagtgggcccagaataaaatatcggatcg

SEQ ID NO: 216476 - DNA, 414 bp, Gossypium hirsutum
gatattttaggtggtggtagccccacagctaggccaatcactggtttacttggcaacatttatggcggtcaagtcccttttgctaagccagttgggttcttaccacccgacggtgccgtcccgatccccaacgcaaatggtgctatcccaaccgttaatggtgtcactggtctcccgttggggaccggtttagccgggacggcttttgcgggaaaccctaaccagaatggtcagcctcaattccctgtaggaccagatgggttaggattagggttcgggacgattaccgtcatcgacgatgtgttaaccgttagccctgacttggggtctcaagtaatagggaaagctcaaggggtttatgtggcaagctcagctgatgggacaacacaaatgatggcgttcgcggcgatgatc

SEQ ID NO: 216477 - DNA, 364 bp, Gossypium hirsutum
gatccgagaaggttaaggatgagattgtttttgatggtaatgacatcgaacttgtatcccgatctgcagctttgataaaccagaaatgccatgtgaagaacaaggatattagaaagttccttgatggtatctatgttagtgagaagggaagggtcgccgaagaagaatgaatactatctccctgaatcatagttatagtgctgctttatttttttgtcgtagtaatattttgggactccgttttttgtcttgtctttcctgtttccatggattgcaactgttacagagtacaaggatgttatctttatttgtttggaagaatttggatatctggttaatctttagtactctaaatattcccccc

SEQ ID NO: 216478 - DNA, 233 bp, Gossypium hirsutum
gccgcgcttcactatggatagctatgcctactgtgccttgcccagcaccagcatagagccacgagcctacccacatgagcccacgctcggcacctaaacagacagtcacttgccccagagatacactgaaactaggtgtttgcgctgatttgatgagctcggtgcgcgttgttgctggaccgtcgaggaccaaatgctgctcactcatttcgggttaggctgatctcgatgct

SEQ ID NO: 216479 - DNA, 335 bp, Gossypium hirsutum
cccacgcgtccgcttaatcagatttcaaattaaaatatgatttcaatcagtttcttttactgattcagtcattatctttcgcaaaataccagttcgtatttattaattcatttgcgttttgttatggtgattcgcagggagtaccagctttcggactatcatccggcgtgggagcattaaacgcgttcgttttcgagatcgtgatgactttcggactggtctacaccgtctacgccacagccgtcgatcctaaaagaggcaacttgggagtgatcgcaccagtggcgatcggtttaatcgtgggagccaatattttagccggtggggcattcgac

SEQ ID NO: 216480 - DNA, 438 bp, Gossypium hirsutum
cccacgcgtccgcccacgcgtccgcccacgcgtccggtcatcgattgcttcccttcacgctgctttcttcatcgtctccatcaattgcttgcttcacttttcacttagtggctcgctatttttttttttcaaagcattgcaccatattcttaagttgcttcatccgcaacttaggttgtaaccgtgaagttctggtggttgcttgctttaccttaccttaaaaatgtcatcattaaagaatgctatcagcagacgtgctcacaaggaacgtgctcaaccttcatcgaggaaaaaatttgggcttcttgagaaacacaaggattatgtcgtccgtgctaaagcattccacaagaaagaagaaatgttacggaaactcaaggagaaagctgcattcagaaacccagatgaatttactttcagatgataaaaacgagaact

SEQ ID NO: 216481 - DNA, 395 bp, Gossypium hirsutum
gttttgagggtgacaacatgattgagaggtctaccaacttggactggtacaagggccctactcttcttgaggctcttgaccagatcaacgagcccaagaggccttcagacaagcctctccgtctcccacttcaggatgtgtacaagattggtggtattggaactgttccagtcggccgtgttgaaaccggtgtcttgaagcctggtatggttgtgacctttggcccgtctggtctgacaactgaagttaagtcagttgagatgcaccatgaagctcttacagaagcacttcccggtgataatgttgggttcaatgttaaaaacgttgctgttaaggatctcaagcgtggtttttgtgcatccaactccaaggatgacccctgctaggaggctgcc

SEQ ID NO: 216482 - DNA, 429 bp, Gossypium hirsutum
ccacgaggcacgtgctttcagaatatgggatcatgtcaagtgcttgtgtgctgttcatattggatgagatgaggaagaaatcaaaggaagatggacttggaaccacgggtgaagggctcgagtggggtgtcctgtttgggttcggaccagggctcactgttgagaccgtggtgcttcatagtatctctgcttaaacaaggttttaatgttcatgttggctagccctggctgcactacaatttgctttgcatttttatttattttattttcctttttattaatgaaatttgggatttgtatggttatttgaaagagagtaaagctctcacatatggtgtttaacgcctgtagaatttatgtgccaccttatattttatgatatggtgtttaacgcctgtagaattatgtgccaccttatattttatggga

SEQ ID NO: 216483 - DNA, 374 bp, Gossypium hirsutum
cccacgcgtccgcccacgcgtccgaataggctgtgtgttggacaaaacttctgctcagtgacggtagcacccgaaatgttcggaggagacccgtgtcctaatgtaatgaagaaactctctgtagaggtcatttgcagctgatggaacacatcagaagtacatgaaacaaacatggtctatcatttctctcaaatccagcatgtcattcacctcttctcttttttgggttcacaagcatttctttcagcttttccagggtgaagttgtacaaatacacagcacgccacttggaaaaagctcggtttagatcgcaaaaattgattgcagataagctctatgtatatatatacaatgtttattcctgcatgatatac

SEQ ID NO: 216484 - DNA, 182 bp, Gossypium hirsutum
tgaaggatcatgatttgctagctcatctcatgactgatccaagagctgatggttttggggtgtcttcatgcattgagagaagtcttgaagatgctggtgtgtcccctgaggaggttaactacatcaatgcacatgcaacttctactcttgctggtgacctagctgagatcaatgctattaaa

SEQ ID NO: 216485 - DNA, 229 bp, Gossypium hirsutum
  unsure (1)..(229): unsure at all n locations
cttccgcccacgcgttcgtccacgcgtncgagactattgtgatcggtacatcgaaccatgtgggtctggccaaacgtgtcggttcaaggattttacttaccataacttgctaagtttatggagattccttggaacattcccagaccgaatgctaatggtgaaatgctaaccctatcggagatcgaagctgctacgatgaaggaaaacgagtggctgaaactttgatgtt

SEQ ID NO: 216486 - DNA, 463 bp, Gossypium hirsutum
  unsure (1)..(463): unsure at all n locations
acgcgcaaatcgaagaatacgctgaaatcttcaatctaaaatcgcctaaccagattcatgagatcagggactttcttctgactgacagaacgaaagatgcacgctctgtgaagatcaagatgagcaaagatgtcgtcaagttcaaggtccagtgctccaagtacttgtacacactgtgcgcgtcggatgctgagaatgctgacaagttgaagcagtcccttcctccaagtatgagtgttcaagacctgtgaaaatatggcacccctggctctgtcacctgatttatacgcgatgaaagctaggtttttagatctgggactattgcatntctggtcattctgcaacagtgagctcaattttctggaattggatctattgacttttggtgattaaggattttacagatatatgcacttttcaaatacaatgaatggtcattttaatgaaaaacaaaaaattttgg

SEQ ID NO: 216487 - DNA, 317 bp, Gossypium hirsutum
cagtgttcttaaccagaagcgaggacatgtgtttgaggagatgcagaggcctggtactccactatacaacatcaaagcttatcttcctggtatcgagtcatttggattctcgagcaccctgagggctgcaacatcaggacaggctttcccacaatgcgtgtttgaccactgggatatgatgtcatcagatccattggaacctggttcccaggcagccacccatgttgctgagatccgtaagaggaagggattgaaggagcagatgaccccgctctccgattacgaggacaagctgtaagctaagctacaaaataata

SEQ ID NO: 216488 - DNA, 399 bp, Gossypium hirsutum
ggaaacatgtaacaagcttagctggactcgtcttcttggtctgcctgaaatctgatctgtgggtaatgacccacggaggtaactttgctaaattgattattggtgctagaaggtacatgggtcatcgtcaaaaatcaataaaacctgacaaaggacttatgtctaaatcttttggggatccttatatgggatgggctacattcgtagaagatgtagtcgttacccaccaaacccgaaccagaagaaaccttccctaattacgacctttgggagaaccccttaactccttgcatgtgtaaagcttgatagccacttttttcttctcgttacttgtttatgcacgttgagcttcatcgaaatgaaactgtatttaacaaatgaagatgcttttagtatctg

SEQ ID NO: 216489 - DNA, 376 bp, Gossypium hirsutum
acggttaactactcctagctttggtgatttgaaccatctaatctctgcaaccatgagcggtgtggcatgctgccttaggttccctggccagctcaactctgacctccggaaacttgctgtcaacctcattcctttccctcggctccacttttttatggttggatttgctcctctcacctcacggagatcacagcagtatcgttctttaaccgtcccagaactcactcagcagatgtgggatgctaagaacatgatgtgtgctgcagaccctcgacatggttgttacctcacagcctcagccatgttcaggggtaagatgagcaccaaagaggttgatgagcaaatgattaacgttcaaaacaagaactcattctac

SEQ ID NO: 216490 - DNA, 245 bp, Gossypium hirsutum
  unsure (1)..(245): unsure at all n locations
cccactcatactaagatttctttttttgtttttaatcacagaaagcttttaacaggaancggttgaattttcaaaagatcctgcccaacaaaggtggaaaggttgctgtgccctccaagaataaacaagataaggttgtcaattcgttgtttgaaaagcgtccaatgcatttcggcattggaggggctttacctcctaataaggatctgcatccatttttgaagtggcctaatgttttcgtattc

SEQ ID NO: 216491 - DNA, 442 bp, Gossypium hirsutum
cccacgcgtccgcttcttcgtcttcttcttcttccagtggaaatggaagggggcttatgcgggtgatacctgtctctccacagctggccaagttccttggagcctccgaagcttctcgcaccgacgccattaaaaagatttgggactacatcaagctccacaatctccagaaccctgcaaacaagaaggagattatttgtgatgagaagttgaagacgatattcgccgggaaggagtctgtcggaatgttagagattagcaaatatctctccccacattttctgaaatccaaataaactttgcctttgcctttgcctttgccttagcgttagccttttgttggaactttaagacttaagttgcattgtgatgaatctgaaaaaatgcttttgtcattagtctttttcagtacaaatgcttaaaccccttttttcccctcgat

SEQ ID NO: 216492 - DNA, 300 bp, Gossypium hirsutum
ctttgtgttcttgatccaaaaatagccgactaccggacccttcagccacttgatgtaggtttcggagccattgttgagcactgcaaggatctgagacgcctttccctatctggtctactcacagattgtgtgtttgaatatatcgggatgcatgcgaaaaagctagagatgctgtccgtggcatatgcaagagaaagcgatttggcacttgatcatgtgctttctgggagcgaaagcctacggatactggacattatcaactgcccctttggggacaaggctatattagcgaacgctgca

SEQ ID NO: 216493 - DNA, 319 bp, Gossypium hirsutum
gttaagaccctcccggccgccccttcgaatgatgacatgctcattctctatggactgtacaagcaagctactgttggaccagtgaataccagccgtcctggaatgttcaacatgagggaaaagtacaagtgggatgcatggaaggctgttgaagggaaatcaaaggaggaagcaatgggggattatatcaccaaagtaaaacaactgtttgaggctgctggaagttcttgatgtgtgtgtgtatgaccaatgaaactggtgtaatttcaagcccttgtcggttacttggggttttcattactatgaataaattatgtac

SEQ ID NO: 216494 - DNA, 321 bp, Gossypium hirsutum
ttttgaaaaagtggaccaaaagctgagaaaagccatccgataagaagccagccgaggagaagaaagccgtagctgagaaagccccggcagagaagaagcctaaggctggtaaaaagcttcccaaggaaggcggagcggctgccggagacaagaagaagaagagagttaagaagagcgtcgagacctacaagatctacatcttcaagggcctgaagcaagttcaccctgacatcgggatctctagcaaagctatggggatcatgaacaagttcatcaacgatatcttcgagaagcttgctcaggaagcctctaggctcgcga

SEQ ID NO: 216495 - DNA, 394 bp, Gossypium hirsutum
cccacgcgtccgcccacgcgtccgcccacgcgtccgcccacgcgtccgccgcagctttgcagtgtcttgtgcagctcgagttggacgtgctctctattatatatcgaaagcttttacgactgctgcatcaaaactggagaaaatcggatatgttgacaccgaaaatgaaagcgaaactgttgaaccaaagggcggtaaagaggcaatcaacatcaaggaagttaaacgcgtggatcatattcttgcttccttgcagcgaaagttaccacctgcgcctctgccacccccgtttcccgatggctttgttccaccttcaacagcagaagcagagaaagatcccgaaaaccagcaaacagcagagccgcaaccttctgctgttgatcccatcattgat

SEQ ID NO: 216496 - DNA, 314 bp, Gossypium hirsutum
gggtctttgtgtgccggtggaggaaaagatggagtgattctgttgtgggatttggctgaaggaaagaagctttatagtcttgatgcaggttccgtcattcactcgctttgctttagtcctaataggtactggctttgcgcagccaccgagcagggtatcaagatctgggatctggagagtaagagcatagtggaggacttgaaggttgatcttaaggctgaggctgagaagtctgacgtcactgacatcggaaataagaagaaggtcatatactgcactagcttgaactggagtgccgatggaagcaccttgtt

SEQ ID NO: 216497 - DNA, 69 bp, Gossypium hirsutum
gtatatcattttctgggattgtgaaagtactgtttttaaataatgaataaaatttgaaatgtttgcttt

SEQ ID NO: 216498 - DNA, 454 bp, Gossypium hirsutum
  unsure (1)..(454): unsure at all n locations
cggacgcgtggganaaattccaacaacagttgttatgaacaggnctgctgctcttcgagcccttgactgctgaccatcaatganggtacggattgaatcaagaancctcaatatncgatatnccaatcaagggaagaatcgggataacccagccccatagtgcgcgaaccctcgancgtgtccctagaatggatgatganttttcatgaaatcgtgagcaaccttctttggcaaaaccaaagagtgagcagcaacgagaacatttctttcatactcgctgccatgtacaagggaagctttgtagagttattattgatggtgaaagttgcacgaacgtagccagcacgacgatggtggaaaagctttgcttaaccactaccaagcatccacaaccttatcaactacaagagcttagcaacgaaggccgatttaaagtcactcaacaagtgcgcat

SEQ ID NO: 216499 - DNA, 168 bp, Gossypium hirsutum
  unsure (1)..(168): unsure at all n locations
tatttctcgcagacntgaagaatggggctgtctttacaaagctgttcagccggctttttgccaagaaggagatgcgtatattgatggctggacttgatgctgctggaaaaaccaccattctttacaagcttaagctgggagagattgttaccacaattccaaccattg

SEQ ID NO: 216500 - DNA, 308 bp, Gossypium hirsutum
cccacgcgtacgtatcactgcagcggcagttggatctggcgccgaagagcttcgtgtataagaagatgccgctctcaaggatgcacgcctaaggtgcgctgagacagcgaaggcaagaatgagcgacgctggcggagaatgtgtaagacacgacctacttgctctgcatgcacacaacggacagctctcggctctcctccgaatggaacagaatgcgggagaggatgataaacgctctctacattctcatgatgatccacacaggctctgcatgcactatatgcggtcaaattgtaagaaatacttta

SEQ ID NO: 216501 - DNA, 305 bp, Gossypium hirsutum
tggtctgaggatttaacggattggaatcgagaaatgcatgttaaatgcacttataatggtgttcaattatccgaaaccgaatttccaaaaaactggttaacagacggtattcagataaagatcctatttcctttttgcctgaaaccttggcacagatttaaactacaaccctctcataaagatccaatgaaaaaaaagaaaggtcaaaagaatgatttttgctttttaacaagttggggaatggaaactgaactacctttcggctctcctcgaaaacggcgttcgtttttgagcctattttaaag

SEQ ID NO: 216502 - DNA, 213 bp, Gossypium hirsutum
gtggtcgccgcctacttccttgccttgctcggaggaaacacttctccttccgccgatgacttgaaggttattctcggatcagttggagctgaggctgatgatgaaaggatagagttgctattgtctgaagttaaaggcaaagatttcaccgtgctatttgccagtggaagggagaagctggctttggttccttctggggggggggctttgcgg

SEQ ID NO: 216503 - DNA, 453 bp, Gossypium hirsutum
cccacgcgtccgcagttccagtagagaagtgcgatgagccagtagtccagccagagacgcgagagaagaaaggtttcctcgagaagatcaaggagaaactccctggacaacacaagaaagctgaagaggccagtagcccagctccagccccagcagctgagccccatcacgaaggggagtcaaaggaaaagaagggaattctggagaagatcaaggagaagcttcctggtaaacactccaaatcagatgaagaaaaagaaaaggcttgagattcaagttcacataaaaatactgatgggattgtgtgtttcttcaattgttaaaaaaatatctgtttttgttttgaggttgtatttgttgtatatttcatattaagtttcttcttttcccagcatttttagtacaaatcataagaaaaaaaaagtttgcttttcgtatgtaagaaatgacatg

SEQ ID NO: 216504 - DNA, 398 bp, Gossypium hirsutum
ggttgcattactaccaaggagctggggactgtgatgcgatcacttggtcagaaccctactgaggcagaactccaagatatgatcaatgaagttgatgctgatggaaatgggaccattgattttcctgaattccttaacctaatggcaaggaagatgaaggatactgattccgaggaagaacttaaagaggctttcagggtgtttgacaaggaccagaatggtttcatatctgctgctgagcttcgccatgtcatgacaaatctcggtgagaagcttacagatgaggaagttgatgagatgatccgtgaagctgatgttgatggtgatgggcagataaactatgaggagttcgtcaaagtcatgatggcccaagtaggataaaaaatgggtaaaaaggg

SEQ ID NO: 216505 - DNA, 441 bp, Gossypium hirsutum
cggacgtggggaaatcctttatatctgggtgtcatctttgtcggtttcttaattattaaggctctatgggtgcagcttgacatttcgggtgaattccgcaatggcgctcttcctgggcttctttctttatctaccaagttccttcccaccgttatgaaccttctcagaaagttagctgaggaggggcaaatgcctgcaactaacagttctcagacaaaccaagcggtagcatccaagagcttccaaaatggaagctccacaagcaatatgtcatcgagtgcttcatccggaataactgcttcagaaaacagcaccacaaaaggagaatgagtaacttattagggaaaaaaatacgttatttgtgttctgaagatgcctgtgttgtgctggcttttatggtccggtgtttgcccgtgtattttatgataacatatacaactc

SEQ ID NO: 216506 - DNA, 292 bp, Gossypium hirsutum
  unsure (1)..(292): unsure at all n locations
gcctatggatcanaatatttggctccggaatcgctctccaattcaatggggttgtttcttcagaaaacaaatattatccgagattatctagagatatcaatgaaataccgaagtcacgcatgttttggccacgccagatttggagtaaatacgtcaagaaacttgaggacttgaaagacgaggaaaactcggtcaaggcggtgcagtgcttgaatgacatggtcactaacgctttactacatgttgatgattgcctgaaatacatgtccagctttacgtgaccctgcaattt

SEQ ID NO: 216507 - DNA, 423 bp, Gossypium hirsutum
  unsure (1)..(423): unsure at all n locations
gacccaatgtaataaaagcaacatcagcaaataaaaagaaaggcttcttccgaccgtaagagaaggagtggagttttacagcaatggagattttattgaaggtgattccataangggaagtgtaatgggagtggggtttataactattttgtgaatgggagatatgaaggggattgggttgaagggagatatgatgggtatggagtcagagttgcagcagaaggcagtcatatagacgccactatcgagagggtttatgacatggatttggagcttataggatttatacaggcgattcttatgctcgtgaatggtgtaatgaccaaagccatgccgatgttattcaaacttgtgctgatcggagttgctatgttggggagttcaagtctggggttaaacatgggcttggctactaccatttca

SEQ ID NO: 216508 - DNA, 374 bp, Gossypium hirsutum
cccacgcgtccgagctggtggtgcctgggataatgcaaagaagtttattgagactggagcgcttggtggcaaaggcagcgaatctcataaagcagcaattactggagatacagtgggagatccattcaaagacacagttggaccatcacttcatgtgctcataaaaatgcttgctaccataacacttgtaatggcgccagtgtttctctgagactttcgtttgtttatatatatatatttgatggagagttgagtagcaggctgcataccaacatacaggcacccatcaccgagttattgttagggtattactattttgcacatacacaacagattgattgatagataggtagataggtatttgatgtctatca

SEQ ID NO: 216509 - DNA, 386 bp, Gossypium hirsutum
tcaaatctcagagtcgaactcttcaaaacttacggcagcacccttgccggactgcgagcgggagggtgtgacatcgatgccgatgattaccacgggtacgtccatgggagattgtcatacgatgtgatcaagccagaccctaagctacgtactatgttacgtatcatctcccaaaggaaaattatatgtacgaattcggacagagttcatgcgattgacgtcatgaaaaggttaggaatagaagactgcttccaccaaatcatatgtttccagacactgaatgctaatttgacagatataaagtgcgtggttctgaatgcgtcgtcagatgccatcaagattgctctgtacgtcgcacgtgttgattccccacgcacgctatttct

SEQ ID NO: 216510 - DNA, 88 bp, Gossypium hirsutum
caacgaatggggttacagttcccgtgttatcgacttgatccgacacatgtctaaggcttaagtgagtgagtgattgtgctttgtgtat

SEQ ID NO: 216511 - DNA, 163 bp, Gossypium hirsutum
ggaatattcaaggacaggttttataaattgtgttatggaagcacttattaaaccccataggtggatgccgtgaaagggcgacttttcatttaaaacactcttctatggagaatttgggaattctggtcttggatccattccattgaacagagttccatggagt

SEQ ID NO: 216512 - DNA, 364 bp, Gossypium hirsutum
cccacgcgtccgggcaaatactacgccaagattttctgcttggagcccacttccttcactggcgaggctgagggtgttaacaagaatgcccctcctgagttccaaaacaccaagctcatgacccgtttaacctacacccttgacgaaatcgagggccctttcgaggtatccaccgatggcaccgtcaaattcgaggagaaagatgggattgattatgctgccgtcacagttcagcttcctggtggtgagcgtgtgcctttcctgttcaccatcaagcaattggttgcatcaggcaaacctgatagctttggaggagacttccttgtaccatcctaccgtggctaattttttttggacccaaagg

SEQ ID NO: 216513 - DNA, 442 bp, Gossypium hirsutum
acgcggacctccacgcttatcaacgtcgttacctattctgagatcaacgccattcttggggtgggggctaactttatagggcgactgggatccattcgcttttggttaattcagaaattgatttctcggaccgattacttagtttggaaattttggggacaataagatggaacctaagatttgcttccaatacaaaattccagttaaagtcattggcggccaagctttggatagataattgggtcttttgcctcatccgtggccatttgaaactgttcataaagagatggataaaaagcctgttacagttaaaaccgaggaagacaaaaacataattaaatccaatgaggcgggaacgaccacttcaactcttgggaatctaaattagctgtttgaagagagctgcactatcacgctttaagaatttcatatactgaaggga

SEQ ID NO: 216514 - DNA, 398 bp, Gossypium hirsutum
cccacgcgtccgcccacgcgtccgacaatattctgcatccttgagaattaccagaaggaagagggtgttgaaataccagaagttttacggccattcataggtgggaagtccttccttcctttcaagaccaaaccaactgctgaaactaaagggaagaaatcaaaggcctagttatgtctcaccaaaccattggttaccattgaaggaacaagcgctcagattgcctgaaaactagttttgtttttcaaaaattgtggcctactgccatcacgacactgaatatataaattcaattgttttgtagtactttgcaaaaaaaaaccccagccatgatactgtgacagacattatagacttggtgttttaagttattggatatcctttacaaaatttgtcaa

SEQ ID NO: 216515 - DNA, 237 bp, Gossypium hirsutum
acgcttacatttactttcaaacatacgactagcttatcgcactaggaacaccctaactacactggggcgcctgatattagccctgctggcttctttacccctatcagggagcgcaacacatgcgttcattataccacagtgctcagttgctcctagtgcacattattccaaacttactcccaccagcacattaatgggctctaaacatccaaccactcgagcctacatgctacaact

SEQ ID NO: 216516 - DNA, 233 bp, Gossypium hirsutum
aaaaaataaatccacttggtttcagacttggtacaacccaaagtcatcattctctttggtttgcgacaagcgaaaaagtattccgagggtctacaagaagataaaaaaataagagactgtatcaagaattatgtacaaaaaatacgagactatcttctggtgtcgagggaattgcacgtatagagattcaaaaaagactggatctaattcaggtgataatctatatgggattt

SEQ ID NO: 216517 - DNA, 448 bp, Gossypium hirsutum
cccacgcgtccgtcttttttttttttaatttcatcccctaattacagctttagtaaacatgggttctgcttcgaaatcgaaagattttcaagacggagttgatggtgatgcactgagatcaacaatggctactgatcaaaacgtgatgcaaaaacatgctgcgttcttcgataggaatcatgacggccttgtttatccatgggagacttttcaaggttttcgagcaattggagctggttatttattgtcaatggcgggtgctgtcttcatcaacctttctcttagtggcacaactcgaccaggaaaatttccatctcttctctttcctattgaggttaaaaacatccaaatgggaaaacatgggagtgactcttgtgtatacgaccgtgaaggaaggttcgtaccttccaaatttgatgaaatcttcagcaagtacgcacgaacacat

SEQ ID NO: 216518 - DNA, 420 bp, Gossypium hirsutum
  unsure (1)..(420): unsure at all n locations
gaggcatttcaacctttgggcatttcggattttaactcgctcttttggatcgctcaccccggtggtccagccatattggatcaggttgaggcgaanctagcccttaaacccgaaaaactccgagccacgaggcacgtgctttcagaatatgggaacatgtcaagtgcttgtgtgctgttcatattggatgagatgaggaagaaatcaaaggaagatggacttggaaccactggtgaagggctcgagtggggtgtcctgttttgtttcggaccacggctcacttgtgaaacccgggtgcttcatagtatctctgcttaaaacaaagtctaaatgtcatgttggctaacccaggcctgactaacaattgctttgcaattttaattaatttaatttcccttttaatactggaaattgggaatt

SEQ ID NO: 216519 - DNA, 408 bp, Gossypium hirsutum
gccaaatcgactccaaatcctgccacaacttctagtccaatttccatacggcaaaagatgacgacttcctggaatgacaaaggaagaacttattacagatattccatagtgatgaccaacaagtcttccaagacactaaaggatctaaagctgtctatatcaaagctttatggtccaatatggggtctcactaaatctggcaattcttatggtttcccaacatatctcaactctttacctgcagggaagagtctcgagtttgtatacatccatgctgcttctccggctgatgtctcagtttcaagttacaacgtggcttaacaacagaagaaaattgctacaacttggtgtaagatttgtgcagctatacagaatgcagtccaggggaaaagaaaagggtatttttca

SEQ ID NO: 216520 - DNA, 441 bp, Gossypium hirsutum
cggacgcgtgggtgaatgcatctgatgtttgtagtgcatataaagatcagaaacgtgaccgtttcctgccttcaaatgcccaatccgcggctgccggagttgctggtctgatcgagagttcctcatccagactggtttatgccatcacagctccgccacaaaccacacagtcaagaatacctgcatcaacagtatcagattcaaatggaagccaggatcagctttcttaaggcaaggattaaagagaaattattttgagaggcatgaaagagtatattcagtgaagaattatacatgacagtcacacatttgtatagctcagtgtacaggctttaattatttttgtttttctttctcttggattcactccgtcagcgaacgtttgattgaagcagaggtggtagttggaatttttctagtgagaagaaggatgttttatat

SEQ ID NO: 216521 - DNA, 434 bp, Gossypium hirsutum
gatgacttctggagaagcagtgaaatacaagagctcgatggcagcattttctcaaatgatcgggaatgaaggtgccaaatcgctgctcaagggtgctggtgcaaacattcttcgtgcagctgcaggggctggtgtgcttgctggctatgacaagctgcaagtccttttccttgggaagaaatatggatctggtggcggctaatgtggaaggtgattctgctgccttaaagaatgatctagcgtcccaagtttgaatgattttggaaggacaaagtgcttatgatggtccccgttcccagtaattaggaatttaatatgaaaaagttggtgacgaaaaatttacttgagcttttgagtgttacattacatgtgtttagttacaagaccatgtggtttttcttttggtttttggttgacaataattacaacactga

SEQ ID NO: 216522 - DNA, 240 bp, Gossypium hirsutum
gccacgcgttcgtcaggatacaataaaagccattccaccaaaaaataagtcaatgaataaagcgagtggtgtccgtgtcacgaccaccactttattctatgtactttgaggcattgccggatactcagcattcggaaaccacgcaccacgaaatttccttacagggtccagttctacgaacccttttggctaatcgacttcaccaacgtctggcttgctgtccaccctatttgtgcatac

SEQ ID NO: 216523 - DNA, 434 bp, Gossypium hirsutum
gagtggtcctccaaaatatacaggagatgatcttcaacatagtgccagtacctatcgatctggtgacagggacaatctgcttatgttcaaaaccagttcttcccttccatccagaggtgccatagattttgcatcagctgtcaggaaaatggcatctcaagattctggaatgtggaagtatgatagaaatggttctgctgattcaactgtggggtcaagtagaagttctaatgggtcagctaattcctacagtgctgcacctggaagaggggtttatgctaataggttgcagactcgtggttcagctcgttcagctcctgtttggcttgaaactggagatgcagtgggaaatttatactctgaactacgggaagaagctcgagaccatgcgcgtttacgtaatgcttattttgaacaggcacgtcaagcatttc

SEQ ID NO: 216524 - DNA, 417 bp, Gossypium hirsutum
ggctggagcatgttgagggttacctcgaattatcagcaaagacaaagacatactttgccacggccgctgctctgagggatgctgatttctatgtaaaagttgatgatgatgtgcatgtaaatatagcgacactcggagcaactatggctagacatcggtccaagccaagggtccacataggttgcatgaaatctgagccacatcttgctcacaatggaggaagataccatgaacctgaatatgggaaataccgtgatgagggaaacaagtattcccgtcatgctactgagcacctatatgccatctctaaagatatggcatcatacatatccattaaccagtctgctcctgcatgctccgaaaaacagtatcatactatctgagcaagaaattcatccgtgggtacgtgggtcggct

SEQ ID NO: 216525 - DNA, 343 bp, Gossypium hirsutum
tactgctcaagaagttgagaaaattactcatatggatcttccatcaatcttgtgtgataaccgaactgctttagatgtgctaaatgcggccaagcatttcaagttgcatcagagagctgctcatgtctactccgaagccaagcgtgtttatgctttcaaggatactgtggcatcaaagttaagcgaggaggaaaagctcaagaaactcggcaatcttatgaatgaaagccaccacagctgtagtgttctctatgaatgcagctgcccggagttggaggaaattgtaaaagtatgccgagacaatggcgctatgggagcaaggcttaccggagctggatggggt

SEQ ID NO: 216526 - DNA, 436 bp, Gossypium hirsutum
ggacacttaagctcaccactcccagctttggtgatctgaatcacctgatatctgcaacaatggctggggttacatgctgcttacgattccctggtcagctcaactctgatctaaggaaacttgctgtgaatctcatcccatttcctcggcttcatttcttcatggtgggttttgctccactcacttcaagaggctcccaacagtacagagccctgacagttcctgagctaacccagcaaatgtgggatgcaaagaacatgatgtgtgcagctgatccacgacatggcagatacttgactgcatcggctatgttccggggcaaaatgagcactaagggagtggatgagcaaatgttgaattgtcaaaacaagaactcttcctactttggtgagtggattcctaacaatgtgaagtcaacagtttgtgacattccacc

SEQ ID NO: 216527 - DNA, 436 bp, Gossypium hirsutum
agacagagcagagcagacagactagaaaagaatagaagatggagcaaacattcatcatgatcagagcctgatggggtccaaagaggcctggttggtgaaatcatcggcagatttgagaagaaaggcttcaatttgaaagggttgaagctcatcagtgtggatcgatcttttgccgagaagcactatgctgacctgtctgcaaaacccttctttaatgggctcgtagagtacattatctccggtccggtcgttgctatgatttgggaaggtaagaatgttgttaccacaggtcgcaagattatcggagccacaaacccagctgaatctgctccgggaacaatccgtggtgactttgcaattgacattgggaggaatgtgatccatgggagtgattccgtcgagagtgcaaggaaggaaatcgccctttggtccctga

SEQ ID NO: 216528 - DNA, 430 bp, Gossypium hirsutum
acgaaattttctttgaaataccagcttttgactacaatgtcaggaaggggaaagggaggtaaggggctcgtaaagggaggagccaagaggcataggaaggtcttaagggacaacattcagggcattaccaaacctgcgattcgccgtctggctcgtaggggaggtgtgaaaagaatcatcggtttgatctactaagaaacccgaggcgtattgaagatcttcttgcagaacgtgattcgtgatgccgtgacatacactgaacacgccagaaggaagaccgttaccgccatggatgttgtttatgccttgaaaaggcaaggcatgactctctatggttttggaggttaagcttagtacactattgaattttacgcattgcagtattatgcttattatggtaaaatcatggatcttggctatagatccactg

SEQ ID NO: 216529 - DNA, 277 bp, Gossypium hirsutum
acgccacgcgtacgtatagatctttatctcttttctttgctatccttttcaatgtctcgtcggtgcacaggaatagggaagaccaaggtcttgttatgaacttctacagggatccttgtcctaacgttgaaaccgttataacggtgcagtttcacctactgttcatcctacacaaaatccctgttttttcttggctgagaaacattttccatgactgtgctatccacccatgtgatgcttcattgctgctggactccacatgaacgagctcttctta

SEQ ID NO: 216530 - DNA, 397 bp, Gossypium hirsutum
cggacgcgtgggggtgtatacagaacaacaaatactggtaacccacaactggttcaagtgcagaacagccagcatcaacaacaatatgcgggttattctcagattcatcatgcatcacaatctgttgcacctacctccagcacggctgccccatatgcatatgaattcactgatccaactcatgctcaaatgtattacactcagcctatggcacccaacatgcctcctcagtaccaaaccatgactgcagtagtcttgccagatgcacccacgcaacttccgactgacaacatcaagccacagatcagaacttcacagccaatatagatcagtcaagaaggaagcgacaaaaattttgaaagaagggggttggttatatctttatattctggtttaa

SEQ ID NO: 216531 - DNA, 463 bp, Gossypium hirsutum
  unsure (1)..(463): unsure at all n locations
cccacgcgtccggggatcccttaccataagtcttgcttcaaatgcagtcattgcaaagggacgctaaagttgggtaattactcctcgatggaaggtgtcgtttattgcaagcctcatttcgagcaactgttcaaggagtcggggaatttcaacaagaatttccagtcacctgcaaggtcagctgagaagttaactcccgagctgacaagatcacctagcaaagccgccagcatgttttccgggacacaagaaaaatgtgctacttgtggcaaaactgcttatccactcgagaaggtaacagtggaaggacagtcgtaccacaagtcatttttcaaatgctctcatggtggctgccctataactccatcaaattatgcagcacttgaaggcattntgtattgtaaacatcacttctcccaactttttaaggagagaggaagctancaccaccttatcaagtctg

SEQ ID NO: 216532 - DNA, 359 bp, Gossypium hirsutum
gcgcaagcatgttcatgaaactgggctttcttagaaaatcgagttggttattgtgtcccctgtgctcaggactatgcaaactggagtgggagtctttggtagtgaagggtataaagatgggatagatgtacctccattgatggtggaaaatgcaggtgaaagtaaccgacctgcaatttcaagtttgaattgcccgccatttgtagctgttgaactttgtcgagaacatttgggagtccatccatgtgatagaagaaaaagcatcggcgagtatcggcctgtctttcctgcaattgatttttctctgatagcaagcgatgaggataatttgtgggaagcctacagtagagaaaagaatg

SEQ ID NO: 216533 - DNA, 441 bp, Gossypium hirsutum
cccacgcgtacgttcctttcgggaatggtagcaatgatcatgctaaggacactatgccgtggcatttctaggtataacgaacttgagactcacgaagaagcccaagaagagacaggatggaagctagtccatggggatgttttcaggcctccatctaattctgatctactctgtgtctatgatggcactggtgttcaattcttgggcatggtacttgttaccatgatctttgctgtttttggatttctttcccctacaaaccgaggtggtttgatgacagctatgcttttactatgggtcttcatgggcaattatgcgggctatgcttctgcccgtctgtacaaaatgtttaagggagcacaatggaagacattagcttctaggactgcgtgcatgttcccaggcattgcctttgccatcttttttgtcttaaaagcaatt

SEQ ID NO: 216534 - DNA, 380 bp, Gossypium hirsutum
caggcacttcggtttgagatcaaccgggcttttgctgtcctacgggatattgcatcaggaagagaactcaagaagttcctatctgtgatcgccggcttatgggtcttgtctattgtcggaagttggtgcaacttcttaacactgttttacatagtcttcgtacttcttcacacggtacccgtgctatacgagaaatacgaggacaaggtggacccatttgctgagaaagcaatgcatgagattaagaagcagtatgcagtgtttgatgcaaaggttctaagtaagattccaaggggaccattaaaggagaaaaagaaggattagatttaccggccaagatgtgcttttgctaggtttctgacatacatttggtagctgcc

SEQ ID NO: 216535 - DNA, 449 bp, Gossypium hirsutum
aaaaatctctttttttttgttgtaatttcttggattctccaatatgggttttgaaaattgagatagggtatcggagccagggatgataatggaagtttggtcaaataatttggaatcggagttcgagttgatcagccaagtgatcgacaaatacccatttatttcaatggatactgagttttcgggtataattttccggccaaaagtggaccccacaagggcgtacaacggtcagttccgaccggccgatcattacaaggtactcaaatgtaacgttgatgctttgaattttatccaagtgggtctaaccctcaacgattcttcaggtaatctgcccggatccgaaaacggaacccggttcatctgggaattcaatttccgtgatttcgacgtggagcgagatgctcacgcgccggattccatcgagcttttaggaggcaagggattga

SEQ ID NO: 216536 - DNA, 338 bp, Gossypium hirsutum
cccacgcgtccggcgaaaactccgcgcttcatttatctaagattaaaatgggttggaaagcggctgagaagcttattaggcactggaaaattcttaggggtgacaatgtaatgataatcaggggcaaagataaaggtgaaactggcattatcaaacgcgttgttcgctctcagaatcgtgtaattgttgaagggaaaaatctggtaaaaaagcacattaagcaaggtccaggtcatgaaggtggtatatttactgttgaggctccacttcatgcctcaaatgttcaagttcttgatcctgttactgggaagccttgtaaggttggagttaaatatcta

SEQ ID NO: 216537 - DNA, 419 bp, Gossypium hirsutum
  unsure (1)..(419): unsure at all n locations
gtcggttttatgaaaaggagggtcttcctgtcttccctatgggtaaaattgatcagacacgggtgtggaaagttggtgagcgtgtccaancaactagagcgaaagatgatttaggtccactgtgccctttcacttctggggtttttgtggcgctaatgatggcacagatcgaggtcttgagaaagaagggccactcgtactcagaaatcatcaatgagagtttgattgaagctgttgattccttgaaccccttcatgcatgctcgaggagtttctttcatggttgataactgttccacaaccgcacgattgggatcaagaaaatgggctccacgttttgattacaaccttactcaacaagcattcgtagcagtggattcaagtgctcccatcaaccaggacctgataagcaacttctta

SEQ ID NO: 216538 - DNA, 424 bp, Gossypium hirsutum
cgaaatccaaaagaaacccacagattataaatttagtatcgattcgagtatttgaatacctgggattgcaagaatggcaggggaagtaggattgttggatttctggccaagtccatttgggatgagatccaagattgctttggctgagaaagggataccatacgagtacagagaagaagatttgacgaacacgagtgatttgttgctgcacatgaaccctgatcacaagaaaatgcctgttcttatgcataatggtaaacccgtctgggagtgtgtcattcaagttcacgatatttatcaggtctggcatgataaaacctcctttgatcccttctgatccttatcaaagagctgctgccagattttgggttgatttcggcgacaagaagatatatgacccggggagcaaaatatggaagacaaa

SEQ ID NO: 216539 - DNA, 354 bp, Gossypium hirsutum
  unsure (1)..(354): unsure at all n locations
ggatgaactcttacttgctggtgaacttcattagtcgagcaagaaaactgttgcacgtttagtagctgcacaggattcactggtggagaccgcgaaagagcaagccagttccattagcaatataattgcacaggccacaaagtaggttatgaccgagagtggttgcggattgccatttgtattggggttggttttggtgtctcatctgttgtgagaactctttctggattttagtttgagaacttaattgtatgtttatgaatgtagattcgggagccttttgtagaaatgatcacatataatcatcatattaattatgttaaaaaaaaaaaaatnaaaaaaatttacnnaant

SEQ ID NO: 216540 - DNA, 343 bp, Gossypium hirsutum
aaaaaaattctatgaatcagcactcaggctgttaccaggttaccttggagctgcattagctggagctgagctccatgtcatcgagggacgaaatggggatgctgtatctcttcttgagcgttatctcaaagattgggctgatgactctcttcatgtcaaattggctcaagtatttgctgctacaaatatgcttcaagactctttgtcacattatcaatctgcattgagaataaatcctcaaaatgaagctgccaaaaaggggctagaacgcctggaaaagcagatgaagggggtggatccggatgcgcctgaagaagaagaaaatgaggttgatgatgcagat

SEQ ID NO: 216541 - DNA, 433 bp, Gossypium hirsutum
cccacgcgtccgcccacgcgtccgtttttttagttcttttactttggaaatctaaatcatagacagaatcatcggcgccaaccatgccgccgaagtttgacccgacccaagtcgtcgacgtctttgttcgagtcgccggcggtgaagttggagctgccagttcactggcacccaaaattggtccactgggtctctcgcccaaaaaaattggtgaagatatcgcgaaagaaaccgccaaggaatggaagggtttacgtgtcacagtcaaactgactgtccagaaccgtcaagccaaagttatggtggttccctctgccgccgctttggtcatcaaggcactgaaagagcctgagagggatcgtaagaagacaaagaatattaaacataatgggaacattagcctcgatgatgtgatagagattgcgaaagtgat

SEQ ID NO: 216542 - DNA, 253 bp, Gossypium hirsutum
ataaggcaaacaaagctaacaaagtatccttttcgaaccacatgacaaataaatggcggtgggtcaatcttcaatgcgccaaggtttccttggaatctggtaaacgctatgtaaaactgctctcgtctaccaacgtgttgaataccatctacaccaacggactgtatgctgttgctaacaaagctggaattgatcttcgcaaggaatgataatgtaacctaatttttaaatatcatggtgtattacgaaaact

SEQ ID NO: 216543 - DNA, 418 bp, Gossypium hirsutum
gcctccactctgtcctgagtctgatgatccttatgcggcatggaatgtgcccctgcaagcttgcatgcacaaagtgccagtagatgcttcataacatgggtctcaatggcctgagcgatggccagaaaggttggaaaaatcaccttattggttgagttcccaagttggagtttatggcaaagcagcaccagaggattttgctgcagacaatgagcactggaaacgggtagtaactaagtcatacctaaatgggatgggaataagctggtcatctgtcagaaatgtcatggacatgaatgctgtttatggaggatttgctgctgcactaaaaaatttgagtttatgggtcatgaatgtggtcccaattgactctccagatacgcttcccataatatatgaaagaaggtctattggcatg

SEQ ID NO: 216544 - DNA, 348 bp, Gossypium hirsutum
cttttggtcactaacccaaagagggttgcgattgctattgctgaaaaaacttgcaatgcccggcttctcaaggtcaatcaaattggatctgttactgaaagtattgaagctgtgaaaatgtccaagcaagctggatggggtgtgatggccagccaccgcagtggtgaaacggaggatacttttattgctgatctttcagtcggtttggccacgggccaaattaagactggagctccatgcaggtctgagcgtttagccaagtacaatcagcttctgcgaattgaggaggagcttggtgcggaagctgtctatgccggagctagcttacgtgctccagatgcaccctat

SEQ ID NO: 216545 - DNA, 264 bp, Gossypium hirsutum
cccacgcgtccgggatgggaggattatacattattttatcgagcttggtacaaaggccaaggcgtgcggcttcagaggccatggacacttaacctgcccttggagatattcccgacgaatttctcgatccaattcaatatacattgatgaaggatccggtgatcttaccatcttcaagaataacaatagacagacctgttttccaaagacatcttctaagtgatagtactgatccattcaaccgatctcatattacctcggaga

SEQ ID NO: 216546 - DNA, 435 bp, Gossypium hirsutum
gcataagcagcttaggcaaccagttcgcagttatggtgaagtattcgaaggagtcagataggcccaccaagtcctgcaaggcgaggggctctgatctcagggttcatttcaagaacacaagggagactgcgttcgctatcaggaagttgcctttgggtaacgctaacaggtatttggaggatgttatggctcacaaacaggccgtacccttcagacagctttgtggtggtgttggacgtacagctcacgcaaagaacaggcattctaactgacactgtcgctggcctgtaaaatctgccaaattcattctagatttgctgaagaatgctgaaagcaatgccgaggtcaagggtttggatgacgatgcactctatatttctcacatacaagttaaccaggctcataaacaaaggcgtcgtacataccgtgcccatg

SEQ ID NO: 216547 - DNA, 265 bp, Gossypium hirsutum
cccacgcgtccgaggtcctgaagcaagtccattctgatatcggcatttccagcaaagctatgggtattatgaacagtttcatcaacgacatcttcgagaagctggctcaagaatcttcgaggcttgcacgctataacaagaaacccaccattacctcccgtgagattcagactgccgtaagattggtcctacctggggagttggccaagcatgctgtttcagaaggtaccaaggcggttacaaagttcaccagttcttagtttcc

SEQ ID NO: 216548 - DNA, 240 bp, Gossypium hirsutum
cgcgtccgagacttccacacctactcccttctttggaactcctcaacgtattatcttctctgttgatggggctccgatcaaggaggtcaaggacttggaatctattggcgttgcgttcccaaagagccagccgatgagagtgtattcgagtctttggaacgccgataattgggccactcgaggtggcgttgttaagacagattggagcaaagctcctttcactgctgcttacaagaatta

SEQ ID NO: 216549 - DNA, 372 bp, Gossypium hirsutum
cggaaccgcaaggccgggccaggcctacgcgttcgcgtttttcaatatacagggtgtaaattggtctgaggctaccgcacccattggcccgcgaaggtgttaacaaatcatgcgcaaaggcccatgcccttgaagccgtcacagcagtgaattctgtaaccgcatttaagaagatggacatgaagattcgaaccaatgcttcatttcacaggtcaaagacctttaagaaagataggacctcaaactacctacgcattaatgctccaccaaagaacaagcttgatcattatcagattctcaagtgtcccattacgactgagtctgctatgaagacgattgaagacaacaacactttggctatcattgttgaca

SEQ ID NO: 216550 - DNA, 413 bp, Gossypium hirsutum
  unsure (1)..(413): unsure at all n locations
tgctgatggaattttccggtcacttctctactaagggtgcatctccgagtgtgacatcaacgtcnagaggcggccgtaccaccggaactgccgttgtgctctccacgacaagtcgttgggaaggaactgttcacgttcattccctaagagcaagaatgtgtcttatcctatgagaagatcatggagtgagggatgcttggccatggtagcagctacgggttattcttccccgtcgtcttcgccgtctttggctggtgttcacggtgctgggaagcagcaactggaatcgtttaaagaagaggaagataaataatcgaaaatggaagggaacgaataattttttggccttcttttgtgatgtttgggatcatgttttagaataaatactgatcatagggtgagtgaaaggagat

SEQ ID NO: 216551 - DNA, 324 bp, Gossypium hirsutum
cccacgcgtccgcaaaatttatcgtcttccactcaaaacaaaccagaagagaatctaccatggcgcccgaaagccgataagaagcctgctgagaagaagccggccgaggagaaaaagactaccgtcgctgagaaatcccttgccgagaagaagccgaaggccggtaagaagcttcccaaagaaggcggcgcggccggagacaagaagaagaagaaggccaagaagagcgtggagacctacaagatctacatcttcaaagtccttaagcaagtccatcctgatatcgggatctcaagcaaggctatggggatcatgaaacagttc

SEQ ID NO: 216552 - DNA, 360 bp, Gossypium hirsutum
cccacgcgtccggaaacctccaatcaagttgtcaccgtttgttcctccaatagttaagccagccattgacctccctccggttacggtccctccaattaaccttcccccaggacggttcctccagtaactaagccaccaagtgggaaaccctgcccaacaccaccaaccaaggacacttgccccattgacacactgaaattgggtgcttgtgtggatctgctgggagggttggtgcacattggactaggtgacccggttgtgaaccaatgttgtccggttctttcaggactcgccgagctcgaagctgcggtctgcttgtgcaccaccctcaaacttaaggttctcaaccttaaaatttat

SEQ ID NO: 216553 - DNA, 412 bp, Gossypium hirsutum
cccacgcgtccggcaacatcactgttaacaataatgctgtttttggtgacagcagtgcattggctcccggaggtgtacgaattggtacacctgccatgacttcaaggggtttggttgagaaggactttgaacagataggcgagttcctccaccgagccgtgacaatcactttgaacatccaaaagcaatatggtaagcttttgaaggacttcaacaaagggttggacaacaacaaggagatccaagagctgaaggttgatgttgagaagttcgcatactcattcgatatgcctggcttcaagatgtccgacatgaattacacggattagatctaaataaccatacgatctaattgatgttattatcagcatctgccactgtgtgggttgcccccatttgatgtcttatgagt

SEQ ID NO: 216554 - DNA, 436 bp, Gossypium hirsutum
cttgcagtcgcctttatcagaagcaaaaacactaagctttagcttctacatcgaagaaaatggtgaacggacgccaaggagagcgagtgagactctatgtaagaggaaccatcttgggttacaagaggtcaaagtcgaaccagtatccaaacacttcattgatccagattgagggagttaacaccaaggaggaagtagcttggtatgctggcaagcgtatggcttatatctacaaggccaaagtgaagaagaatggctcacactatcgctgcatttggggaaaagtttctagacctcatggtaacagtggggttgctcgtgctaagttcaagtctaaccttcccccaaagtctatgggagatagagtcagagtcttcatgtaccccagcaatatatgagtagtgtagatcgacgactcgaatgacgctctaccatt

SEQ ID NO: 216555 - DNA, 436 bp, Gossypium hirsutum
cccacgcgtccggtcaatcagcagctactttgaatcttttgagagcctttgctactggaggttatgctgctatgcaaagggttactcagtggaatttggatttcaccgaacacagtgagcagggggataggtaccgtgaactagctagtcgtgtggatgaggcccttggattcatggctgcagctggacttacagttgaccatcctatcatgacaacaactgaattctggacttcccatgagtgcttgctcttaccttacgaacagtcacttacccggcttgattctacttctggccgttactatgattgttctgctcatttcctgtgggtcggggaacgaacaagacagttggatggtgctcatgttgagtttttgagaggagttgctaatccccttggaattaaggtgagcgataagatggatccgaatgaact

SEQ ID NO: 216556 - DNA, 423 bp, Gossypium hirsutum
gttgggagtcggctcactatggtttctactgaagagatccttcttgaacgacctagagcccctggtaccaaaccggaagaagcaaaggcttccggtgacggcttggctcagcttagcaaaggaggtgctgttctcatggtgtgccgaacatgcggtaagaaaggtgatcactggacctccaaatgtccttacaaggatcttgctgctccagtcgaatcctttgttgataaacccgcggcagccgagacctcggcagctgctcctggagctggaaagggagcctacgttccaccaagcatgagagccaatgcagagagaacaaccggatcagatatgagacgtaggaacgacgaaaactctgtgagggtaacaaacttatctgaggacactcgggaggctgacttgcacgaacttttccgatcg

SEQ ID NO: 216557 - DNA, 435 bp, Gossypium hirsutum
cccacgcgtccgcccacgcgtccgcttttttatattactctcaattcccattgaaactttcagactttcagccataattaagcttcttcccttcagaaaacttcgactgaagctgctccaagattaaagaagcttcaatttataatactctgccccttaaactagcaagcctgatctgctgcataatcgtctaaagaaaatttgatggggataaataagttgctgtgttggtttgcagttttcttctttttgttgggtttctctgcttgcacttcgatttcggatggtgttttcgactctctcacttctactggaaggcacctccttcaagctaagaaagcttgccctgtgaactttgagtttctgaactacacaattatcacaagccaatgcaaaggaccaaagtatccgcctcaaagttgttgttctgcattc

SEQ ID NO: 216558 - DNA, 425 bp, Gossypium hirsutum
gtgaaagcgataccctaccctctctttgatcaagtggccaatgggggcttataagtgcgtgtcggagctatggaggaagaagcagtcggatgtgatgaggtttttacagagggtgaggtgctgggaataccgccagcatccgtcaattgttagggtcaaccatactactcggcctgacaaggcacgccgcttgggttataaggccaaacaaggttatgtggtttaccgtgtacgtgtttggaggggtggtcgcatgaggcctgttcctaagggtatcgtgtatggtaagcccacagaccaaggcgtcacccaattgaaactccagcgcagcaagcggtctgttgctgaggagcgtgctggcccacagttgagaggtctcagagttgttaactcgtactggatcaatgatgactctacttacaagt

SEQ ID NO: 216559 - DNA, 393 bp, Gossypium hirsutum
aggatcacaacatggaacatcaccaccattaccataaccatgttgaaagtgcagagatgggcttgttcaccattgatgaactacatacctttaacgtacggaagaaattacccatctttttcccaataaaaaaccactctctttaccctcctttattgcctaaacaaattgctgacaccatccctttttcatcttcccaagtttctaatattctacgattcttctcagtttctccggactcccccaaaggcaaagctgttcaagatacactcgcaaaatgcgaactcggagcagcgcaaggggagaccaaaatctgtgctacctctttagaatctttacatggttttctaagcaatgcatttggaccccatgttgatttcaagttcataagca

SEQ ID NO: 216560 - DNA, 422 bp, Gossypium hirsutum
gaaagacgatcactctcgaggtcgagagctctgacacgatcgacaacgtgaaagccaaaagccaagacaaggaaggcatcccgccagaccaacaacgtctcatcttcgccggaaagcaactcgaggacgggcggactttagccgattacaatatccagaaggaatcgactcttcatctggttctacgtcttcgaggtgggatgcagatcttcgtcaagactttgaccggtaagaccattactttagaagtggagagctcggatacgattgataacgcgaaagcgaagattcatgacaaagaaggaattccaccagatcagcaaaggttgatttttgctgggaaacagctggaagatggaaggactctggctgattacaatattcaaaaggagtccactcttcaccttgttcttcgtcttcgt

SEQ ID NO: 216561 - DNA, 422 bp, Gossypium hirsutum
  unsure (1)..(422): unsure at all n locations
gcagcagcagcctctctttctcatcttgtgatttgagcttcgtgtttgtgttgggttaagcaattcgccaagatgcagaacgaagagggtcaaaacatggatctttatatccccagaaaatgttcggccactaataggctgatcacctcgaaggatcatgcttctgtccagattaatgttgggcatttggatgagcttggcagatacactggaactttctccacttttgctctttgtggctttgtccgtgcccagggtgatgctgacagtgcacttgacaggctttggcagaagaagaaagctgaagtccgacagcagtagtgggaggtggattgctttttactaattgcttggtctctgaantttggagggaaaatgtgttttttttttaatcagtgacctttaagttctagtttggtttt

SEQ ID NO: 216562 - DNA, 306 bp, Gossypium hirsutum
gaaaagttggaggaaaattagaagacactgagctaatatatggaattactgttgataaagacatgagtcatcctcagatgccaaagcaaattgaagatgcaaaaattgccatattaacttgtccatttgagccacctaagccaaagactaaacataaagtagacattgatacggtggaaaagtttcagactctacgtcagcaagaacaaatgtattttgatgacatggttcagaaatgcaaggatgttggtgccacattggttatatgtcaatggcgaattgatgatgaggcgaatcatttattta

SEQ ID NO: 216563 - DNA, 436 bp, Gossypium hirsutum
cccacgcgtccggaaacacaaggttggactgcgagctttgaattttaggtgttcctgcagagtgaggaagctcccctgaaaacttcagttgaaaatgcctaagcaaattcatgagatcaaggacttccttctcactgctagaaggaaagatgctccctctgtaaaaatcaagaaaagcagagatgttgtaaagttcaaggtccgctgctccaagtacttgtacaccctttgcgtgtctgatgctgagaaggccgacaagttgaagcagtctcttcctccaggtttgagcgtccaagacttgtgaaattacaactgcccttagcttctactaggcaatgaaaactagattttgacttttagtttattgcttgcatttcgtgtcgttttgcaacaatcaaaagtttttataatggatttttatttggtgtgtttttta

SEQ ID NO: 216564 - DNA, 432 bp, Gossypium hirsutum
cttgcaaaggagatttcaaaggactggagttctgttttcgaaagaagcataaacacgctgtttctaactgaaatggttcggggtctcatgctgacactcaagtacttctttgaaagaaaagttactattaactatccatttgagaagggtccattgagccctcgttttcgaggggagcatgctctccgccgatatccaactggagaggaacgttgcattgcctgtaaactttgtgaagcggtatgtcccgcacaggcaatcacgatagaggctgaggaacgagaggatggaagtcgtaggacaacgaggtatgacattgacatgaccaagtgtatctactgtgggctctgccaagaggcatgtcctgttgatgcaatcgttgaaggacccaactttgaatttgccaccgagactcatgaggagctgctgtat

SEQ ID NO: 216565 - DNA, 413 bp, Gossypium hirsutum
aatacttgcctaaactatatgatcctttcttgcatggaccctaccgcggaagaatcaaggaatggggttcccctttaagcataaatcaaacttataaaaaaaaaaacacggatccattttggataaataagattcatgctctacttcttactactgattatcacgaccttgaacagacactagatacactcaatataaaatcattagcaacagaaaaagaactctctttattgacattgacagaagatgaacagggaaatatcgattccgaggatcgagtcaaaattttgaaatttttattcaatatagttataactaatcccaacaatcaaacaattagaaaaaaatctattggaataaaagaaataagtaaaaaagttcctcgatggtcatacaaattaatcgacgattta

SEQ ID NO: 216566 - DNA, 433 bp, Gossypium hirsutum
  unsure (1)..(433): unsure at all n locations
cccacgcgtccgaagagacgcccaaaccaggttaaaaggacttgttacgctcagtccagccggattagacagatacgccgaaagatgagggaaataatgactgcccaggcaacatcttgtgatttgaaggaactggttcaaaagttcatccctgagatgattggaaaagaaatcgagaaggcaacatctagcatctatcctttgcagaatgtgtttattcgtaaggtcaaaatcttgaaggctcccaagtttgatcttgggaagttgatggaggttcatggtgactactcagaggatgttggtgtgaaactagagaggcctgctgatgagacaatggctgaggctcctgcagaggttgttggagcttgaacgaagaaaatagtccatgaatgtctngttttttatgcttctaggagttttgctgatcatttaa

SEQ ID NO: 216567 - DNA, 430 bp, Gossypium hirsutum
ccgaaacagaatttgtaacttgctatcctcttgcctagcgggcaaggatttacctccgtggaaaagatgattcattcggatccgcatgaaagcccaactccattgcattgccagaatccatgttgtatatttgaaagaggttgacctccttgcttctctcatggtacaatcctcttcccgctgagccccctttctcctcggtccacagagacaaaatggaatgtaggactaggactggcgccaacagttaatcacggaagaaaggactcactgagccgggatcactaactaatactaatctaatctaactaatactaatctaatactaatagaatactaatctaatactctaatactaatagaatagaaaaaatagaatagaaaatactaatataatagaaagaactgtcttttctgtatactttccccg

SEQ ID NO: 216568 - DNA, 385 bp, Gossypium hirsutum
  unsure (1)..(385): unsure at all n locations
cccacgcgtccgctccacaggggtctggttaataaggagaaggttaggatctcatgggcaggtttctgtgagccaccgaaggataagatcatccttaagccactcccggagactgtctctgagaccgaacctccactgttccctcctcgtacctttgctcagcatatcgagcataagctgttcaggaagacccaggataatctgtccaactgaaactagcatttttatttgtcgcgataacctatttctttctgtactctgatgaatgctatatttcgttggggggttaaacccttggttgtggcgtctgtctccactccttggctcctctttacctgttttatttgaataatgagagctgatttggtcttttattaannaaaaa

SEQ ID NO: 216569 - DNA, 416 bp, Gossypium hirsutum
cccacgcgtccgtgaaaaggctacagttttttacaaagacgaatcgacctcggcagcttggatgaccatgaagtctggcataaggaacatacttccaaactctgaaatatgcgattttgagttcgaaccttgcggctattctatgaattcaatcgaaaccgatgctatttcgaccattcatgttacacccgaagacggttttagttatgcaagcttcgaagctgtgggctatgatctgaaagagttgaatctggagcagttggtgcaaagggttttagtttgcttcaaaccaagtaatttctctgttgccgtgcatgtggatgttgattgtcactcatttgaacagacctgtctgctggatgttaaaggataccgttgccgggagagtagcatcgaagagcttggttcagggggtt

SEQ ID NO: 216570 - DNA, 399 bp, Gossypium hirsutum
gcaagctcaaaggacaggttcaagagagagttggacggtattcaaatagagctgcaggcaactgacccgactgagatgggacttgatgttattcgaagccgtgccaactaaattggcatctccaaatggcaggaataatggagatggtaaaatgctttctgcttttgtttcaagtgaaatgttaatagtttggtggggtggtatgattttggtttgttgttcagatgttatatccaagtctttgtctagaacaagtttagcaatttccatttgaatcttatgattctgttatgcatgtctcaaagttatcggacggagtgtcttacagctgagtcgataaacaaaagtctcatcttcttgaagagtatatgaagcactcttttttgaggggttttttcc

SEQ ID NO: 216571 - DNA, 385 bp, Gossypium hirsutum
cccacgcgtccgtttttttttaaacaaattcagtagaattatccactgtaaatgtgaaggaagaaaaaccaaaagtacctcactccacaaccttcatagtatccatcaaacaaaatacataaaaacaaagcaaagagatcataaaacataaccattacaaactttttccatgtaaatacgagtaatacggagacgcttcgatgcatgtttctttttttcgtatagaaaaaaacccaagaagaaatgcattcaaatcaggacacacaccggagagaatcaataaccctgatcgaggagataatcgccgagcctctcgacgatcatgttgcattggccgggtgacattcgttcatgatagattccgatgaacaacgccatattggtc

SEQ ID NO: 216572 - DNA, 429 bp, Gossypium hirsutum
cccatgctttcaaacatgggagaatattcttttgcaatatgcatgatctttgatgactatggcgagaatgagcactcttatggccattatagttgaatctgcacagtccgaggacgcgataactgtctttattgcaaaaagtgcagttcttgctatgccattgacttgccatataatcatttgttcgttgagaactcgatgcgctatcattgtcccatattttatcagtacctattcgattctttgaaagataccactgtgatcaaatgttgtcacacaatgcactgcgaatgttactatgagatgatcattcgtatcatatattggtgtcctatgtgcgcaaactccgtaataattatgtgtataacctggaatacgatataccaagagatccaacctactgctttgtcttaggactaccggttcatt

SEQ ID NO: 216573 - DNA, 383 bp, Gossypium hirsutum
aaaaaaaagagatgcgttcgaagaagatggtaggaacttcggcccccagtttgcgtcgaggtccttatgaagttttatgcgtttcaagggattcttctgatcaggagatcaaaactgcttatcgaaagctcgctctcaagtatcatcctgacaagaatgccaacaatcctgaggcttcagaactttttaaggaagttgcatattcttatagcattttatccgacccagaaaagaggagacaatatgacactgcagggtttgaggctgttgaagattcgatggatatggagattgatttgtccaatctaggaactgttaatacaatgtttgcagcattattcagcaagcttggtgtccctatcaagactactatctcagctaat

SEQ ID NO: 216574 - DNA, 389 bp, Gossypium hirsutum
cccacgcgtccgaaattttatagcaagactccttatttctccgatgtcgatcttcgaatacaacgggagtgccctaatagccatggtaggcaagaactgcttcgccattgccagcgatcggagactcggagttcaactccaaactatcgccaccgatttccagaggatttataaagtccacgatcgcctcttcctcggtctctccggcctcgccaccgatgctcaaaccttgtatcaaaggcttgtctttcggcacaaactgtatcagctaagagaagaagagacatgaaacctgagacttttgctaaccttgtttctgcgattctttacgagaaaaggtttggtccatacttctgccaacctgtaattgctggataggagatgaagac

SEQ ID NO: 216575 - DNA, 345 bp, Gossypium hirsutum
ctatcgaagagcaaaaaaaaggaaaagaaaagaaaagaaaagaaagagatattgtttactcctgaactatcttcatataatctcagaaagcacgagctgtgtaaaatccgtcggctctacaaaagagtttaagatctaacattccgcctcttaaattctatcagatctgcgtcttgctgattccatcttacattttcattgatagactttttctttggttagatccgtgatggatttcatgaaggtctttgatcagacggttcgcgaaataaagagggaggttaatctaaaggtattgaaggttccggagatcgagcagaaggtactggatgctacagataatga

SEQ ID NO: 216576 - DNA, 433 bp, Gossypium hirsutum
cccacgcgtccggaaaaaagaagcaaaaaaacatggccaaagttctgttgttcattgcactatgtgtgcttccagctttggttagtgctacacgcattctgaataatcaattggtggtagaaggctatgtgtactgtgatacttgccgtgctggttttgaaacccctaagactagaagcctagctgatgccatggttaggttggtatgctccgacaggaagagcggccaagttgtcttcaaaaaggagggatacaccgacaaaaccggaaaataccagattcgtgtatccgaggatcacttggatcagatctgtgatgcagttcttgtgaagagctcccagcttggttgtgccacaatgtcccccggtcgtgaacgtgcccgtgttatcttgaccaacttcaatggcatttcatccaccacccgttatgccaa

SEQ ID NO: 216577 - DNA, 372 bp, Gossypium hirsutum
atccgaattccgagtcgactcaggaatggcaactggaacagcaccaccaagaggaagcgcagcagcagctgcaaacatgcggaggaggagaacgtcaagcggtgcaggtgcctcgggaggagctgctggcacaatgcttcagttttacacagatgatgccccagggctgaagatctctccaaatgtggtgcttgtcatgagcattggtttcattgcttttgttgccattctccatgtcatgggcaagttgtattttgttcgtaaggagtagggaggggctttcttcaatacctgtattaacaagtaccaaacaaagatcaatgttgtagttttcagttttgcttaataaatggattttgatttgatttctcc

SEQ ID NO: 216578 - DNA, 421 bp, Gossypium hirsutum
caactctacaagtgtgatccagcgggccacttttacggtcacaaggcaactagtgctggatcgaaagaacaagaggcaattaatttcttggaaaagaagatgaagaatgacccagcttttacttacgaggaaacggtgcagacggccatttctgctctgcaatctgttcttcaggaggatttcaaggctactgagatagaggtgggagtggtgaaagctgataatcctgttttccgagtgatgtcaaccgaggaaatagatgaacatttgacagccattagcgagcgtgactagcgagctcagaccatcaagagccgctgcaaaaatctctgttatcaatcgaaaatgacaaatgtgctttagtttatcatatcatgtttgagagaggatagaaaaaggggtttgtagcttcaaattatgt

SEQ ID NO: 216579 - DNA, 302 bp, Gossypium hirsutum
gctgtgtctttgcagagtatcgggtagtcctttcaatcctcagccatggcggaacagacggagaaagcatttctcaaacaacccaaggtgtttttaagctctaaaaaaaatgggaaaggaaagagacctggaaagggcgggaatcgcttctggaaaagcattgggttaggctttaagacacccagagaggccattgaaggaacatatattgataagaaatgcccatttactggcactgtttctattagaggccgtatccttgccggtacttgccatagtgcaaaaatggtaaggactattat

SEQ ID NO: 216580 - DNA, 444 bp, Gossypium hirsutum
atccaagtcagatactaagagtgccaagctatccgtgaaatccaaagctggaaagaaatcggggaaggctgccaaggatccaaacaagccaaagaggcctgctagtgccttctttgttttcatggaggagttccgtgagcaatacaagaaggatcaccctaaaaacaaatccgttgcggctgtcggcaaagctggtggagataaatggaagagcttgtctgaagctgaaaaggcaccttatgtagctaaggcagaaaagcggaaggttgagtatgaaaagaacatgaaggcctacaataagagacaggctgagggtcccaaagacgaagatgttgagtctgacaaatcagtgtctgaggtgaatgatgaggatgatgatgaagaaggcagcggagacgaggaagatgatgagtaggaaggtccgtggtggatagcataatcaat

SEQ ID NO: 216581 - DNA, 364 bp, Gossypium hirsutum
cttgacaagaagaggaagcccatttctaaggaggaggcaacagcaatcaagtcagcaggcaaagcatggtatcagactatgatctccgacagtgattacacagagtttgagaacttctctaagtggttgggtgtgtctcagtaattttagtttttgatttagatatttgttgcagtcaatgttgtcaactttgttatggtgttgtctttttagttattttgatgttttgagttgtgggtggaaggaaaattagtgaaatatcatgctctaatacgcttctgttttgtcctcctcccctgttttcgcattctatggctagtggaatagtttctataatatgagaacaagaaattaatcagtttac

SEQ ID NO: 216582 - DNA, 365 bp, Gossypium hirsutum
atggcacaacaatggctggtttaaaggctattggttataactttgagtatgatgattttcatagtttcgttcatgggagactgccctatgcaatgctaaaacctgaccctgttttaaggaatctcttgcttagcataccaattcggaaaataattttcaccaatgcagataagaaccatgctgccagggtgctcaacaggttgggattggaggactgcttcaaaggattatatggttcgagaactttaatccaataaacaaaaaaacccttcaacttgtgatgatatcaaaccagacactgccatttgtgacatcaatggatactgcagtgctgttcttgattctgagcttaagcttccaagtac

SEQ ID NO: 216583 - DNA, 431 bp, Gossypium hirsutum
cggacgcgtgggcggacgcgtgggcggactcgtgggcccacccacaccaaactccacccgtcttcgtttccgtttccctactgctacttctattttctaaatcccaaaatgggaaggtctccttgctgtgagaaagctcatacaaacaaaggtgcatggaccaaagaagaagatgatcgcctcatcgcttacatccgagcccacggtgaaggttgctggcgttctctccctaaggctgctggccttctccgttgtggcaaaagttgcaggcttcgttggatcaactacttaagacctgacctcaaacgtggcaacttcactgaggaagaagatgaactcattatcaagctccatagccttctcggcaacaagtggtctcttatagccgggagattaccaggaagaacggataatgagataaagaattactg

SEQ ID NO: 216584 - DNA, 427 bp, Gossypium hirsutum
gctgtgtctttgcagagtatcgggtagtcctttcaatcctcagccatggcggaacagacggagaaagcatttctcaaacaacccaaggtgtttttaagctctaaaaaaaatgggaaaggaaagagacctggaaagggcgggaatcgcttctggaaaagcattgggttaggctttaagacacccagagaggccattgaaggaacatatattgataagaaatgcccatttactggcactgtttctattagaggccgtatccttgccggtacttgccatagtgcaaaaatggtaaggactattatcgtccgaaggaactaccttcactacatcaagaaataccaaagatacgagaaaaggcacagcaatatcccagctcatatatccccctgctttcgtgttaaagaaggagatcatgttataatcgggc

SEQ ID NO: 216585 - DNA, 439 bp, Gossypium hirsutum
cccacgcgtccgcccacgcgtccgcccactcttccgcccacgcgtccgggccttccagttgcctgaattgaagacactaaaaagctgtgatttgctatcttccagctggatttctgtttcatggtatccaatttacagaatacctactggacctacattaaaagatttagatgcttgctttctgacttaccattgtcttcatacacccataggaggtggagaaagtgctcaggcaccttttattacttgtcccaatgacatggatgatgttccaaagatgtcattgcctgtctttggtcttgcgtcatacaagttcaagggctccttgtggacacctaatggaacaactgattgtcacttggcaaacagcctctttcaggctgctgacaattggttgagacttcttcatgttaatcaaccacatttcacaatttttctg

SEQ ID NO: 216586 - DNA, 429 bp, Gossypium hirsutum
gcgaaacttcgggcttaccaccacactgctcaaaccaaggctgataaaaaacatttttcaaacatgggtttggaccttttgaatggaaccgttcgtaacaacttagaagctggagtcattgagcctgcaatgagcaaagtgaagattattcagtttgcaactgaagcagccataacgattcttcgaattgatgatatgatcaagcttatgaaagatgaaagtcagaacgaagagtaggggagatgggacttctgttgataaggatgatggttgtaggttaatacaaaggaaggattgggatgcggttttaagaaaattgaagcaggttttcatgttttttttttgttgttgttatatatcgttttattgggtttaaaacgaatataatgtttgttttcagcgattaatagaccagcgttccgttttttg

SEQ ID NO: 216587 - DNA, 399 bp, Gossypium hirsutum
atcatcgtttgctttatacaaaatctggcaactactcatctacatttgtttacatggactggatattcggtactgacaagggttacagaaaattgaaagcactaaagcgtgatggagtcgaagaagaaagcaagcaaacataaccgagaagatgagttttcgaaggctttgaccggcagaaacaccggttaccgataaaatgtcatgttgaggaagggtttttctcattgtgagcttcttctgcatcttgtgtgcaaatccacctctgtttttttggttgtttaaattgctgttttatgttttgtagcatcataggattaagatttgtttgaacatttagcgacctggtcatctccgtgttcctcgcatgaatgaagttgctgtcttatttttattttt

SEQ ID NO: 216588 - DNA, 433 bp, Gossypium hirsutum
  unsure (1)..(433): unsure at all n locations
ggccaagatccaagacaaggaaggcatcctcaccagaccagcaaaggctcatctttgccgggaaacaactcgaggacggtcgcaccttggccgattacaacatccagaaggagtcgaccctccatttggtattgaggcttcgtggtgggatgcagattttcgtcaagacgttgactgggaaaaccataactttggaggtggagagttccgatacgatcgacaatgttaaggcgaagattcaggacaaagaagggattccaccagatcagcaaaggttgattttcgctgggaaacagttggaagatggaaggactttggctgattacaatattcagaaggaatccactctccaccttgtcttgcgtcttcgtggtggtttctaagctctcctatgaaaatgaggtttctggattntatgtgaatgattgtgatg

SEQ ID NO: 216589 - DNA, 431 bp, Gossypium hirsutum
caaggaactcttttgagagtgcagtaacaaagcttagagcaagtggggagaggaagtcagccttctttggggttgtcttgaaccagatgggcttggcttgtgtccaattattcaagattgacgaggctgccgagttgtttgaagaagcacgagcaatactcgaacaagaatgcggcccatgtcatcaagataccctgggagtatacagcaatcttgcagcaacttatgatgctatgggaagggtcgaagatgcaatcgagatattggagtatgtactaaaattacgagaagaaaaacttggaatagcaaatcctgattttgaagacgaaaagaataggctggctgagctcctgaaagaagcgggcaggccacgcaacagaaaagcaaaatcactggaaaatctcatcgatccgaactcaaagaggacggcg

SEQ ID NO: 216590 - DNA, 461 bp, Gossypium hirsutum
  unsure (1)..(461): unsure at all n locations
gaanncccgcggcgaggcacgcgtccgcaactagcaacatagaaagcacaatagtttaccaacaatggcagccaaaatattttgcggccttatgctccttggtctttctgcaaattcttctacggcgaccattttccttcaatgctcgcaagctactatatcttcccttcttcccccgtacctctcaccagcggtgtcttcgataagagaaaacccaattcttcaaccctacaagatccaacaagcaataccatctgacatcttacctttatcacccttgtccctccaacaatcatcagccctattacaacaattaccttagatgcattcattggcgcaaaacatcatggctcaacaactacaacaacttgtgctagcaaaacttgctgcctactctcagcaacagcagtttcttacattcaaacaactaagatcattgaactcctgcttcttatttcaac

SEQ ID NO: 216591 - DNA, 417 bp, Gossypium hirsutum
aaactgctatgatgtacaaactggaaaaggtggcaactggggcagctacttttactacggtggtccgggtcgaaatgctaactgcccttgactcatttaaatccttaagaaaatgaaagctaagtaaccatcaactgttgccgaaatgaatattcatcaagccaagtgcatgcccttcttcaagctaagtttagactagtaaatttgtgaatcatggattcaccattagatggtagcaatacaggttaaatcaccttattaactctgccaaagatttgttgtgagaaagtgagggatctctagctgatattctttgtttggacatatgagtgtatattttgattttgctttttttttttggcgtgtatgcgtcattaaattctgcttaagcaatataagcacttgggtttgatattc

SEQ ID NO: 216592 - DNA, 429 bp, Gossypium hirsutum
cccacgcgtccggggcggctcagttgagagtttacaacttggggaacacatcgccggtcccagtggggcgattggtatcgatcctggaagggttgctgagcacaaaggccaagaaacatgtgatcacgatgccaagaaatggggacgtgcccttcacacatgccaacgtgacgttagccttcaaggactttgggtacaagcccaccacggatttgtccactgggttgaggaaatttgtgaaatggtacatcagttattatgggattcaatcaaaaacaaggaaggaaagtcaagctaccggtgaatccggctaaagaacattgagcttcatcatcaagcacatggttggttgggtgtttttttttttttttgaattttgggtttttggtcctacgaaaaaaaaaaggatcaaagtgttggaggtgttgt

SEQ ID NO: 216593 - DNA, 381 bp, Gossypium hirsutum
tgttgaatggtacgggaagaatgctaagttgcgtgaattggttaaccttgtagttgtcggtggagatcggagaaaagagtccaaggatttggaagagaaggctgagatgaagaagatgttcgagctcattgagaagtacaagctgaacggtcagttcagatggatatcatcccaaatgaacagagttaggaacggtgaactttaccgttacatttgcgacacatagggtgcctttgtgcaacccgcattatatgaagcctttgggttgactgtcgttgaggccatgacttgtgggtttgccgacattcgcaacttgcaatggtggacctgccgagattatcgttcatggtaaatccggcttcaacattgatccttaccacg

SEQ ID NO: 216594 - DNA, 353 bp, Gossypium hirsutum
aaatcgttgggctttttctttcctcttcttattggcctaaccctccaatgggggggggggcccacttaagcaagggtttgccagtcacaaagccataagttccacggtgcatgtgtgagtagccacaactgtgcgatggtgtgcaaggaccaaagtttcttccgcggcagatatttatgattccgtcgtcgctgcttttgcactaaactttgctaatgcaagcttgcccttatctcatattttaaggatttttcttgagtaaaagacccttatatttttcgtgcactcctatgattgtgttaataaggaatttcctaattacttttgttttggaagacaattttctgttcttt

SEQ ID NO: 216595 - DNA, 432 bp, Gossypium hirsutum
aacaaatccataatctctgagtcctgtgtttcagttggaaaataccatgtgaaagaaagcgtctcctcaactctacagtcaattttcgataaatatggagacatagcagctaactgtcagttggaatcgtcttccatgcgtgcatattatttagagtgcttgtgtgctgtggttcaagagttgcaatccactccattcaatgaactgaccaaatcaaaagtaaaagaaattttttctgttcttaaggatgtagaatctgcaaacattgatgttagttggctgcgtgctctgctcaatgaaatctcagaagccatcaatcttgctagtcaacgacaaacttttgaagccaaaaaggttaagtatgaaagttcgttagagtctgtaaagaacgaactggaatctcgaatggaaaatctatctcagaaagaaaag

SEQ ID NO: 216596 - DNA, 309 bp, Gossypium hirsutum
cgatgatggacagcctaggaccggtagggttcataggggagctctgcaacgggttccggctggtgatggactgccaaagaggattgatcacgttctacagcttgaataacaatcgcattatgtcggggttacatgacatgcgggacgatgaaattctttgcatgttgagcgaagggcatttagatggacatggcgctccgaaccaagatgactttcgtatcctgatgcttacgatacgccctgggtccatggatcacatgggatcaccataatgtgtgcaagaacatgatgttctataccactatatat

SEQ ID NO: 216597 - DNA, 399 bp, Gossypium hirsutum
  unsure (1)..(399): unsure at all n locations
atgttactgaattccttcaacgtgggagtttgttccgattgctacagaggaatgctgcgaaattagagaggaaacggcgtgttcatatggctctggatattgcacgaggcatgaattatcttcaccattgcaatccgactatcgttcatcgtgatctgaagtcttcaaatctcctagttgataagaattggactgtgaaggttggcgattttggtttgtcacgtctcaagcatgcaacgtttctcactactaagactgggaaaggaacgcctcaatggatggcgccagaagttcttcgcaatgaaccctccgatgagaagtccgatatttatagttttggagtcatattatgggaacttgctactgggaagatcccttgngagaatctcaactcaatgc

SEQ ID NO: 216598 - DNA, 439 bp, Gossypium hirsutum
tttcagcattcagaaacacaccaagcgtttcgcactatcaacaacctaacaacaatgtcgagccaatatattagccctccttgcgcttcttgcccttttagtgagcgcatcaaatgcgttcattattccacagtgctcacttgctcctagtgccattattccacagttcctcccaccagttacttcaatgggcttcgaacatccagccgtgcaagcctacaggctacaactagcgcttgcggcgagcgtcttacaacaaccaattgcccaattgcaacaacaattcttggcacaatctaaacctacaaaccatcgtaacgcaacatcaacaacagtttctgtcatcactgagccacctaaccgtggtgaacccttgtccctacttgcaacagcaactactttcattcaacccactttctctggcaaacgtatcttcata

SEQ ID NO: 216599 - DNA, 410 bp, Gossypium hirsutum
ggatatattaaacagggcagtacaggtaggcgtctcctaaaacttactggatctgaattccgactccactcagagatggcaacgggaacagctccaccaagaggaagtgcagcagcagcagcaagcctgcgcaggaggagaacaacaagcggtgggggtgcctcgggaggggctgctggtactatgcttcagttctacaccgatgatgctccaggactcaagatctctccaaatgtggtgcttgtaatgagcattggtttcattgcttttgttgcagttctccatatcatgggcaagtttgttcgtagggactaagaagtattccaagcgtgtagcaaacactttttctttttttttggtcttaacaggagcaaacacttcccattgttataatttttcaagtttcctct

SEQ ID NO: 216600 - DNA, 288 bp, Gossypium hirsutum
ctgacacaaggatcacttacagaaagttcactggttcataagttcaaagaaaatggtggccatgtaatggtctttgaggctagatcaatctagagatcaatgactatggatgtgataaagcacacttctttttgcgccacttgcctgaatctaacatagtctgaaattcctgatctcgatgaatattacagaaaggtgatgaaggaatttgccgtggaataggagaaactttcagagcaacttttggaccatgtgtgtgagaatctttggttggagcctggttacctg

SEQ ID NO: 216601 - DNA, 427 bp, Gossypium hirsutum
gcaagcgatggcaatggctgctctcagacgcgatgggaggcgtttcgcccctctgatctctccccgtccaattactgctgtccgatcctctcctatcgttcccactcacgaagatgagggtccgattggtgttcgttatatttcaacccaagtcgttagaaaccggatgaagagtgttaagaatattcagaaaattacaaaggctatgaagatggttgctgcctcaaagttgagagcagttcaaactaaagctgagaattcccgaggcctctggcagccatttactgcacttcttggtgatcttcccagtgttgatgtcaagaagaacgttgttgtaaccatctcttctgacaaaggtctctgtggtggaattaactctacatcagtcaagataagcaaagggatctataagttgaactctggccct

SEQ ID NO: 216602 - DNA, 422 bp, Gossypium hirsutum
cccacgcgttcgcccacgcgtccggagagtgcagccgccatggaaatgatcaaagatgcgtgtgagaattggggtttctttgagttggtgaaccatggaatatctcatgagctgatggacactgtggagaggctgacaaaggagcactacagaaagtgcatggagcaaaggttcaaagaaatggtggccagtaagggtcttgaggctgttcaatctgagatcaatgacatggattgggaaagcaccttctttttgcgccacttgcctgaatctaacatgtctgaaattcctgatctcgaagaagattacagaaaggtgatgaaggaatttgcagtggagttggagaagcttgcagagcaacttttggacctgttgtgtgagaatctggggttggagcctggttacctgaaaaaagtgtttat

SEQ ID NO: 216603 - DNA, 423 bp, Gossypium hirsutum
  unsure (1)..(423): unsure at all n locations
accgccttttcaccgtcaatgtccgcggcatggctgcttgtgtgaaacacgccgcacgagccatggtggaactgaacgtgagaggaagcatcatttgtacggcgagcacgactgctagctgcggtagtgaaagggacactgattataacatgtcgaagcatgcggtgattggattgatgagatcggcaagcaaacaacttggagagcatgggattagggtgaacagtgtgtcgccgttcattgtgggaaccccattactctatcattacctgnggacggaggcggaggtggagcagttgtttgagccctacgcacggttgaaaggggtggtgctgaaagcgaagcatgttgctgatgctgtggtgtttcttgcgtcacaggactccgaacttattaccggacatgacttggtggtggatgctg

SEQ ID NO: 216604 - DNA, 283 bp, Gossypium hirsutum
cccacgcgtccgcccacgcgtccgaatgcttacatgcctggaaaaggttatactcttcttttagactaaattaagccatggtgggtttgggcttcatggctatcaccattacagtatgcgcaaagagcagcttccattaatgaattcacagctgcaaggtggaaaaagatatctgctattggaaacaatacaatcggatacaatgtgcttcatcaacatggtttaccttccgctaaatattggggtttgcagaaagtcgaagttttggaagttcaggtcaggt

SEQ ID NO: 216605 - DNA, 469 bp, Gossypium hirsutum
accggaacggaatggccggacccgacccacgcggtttctataaacaaacagaaactgggtgtgaaacaatggcgtcctcggatcttattggcaagctcgagactgatgtcgagatcgatatttcttccgaaaaggtccaccatatgtggtgccacaagccgcaccatgttcaccacactagctctgaaaaagtacaaagatgcgatttacatgaaggtgaatttggaactcccggcgtcgttatctgctggagatatgtgcatgatggaaaggctaaaactgcaaagcaagtagttgaagttatggaccatgagaaaaagtcaataactttcaaaatgcttgaaggagatctgatggaggaatacaaaagcttcgtgattacaatccaaacttcccccaagagcgacggtaaaagcagtatagtgcactggactctggattatgaaaagctgcacgagggtattggaca

SEQ ID NO: 216606 - DNA, 433 bp, Gossypium hirsutum
gcctgaccttaacattgtctccaatgctagctgcaccaccaactgtcttgctccattggctaaggtgatcaacgataaatttggcattgttgagggtcttatgaccactgttcattctattactgctacacaaaagactgttgatggtccttccatgaaggactggagaggtggtagagctgcttccttcaatatcattcctagcagcactggagctgccaaggccgtcggcaaagttttgccagcactgaatggcaagctgactggaatggctttccgtgttcccactgttgatgtctctgtggttgacctcactgtgagacttgagaagaaggctacatatgatgaaattaaagctgctatcaaggcggaatctgaaggcaacttgaaaggaattctggttatgtggacgaagattagtctcaactgactt

SEQ ID NO: 216607 - DNA, 439 bp, Gossypium hirsutum
aggggatagacgaagacaaaggtacacaaatcagaaagttgtatgtcgagcttgcagaattgtggccaaatgggatcatgggcaaacatggtataaaaagcgcaatttgtagggcaaaggaacgtagaagggcattgtgtgaacatgataaggttagagagaacaggagaaagaagtcggcacagaaaacaaagaccggtgttgtaaaagcttgttcagtttctcaattgcaggctgagcaagagaatcaagcttctgcgtctagtggtcacgtattagctttgccttgtatgacaatttattgtaaagaaaccctggaccagcaccttgctgcaccacttgaaagttgcagtgtgccaccaaattcgagtctggatatttctgaagaagagaagaatgagaaaatgattatcccaatgctgaaaaagcaaatgaagca

SEQ ID NO: 216608 - DNA, 337 bp, Gossypium hirsutum
gtgaataccaggcgtaaggtcgactggttaactgacaagatgcgaagccgtgaccacacagtgtctgccacccatggagacatggaccagaatactcgtgacgttatcatgcgtgaattccgctctggttcatctcgtgttctcatcaccaccgatctccttgctcgaggtattgacgtgcagcaagtctctctagtcataaactatgatctgcctactcaaccagaaaactacctccaccgtattggtcgaagtggaaggtttgggagaaaaggtgtggccatcaactttgtgactacagatgatgagaggatgctttttgacatccaaaaagttc

SEQ ID NO: 216609 - DNA, 433 bp, Gossypium hirsutum
cttggtgtcggccttgttgaattcttctaaattgcagttgaagaaggtgttctcttcattcaaggatgtcaaagtcattcagttctcttcaatgcaggatgcttttcttggtttcactgacaagacaagagaggagaaattcaggaaacgtgtaaagcagtatgtaggtatatggtgctgtgttgagaaccacattcctggacacatatattatgacatgtattgggacgagaaaccgggttggaaacctgttccacctaaaaccccagaggacgatcatccacctttctgaagccctctcttcaccctcttatcaaaaaggttgcccaagttctggccttgggaggtagaaaaagagacagagacagtggcggggacagtgacagtcacagcgtttcaaagctgctatggttcctaacacatcgtcaaaaac

SEQ ID NO: 216610 - DNA, 434 bp, Gossypium hirsutum
cccacgcgtccgcccacgcgtccggaaaaacccagagccaaaaaaatggccaaattattgctgttcattgcactatttgtggttccatgtcttgttagtgctacacgcatggtgaagaacccgttggtggttcaaggtcaagtttactgtgaccattgccgtgctgggtttgaaacaccaaagactagaaacatggctggtgccaaggttaaggtggtatgttccaaccggaagaccggtgatgtcgtgtacgagaaggaaggacacacggattcaaccggacaatacaagatcgctgtctccgaggatcatttggatgagatctgcgacgctgttctcgttaagagctcgcagccggagtgcgctgaaatgtcaccgggacgtgaacgtgcacgcgtggtcttgaccaacttcaacggcatttcatccaacac

SEQ ID NO: 216611 - DNA, 395 bp, Gossypium hirsutum
cccacgcgtccgcccacgcgtccgcccacgcgtccgcccacgcgtccgggagctcaacatattgggtaataccagggggaaggctattgatagggttccccttccccctcctctttatggagctggttcttttagcaactcgaaactttcgtggtcgagcagttttcgtccaagtgcaccttcttccgctagacgtgaagcaccagtccaaaccgctcctcctgcaagttctgcttcagataatcatctttgccctatttgcatttgcaatgcaaaagatatggcctttggttgtgacatcagacctgttgtgagtgcggacaagaccttcagttgtgtcccatctgccgaggcacaatcgatacgagaataagactctattaagcataatatgc

SEQ ID NO: 216612 - DNA, 390 bp, Gossypium hirsutum
cccacgcgtccgattagagagatagagagggagaggcaaggtcttcagaaccaagagaagaaactgattgcagagataaagaaaactgcaaagcaagggcagatggagctgtaaaggtgatggcgaaagaccttatccgaactcgacatcaaattgaaaagttctataagctgaaatcacagctccaaggcgtatctcttcgaattcaaacattgaaatcaacacaagcaatgggagaagcaatgaaaggcgtgacaaaggcaatgggccggatgaacaggcagatgaacttgccgtcgttgcagaaaattatgcaagaattcgagatgcagaacgagaagatggagatggttagtgaggtaatgggtgacgctattgatgatgctctgg

SEQ ID NO: 216613 - DNA, 436 bp, Gossypium hirsutum
gattcttgacgacaagtattcgcttggcaaatcactcaaaaacaaacaaatcgttgagctagcttcaatgggtgaccaaaagaatgctatcaacgttgttttaacagcatctgatgttgctgttgaagggttctgcatgagccgctgtgggactcatggctctgccttgggctccaccgatggtctcgtcaaggccaagaagcactccaagttcgcttacatttgggtgggtaactcccagacccagtgccccggtcaatgtgcctggccgttccaccagccaatctacggaccacaaagcgcgcctttgattgcaccaaacaacaacgtgggtcttgatggcatggttataaacttggctagcctctttgccgggaccgtcacgaaccctttcggaaatggttacttccaaggcccagctgaggcaccattggag

SEQ ID NO: 216614 - DNA, 436 bp, Gossypium hirsutum
ggaatttcaacaagaatttccagtcacctgcaaggtcagctgagaagttaactcccgagctgacaagatcacctagcaaagccgccagcatgttttccgggacacaagaaaaatgtgctacttgtggcaaaactgcttatccactcgagaaggtaacagtggaaggacagtcgtaccacaagtcatgtttcaaatgctctcatggtggctgccctataactccatcaaattatgcagcacttgaaggcattttgtattgtaaacatcacttctcccaactttttaaggagaaaggaagctacaaccaccttatcaagtctgcatcgattaagcgcgcagctgcctccgttccagaagcttaaatccgtgtgttaatatccatatcatttcgattttttccttctttcctcgtgattgccggtgtgtttgatttatg

SEQ ID NO: 216615 - DNA, 361 bp, Gossypium hirsutum
  unsure (1)..(361): unsure at all n locations
cccacgcgtccgcccacgcgtccgcccacgcgtccggattaaataagctgtttgctttctaaagcctgacattattcctattctcactaatgttgattttttggtacattttctttttctggtgctgcataaaactaagaatgtgttgtttttcattaccgactgtctttcacctttgaatttgacgagaaatatgatatgattcaacagatgatactttttcttctgtttgaagctaattaatgatagacaggattttagatgtgagtccnccaaacaaagctctaaaaaatcaaaatttaccatttcaatggaaaacaaataatgatccttggaactgtttgtgggaaaaaccttcccg

SEQ ID NO: 216616 - DNA, 431 bp, Gossypium hirsutum
caatcgtcgaacctgaaattcttgttgacggatcacatgacattcaaaagtgtgctgcagtgacagagcgtgttcttgctacctgctacaaggctctaaatgaccaccatgtcatgcttgagggtactcttttgaagcctaacatggtgacccctggttcggactccccgaaggttgccccagatgttattgctgagtatactgtccgtgccttgcagcgaactgtccctgctgcagtcccagctattgtattcttgtctggtgggcaaagtgaggaggaggctaccctaaaccttaatgccatgaacaagctccagaccaagaaaccatggtcactctcattctcattcggacgcgcccttcagcagagcactctcaagacctgggcaggaaaagaggagaatgtgaagaaggcacaagatgctttgctc

SEQ ID NO: 216617 - DNA, 335 bp, Gossypium hirsutum
cccacgcgtccgcaacatcgttgtttgaagaaccctgagcagccgaccccccccccccccaaaaaaaaagaccaactaaactcaccaataaaaatggtggccagcaagaaaacgaagaagacccatgagagcatcaacaacaggttggctctcgttatgaagagtgggaaatacactcttggttataaaacagtgcttaagtccctcaggagctccaaagggaaactgattatcatttcgaacaattgtccaccgctgaggaaatctgagattgagtactatgcaatgctctgtaaagtcggagttcaccattacaatggaaacaataatgatct

SEQ ID NO: 216618 - DNA, 376 bp, Gossypium hirsutum
cccacgcgtccggtcagggttcaaacccagcctgggtttgctaggggtctgtctgatggtcttcccaagtttgtcagatcagaaggtgctgttggattgtacaagggtattgttcctctttggggccgacagattccatataccatgatgaaatttgctttttttgaaactattgttgagatgatctacaagtatggtattcccactcccaaggagcagtgcagcaaaagtctgcagcttggtgttagttttgctggtggttatgtcgctggtgtcttctgtgctattgtttcgcatcctgctgacaaccttgtctccttccttaacaatgccaaaagagcaactgttggggatgctgtgaaaaagcttggattat

SEQ ID NO: 216619 - DNA, 380 bp, Gossypium hirsutum
  unsure (1)..(380): unsure at all n locations
aaggaatgtcatgtctaccacatctgtggtgacaacaggacttgtttcacaaaggtatggagaaaaggcaggaaaggttacaaatgaagggcttgatgcggcaggacatgcaattgggacagcttgggctgtgtttaagattagaaaggctcttaatcccaagagtgtcttcaaacccacaactcttgcaaaagctgctgcacaggctaatgctgctgaattgaagtccaaaaataacaagtaaacagagttgctttttagtttgaacaggaagacaaaaacagagatgcttgtaggactgcagttttccaaaggttgagaattctcaagtggattgtatttgtactttgcaattgatgtgaattactatgcatcttang

SEQ ID NO: 216620 - DNA, 454 bp, Gossypium hirsutum
gaaagacgtaattaaatttctctctactaatgaggtagcatctcgcgaaaataagttgcgcttattgatgattctagctgccatttaccctgagaagtttgagggtgaaaagggtcttaatttaatgaagttagcaagactaccacttgaggatatgactgctgtgaataacatggcattgcttgcacctccatcagaggccaaaaaaagttcaggaagtgctttctctttgaaatttgatatgcataagaagaagcatgcaactaggaaagaccgcagtggtgggcaagaaacatggcaattatctcgcttttaccctataatagaggagcttgttgaaaagcttggcaaaggagaactatcaaaggatgattatccttgcatgaatgatcctagtccaacttcccatggcacatctcacactgcatctgtatatgaagctccagttgctcat

SEQ ID NO: 216621 - DNA, 436 bp, Gossypium hirsutum
gaaaatggccgatcagcttaccgacgaacagatctctgagttcaaggaggcctttagcctcttcgacaaggatggcgatgggtgcattactaccaaggagctgggaaccgtgatgcgatcacttgggcagaacccaactgaggcagaacttcaagatatgataaacgaagttgacgccgatggaaatgggaccattgatttcccggaattccttaacctgatggcaagaaagatgaaagataccgactcagaagaggaacttaaagaagcattcagggtgttcgacaaggaccagaatggtttcatatctgctgccgagctccgtcatgtcatgacaaatcttggtgaaaagcttacagatgaggaagttgatgagatgatccgtgaagctgatgttgatggtgatgggcaaatcaactacgatgagttcgtcaag

SEQ ID NO: 216622 - DNA, 434 bp, Gossypium hirsutum
cccacgcgttcgcgatcatgcctaatgccgcaccttgggcaggctatacaacatcaggtcctgctgccactggagtcatgactggttccgcctcattaaagaagtcaaactctggacccctgaatagacatgggggtcctgctaagaaatcatctggtccacagtctggaggagtaacaacaagtggacgccaaaattctggtcctattcctcccgttctccctgcaactggccttattacgtccgggcccatctcttcaggcccattgaattcctctggggctcctcggaaattgtctggtcctttggactctatgggatcaatgaaagtaaaaagttctgttgttaatagtcaggctgtgaatgttcttagccaagatgatgacttttctttcaagaggaacttcccaaagctaatattttgggcactgata

SEQ ID NO: 216623 - DNA, 359 bp, Gossypium hirsutum
ctagcgccaagatttagtgttgaaaatctcgagaacaatggccaccggtgaactcgcctgtacttacgccgcgttgattctccacgacgatggaatctcaatcaccgccgagaagattgctacattggtgaaggcagcgaacttgagcgttgaatcttactggccaagccttttcgccaagctcctcgagaaagtcaacgtcgatgatctcatcaccagcgttggctccggtggtggtgctgcccctgttgccgttgctgctgcttctggtgcagctggcggtggtgctgctgcggcagcccctgctgttgaggagaaaaaggaagaagagaacgaagagagtgatgatgacatgggat

SEQ ID NO: 216624 - DNA, 314 bp, Gossypium hirsutum
cgtcaatgaaagaagattaaaggagttgagagagaagcaccgatcagctgtaataactgcagttgaggaaagatcaaagggacttcaagattggaaggattgtcagggcctagcaactaagctatataattttaagcatgaccctaaatcagtgcttaccgaaacaaataagacagtgcagcttgttgattcacaaaaaaatgtggatcgctcttgttccgagtctgggtctgggaatgagaacaaagttcttatcagtctgaatggggatgctgagctagatgcagttccagatcttcaagatcaggttgtat

SEQ ID NO: 216625 - DNA, 387 bp, Gossypium hirsutum
gcgatagctgagttggatactctaggcgaggaatcgtacaaagacagcaccctcatcatgcaactcctccgtgacaatctcactctctggacctccgacatgcaggatgacggggctgatgatattaaagaagcaccgaagcgtgacgagcaggagcaacaacaaaagccagagcagtagtgagggtcagccgggctcttactttcaattatataatttgccaatttagggtttcaattcaaaacgaaacttctaccgatttgatgtgtttttgatagaagaagatttggtgctacttaagcaattcttgcctttgttttaactcgatcgtccatgtactcagttttttgcttcttttctttttttaaattttattttagcttcttt

SEQ ID NO: 216626 - DNA, 344 bp, Gossypium hirsutum
cggctatggttcagacaagaagacacgtcactatctacctaatggctttaagaaatttgttgtacacaatgttggagagctcgaattgttgatgatgcacaacaggacatactgtgcagagattgcacatgatgtttcaacaaagaagagaaaagagatcgttgaacgagcagtccagcttgatgttgtggttactaacaagcttgcgaggttgcgcagccaagaggatgaatgaacatggaacttgggatcttgtacaccattcccattgcaaaattagcttgttattgaaagattattatttgtcaaaaaaaaagaggaaaaatttatcaggattttttcgc

SEQ ID NO: 216627 - DNA, 333 bp, Gossypium hirsutum
aggaaattggggctggtgaccaaggtcacatgtttggctatgccacagacgaaacccctgagttaatgcctctaacccatgtgcttgcgactaaacttggtgccaggctcaccgaagtgagaaagaacaagacatgtcaatggttaaggcctgatggtaagacccaagtgactgttgaatatcgcaatgatggtggagccatggtccccatacgtgttcacactgttcttatttcaacccaacatgatgagaccgtcaccaatgagaagattgcagctgacttgagagagcatgtcattaagcctgtcattccagcaaagtatctcgatgaca

SEQ ID NO: 216628 - DNA, 356 bp, Gossypium hirsutum
  unsure (1)..(356): unsure at all n locations
caagagtctttcaagaagaacatcgagggggctactaaatttttgatgtcgaagcttaaagatctccaattttttgtgggtgagagcatgcatgatgatggtagcctagtgtttgcatactacaaggacggtgccaccgatccaaccttcctctactttgcctatggcttgaaggaaatcaagtgctaaatggagttttcacccgataccggaccggctttgttatacctaaagacttagttgtaattctagatataaggagttcttaactatctattttagnctttgttatctcttttaagtcatatttataatgtttggtttttgagggttatgaactattggttaaggatatg

SEQ ID NO: 216629 - DNA, 439 bp, Gossypium hirsutum
cttgaagcaaggtgttcttggtgctgtacttatcccctcggaagatgcaggaaaagagagggtgattgcttctttggtggctaatgtcgaagcaatgataaaagctgatcgaaaaattactgccttaaagcaattgcaaggtcatatatggcgtactggatttgagaataacgagcttgaaggagtagtttttgatgatgtaccagaagctctcgaaaagtggcatgcactgggtataaaggtatacatatattctagtggtagcagattggctcagaggcttatattcggaaatacaaactacggtgatttgaggaagtatttatctggatttttcgacaccgcagtaggatataaaagagaaacacgaagttatgtcgaaatcactgagtcattgggagttgataagccatccgatatgctatttgtgaccgatgtc

SEQ ID NO: 216630 - DNA, 416 bp, Gossypium hirsutum
gagcaacttccgtgatcctgaaacctctgcagagttggaagttcaagaaaaaatgcccctgctcgaatggtttgccaacgagtacaagcgcttcggttgctctcttgaattcgtcacaaacaaatcccaagaaggatcacagttttgcagaggcttcggtggcattggaggtatcctccgctatcagcttgacataagatcattcgatgagctatctgatggagaagtttacgaggattctgaatgataaagcactgcttaaagatggtatgatggcttgagagcctatagagcccagatgtaatgcttcgtctttttacttatttcaccttttgattcaaaagtaactataaacacttgtggtttggtttttgctgaattgtgctgtctctgtcaattggattgtgattgcttgt

SEQ ID NO: 216631 - DNA, 428 bp, Gossypium hirsutum
cccacgcgtccgccccggtattgcagatagaatgagcaaggaaatcactgcattggccccgagcagcatgaaaattaaggtggtggctccacctgaaaggaaatacagtgtctggattggaggctctatcttagcatccctcagtactttccagcagatgtggattgctaaggcagagtatgatgaatctggcccatctattgtgcacaggaagtgcttctagttcttcacaacgcatgaggtcctacaagcaaagcttaagaaagaatggagatgatgataagagcttcaacattcattcgtttttatttttatttcttccaatttagcagatgttttaacgattttcattcaatgaaacggcaacggatttgtgatttattatttctctagcttttctcccgtttgttatgtactcctcaaggaca

SEQ ID NO: 216632 - DNA, 313 bp, Gossypium hirsutum
agcacaaaccaaaagccaaacaacgagtcaacctccagctttgagattggacagcttgaattgagatccataaagcgaaattgcaagctttgtgatcaaaagctggcatatggatatggaacagccaacaggtcattggtgtacaggcctgcaatgctttcaatggtagcagttgccgcagtatgtgtctgtgttgccctactatttaagagctgtcccgaagttctatacatcttccgtcccttcaagtgggaattgttggactacggaacaagctgaagtccaagtcgccctaagttggtaaccttcaata

SEQ ID NO: 216633 - DNA, 465 bp, Gossypium hirsutum
  unsure (1)..(465): unsure at all n locations
cacgcccgtccggacctttccaactccannaatttcaaatccctttgattctctttttggtcaacacaagacattcccacctcggacctggttagttacgccggtttcattcaatttcaccaacacttcccttttttggtttaaattgtcctaccaccgaatttgtcgccacccaaatctaatcccaaaatgagcctggttggtgggctcggtgcccattggagcctgcttaagaaagaaatttgagggaagatgaagcactccgagaagcttccagagcgttggtcttgatcaattggagcccaccggcattagtcggcaaccagcttggctgaaatcctcccgttatccgacacccccggtggcccatggaaagtatacggggtggctcgtcggcccagacccaactggaacgtcgaccatccaatcgagtacattcagtgcgacgtatccgacccgaatgac

SEQ ID NO: 216634 - DNA, 427 bp, Gossypium hirsutum
cgaagttgatatccaactatcactctttaggtttattgcattaaataaatcatgaaatctttccttcctttctttgcattcctctcacttctcctgtttgtagacaccattgcagcagctaggaaagatgctggagagtactggggagctgtaatgaaagatcagcctatgcctgaggcactccaagagcttgttcggattgaggctgccgttgccaaccccgatgagaaaaccaagtgccatacatcaggtaacattgagcttaaggaagagaagattattgttaatgaggagttcgaaccaaggccaaacatttcagcttacggtgatgacgctaatctaaaaggagataaatcatcatcttttgcagaagattttgaaccgagacctaacatttcggcttacgggggcgatgatgctggtctta

SEQ ID NO: 216635 - DNA, 350 bp, Gossypium hirsutum
gagcttctttctatctatatccttatcagctttcaaagatggcaggaatcgcctttggtcgcttcgatgattccttcagtttggggtctgtcaaggcctaccttgctgagtttatctcaactttggtgtttgttttcgccggcgttggctctgccattgcttacaacaagttgacaactgatgcagccctagatcccgatgggctagtcgccattgctgtttgccacggatttgctctctttgttgcagtggctatcggtgccaacatctcaggtggccatgtcaaccctgcagtaacttttgggttagctcttggtggccaaatcaccatactcactggcatcttttac

SEQ ID NO: 216636 - DNA, 346 bp, Gossypium hirsutum
agaacatgttggaccttttaatcttggaaacccgggcgaattcaccatgcttgagcttgctgaggtggtacaagaaacaatagacccgaatgcgaagatagagttcaggccaaacacagaagatgacccgcacaagaggaagcctgatatctcaagagccaaagagttacttggttggcaacccaaggtctccctccgaaagggtctccctctaatggtttcagacttccgacaacgtatctttggtgatcacaaggtcggcagcagcaccaccaccaccaacgactcatcatcttaagatggcctatatactcttctcacagacagagcgataaaaatatattat

SEQ ID NO: 216637 - DNA, 307 bp, Gossypium hirsutum
cccacgcgtacggagaaccggagctactgtcgtcgccgccgccatggtgaagtttctgaaatccaacaaggccgtgatagtcctccaaggccgatacgctgggcgcaaagcggtgatcgttagatccttcgacgatggaacacgtgatcgcccctatggccactgtttggttgcagggataaagaagtacccgagcaaggtcatccgcaaggattccgccaagaaaacagcaaagaaatcgcgcgtcaagtgcttcgtcaagctcgtcaactaccagcagctgatgcccacccgctacaccctcgac

SEQ ID NO: 216638 - DNA, 437 bp, Gossypium hirsutum
ctctcttccaaaaaattttccccagggagtgaaaaggaacaaaaaatcttctactcaagaaaagagagaaagatcttccttagcaaaactatttgcaggaaaatcaaaaagaacagggatgagttattacaatcaacaacagcctccagttggtgttcctcctactcaaggttatccaccggaaggatatccgaaggatgcttatccaccaccgggatatcctccacaaggatatcctcaaggttatcctcctcaaggatatcctcctccttacgcccctcaatatcctgctcagcctcctcctcagcaacagcaaagtactggtttcttagaaggctgtttggctgctctgtgctgttgttgcctgctggatgcttgcttttgagaatccaactatgccaaatgcctcaaatgttgaaaaatcaaatgttcttact

SEQ ID NO: 216639 - DNA, 428 bp, Gossypium hirsutum
gcagcatcgacgcctactccgctgcagttgttaaagttggtccctgtagcttacgtggatctcgagtaggaggttttggcagtcaagttatacttcccctggctcatactgtcgaacatgaagagttcttagaggtcattaaattggagggaattgcacaatctcctgaagatgcactaatgccaagagatgttttcctcctgcaactatgcagtggaatggatgaaaatgctgtgggcacctgtgccgagcttatatttgctccgatcgatgcttcttttgctgatgatgcacctcttttgccttctggttttcgtataattcctctcgattctgggaaggaagcctctagtcccaatcggactcttgaccttgcttctgctcttgagattgggccagctggaaataaagcatctaatgattactct

SEQ ID NO: 216640 - DNA, 386 bp, Gossypium hirsutum
ggaaaagcagcgtcgccgtcgaaggagtgctgtaattcagtggcggggattaaagagaataaacccaaatgtttgtgttatattttgcaacaaacacaaacctctggtgctcaaaatctcaaaagcttaggtgttcaagaagataagctgtttcagttaccatcggcttgtcaattgaagaacgctagcgtcagtgattgcccaaagcttcttgggttatctccgagctcaccagacgccgccatcttcaccaactcctcctctaaagcaacgacacccagtacttcagcaaccaccgcaacgccgtcttccgcggcggataaaaccgatagcaaatccagtggaaccaagcttggtccccacttcgtcggttccacggcggcgct

SEQ ID NO: 216641 - DNA, 253 bp, Gossypium hirsutum
  unsure (1)..(253): unsure at all n locations
ctaagatgtaccaaggtgccggcggtgacatgggtggtggcatggatgaggatgttccggctggtggaagtggtgctggtcctaagattgaggaagttgactaaatcattgattttcttcacctggtttctctattgttctcttatgttttttgggatttaaactgtttggttttgttgtttggtttctaatcggattgaaatgaacttttatagggtttgttccttttttgggatactatcagtngcnnnnc

SEQ ID NO: 216642 - DNA, 319 bp, Gossypium hirsutum
gactccttttgttatcatataatctgccatgtctaggagaaccggtggggagccaacaggagatactacaaacctcgggcctgctgtacgacacaccgagcatgtttatggaggagatcacatttcagaatctattaatgacactgacattcatgtgactgatctgactggaagagagactatgattcttattacaagaggtatcatggtgaacaccaccagggatcaataaatagctcatgatactatggttacactacatgatgttgccctgagatgtaaggaacttctgatgactgccatgaacatcaaattacgt

SEQ ID NO: 216643 - DNA, 326 bp, Gossypium hirsutum
gaaggttgaaaagcaaagaagcaagttaggagaagaagaacaagctgctgttcttttaatggctctttcttatggctctgtttatgcttagtgttttcttacttttattttaatttaaaaatatatatttagaacagaaataatacgatctttaatgggtatctaaccattttgaaatgtaatctttggttaatttgtagttttctttttagtgctaactttgttgttaattgtgggtgtttggagagaaggatttgaaggaaggaaagtgtaagaagatggaagttctattctatttttcttgaatcaacttgtattagtaattc

SEQ ID NO: 216644 - DNA, 391 bp, Gossypium hirsutum
cccacgcgtacggcagatatggccaagtcaaagaaccacaccgctcacaatcagtcttacaaggctcacaagaatggcatcaagaaacccaagagtcaacgccatacttccaccaaagggatggatccaaagttcttgaggaaccagaggtatgcaaggaagcacaacaagaagaatggagagtctgccgctgaggaagagtaaatttaaatggaaaagaaaattatcctttattaaagtttttctagttagggctgttttactatcttctatggaatttagtgttaaatttacgctcctttagtttttatattggtgatttatgggattgttgattatatttgctagaaaagatctgaagttgtgagcttattaatatcatgaacatgtt

SEQ ID NO: 216645 - DNA, 436 bp, Gossypium hirsutum
cccacgcgtccgaagcgagatcaaaagccagcagcgcagcagctaaaagagcagtcttttgacaattattcgccatgggtaaggttcacggatctctagctcgtgccgggaaggtgagaggccaaactcctaaagtggccaagcaagacaagaagaagaagccccgtggccgcgcttacaagcggatgcaatacaaccgacgcttcgtcacagcagtggttggatttggcaaaaagaggggacctaactcatctgagaagtaagagatctatgtaggtgaagaaggcaagaagccttgttgaaagctttgatggattttaagtctttgttttcttttgataatgtttttatgatattggtttcaaggattggattgaactgccattttgtttgctagatattatgtgatattggtatcaaatatcttaatttttgg

SEQ ID NO: 216646 - DNA, 278 bp, Gossypium hirsutum
cccacgcgtccggctttaccgtctttgctcccacagataatgccttcaacaacctcaaacctggtaccgtcaataacctggacccacaacagaaagtacaactagttctataccacgttattcccaaatactactccttgaacgatctccaatttgttagcaaccccgttagaacccaagctggtcaggatttcggcctcaacgtcactggcctgaacaaccaggttaacgtctcaagcggggttgtcgagactcagattaacaacgcattatatcaa

SEQ ID NO: 216647 - DNA, 374 bp, Gossypium hirsutum
gggagaaggtttataatctgttcttggagtacgctcataaaggaagcttggccgatcaggtcaagagaaatggtggaaacttgacggaacccgatgttcgaagatacgttaggtccatacttagagggctaagcttcgttcacgccaaagggttcgctcactgtgacattaagcttcaaaatattcttttgtctgggaatggcgatgtgaagatagctgattttggattagcaaagagaagaggagaaaaacaggggaggatggaaatcaggggaactccttcgaatattgcaccagagtctgttaaaggaaacgattatgattcagcagtggatatatgggcacttggatgcgccattgttgagatgtttact

SEQ ID NO: 216648 - DNA, 216 bp, Gossypium hirsutum
cccacgcgtccgaggacataaagtgtgtgatcaactacgattttccttcgagtctggaggattatgtacataagattggtagaactggtcgagcaagagctaaaggaactgcttttaccttcttcacacaagcaaatgcaaagtatgctaaggaccttatcaagctcctgcaagatgctgggcaagttgtctcccccgcattgtctacattggctc

SEQ ID NO: 216649 - DNA, 228 bp, Gossypium hirsutum
cccacgcgtccgcaaccagtttgtgtgtccgtcgtgctgtctattataaccctgagaccggaaaggaggatccgtcgaaaagtggtgtttgtagcaatttcctatgcaattgtaagcctggagataaagttcagatcactggcccttctggcaagataatgcttttgcctgaagataacccaaaagccaaccacataatgatagccactggaactggtgtagcttcct

SEQ ID NO: 216650 - DNA, 407 bp, Gossypium hirsutum
cccacgcgtccgcggacgcgtgggcggacgcgtgggcaagatcgtgttcactttgtgaacaaaactctaacagtagctccatatttagctgccgtagatgttcttgttcagaattctcagggacggggagaatgctttggacggataacaatcgaagcaatggcatttcagttgcctgtgctgacagggaacagctgccgggggcacaacggaaatagtagtgaacggcacaacaggtttattgcaccctgctgggaaagaaggggtgacaactctggcgaaacatattgtgaaactagctacgcatgtagagaggaggcttacaatatgaaagagagggtacgaaagggtgaaagaaagatttctagaacatcacatggcagagagaattggtgaagtacttaaag

SEQ ID NO: 216651 - DNA, 408 bp, Gossypium hirsutum
  unsure (1)..(408): unsure at all n locations
cccacgcgtgcgcccacgcgtccggaaaagttggaggaaaattagaagacactgagctaatatatggaattactgttgataaagacatgagtcatcctcagatgccaaagcaaattgaagatgcaaaaattgccatattaacttgtccatttgagccacctaagccaaagactaaacataaagtagacattgatacggtggaaaagtttcagactctacgtcagcaagaacaaatgtattttgatgacatggttcagaaatgcaaggatgttggtgccacattggttatatgtcaatggcgatttgatgatgaggcaaatcatttattaatgcaccaaaacttgcctgctgtcagatgggtaggtggtgtggaatnggaattgatagcaatagctacaggtggaagga

SEQ ID NO: 216652 - DNA, 246 bp, Gossypium hirsutum
ggattggcctcgacatgcgtgtgacagctttggtcaatgacacaattggcacattggctggtggaagatataacaaccccgatgttgttgctgctgtgatattgggtacaagcaccaatgcagcttatgtaaaacgtgctcatgcaattcccaaatggcacggtcttctaactaaagctggggacatgggtatcaacatggaatgggggaactttcgggcttctcaactttcaatattaaaatatg

SEQ ID NO: 216653 - DNA, 424 bp, Gossypium hirsutum
gaaggatgctgagaaggcagtatttgtggaggaagagaagaagaaagaggaagaggaatcgaaagatgagccagttgattccgatgctgaggacgacgatgatgatactgatgatggtgaaggaagtgagtcggattcaagcaaagatagtgctgaggaagatgcagtacaacatgatgagctataaagcaagaggaatacagtatttcgctggcaatttggttgagagctttaaacacaagtgcttaaattttcctttagtatctttttaagatgtagtcttattagtttttatttagataaaaaaagaattgaatgctggcaagagaaaagtttgagtgacgcgttttaatatgatttcattaactctgcctaaacgaagcgggcgttttatgacgaaaccaaattaatcaatgttttgaac

SEQ ID NO: 216654 - DNA, 399 bp, Gossypium hirsutum
atttagcttcagctgttccgggcaaatctttcaatgcaccacctttgcttcagtgtacgagccatatgtgtccagttcgaattcactggcatgttaagctcaactacaaggaatactggcgtgtgaagatcacgatcaccaatttcaattacgcattgaactacagtgagtggaatctagttgtgcaacaccccaactttgacaatcttacacaacttttcagcttcaattacaaaccattaactccttatgctggcttaaatgatactgccatgttatggggacttaagttttataatgatttcctcaacgaagctggtcctcttgggaatgtgcagtcagaactattattcagaaaagatgcatcaacttttacttttgaaagggatgggcttttca

SEQ ID NO: 216655 - DNA, 379 bp, Gossypium hirsutum
gcccctaagaagttgctagcatcagactctcgtctccggcctgatagatttgcacttgagaagggtgatttatccaaggccggttctgagaagagcaggttggaagagaggcagagagcggaaaagaggacacgagaggccaagggacatcagtttactcctagatggtttgatttgacagatgaaatctcagccacaccttggggtgacctggaaatctatcgcttcaatggcaaatacactgagcatcgggctactgtagatagctcagacggcattgatgaggttgacttggcttcaatcgagttcaacccatggcagtatggtaacttgtcaactgaataggtattggtgttctaatgtatacttctaaaacttg

SEQ ID NO: 216656 - DNA, 356 bp, Gossypium hirsutum
gtgattacaaagtaataaacttggaccagtggataaattttctacgtttttgccaagagattagttttccagatcttggaaattatgattcagccctagcttggccgttgattcttgacaatttcgttgaatggatgagacaaaagcatggctagagttggcatctttttgtgtttcttgcagtttgctgattttataaggaccttgcaagaaccctaaccagtcaccatggagctggctcatttaactgattaaaccgaattgtgctgaaactgtgttttttttctgtgcatgataaacccctacaatcgtgttatactgagatcattttatacattctgcattcagtaaaatac

SEQ ID NO: 216657 - DNA, 389 bp, Gossypium hirsutum
catcaatgctgtgggcttcaagggcggcttcttatctcaggatctctgtcttccacagaggcttttccactgttctaaaggatctgaaatatgcggattctcatgagtgggtgaaggttgagggtgactctgccactattggtattactgatcatgctcaagatcatttaggtgatgttgtgtatgttgaattacccgaagtgggagctgctgtaaagcaaggtgaaagttttggagcagttgaaagtgtcaaggctacaagtgatgttaattctcctgtttcaggaaaagtggttgaagttaatgatgagctcagtggctctcctgctaaggttaactcaagtccatatgaggatggatgggatataaaggttgagatgaaagatgct

SEQ ID NO: 216658 - DNA, 294 bp, Gossypium hirsutum
cccacgcgtccgattgaaactgtgaaaagaacaggatgcaaatatactggcatcactctatcagaacagcaactgaaatatgctcaagaaaaagtgaaggaagctggactccaggataacatcaaaatacttctctgtgactatcgccagttacctaaggaacaccaatttgacagaatcatatctgtagagatggtagaacatgttggtgaagaatatattgaggaggtttacagatgctgtgaccaattactgaaagaagatgggctttttgttcttcagttcatatctatc

SEQ ID NO: 216659 - DNA, 272 bp, Gossypium hirsutum
  unsure (1)..(272): unsure at all n locations
cggacgcgtgggcggacgcgtgggcggacgcgtgggcggacgcgtggggcgtgagtgccataagttttcagttccacaaagggaatggaacaacaaacaaccgagctgctcaatctcatcagcgaactactactgccttagggaagccaacaacaccttcaaaatgggatgatgcgcanaaatggcttgtgggactgtcgagaagtagagacaaaaagacccactccaaagccaaacctcgaaactccaacgccgatgatagaagactaata

SEQ ID NO: 216660 - DNA, 464 bp, Gossypium hirsutum
cttacagaaaaacaccatcactgctcaaaaccgaaaagacccgaatcaaaatacgggcatggggatccatgcatgtcggattctaccagcatcggatctcgtcgcatccaatggtagctttgagacgtacttgggccgtccgtggaaattgtactctagggttgtgttcatgttatcatacatgaataatcacgtacaccccaagggatggctcgagtggaacaccacattcgccctggatacactatattatggtgaatacatgaattactggccaggagcggttatcgggcaacgaatcatgtggccgggatataaggttattactttctagattgaagcaagtaaatttacagtccaacaatatatctactgatcatcatggtaccatcaactggagttgctttcttggttggtttacaagtttaaagcttgaatgttgtatacattatgaattatttaat

SEQ ID NO: 216661 - DNA, 455 bp, Gossypium hirsutum
ctcggagactcaccaaagcacgaaagccaggatctttcagaaaatggattcctattcgaagagtgcataaccgcatggataagctcacactaacccgtcaattttggatccaattcgggattttccttggggggtatcagtaaggaattggaatgtaataatattgattcatataggaggaaaaggttctctattgattcaaatgctgtacctatgggatagggatagagaaagaggaaaaaccgaagatttcacatagtgcttttgatcgaaaaatcaatctgatttatttcgtacccctcgctcaatgagaaaatgggtcagattctataggatcaaacctatgggacttagggaatgatggtaggcgactaaattaatgaaaaaacgcagtcctatcccaaattaatcgtcttgcagaacataccctttttgtcattttgtttaaaacaaaa

SEQ ID NO: 216662 - DNA, 320 bp, Gossypium hirsutum
  unsure (1)..(320): unsure at all n locations
cgcacgccttccgagttgctggcatattggtggcgaaccctccagatactcagtgctgctcagcgctaggggggcttgtggatttggaagctgcagtgtgtctttgcactgccattaaagctaatgttcttggcattaacattgatattcccattgcattgagtttgcttatcaacacttgtgggaagaacctaccttctgacttcatttgtgcttaaccaatgttttgtagttaatttcaacaaattaactctgctggaatgtagccttttttttctcccattcagtactttataattntcctaattggacaattgttc

SEQ ID NO: 216663 - DNA, 246 bp, Gossypium hirsutum
cagcaatgtggccttgttccaatcgtcgaacctgaaattcttgttgacggatcacatgacattcaaaagtgtgctgcagtgacagagcgtgttcttgctacctgctacaaggctctaaatgaccaccatgtcatgcttgagggtactcttttgaagcctaacatggtgacccctggttcggactccccgaaggttgccccagatgttattgctgagtatactgtccgtgccttgcagcgaactgtc

SEQ ID NO: 216664 - DNA, 414 bp, Gossypium hirsutum
actggactggctattgatgcttatggtcctatcattgacaatgctggaggtattgctgagggggctggcatgagccacagaagacgagagagaacggatgctcttgatgctgctggaaacaccactgctgctattggaaagggtttcgccttagtgtcagcagcccttgcgatcctagcactctttggtgcttttgtgagccgtgctgctatttcaacagttgatgtattgacccctaaagtttttattggcttgcttgtcggggcaatgcttccttactggttttctgctatgaccatgaagagtgtgggaagtgcatctttgaagattgttgaggaagtgcgcatgcaattcaacacaatcccaggtctcatggaaggtactgctaaacctgactatgctacctgtgttaag

SEQ ID NO: 216665 - DNA, 491 bp, Gossypium hirsutum
cccacgcgtccgggcaaagatgtcttcattagtgcaaatactcaaagaatgcacaacgattgggttagtgaccctcgagcctttggattcgtaacatcacagatagcctgttgtggacaaggaccttataatggacttggtctctgtactcagctgtcaaatttatgtcccaacagagctctctatgcattttgggatccattccatccatcagagaaggctaacagattgattgtggaacaaataatgactggatccaatgagtacatgcaccccatgaatctcagcaccatcatggccatggattccgggatctgacatcagctctatcttcttctttttcatcatctgggtgtttcgtaataatatgtttctttcaactgtcataaatgttatatttcgagccggtttgccttttgtttgtgttgaatgtaatggggaattcaaatgatgcacatgcatttgtaatgaattgatgatgagcattaatg

SEQ ID NO: 216666 - DNA, 417 bp, Gossypium hirsutum
cccacgcgtccgggtttggagacgctgaaaagctcaccaaggcccttttctcttttgctagcaagctggcgccagtcattatttttgttgacgaggttgatagtttgctgggtgctcgtggtggtggttttgagcatgaggcaactaggagaatgagaaacgagttcatggcagcttgggatggattaaggtcaaaagatagccaaagaatcctcatccttggtgccacaaataggccctttgatcttgatgatgctgttattcgtcgcttaccaagaaggatatatgttgacttaccagatgctggaaaccgcatgaagatactgaaaatatttcttgcacaagagaatataggctgtaatttttcatttgaagaacttgcaaatgcaactgaggggtattctggcagtgatttga

SEQ ID NO: 216667 - DNA, 423 bp, Gossypium hirsutum
  unsure (1)..(423): unsure at all n locations
cccacgcttccgaggacgcgtgggttttgcatatactttcagccactaagcaatagcagccagtactgcaaatggcttccaacaaaacctgtgctgtccttacagttttctctcttcttcttttcaacttatcattcaccaatgcttgccattcatgcaagccaccaaagcccattccaccacctgctgcatgccctccaccaccagcaaagcctgcttcttgccctaaggacacattgaagctaggtgtttgtgctgacctacttggactggtaaacatagtggtgggaacacctccttcgagcaaatgctgtgctttgctccaaggcttggctgatttagaagctgccctttgcctttgcaccgccattaaagccaatgtgcttggngccaacctcaacatccctattacccttagcttac

SEQ ID NO: 216668 - DNA, 437 bp, Gossypium hirsutum
cttagcgctgaaaatgaagcaatgtacgggaagttgttggccaaatatgtagatgatcctgataatttcttctccgtgtcatcagatttttgtcactggggttctcggttcaattatatgtactatgacaagaagtacggggccatacacaaatcaattgaggcgctagacaagatgggtatggatataatagaaactggagatgcagatgcattcaaacaatatttatctgagtatgacaacacgatctgcggacgtcatcctattagtgtatttgttcatatgctgagcaacagctcgacgaaaataaagataaaattcttacgttacgagcaatcgagtcagtgcaaaagtacacgagacagtagtgtaagttatgcatctgcagcaacaaaagtgggatcctggaagattgaaaaagaaaaaaaaaggtgggg

SEQ ID NO: 216669 - DNA, 472 bp, Gossypium hirsutum
atggattgataacccagagttcgaagatgatccggacctctatgtgctgagaccaatagagtatgtgggtattgaagtctggcaggtaaaggctggttcggtttttgacaacatattgatttgtgatgacccacaatatgcaagagaagttgtagaagatatatgggccaggaatagggaggccgaaaaggaagcctttgaagaagcagagaaagaacgaagagcccgggaagaggaggaagccaaaagagctagagaggaaggtgaaaagcggagaatagagagggaccaccgacatagagacaggaggcaccgtagaaggcacgatcctcgtgattatctggacgattaccatgatgaactatgaggttgtccaccacaatttcgcgagttttaggatcccatttcaattacgaaaaagagaaaaattgaacaaggttccatgctgtgagagatggggttaccgtgtact

SEQ ID NO: 216670 - DNA, 505 bp, Gossypium hirsutum
taccgcctttgaatcaaattacaggccccagttttatctgaggacagcagatgtgactggaaaagtggaattacccgaaagtgttaagatggttctgccaggggacaatgttactgcaacttttgagctcatctcacctgtgcctcttgaagcaggacaaagatttgccttgagggaaggaggtagaaccgtaggtgctggtgtagtatcaaaagtactgacctaagaagttgccattcccatagcaatgcctggttttctccatcttgttgatcgcagaaatggagaaattgatagaacaatcagttggtgatattttctgttctagaattactaaagagattgttagtgatatgaaaaatgagggctgttattgaaattattttgattcaatttcgctggtggttggtaagcagacagcatgtttttccctgtttccacccaaaaaatcacgattgaacagctttttaatgtcattgaaaataatagtcctgttgaacagtgc

SEQ ID NO: 216671 - DNA, 430 bp, Gossypium hirsutum
cccacgcgtccgcccacgcgtccgcccacgcgtccggcaggtgaatcagaggtagagacagaggttgagtcaccaaagacaaaaccagagaatcttctgcttgtatcagagggtcaaggtcaacatcatgatgtgtgctttcagaacccagagataacttctcaactgcatttcttgggtgtaggagatgaccatatgtctgctaaaagaatggggggaagctaccacatttatgaccaagcatggcagggtgagtgagtgaatgagtgaggcaaagaaactacatagcatgcatgctttgacatagtaaagctaatacataagctttgaatcttacactgccctttaggcttttggctttcttttgtttttgattaatatttgttaatatgaagaagtgaaaggaatgtgcttgggcaggtttttgatg

SEQ ID NO: 216672 - DNA, 379 bp, Gossypium hirsutum
cggacgcgtggggtttctgtatcttccacaaaaacacacttgcaagttgcaacaatcttttggaggaaaaaaaataattggttttacaataaaaactgcatcagatttccaatccaactaagaaacaaagagaaaagctcgacatcctctcatgtccattccatcatatagagtccatcaacctagcaaccttggttttagagagagcaagtgtaaccaggagggggtgttttcccacatgtgacaaggagttgaagagccagtggcacataaattttaaggttgggaaccctaagtgtgagggtggtgcacaagcagaccggagcttggagcttcgcgaggtctgaaagaacctgacaacattggttcacaaccgggt

SEQ ID NO: 216673 - DNA, 506 bp, Gossypium hirsutum
actgaagcaaataattggcgaggggaacttggtggaggaatctaacattacttgtttaccttatttgcaagcaattgtcaaggaaacgatgaggttgcatccatcgtttcctttgttactccccagaaaagctgaagcagatatcgagattcacagcttcgtcattccaaaaggtacacaactgttgatcaacgcatgggctataggcagagatcctaagttctgggacgagcctgacttgtttcgtccagagaggttcataagatcagaaatggatgttaaaggaagggattttggactgattccgtttggaggtgggcgacgaatttgccctggattaccattggccatgagaatgttgcacttaatgttgggtggactcattcattcatttgattggaaacttgaaaataacatcacaccagggagtttagatatgaaggataagtatggtctttttctgcataaagctcaaccattaagaatcatcccgatttcaaattaac

SEQ ID NO: 216674 - DNA, 286 bp, Gossypium hirsutum
cccacgcgtccgcccacgcgtccgcccacgcgtccgcccacgcgtccgtttggatacgaaccgtgtcctggttttcagatgcgcgtaaatgcaaagatcaaagccgaaatcaaggagtggcaggacaagaaactgaaaaaggtttcttaggttacattgttgtaagttgtatgtttggtaacgagtaaatttaggtttaagtataatgtactgttgtggtataagtgttgtaaggcaacattgcatggattttaattatccgtgaaagcattgctatgaattgaac

SEQ ID NO: 216675 - DNA, 477 bp, Gossypium hirsutum
  unsure (1)..(477): unsure at all n locations
cccacgcgtccgcccacgcgtccgtgctccgtccgatgaagcttttaaagctgaaggtgtccgtggtttgagcaagctcaccaatgcagaacaagtctcacttctagagtatcacgcctcgccggattacaaacctaagggaacgttgaagacgacgaaagacccgatcagtacattggcgactaacggcgctggaaagtacgatctgacagttacaaccgccggcgactcgatgacactacacacaggggttggcccatccagggtcgccgaagcagtttttgactcaccgccggtcgccattttcaccgttgacaacgatttgctcccttctgagctgttcggcaagtcaccgtcgccagcactcagccccggaaccagtttcttcgccttcaccgacaccatctntatctccagcccattcccatgtctgaagcaccgcaccacttgcagcttcaccaccagctccaccaactg

SEQ ID NO: 216676 - DNA, 422 bp, Gossypium hirsutum
gattttctgggattactagtaaatgcttatcatgatttggacgataaaaacagggtttcatggggagacttggtaggtgaatgcaaaacaatctactatgctggacgggaaaatgttaattcattgcttgcatggatagtcttgcatttggcaatccatggagattggcaagaaaaagcgagaagagaggtgattgacatatttggtaaccaaaatccgcatctcgaaggcattgctaaactcaaaataatgaccatgatcatcaatgaaactctaagattgtatggtccttcacatggcctgcccagaactgtcgcaagagaaggacaattgggaaagtttatcttgcctgctgatatagatattctgtctctaaatattggaccccaccgtgaccctcacttgtggggggatgatgtgca

SEQ ID NO: 216677 - DNA, 403 bp, Gossypium hirsutum
ctcaaccaaaaatgactgctcaggccgacaaagagatcgaagagattctggcagcccatggggaccaacaaaaaatcgattccgagaaaccagagcaacctgttgttgaagatgacgacgaggaagatgacgatgacgatgatgatgaagatgatgccgaaggtcatcatgagggagaaggagatggaactgttaggtcaaagcaaagccgaagtgaaaagaagagtcgcaaagctatgttgaagcttgggatgaaaccgatctctggtgtcagccgggtcactgtgaagaagagcaagaatatcttatttgtcatctcaaaaccagacgtgttcaagagcccagcatcagatacttatgtaatatttggagaggctaagattgaggacttaagcttacaact

SEQ ID NO: 216678 - DNA, 390 bp, Gossypium hirsutum
ctcaaccaaaaatgactgctcaggccgacaaatatatcgaagagattctggcagcccagggggaccaacaaaaaatcgagggcgcgaaaccagagcaacctgttgttgaagatgacgactaggaagatgacgatgactatgatgatgaagatgatgcctaaggtcattatgagggagaaggtgatggaactgttaggtcaaagcaaagccgaagtgaaaagaagagtcgcacagctttgtttagcttgggatgaaaccgatctttggagtcagccgtgtcactgtgaataagagcaagaatatcttttttgtgatttcaaaaccagacgtgtttatgagcccagcatcagatacttatgtaatattttggagaggctaagattgaggact

SEQ ID NO: 216679 - DNA, 427 bp, Gossypium hirsutum
cccacgcgtccgcgaaactgttacaaatgatgaatttgctgctgacctcaaagagcatggggtcaagcctgtcatccctgaaaagtacctatatgagaaaacaatcttccaccttaacccatctggccgctttgtcattggtggtcctcacggtgatgcaggtctcactggtcgtaagatcattattgacacctatggtggctggggagcccatggtggtggtgctttctctggaaaggaccctaccaaggtggacaggagtggtgcttacattgttaggcaggctgccaagagcattgtggctaatgggcttgcccgaaggtgcattgtgcaggtctcttatgctattggtgtgcctgaacccttgtttgtctttgtagacatctttggaactggtaagattcctgacatagaaatccttctaatt

SEQ ID NO: 216680 - DNA, 392 bp, Gossypium hirsutum
ccacgcgtccgcggacgcgtgggcagggatccgaatttcaaacaccaagatctaaatgacggatccgaatctggatctgcaagaatcgggttgggaggaactcaggagagaggctcgaaagatcgagggtgatctcgatgtcaaactctcttcttatgctaagctcggtgctaggttcacccaaggagatactgggtcgccaaccgttgggtcaagtagatcatggaagtctatggaaatggaaattcagtcattgctcgagaaactgctggacataaatgatgccatgagcagatgtgctgcgtctgctgcttcaactacttcagtaacccaaaagcttgcaaggcatagagacatactacatgagtttactcaggagtttagaagaatca

SEQ ID NO: 216681 - DNA, 450 bp, Gossypium hirsutum
ctcgaacaagggatttgttcgccagaccctttagaaagaagggttacattcccttgtctacggacctcaggacctacaagatcggcgactacgtcgacgtcaaggtaaacggtgccgttcacaagggtatgccccacaagttctaccatggtcgtactggtcgaagttggaatgtcacaaaacgtgccatcggtgtcgaagtcaacaagcaggtgggaaacaggattatcaggaagaggattcatgtacgtgttgagcatgtacagccttcgaggtgcgctgaggaattcaagctcaggaaggtgaagaatgatcaactcaaggcagaggctaaagcaaagggtgaggtcattagcacaaagaggcagccagaagggcctagacctggtttcatggtggatggtgctacacttgaaactgttacgcccatcccatacatgttgttaatga

SEQ ID NO: 216682 - DNA, 352 bp, Gossypium hirsutum
  unsure (1)..(352): unsure at all n locations
cggacgcgtgggcggacgcgtgggcggacgcgtgggcggacgcgtgggctcaaagtatatgcagatcgaatgtctcagccatgtcgtgctgtcatcatcttctgcaaggtaaatggtatagactatgaggagatcaaagtacacatatcgaagggtcagcattcattcatgtaagtttgtcaagttttattgttttttggagttgcaatgcaaataacaaattgggatattgctaatgtgttttaaagagaattcatttgtatatgtaatttggttctaagttaattgtagggattgaacttttctttgctaaaaaaaaagaataaaaatataaaaaatatatnttatattc

SEQ ID NO: 216683 - DNA, 452 bp, Gossypium hirsutum
cccacgcgtccgggaatttgcaccttcaatccctgcaaagaacattacctgtttgacaaggctggatcataacagggcactaggtcaaatctcagagaaactaaatgtccaagtttctgatgttaagaatgtgattatttggggtaatcattcatcatctcaatatcctgatgtcaaccatgcaactgttatgactccatctggagaaaagccggttcgcgagcttgttaaggatgatgcatggttgaatggagaattcataaccactgtccaacaacgtggtgctgcaatcatcaaagctaggaaactctcaagtgcactatctgctgctagtgctgcttgtgatcacattcgtgattgggtccttggaactcccgagggtacatgggtttccatgggggtttactctgatggttcatacaatgcaccagctggggtcatctattctttcc

SEQ ID NO: 216684 - DNA, 443 bp, Gossypium hirsutum
gcccttaaaaatattagtagaactgatcccaacccatagcagaaagaatcaaagacagctaagagggtttcttccaacaatttcccttccaatgtcaaaagtttgttgtcaactggtatgcttgatggggttgttgtgaagtatgtttcctggtcgcgggagaaaagtcttaaagggtacatacaagggactgggtatatgtgtggctgtaaagactgcaactttaagaaagctttgaatgcatatgagtttgagcaccatgctaattgcaagaccaaacaccccaacaatcatatttactttgagaatggaaagaccatctatgctgttgttcaagagctcaagaacactccacaggagaggctttttgatgtaattcaaaatgtgacagggtctcaaatcaatcagaagaactttcgcatcttgaaagcatcatatcaagc

SEQ ID NO: 216685 - DNA, 481 bp, Gossypium hirsutum
cccacgcgtccgcccacgcgtccgggccgcccttttttttttttttttttagttctttaaaaatgggctcaaaaaacgaacgccgttttcgaggagagccgaaaggtagttcagtttccattccccaaactgttaaaaagcaaaaatcattcttttgacctttctttttttcattggatctttatgagagggttgtagtttaaatctgtgccaaggtttcaggcaaaaaggaaataggatctttatctgaataccgtctgttaaccagttttttggaaattcggtttcggataattgaacaccattataagtgcatttaacatgcatttctcgattccaatccgttaaatcctcagaccactcaggaaattgaaataataacatacgggcaatgtttttaactattatcagtgaaggtaatataatatattttctaagaattgattgggttattaacacggagccccttattacttgagca

SEQ ID NO: 216686 - DNA, 347 bp, Gossypium hirsutum
cccacgcgtccgcccacgcgtccgaggaaacttcaaaacctggggattgttttaaaaattgaagcaaaaagtgggtttgaaaagttgcccctcttacttttggaagcaatgaaatcttcaaatcctttaggggttatgattgccaggggagatcttgctgtggagtgcgggtggtatagattggctgatatacaagaagaaatattatctttttgtggtgctgctcacttaccagatatttgtgcaactcaggtcctctaatcactcgtcaaatcccgagttcctaccagagctgtgatttctgatgttgcaagtggttggttggcatagtttgttttattttttca

SEQ ID NO: 216687 - DNA, 443 bp, Gossypium hirsutum
gtttaacttgatttcaaactcgaagtctccgccactactaccagctttctattcatcgctcaacccaatggcagtcgcttccaactcgctcgtttctttcatccacggctcattgagtcaacccggaaggacctcccactttcttccttcaccttctctttctttccccggatctcgctcgctctctctgaaactcacccgccgctccaactcgccccttctttgctctttagatgcaaccaacgccacagataaggacaccccaatcgaaacaaggttcccagcttatccaactgtgatggacatcaatcaaataagagagatattaccacacagattcccattcttgttagtggatagagtgatagaatataatccaggggtatcggctggtggtataaagaacgtgaccataaatgataactttttccctgaaaatttcc

SEQ ID NO: 216688 - DNA, 463 bp, Gossypium hirsutum
ccaaaaccctcaccacaaaagaaatctcttctatttttccccactctactgcaaaaatgtggggatccgttgctagatcggccgccggtaagagcctcctccgacgaggatatgcaaccgccgtacctgaacggaaagtcgctgtcttgggcgcagctggagggatcggccaacccttggctctcctcatgaagcttaaccctcttgtttctcaactggctctctatgatatcgctaacactcccggtgttgccgctgatgtcagccacatcaactctagatctgaggttgccggatatgtaggtgaagagcagttggggaaagcttaggagggatgtgatgttgtcattattccagccggggtgcctagaaagcccggtatgactcgtgatgattctttcaacattaatgccggaatcgtcaagggtctatgttctgcaattgctaaatattgccccaatgc

SEQ ID NO: 216689 - DNA, 495 bp, Gossypium hirsutum
cccacgcgtccggcgattgcgaaagagaaacgcgagacggaagccatgaaactctttgaagaggagcataaacaaaagacagcaatggagttactggaacaatacttgcagttcaaggaagaagctgagaaagaaaccaagataaaaaccaagaaagaaagggatcctttaaagcctaagcaacccatgtcggctttctttttgttctccaacgagagaagggcggctttacttgccgataacggaaacaagaacgttttggaagcggcgaaaatcgcgggcgaagaatggaagaacatgactgcagaacaaaaaaagccttatgaagagatagcaaagaagaacaaggaaaaatacatggaagaaatggaggtttacaagcagaaaatggaagaagaagctttgaatgttaaaaaacatgaagaagagatgttgaaactactgatacaagaagcactttaattgctttaaaagaaagagaaaactgatcatatt

SEQ ID NO: 216690 - DNA, 506 bp, Gossypium hirsutum
ccttaatttcattcccttctcaaaaccctaactctttcccttttaaatctctcattgcttcccctaaaacctttagtttcgctaaacccataatctctttacaagtcaaagcaaattctcctgctctttcagatgaactgccactggatgcttccccttctcaatcttcttctggtaaagagaagcttggagtggtggtgaagccattagagaagccacgggtagtattgaagttcatatggatggaaaaagatatagggatggctcttgatcaagtgataccaggccatggttcaatccctttgagtccatattacttttggcctagaaaagatgcttgggaagagctcaaggttttgcttgaaagcaagccatggatatctcacatgcaaaggattcaccttctcaaccaagctactgatatcatcaatttatggcagacaagtggtggtaatttaacctaaagtgtttcaacttacaaagttttgttgcaatctcttcatgtt

SEQ ID NO: 216691 - DNA, 431 bp, Gossypium hirsutum
tccgattctcagaatgcaacaatgaatgctactgaaaaagcttctgacccaatggatgaggatgacgctttgctaaagcaggcccttgcattgtcgatgaatatccccggatctgattcttctgcaggtgatgctcaaatgtcagaggcaactaatgacgaccaggaattcgccttggcacttcagatgtctatgcaggacggttcaaaagattcgtcagctcaatcagatgtcagcaaggtgttgggggatcagtcttttatgtcatccattctttcatcgcttccgggagttgacccaaacgatccgaaagtgaaagatctgctagcatctttgcccagccaatctgagccgcaagaaaagaaagacgaagatgaacaacccaaagatgacaagtgaagatctacattccttctaacaatcgatgtgtg

SEQ ID NO: 216692 - DNA, 415 bp, Gossypium hirsutum
cccacgcgtccgaagagatggaaaggtttgctctcggtacgaatagtattcttaacgaaatgagacagagggttgaggacttggtcgaagaaacttcgagacagaggcaacgagctgctgaaaacgaacaggagcttactcgtgtgaagcaggatttcgagtccttgaaatcttatgttagtagtctcattagtgtaagagaaactcttctttcatcggagaagcagtttcaaaccatcgagcggctctttgaacgactagttgcaaagacaacgcagctcgagggcgagaaaaagcagaaagagactgaagttcagaagcttatggaagagaatgtgaggttgaccgcacttctcgacaagaaagaagcttaacttttggccatgaatgaacaatgcaaagtaatggccttaag

SEQ ID NO: 216693 - DNA, 450 bp, Gossypium hirsutum
tgattgtcgatatgctgtgtacgattttgattttctaacggccgagaacgtcccgaagagcagaatctttttcatcgcatggtctcccgacacgtcaaggatcaggagcaagatgatttacgccagctccaaagacagattcaagcgagaactggacggaattcaggtggaattgcaagcaacagatccaactgagatgggtctcgatgtgttcaaaagccgtgctaactgaatacggttcttttaggcatctgcaaccgggaagcttccttccttcctacctacagtatgtctttacttaagtgaaatgtttataggtttcgaaacggcaaactcgggatttccgagttatgccataagacttttatcagtctcgatgatgataaacccgtagtttcgggtatatgtgatttgttatctatagaacctatgtgttgagtgcctttgtgt

SEQ ID NO: 216694 - DNA, 402 bp, Gossypium hirsutum
  unsure (1)..(402): unsure at all n locations
ccaacgcgtccgcggacgcgtgggattaaatatgaaggtgcgagcatcagtgaaaaagatgtgggagttctgtagaaccgttaagcgccgcggacgggtatatgtactatgcacttccaaccctaagcataagcaacgacaaggcatttccacatttgcttttgaaggcacactgccccctgcgtatgcctctctcattgcagttacttaatcttttcgtttttttttttcagcctagatttcagtcctgttaactgccattgttctgcagatacttcaagcagtttaaattttaaacaaatatgatatttgttatctgaatttgaatgctggtatttttcagttggtgttatgnttactgggtagggtcattttgatgaaaatacacataatttttgtttc

SEQ ID NO: 216695 - DNA, 401 bp, Gossypium hirsutum
ctgatatcgttatttcgagcaaggccatggggattatgaacagtttcattaatgacattggggagaagcttgctcaggaagcttctaggctcgctcgttacatcaagaagcctacaattacattttgggagattcaaacagctgttgaggcttggtttttccttgggagttgcctaatcattctgtttcttaagggactaatgctgtcactaagtttactagttcataggttttggatattatgaattggttgtaaatattagttcttttaaggattatcaatctgtgggactttgtgttttttgagctcaattgtaggcttttatcttcttttttattattttctattttttaatttcgtttaatattttttatattttattatatttttatattttttt

SEQ ID NO: 216696 - DNA, 441 bp, Gossypium hirsutum
gaacgttgctgttaaggatctcaagcgtggtttcgttgcttcaaactctaaggatgatcctgcaaaggaggctgccagcttcacctctcaggtcatcatcatgaaccaccctgggcagattggaaacggatatgccccagtccttgactgccatacctcccacattgctgtgaagttttctgaattgctgaccaagatcgacaggcgatctggaaaggagcttgagaaggagcccaagttcttgaagaatggtgatgcagggatgataaagatggttcccaccaagcctatggttgtggagactttctttgagtacccaccccttggacggtttgctgtcagggacatgcgttagactgtggctgttggtgtcatcaagagcgttgagaagaatgatccaaccggtgctaaggtcaccaaatctgctgccaagaagaaatg

SEQ ID NO: 216697 - DNA, 506 bp, Gossypium hirsutum
ttcctccgtccttaacgacgagttcattgcccatcgcctcggtctcatccctctcaccagcgaaggcgccatgtctatgcgcttctcccgtgactgtgacgcttgcgacggtgacggtcagtgcgagttctgctccgttgagttccatcttcgcgccaaattcatttccgatcaaaccctcgacgttaccagcaaggatctctatagttccgaccatactgttgttcccgtcgatttcaccgataacgctggctacgattccactgagcctagagggattattatagtgaagttacggcgagggcaagagctgaggctgagggcaattgcgaggaaagggatagggaaagatcacgccaaatggtcacctgctgcgacagtgacttttatgtatgaacctgagattcatattaatgaggatttgatggaaagcttgacgcttgaagagaagctaagctttgttgagaagcagccaactaaagtctttgacattgacccaaataccc

SEQ ID NO: 216698 - DNA, 316 bp, Gossypium hirsutum
  unsure (1)..(316): unsure at all n locations
cccacgcgtccgctttatggtcttattgtcggcattatcttgtcatctcgggctggacaatggggagcagaataagataactcaagtgctgcatagtattctcttattgattttatctgtagcactagaccgaaaaccatttcgatcaatatcaggttagttatggttggacagcangtgccgtgttcgcacacaaatattgatgnaacaattttttttggtggatgctcttttcctctttgtagtagtagaaattgagtttctctttaagtcttaataaaatgtnttggagcttttccttgtttgattctttttc

SEQ ID NO: 216699 - DNA, 494 bp, Gossypium hirsutum
  unsure (1)..(494): unsure at all n locations
cccacgcgtccggcttagcttaaaaaatcttgaatccgtactctcctacttccctcgttatcgtcaatggcttcggacaagaagattaagatcgggattaacggatttggaagaatcggacgtttggttgccagagttgctcttcagaggaacgatgttgaactcgtcgccgttaacgatcccttcatttccaccgattatatgacatacatgttcaaatacgacagcgttcacggtcaatggaagcaccatgatcttaaggtcaaagactctaaaaccctcctcttcggcgaaaaacccgtcactgttttcggaatcaggaaccctgaggagattccatgggctgaagccggggctgagttcgttgttgagtcaactggagtgttcactgacaaagacaaggctgctgctcacttgaagggtggtgctaagaaagttgtgatatctgcccctagcanagatgcacccatgtttgtaatgggtgtaaacgagaa

SEQ ID NO: 216700 - DNA, 410 bp, Gossypium hirsutum
aagcagcttaggcaaccagttcgcagccatggtgaagtattcgaaggagtcagataatcccacgcgagtcctgcaaggcaaggggctctgatctcagggttcatttcaagaacacaagggagactgcgtttgctatcaggaagttggctttgggtaaggctaagacgtatttggaggatgttatggctcacaaacaggccatacccttcagacgcttctgtggtggtgttggacgtacagctcatgcaaagaacaggcattctaatggacaaggtcgctggcctgtaaaatctgccaaattcattctagatttgctgaagaatgctgagagcaatgctgaggttaagggtttggatgtggattcactctatatttctcacaatccagttaaaccaggctcagaaacaaag

SEQ ID NO: 216701 - DNA, 374 bp, Gossypium hirsutum
atttaggtgctgctacctgcactgttttagcgatttataatctatcaaaaggtcatcccgaccatgaagagcctcctgcatacccatatttgcacattcgcaataaggagttcccatggggtccggatggtctgtttgagacaaaggagcatcactagggatggccagacagatgcatatctttccgagttcggcgcatttttatcatttctctgagaaatcaatcagataattctgtggatcttttgtaattttagcactcgatttccagtttctggactttgaattgcaagttcatcaggttttctatatggttgtgcctgcctaccatactctgtttcgaaataataagattactgaatggttttgtgtgg

SEQ ID NO: 216702 - DNA, 265 bp, Gossypium hirsutum
  unsure (1)..(265): unsure at all n locations
ggcaaagtagacaggaaattatgactcaaatctttttctttattttacttcgttcatgtgagacatgaaactgcattggataattccctaatttcctcgcctggacaaatgcctgtagtatcgaggaggaacatatttactagttatatcatttgcaatcgcctgaattttgaggtactcttcgaaccaaaaaaaaaaaaaaaaaaaaaaaaaaaaaaaaaaaaaaaaaaaaaaaaaaaaanaaaaaaaaaaanaaannnnnaag

SEQ ID NO: 216703 - DNA, 309 bp, Gossypium hirsutum
cccacgcgtccgcccacgcgtccggcagtggtagggaacgaagtcgaactgtttcacacgagcagccatggtgaagtattcaagagaaccggacaaccctactaaatcttgcaaagctaggggttctgatcttcgtgttcattttaagaatacacgagaaactgcattcgcaatccgaaagctacctttgacaaaggcaaaaaggtacttggaggatgttattgcccataagcaagcaattccattccgccgcttctgtggaggagttgggcgaaccgcacaggctaagaatcgacattctaatggaca

SEQ ID NO: 216704 - DNA, 319 bp, Gossypium hirsutum
cccacgcgtccgatcagctcaaggcagaggccaaggcaaagggtgaggtgattagcggaaagaggcagcctgagggcccaaaacctggtttcatggtcgagggtgcgatgttggaaacggttactcccattccatatgatgttgttaatgatctcaagggtggctactagatctactctgttttttggtttattcttggcataacttaagtaagctttgttagttattttggatgtgttgtttacgttttgtagtttattttgaagagttactgcttctgcaaagattttaatcttatcaatcattttattttagagat

SEQ ID NO: 216705 - DNA, 425 bp, Gossypium hirsutum
  unsure (1)..(425): unsure at all n locations
cccacgcgtccgccccaaaccaccttgttctcccccctcctctgtctttctggcgggaggggttcaccaccactttggattctgcttctgggtgtgttgtttatggcttctggaacaatcgcagctccccctaggaagcctgtagatgtcccattctccagaaactatatgcctacttgggcttttgatcacattaagtatttcaatggtggctctgagattcagctccaccttgacaaatacactggtactggtttccagtccaaaggatcatacttgttcggacacttcagtatgcaaataaagctagtccctggagattctgcggngactgtcactgccttttatttgtcttctcaaaactcagagcatgatgagatagattttgagttcttgggcaacagaacagggcaaccatacattct

SEQ ID NO: 216706 - DNA, 378 bp, Gossypium hirsutum
  unsure (1)..(378): unsure at all n locations
gctcttcccgcttccgctctactcacgcgccgtctcctangcccatcgccgcttccttctccgccgttgaatctaccacctccaccgacggtcttggcaactccaagacgcctcttctcgaagtcagaggtttaactgccgtgattgctgaaaccaagcaggaaatcctcaaaggcgtcaacctcgtcgttcaccatggagagattcatgctataatgggaaagaatggctctgggaagagtacgttttctaaggttcttgtcggtcatccagattatgaggtgactggaggagatgttgttttcaagggagagaatttgcttgacatggaaccggaggaaagatctcttgccggactttttatgagtttccagtccc

SEQ ID NO: 216707 - DNA, 374 bp, Gossypium hirsutum
ctttggtgttgtagctttctgctttgctcttttttggggggtttcaaaaatggttgagggggcaaggggaagaaaggaagaggttgtttccagagaatacaccatcaaccttcacaagcgtctccatggctgcacattcaagaagaaagctcccaaggcaataaaagagatcaggagatttgcagaaaaagccatgggaaccaaggatgtgagagttgatgttaaactgaacaagcatatatggagccgagggattcgaagtgtccccagacggataagggttcgcattgctcggaagagaaatgatgatgaagatgcaaaggaggagctttactctctggtaacggttgccgaaatcccaaccgaaggactca

SEQ ID NO: 216708 - DNA, 415 bp, Gossypium hirsutum
cggacgcgtgggcggacgcgtgggttcatgtacacccgaggaagttcaacagcattttcggtcttgtgggactgtaaatagggttactatccgtactgataaatatggccagccaaagggttatgcttacgtggagttccttgaagctgaggctgttcaagaggctcttcttttaaatgaatctgaactgcatggcaggcagttgaaggttactgctaagcggaccaatatacctgggatgaaacaatatcggcctcgccggtccaacccttttatgcaacccagggacccatttatggctccatatttcttttctccttatggatatgggaaggttccaaggttgagaatggcaacacgatatagcccctattattagagacattaagggccatactataagctccaaatactt

SEQ ID NO: 216709 - DNA, 333 bp, Gossypium hirsutum
cccacgcgtccgagatttttaattagggaagcttggaagaaggaggttcaaaaaaatgggccctaagagaggtggaaaggttgtggctcctgccaagaagaaacagccggagaaggttgttaatccattgtttgagaagcgtcccaaacagttcggtatcggaggagctttaccttcaaagaaggatctgcatcgattcgtgaagtggccgaaggttgttcgaatccaaaggaagaagaggatccttaagcagagattgaaggtcccaccagcgttgaaccagtttaccaagactcttgataagaaccttgcaacaagtttgttcaagttgct

SEQ ID NO: 216710 - DNA, 424 bp, Gossypium hirsutum
tgtaggaattgatgactggtggagaaacgaacaattctgggtgattggaggtgtatcatggcacctctttgccctctttcagggtttactgaaggttctggctggtgtcagcacaagcttcaccgtgacctctaaagcagctgacgacggtgaattttctgagctttacctcttcaagtggacatcgttactcatccctcccaccaccttattgatcataaacatagtcggcgtcgtggttggaatctcagatgccattaataatgggtatgattcatggggcccattgtttgggcgactatttttcgccttttgggttattatccacctctaccccttcctcaagggtctgcttgggaaacaagaccgaatgccaaccattattttggtttggtcaatcctgctggcctcgatcttgacactt

SEQ ID NO: 216711 - DNA, 364 bp, Gossypium hirsutum
cccacgcgtccggcaatgttgatatttgtgtaataactaagggtggcaaagaatactggaggaaccatttacaacctaatcctcgaacttacaccagctccaaaggctattcttttcccaagaagacagaggtcctcttgacaaaaatcataccccttaaggagaaagtggagatcatcgaaagaggcgacgccatggaagaatgaagcacttacgcaactgatgattagtatatcaactctctagcgttcatttatgctctatcaaagaactattttctgatcagtattgtgcaattgctcatctgtttgaccaaagattttgttggtaatcaaaccttttgagtttgttttaacattgcaca

SEQ ID NO: 216712 - DNA, 351 bp, Gossypium hirsutum
cggacgcgtgggcggacgcgtgggcggacgcgtgggcggacgcgtgggggacatatagggggagtgtgaaggctatccgaagaaagacaaccggaacaggtaggatgaggtatcttcgccatgttcctcgcagtttcaagacgggtttcagggaaggtactgaagcagcaccaaggaagaaggttgcagcagcttctgcttaaaaggcaaaattgtaatggtatgaagttttgttttggatgaagccatgtttatgaggaaacatttagtgatgaagagtgaaattatgttccattggatgctttaagtgatatttagtttctatctgaatgtagctggcgtatattttga

SEQ ID NO: 216713 - DNA, 415 bp, Gossypium hirsutum
cttctggcatgccttggcctggagatgaaggtgagcagaggtgggagcaagcatggactgctataaagaaggtatgggcttcaaaatggaatgagagagcatatttcagcaccaggaaagtcaaactagatcacgactacctctgtatggctgtcctggttcaggaagtaatcaatgctgactatgcatttgttattcatactactaatccatcgtcaggggacacttcagagatctatgctgaggttgtcaagggacttggagaaactcttgttggagcttatccaggtcgtgctttgagttttgtttgcaagaaaaacaatctcaactctcctcaagttttgggatatccaagcaaaccaattggtctcttcataaggcgttccattatcttccgatctgattctaatggtga

SEQ ID NO: 216714 - DNA, 382 bp, Gossypium hirsutum
cccacgcgtccgcccacgcgtccgctatggatggagaataagccatagaactcacgggcaaaaccatggaaatgtggagaaggatgagtcttgggttccgatgtccgaagatctttataatagtttgagcagcaggaccaagtttctgagattcaaaatcccattccccctatttgcataccctgtctatttgtggcacagaagtccaggaaagacaggatctcacttcaacccatacagcaacttgtttgctccccaagaacggaaacatataatgacatcaacaacctgttggatagcaatggtggttttccttgtgtatttatcctttgtaatcgggccatccatgacattcaagctctacggcgttccctacttgatt

SEQ ID NO: 216715 - DNA, 406 bp, Gossypium hirsutum
aaacaaaccactcccatattaaacattgttggtgaaacaatgacgtcttcagctctgacaggtaagcttgaggcagatgtagagattaaggcttctcctgagcagttccatgaaatgtttgcccacaaaccgcaccatgtgcaccatacttgctatgacaagattcaaggatgcgatttacatgaaggtgaatgggggaaagtcggtaccattgtccattggagttatgtgcatgatggaaaggctaaaaaggcaaaggaagtagtggaagcagtagaccctgataagaatttggtcactttcagagtgatcgaaggagatctaatggaagagtataagagctttgtaatcacgattcaagtttcgcccaagagcgagggtagtggcagcgtaatgcacttgactt

SEQ ID NO: 216716 - DNA, 321 bp, Gossypium hirsutum
tttaaaaaacgtatgggcttcaaaatggaatgagagaacatatttcatcaccaggaaagtcaaactagatcacgactacctctgtatggctgtcctggttcaagaagtaatcaatgctgactatgcatttgttattcatactactaatccatcgtcaggggacacttcatagatctatactcacgttgtcaagggactagtagaaactcttgttggatcttatccacttcttgctttgtattttgttttcaagaaaaacaatcttcaactctcctcacgtttttgggatattccaagcaaaccaatttggtctttttcata

SEQ ID NO: 216717 - DNA, 393 bp, Gossypium hirsutum
gtttgaagatgacgatgaatttgaagaatttgaaatcgatggagagtgggatgacaaggaagaaggaaaggaagaaggaaaggaagtaacacagcagtgggaagatgaatgggatgacgatgatgtcagtgacgacttctcactgcaactgaggaaggaactcgagaataacaccaagaactgaaccagagttgtgcttctctattgacttgcttcctcgtttgaatttattttggtttcttgcaaaactgatgtttgagctttaactctttatgattgggatgtttgataaaaacaatgtgcagaagctggtctttatggttatctgaaatataaattgtgtgggtgtttgccttgtttaaactgggcccatgttttgcttttttttttttt

SEQ ID NO: 216718 - DNA, 404 bp, Gossypium hirsutum
ctcattctctgtatcatctatcatttccttatttctactgtttcctcgctttccggggtcacatccttctcaggtgaacggagatggcaggaaaaggtggaaaggggcttttggcggcaaaaacaaccgccgctaacaaggacaaggacaaagataaggacaagaagcgcccggtttctcgttcatctcgtgccggaattcagttcccagtgggccgaatccaccgtcacctaaagactaggacttccgcaaatgggagagttggtgccacagctgctgtttacttggcctccatccttgagtacctaactgcaaaggttcttgaattggctgggaatgcaagcaaggatctgaaagtgaagagaatcaccccgagacatctgcagcttgctattaagggtgat

SEQ ID NO: 216719 - DNA, 413 bp, Gossypium hirsutum
  unsure (1)..(413): unsure at all n locations
cccacgcgtccgcggacgcgtgggtactggccagaagaacaagattacgatcacaaacgacaagggtcggttgtctaaggaagaaatcgagaagatggttcaagaagcggagaagtacaagtccgaggatgaggagcacaagaagaaggttgaagccaagaacgcattggagaattatgcctacaacatgaggaacactgtcaaggatgagaagattggttcaaagcttgacccggccgacaagaagaagattgaagatgccattgatggagcaatccaatggttggatggcaaccagctagccgaggccgatgaattcgaggataagatgaaggagctcgagagcatctgcaatcctatcattgccaagatgtaccaaggtgcangggctgacatgggtggtggcatggatg

SEQ ID NO: 216720 - DNA, 392 bp, Gossypium hirsutum
cccacgcgtccggaggaaaaaggacatttggctgctactgtaaagcactaaaagaggggaatacaaaaaacccaagcatttcttcctcctcgagtctctcaatcaagcccttccaacactcttcagcttgaactctccgcaacaatgtttcgatcagtagctcgatcggccgccggaaagcacctcctccgccgaggatatgccactgaatctgttcccgaccggaatgtcccggttttgggcgctgccggaggtattggccagcccttggctctcctcatgaagcttaaccctcttgtttctcggctggctctctatgatatcactaacactcccggcgttgcaactgatgtcagtcatgttaacaccatatctgaggtgcttgatttgtt

SEQ ID NO: 216721 - DNA, 258 bp, Gossypium hirsutum
gttccactcttgaaggatacagagatacgggaccttatggatgcagctgatgtcgacaggggcgggaccatcgattatggtgaatttatagctgcaaccgctcacctcaataaactagaacgcgtggaacatttcgttgcagcattccgatattttgataaggataatagtggctatattacggttgatgagcttcatcaagcttgtactgagcataacatgaccgatgttttactcgaggatataatccgagaagtc

SEQ ID NO: 216722 - DNA, 308 bp, Gossypium hirsutum
tgatgcctgttggaaaacagagaggagctggtcttggaggaggaaatgatgagagagggcagacaatcaataattgttgacttaaaatgattgattttcaaggaattcttgtgtcattgttttggcagcaaccaacagacaccatgttctttataccgctttgttgcggccgggtatgttttaccggcaggttacacattatatgcctcatttttcttggaaagtgaaaattcttcaagtgcacttcaaaagaaaagcacttgcaaaggatttttattttgaaaagatctctatgaggaaccccagtt

SEQ ID NO: 216723 - DNA, 401 bp, Gossypium hirsutum
aggaagtgtagttggtgcaaaactttgatatgggtgtttcttttgttgtcttcccttggtgtttctttcttttttctcttatatattttagctcaggatcagaagttgttaccattcatgttaatgaagcaaaaaacttgctgcagtcaggctaccgttacatcgatgtcaggacagtggaagaattcgagaagggacatgtggaagcagagaatattcttaacatcccatacttgttcatcacaccagaaggtagggtgaagaatcctgagttcttgaaggaggtttcatctctttgcaaggaggatgatcgtctcatagtgggctgccaaagtggggtgagatcccttgctgcaaccgctgatcttcttaaaattggttttaagaatgtgcacgacatg

SEQ ID NO: 216724 - DNA, 379 bp, Gossypium hirsutum
gaataaccgggcaaaagaagctgtcgaaggtgatcgtgccggataagtggaaggaaggtgccagcaacacaaacgaaagcggtgggcggaaaattaacgagaataaactcctctctaaaaagcgaaggtggactccttatggaaatactaagtgcatcatttgcaagcagcaagtgcaccaagacggcaagtattgtcacacttgtgcttattccaaaggtgtatgtgcgatgtgtggcaagcaagtgctcgacaccaagctttacaagcagagcaatgtataataaggaaggggcattagctgttcttcaagtagataccttaattgctcgttgtcattgacaacacatgaacatgatcgcgaaggctgtataagatt

SEQ ID NO: 216725 - DNA, 378 bp, Gossypium hirsutum
cccacgcgtccgcccacgcgtccgctacttgatttggccacattggcaacaactttatgggttatttatatgatccgtttcaaactaaagtccagctacatggaagacaaggacaactttgctttatattatgttcttgtcccatgtgctgcacttgccctatttattcacccctctacttctcataatctagtgaaccggattttctgggcattctgtgtatatttagaagctgtttcagttctaccccagctgcgagtgatgcaaaataccaagattgttgagcctttcacagctcattatgtatttgcactgggtgttgcaaggttcctcagctgtgctcactgggttctccaggttttagacagtcgaggacac

SEQ ID NO: 216726 - DNA, 260 bp, Gossypium hirsutum
cccacgcgtccggctgaatattcaaaaccattgattcaatatctagaggcccttcccgaagacgagaaggttattttggtgggtcatagcagtggaggtgcttgcctttcttatgcattagaaaatttcccagaaaagatctccaaagcaatcttcctttgtgctacaatggtgtctaatggtcagagacctttcgatgtgtttgcagaagagcttggttctgctgaacgtttcatgcaagagtcagaggttttgattta

SEQ ID NO: 216727 - DNA, 326 bp, Gossypium hirsutum
cccacgcgtccgcccacgcgtccgcccacgcgtccgcccacgcgtacgatgacgaaggcgtttgattatagtacttaggcatatatttttgttattgtattgttacattttaaaaaaaaatcttaattagtgtttatgattgtatggtaaactttgattatcttgactgattagagtttggtttacgtttaaatgtgtacatagatagtggtttccacagaaaaacatatagattaaaagtttgaatgggaaaagaaaattgacatggatgaatattaatccaatacaccgataatcgttttaaaaaattttactgaattatatat

SEQ ID NO: 216728 - DNA, 421 bp, Gossypium hirsutum
cccacgcgtccgcccacgcgtccgggttcagtcggttgttaagccgattaagaaggagagcgaagagggcacctttgaagaagaatccactcaagaacttgaatgctatgctgaagttgaacccttacgcaaagactgctagaaggatgtctcttttggctgaggcacagcgtgttaaggccaagaaggagaagcttgacaagaagaggaagcctatatctaaggaggaagcaaccgcaatcaagtcagctggcaaagcatggtatcaaactatgatctccgacagcgattacacagagttcgaaaacttctccaagtggttgggtgtgtcgcaataaaatttatttttctgcgggagggtttgaatcaattttggttttcggtggtttttgacattttaattcaatttcgatgaatggtt

SEQ ID NO: 216729 - DNA, 247 bp, Gossypium hirsutum
ggggcgacgccacgcgtccgcccacgcgtacgtgttctccccctttcctcttggtgcctggtttcagttccatctattgggccatggatcttacacctcagcaacttatccaattcaacggatacgacccatacaagcccatctacattgcaatcaatggacgcatctactacatcaccgtcgggaaatacttatacggacctggcggagcctactccatcatcacaggcgaaaattccaacgtagc

SEQ ID NO: 216730 - DNA, 374 bp, Gossypium hirsutum
gttactggggctgaaaatgaaaatgagctcattctggtaactgttcttcgggggttttttgatgcagttggccttcttctaagagggactgtggacaagaaagaggcactggagaacttagatctcattttgttatgccttgatgagattgtcgacggcggcatcatcctagaaaccgatgcgaatgtcattgcggggaaggttgctagtcatagcatagatgcggctgctcctttatctgagcagacaataagtcaagcattggcaactgctcgggaacatttagcaagatctctcctcaagtgatgattacaaggggaaggagcaaagcaaagagtttcgaattgttattatttctagctttttattattct

SEQ ID NO: 216731 - DNA, 374 bp, Gossypium hirsutum
  unsure (1)..(374): unsure at all n locations
cccacgcgtccggctttcagcatatgggatgtaggaggtgacagtaactcacttgatgttcttccaattgcttgtaaaaatgctgtagcaattttgtttatgtttgatctaactagccgatgcactcttaacggtgttgttggatggtatagtcaagcaagaaagtggaatcagacagcaattccaatattggtaggaccaaatttgatgattttgttggtcttcccccagatttgcaatggactatagtgactcangcaagagcatatgccagagcaatgaatgcaacccttttcttctcaagtgctacacataatatcaatgtgaacaagatctcaaattcatcatggctaaactctttaacttgccatgga

SEQ ID NO: 216732 - DNA, 355 bp, Gossypium hirsutum
  unsure (1)..(355): unsure at all n locations
atggatttatgtttgaacagacttgatagatggccgagcagagaatggctgcagaatgttgtaaacactgtaatgaaacgatttagatggggatttgtgcttgctggttttattgcactagccatggcagcaataagctggaatcttgaaagcagtcaaagttactggatttggcacagtgtttggcatgttgccatatattcatcttctttcttcttcctctgttcaaaagtaataaccataaatagtgggaacagaacacccaccgacgcaaactatcagttgactcagcaggattctctctctcaaggtgcataagaagaaagaagaattntcagagaattaaagttcacat

SEQ ID NO: 216733 - DNA, 320 bp, Gossypium hirsutum
  unsure (1)..(320): unsure at all n locations
gaggaccatnttggaaccgtccaacacgaagaagagagggcggataccaatatcaccggggcacttgccaacattccaagcgctctcagcaactttactactctcctttcacagttcaataacctaggacttaacacaactgacatggttctcctgtccggtggtcacaccatcggcatatcccattgcccggctgtttctcctcgattgtacaattccaccggccctggcggaatcgacccaaccatggacagtgagtacgctgaaaacctcaatgtcaacaatggtaaaaccgtgagcgataacaccacaatatttga

SEQ ID NO: 216734 - DNA, 413 bp, Gossypium hirsutum
cggcaggtcatgatcaggccatcctcaaaagtgatcatcaagttccttttggtcatgcagaagcacggttacattggagagtttgagtacgttgatgatcacagatctggtaaaattgtagttgaactgaacggaaggctgaacaagtgcggggtgatcagtcctcgcttcgacgtaggagtgaaggagatcgagggttggactgccaggctgcttccatcaagacagtttgggtacatagtgctgacaacatcagctggaataatggaccatgaagaagccagaagaaagaatgtaggtgggaaagtacttgggttcttctattgaggggatttcattagaattaaaacttttatgaattatgtttttttcctttaaacctcttaattagcaatgcctattttctaaatttt

SEQ ID NO: 216735 - DNA, 416 bp, Gossypium hirsutum
cagagccgcatcttcttcttagcctcagtcggggtgaacagaaatggcgaagtcaaagaaccacactgcccacaatcaatcttacaaggctcacaagaatggcatcaagaaacccaagaggcaccgccacacttccaccaaagggatggatcccaagttcttgaggaaccagaggtatgcaaggaagcacaacaagaagagcggtgagtctgctactgaagaagagtaaatttttaatggcaaaagatctagctttgattagtgttttccaattgttgtttttccccccggtggaattgagtgttcgtttactataatcaccttagttgaaatgttattttgggattgttgaatctcattttcaaaagagatttgaagcttggagcttattaatattaaaaacatgttttgagctt

SEQ ID NO: 216736 - DNA, 423 bp, Gossypium hirsutum
gatttcaacaaccatgagtggagtcacatgctgccttcgcttccctggccaactcagttccgatcttcgaaaactagcagtaaacttgatcccattcccacgcctccattttttcatggttggttttgcacctttaacatcccggggttcacaacaataccgagctttaacgatccccgagctaactcaacaaatgtgggattccaaaaacatgatgtgcgcggctgatcctcgtcatggaaggtacttaacagcctcggcaatgtttcgaggcaaaatgagcaccaaggaagttgatgaacaaatgatcaatgtccaaaacaagaactcttcgtactttgtggagtggattccgaacaaggttaattaagtggttgcgacattccaccaactgggttgacgatgtcatcgacgtttatgggg

SEQ ID NO: 216737 - DNA, 300 bp, Gossypium hirsutum
cccacgcgtccgcagagttttttttccatagaaagcgaagaaacttgaaaacgacgacgtagtgaaaaaaaaaaaaacatgtcttacgattatcttttcaagtacatcatcatcggtgacactggcgtgggaaaatcatgtttgctcttgcagtttactgacaagagattccaaccggttcatgatctaaccatcggtgttgaattcggtgctcggatggtcaccattgatggcagacccatcaagcttcaaatctggatactgctgggcaagaatccttcaggtccatcaccagatctt

SEQ ID NO: 216738 - DNA, 421 bp, Gossypium hirsutum
ggggaaatgccatcgtgaaagaaataatcaaggatcaggatggaaacataactcagggggtaggtgttttgcatcttcaaggatctgtcaagacaacaaaattgaagctcacgtggcttgcagaaactagtgaacttgtaaacctttccttggtggagtttgattatctaataacaaagaagaagctggaagaaggggaggatttcctagatgcactaaacccatgtacgaaaaaggagacagcagcaattggagattccaacatccgcaattgaaacaaggagagatattgcagctggagaggaaaggctacttcagatgtgatgttccctttgttagaccttcgaaaccagtggtgttgatcgcaattccagatgggcggcacaaagcatgttgaagtatgtcttttaccctatcttta

SEQ ID NO: 216739 - DNA, 414 bp, Gossypium hirsutum
cccacgcgtccgacctgctgaagctgcaacccctgcttctgcaaaaaaggctaaatgtgcggttacacctcagaagacagatggtaagaagggtggacacacagcaacaccgcatccagcaaagcaatctgggaaaaattctgcaaagtctccaaagtctggtggtcaattctcttgtggttcttgtaacaagtcgttcgggtctgagggcggtttagagtctcacaagaaggccaagcatggtggcaaatgaggtcgggtttactgctctaatgtgcatgtttaattttgggggagagatgtttggcttgtggttttggttctttttattcttactagtaaaatgagtgaattatggattaaaaaagacttcgggaaagtccttatgattagaaactatcataatattgggat

SEQ ID NO: 216740 - DNA, 415 bp, Gossypium hirsutum
cccacgcgtccggaaaatcaggagtaactgaagaagatgcagatattcgtcaaaaccggggcagggaagactatcactctcgaggttgaaagcagcgataccatcgacaatgtcaaggccaagattcaggataaagaaggcatccctcctgatcagcagaggttgatttttgctggtaagcaactggaagatggccgaaccctcgctgattataacatccaaaaggagtccactcttcacctagttttaaggcttaggggaggaaccatgtcaaggtgaagactctcaccgggaaagaaattgaaattgacattgaaccaactgataccattgatcgtatcaaggaacgggtcgaagagaaagaaggaattcctccagttcagcataggcttatatacgccgggaagcaacttgc

SEQ ID NO: 216741 - DNA, 393 bp, Gossypium hirsutum
gatatgggaaatattgacccatacagtatcttcactccctcctgctctgctaatgcgggtcagacgaagtggctgctgaaaagaaggcttatggttagccagctcattgaaaagtacgatccttgcactgagaagcactcagaagtatacttcaatctacctgaggttcaaaagtcacttcatgttttacccgaagctgcaccatctaaatgggagacgtgcagtgatatcttaaataccaactggaaggattctccaataacgatgcggatgtttaccgtgagcttatacatgaaggacttcgcatatggttattcagtggtgacacagatgctgttaatccaattacatccacccgcttacatatagatgctctcaagcttgcaactatta

SEQ ID NO: 216742 - DNA, 413 bp, Gossypium hirsutum
  unsure (1)..(413): unsure at all n locations
attcaggacatcatttataaatctgcaaagaagaaagggtcgggggcaggtgctttagggtggcagttctttgtagaaggaatgcaggaatatagtgatgatttcgggatggtaccatggcagtccccgccaatttacaaactcaccatagaacactcgtgcaaattggctagaatccaaggacttattcaagaaaacggaaacctcaaacaactgtgttccaagagaaagtaaagctagggcttgctatcagaaaattcaattcttctggtgaggtaatttgtgcgagatatatattggtattggatcaattnttttcttctaatatccatacaaattactatgtattaagtagagagccatatatatatatagcacatgattgcaagttcgtgcaaaaacttgggtgaatc

SEQ ID NO: 216743 - DNA, 188 bp, Gossypium hirsutum
atggagagtcatgaagagaaattgcacaagctggtgttgcagagcaagattaatgaagctaaggatgccatgaagcgtaaagctagttagaattgaatgagcaagattgatttgaataaaggtgattaaggagggtacatgtttaatgggctttttaagtatataaagatactttatttttattatca

SEQ ID NO: 216744 - DNA, 384 bp, Gossypium hirsutum
cccacgcgttcggtgtgccaagccccagaagcccccattctttgtatcaacaactgtgggggcttcggcagtgcagctaccatgaatatgtgctccaagtgtcacaaagcgatgatcctgaagcaggaacaggcgcaacttgcagcatcatcaatcggaagcatcgtgaatggcagctcaactgggaacggtaaggaaccagccgtggctactgctttggatgtacaatctggaaacgccgacaccaaaatggtctcaacagagctacccttgacccatccggaacgacttcatgtgggatgaaaatgaaagagggtcctaacaggtgtaccaaatgctgtaaacgtgttggtttgacaggatttaactgcaagtgtggaaacc

SEQ ID NO: 216745 - DNA, 369 bp, Gossypium hirsutum
actttaaccgattactatatccagaaggaatcgactcttcatctgggtgtacgtcttcgaggtgggatgcagatcttcttcaagactttgaccggttagaccattactttagaagtggagagctcggatacgattgattacgtgaaagcgaatattcaggacaaagaatgaattccaccagatcagcaatggttgatttttgctgggaaacagctggaagatggaaggactttggctgattacaatattcaaaaggttccactcttcaccttgttcttcgtcttcgtggagggttctaaaccttaaggtcttccttaatggtgttttctggttttacgtgaatgaatgttcccttttgatggcctttta

SEQ ID NO: 216746 - DNA, 357 bp, Gossypium hirsutum
caacatctcgaggaatggtcatgctaatgaaaatggtgctggtaggcggaagaaaaagggcaatcaaggtaaaaggagattgaacaatatgacaagtatggcccatagagaagaggttatccgtaggactgtttatgtctctgatattgaccaacaggtcactgaagagcagcttgcagtttatttgtgagctgcgggcatgtggttgattgccgcatatgtggtgatcctaattctgtgcttcgttttgcctttgttgagttcactactaataatgttcgctagcttctctgaatcttgcatggactatgcttgtattctacccagtttgggggctaccttttaaaacagctattt

SEQ ID NO: 216747 - DNA, 382 bp, Gossypium hirsutum
gaagagtgtactggacttgatacggaaactgcgtggggaacttgacaagcttttgaacagaaaggttgaagaacctggatttgatatatctgttgaaggaaagggagttgtgtctgctgtggttgagttattgcacagccaaaatggtcgggactgaattcgtattcttttaagttctttatggtaggatggattgctcttcattttgtgagataatataagcaaaatgcaactttttaggggtgatttaatctattcgacattccgttaggatgttgaaagcttttttcgtagcataataagggaaaaatgggaaggcatgaacctaagtttgggtagacctaatcccattgggtacccattgggagacatattgattcct

SEQ ID NO: 216748 - DNA, 372 bp, Gossypium hirsutum
cccacgcgttcgctaaaacccctgctcaagaaagatgcagtctctgcgcaatttcaacggcgagaaaaaatggcagcggagctaccaaaaccggcaaccgaagacgtaaagtttgatttgtttgaagatgatgatgagtttgaagaacttgagattgatgaagagtgggagttaaaggaagaaggaaaggagattacacagcgatgggaagatgactgggatgatgatgatgtcactgacgatttttctctacaactgaggagggatcttggaataacactgtgaacaacatcttagctggacttatgcatttctctgcactgtacttgtctgaatcggggttattttgtttttagattttctttgccattg

SEQ ID NO: 216749 - DNA, 410 bp, Gossypium hirsutum
cccacgcgtccgtgaaagagtaaaaagtgggtcaagggtagtcatgggcaatttccaggctcctggtgaaggaaattacaacttgactgcattctgcttgtgcgactcttggatcggttgtgataagaagactaacctaatgataaaaattttgaaacgaagtcgtgccggtacaaggactggtgccttgtcagaagagggagctggtatggaagaggggattgatgatgtagagcatgtataagatgttgaatattaggattttgagaggaatacagtgtagatgaagaggatgaataagattctaagaggaatggagttttgccccgctgctggtgcttgtgctgctgctgaaagttcgtgacaatgagtgaaattcttaattttttcattttcactttgggggaaca

SEQ ID NO: 216750 - DNA, 447 bp, Gossypium hirsutum
  unsure (1)..(447): unsure at all n locations
gtggctccgtcgtctcttctccacctctccttcaaccaggatcatggctgctttgccgccggcactgaccatggcttccgaatctacaattgcgatccatttcgcgagatctttcgccgagacttcgatcgcggtggcggtatcggggttgttgagatgctttttcggtgtaatattttggctcttgttggtggtggacccgatccgcagtacccgcctaataaggttatgatctgggacgatcaccaaagccggtgcatcagcgagctttcgtttcgttcggaagtgagatcggttcggcttcggagggaccgaatcatagtcgttttggaacagaaaattttcgtttacaattttgtggatttaaagctcctacaccagattgagaccatcgcgaatccaaaaggactctgcgcggtgtctcnaggagcagcatcattggttttg

SEQ ID NO: 216751 - DNA, 334 bp, Gossypium hirsutum
  unsure (1)..(334): unsure at all n locations
cggacgcgtgggtttgcacagaagcagggatgtttgctttgagggaaaggagggtccacgtaacacaggaagattttgagatggcagtggcgaaggtgatgaagaaggagactgagaaaaacatgtccttacaaaagctgtggaagtgattaagctntattttcattattgtgctttgctttctttgttacgggcaaaaatggatggaacatgtaaaactagacttatacaatgacattataataccgtgcgcctgttttctttgacaaanaaaaaaaaaaaaaaaaaaaaaaatataaaaataaaaaaataaataaatatttatttataaaaa

SEQ ID NO: 216752 - DNA, 309 bp, Gossypium hirsutum
cccacgcgtccggtgccatgattgggcaggttgctggaggtggtaggactgagaaacctctgcttaaggctggtaatgctttccacaagtatagagtgaagaggaactgctggcctaaggtacgcggtgtggctatgaacccagctgagcatccccacggaggtggtaaccatcaacacattggtcttgctagtacagctagacgtgatgctccaactggacaaaaggttggtcttattgctgcaaggaggactggtaggcttagaggaccagctgctgccactgttgtcgaggccgatgaggcataat

SEQ ID NO: 216753 - DNA, 468 bp, Gossypium hirsutum
  unsure (1)..(468): unsure at all n locations
cccacgcgtccggagaaagtgttgcaattgctcgtactgtcggtcatctttccaagagtgctgaagtcatgaaacttgtaaacaacctcatgaaagctccacaaatggctaccacaatgcaagaatttagcaaagaaatgaccaaggctggggtgattgaagaaatagtaaatgatgctgttggcacggcattggattcagaagatatagaagaagagacagaagaagaagtcaataaggttctttcggaaatagctggtgaaactgctgcacggcttcctgaagctgttcggaaggaaagagcgagggtacctacccaaagagaaaccacttcacatcaagaagaagcgattgcagagggtgcagatgatgaagaaaaattggaagagattagggcgcgactcgctcgagttagatcgtaaacctttaacttccattttggntgttcttttgctatctatcaactaa

SEQ ID NO: 216754 - DNA, 289 bp, Gossypium hirsutum
acttcttcaaggggttctaccaagactcttggtaactttgtaaaggccaccttcgagtgtcttttgaaaacttagggggtcttgactcctgatttctggaaagagactcgattcacaagatctcctttccaagagtatactgatctgatgggaaagccatcaaagacgctcgtactctatgatgccgagagagtggatttatgatgttccaacagggccttagaattgcaatatatctagctccccttggggttcttaagtacaatagatgctttctttagtgcacttg

SEQ ID NO: 216755 - DNA, 505 bp, Gossypium hirsutum
  unsure (1)..(505): unsure at all n locations
gtttttctcgtccttaaagctcatcttctaatttggtgccatctttggatctctcacttttctacctttcagatttcgtgacggagaggagatatctttatttttctgaacttgcaactgagtaatcccggtttatttggtcttttgatccaacggctaagagggctctttttagaattttccctaatacgacgactgcaatttctttttaatagaagaggaaattttcattacagcaactggtccaggccttttcgttcgtctttacaatacttccctccgtttgagcacttccagatctgaagaaaaatgcctnccgccgctcctcgatccggagatgnnancttcgccagcgtagaacgcgtgaatgcagaactattcactttgacttatggagcaatagtgcgtcaattgcttactgacttggaggaggttgaggaggttaacaaacagcttgatcaaatgggctataatataggaattagactaattgatgagtttctag

SEQ ID NO: 216756 - DNA, 417 bp, Gossypium hirsutum
agagaaagtcctccgtatttatgacttgaatcgcccagatgcacctccaagagaagtggacggatctcccggttcagtcagaactgttacatggatgcatagtgatcagacaatattaagttcttgcactgatatgggaggtgtcagattatgggatgtaaggagtggtaaaatagttcaaacactagagaccaagtcatctgtgaccagtgcagaagtgagtcaagatggtcgatatatcacaactgctgatggatctaccgataagttctgggatgccaaccactatgggttggtaaagagctacaacatgccatgcacagttgaatcagctttattggaaccgtagtatggaatataaattctttgccggaggagaggatatgtgggttcgtgtttttgaatttcacacttgag

SEQ ID NO: 216757 - DNA, 483 bp, Gossypium hirsutum
attatgggcattaacatggatcttaatttcaatctccttgaaactggctctctcgctctatgcattattgctgttgccttcactttacaggatggcacttctcactacatgaaaggcctggttcttctactgctctacattgttattggagcttgctttttcgtatctaaaacacctctaaaccaagtaaacatcacaaactcgggagctgaacttgccacaatcctcagagcttgataagctttgccgtcccgggggatgtcgttactccaccccccccccttttgatgatgaaatgtttgaaacttgaacagagatttcatgcattggttattctttcatatctggggcctggcggaaagctgacaatttgcagttactaggccgcatacaagttgtcatgcctttaaagttgagatggatactatctataagtataccgttgaagcttgatgaagacaggctatacaatacacagcacat

SEQ ID NO: 216758 - DNA, 456 bp, Gossypium hirsutum
tggatgccgatgtcataaccattgagaactcacgttcagatgagaagctcctgtcagtcttgcgtgaaggagtgaagtatggtgctggaattggacccggtgtctatgacatccactctcccagaataccatcaaccgaagagattgctgacagaattaacaagatgcttgccgtgctcgagaccaacatcttgtgggttaaccctgactgtgggctcaagactcgcaagtacgctgaggtgaaaccagccctgagcaacatggttgctgctgccaagctgctccgcacccaactcgccagcgccaagtgataggctcccgagatattggaaatcctaatcccataccactccagagagattaaaaagaaaaatggcaaagaagtttcttctatcttatcatttgaataactttgtttgttgctgaaatatttgttacatgcccttgggcgtcctt

SEQ ID NO: 216759 - DNA, 405 bp, Gossypium hirsutum
cccacgcgtccgaacttggtgtaaattgtatgcttattgttcttttcattttgggctattagtatccttctattgaattcccaacatattcttttgaaagaatcaatgagaaagttcaaggtaacctggtgtaaatttcttatattatatctgcagatttcttgagggagaagaaaggcaggttatggagattgaatgattggggtcttcggagactagcatacaagataaagaaagctaagaatgcccactacatcttgatgaactttgagttggaagctagatggattaatgagcttaagaccatgttagaccaagatgaaagagtcattcggcatctggtgataaaaagagacgaggcaatcactgaggattgtccaccttcacccgactggcacactgttc

SEQ ID NO: 216760 - DNA, 468 bp, Gossypium hirsutum
cgaatcttaaccgccttgtctctcaggttatctcatctcttaccgcatctttgaggtttgatggagccctgaatgtggatgtgactgagttccagactaacctggtcccatatcccaggatccactttatgctttcttcttatgcccctgtcatttcagctgagaaggcttaccatgagcagctatcggtggctgagataaccaacagtgcttttgaaccctcttcaatgatggccaaatgtgacccacgccatgggaagtacatggcttgctgccttatgtaccgaggagatgttgtgcccaaagatgtgaatgcggctgtggccaccatcaagaccaaacgcacaatccaatttgtggattggtgccctactggattcaagtgcggtatcaactaccaaccaccaactgttgttccaggaggggaccttgccaaggttcagagagctgtctgcatgatcttcaact

SEQ ID NO: 216761 - DNA, 513 bp, Gossypium hirsutum
gggttttgctttttgcttctgcctttgctttttgcttcttactctcaaccaaaaatgactgctcaggccgacaaagagatcgaagagatcctggcagctcatctcgaccaacaaaaaatcgattccgagataccagagcaacctgttgttgaagatgacgacgaggaagatgacgatgacgatgatgatgaagatgatgccgaaggtcatcatgagggagaaggagatggaactggtaggtcaaagcaaagccgaagtgaaaagaagagtcgcaaagctatgttgaagcttgggatgaaaccgatccctggtgttagccgggtcactgtgaagaagagcaagaatattttatttgtcatctcaaaaccagacgtgttcaagagcccagcatcagatacttatgtaatatttggagaggctaagattgaggacttaagctcacaactgcagactcgagctgcagagcaattcaaggctcctgatctaagccaagtgatatcaaaaccagagtca

SEQ ID NO: 216762 - DNA, 366 bp, Gossypium hirsutum
cccacgcgtccgcaaggctatcaatgatgagggtatgccccaccatcagagacctttcatgaagggcaagctagtcatccagttccatgttattttcccagaatctggggtattttcacctgagcaatgccggaagattgagagtgtattgcccatgaggcctagtaagcatttgacagacatggagcttgatgactgtgaggagactactttgcatgatgtcagtgctgaggaggtaaagaggcggaaggaacaacgacagcataggcaccgtgaaggttacgatgaagatgacgatgacgatgagtcagcaccaagagtgcaatgtgcccagcagtaagaaatgtttgcgttcaatgttttgcc

SEQ ID NO: 216763 - DNA, 511 bp, Gossypium hirsutum
ctggttcttgctaaagcgtttgctactagctgttaactctaaaccaacaataactgggcaggccgacacatagatcgaagagatcctgccagctcatctcgaccagcataacatcctccccaatattccagaaccaccagttattttacattacaaccaggaacatcacgatgacaatgatgatgaagatgatgccgaaggtcatcatgagggaaaaggagatggaactggtaggtcaaagcaaagccgaactgaaaagaagagtcacaaagctatgttgaagcttgtgatgaaaccgatccctggtgttagccgggtcactgtgcacaagagcaagaatattttatttgtcatctcaaaaccagacgtgttcaagagcccagcatcagatacttatgtaatatttggagaggctaagattgaggacttaagctcacaactgcagactcgagctgcagagcaattcatggcttctgatctaagccaagtgatatcaaaaccagagtcatca

SEQ ID NO: 216764 - DNA, 419 bp, Gossypium hirsutum
cccacgcgtccgctaagtttgaggttgagaaagaaaaacagaaggctgaggatgagtccactgattcagatggattttcagccgtccagaagaaggtctttgatgtcctttacaaggttgctgatattcctttcttaagtgaatacaagcttcaaatccttgatctcattgagaaggctgagaaacagccaaacatcaccattggtgtcatcgtctccattttggtgattatggtcacagttctcttcagacttcttttcggtggcaagaagcaaccaaaagtagagaagaaaccggaggttgctgagacatcaaacaatcaatcaaccagtggagaaaaggctgaagaagaagaagaagaagaagagaaagaaggaaccgctgctgctcctcgcaggaggaggcgtgacacttaaaac

SEQ ID NO: 216765 - DNA, 473 bp, Gossypium hirsutum
acccacgcgtccgcttatccatggcgtctacatttttggcactacccaaaaccttcactgcaggcaagcctaccttcccttctctttcaacccacaaacttctcgggactcgaagaaattcacttagaatcaatgctgtggccactaaatgggaacccaccaaggttgttcctcaagctgacagagttcttatccgtctccaagaattacctgagaaatcagctggtggagttttgttgcccaaatcagctgtcaagtttgagaggtacctgatgggggagatagtttcggtcggtgccgaagtaggaaacgtggaaactggaaagaaggttcttttctcggatataaatgcttatgaggtggatttgggaacagatactatgcatgtgttttgtaaagagagtgacttgttagcttgaattgattgaagtttttctggtcctttgtttaagatgaaaagtcaattgtatttc

SEQ ID NO: 216766 - DNA, 507 bp, Gossypium hirsutum
tcgggtcttgaacatgaggtggtgcctggtgttgttgaaagccttaaggttataacgaagttttgttccgagcggattgcgaaatatgctttcgagtatgcttatttgaacaatcgaaagaaggttactgctgttcataaggccaatattatgaaacttgcagatggattgttcttagagtcttgccgtgaagttgcaactaagtatccaagtatcaagtataacgaaatcattgtggacaattgttgtatgcaactcgtttcgaagcccgagcaatttgatgtcatggttacccctaatctttatggaaatctggttgcaaatacagcagccggtattgctggaggcaccggtgtcatgccaggaggcaatgtgggagctgaatatgccgtgttcgagcaaggtgcttcagccggaaatgttggaaaagaaaagatagtagagcaaaagacggcaaatcccgtggcattgcttctctcctctgccatgatgttgagacatctccag

SEQ ID NO: 216767 - DNA, 422 bp, Gossypium hirsutum
  unsure (1)..(422): unsure at all n locations
cccacgcgtccgcccacgcgtccgcaattttgtgctacatcttcgttgtttttcacttccaattacagctcgtcacaaatgcgatgagcatcttctttcacttactgatcatgatgataacagttattcagaacatcatcattgtgatatctgcgaagaaagtcgagatccaaatcgttggttttataattgtgcaacatgtgatacttctgctgatcgtaattgtgttcttggagaatatccattcctcanactcaggagcattcaagaaggaaatgatcatccacatccactcacctttgtgaagaagaagtattactacccagattgtgataaatgcggtaagccttgtgaaggtgtggctcttgaatgctcaaagtcggaatgcaaatatattgtccactggaaatgtgtaggagaca

SEQ ID NO: 216768 - DNA, 446 bp, Gossypium hirsutum
cccacgcgtccgcccacgcgtccgcccacgcgtccgagatagttgacctggcaacactaaccggggcttgtgttgttgctcttggaccctcaattgcacgcgtcttcacacccaatgatgatctagcaaaggagttatttcaagcatcacatgccagtggtgagaaattttggaggatgccattagaggaacgctattgtgaatcaatgaaatcaggagttgctgatatggtaaataccggcggtcgtcaaggcggtgctatcaatgcagctctggtcttgaaacaatctgttgatgaaaaagtaaagtggatgcacattgacatggctgggcctgtcttgaatgataagaagcatgtggcaacttaatatggcatcttaactttggtggaatgggttctgaataactcttcttcttaaatgaaaagcttgcacatgctctgttgt

SEQ ID NO: 216769 - DNA, 449 bp, Gossypium hirsutum
aaaaaaaaaaaccaactaaaaagatggcgaggagaccggacgaggaatacgattacttgtttaaggtagtgctaatcggcgattctggtgttggaaaatctaatttgctttctcgatttactcggaacgagttttgcttagaatctaaatctaccatcggcgtcgaattcgccacccgcactctccaagttgaagggaggactgtgaaagctcagatatgggacactgctggtcaggaacggtacagagcaataaccagtgcttactatagaggtgctcttggagctcttctggtgtacgatgttaccaagccaacgacttttgaaaatgtgagccgatggctgaaagaactcagggaccatgcagattctaacattgtaattatgatgattgggaacaagactgatctgaagcatctccgagcagttgccacagaggatggtcaaagc

SEQ ID NO: 216770 - DNA, 493 bp, Gossypium hirsutum
cccacgcgtccgatttcatttcatccctaaacatctaaatttaagccacaagctttgaggttttgaccttttgttgggtcattagctttgattagtgggaaaagttctttgtatgtgcagagagaacaaaggctaaagagaatggaagtgggtcagatgcagagaagattggtggactacacaaaatccttgtttatggagggtttcttggatgctcagtttttgcagcttcaacagcttcaagatgagagcaacccagattttgttgttgaagttgtgtctcttttctttgatgattcagagaaacttcttaatgatctcaccatggctttagatcagccaagtgtagatttcaaaaaagttgatgctcatgttcatcaattgaagggtagcagttccagcattggtgcacagagagttaaaaatgcttgcattgcttttcgtagcttctgcgaggagcagaacatcgatgcgacactgagatgtcttcaac

SEQ ID NO: 216771 - DNA, 192 bp, Gossypium hirsutum
cttatgggaagctaacgtcggatgcagcactagacccaccaggcttggtggccatagcggtagctcatgcacttgcgttgtttgttggggtagccattgcagccaacatctcaggtggtcatttgaacccagccgtcacctttggtttggccatcggaggaaacatcaccatcttgaccggccttttctact

SEQ ID NO: 216772 - DNA, 467 bp, Gossypium hirsutum
gaattaacaagatgcttgctgtgcttgagaccaacatcttgtgggttaacccagactgtggtctcaagactcgcaagtatgccgaggtgaagccagccctgaacaacatggttgcagcggccaagctgctccgcacccaacttgcgagtgccaagtgagaggcatatctgaggtcggacatcatcctttatatcgaagatggtccagaggaaatttgtcttaaatcatttgaataactgtgtgttggaagtatttgttaggcgtatcatatgcccctcttttaggccaattgttttcctttttcttttttggttatttaccctctaaatttttgtattttcgggaatatatgaattgccttcaattactttgaaaggcacgaaatttggtagtgtatcttttatgagcctaatgaaaatgtcagtactggctgtggctgtggactgactatattagcttctttctct

SEQ ID NO: 216773 - DNA, 498 bp, Gossypium hirsutum
cccacgcgtccgcccacgcgtccgatcttgctcataatcagttgcagaatgcgctggcgggcatgtttggaccactttcttccctctccacactggatctctctttcaattctctgaacggtggtctccccgagagttttaagaatcttaccagtataaactctatgtacttgcaaaacaaccagttttcaggcactattgatgtcctcgcaaatcttcccctcgatactctagatgtttcgaacaaccgttttactggctgggtacctgatcaactgaaaagtatcaatttgaagaaggatggtaattcatggagctcagggcctgcaccttctcctccacctggtactcctcctgccactagaaatagaaagcacaaatctggcagcgatggttctgcatcagatagtggttctggtggtgggagtagcagctcaggaattggaggtggagccatagctggaatagtgatatcaatccttatatcggggctatagt

SEQ ID NO: 216774 - DNA, 486 bp, Gossypium hirsutum
gccagaaaggcattccatacctcaatacatatgatgggcgtactatccgctacccggaccctgtgatcaaggctaatgacaccatcaagctggaccttgagagcaacaaaattgttgatttcatcaagtttgatgtcggaaatgttgtcatggttactggaggaaggaacagatgcctgttggtagttgttaataacagggtgtttcacatgggtttttttgataactattcatttttaggttgcttcttggttatgagtttgctactatgatttgtttatttgttcatattttgatatggatcgtaattcattgtgtttatcttgtttatggtcaatggttatatagttttccttttactgtagatgtcatgtaattttttttttttccttttatttctaaattgtttcttaagtatatttatattttatattatctattttttattaattttatatattatttttttcttatatatttttcttt

SEQ ID NO: 216775 - DNA, 495 bp, Gossypium hirsutum
  unsure (1)..(495): unsure at all n locations
cgctgcggcggtggaacaagctgcagtgacagtgaacaatgctccaccagcgtccgaggaaccggtgaggatgtcattaatggaattattagaagaaacaagccaacaaatggggctgatgggatccagttacatcataagcgacgccggtgaagagtatgagaaagaggaagtgacggatgaagacgaagacgaaaaagaggtggtgcaaagcagcggtgggatggagcacgcttgttgcgtttgcatggttaggcataaaggtgctgcgtttattccatgcgggcatacattttgtcgtctctgttcaagagaactctgggttcagcgagggaattgcccactttgcaatggctccatcttgggaaatctngatatattttaatctatatttaaatccgcgttatcgnttgttcttcataacaattttatctattctttttcttcattatcagcagggataacaatagttcatgtcttctagtttccaacttt

SEQ ID NO: 216776 - DNA, 392 bp, Gossypium hirsutum
gcacacattgcacaaggttacacagtataagaagggtaaggatagtttggctgctcaagggaaacgccgttatgatcgcaaacaatccggttatggtggtcagaccaaaccagtgttccacaagaaggcaaaaaccaccaagaagattgtgctgaggctgcaatgccagggttgcaagcatgtgtcgcagcatccgatcaagaggtgcaagcactttgagattggtggagacaagaaagggaagggaacatctcttttctaaatgttgtgttcttgttcttgtgtttttgttggttttgagttcaatgctagtatggaatttttgtccaagttttgatttttaattttctcatgttataaaaacattaatgtgaaattcacattttattgtt

SEQ ID NO: 216777 - DNA, 434 bp, Gossypium hirsutum
cccacgcgtccgcccacgcgtccggattcaagcacaagtgatggcccttcgggatggcttcgtctttcattgtatgggaattcacactctgcaggttcagcaaagacaaataccacggggagttatgcttcttccttgccttcgaacctttgtcgccacttctcgtttgctgagatcaaggctgccacgaagaacttcgatgaggccttagtccttggggtgggaggctttggtaaagtttacaaaggtgaaattgatggtgggactactaaagttgcgatcaagcggggcaaccccttatctgagcaaggtgtgcatgagttccagactgaaatcgaaatgctttccaagctccgacaccggcaccttgtttcgttgatcggttactgtgaagagaactgtgaaatgatcctaggttacgactatattgctta

SEQ ID NO: 216778 - DNA, 414 bp, Gossypium hirsutum
cccacgcgtccgactcgctacagattactccgggaacacttaccatctcatcacaaagaactgcaatcatttctgcaatgatgtgggtatccaattgacagggaaaccaattcctagctgggttaatcgacttgctagacttggtttcctttgcaactgtgttctcccagcagagttgaacgagacgagagttcgccaagttagatcagaaagtaagcttcaaccggtagagaagaagttaagaagccaaccaagtaagttcgtaccttcttctaaacctctaccttcttcattgaaatcttgcccttcaggccctgccatgagtagtagacaaaggcgatgtattccatcgtcggctttgattcatagttcttcgacctcgactttgagtttgaagctttaattagaactttc

SEQ ID NO: 216779 - DNA, 367 bp, Gossypium hirsutum
cccacgcgtccgcggtgaaatatattcagtatcaaagggcaatctgtaaagctttactggatagggtccccgatgggaaggcatcagcaataacaactgtattaatggttgttggagcaagacgaggacctctagtgagagcagcattgcaggcagctgaggaaactggacgcaagcttaaagtttatgctgtagaaaaaaacccaaatgctgtggtcacacttcatagtctggttaaactggaagggtgggaaaatgttgttaccatagtttcttgggatatgcgtctttggaatgctcctgaaaaagctgacatcctggtcagtgaattgctgggatcttttggtgataatgagctgtctcctga

SEQ ID NO: 216780 - DNA, 293 bp, Gossypium hirsutum
caaaaagcacgctcttcttccttgtgtaagcggcgccggcaagaagctaaggccagtccacctcggatctctcgtctctgccttccatcgacaacaatctatcttacatgtttcacttcttctttcatcaaagattttgatggcgtcaaaattgcagcagttgcaatctcaggcgtgccaagcttcaaagtttgtggcgaagcacggaactgcttactacaagcagttgttggagcagaacaagcaatacattcaagagccgccgacagtggagaagtgcaacgagttggcta

SEQ ID NO: 216781 - DNA, 485 bp, Gossypium hirsutum
ctcgttcactccattatgcgacacgtggcggagacttggcgtatcgatttgcaggacctgagcatgaaaattgggtggcctctatacgggaaatatggccatgcttgggaggcattcaaaataattgagactgatcctgagtcagtcttgaacaccctcacctgtgaagtcacgaagcctgacccagatggacaggaagtaactgaagtgcttcctgctgctactgaggaagtcaaagatgctttggtaaaaaacattatgagaagaatgactccacaacctttgaagattcgggctgacattgaaatgaaacgtctccagtttgatggtgttcttcacattaaggaggccatgcgcaaagctgaggctgctgtgaatgatgattgccctgttaaaatcaagcttgatgctcctacactttatgttcttaccactcaaaccctcgacaaggagcatggtatagctattctcaataaacaattaca

SEQ ID NO: 216782 - DNA, 325 bp, Gossypium hirsutum
cgacagaacgccttttggtttatccatttatgcagaatttaagtgtggcctatcgtcggcgagaactcaaacccggtgaacctgttttagcttggcccgcaagaaaaagaatagcactaggagcagcacgtgggctggagtaccttcacgaacattgcaatcctaagatcattcatcgggatgtgaaggcagcttatgttttattggatgtagactttgaagcatttttttgggactttggattttttaagtttttttattttatgtcatcttttttgttcaatttatggatttttttttttattttgatcttatattttttatt

SEQ ID NO: 216783 - DNA, 480 bp, Gossypium hirsutum
ctttctttggccctatcaattcaactgttggatctctccttgtcagcttcactgtttacattatcccttcattagcacacatgattacttttgcaccttcatccgcacgagaggttagccatactttttgttcaattatcatcatcattaccctctcaataactattactgatgttttcttctttgttttctgttttgcagaatgcagtggagagaccaccatcattccttggagggtgggcgggcatgtactccatcaacatctttgttgtagtatgggtgttgattgtgggatttggatttggaggatgggcaagcatgcttaatttcatacaacagattaatacatttggtttattcaccaaatgctatcaatgccctcataaggcttgaactatatggatttattatcatcttcttcccaaatgattaacaaagttttaagatacttttctttttaagtgtgtaaagaggttggca

SEQ ID NO: 216784 - DNA, 459 bp, Gossypium hirsutum
aacgtattgaagaagaaaatgaaaggaaacgtttggtggccctgcggaaagctgaaaaagaggaagagaaacgagcacgagaaaagattcgtcagaagttggaggaagataaggcagagagaaggcggaagcttgggctgccaccagaggagccttcagcagcacctaaaccttctgcatccattgtggaggagaaaaagagcgcattgccagttaggcctgccacaaaggctgaacatatgcgcgaatgtttgcgatctctcaagcaaaatcacaaggatgatgatgcgaaagtcaagagagcattccagactcttcttacatacataggaaatgtggccaggaatcctgatgaggagaaattcagaaaaattagactaaataatcaaactttccaggatagagttggatcttgtaaaggagtggagttcttggagctgtgtgggtttgagaaagttg

SEQ ID NO: 216785 - DNA, 287 bp, Gossypium hirsutum
  unsure (1)..(287): unsure at all n locations
cagagtacaatggcccatggaagcctaagaaaatcaagaaccccaactacaatggcaagtggaaggctccaaaaattgacaacccagacttcaaggatgatcctgatctttatgttntccccaacttatagcatgttggtattgaattgtggcaggtaaaatctggaacattgtttgataatatcttaagtgctgatgatgttgagtatgccaaaaagctagctgaagatacatggggcaagcagaaggatgccgagaaggctgcatttgaggaggcagataaaaag

SEQ ID NO: 216786 - DNA, 441 bp, Gossypium hirsutum
acgattcactggaatttattatctagacggtattacagttaccaacaaaggtctacagatggagctggagaaaatcctaactattttcacctccattgacctttcatgcaacaacttggaggggccaataccagatgtgatcagaaaattcaaagcactgtatgttctcaacctgtcacacaatgctctcactggaaaaatcccaccatctctaggaaacttgcaacagctggaatccctggacctctcgagtaataacctgagttacagtattcctcaacagcttttaaagctaactttccttgcagtccttaacctctcctacaatcaactggagggactcataccagatggaaagcagtttgcaacatttactaatgattcttatgaaggtaacaagggactatgtgggaatccattgacgaaacaatgcaacgatgc

SEQ ID NO: 216787 - DNA, 464 bp, Gossypium hirsutum
tcgtccaaccgtcccctctcaactttccaggttccttgctctacatctcctggagaacacagtcccctataacactatgtcctcctctttttcttctttcgctcattcaaatacaagtcagaggacgaagagcacatgataaaggtggacgcaaagaacgcgttggagaactacgcatacaacatgaggaacacagtgaaggatgagaagattggtgccaaacttgctgcagcagataagaagaaggttgaagatgcaattgacgaggccatccaatggttagacaacaaccagcttgcagagtcagatgaatttgaagacaagattgaggaagtggactaagaaatttctctccattcttttcgacccttacatttgttcctttagtcgtttcatgttggtttcttttttattggactttagacatgtttttgaggattttgtttgaagccaatttttgagta

SEQ ID NO: 216788 - DNA, 313 bp, Gossypium hirsutum
cccacgcgtccgcccacgcgtccgcccacgcgtccgcacacgcacagacactctctcaccctttgtatctctatagcctgtgcgtgcagtagtgttcacacgcagcatccaaaatatacaatgaggggacaattagaaggtggtgataatttgttgaaaattccaaatgcatccattatacactgtattcgatttgttcataatgtgagttattcgttgtttttttcccttgaatatatgttcatggtattccaacttgtatcctttttgtaaaaaaaataaaaaaataattaataaaatataaataataaaa

SEQ ID NO: 216789 - DNA, 405 bp, Gossypium hirsutum
aacaaaagcaaccatgtattgaggaagctggagaagcgtcaacaaaatcgcgctcttgacccacatattgaggaacaatttggcagtggtcgtctgttggcttgtatctcttcacggcctggtcaatgtggccgtgcagatggttacatcttggagggcaaagagctggagttctacatgaagaagatccagagaaagaaggggaagggagctgcttaaaaaattattgcatagttttcagcattcatatcagaatgccgcccttagggtttgcctttcacatttccagaacatttaaagttgtgttagcattgaacttttaatctggatccctgagagttattatttttgtattggaatttagattatctttgaactttataaatgcagcttattttggttggt

SEQ ID NO: 216790 - DNA, 492 bp, Gossypium hirsutum
  unsure (1)..(492): unsure at all n locations
ctcactggggtgattctggagccaacaatccagcacctgccacaaattctgctgatgcccagctgaaacaagaactcgcagcaatatttaagaaaattggtgacaagcagacatgcaccattggtctctatgagctttatcgcattactcagctataccctaaggttgatatatttgctcagctccaaaatgctagtgaggcatttcggacttatattagagacggcttagctcagatggagaagaatgctgcagctggaaggactccttcaagtgtgccaatgtcaacccctccccctgcttctctttcttcttcgtcacctgaatttgggcctctgtcccctgtacagaccaactctttaaatgattctaaattatcaagtacaaaacctgaaccaacaagctttaatttgccaccatcatacactgaagactatcgnggggctggtaatgctataaatacagcaagagttcgtgcccctgaaaatgcat

SEQ ID NO: 216791 - DNA, 419 bp, Gossypium hirsutum
  unsure (1)..(419): unsure at all n locations
tcgcccacgcgtccgcccacgcgtccgccatggaccccctgaagctgtcctatgaagctcgagtgcatgcatcccaaaacaagcgcttgcctgtgcagattgttttgcacgcattgtactatgatcagctaaagctaaggagtgggggggcggatgaccgcaaccagccagacgccgtgaccaccaggaatcagttgcaggcagacgtgtcgctggtaaaggagaatgaggcattgcgaacggagcttttgaagatgaagatgtacatatcggacatgcagaagaacaatcaaactggaactagttcaaagagcgttgggaccagaaagcctaccttcttctcttccatgttcaagactctaggcaagctaaatccctttcgacatggcttcaaggacactnttccatatcgatgataa

SEQ ID NO: 216792 - DNA, 467 bp, Gossypium hirsutum
tccttccttcgccgtctactgcacttgtgacatcgatttcaagtgaatcagaatgggtaaggaaaagagtcacattaacattgtggtcattggccacgtcgattccggaaaatcgaccaccactggccacctgatctacaagcttggtggtattgacaagcgtgtgattgaaaggtttgagaaagaagctgcggagatgaacaagaggtcattcaagtatgcttgggtgcttgacaagctcaaggctgaacgtgagcgtggtatcaccattgatattgccttgtggaaatttgagacgaccaaatactactgcactgtgattgatgcgcctggacaccgtgactttatcaagaacatgattactggtacctcgcaggctgattgtgctgttttgattattgattccaccactggtggttttgaggctggtatctccaaggatggtcagactcgtgagcatgctttgc

SEQ ID NO: 216793 - DNA, 340 bp, Gossypium hirsutum
ttcatattgaagtgttctcagatcatgaaagcttcaatttaatggttaaggtacatgccctggtcatatgcaatcacagaagtgatattgattggttagttggatgggttttagcacagatgtcaagttgttttggcagttcataaactatattgaaaaatcatctaaattcctgacgaacaagtttggacaatgtggttttctgagtatttgtttttggaacgaagctgggccatggatgaaaacacattaaaggcaggtctttaactgttaaaggtactttcacggtcatttttgttggcacttttcgtagaaggatactttgttatacaatcaaagt

SEQ ID NO: 216794 - DNA, 494 bp, Gossypium hirsutum
cccacgcgtccggggaaccaactgttacacacagcagcagcagcagcagccatggtgaagtactcaagagaaccggacaaccctactaaatcttgcaaagctaggggttctgaccttcgtgttcattttaagaatacacgagaaactgcctttgcaatccgaaagctacctttgacaaaggcaaaaaggtacttggaagatgttattgcccacaagcaagcaattccattcaggcgcttctgtggtggagttgggcgaaccgcacaggctaagaatcgccattctaatggacaaggccgttggcccatgaaatctgcaaaattcattctcgatttgctcaagaatgccgagagcaatgctgaggtgaaaggcttggatgtagattcacttatcatatctcacatccaagtaaaccaagcacagaagcaaaggcgccgaacatatcgtgcacatggaagaattaacccctacatgtcttcaccgtgtcacattga

SEQ ID NO: 216795 - DNA, 463 bp, Gossypium hirsutum
ggtgaatggacaccctcaacaattcccaacccctagtacaagggcccatggaagccatagaaaatcaagaaccccaactacaagggcatgtgtatggcaccaatgattgacaacccagatttcaaggatgatccagatctctatgttttccccaacttgaagtatgtcggtattgaattgtggcaggtaaaatctggaacaatgtttgataacatcttagttgccgatgatgtagagtatgccaagaaactagctgaagaaacatggggcaagcagaatgatgctgaaaaggcatcgtttgaggaggcagagaaaaagagagaggaggaatcaaaggatgacccatttgattccgatgctgaggatgaatatgatgccgattattctgaatggcacgagtctgattccgataccaaatcagacgatgatgacaaggaagatgctcatgatgagctctaagcac

SEQ ID NO: 216796 - DNA, 272 bp, Gossypium hirsutum
gcacatcaaccgcttcacttttccttcttttcatcttctcaatcacaccaccgtcctttgggttcgaggtggccaacgctacaaattatcctgtgctcgacatcaatggtgactggctccacaggcgttgaatatctacgttgtgtcatcttatttttggtgctgtcggtggggggcttgccctaggcaggtctaccaaacaaccatgcccggaaatcgatgtttatagacgatccgtttcctacaaaggttcaccgtgtatattttctaat

SEQ ID NO: 216797 - DNA, 329 bp, Gossypium hirsutum
attcccggggggagcgccacgcgtccgcactcctatattcatctttcagcataaacgatgtcttcggttggcgaagctgcttgctggtatgctgctttgatggtctatgacgatggcatccccatcaccgctgagaatattgccgcgctagttaaagctgccaaagtctctgttgagtcttattggccaagcttgtttgctaagtcttttgagaagtgcgacattgagaatctcataaccaatgttggtgcttctgctggttaagctacggtcgctgcagcttcaccattttcaactgctggatgaggctgtccttcttcctctgcttc

SEQ ID NO: 216798 - DNA, 204 bp, Gossypium hirsutum
ggggagtttaaagcagcaatatggtctggcatagtcggcaaatgaagtgattttggtgagggaagcttacaaggcccttcgtgaccgatcaccttatcctccaaaccatgtggttggccatctaattgggagctttgcttttattgtcctttgacaaataccaccttcactttgtttgtggcttctgatcaatttggtaaggtt

SEQ ID NO: 216799 - DNA, 433 bp, Gossypium hirsutum
cttcacattgttatcatcgccttggcgttggccttcaaccatgcaagctcttcaaccttctgcttctcttcgaccttcctctctaaaacctcttaaaaaccccaaacccaatccccattttcccaatgtatcaacactccctcccaggcctgccaagaaattctcttccattaccgcttcatcccccactgtttcagctcccaagcgcgagaaggaccccaagaaacgggtcgttattacgggaatggggttggtttccgtttttgggaacgatgtggatgcttactatgaaaagctgctggctggagagagcgggatcggaatcatcgaccgcttcgatgcttccaagtttcctactcggttcgccggtcagatccgggggttcacttctgaaagttacattgatggaaagaacgataggaggcttgacgat

SEQ ID NO: 216800 - DNA, 473 bp, Gossypium hirsutum
gtttcaaattcggcgtgctcgatctaataacaaacatctggaaaaagaatatgattcactggggagctaccttcgataagctcatggctgacttcgacaatctccttaaggagaaagatgatttaaaaaatcatgtgcttacactcaaagagaagctgcttattaaagagacagggatgtaaaatctgggatctgtccaagccatacattcgaccaatgatgaacctcataaacccaatccagatgcatcccatgttccattgctggcctgctaacaggaagaatcatgttcggctcaaagtgatgtttttgactcggacagcccacactatcccgatggccatgggtattattcctcattcatagagcctgcggaatcctctaacgttttcgaaccgtatcaatcagacaaagaagatgatctcatcaaaagccttctgcattcaccattgttctttccaaattcgattgtt

SEQ ID NO: 216801 - DNA, 137 bp, Gossypium hirsutum
cccactcttccgaagagacttgactgcaccttatttagatgatggccttctggaaggtgtgggttttagagatgcatggcatgggctcgtgtttctttctccaaagggacatgtaactcgcctttcacatgcacacc

SEQ ID NO: 216802 - DNA, 443 bp, Gossypium hirsutum
cccactcttccggtgctcgcataaggttccagaggggtctcaagagaaagcccatggcgttaatcaataaacttcgcaaggcgaaaagggaggctccaccaggtgagaagccagaaccagtcagaacccacctccgaaatatgatcatcgtacccgaaatgattggtagcattatcggtgtgtacaatggctagacattcaatcatgttgagatcaagcccgaaatgatcagccattaccttgctgagttctctatttcgtacaagccagttaagcacgggagacccggtatcggtgctactcattcttcaaggctcatccctctgaagtgaagccctttcatgctgcttggagcctcaatttggggtttactatttgagagttatattttgtttgttgcacttctaagtaatgaaaatttcacacagcttttggttgctttc

SEQ ID NO: 216803 - DNA, 361 bp, Gossypium hirsutum
gaattatatatggaggttccgtaaatggagcaaactgcaaggaattggccgcacaacccggtgttgatggctttttggttggtggagcttccctaaagcccgagtttgttgatatcatcaaggccgcgatggtgaaaaagaattagaagttgaaaagcaggaattaaaggtgaaacagaaacaaccttctgggaaactttaatttttgtagttgagatctttccttggaacctaatgtctgttgaaaatttcccgatgtaataagccaaatttaactatgtgttttttttttgcggtggttgaggcattgatcctcatttcggactttccctgaatttacctcacaaattgctattgctct

SEQ ID NO: 216804 - DNA, 447 bp, Gossypium hirsutum
cggacgcgtgggttttaggaaaggtcttgactgctggtgatgatgcggttggtttggagcagttagaagaagatgcagatgatatagcccttcacaaagctcgtcgctctatgggatccatgagtgcaatgtcgggtgcaaatggaatggtctacatggaatacagcactggaaagcataaacttatggggcatggccagaataagagtaaacctaaggatccatccaagcggcatcatttgtttaagaaacgctttggttgagatgaaagccaaaccatgcagaatgatggttgttttatgacaatctacgaggttacttcccgcattgttttgtttaagagatgctatggtcgagatgaaaagcataaacccgaattacgtttggtttatatatatcatctaagaggttccaagaagaagaagaagaagagttttatttcttcag

SEQ ID NO: 216805 - DNA, 492 bp, Gossypium hirsutum
cccacgcgtccggataacttcgtttttggtcagtctggtgctggtaacaactgggctaagggccattacactgaaggtgctgagttaatcgactccgtacttgatgttgttcgtaaagaggctgaaaactgcgattgccttcaagggtttcaggtttgtcattccctgggaggaggaactggatctggaatgggaacactgttgatatcgaagataagggaggaatacccagataggatgatgctgactttctcagtcttcccatctcctaaggtctctgatacagttgtggagccttacaatgccactttgtctgttcaccaattggttgaaaatgctgatgagtgtatggttctggacaatgaggccttgtatgacatctgtttccgcacacttaagctaaccactcccagctttggtgatttgaaccatttgatatctgcaacaatgtctggagttacatgctgcttgcgattccctggtcagctcaac

SEQ ID NO: 216806 - DNA, 407 bp, Gossypium hirsutum
cccacgcgtccgcggacgcttgggcccacgcgtccgctcttggatctgttaaaagcatcggggagtcttttggctcgaaatgttcctccaatttcagaacctcaatggcaacttacaagattaagcttgtaggaccaaaaggtgaggtgaacgagtttgaggcccccgatgataagtacattctaaatgcagctgatgaagcaagggtcgagctcccatattcttgcagagctggagcttgctgcacatgtgctggtaagatgatttcaggttctgtggatcaatctgatggttctttcctggacgattaacaaatggaggaaggttatctgctgacttgtgttgcgtacacaactttagactgggaaattcacacccacaaggaaaccgatccttttctaagtagt

SEQ ID NO: 216807 - DNA, 414 bp, Gossypium hirsutum
cccactcttcctacctgattcaaagaatgcataagttaaccttgagccggaaggagtaggtgatttctctgctactggtggaactgacaataacacatatgagttgaagttggatctttttgataaggtcaatgatggaggaacagcataaattaattgtcggaaataggagcaatattctgcatcttggataaggctgaaaaagtgtggtggaaaaaattattgcgcggtgatggcatatcccttcattacgtcaaagtggactgggacaaatgggtggatgaagatgaagacatagggatttggtgatctcgacttaggaggaatggacttctttaactttgggggaatgggcggcatgggcgacatgatggcctggatgggcgatttgatgggcggcatgggagacatgat

SEQ ID NO: 216808 - DNA, 430 bp, Gossypium hirsutum
aaaaaacttgcaatgctcttcttctcaaggttaatcaaattggatctgttaccgaaagtatcgaagctgtcaaaatgtccaagaaagctggatggggtgtgatggccagccaccgcagtggtgaaactgaggatacatttattgcggatctttcggtcggtttggccacgggtcaaattaagaccggagctccatgccggtctgagcgtctagctaagtacaatcagcttttgcgtatcgaggaggagctcggttcggatgccatctatgccggagctagtttccgtgctcctgttgaaccttattggagttggtttgatgataaagtttgttgcgactggatgtgcgcgatagagctctacttccaatgaataagttataataacacatagtgggttagtcaagactttttctttttcaataaatttga

SEQ ID NO: 216809 - DNA, 496 bp, Gossypium hirsutum
cccacgcgtccgcccacgcgtccggttcgatcccattcacatgggattgggtgtgggcagtgttattaatgactcaaaccagaggcaagcaaattggattcctatctcttgggaggcatccatgggtggtcctcttggcgaggtattgcatagtactaacagcagcacaggtgagtgtaagagctcatcggcacttaacctcatgacagagggctgggatagtagtcctcggttaggatcatcacctaccggtgtcttacaaaagacttccttcggttctctttctaatagcagtgcgggaagcagtccaacagcggagcacaacaagacacatgaaggtgctagtctttgcaataacctccttggttcagcccttgttcagtcttcctctctacctgcttcttgaatccacttcactaggttgtgggaggagaaaaatggagaaatggaagcatggatttttatatctattgacaaacatggaacaattaattat

SEQ ID NO: 216810 - DNA, 490 bp, Gossypium hirsutum
gttatccatatttttcaagccaggtgaaagattctctgagatcgttggaagtccatattatgtggctccagaggtgctcaaacgaaattatgggccagaaattgatatatggagtgctggagtcattctgtatattttgttgtgtggggttcctcctttttgggctgagtctgaacaaggcgttgcacaggcaattcttcgtgggttaatagatttcaaacatgacccatggccaaatatttcagagagtgctaagagtctagtccagcaaatgttggaacctgacccaaagcttcgactcactgcaaagcaagtgcttgagcacccgtggctccaaaatgctaaaaaagctcccaatgttcctcttggtgatgttgttaagtcaaggcttaaacaattttcaataatgaacagattcaaaagaaaagctctgcgggttattgctgagttcttatctgttgaagaagttgaaggcatcaaagaaatgttc

SEQ ID NO: 216811 - DNA, 482 bp, Gossypium hirsutum
attattttttgataatccggagttcaatcatctaaaagaagccctaaaatccttgaatcaggtgtgagcttgtggtttgttaggcctctttgatcaaactaagtttcatgtctgatcttgacgttcaaattcctactgcctttgatccctttgctgatgcaaatgctgaggactcaggtgcgggtgcaaaggagtatgtgcatattcgtattcagcaaaggaatggtcgcaaaagcctgacaactgtccaggggttgaagaaagaattcagctataacaagatacttaaagacctgaagaaggagttttgctgcaatgggaccgcggtccaggaccctgaactaggacaggtgattcaacttcaaggtgaccagcgtaagaatgtatcaaccttccttgttcaggctggcatagtgaagaaagaaaacatcaaaatccacgtgttctaagcctgcgcggtggaagcaggaaatactatctga

SEQ ID NO: 216812 - DNA, 458 bp, Gossypium hirsutum
cccacgcgtccggcctggctacccttggatcattggtgggattgatattcctcatgagggaggctgtgaatctcattctgatggatatgtactgcttcattgcgttggggacgcaatattgggaggtttagggctacctgatataaggcaaagttttccagactctgatcccaaatgtaaaggagctccatcttcagttgtcattatagaagctgtgagactcatgcatgaggcatgttacaagattggatacctagatgccaccttatttctttacagaccgaaactgagttcacacaaaggagttatcagagccaatttgtctgagcttttatgcgccgacccatatgtcatcaatcttaaagccaagactcacgagaaggttgacagccttggtgagaatcgaagtattgcagcacacactgtggtcttactcatgaggaagttaatactggtat

SEQ ID NO: 216813 - DNA, 483 bp, Gossypium hirsutum; identical to SEQ ID NO: 192055

SEQ ID NO: 216814 - DNA, 495 bp, Gossypium hirsutum
caattatccttgatggcgctggagacaaggctaccattgaagaaagatgcgatcagataagatcagcaattgaatcaagcacttctgattacgacaaggacaaattacaagagaggcttgcaaagctctctggtggcgttgcagttttgaagattggaggagcaagtgaagcagaagttggtgaaaagaaggatagagttactgatgccctaaatgccacgaaagctgctgtggaggaaggaattgttcctggtggtggtgctgcacttctttatgcctctaaggaacttgaaaacctggagactgcaaactttgatcagaagatcggtgttcagatcatccaaaatgctcttaagatgcctgtacatacaattgcatctaatgctggagttgagggtgcagtggttggtggaaagctactggaacaggacaatcccgacctcggttatgatgctgccaagggtgagtatgtagatatggttaaagctggaatta

SEQ ID NO: 216815 - DNA, 463 bp, Gossypium hirsutum
  unsure (1)..(463): unsure at all n locations
cggacgcgtggggcaagacttggtgatcttatcaggggggcataccatcggagtaggccactgcaataccttcagcaacaggctatacaactttactggaaatggagatcaggacccttccttgaatgcaacctatgcaactttcttgaagacacaatgccaaagcctcagtgacagcacgaccttcgtggcgatggatcctggtagtgggctaacatttgataataactattatgtcacacttaagcaaaacaagggtctgtttcagtccgatgccgcccttataacgcatgaaatctcgcgcatcattgttgatgagttgcttgtctcagaagtattcttcagagagtttgcactgtcaatggtgaagatgggaagccattgagttctcacagggaatgaaggagagattaggaagaaatgttccgttgttaactaattcctgaaagattntgctcatgta

SEQ ID NO: 216816 - DNA, 446 bp, Gossypium hirsutum
cccacgcgtgcggtagcacttcttgaccttatcaccactgcactccatcatgggatgccagtggggccccttcagcaagcggctatacacccatcctggagatggagaccaggacccttgcttgaatgcaacctatgcaactgtcttgatcacacagtgccaacacctgagtcacagcacgacccttgtggctatagctcctggaagtgcactaacatgcgattatagcaaatatgccacactgcatctaatcacaggagtgcttcaatccgaggccaaactgttctctcatgaaataacccgcagaagtgttgctgacttgcttgtctgataagttttctgcagataggaaccactgtctatggtgaaaatgggtgccatcgtattcctcactggtgatgaaggagacattagaaagaaatgatccgttgttaactaattactga

SEQ ID NO: 216817 - DNA, 474 bp, Gossypium hirsutum
cccacgcgtccggttcgaatgataactgctgtcaccactgagagtgctttgaaggcaacggagttgggtggcctgcttttgaaggaagtacatgatgcttccaatatggaagtaagcttgctggaaaagaaagtggcttctctaaaaaatactgcggattctgcatcaattcctgctgcccagaatgctgattttagggcctaaattgcacaactttcttattcaactgataaaagctcaaaagaagattgctgaacaaaatatgcagagagctgtcgcgacagcaacctaattgactgaagttgctgccaaagagggaatgaacttctgtgtcactcggattgatgtcgggattagatgctcctgctctccgataaacggcttcaaaagtttttcagcaaaagggtgtgccggttatgggttttagtattgaccaaaccccataacaggctgacgtttatgctgtgtgtcccg

SEQ ID NO: 216818 - DNA, 475 bp, Gossypium hirsutum
  unsure (1)..(475): unsure at all n locations
attttgtgagtgttaaacattgtttgcctttcatttctttctctattccttgttgcttgctcggcagcctctcgggttctgagtaatataaaaaaggatggggctgtcttttgctaagctgtttagtcgactgtttgccaagaaagagatgcgaattcttatggtgggtcttgatgctgctggtaagactaccattttgtacaagctcaagctcggtgagattgtcactaccattcccaccattggctttaatgtggagaccgtagaatataagaacattagcttcactgtttgggatgttggtggtcaggacaagattcgacctttgtggaggcactatttccaaaacactcatgggctaatctttgttgttgatagcaatgaccgtgaccgtgtggttgaggccagggatgagctctcatcgatgctaaatgaggacaagctganggatgctgtgcttcttgtgtttgcaaac

SEQ ID NO: 216819 - DNA, 487 bp, Gossypium hirsutum
gtcgtatgttgggccatggaactttcgctaaagtctaccatgctcggaatcttcagagggggaaaagtgttgccatgaaagttgttggcaaggagaaagtgattagagttgggatgatggagcagatcaagcgagagatttccgtcatgaagatggtgaaacaccccaatattgttgagttgcatgaagtcatggcgagtaagtccaagatttactttgccatggaacttgttcgaggcggtgaactcttctcgaaaatcgccaagggtcgactcaaggaagacttggcaagagtctatttccaacagttggtttccgttatcgatttctgtcatagccgtggggtttaccaccgtgatttgaagccggagaatttgctcttggatgaagatggctgcttgaaggttacagattttggtctcagcgctttctctgagcacttgaaacaagacgggttattgcacaccacatgtggaacgtcggctta

SEQ ID NO: 216820 - DNA, 448 bp, Gossypium hirsutum
  unsure (1)..(448): unsure at all n locations
aaacaaaccactctcacattaaatattgttagtgaaacaatggcgtcttcagctctgataagtgagcttgaggcagatgtagagattaaggcttctcctaagcagttccatgaaatgtttgcccacaaaccgcaccatgtgcaccatactngttatgacaagattcaaggatgcgatttacatgaaggtgaatggnggaaagtcggtaccattgtccattggagttatgtgcatgatggaaaggctaaaaaggcaaaggaagtagtggaagcagtagaccctgataagaatttggtcactttcagagttgatcgaaggaagatctaatggaaagagtataagagcttttgtaatcacgattcaagtttcgcccaagagcgagggtagtgcgagcgtattgcactggacttggaatacgaaagctgacggtgggattgcgcattctgag

SEQ ID NO: 216821 - DNA, 457 bp, Gossypium hirsutum
  unsure (1)..(457): unsure at all n locations
atccaaaactaggagtgtctgtcaaaagtcccatagctctacacgccagcaggctacttcggatcaccgctctgaagaatcgaggcgtatacagtgcaccaagtgtggtaattcacatatatgggtttgcacaaataggaacaaggccaaggctagatggtgtcaggattgctgtcaatatcatcaagccaaagacggagatggatgggttgagtacaaaggttccttggtgtttgataggcctcaaaaagtggaaataccacgggcttttgtttgcgctgaaagcaagatctttgatgtttcagaatgggctatctgtcanggaatggcttgtagaccaaacacgcatcgacctagcttccatgtaaacatggttggtttagaaaagacccanagatcaaagtcgagccgatatccttgggatttggatgctgaaatgatcgacgaagatgaagaa

SEQ ID NO: 216822 - DNA, 485 bp, Gossypium hirsutum
  unsure (1)..(485): unsure at all n locations
cccacgcgtccggaaaatggctgcttcggagtttagtgccggtgaaggcagtgtgaatggtgaggttgttaaggtgaggaatttgcggcacggcggcggtggtgaggtcggtggtttcgttttgtggcaaaaaaggccggagctttggtgccttgaactggtggtttccggctgtaaaatcagtgccggtagcgatgggaaagtggcttggagacaaacaccttggcaccattctcatgcttctagaggtccacctagacccctccggcggttcttacagggtcttgatccgcgatcgacggcaaatctgttcacgaattcggtttgtgttggtgagaaaacgatcgatgacgaagactgtntcgtcctaaaactggatgccgaaccttcggctttacgagctcgaagcagcagcaacgtagagatcattcgtcacacggtttggtgttgctttagccaaagaaccggtctcttgatccaactcg

SEQ ID NO: 216823 - DNA, 315 bp, Gossypium hirsutum
tctctacaccactttaacgtactcgtgctagagacgagaggctgatattggaaatacagacccagatctggcgccagtttgaggaatcaaatgaagaaaatagatgtcacgcaacacatcaagtacttgtgcgagttctgaggaaagtatgcaattgaacagaaaggctgttggaatattgtgctgcaaagattgtaggaaaatctaaagcctggggtgcgtatacttagacactgctagcgctgtgacggtgactagtaccattataaggttgatggaacacactgacagctgtaccaataacattatcatacc

SEQ ID NO: 216824 - DNA, 457 bp, Gossypium hirsutum
cggacgcgtccgcccacgcgtccggctgttcgtgctgtcatagaatttgtgaaggcacctgacacgtttcggtgtgatctattagatatgcctgctgtagggcaattggagaaggatgctaaatatgcactggtttatcagcttctgaagatctttttgactcagcgattagatgcctacctggaatttcaggctgcaaattctaccttaatgaaaagctatggtcttgttcacgaagattgtataacaaagatgaggttgatgtcattggttgatcttggctcttatgaatctggacaaattccatatgccctcatcaaggatactcttaggatcaacgatgatgaggtggaattgtggattgttaaggctataactgctaaagtaatcgactgtaaaatggatcagatgaaccaggttgtgattgtaagccgctgtactgaacgcatttttggac

SEQ ID NO: 216825 - DNA, 353 bp, Gossypium hirsutum
cagattctccctggtaatgtatacgccatcaatgatgcactgtctgctgaaggtgcaggcggtgattatgagacttgtctcaagcacttggtgaagagcaacgtgcttagtgtctcaacagctactgggtttcctaagtttgatctcatgcttctcggaatgggaccggatggacacgtggcttccctctttcctggccatcctctggtgaaggagaacgaaaagtgggttaccttcattaaggactcaccaaaaccgcccccggagagaatcacctttactttcccagttatcaacttatctgctcacattgcacttgtgatctgtggtgcttggtaagctggtgcggtgca

SEQ ID NO: 216826 - DNA, 461 bp, Gossypium hirsutum
cccacgcgtccgaaaatgggaaaaggaactggaagctttggaaagagaaggaacaagactcacacgctgtgcgttcgatgtggtcgccgaagcttccatctacagaagagccgttgcggtgcttgtggctaccctgccagtcgcatccgaaaatataactggagcgtgaaggctattagaagaaagaccaccgggactggccgcatgaggtacctccgacatgttccccgaaggttcaagactggctttagagaaggtactcaagcaactccaaagaagaagggagcagttgctgcttcgtaagttaatttgtgatgttttcgttttgttcagagagattcctgaatttagaaacgataggtttttgggtttctttcaactgtgttactttcttatttttcaccaaatgtctacaaacgggaagttttgttttatattatgagctgtcacgactttatttc

SEQ ID NO: 216827 - DNA, 407 bp, Gossypium hirsutum
  unsure (1)..(407): unsure at all n locations
cccacgcgtccgcccacgcgtncgggagggcttcttggaggattatctcttctattgagcagaaggaagagagcagaggaaatgaggatcattttgcaaccatcaaggagtataggagcaagattgaagctgagctcagcaagatatgtgatgggattttgagcctccttgagtctcacctcattccttcagcttcatctgccgagtccaaggtgttttaccttaaaatgaagggtgattatcataagtatcttgctgagttcaagactggtgctgagaggaaggaagctgctgagagcactttgttggcttacaagtctgcacaggatattgctctcggtgacctaacgccaactcacccaattaggctgggacttgctcttaacttctcttgtttctactatgaa

SEQ ID NO: 216828 - DNA, 447 bp, Gossypium hirsutum
cccacgcgtccgcccacgcgtacggaataatttatgtgatgtcggcattgatcaaccgtgggcgcctctctgcgacatcaagggcagctatgtttctcagtttgaacacaccatcctactgcggccaacctgcaaagaagttatatcgagaggtgatgactattaaggtggaagaccaaaaagtttagttggtaatcatctcctcaaatattttgcgaataattttagttgtgtactttatgtgttttttaacataaggaaggttcctaaatagtggatgatacccatgtttgtcacttgtctgtactcttgctttgccgtgtttgatgatagatggtgtgattgagacttgaatcatgcaatatattgtgatgggaaaactagaatttttccattgcagtcaaagttatgtcttacttctacaaaacatgaatgattttttcttat

SEQ ID NO: 216829 - DNA, 296 bp, Gossypium hirsutum
cccacgcgtccggagcttttgtcgggagagaaggaaggccttcttcaactaccaactgagcggggttctcctgtcagatcctgttttccgtccattggttgaaaaatatgctgccgatgaggatgccttctttgctgactacaccgaagcttacctgaagctctctgagctaggatttgctgatgcataagctgatggttgcggaatagaattgaacctacaacatttgccttcacaaaatgaatgtatcgggttttgtcatttcttaatagtttattggccagttgtttgcttga

SEQ ID NO: 216830 - DNA, 445 bp, Gossypium hirsutum
  unsure (1)..(445): unsure at all n locations
cccacgcgtccgcccacgcgtncgggaagaacttcaccgtgaaacatgccacantgatcaaaagcacttcatcagtatgattgcctgagagctaacaaagcaacatcagcgtggggattggaggctcgagtacccttcttagacatagaatttatcaacgttgccatgtctatagaccctgaatcaaagatgatcaaaaaggatcaaggacgcatcgagaaatggattcttagaaaggcctttgacgatgaagagcgtccatatttgccaaagcacatcctctaccgacaaaaagaacaatttagcgatggcgttggttatagttggatcgatggtcttaaggcgcatgctgccaaaaatgttactgataagatgatgcttaatgcttcttacatatttnctcacaacacgccaacgacaaaagaagcatattactacaggatga

SEQ ID NO: 216831 - DNA, 447 bp, Gossypium hirsutum
  unsure (1)..(447): unsure at all n locations
tgcctttcatttctttctctattccttgttgcttcttcggcagcctctcggtttctgagtaatataaaaaaggatggggctgtcttttgctaagctgtttagtcggctgtttgccaagaaagagatgcgaattcttatggtgggtcttgatgctgctggtaagactaccattttgtataagctcaagctcggtgagattgtcactaccattcccaccattggctttaacgtggagaccgtagaatataagaacattagcttcactgtttgggatgttggtggtcaggacaagattcgacctttgtggaggcactacttccaaaacactcanggtctaatctttgttgttgatagcaatgaccgtgaccgtgtggttgaagccagggatgagcttcatcgtatgctaaatgaggacgagctganggatgctgtgcttcttgtgtttgc

SEQ ID NO: 216832 - DNA, 439 bp, Gossypium hirsutum
  unsure (1)..(439): unsure at all n locations
ccggccggaattccggtcgacacgcgtncgccacgcgtncgccacgcgtcggatattctgatgttctctatcttgattgtgttcacaaaaagtatttggaggaagtttcttcttgcaacattttcgtggtgaagggtaatgtcatctcaactcctgcaataaagggaacaatcttacctggcatcacaagaaagagtataattgatgttgctcgaagccaanggttccaggttgaggagcgttttgtgccagtagatgaattgcttgatgctgacgaagtgttttgcacagggacagcagtagtagtgtcgcctgttggcagcattacatacaagggtaaaagggtaccgtatggcgtaaatggttttggggcttgtgcacaacagctctactctgtgcttaccagactacagatgggtcttatagacgacaagatgaa

SEQ ID NO: 216833 - DNA, 366 bp, Gossypium hirsutum
  unsure (1)..(366): unsure at all n locations
ccacgcgtccgagagtacagtgcagttatggagcttgttgcatatgtgcagttagtgttaaaaagtgcaatgcgggtttatgggttttctctcgaggtcaggtctgaagcaaggaaagtacatgatctgttttttgatttgttgaaaatcgcatttccggatactgatttccgagaagctagaaatgctctctccttctctagtctggtaactacctccaccatgggctcatctgccagacaagctgcttgtgacaagaagcagaagctgataaatgaagtggaatctgattcangactcactcaaaagtcattgcaacgccggtccagtcatgctggtgaggacacaagggttagagtgcacatg

SEQ ID NO: 216834 - DNA, 349 bp, Gossypium hirsutum
gtgatgacgtttatgcttggggtttcattcccaaaaccaagtatgccactgttaaattccataacccacgtgttcaagaggatcccacctgtggtccattgttggatgcggttgctattaaggagcttgtccgtcccagagctaccagatataatctggtgaagaacaatggctttgaagagggtcctcatcgcctagtcaactccaccaatggtgtcttgctcccccctcggcaagaggatttcacattcccactcccgggctggatcattgaatcacttaaagccgtaaaattcatcgatgcaaagcacttcaacgtcccggcgggacactccgcaatcgagcttgt

SEQ ID NO: 216835 - DNA, 350 bp, Gossypium hirsutum
caaagcttaggaagatattggatggcttatgcaaagggtaactgcggtacttgtagttacttggggacattccgaactacaaagtgccagagtggttgtgaccagccaacccaaagatggtaccacgttccaagatcatggctaaagccaacaaaaaatttgttggtagtctttgaagaacttggtggagatgtatcaaaaatatctcttgtgaggagatcagttttataaacattgcctagacaacaccacaagtctgggagctgggaaagaaaacaaggtgcaagaatataggtggagaagacatcccagattcacttgctaaattctttttcactattgttttattt

SEQ ID NO: 216836 - DNA, 400 bp, Gossypium hirsutum
  unsure (1)..(400): unsure at all n locations
cccacgcgtncgcaaaaatgcaaaaaggaagagcttcgagcacgagcaaaagggttgaaaactcttggtaaaatcttccagagtgtcaagtcaacaaatggaaatgagagtgatcctgtgctaggcaataatgcaagacataaattagatggagttgagccaagttataacagtggttctccaaatgtatcaacaaagtcctcatcccgggaagaactatcttcttctccattggcaccacagagcccatacgtggaggcccctaactttgttaatgctcaattgccgaggccaacagcaccgcctggtgcacaaagacatccattacctgaagagatggagaggctttgattcgaaaaggatacgcttgattatacaactatatcatcttgtatcaata

SEQ ID NO: 216837 - DNA, 450 bp, Gossypium hirsutum
ggttgtggagaccttttctgagtacccacccttgggccgatttgctgtgagggacatgcgtcggaccgtggcagttggtgttataaagaatgttgagaagaaggacccatccggtgccaaggtcaccaagtctgctgctaagaagaagtgaaccgtgctggttaaatctaatgaagtttccgcagatggagtattttattatcataataatagtttgatagactttatcatttatgatatagttggtcttttgcttggttttgcatgttatagtgtgttgccattgttgtctggtaactgttctcagtattgggtgcttgacagacggtggcatatctatgggtggtctttagcgttatctggttttgtttaatttactactgtatcttgtcatttgtcaagaggtgcccccttggttttccaatggggcttgaaacttttgtttatgat

SEQ ID NO: 216838 - DNA, 471 bp, Gossypium hirsutum
  unsure (1)..(471): unsure at all n locations
cccacgcgtccggccaaaaattgtaagtaatgctgaggtcattggtaaaatcgccaaagggtggcctctttttggtgtcccgattgcaggatgtcttggtgatcaacatgctgcaatggttggtcaagcttgccgtangggtgaggccaaatgcacttatggaactggtgcctttatcctgctcaacacgggtactgcacccattaagtcaacccacggcctcctaaccacgcttgcattcaagcttggtccaaaagcacagacaaactatgctttagagggctctattgctattgctggagctgcagttcagtggctaagagacagtcttgggataatttcctctgcaagtgagatagaaagcctggcatcaaaggttgattgcacaagtggggtttactttgttcctgcctttaatggtttgttcgctccatggtggcgagatgatgctcgtggaatttgcattggaat

SEQ ID NO: 216839 - DNA, 374 bp, Gossypium hirsutum
  unsure (1)..(374): unsure at all n locations
cccacgcgtncgcaccagttcttttcgccgctttccaaagtcaaagaagaacaagagaatggaatgctggaaccggtagattataaggaaaaccacaggtccaaggaatctttcattaatatagcagcaggagcacacgaagaggctagtcatcgtgttggatccgacgagagacaaccacttcttcccacttaaagttttagggaggagggaatttgttttggtagggacccacgtattgttggatagtgacagagataaaccagttttcgctcgagacgttaaatggaattgaaagaaatttgtgaaatgagaaacccttaaagtgtagtcatttgttataattttcgntcatgggtctgaatggatgcttg

SEQ ID NO: 216840 - DNA, 412 bp, Gossypium hirsutum
cttctttcgccaaacaaacgcgagatttgtagatttatttctcgtctatctgcctccgaatcgatgattttgcaatcattatggacctgggcaactagatacaagaaggtatggtgagcaatatgctagtaaaggagaagatgtagattgtgctttgcttcctgagcagacacctttctacaaagatctggctgctgtggctattcaagcaagtgtatgcgtggacatttttgctgttacaaatgagtatacagatttggcatctcttaaatttcttagcatagaaagtggtggctctttgttcttatatgcaaatacagatgattcaacaattcctcaggacatgtaccgaatgctaagtcgaccatatgcttttacttgcgtactaagattgaagacatctactgaattc

SEQ ID NO: 216841 - DNA, 432 bp, Gossypium hirsutum
gagaggcttcttccgtggttgggttcctacccttcttggttacagcgcacagggtgcttgcaagtttggattctatgagttcttcaagaagtactattctgaccttgctggacctgaatactttgccaagtacaagactctcatctatcttgccggctctgcatctgctgaggtgattgctgatgttgcactttgcccctttgaggcagtcaaggtcagggttcaaacccagcctggttttgctaggggtctgtctgatggtcttcccaagtttgtcagatctgaaggtgctctcggattgtacaagggtattgttcctctttggggccgacagattccatataccatgatgaaatttgcttcttttgaaactattgttgagatgatctacaagtatggtattcccactcccaaggagcagtgcagcaaaaa

SEQ ID NO: 216842 - DNA, 349 bp, Gossypium hirsutum
attgtgtcataatggttccatccaacctcagggagctggagaagaagaggaaggaaagggctcaggttgcatatgagaggaagaagcagctgaacaagcttagggtaaaagccgagaagactgtagaagagaaactcggctctcaactcgacatccttgccccagttaagtactgaatttctagtggctagctagtttcatacaattttgttaaaggttattggtttcactatttagttccgtttgagatgtggagtttaaaatttttgttgaatcttgggttgtcccttttttttaatgaactttttggtgtaagatcattcgaatataattcatatatgctttttat

SEQ ID NO: 216843 - DNA, 405 bp, Gossypium hirsutum
  unsure (1)..(405): unsure at all n locations
cccacgcgtncgttattttcgtggttgatagcaatgatcgtgaccgtgtggttgaagctagagatgagttgcacaggatgttgaatgaggatgagttgagggatgctgtgctgctagtatttgcaaacaagcaagatcttccaaatgctatgaatgctgctgagattaccgacaagcttggccttcattctctccgccagcgtcactggtatatccagagtacatgcgccacatctggtgaaggactgtacgagggactggactggctctcaaacaacattgcaaacaaggcatagatggcgtaattgacttgtctgtctcagaaaatgccagcccctttcggaattattgatgtttctacgtccgttaaaatgttttggtttttcatgttcttttgtttcttgc

SEQ ID NO: 216844 - DNA, 464 bp, Gossypium hirsutum
caaagcttaggaagatattggatggcttatgcaaagggtaactgcggtacttgtagttacttggggacattccgaactacaaagtgccagagtggttgtgaccagccaacccaaagatggtaccacgttccaagatcatggctaaagccaacaaaaaatttgttggtagtctttgaagaacttggtggagatgtatcaaaaatatctcttgtgaggagatcagttttataaacattgcctagacaacaccacaagtctgggagctgggaaggaaaacaaggtgcaagaatataagtggagaaaacatcccaagttcactggctaaattctttttcactatttgtttatttggttacttaagcagccggcattaaactcaccatgcattaaaagaatgctcttgtaagaaaatggggctgatgggaaactaaccctgtaatatctgaggttgaaaaaccattttt

SEQ ID NO: 216845 - DNA, 438 bp, Gossypium hirsutum
ctcgcctgtacttacgccgcgttgattctccacgacgatggaatctcaatcaccgccgagaagattgctacattggtgaaggcagcgaacttgagcgttgaatcttactggccaagccttttcgccaagctcctcgagaaagtcaacgtcgatgatctcatcaccagcgttggctccggtggtggtgctgcccctgttgccgttgctgctgcttctggtgcagctggcggtggtgctgctgcggcagcccctgctgttgaggagaaaaaggaagaagagaaggaagagagtgatgatgacatgggattcagcttgtttgactagacacaattcttcccaatttggatttttcttttgttttgttggttgaaattgcggaaaattatgactcgttttaacattagttgaattttgtattgggttttgagaacttttgca

SEQ ID NO: 216846 - DNA, 471 bp, Gossypium hirsutum
cccacgcgtccggtagggtgctatagtctactcaagtggtcgtgtctccatcattttcgtggatgagccaacttcagggcttgatgcaagagctgctgcaattgtcatgagaacagttaggaatacagtggacactggaagaacagttgtgtgtaccatccatcaaccaagtattgacatatttgaagcatttgatgagctattccttatgaagcgtggaggacaagagatctatgtggggccattaggacaccattctagacatcttatcaaatattttgagggaattcaaggagttagcaaaatcaaagatggctataatccagctacttggatgttggaagttacctcaacagcacaagagttatctttaggcgtcgaatttgctgaattctacaaaaagtcagacctattcaagagaaacaaaactcttattgaagattaaagtaaaccagcttctggtgcaaaagg

SEQ ID NO: 216847 - DNA, 464 bp, Gossypium hirsutum
cccacgcgtccgcaaggatttgaaggccgaccctgaagacgaattcctcaaattgctgagagctgcaatcaagtgcttgactgtccctgagaaatattttgagaaggtgctacgtcaagcaatcaataagctgggaacagatgaatgggctcttactagagtggtcgccactcgggcggaggtagacatggtgcgtattaaggaggaatatcagcgaagaaacagtgtgaccctggaaaaagcgattgctggagatacctctggagactatgagaaaatgctgcttgcgttgattggagctggagacgtctgagctgctttcctatattgagttgttggtatgaaaatttagtttgcaatttgaggtgtgagttatgtttgtttggttgggttgtgtgaacatggcttttgtatgccgctgcttccgtgttagaacgttcaaagatgatgtgtttgtggatata

SEQ ID NO: 216848 - DNA, 254 bp, Gossypium hirsutum
gcgtccgcccacgcgtacgaccacgcgtccgaccacgcttttcggaatatgactggacattttacagagggaatggattccaatatatgatgtagcacctattctcacatctatccagacattgttgtgtgatccaaacccaaactcacctgcaaactcaaaagctgctatgatgtttattgagaacaagcgtgagttcaacactaaatgaacggagaatgttgagcataactggacaatggactaactccata

SEQ ID NO: 216849 - DNA, 448 bp, Gossypium hirsutum
cccacgcgtccgtgagcttccaatttgcaaggaaggcgatttgataatggagcaactggtggggctgagtagcaaaggatgcggatgcttggtggttatagatgatgaatatcacttgcttggcacatttacagacggtgatttgcggcgtactcttattaaggccagtggagaagcaatattcaagctcagagttggagacatgtgcaacagggaaccgagaaccattggtccggatgcaatggcagtggaagccatgcaaaagatggaatcaccaccttctcctgtacaatttctgcctgttattgatcatcaaaatgtcttgattggcattgtcattgcatggattagtgtcaactggcctttgagaagtatgtctggatttcaatgtgacataagtgttgactagaaattatggtcaaactatgataggatcttatgtatactg

SEQ ID NO: 216850 - DNA, 452 bp, Gossypium hirsutum
cccacgcgtccggctcatgaattctggaggtcagattcaccgtcttgctaaatcagtttacaaggttgaggctgaagctgtagatttgatggacggactgcgagaaatccctggaagggaggcattgaaactacgagcagaggttgcttcaatggcatcacttttgaggcagcaaagggtttcacttgacagaaggataaggaaaatatctgagttggggatacctgtctgatacactgtgtgtggacctctcttgttatatttgatattatttgataaggatttttgaactgatgctgcattttctagatcccatgttactcatagagattaaacttaattcggccgaaataatctatctagtacaattgaactgtgagtcactaaatcattttgctatgtatgatttttagatcaaggaatgggaaagaattctttcttctttttggtgc

SEQ ID NO: 216851 - DNA, 403 bp, Gossypium hirsutum
  unsure (1)..(403): unsure at all n locations
cccacgcgtncgcccacgcgtncgcccacgcgttcggccaaagcagtggaatgaggaccatatcatttggcgttttccattcttccgctcttttgagattgagttcacaagatctcagatcatagctgcaatccctggaacctttttctgtgcatggtatgcctcgcagaagcattggctggctaataatattctgggtcttgctttctgcattcagggaattgaaatgctttctcttggatcatttaagactggtgccattctcttggctgggctttttgtatatgatattttctgggtttttttcactcctgtgatggtcagtgtggcgaagtcttttgatgctcctataaagcttttgttcccaacagcagactctgcacgaccattttncatgcttgga

SEQ ID NO: 216852 - DNA, 436 bp, Gossypium hirsutum
caagaatgtccaaggacagtttcctgcgctgatatcgtctctctttctgctagagatggcattgtcttgcttggaggaccacgcattgagatgaaaaccggtcggaaagatagcaagagaagttaccttccagaggtagaaaataccatccccaaccacaatgattcaatggagttggtgctttcacgctttcaatccattggcatcgacacccaaggagtagtagctttactaggagctcactccgtaggtcgagttcattgtgtaaacttagtacacagactctaccccacagttgatccgacattggaacctgactatgccgagtaccttaaagggaggtgtccgacacccgaccctgatccggaagcggtgttgtactcgagaaacgaccgggaaacgccgatgattcttgacaatatgtactacaaaaact

SEQ ID NO: 216853 - DNA, 362 bp, Gossypium hirsutum
ctttctttccttttcctgtaaaaatggagggttcctcctctgagaagctgatcattgtgacccgtgaacctgatgggatcgctactgttaccatcaatcgacccaaatctctcaactccttgacccggcccatgatggtggacttggccaaggctttcaaggctcttgcgaaggacaactcggtgcgggtcatcatcttgtctggagctggacgggctttctgttcaagcgtggatttgacggctgcacaagatgttttcaagggtgacgttaaggacccggagacggatccggttgttcagatggagcaatgccccaaaccaatcatcggagctatcaacggccttgctattactgtcggc

SEQ ID NO: 216854 - DNA, 464 bp, Gossypium hirsutum
  unsure (1)..(464): unsure at all n locations
agagactactttgagcttgttttgattagcaatgtaggtggggcaggatccatccaatccgtatccgttaaaggctctaaaactgggtggatgtcaatgtcaagaaactggggagctaactggcaatccaatgcctacctcaaccgtcaatcgttgtcgttcaaggtcaccactaccgatggtgttacccgactgttccctgatattgtgcctgcaagttgggggtttggccagactttctctagcaaagtacaattctaagctcactaaaagctttagttcccggcggaggcgtgctacattattttacaaaaaagctgcccgccatacatggtatttatcgatacatcacatggtcaataatatcangctacttgtttttcttgagaactggttgtttaaatggaagtgaaatctttgtttttgatacaagtcgatgtttgaaaatatttcatgatcataat

SEQ ID NO: 216855 - DNA, 444 bp, Gossypium hirsutum
  unsure (1)..(444): unsure at all n locations
cacccgtgctgcagctgtggttcatgtgacagatgattcgacaggctgtgcaatcaccgacctgaaacgtctcttgatgataaaggacttgctttgtaatgttctcaaaggaaatgatgacttgaaaacagcaaaaacaatgctttcagctccgggtgtcatgcatagggagcgaaggttgcatcaaatcatgtttgcagatagggactacgaaagggtggaaagaactggagtcagggcagtcgaagagaggagctcgagaccccaagttaatctgttgaatattgagaaagaatacactgttattaccatgagggcaaaagataggccaaaactactgtttgatattatctgcactcttacagatatgcaatatgttgtttttcatggaatggtcaacacaacgaggatggacgctaatcangaattttatatccgacatgt

SEQ ID NO: 216856 - DNA, 124 bp, Gossypium hirsutum
ttgccagcgatcggagactcggagttcaactccaaactatcgccaccgatttccagaggatttataaagtccacgatcggctcttcctcggtctctccggcctcgccaccgatgctcaaacctt

SEQ ID NO: 216857 - DNA, 371 bp, Gossypium hirsutum
  unsure (1)..(371): unsure at all n locations
aaagaatgaagtatctgcaagatttatatcacggtgtaacaaaatcacaggcaaagttggtatgcttgatgaaatcatcaattatgttcaatctcttcaatggcaagtagaggtaaaaaaataatggagaaagaacatatggatttgtgtatgaacacaaaaattctttttcatttctagtaattacttaactgctttaagattttgtcctccatgtgaggacatatttatttgttgttattttcttagctaataacaagatgagaacaatatgagaaagaaaaatagaaactactttgatacaattnaacaacttcaatagcttataatacttgtgaggagtaaaaacaagggcactcttagaattgaac

SEQ ID NO: 216858 - DNA, 349 bp, Gossypium hirsutum
  unsure (1)..(349): unsure at all n locations
aaaacaattccgagagtctcgactgttctcagatctatacgacaacgtttccagatccacaatggcttctacattcagcggcgatgaaacggctccgttcttcggcttcctcggcgccgccgccgctcttgtcttctcttgtatgggagctgcatacgggaccgctaagagcggtgtcggtgtggcatctatgggtgtgatgaggccagaattggtgatgaaatcgattgtccccgttgttatggctggtgttttgggtatttacgggttgattattgctgtcattattagtaccgggatcaatcctaaggcanaatcgtattaccttttcgatggttatgcccatctt

SEQ ID NO: 216859 - DNA, 422 bp, Gossypium hirsutum
aaaaagatcgaattaaagtagaatcagaagcaaaaatcgccgaggaaaacaagatgtcggggcagcaagaagaagataagaaacccggcgatcagtccgccgctcacatcaacctcaaagtcaaaggccaggacgggaatgaagttttcttcaggatcaaaagaagcacacaattgaagaagctcatgaatgcatattgcgaccgacaatctgtggatttcaactcgattgccttcttgttcgatggtcgccgcctgcgaggtgagcaaactccggacgagcttgagatggaggatggtgatgagatcgatgctatgcttcaccaaaccggtggtactgtgtgaagcgagtactacttttgccgcatttagtatttgatgaggtagttatggtctgattatgtaagatgtttccatgtttta

SEQ ID NO: 216860 - DNA, 428 bp, Gossypium hirsutum
cggacgcgtgggcggacgcgtgggcttgctccaagcagcatgaacattaacgtcgttgcgccaccagagagaaagtacagtgtctggattggaggatctatcttggcatcactcagcacccttccagcagatgtggatttccaagggtgagtatgatgaatccggtccatccattgtccacaggaagtgcttctaagttttgtaattgcttttgatggtgatctacattttgcatttagttggctatttttgtgtgcgatgttaagtgaagtccaaagtctggtttatgtggggagagttagggatcattgtaggatggtgtacttgatattgacgtattattattgtagcctttcaccgtatcaccaccattaagatgatgggtcctatggagatggcggtgggcggacaattggtgctgaattcct

SEQ ID NO: 216861 - DNA, 366 bp, Gossypium hirsutum
gcaccccagccgttaagagtggcaatggaggagaaaacttatgctgaagaggcaagacaggaggcgaaaaggcagattgaaatagctgagcaagagtttgcaaaggcaaagagaatccggcaacaagcacaagctgagttagaaaaggctcaagccttaaaggatcatgcaataaagcaaataaactccaccatccttcaaattacttgtcatgcttgccagcaccaatttcaagcaagaacaccacccgaagagaactcccttgttgcgagttacatttcatcagcggtaacagaaggtgaagttgaaaacgatattcaaacaagtcttacaaaggcgactaacacataaacccatctaaacata

SEQ ID NO: 216862 - DNA, 332 bp, Gossypium hirsutum
  unsure (1)..(332): unsure at all n locations
cccacgcgtccgggctgaacaagtgtggggtgatcagtcctcgttttgatgtcggtgttaaggagattgagggttggactgctcggttgcttccttcaagacagtttggttatattgtgctcacaacatcagctggaattatggaccatgaagaagccagaagaaagaatgttggtgggaaagtacttggcttcttctactgagaaatttgcctttttcattttgaatcgaactcatattattaagatggcatctttttgtagttcagcaattatggttttaatgttttgtttacgattatgaattgttgggttggtaagagattttngtct

SEQ ID NO: 216863 - DNA, 429 bp, Gossypium hirsutum
  unsure (1)..(429): unsure at all n locations
caaaaggttctagtgcaggtggagatggttttgaagttacaaaatttggtcatggacgtgtagcactaataggatttccaagtgtggggaaatcaacccttttaacaatgttaacaggaactcattcagaagctgcatcttatgagttcacaacacttgcatgcattcctggtatcatacactacaccgatactaagattcaactacttgatcttcctggaattattgaaggtgcttctgaaggcaaaggacgtgggaggcaggtaaaaatttgcagattctaattttacctggtggtatgttctcgtctcttggtataaaatgtatcattaccaagtgagggaaatgctgataaaatttttaattgaaatgtgttgattaactgcttaacattctnctttaaatgttgtttgattaaatgcttaacat

SEQ ID NO: 216864 - DNA, 457 bp, Gossypium hirsutum
  unsure (1)..(457): unsure at all n locations
caaacatggccgtggccatgtcaagttcatccgctgctctaactgcggtaaatgttgccctaaggataagtcaatcaagaggtttcttgtgaggaacatcgcggagcaagctgctgtcagggatgtccaggaagcctgcgtctatgacacgtacactctgcccaagctgtatgtgaagatgcaatactgtgtttcatgtgcgatccattcccacgttgtgagggtccgatcccgcactgacaggaggaaacgtgacccgcctcagcgcttcattagacgcagggatgatatgccaaagcctggtcagcctggtcaggctcctcgtcctggtgttgcggctcctgctcgtgcataaggcttttgaagtttaagatgaatttgtatttcgtgttttgctttgagatatggttgcttgaaatttgagaacttggatcatgtanggaagttttttttattg

SEQ ID NO: 216865 - DNA, 460 bp, Gossypium hirsutum
ctcaaacaacatttcatctgtgtaagcaattagcagaggctgctgaagcatgtgagggattgagtggaagaacattgagaaaactaccatttttggcgcatgcagagcttgataacccgtattgttgtgaccctaacaagttgttgaacacaatgatagacacagcccggagggagcgttccgaactgcccgactgaagtaatggagttttgtactggtgtaaaatggatggttcttatgctgaaaatgttaaatctttggcgatacccactgccactgatgccttgtctatcttgactttaaatcctctcgtgtaatgagattataggttatgggatagactatagagtcgtacacaagatgcagagggttgattagaaatcatgtttgttttgttttcaagcataacaaatgtaaaaacctaaacagagcacacaataatataatagactcgagcaat

SEQ ID NO: 216866 - DNA, 439 bp, Gossypium hirsutum
tgttaagcagattccctacaatatctctatccttgagatcagcgctccggttatcgctccgggggtcttaacggctccggccccggcgtcttctggcgtcaacattaccggtttgcttgaaaaagccggctgcaagacttttgctagtttgcttaccagcagtggcgtgcttaagacttacgagtcggcgcttgataaagggttgaccgtttttgctccgtccgatgaagcttttaaagctgaaggtgtccctgatttgagcaagctcaccaatgcagaacaagtctcacttctagagtatcacgcctcgccggattccacacctaatggaacgttgaagacgacgaaggacccgatcagtacattggcgactaacggcgctggaaagtacgatctgacagttacaaccgccggcgactcgatgacactacacacaggg

SEQ ID NO: 216867 - DNA, 481 bp, Gossypium hirsutum
  unsure (1)..(481): unsure at all n locations
gttaaatgccttagtgatgctggtctattccttgatgcggttgatgtctctggtggtcagacaattaggagtttatacagcggcgtggttggcttgcagggcgtgcaacataacctgccacgtatatgcaccaaccacctcgatccaacttcgtgtttctttcctcaaaatgtaatcaaccacatccggactccactgtttattcttaacgcagcatatgattcatggcagattcaatccagtattgctccaccatcggcggatccacatggttattggcatgattgcagattgaaccatgcaaaatgctctgcttctcagctccggtatttacaaggcttccggacacagatgcttaatgctataaaagggttctcaatgtcgagacagaatggattatttataaattcatgttttgctcactgccaatcagaaaggcaagacacatggttngctgataattctccttgaattagaaaca

SEQ ID NO: 216868 - DNA, 391 bp, Gossypium hirsutum
attgagacttggaccaagtgggcaacctgtgaggatcaaatacaccccgttgctcagagaaccctaggagaccctcactttattacgtcaatttgattggaattagggttggaagaaggattgttgatatcccaccaagtgccattgctttcaatccttccactggtgctggcaccattattgattctggtactgtcttcacccggctagttgaaccagcctatgtagctgtccgggacgcattccggagacgagtaagggtggcgaacgtgacatctctgggtgggttcgacacatgttactcggtcccaatcaatgcaccgaccataacatttatgttttcgggcatgaacgtgacattgccacaagagaacctactgctccacagcac

SEQ ID NO: 216869 - DNA, 456 bp, Gossypium hirsutum
ctttgaggttaagtgaaaaaactatggctgaagagggacaagtaattgcctgccacactgttgagtcatggcagcagcagctccagatgggaaacgagtccaacaaactggtggtggtggatttcacagcatcatggtgcgggccatgccgttttatatcaccaatcctggtggatcttgctaagaagctgcccaacgtcatattcttgaaggtggacgtggatgaactgaaatctgtcgctcagtcgtgggctattgaggcgatgccaacttttgtgtttctgaaaggaggcaccataattgacaagcttgtgggtgcaaggaaagatgaattgcagcagaaaattgccttccattcatctacctcggtgcagacagcatgaatcaacatttaaatgtacttgatgtctggagttgtttatgaaactaggatcttatgaatgtctgacagacact

SEQ ID NO: 216870 - DNA, 351 bp, Gossypium hirsutum
cttcaagccaaccacctttgaaagtgagaaaggagaagcttggagatagaataacaggagttcaccagttagtttccccatttggaaagactgacacagcatctgtgttgttagaagctattggttatatcagattccttcaaagtcaaattgaggctcttagctccccttacttgggtactgcatcaccaaacatgagaaaccaacaatctggtcaaggagaaaggaattgtgcatttcctgaagatgaaggacaggaaaagcaagagcctaagtcaaaggacttaaggagtagagggctgtgcttggttcctgtttcatgcacacaacatgtcggaagtgacaatggtg

SEQ ID NO: 216871 - DNA, 483 bp, Gossypium hirsutum
caaccattttttggcggagaagagagaagccagtcggagatgcagctagtaaggtccgggcgattggtgtatgacccttgaacggattggtgttggaacgcatatttgccataggggtcgaaccgagaccatgaagcggcgaatgtgagcggtcccaacgcagatgacatatcagggttagattgtccgacgacgatggtggtggtggggggatttgatccattagaaagatcggcaaataaggtattatgaatggctattgaaatctggcaaagaggcgaggttgatcgaatatcataacatgatccatgcgttttatactttcccactcatgcccaacttcccacttggttgtgcaaatcaaggagttcattgccaagtgttcatacagagttccaaacctcaaatctgaaacctacatgtctcaagttcaactttcacctcgtaagctcaacttaatccatataccagatttatgttgga

SEQ ID NO: 216872 - DNA, 413 bp, Gossypium hirsutum
aaaattcttctcttttttttcttccatgattgagtaaaagatttttgtttcttcaaagatgaatgtcggggacccgcttcccactatcctcctatcatgtaccaaacccaaatttctctagtttttttatagattcaaattaatccccctttcttctctacaatcctttttacagttttaaaagataccgatcttaatttcctcttgattttcaatggcgggtatgctagctggtgttgaatgtgctcgaagaagacggttccatcaaagtggcggttcatctgattcggttcttgggttcacgaggagaccttctttttgtttgtatacaagcaaccatgaatcccttcatagctctgttttttctcagaggagggtaataattgaagggtatgaagatgatgatgagaaac

SEQ ID NO: 216873 - DNA, 466 bp, Gossypium hirsutum
ggtctcgattcaaggagatccgccccagagaattgcagcctacatggtcgaaggccttgcagctcgcatggcagcatccggaaaatatctttacaaagctttaagatgcaaagagcccccttcttctgataggcttgcagcaatgcaaatcctctttgaagtgtgcccttgtttcaagtttggatttatggcagcaaatggtgcaattattgaggcatttaaaggtgagaaaagagtacatataatagattttgatataagtcaaggtagtcaatatattacactgattcaaacaatagctaagctgccgggtaagccacctcatttgaggttaaccggagttgatgaccctgagtcagtccaacgtcttaatggaggcctcgaaattgtcggactaaaacttgagaagctagcacaaatacttcgtgtacctatcgagtttcgagcagttccctcgaggacttca

SEQ ID NO: 216874 - DNA, 480 bp, Gossypium hirsutum
  unsure (1)..(480): unsure at all n locations
cccacgcgtccggcttaaaaccctaaccctagaaatttattcggaattcatcgctggtgctgtgtgacctcattcaaaatgcctcgccgtagctctggaaggtctgcttctcgccctgcccctcgtcctgctcctgctcgcaaccctgcacctcaaccagctcatcatgctcctgctccagctcctgctcagagtggaagtggtggatccttgctcggaggcataggctctaccatagctcagggcatggcatttggtactggaagtgctgtagctcacagggctgtggatgctgtgatgggtcctcgtactattcaacatgaaactgtggtttccgaggctgcagcttgccctgcaccagcaactacttacagtagtttagctggcactgattcatgcagcatccactacaatgcattccangattgcctgaatagctatggaagcgaactcagcaagtgtcagttctacatggatatg

SEQ ID NO: 216875 - DNA, 234 bp, Gossypium hirsutum
cagatttttctctcagtttgaaacgatgtctacggctggtgaagctgcttgttcttacgctgctgtgattctctatgatgatggaattcccatcaccgctgagaaaattgcaacaattgttaaagctgcaaatgtttcggttgaatcttattggccaagcttgtttgcaaagcttttcgaaaagtgcaacattgaggatcttataaccaatgttggtgctgctggttgctgtgc

SEQ ID NO: 216876 - DNA, 447 bp, Gossypium hirsutum
aaagacttcagccacccacgcagcccctttaccgatccaaacaatgggacgcgtccggacgaagactgtgaagaaatcgtctcgtcaggtaatcgagaggtactactctcgcatgacgcttgatttccacaccaacaaaaaggttatcgaagaagtagctattatcccatccaagaggctccggaacaagattgctgggttctcaacccatttgatgaaacggatccagaagggtccggttcgtggcatttctctgaagcttcaggaagaagagcgtgagcgtcgtatggatttgtccccgatgtatcggctattgctgttgattcaatagaagttgataaggaaaccattgatatgctttcacttcttggaatggccgatcttcctgggattgttaaggttgatccggttgctgttcaggttcctcaagtcgggttcggacgtggt

SEQ ID NO: 216877 - DNA, 486 bp, Gossypium hirsutum
gcgtccgcccacgcgtccgcccacgcgtccgccgattgacaacacgttgtgctgacattaatttgctgggtgtgatgtaatgcaggacattctgaaagtgggtgaatgtgctgaagctcaatgcatcagtggctttactgctttggatgtccctcctcctcgtggacctctctggattttgggagatgccttcatgggtcgctaccacactgtgttcgattttggtaagcttaaagttgggtttgcagaatcagcataaatgggacctgatgttttcaatggccataaactatatatgtgtatgatttaaatttataaagatccaacgaaagcccaaaacctttaaaagaaatgatgctgtgttgcctgtaaatatttgcgttcctgcactgtaagattttggttttagaagaaatgaaaaatattgtgtttgcatttaatgaatggttactatattatttgattttcaactttccaaaaattata

SEQ ID NO: 216878 - DNA, 476 bp, Gossypium hirsutum
cccacgcgtccggcagaagagtaaaatagcaaagagtcacagctgaggcacggaagaagatgccttgcctaaaccgttcaaccaacgtcaatctcgacagcgtcgacacctgcgccatgctttccgaagccacctcttccgtcgctaaactcatcggcagaacctgaggcctatgtgatgatcgtgttgaagggttcagtacccatgtcatttggcggtaccgagcaggcagctgcctatggagaactggtatcaattgggggccttaatccagatgtgaacaagaaactgagtgctgcaattgctgcaattcttgaaaccaagctacaagtgcctaagtcacggctcttcctcaaatgctacgacaccaagggttccaactttggatggaacggatccaccttctgagcctggcatgttctgaatctctcgaaacatcagtgatgtctattcaaaacaatcttactcggatgatg

SEQ ID NO: 216879 - DNA, 412 bp, Gossypium hirsutum
cccacgcgtccgctcttaccacctgtaatcagagtccagtaagagaagcgacgacaatcacaaatgggtaaggttcacggatcgttggcacgtgccgggaaagtgagagggcaaactccaaaggtagccaagcaagacaagaagaagaagcccagaggtcgtgcctataagcggatgcaatacaatcgccgtttcgtcactgccgttgttggctttgggaagaagcgcggacccaactcgtcagagaagtgaggccggacatgtaggagtcttacattatattgataattttctagcttcattagcattacattgttatgatttagtttggagtctttctttgctttaagaaaactataacatccgtatctgttgttttgaaatatttactaaggccctccatttctgatcc

SEQ ID NO: 216880 - DNA, 390 bp, Gossypium hirsutum
cggacgcgtgggcggacgcgtgggggggtatcgattttcggaggcagtcatgtttgggtggaccattgctctttgtctaactgcaacgatgggctgatcgacgccattcatggatccaccgccatcaccatttctaacaattacttgacccatcataacaaggtcatgctattgggacatagtgacacttacaaacaagataagaacatgcaagtcaccattgcctttaatcactttggagaaggccttgtacaaagaatgcctagatgtaggcatggatactttcacgtggtgaacaatgattacacgcactgggaaatgtatgcaatcggtggcagtgctgatcctacaatcaacagccaaggcaatagatttcttgcaccaaatgat

SEQ ID NO: 216881 - DNA, 438 bp, Gossypium hirsutum
gaggcggtgcctacaaaggaatatgtcgaataagtataatttatctcgtaggaaaaggggggacgaattcgatctccaaagggagagggaagagaaagaaaagaaggttaagaagcttcaagcgaagaagaataagatgaaggttgatggtagtgagaagaaaaagaagaaagctggaagtgggtttcaagtagggaaaagaaaattgaagaccaagttaactgaagttgctaaagctaaagcagctctagcaatggagcttgacaaatgagcttcatggttatgtaattttagagggaatattcaatatcctcttcttattcttctttttttatttttacttttatttctgttaaattttgattattgagatgaatgcatatgttagcttgagaaaaaaaaaaatttatttaaattatatattaataaatttggggc

SEQ ID NO: 216882 - DNA, 473 bp, Gossypium hirsutum
cggacgcgtgggttttatttttacttgctttttctatttctcctttgactggttcaggtgggccgttgatagtttagtgattaatatatagaactctttaaagctttggaaagatccttttttttcacttggtatcaagcatggaagatcgcaaggagaaaaatgcaccatggctatcagtaccacaatttggtgattgggatcaaaagggacaggtgccagattactctcttgacttctcaaagatcagggaaatgaggaagcaaaacaagagggaagtttcaagagccagtcttggtaatgaagaagagttcattaacccaactgcaaacactgttagcactactcctagtgatgatcatcaccacaattaccctcagaaccatcactctccatctacaaggaaggagttctatagctacttcaattgctgcgtcaaggcttaagggttagggtttaagggctcgcatgaa

SEQ ID NO: 216883 - DNA, 487 bp, Gossypium hirsutum
  unsure (1)..(487): unsure at all n locations
cccacgcgtccgcccacgcgtccggttgagaagtgcaatcgttctgaaggaacccctcaggtggcatatacatttgacgctgggccgaatgcagttttaattgcacgagatagaaaggcagctgctcaattaattcagcggctgctattctacttccctccaaagtctgatactgatctggacagctaccttctcggtgataagacgatacttaaagatgctggactcgagggattgaaggatgtggaagctttgtccccacctcctgaaaatggttcagctcagaaataccctggggatgtcagttacttcatctgtacaagacctgggaaaggccctattctgctttcaaatgacaaactggctcttcttgacccagaaactggacttcccaagtaagaagtgccatactttctctccgcaacattggtaaaacttatcttcaaggagagctgaatgtctntgagctgcaaaagtgtcagatagg

SEQ ID NO: 216884 - DNA, 335 bp, Gossypium hirsutum
ccattccacgcctttgtattttgcattttcgtttttttggaattcatcatcttcgttgcgagtatacaatggcaggtcggggtaaaactcttggatccggggcctcgaagaaggcgacatcgaggagtagcaaggccgggcttcagtttccggtgggtcgtatcgctcggttccttaaggctggaaaatatgctgaacgtgtcggagctggagctcctgtttacctcgctgccgttcttgaatatcttgcggctgaggttctcgagcttgctggaaatgccgccagagacaacaagaaaactcgaattgtgccacgtcatatccagcttgctgtg

SEQ ID NO: 216885 - DNA, 483 bp, Gossypium hirsutum
  unsure (1)..(483): unsure at all n locations
ctattccatcatttggaaaccccaacacatcattttcttggtggataacacccccattagagtgttcaaaaatgctgaatccattggtgtaccattccccaagagccaacccatgaggatttactctagtttatggaatgctgatgattgggccacaaggggtggattagtgaaaactgattgggcaaaagcacctttcacagcttattacaggaacttcaatgccaatgcttgtgtctggtcaggaacaagttcatcatgtgctaaaactaactcggtctccgccggtgcatgggaaacaaacgaacttgatgcaccaggaagaagaagattaagatgggttcaaaaatatttcatgatttataactatngcactgatttgaaacgtttccctcaaggtgttccaccagagtgtaaacgcccaaggttctaaaatcaaacctgttccaccagagtgtaaacgcccagtgttctaaaatcaaa

SEQ ID NO: 216886 - DNA, 485 bp, Gossypium hirsutum
gaaactcaaacagcagccctacgaaatgagttggttgagcctcgtagttccgaaggagaggggctgcctcgtcttgagagcctgcaaagaattcttcaaggccgagctgcagttgaagtgaatagtggtgttctgagtgtgtgcacagccttcttgtctggtgaacctgccacacggttgcgttatcaggagctacagcaacttattgctgcactccttgaatatatggctgcttgcaagcgggcaattcgagtacacttcagactaataggagaagaagaccaatatttccacacacaactagtgaatggatttcaatctctcacagcagagctatctcattacatccctgcaattctatcagagctctgctaatgttgtaagcattactagctccgatatatcttattggtgcacgctgctcataaagatcgtgacacattctttttgtagatctgtgctcatatgatgattgctgatgtctg

SEQ ID NO: 216887 - DNA, 352 bp, Gossypium hirsutum
  unsure (1)..(352): unsure at all n locations
aaaccactctcacattaaatattgttagtgaaacaatggcgtcttcagctctgataagtgaggttgaggcagatgtagagattaaggcttctcctaagcagttccatgaaatggttggccacaaaccggaccatgggcaccatacttgttatgaccagattcaaggatgcgatttacatgaaggtgaatgggggaaagtcggtaccattgtccattggagttatgtgcatgatggaaaggctaaaaaggcanaggaagtagtggaagcaataaaccctgattagaatttggtcactttcagagtgatcgaaggagatctaatggaagagtataagaactttgtaatcacgat

SEQ ID NO: 216888 - DNA, 489 bp, Gossypium hirsutum
ggtaatggttagctattataatcacttactgacgcctgttggtggggtacggtttctgagtgccaagccttccgttttgacagccgagaccaacaaccccatggcttctgatctctcctctgaccgctccgtcttctgcggcgactcctcctcttctcctatccaccgccgtgatctagttttcatcatcaatcctggaggtgctaatgggagaaccggtaaagagtggaagaaactacttccttatcttcaatcttgcctcggcagtgattgtaatgtgagtgttcttttttcctctcttttttttcggttaatataataagaaaatctcttgtatttgtctcagatatgtgaatctttgacttcgagtcctcatgcaattgacattactagggaggcaataagggagggtgaaagagtatgcagtgcctgggatgggtatgcttctttttccgctttaattaccaagttatgtacatagacagacat

SEQ ID NO: 216889 - DNA, 490 bp, Gossypium hirsutum
atcgccattgtttactgctagtaaagaccctaagcctaacctaacctaacctaacgtgaggctgcatactgctcgcaaaatcattaggtagcaatgggtacagttacagtgaagttggttgttgtgattatgataacggtgggtttaatggtggaagggtcaagagcaataagcttgtgtgacatgaacgatgagggtctggaagcctgcaagccatcagtgacccagccggatcctgtcgacccaacacctcaatgctgcgaggctcttaaaggagctaacctcacatgcttgtgttcttataagaattcaatgttgctgccttctcttgggatcgatccaacactcgccatgggtttaccagcaaagtgcagtctcgatatgccttctgattgttgattaaggtattttcggaggataatgaaccatgaagcggctttcatgttcgtcagcctttcacaagttgtttttatttatttgtacgtggaaa

SEQ ID NO: 216890 - DNA, 490 bp, Gossypium hirsutum
cccacgcgtccgctctaaccctagccctctatcaggattcaaacatgaaaggaggtaaatgcaggtcggatgccaagagcgccaagctctccgtgaataagaaatcaaccacgaaagctggaaagaaatcggggaaggcagctaaggatccaaacaagccaaagaggcctgctagcgccttcttcgttttcatggaggagttccgcgagcaatacaagaaggagcaccctaaaaacaagtccgttgctgctgttggcaaagccggtggagataaatggaagagcctttctgaagctgaaaagcgaccttatgttgataaggccgagaaacgaaaggtcgagtatgaaaagaacatgaaagcctacaataagagacaggctgagggtccccaagaagatgaggaggaatctgagaagtctgtatctgaggtgaatgatgaagaagaagatgatgatgaaggcagtggagacgaagatgatgagtaggaaaa

SEQ ID NO: 216891 - DNA, 422 bp, Gossypium hirsutum
  unsure (1)..(422): unsure at all n locations
gtttccagtgaattacatgcttttcttgatcaagtgatagaggatcacctggctatgatgaatgaagatgatgatgatggtgatacatcagagaacaaagattttgttgatatccttcttcgtcttcagctcgatggcaagctcgatatcagtctaactcaagataacctcaaggctataatactggacatgtttgttggtggaacggataatatagctgcaacactggaatgggcaatggcagagcttgtgaaaaatcccagcataatgaagaaagctcaagaagaagtaagagcgattgttggtaagaaacanacaatcagtgagattgatgtcaatgaaatgcactacttgaaatgtgttgtgaaagagacactgagactccatgctcctgttatggtgtcaagacaaaattccacagc

SEQ ID NO: 216892 - DNA, 466 bp, Gossypium hirsutum
taacaatgtcactagtaaagaatgcaagttcgtatcgatatatgctggaatatagtagttgactataaacatggttctgtttgttctttgagacacacagatgtgcattcagtgcaataaccaaactactcgaagttccaaggataggatgctacttcctcgttattctttgttcagacgtgatgacggtccacttcttctttctggtgaagaacacggggagctggatggaaattggtaatagcattagccatttcggaatcatgagtgcccaagttgtgtttgtgctgctactttttgctctcacaaatatatacacgaaagacatcgaaatcagatcagggagtcgagattcccgaaaagtaatgtgattcacgagaaaccagaactcattagcattataattaggtagccaaatttatttgcaaggtaaaagcatttagtttctcagattctatggctttcg

SEQ ID NO: 216893 - DNA, 344 bp, Gossypium hirsutum
ggcgcgcccgcgcgtgcgaccacgcgtactatcacaaatggtgctggccttgtatcttacccaatcgacactgatcggtggagattgttattgaggtgttgcaaaactgtccaatacaatagctcgcttgctgccttttctcaaatctggaaacacgcacgtgccaagtctctcttcaagggtgctggagcttacatacttcgagccattgccggtgcgggcgtgctatatggatacgacactgtgcagctcattggtatcggaaggaagaactgatcccgtggtgcataaatctaaggaggaactatcacttccttcttttgttaagcattcagttttaaaga

SEQ ID NO: 216894 - DNA, 444 bp, Gossypium hirsutum
cccacgcgtccgcccacgcgtccgaagtctatctttatttgaagtctgtgattaagagggagtatggtcaagatgcgaccaatgtcggtgatgaaggtggctttgctcctaatatccaggagaacaaggaaggacttgaattgttgaatactgccattgctaaagctggttacactggcaaagttgttattggaatggatgttgctgcatctgaattttacggaacagataaaacttacgacctgaacttcaaagaagagaacaatgacggtaaacaaaagatctcaggagatgctttgaaagatttatacaagtcattcgtagccgagtatccgattgtgtcaattgaagatccatttgaccaagatgattgggagcactactccaaactaaccaatgaaatcggagaaaaagttcagattgtaggagatgatcttttggtca

SEQ ID NO: 216895 - DNA, 484 bp, Gossypium hirsutum
cccacgcgtccgctcctttctacaatgtaaaagatgtaatgaataagcttcaagaatgcggagattacataaacgaaaatctaaacaagctagacacacggggtccggtttcaaaatatatcctccatgacgaaaaccttagaggaagccttactttgactttcgacgaggcaatgtccggtgttgcttgtgatctcaattctcgtggattccatgtattgtgcaaggcaactgaagaggctgttggacatgtgaagccttactcaattaccggaagtttgccactcattcgggagctacaagatgaaggttttgatgttcaaactgctggctacggtttaatggccacgtaccacgccaagaacgagtactgccttctttccgatatgtgccaaggttatcacgtatttaccggcatcatcgctcagctagaggattgaaagatgacaatagattagatatgaactttcataatagttttctc

SEQ ID NO: 216896 - DNA, 474 bp, Gossypium hirsutum
aggttttcaacaggggaatgtctgatcactctaccattaccatgaagaagattcttgagacctatgatggctttgagggactcaaaacactggtcgatgttggcggcggtactggagctacgcttaacatgcttgtcaccaagcacccttctataaagggcatcaactttgatttgcctcatgtcattgaggatgctcctgcttatcctggtgtggagcatgttggtggagacatgtttgaaagtgttccaaaaggagacgccatcttcatgaagtggatatgccacgattggagcgatgagcactgctccaagtttttgaagacgtgctacgaagctttaccggacaacggaaaagtaattgttgcagaatgtattctcccagattacccagatcctagccttgacacaaagttagttgtccatattgattgcatcatgttggctcacaatcctggtgggaaagagaggactg

SEQ ID NO: 216897 - DNA, 427 bp, Gossypium hirsutum
gttgtcgtttctatagctgaagaaactcttcaatggctgaaaagagcaaggttttgggcggcggatgaactggatatctgggaaagttcattgtggaagccagtgcaaaagagggtcatcccactttcgtttttgtaagggagtccaccgtctccgaccctgttaagggaaaacttgtcgacaacttcaagaacttaggggtccatttgttgttaggggatatgtacgaccatgagagtttggtcaaggcaataaagcaagttgatgtggtgatttcggttgtgggtcaaatgcagttagcagatcaagttaagatcattgctgctattaaagaagctgggaatgtcaagagatttttcccatcggaatttggaatggacgtggacaagaacaatgcggttgagccagcaaaatcgacattcgcaat

SEQ ID NO: 216898 - DNA, 476 bp, Gossypium hirsutum
cccacgcgtccgggaagaggcaatgaattggttgctttcacacatggatgatccagggagagatgctcctatctcccatgggtcacaaagtgctgagatatctatcgaccaatcaaaagttgataccttgatttcgtttggatttcaagaagaaattgctcgaatggcattgaaagcatcgggtggcgacattgaaaaagcaacagactggatatttaacaatcccagtgcctctgcttcatcagctatggatacaaatgcatcaagcaacggcccatctactccagtcgatgcaggactgcccgacggaggagggagatatcggcttttcggaatagtgagtcacatcggaacctcaactcagtgtggccattatgttgctcacatcctgaaagatggtagatgggtgattttcaatgatgataaggttggtgcttcgatcaatacacccaaggacatgggttacttatactttt

SEQ ID NO: 216899 - DNA, 464 bp, Gossypium hirsutum
cccacgcgtccggaaaaactatgatcctcaaaaagacaagcgattcagtggatctgtggagctgcctcatattcctcgccccaagatgaagatttgcatgcttggagatgctcaacacgttgaagaggcagagaagataggtttggattatatggacgtggaagcattgaagaaactgaacaagaataagaagttggtgaagaagcttgcgaagaagtatcatgcctttttggcttctgaatctgtcatcaagcaaatcccacgtcttctgggtcctggtctcaacaaagcaggtaaattcccaacccttgtcactcaccaggaatcactagagtcgaaggtgaatgagacaaaggcaatggttaagttccagctgaagaaagttttatgcatgggagttgctgttgggaatgttgcaatggaggagaagcagatcttccaaaatgtgcaaatgagcgtcaatt

SEQ ID NO: 216900 - DNA, 291 bp, Gossypium hirsutum
agggatgtgtatattgatagagcataaacccgaacttaaaggtgacccctaccaaaccctcgtcaacttttaattgggggaccaccgtcacataacggggcaaggaccttactttacttaccaagactcgcaacttgctaatactggtggaaccggcctttttgaaagttttttttgccaaggtaaggctcaacaaaatcgcctccattttaatcttttctacactttctattttaagggaattggtgaactcccaaaagagacttttttcaaaccagttgacccacaccc

SEQ ID NO: 216901 - DNA, 296 bp, Gossypium hirsutum
tttgcgtgtcttctcatctctgctttttccccctttttatctttcttcttctttttcttcttctgcttcttcttcttcttactccagccgactttttccggcaaaacggtgtcagatctttgtgatctatagccggaagtttcatttcgagttcgacgatctcatccttcgatctttccactttcttcagcctaccatgaatcccgaatatgactatcttttcaagctacttcttattggagattccggtgttggaaaatcttgccttctttggagattggttgatgatacatatg

SEQ ID NO: 216902 - DNA, 429 bp, Gossypium hirsutum
gaaaattattttaatttctcataagctaaacagattttgtcaaatctcgaaatcatgagaggaatggcccgtacaaagcaaacagctaggaagtcgaccggtggaaaagctccaaggaagcagctagccacgaaggccgcccgtaagtctgctccggcgaccggcggagtgaagaagcctcaccgtttcaggccaggaaccgtggctttgagagagatccgtaagtaccagaagagcaccgaattgttgatcaggaagcttcctttccagaggctggtgagggaaatcgctcaagatttcaagactgatttaaggttccaaagcagcgccgtcgctgctcttcaagaagctgcggaggcttatctcgtcggattgtttgaagacactaacctttgtgcaattcatgctaagagggttactatcatgccc

SEQ ID NO: 216903 - DNA, 439 bp, Gossypium hirsutum
ctatttttgccccgtccgatgaagcttttaaagccgacggtgtacctgatctgagtaaggggaccaatgccgatcaagtttcgctgttagaataccatgcctcgccggattataaaccaaaggggactttaaagacgacgaaagatccgattactacattggctactagaggtgccgggaagttcgatttgacggtcaccgccgccggtgattccgtcacgcttcatactggaatcagtccatctagagtcgctgaagcagtttttgactccccaccggtcgtgatattcaccgtcgacaatgttttgttaccctccgagttgttcggaaagtcaccgtcgccagcacctgctcctgaaccagtttcttcaccttcaccgacaccttcttcattatccgaagcaccatcgccattagccgtttaccaccagttcaccaa

SEQ ID NO: 216904 - DNA, 364 bp, Gossypium hirsutum
  unsure (1)..(364): unsure at all n locations
gcacagctgaaagctgtttgtgtggaggctttcatgctagctcttcgccgcgatgcaactgaggtgaaccatgaagattttaatgaaggcatcattcaggtgcaagctaagaagaaggcaagcctaaattactatgcataatgggagagcatttcagtgtaagaatgtgaaggtgggttgtgttgagaataggttgatatacatatttactctctgcccaattatattgtgttaggttttcctggtttgcacgtaattttatataaaaaaaaccatttacaaatggattgttctgtttaaaagactgccatctttttatttgaataagctagttcagcnnnnnataaaaanaataatttaaaaa

SEQ ID NO: 216905 - DNA, 409 bp, Gossypium hirsutum
tgcagatcttcgttaagaccctgaccggcatgaccatcaccctctgaagtcgagagctccgacacgatcgacaacgttaaggcgaaaatccaagacacggaagggatcccaccagaccaacaacggctcatcttcgccggaaaacagctcgaagatggccggaccttggccgattacaacatccagaaggagtccaccctccatctcggcctccgactacgtggcggcatgcagatcttcgtcaaaaccctgaccggcaagaccataactttggaagtcgaaagctctgacaccattgacaacgtcaaggccaagatccaagacacggaatgcatgccaccagaccagcaaaggctcatctttgccgggaaacaactcgaggacggtcgcaccttggccgattacaaca

SEQ ID NO: 216906 - DNA, 306 bp, Gossypium hirsutum
gaagctattgatttggtaaaaactgtttttgcatctgcatccgagagagatatatacactggagacaaactcgaacttgttatcataaatgcagctggtatccgccgggaatacatggaacttaggaaagattgattaatctccattctccaaactgggttaccacctcttatagatgtgtgagttcttgaaattgatggaatgactcttacaatgtgtctgatgcttgtactgcaactatttccttgcatttggatactttaaaatatggattgcagttgaattttatcttccgtctgttagacg

SEQ ID NO: 216907 - DNA, 463 bp, Gossypium hirsutum
cccacgcgtccgcggagatggaagccacattgtacttgcatgcaatgaatcagagccccaagccatgtcacgtttctttctcgtacgcacgttcattgcagaacactgtgcttaagacatggcaaggacgtccagagaatgttgaagctgcacagaaggctcttttggtgcgtgcaaaggcaaactctctggctcaactcggaaaatactctctgcgagggtgaaagtgaagaagccatgaaaggtttgttcgttttgggctatacctatttatgcgtatgacactgtaatatctggtttttgttctttaaaggcatatttgtttctatgttttcaacttttcttttagttatgaaattgtattatctattttttttctttcttatttttgattttaatacatttatttatttggcaatgtttttttatttataaaaattttccctttttttatgcctttttt

SEQ ID NO: 216908 - DNA, 318 bp, Gossypium hirsutum
aagaaggaagctttgaaggaaaagtttgagggtctttgcaaggtcatcaaggatgtgctgggtgacaaggttgaaaaggttgtggtttctgatcgtgtggttgactcaccttgctgtttagtgactggcgagtatggttggactgcaaacatggagagaatcatgaaggcccaggctttgagggataacagcatggctggttacatgtcaagcaagaagacaatggagatcaacccggagaaccccatcatggaaaacctgaaaaagaaagccattccaaaaaaaatggttaatttttgaaagaccctggtcttcttt

SEQ ID NO: 216909 - DNA, 437 bp, Gossypium hirsutum
aattttctcccttactaacaacaaaaacccttaaatgtcggacgacgatcatcatttcggagccaaggctgatgccggcgcctccaaaacctatcctcagcaagccggtactatccgtaagaacggctatatcgtcattaaaggccgtccctgcaaggttgtggaagtttccacctccaagacggggaagcacggtcatgctaagtgtccttcgttgggatcgatatcttcactggcaagaagttggaagatattgttccctcctcccataactgtgatgttccgcatgtcaatcgtactgactaccaattgattgacatttctgaggatggatttgtgagcttgctgactgatagtggtgatactaaggacgatctcaggctcccaactgatgagaacttgttgaaacagatcaaggatgggtttggtgagggaaa

SEQ ID NO: 216910 - DNA, 433 bp, Gossypium hirsutum
cccacgcgtccgaattacagtggcaaatccttctgatcttgtgaaagttcgacttcaagcggaagggcgattacctcctggagttcctaggcgctattctggggcacttaatgcttattcaactattgctagacaggaaggagttaaggctctttggaccgggattggacccaatatagcacgaaatgctattataaatgctgctctcttgcaagctacgatcaagtaaagcagacgattttgaaaatccctggattcactgataatgttgtcactcatctcctttctggtcttggagctggattttttgccgtctgtattggttctccagttgatgtggttaagtcaagaatgatgggagattcaacttacaagagcacgctcgattgttttatcaaaactttgaaaaatgatggacctatggctttttaca

SEQ ID NO: 216911 - DNA, 395 bp, Gossypium hirsutum
tggcttcccatgatgacggcaaactggggttctttgagttaaaggccaaaaaaccttcccgttccttatattcaagattggggagaaacaaaagcaggtttgtagaaaagcttggtgagccaagtcaaagctatgatgatttcacttcaagcctccctgctgatgaatgtcggtatgctggctatgattttgactttgtgactgctgagaattgccaaaaaagcaggattttcttcattgcatggtctcctgacacctcaaaggtgagaagcaagatgatttatgcaagctcaaaggacaggttcaagagagagttggacggtattcaaatagagctgctggccactgacccgactgagatgggacttgatgttattcgaagccgtgccaactaa

SEQ ID NO: 216912 - DNA, 448 bp, Gossypium hirsutum
ctgaggttgatgatacatccgttggtcgtgttggttctccacttccttgctcctttgtcaggttagtagattggcctgaaggtgggtatttaattaatgattcaccaatgcctcgtggagaaatagtagtcggtggttccagtgtaacacttggatactttaaaaatgaagagaaaacaaaagaagtgtacaaggttgatgagagaggatgaggtggttctatactggtgatgtaggacagtttcacgctgacggttgcctcgagataattgaccgtaaaaaggacattgtcaagcttcagcatggggaatatgtttctttgggaaaggttgaggctgctctcagcatcaatccctatgttgacaatattatgttgcatgctgatccgttccatagttactgtgtggctcttgttgtggcttcccagcatgcagtggaagattgggct

SEQ ID NO: 216913 - DNA, 415 bp, Gossypium hirsutum
actttgtttaatttcatagggagtttatgtgtttatggtactatttgtaagcatttgaacgtgccttttgtgtttggagggacaagtgagtgttgggaagagagttatatagacggctccgatgccagactcgtcgccgaacaacaaatttgggcagccaccaggaatggcgatggagtgtcttccaacggcgaggcgttcaatgcatcaacggttcgagtttcagttggaaggagatatggccaatattgggaaagaaatttggagttagagtgcctaaagagacgtgtatggaggaattttggtatacgagggccatgggagacaagaaaagggtatgggaagatatagtggagaaggaaaggttggtggagacgaagatggaagaagtggcaaattggcaattcatggacat

SEQ ID NO: 216914 - DNA, 448 bp, Gossypium hirsutum
gctcgtcgagtctggaaagattactatgcttaggttgatgctatggtgtacctggtagatgcctatgataaagaaaggtttgcagaatcaaagaaggaactggatgcactcctttccgatgaggcccttgccaatgtcccgtttcttatactaggaaacaagatcgatataccatacgctgcctcagaggacgagttacgataccattcgggctcacaaactttaccaccggcaagggtaaggtaaacctggcagactcaaacgtccgtccactagaagtatttatgtgcagcatcgtccgcaaaatgggttacggcaatggcttcaagtggatgtctcaatatatcaaatagagaaaatggtctcaaagatgcagtaggaaagatcttacagggtgccaaaccccaaattccataactcccaacttaaagggggggacaaagaaact

SEQ ID NO: 216915 - DNA, 440 bp, Gossypium hirsutum
gcgtccgaagaatcgccattctaatggacaaggccgttggcctgtgaaatcagcaaaattcattctggatttgctcaggaatgccgagagcaatgctgaggtgaaaggcttggatgtagattcacttatcgtatctcacatccaagtaaaccaagcacagaagcaaaggcgccgaacatatcgtgcacatggaagaattaacccctacatgtcttcaccgtgtcacattgaactgatcctgtctgagaaagaggaagccgtcaaaaaagagccggagactcagttggctccgaggaaatcaaagggtgcttcagtttaaactgctgagtgatggattgttagtcggaagcttttacaattttctttttgttgtctctgtaatgagaacagttttgtttacttcacaatggggtgcttaagacttataagtttggagattc

SEQ ID NO: 216916 - DNA, 431 bp, Gossypium hirsutum
cccacgcgtccgcccacgcgttcgcccacgcgtccgcagaattcggattcccggaataaagtatctagggtttgcaaaagaggtgaaacccgcaaatggaaggctgggacccgaatacgaagtcgacgctaacacagatcccgctactgacgacgaaggcgggtcccagagacggagcggcatggactcagcggctgaaggaggagtataaggctttgatcgcctacacgcagatgaataagtccaacgacaacgattggttccggatatccgccgccaatccggaagggacgcgttggaccggcaagtgttggtacgtccataaccttctcaagtacgaattcgatctccagtttgatatccccgttacttatccggccactgctcccgagctcgagttgcccgaacttgatggcaagactcagaagatg

SEQ ID NO: 216917 - DNA, 440 bp, Gossypium hirsutum
cccacgcgtccgagtggacagcctatgccgtttactgctttggctacatcacttgcaaatgcagcacctgaacagcagaggacgatgcttggtgaaagcttgtatccccttgtggagcgactggagcgtgatgcaacagccaaggttactggcatgcttcttgagatggaccaaacggaggttttgcatctcctcgaatcaccggaagctttgaaggcaaaagtagcagaggccatggaggttttgagaagtgttgacgctcagcaacagtccaacaatccagctgaccagctgtccttaactgtcactgaatgacaaccttgtctcctgagtgaatgaacttgagtcgagattcttggcagagaagttgctagacccttttatcaaaattgggcttatctttaagtacggttggattttacaacgtttattctttttgg

SEQ ID NO: 216918 - DNA, 426 bp, Gossypium hirsutum
cccacgcgtccgcggttcccgagattacaagtgctgtttttgaaccctcaagcatgatggctaaatgtgatccgaggcatgggaagtacatggcatgttgtttaatgtaccgtggagacattgtacccaaggatgtcaatgctgctgttgctaccatcaaaactaagcggactgttcagtttgtagactggtgtcctactggtttcaagtgtggtatcaactatcagccacccacagtggtaccaggaggtgatcttgctcgggtgcaacgagcagtgtgtatgatcagtaacaacacatctgtggccgaggttttctcccgaatcgaccacaagtttgatctcatgtatgccaagagagcctttgttcactggtatgtaagtgagggaatggaggaaggtgaattctccgaagcccgggaagatc

SEQ ID NO: 216919 - DNA, 418 bp, Gossypium hirsutum
cgacgaactaaccctggagggtatcaagcatttttatgttaatgttgaaaaggaagagtggaggctggaaacactttgcgatctctatgaaacactggccattacccaaagtgtcattttcgtgaacacaaggcgcaaggttgactggctaactgacaagatgcgaagtcgagaccacacagtttctgccacccatggagacatggccagaatacgcgtgatgtcatcatgcgggaattccgttctggttcttcccgtgttctcatcactaccgatctcttagcccgtggtattgatgtgcagcaagtctcccttgtcataaactacgatctggctactcaaccagaaaactacctccaccgaatcggaagaagtggtagggttgggagaaaaggtgttgccataaactttgtgactc

SEQ ID NO: 216920 - DNA, 443 bp, Gossypium hirsutum
cccacgcgtccggttgaacccatatgcgatttctgctaggaggatgtctcttttagccgagggacaacgtgttaaagctaagaaggagaagcttgacaagaagaggaagcccatttctaaggaggaggcaacagcaatcaagtcagcaggcaaagcatggtatcagactatgatctccgacagtgattacacagagtttgagaactttctaagtggttgggtgtgtctcagtaattttagtttttgatttagatatttgttgcagtcaatgttgtcaactttgttatggtgttgtctttttagttattttgatgttttgagttgtgggtggaaggaaaattagtgaaatatcatgctctaatacgcttctgttttgtcctcctcccctgttttcgcattctatggctagtggaatagtttctataatatgagaacaagaaatt

SEQ ID NO: 216921 - DNA, 443 bp, Gossypium hirsutum
cccacgcgtccgctcgagcagaacgcaactattgctttccaggccgctatctggaggtggatgaccccaatcaagaagaaccaaccttcagcacacgacattttcgtgggcaactggaaaccaaccaagaacgacacagaggaaaaacggggtcctacttttggctccaccatgaacgttctctacggagattacacttgcgggcaaggcgatattgatcccatgaacatcatcatctcccattaccttcattaccttgacttactaggtgtcgggcgagaggaagcagggccacacgaggagctaagctgtgccgagcagaaagcattcaacccaaccccagctccacctgctgccagtgcttcctaatctttggttcagccaatttcattgttaaaatgtagttgtcaatgaagggtaatttaataagagagctgggcaat

SEQ ID NO: 216922 - DNA, 451 bp, Gossypium hirsutum
cgtgacgccacacgttcgcccacgcgttcgtagatgctaagcgccggaaggtcaccgtctgtgtggtgataactgtggtgactaaggaagcccggcgactatgaatctttgttctaaatgatacagagatttacgacttaaagaacaacaacaagcttgttctgctaaatcgactataatacctgtccttcatcttgagtcaaccgcaggcgaatctgtgttctcacgcacctatcctgactatgcctgaagacaaaggagtcccgctgaccgtgtcggctgtcgcgatctctacggtggcggatcagaaacgacaagagcgacagcaactttatctagtgcaacaacaacaacgacggcaaccgactcggtgcactgttcgcaagaaactggtcggtttgaccggattcaagtgcatgtgcaggattacgtttagctggtcacacaggta

SEQ ID NO: 216923 - DNA, 459 bp, Gossypium hirsutum
cccgggcgagaagtgctctttgcaagacttcgattatggctgcttcagatatcttcaatgcctacggcgaaaaattgcttgagtcaactgattctagtgcatttgatcagctgttactgcagttgttactgaaagcctctcaggacaagaagtttgtgtgtgaagaagccgataagtcgctgacagcaatggttaactccattgctgctttacccctgcttcaaaagctccgcggatttgttaaccatggcaaccttagagtcagagccaaagctgcagtttccatttccaattctgtttacaaaatgggatcagaagaaatcaaagagttcgggtcagttaccttgcttcaaatggcttcggatttgctaaacgataggctgccagaggccagagaagcagcaagaagcattgtactttcagtatacgaggcatttacagaaaacgaaaagcttgata

SEQ ID NO: 216924 - DNA, 219 bp, Gossypium hirsutum
cccacgcgtccgcccacgcgtccgcggacgcgtgggcgaagttgaaactcacgcctaatgtagccttttgcatttacagatggcatgtatgataataaataaatgggcatacgtcctaaatgaaaatgcttccttaatatagtgatgtaagtggaagtataaagcaataaaattgtgcttttacttaccaaaggacaaatccgcgcgacccatataccc

SEQ ID NO: 216925 - DNA, 441 bp, Gossypium hirsutum
gctaaatgaaagacgggcaatgcaagggaagagccgaaatgacttttttgattttgtccttgaagaacttcagaaagagggaacaattctaacagaggcaattgctctggatttgatgttcgttctactatttgctagctttgaaacaacttccctggctctaactttagcaattaaattcctttctgacgacccttcagtgctgaaaaactaagggaagagcatgaagcaattctacgaaatagggaagacacagactctggacttacatggaaagaatataaatcaatgacatatacattccagttcatcaatgaaacagttagactagcaaatatagtgccgggaatcttcaggaaagcactaagagaaatccaattcaaaggatataccattccagctggttgggcagtaatggtgtgtcccccagctgtgcacctg

SEQ ID NO: 216926 - DNA, 444 bp, Gossypium hirsutum
gtctatagaccctgaatcaaagatgatcaataaggatcaaggacgcatcgagaaatggaggcttagaaaggcctttgacgatgaagagcgtccatatttgccaaagcacatcctctaccgacaaaaagaacaatttagcgatggcgttggttatagttggatcgatggtcttaaggcgcatgctgccaaaaatgttactgataagatgatgcttaatgcttcttacatatttcctcacaacacgccaacgacaaaagaagcatattactacaggatgatattcgagagattcttccctcagaactcggctagattgacagtccctggaggagctagcgtggcatgcagcactgctaaagctgttgagtgggatgttgtctggaagaacaaccttgatccttcagggagggctgccctgggagtccatctcttcgcttacgatgc

SEQ ID NO: 216927 - DNA, 442 bp, Gossypium hirsutum
  unsure (1)..(442): unsure at all n locations
cccacgcgtccggatctctatggccaactcccggcagaacataaggaagttggttaaagagggttttatcatcaggaagccaaccaagattcactctcgatctcgtgctcgtcgcatgaaggaagccaagagaaagggacgtcactctggatatggtaagcgcaagggtacaagggaggcaaggttgcccacaaagatcttatggatgagaaggatgcgtgtacttagacgcctactccgcaagtacagggaatcaaagaagattgacaagcacatgtaccatgacatgtacatgaaagtcaagggtaatgtgtttaagaacaagagagtcctcatggagagcatccacaaatccaaagctgagaaggccagagaaaagacattggctgaccagtttgaagctaagagggctaagaatagggcangcagggaaggaacatgc

SEQ ID NO: 216928 - DNA, 422 bp, Gossypium hirsutum
  unsure (1)..(422): unsure at all n locations
cccacgcgtccgaaggtggtaggggcattcctagaaggtggtagtgccgaagaaaaccaggcaattgctaaagttgctaagcttcagcctaaagctgagaatttggatgcgctgacaaaagaaggtcttgcctttgcctgtaagatatgaagagtagtaacagctgccatgccttacaaaaaaggaagaacactgttgcaagaggactgcgtatgggaagggttggatctgagttttttcattgggttgttatttctctttgcatttagtacatagattctggagtttgctatgtttatcttgcttttcttttgaatgatgaataataacaaacaatattcaactgtatgttgtgcagtacgaaaaataaaacctatgatcttgctggtaaaanaaaaaaaaaaaaaaanaaaaacccccct

SEQ ID NO: 216929 - DNA, 446 bp, Gossypium hirsutum
cccacgcgtccgggctcacactgatgctggtggaatcatcttactcttccaagatgacaagggcagcggccttcagcttctcaaggatggtcagtggattgatgttcctcctatgaaacactctattgtcatcaaccttggtgaccaacttgaggtaatcacaaatggtaaatataagagtgtgatgcaccgtgtgattgctcaaacgatgggaccagaatgtccattgcttccttctacaacccgggcagtgatgctgttatatatccagcaccagctttgctagagaaagaagctgacaaatctcaagtgtaccccaaatttgtgtttgaggactacatgaatctctatgctgacctcaagttccaagccaaagagccaaggttcgaagccatgaagaccgtggagtctgcagttaacttgggtcctattgcaactgtttgagt

SEQ ID NO: 216930 - DNA, 427 bp, Gossypium hirsutum
gccgaaggcttgctgcgacgggatccggtccctgaacatgatggctcgaaccacccctgagcgccaaaccgtgtgtgggtgcttgcaaactgccgctaaggctgtcaaaattaaaggcaacttggctgagaccctcccggccaaatgtagtgtcaacatcccttacaagatcagcacttccactaactgcaaaaatgtgaagtgagatgatgaagagagggttttgcagcagcttgaaggagatataatatatgattaaaaagaagaagaagaatgaataaggattttgggatggaattttcaaaatccaaaattagtctccactttagtgtagtgaggctttgtttattttgtttaatgttttggtccctgcatgtattggctgttttaatgttttaatgaaaggaagtttatgctttgtcagatc

SEQ ID NO: 216931 - DNA, 394 bp, Gossypium hirsutum
cccacgcgtccggctggagggtatgccatttacaaatacagtttccggagatacatggatgcagagattcgggctataatggcacaatacatgccattggataatcaaccaaacaacgttcatcatccagacatctgaagtgcctcttccgattgggttggttatatattagtaggttttatatttttgggtcacgtaacttatttggcttctcttcgacattgtaattctaaataaagaacaattttcataattatgtggcttttacatttatcttccggctggatttatttttgaaaaattgagttcagggtgggtcggaaaatagttgggtaaatttgcccgatattaagtttttaaaataaataaaatttggatccggatgcttcgttct

SEQ ID NO: 216932 - DNA, 345 bp, Gossypium hirsutum
cccacgcgtccgattgattgtagccatggatattgctgccgactataacatgtaaagaaagagctcatggtctaaaaagctgtttgtccagaacagaaaggcagctatcactgacatccatcggatcaagcttatgttatctaaaatcaagaaggctggcatacgcaggcaagagcttgcaaagcttaaaaaggagaatgcatatagcggtattctgaattaaaggattgtttgctaattctctcatcaatgttacgccagttctatataggactgattttcgtttttctattatacaggagatcaagatcttttgaggacaccttatttactgtatgacagatt

SEQ ID NO: 216933 - DNA, 422 bp, Gossypium hirsutum
caaactacaactgtccttgctgtgggctcaaacaacggacatggtgttaccaggggggtacggggtcgccacccttgtaatacaaaggggaaaactagcatgagagtccactttgtgaggagcctaattcgggaggttgctggtttcgctccgtctgagaagaggataactgaacttctcaaagttgcgaaagataagcgtgctttgaacgtggcgaaaagaaagctaggcactcacaagcgggccaagaagaatcgtgaggagatgtctagcgttctccgcaagatgaggtcagctggaggtggagagaaaaagaagtgagtagccctgcgattgtgcttcaaagcaagtattgagttttttagatttgttaaattttctctatcacctttgtattgagagtttggagtactgattcggat

SEQ ID NO: 216934 - DNA, 447 bp, Gossypium hirsutum
tgggcttatccaagaagcaatgaagcttttttgattaatgagggaaaagggtacaatccggggagttgtaatatacacagctgttgttgatggcttctgcaaagcacacaagcttgaggatgcaaagagaattttcaggaagatgcaatcaaaaggtgtgatccccaatgcttttagttatactgttttgattcaaggattgtataaattaagcacttggatgatgccgttgagttttgtttggaaatggttgaagctggacattctccaagtgtcaccacatttgtgggcttggttgatggattgtgcaaggagaagagtgtggaagaagcagtgaatgctattggaaccttaaaacaaaagggatttctggttaatgataaagctgttagacagtttctggataagaaggctcctttttcacctttaatttgggaagcaatattt

SEQ ID NO: 216935 - DNA, 412 bp, Gossypium hirsutum
atttttcctgctagcaaaacagaggatctgcagccaattgatcgctttgttgttgaagagtctttgctggatgtgcttttgttcttcaatggatgtcgaaaggaatgtgctgctttcatggtaggcttgcctgtgcccttccgatatgagtatctaatggcagagacaatattctcccagctgcttttgttaccacaacccccattcaagccaatatattacacactggttattatggatctctgtaaggctctccctggggcctttcctgcagttgtagctggtgcagttcgtgctctttttgttaaaattgctgatttagacatggaatgtcggacacgccttatcctttggttttcacaccatctatcaaatttccaatttatttggccttgggaagaatgggcttatg

SEQ ID NO: 216936 - DNA, 421 bp, Gossypium hirsutum
agaagaaggtgcagaaaatgagctgtcatttcaagagtggacacaacaggttcaggatatgctgaatacaaagaaatttggagatattgcatttagagacaaagattttaaaaatgctattgattactactcaaagttggtagcgatgatgtctgttccttctggtactgtatttgtgagaagagccctttcatacttgattattggccaaccagaacttgccttgagagatgccatgcaggctcaggtatgcttgcccgagggccccactgctttttacatgcaagcttttgccttctccaagcttggaatggaaaccgatgcacaggacatgcttaatgatggagcctcatttgaggcaaaaagcagaatggctggcgtgtctaagcagcgatcaggcagtattgttaatttttttttc

SEQ ID NO: 216937 - DNA, 415 bp, Gossypium hirsutum
aaaaagaagggtacttttcaacattctagtttcttggctggtggtgctactattgctgctggtagattaggggttgacaatggtgtccttaaggcggtctggcctcatagcggtcattatcgtcctacagaagaaaactttaacgatttcatttcatttctgaaggagaacgatgttgatcttacagatgttaagatggcaccagttgatggagaagagagtttccatggaaccagtcaccatcttagatgcaattcatctgaagaaaatagcttagagcctgaagaaaacagtgttaaaggttcgatcgagaagctcggtgatttgatcgaagaaggaaccagtgaaagccttgagtgcacaatgtcaagcaggttcctcaacttgagtcatcttgaaataccgatgaaaaccg

SEQ ID NO: 216938 - DNA, 421 bp, Gossypium hirsutum
atttttcctgctagcaaaacagaggatctgttgccaattgatcgctttgttgttgaagaggctttgctggatgtgcttttgttcttcaatggatgtcgaaaggaatgtgctgctttcatggtaggcttgcctgtgcccttccgatatgagtatctaatggcagagacaatattctcccagctgcttttgttaccacaacccccattcaagccaatatattacacactggttattatggatctctgtaaggctctccctggggcctttcctgcagttgtagctggtgcagttcgtgctctttttgttaaaattgctgatttagacatggaatgtcggacacgccttattctttggttttcacaccatctatcaaatttccaatttatttggccttgtgaagaatgggcttatgtcctagacc

SEQ ID NO: 216939 - DNA, 446 bp, Gossypium hirsutum
cccacgcgtccggtaaccccaatcatcaccatgctcaacagcaacagtcctcagtacagcctgctcctcctgcaccttccgccgctgttcagccttcttctcaacctaccttagctgaattcgccgctgattctggggacttgggatccggggctgctggggatgagccggcacggactctcaagcggcctcgtctcgtgtggaccccacagcttcacaagagattcgttgatgccgtggctcatttggggatcaagaacgctgtccccaagactatcatgcagttgatgagtgttgatggtttgacaagagagaacgttgctagtcatttgcagaagtatcgcctttatttgaagagaatgcaaggtttatctggtggtagtggtggtggtgccaatggtggatctgggggtgccggattaggtgccttggcttgatcagccaca

SEQ ID NO: 216940 - DNA, 442 bp, Gossypium hirsutum
tcgcccacgcgtccggagggaagtgcagctttgaagatggtcgaggaagtgcgccgacagttcaacacaatccctggtctcatggagggcaccactaagcccgactacgctacctgtgttaagatctctactgatgcttccatcaaagaaatgatcccaccgcgtgctcttgtcatgctcacaccccttgttgatgggatctttatcggcgtggaaactctttccggtgtcctcgctggatctgtcgtctcaggcgttcagatcgctatctctgcatccaacacggggggcgcttgggacaactccaagaactacatcgaggctggggctaaaacacatgcaaaatctattggccccaaaggttcaaatccacacaaggcagctgttataggcgacaccatcggtgaccctctaaaggatacatccgggccatcgttgaaca

SEQ ID NO: 216941 - DNA, 439 bp, Gossypium hirsutum
cgggcattgtgatccagaaatgtaggataggtgccacttctgatttacagcctgttcgtagagacttcccaacatatcttggcaggccctggaaggagtactcgaggactgtggtaatgcaatcaacaatcagtgacgtgattcaacctgctggttggcacgagtggagcgggagtttcgccctgaaaacactgttttatgccgagtccagaacaccggggctggtgcctcaacttctgcgagagtgaaatggggagggtacaaggtgatcactagtgcaagtgaagctcaggcttttactcctggcaggttcattgctggaagaagttggttaagctctacaggctttcctttcgctcttgggttgtaataattttaaagattgtattgtcaatgtaaccacctgccgacttcattgtttggtttgagatttgctttg

SEQ ID NO: 216942 - DNA, 453 bp, Gossypium hirsutum
ctttgtggagagggaacactgtcaatgttattcgttatttccccactcaggccttgaactgtgccttcaaggattacttcaagaagcttttcaacttcaagaaagacagagatggttactggaaatggtttgctgggaacttggcatctggtggtgcagctggtgcttcttcccttctctttgtctactccttggattatgctcgaactcccttacaaatgatgcaaaggctgcaaagaagggaggagagagacaattcaacggttttgttgatgtctacaggaaaaccctaaaatctgatggtattgccgggctttaccgtggtttcaacatttcatgtgttggaatcattgtttaccgtgctctatattttggaatgtacgactctctgaagccagtgcttttgactggaagcatgcaggatagtttcttcgctagctttgctcttggttg

SEQ ID NO: 216943 - DNA, 379 bp, Gossypium hirsutum
gtgtttaccttcctccagctgaggaagctgttattgctgcattgaagagagcccttggcgctttgaacactcatcttgcttccaacacatttcttgtgggacatgctgtcacccttgctgacattatcatgacatgtaatctctacttgggtttcttccagatcatgaccaagagttttacctctgaattccctcatgttgagaggtacttttggaccttggttaatcagccaaaaatcaagaggattcttggtgaagtgaagcaggcagtctctctaccacctgttccttcaaagaagcctgctgcccagccaaaagaaactaaaccaaaggctgaaccaaagaaagaagccaaaaaggaggttgagaaacaggcagc

SEQ ID NO: 216944 - DNA, 374 bp, Gossypium hirsutum
gcggagtgtggggccggcactttcatggcctataagatgaagcaccagacgaagaagggcgagctcgccgtgctccagatctacaaggtggatgagtccaggaaggttcacaggctgaggaaagagtgtactaatgcggagcgtggggccgggactttcatggccaatcattttgataggcactattgtggtaagggtgggctcacttacgtttaccacaaggctggtggagactgagcagcgtccgattccaccttcagtaaaaaaaaaaaagctgaaatcaatagtttatttgtatcagtatgagtcgcattaatattcgctaatattcggatctttttatatatttgtcatgctatgatactttggatatg

SEQ ID NO: 216945 - DNA, 426 bp, Gossypium hirsutum
agacaaataaaatatgaagagttcattgcttgtatctgttgtaatcagcttggtaataggggcttcagccgccaactttaaccaagacatcgacgttacttggggagatgggaggggcaagattctcgaaaacggaaaccttctcactctcaccctcgacaaattctccgggtctggttttcaatccaagaaccaatatctggttgggaagatcgatatgaacattaagctggttccaggcaactctgctggcactgttaccacttactatcttcgttcggaagggtcgacatgggatgaaattgacttcgaattcttggggaacctaagcggagacccatacatagtccacaccaatgtatatacacaaggcaaaagtgacaaagaacagcagttctacctttggttcgatcctaccaaagactt

SEQ ID NO: 216946 - DNA, 405 bp, Gossypium hirsutum
gttctcaacaggcgatgttaaggagctcggaagtgcacaaaatgttaaccaacatctcagcaaccttcttgttgacaatacaataagggtcaagtccgagagagtttgcgataccagccctgccaatatattccccgatcacttcggacaagatgatctcatgagtgctcttctcaaacagcaagaaagtgttgcatcatctgaaaacgagtttgacttcgacgggtattctatgaataatattccagtgtagggtgttattccatactccagctcacgtcgtgattgcagtttccgatgtacatatccattgtaacggaaaagttatcacttcagcaatcaagttagtgggaactcaagtttggttaagaaactgcgttttgcttagttggaagaaggtgtctt

SEQ ID NO: 216947 - DNA, 303 bp, Gossypium hirsutum
cccacgcgtccgggattacccgctgagtttaagcatatcaataagcggaggaaaaaaagggccagaattgggaaatggaaagagaccaacttcagaattttcattgtaccggtaccagtctttcttcttcttttacgttatgtttccaagtcaagaaaatagtgacaaaaaaaaagaaaagaaaagaagattttgcagccatggctgatggctcatgcattgtttatttccattacaagtatacattaaaaggaagttaagtttcctggtaacagatgccatatctataccctatttgactta

SEQ ID NO: 216948 - DNA, 409 bp, Gossypium hirsutum
cccacgcgtccggcggtagggaaccaactgttacacacagcagcagcagcagcagccagggggaagtactcaagagaaccggacaaccctactaaatcttgcaaagctaggggttctgaccttcgtgttcattttaagaatacacgagaaactgcctttgcaatccgaaagctacctttgacaaaggcaaaaaggtacttggaagatgttattgcccacaagcaagcaattccattcaggcgcttctgtggtggagttgggcgaaccgcacaggctaagaatcgccattctaatggacaaggccgttggcccatgaaatctgcaaaattcattctcgatttgctcaagaatgccgagagcaatgctgaagtgaaaggcttggatgtagattcacttatcatatctcaca

SEQ ID NO: 216949 - DNA, 118 bp, Gossypium hirsutum
cgggggtcccagtcccgaacccgtcggctgccggcgcactgctcgagctgctcccgccgcgagagcggttcgccgcgtgccggccggtggacggactgggaacggctccctgggggcc

SEQ ID NO: 216950 - DNA, 421 bp, Gossypium hirsutum
cccacgcgtccgcggatttcagtattctctcattcttttcccgggacccagacaaactctaggagcaagaaaatggcaccaaaagctgagaagaagccagctgagaagaagccagcggaggagaagaagacggtagctgagaaagcccccgctgagaagaagccaaaggcaggcaaaaagcttcccaaggaaggcggagctgcggccggagacaagaagaagaagagggtcaagaagagtactgagacctacaagatctacatcttcaaggtcttgaagcaagttcaccctgatatcggtatctcaagcaaggctatgggaatcatgaacagcttcatcaatgatatctttgaaaagcttgcccaagaatcgtctaggctcgcaaggtacaacaagaagcctaccatcacttccagggaaa

SEQ ID NO: 216951 - DNA, 435 bp, Gossypium hirsutum
  unsure (1)..(435): unsure at all n locations
cactttccgaaccagacaggcgcatatcctctcagcccagcgaccatgacaaagagaacgaggaaggccggaattgttggcaaatatggtacccgttatggtgccagtttgaggaagcaaattaagaagatggaggtgagtcaacacagcaagtacttctgcgagttttgtggaaagtatgcagtgaagagaaaggctgtaggaatctggggctgcaaggattgcgggaaagttaaagctggtggtgcttatactttgaacactgccagcgctgtgacggtgaggagtactattagaaggttgagggagcaaactgagagttgagctgctgctgactacgttatgttcacaactttggtatgatgttcgngtatgtgttggctacaaaccagttgagtcattttgttgacaattatggcgcttatttcttaattt

SEQ ID NO: 216952 - DNA, 430 bp, Gossypium hirsutum
  unsure (1)..(430): unsure at all n locations
ataagcacctccccgtaagcaaaccacataggaaagcttggagagagacccaaaaagggggtctaaggaagttagtgaagaaggacagggtcgtaaggactatgtggaccctccaccggcacctctgattgacatggctgaactcaagtcatggtctttttacagagccctcatagctgagttcatagccactctcctcttcctctatgtcactgttgctactgtaattggtcacaagaaacaacaagatgcatgtgatggtgttggtctcttgggtattgcatgggctttcggtggcatgatctttatccttgtttactgcactgccggtatctcaggtggacacattaaccctgcggtgacttttgggttgtttttggcccgtaaagtgtctttcattanggctgtggcttacatggtgtcacagtgc

SEQ ID NO: 216953 - DNA, 445 bp, Gossypium hirsutum
cgccttgggaacaagccaagaggctgctcatcctgactgcatcaaagcccttgtggtcgagtttatcaccactttcctcttcgtattcgttggagtaggagctgccatggccgccgatgagtcgggggcaaatgcgctggtgggattgtttgctgtggcggtggctcatgcccttgtcgtcggcgttatgatatcggccggacacatatcaggcggccatcttaacccagccgtcacgcttgggttgctattcggtggtcacatcacggtggtccgtgcgatcctctactggatcgatcagttgttggcatcttcagctgcttgtatacttctcaagtatctcaccggaggattgaacactccggttcacacattagcaagtggaatggggttccttcaaggtgttatatgggagattattctcacattcgcattgctgttcaca

SEQ ID NO: 216954 - DNA, 395 bp, Gossypium hirsutum
cccacgcgtccggtacaaggatacagggcaacacttcaatggtgagttctcgatggcagtggggcaggccaataatttacttgaggatcagagccagcttgagtctggttgtttgagttcacatgagtgcggtccctatggtacttttgttggtgtatatgatgggcatggaggccctgagacttcacgttacatcaatgatcatctctttcaacatctcaagcggttcacctcagagcaacagacaatgtcagttgacgtaatacaaaaagcttatcaagcaacagaagaaggttttttgtctctcgttaccagacaatggcctatgaacccacaaattgctgctgttggatcctgctgcctggccggtgttatctgtggtggaaccctttatg

SEQ ID NO: 216955 - DNA, 444 bp, Gossypium hirsutum
gggatttgcgggtggagaagacgagagctcatctctctgcttcaaagctcctgtccagggagaattctcttcttcctttgcgttgtgttctttgttgttcagtcgccatggcttcaaagcggattttgaaggaactcaaggatttgcagaaagatccacccacttcttgcagtgctggtccagtagctgaagacatgtttcattggcaagcaacaatcatgggaccctcagatagcccttatgctggaggtgtgtttttagttaccatccatttccctccagattatcctttcaagcctcctaaggtcacgtttaggaccaaagtcttccatcctaacatcaacagcaatggaagcatttgtcttgatatcctcaaagaacaatggagccctgcactaaccatttccaaggttctgctctcaatctgctcgttgctgaccgatc

SEQ ID NO: 216956 - DNA, 314 bp, Gossypium hirsutum
cgtaaatggagcaaactgcaaggaattggccgcacaacccgatgttgatggctttttgggtggtggagcttccctaaagcccgagtttgttgatatcatcaaggccgcgatggtgaaaaagaattagaagttgaaaagcaggaattaaaggtgaaacagaaacaaccttctgggaaactttaatttttgtagttgagatctttccttggaacctaatgtctgttgaaaatttcccgatgtaataagccaaatttaactatgtgttttttttttgcggtggttgaggcattgatcctcatttcggactttccctg

SEQ ID NO: 216957 - DNA, 437 bp, Gossypium hirsutum
cccacgcgtccgtctacattcagcgaaggggtgctctgagatcacataccaaaatggtgaagggcgttgccgtccttggcagcaatgaaggtgttagcggaactgttttcttctcccaagaaggagatggtccaactaccgtgactgggaacctttctggtcttaagccgggactccatggcttccatgttcatgcccttggggacacaactaacgggtgcatgtcaactggaccccattttaatcctgctggcaaagagcatggtgctccagaagatgagaaccgccatgctggtgatctagggaatgtcactgttggtgatgatggctgtgcaagcttctccatcaccgacaaacagattcctctcacaggcccaaactccattatcggaagagctgtagttgtccatgcagatcccgatgaccttggcaagggc

SEQ ID NO: 216958 - DNA, 232 bp, Gossypium hirsutum
attttgataggcactattgcggtaagtgtggtctcacttatgtttaccaaaaggctggtggcgattgagtttccatctttagcttgtcgatcttttgttagtatgagagacgggattttaatttccaattatcgttcgactgtttaattttttattatgttttatcatgttacgatacttgggatatgattatcaattttagcttttctgaatctaagtaagggcattttac

SEQ ID NO: 216959 - DNA, 449 bp, Gossypium hirsutum
cccacgcgtccgcccacgcgtccggatggtgtgagccacacagtccctatctatgaaggctatgctcttccacatgccatcttgcgtctcgacctatctggtcgtgatctcactgatgctctcatgaaaatattaacggagcgtggttattctttcacaactacggctgagcgggaaattgtgagagacatgaaggagaaactagcttacattgctcttgactatgaacaagagttggagacagcaaaaaccagctctgccgttgagaaaagctatgagctacctgatggacaggttattaccattggggctgaacgattccgttgtccagaagtcctcttccagccatccatgatcgggatggaagctgctggcattcatgaaacgacatacaactcaatcatgaagtgtgatgtggatattaggaaggatctctacggaaacattgt

SEQ ID NO: 216960 - DNA, 432 bp, Gossypium hirsutum
cccacgcgtccgattttcgttagttttagctttgctgctatgtatggcattgctgtttgtgcccttggaatgctgagcaccatagctaccgggttggctattgatgcttatggtcccatcagcgataatgcaggaggcattgctgagatggctggcatgagccacagaatacgggagagaacagatgctcttgatgctgcaggcaacaccactgctgctattggaaagggtttcgccattggttcagcagcactggtttcccttgctctctttggtgcctttgtgagccgagctgctatctcaactgtcgatgtattgacccctaaagtttttatcggtttgcttgttggggcaatgcttccttattggttctctgctatgaccatgaagagtgtgggaagtgcagctttgaagatggtcgaggaagtgcgc

SEQ ID NO: 216961 - DNA, 423 bp, Gossypium hirsutum
cccacgcgtccgcccacgcgtccgcccactcgtccgctcacgtacagagaagttattggtgttctcatgcagaggcatgtcatggttgatgggaaggttcggaccgataagacttatcctgctggtttcatggatgttgtgtccattcctaaaacaaatgaggacttccgtctcctttatgacaccaaagggcgtttccgtctccatgccatcacgggtgatgaaaccaagtttaagctttgcaaggttaggactgtccagtttggccagaaaggcattccatacctcaatacatatgatgggcgtactatccgctacccggaccctctgatcaaggctaatgacaccatcaagctggaccttgagagcaacaaaattgttgatttcatcaagtttgatgtcggaaatgttgtcatggtgact

SEQ ID NO: 216962 - DNA, 455 bp, Gossypium hirsutum
ctttgaggtttttttaggttgctcttggaacatttagcagccaaccaaaaatggttctccaaaacgatatcgatttggtgaatcctccagcagagcttgagaagaagaagcacaaactcaaacgtcttgtccagtctccaaattctttcttcatggatgtcaaatgccaaggctgtttcaacataacaatagtgtttagccactctcaaacagtggtggtatgtggtaattgtcagactgttctttgtcaaccaacaggaggaagagctagactcaccgagggatgctctttcaggaagaagggtgattgatctcatattttgctattttatgattcacaaaaacaaaagaaagtaatctttggatcaaatatgggaatcatatgagtaatctttttcatgtgtttcagttatgacatatgtttgaagtttatttttgtagtaagttggtacttg

SEQ ID NO: 216963 - DNA, 438 bp, Gossypium hirsutum
cccactcgtccgcccacgcgtccgagtattctctactgtattgcagagccacgaggatctggctgggaagcttcaggaagagatggggagaagtcgcagagcatcatcaggctccatgtctgatggctctggtaggcggatgaaggaagttgcctgtcctacatgcacagttcatttgcaggttcaagttccaagctcaagttctgagaccattgaatgtggggtgtgccagcatccttttctcgttagtgcccattgatcaatgcgcttttgtcaccagtgaattgctctttttctctattaatttcttgttgaggtcgtgtttataataaactaatacggatgagctctctattatctcttttgtcatctcttcaagttattgtgaatatggaacttatctcttgatctttaatcaaatcttttgtgtaaaattta

SEQ ID NO: 216964 - DNA, 441 bp, Gossypium hirsutum
tgttcctctagatgttggtccagccacacagttggatatcatagcggagtttgagatagatgacgaggcgttagagaaaacaacagggtccaatgtaacattcagctgcagcagcagcggtggaactgtagaacgtggggcattgggaccatttggtctgttggtgcttgcggatgacagcctcagtgaacagacacctgtatacttctacatcgccaaaggatccgatggcaaactcaagactttcttctgcaatgatcaatctcgatcatctgtagcatctgatgttaataaacaaatttatgggaacttggttccagtactggagggcgaaaaattatccctcagagtcttggtggatcattcgatcgttgaaagctttgctcaaggtggaaggacagtcatcacatctcgggtttatccgacgaaagcaatctatgg

SEQ ID NO: 216965 - DNA, 416 bp, Gossypium hirsutum
gcctagcttacgtcctaatggaccacctgatggttcaaagagtggttgtactaccttcggagcggacttgctatcctacaagatccattacaataaccattacacctgccctgataccagctatgcttagagctataaacatgcttgtacacacgcatttacttacacatataattaccctcatgttatgcactacttcattcacgaacgtgagctaacacgtatgctctgtcacttgaggtagaccatgatgaagacgagtatgaggaataatctgtagaactatgtgaaagactttgtgaaagatatagtgaatggattaaagcattgatggaagcataaaaagtggaagaagaaaattgagtatgttaatacaaatgttatgacagatgttatgcatgttgtttttcatcttc

SEQ ID NO: 216966 - DNA, 332 bp, Gossypium hirsutum
tcggcgaccccttggcctgaaaaaaacattacctgtttgacagggctggatcataacagggcacggggtcaaatctcagagaaactaaatgtccaagtttctgatgttaagaatgtgattatttggggtaatcattcatcatctcaatatcctgatgtcaaccatgcaactgttatgactccatctggagaaaagccggttcgcgagcttgttaaggatgatgcatggttgaatggagaattcataaccactgtccaacaacgtggtgctgcaatcatcaaagctaggaaactctcaagtgcactatctgctgctagtgctgcttgtgatca

SEQ ID NO: 216967 - DNA, 436 bp, Gossypium hirsutum
cccacgcgtccggtagcccagcttgttacctactgtgcttttggagtactagctggagtgggcggcggtctgcttggcctaggaggaggatttatcatgggtccactattcttggagttgggtgtccctcctcaagtatcaagtgctacagctacctttgccatgacattttcctcatccatgtctgttgtagaatattaccttctgaagcgttttccagtaccttacgctctgtacttcactggggtagctacagttgctgcctttatcggacagcatgttgtccgaaagctgataattttatttggaagggcatctttgatcatcttcattctagcctccacaatatttgtcagtgcaatatcactaggtggtgttggcatatcaaacatgatcgggaaaatcgagcgccacgagtacatgggattcgagaacc

SEQ ID NO: 216968 - DNA, 439 bp, Gossypium hirsutum
ccgcttcacttttccttcttttcatcttctcaatcacaccaccgtcctttttgttcgagggtgccaacgctacaaaatatcctgtgctcgacatcgatggtgactggctccgcacaggcgttgaatactacgttgtgtcagcgatatttggtgctggcggtggggggcttgccctaggcaggtctaccaaacaaccatgcccggaaatcgtcgttcaaagacgatccgatttcgacaaaggtacaccggtgatattttctaatgcagacaccaacgatactgtagtccgcctatccaccgatgtaaacatagagttcactcccatcaggaccaaactctgccgaacaacaacggtgtggaagattgacaattatgatgattcagccgggaaatggtgggtgacaaccgatggggttagaaggaaccctggtcccaacac

SEQ ID NO: 216969 - DNA, 337 bp, Gossypium hirsutum
tccgccacgccgtccaaccgatgatgatgataattgctatgaaaaatctgctctcgaattacttgcggaagatattattattaagattatttgtggtgtggatcatgaagatttgaaacggcttcctattgtttctaaatcaatcagagaagctgctatggttgcaaagcaattgcattttgcatatagtacaccaacaaaggtgaaagcttttaaaacatcaatagatttcgatgaacaaagtgaatcaaacgacttggaacttgaagctccaaatgcacctcaacaatggcggtcacacaggtcaatcaacaagaaaaaacttgcagatatatca

SEQ ID NO: 216970 - DNA, 372 bp, Gossypium hirsutum
gttcacttctaccaattgttggaggagttgttcttgcatctgttactgaggcatcttgcggttggcctggattttggagtgcaatggcttccaatttggcaaaccagtcccgtaatgttcttagcaaaaaactcatggttaagaaagaggaatcgctggacaacattaccctcttctcaataataacaattatgtcctttatcttgctagctcctgtggctatctttgtggaaggcataaagtttacccctgcctacatgcaatcagctggtttgaatgttaaagaagttgttgtaagatctctgcttgctgctctatccttccatgcctatcagcaggtttcatatatgatactgcaaagggtgtcccctg

SEQ ID NO: 216971 - DNA, 419 bp, Gossypium hirsutum
ggccaattggtttcgagttgtcggctgtttgtcccatgcggcaattttggcacgttgggtggatggggttcgcacgtgggcacacccaccaacgactatcttagttcatgttttgcttatagcggtggtgatgtgcccacaactagtcctctccaccatattcatgtatgccttcttaattttggcattgagatttcgttaccgcatgcgagtcacacacaatgtatacctaaggctctcttacgttgacgctgtcggtcctgatgagctcgatgaagaatttgacggactttcaaccacacgatcggcagacacaagtcgggttcgatacgacccgttacgcgcattggcatgccgagcacaatcactattaggggatgtagcaacccaaggggaacgtttagaaacattgtttaatt

SEQ ID NO: 216972 - DNA, 381 bp, Gossypium hirsutum
  unsure (1)..(381): unsure at all n locations
gccaaaaggagagctgaaattgctaggttgagagaactgcacacactgaaagggcatgtggaagcggtggtgagattgaagaacctggacatagacacaatccagcaagcgtacacggtgtaaggcggtggaatggtattccgaaggaatagtggaaaatgtaatgagagggagcgttttcctgcgagtgaagctctaatatatgtatcttttattaccttaatcccgtccgccattttacaagggaaaggttattgtttatggcattttatgtttatattagtagtaaaaaaccatgtgttttgcttttgttgtagtaaaaaaaaaaaaaacaaaaactggtatagtaggaataagaacccaaattaactttttcggntt

SEQ ID NO: 216973 - DNA, 368 bp, Gossypium hirsutum
gcttcatgagaatgttggcggtgacattgctgcatcaactagaattatatatggaggttcgcgggatggagcaaactgcaaggaattggccgcacaacccgatgttgatggctttttggttggtggagcttctctaaagcccgagtttgttgatatcatcaaggctgcgacggtgaaaaagaattagaagttgaaaagcaggaattaaaggtgaaacagaaacaaccttctgggaaactttaatttttgtagttgagatctttccttggaacctaatgtctgttgaaaatttcccgatgtaataagccaaatttaacaatgtgttttttttgtggtggttgaggcattgatcctcatttcggactttg

SEQ ID NO: 216974 - DNA, 358 bp, Gossypium hirsutum
cgggtcgcccacgccttcggccaaggcttccgcccacgcttccgcccacgcttccgcccacgcgtccgcccacgcgtccgggggcgcgtccgtttgacaatgaaatcgatatgctcggtcttgagacctatcctggtgttaaacgcatcaccattaagcctcaaaccgataggtgggtcttccctgaaaccaaaaccggcatcattgtgttggctgaaggacgtctgatgaacttgggatgtgccactggacacccaagttttgtcatgtcctgctcgttcactaaccaagtgattgcccagctcgaactatggaaagagaaagcaactggaaaatatgagaagaaagtttacgtatt

SEQ ID NO: 216975 - DNA, 441 bp, Gossypium hirsutum
gttgattaatgggtttagggactatgctctgacgagtgctttgagggaccgcaggttcccggctattcaagctaaagaactgcctaacttagaatgtacagtttctattctgactgattatgaaacagctaataactaccttgattgggaggtaggaaagcatggcataattattgagtttgttgatgattataattcaaggcgaagtgccacatatttacctgaggtgccggcacatgaaggttggactagagtggaggcaattgactcacttatccggaaggcaggtttcagtggccccataacggagtcgctcaggaagcgtataaaactgacccgttaccaaagcacattatttaccatgcactacagtgactatgcctcccaagttaaggcaaccaggggtgcagcgcctactattgctggcgctaagctcggaaa

SEQ ID NO: 216976 - DNA, 440 bp, Gossypium hirsutum
gaagaatcaacccttacatgtcctctccttgccacattgagttgattttgtccgagaaggaggaacctgtcaaaaaagagcctgagactcaattggcagcaagcaagtccaagaagtcccaagcttcttcttgagtgaacaaagtttgaaactttatcaagtcagttaatgtagtgatgtctggtctttggatttcatacactatttttgaagtttttgacattaagatgtgttggatggttttttatttcaaagcatgttttagtcaaatgttgtcttgagttatgtttttcttggagattttgtctcaattacagtgttctatgttatgtttcatttatatgacttttaatataaaacaaggttcgttaattggtaggttggtttggttgtaagttaatttgggttttaaagtttttgaattattttgatttaagcaa

SEQ ID NO: 216977 - DNA, 449 bp, Gossypium hirsutum
cagccgtccgaaactatattagccaaatacccagatcgatttcctgtgatcattgaaaggtattcagggacggacctcccagatatagagaagaatatgttcctggttcttcgagacatgttggtgggtcagttcattcacattttaagtagcaggctacatttgagtcctggaaaagctcactttgtttttgtgcacaatacattacctcaatcagtaagtctcatggggtgtgtctataattctttcaaagatgatgatgggtttctctacatgtgttacagcactgaggaaacttttggctaaactctcctctgcatctttaatcttcaatgtgaaacaatgggaaaatatatatacatatctatgtatgtgttggtggaattggttatagttcaattcaccctattgatctgtaaatgatgtaactatatttaaatataaaatgg

SEQ ID NO: 216978 - DNA, 440 bp, Gossypium hirsutum
cccacgcgtccgcaacctcgattcatggttcagcttttgcacaaagccagaagatcatgggtgccaaccaaaacatgttaattcttgaacattcggctaagaactgttccacaaaaacccaagtaaaagcccgtccggtagttggttctaagcttgtagcacaaggtgttcttcgtaaacccgggaatggctcagctcttggtcccaaggctccggttcaaccaccacctgaaatatggacaaggggaaatggccttgatgaagttgttgacatggcagatatgttgcaaatggaatcccaagattggttcctaggatttgtcgagaaattcttggatgccgatgtagacacatctgttctatccgacaacggtcaaataagccggatgttgacacaactcaagagtgttaatgacttgttagatgaaattagttcgagt

SEQ ID NO: 216979 - DNA, 446 bp, Gossypium hirsutum
ctggtttgatcctaaatgggaaggctgcctgctgtatgcacatgggaaactttgacaaggggtggacactgttacttgaagcactcaataaggatgcaaaggatcctgaaactctggccaacctggttgtatgcggccttcacctcggtaaatcatcttcacgttatctaagccaattgaaactcacacatacagagcacattcttgttaaacgtgcatcatctgcggaagacagctttgaaagagcagagcaatcagatgcttgaagaagtggagttagttttgttttattctacaactgctctgactgctattctttgccctacgtgagtctatgatcaattatgagatcgttggcaaatttagagcttgctcggcaaaatagaacggtacttggaaacatttggattctgcgtttttttttggctgttagtactgctcttaaa

SEQ ID NO: 216980 - DNA, 429 bp, Gossypium hirsutum
aagatgatgacgaagaagactcagatgaagattcggaggaagatgaaggaaagacttgggaagagttggagagggaagcaagctatgcagatagagagaaaggagatgattccgatagcgaggaagaacggaagagaagaaagatgaaggctttcggtaaaggtcgtgtacctgataagagacccagcggtaaccttccgaagaggtccaaattgaggtgacatgctttttgaaaacaaatgtagtagtaccagcaacctagtaaaatatggtagttgtactaaataatactagttgctttcagtagtatatgtttaatcaaggttttttatttgttgctttccatcccttttttgtgtgtcaatcaacttgttataaacttttaccagtaaattagctaagataaaatatcatggaggttttacctgt

SEQ ID NO: 216981 - DNA, 431 bp, Gossypium hirsutum
agaatacctccccagtcgcccctgccaggcttttcaaggcctttactgttgaagctccgagagtggggcccacggctgcaccaaatgcagtcaagagcattgaggttgaagctaatcctagctctggaagtatagtaaaaatcaactttgttgaaggccttccattccaatatatgaagcaccagatcggaggacatgatgaaagtaatttttcatacagttacgatttaatcgaaggtgggcctttgggggataagcttgaaaaaattagctatgagaacaagtttgaggcagctgcaggtggaggaagtatttgcaagagctcaatgaaattctacactgttggcgataatgttatcactgaagacgaaatcaaggctctcattaaagggagtgaaggagtttacaagcctgttgaagcttacctcttg

SEQ ID NO: 216982 - DNA, 430 bp, Gossypium hirsutum
ctttagcctgttcgacaaggatggagatggttgcattactaccaaggagttgggaactgtgaggcgatcacttgggcagaaccccactgaggcagaactgcaagatatgattaatgaagtcgatgctgatggaaatgggaccattgattttcctgaattccttaacctgatggcaagaaaaatgaaggatacagactctgaggaggagcttaaagaggcattcagggtgtttgacaaggatcagaatgggttcatttctgcagccgagctgcgccatgtcatgacaaaccttggtgaaaagcttacagatgaggaagtcgacgagatgatccgcgaagccgatgttgatggtgatgggcagatcaactacgaggagttcgtcaaagtcatgatggccaagtaaaggacctctccaactataaccaggatt

SEQ ID NO: 216983 - DNA, 441 bp, Gossypium hirsutum
cccacgcgtccgcccacgcgtccgcccacgcgtccgaatggtgttcaatgttaagatttgcgcttttggctatttacagcgcacatgctggctttctgcttggtttaacatgaccagctgaattgatcctccagggttttcttgtccatgggttccgattgtgccatctgtttgcatctttttcaacatatacctgtttgctcagttgcactatgaagcgtggatcagattcatcatcctcagcatagtatctgtaggtatttatgcattttatggacagtatcatgctaatccccgtttagatgagacaattatttaccatatggggcctgaagaagatagacactgagcattaatgtacagtcaccaatagttattggtgggacttgtagtctatcatcctattattgcacaatcagcttataaaattattagtgatca

SEQ ID NO: 216984 - DNA, 406 bp, Gossypium hirsutum
cagacctgaacgttgccgagatgaccacatctgagactctggttcttggtgtagcagcggggaaagcacactttgagggagctgagatggaattcggggctgagaacggctgcaagtgtggagacaactgcacctgcaacccttgcaattgtaaatgattagagaccaaagccaaagctccctgtaagcagagacgcctttgtctttaagaaataatatgttttgttgtttatgtgtttttagaataaagtagccatggcttgtcgtaagttttgcctgttgccgccacggttacttggtgcttgccaatagatagagtgaagtactaatatttacttgtttttctgtccaatgtgagcatctctgctatctcaagatatattgtgactattacataattaatgta

SEQ ID NO: 216985 - DNA, 444 bp, Gossypium hirsutum
gcctcccccaacttaacaccagcaaagcaaatgcttcaccaatggggatcgatttagtcgcaggaggtaagagcaagaagacgaagaggacagcccccaaatccgatgatatttacctcaaactcctcgtcaagctttaccgtttccttgtaagaagaactgggagcaaattcaatgctgtgatattgaaacgcttgtttatgagcaaagttaacaagcctccactatctctctctaggcttattgaattcatgaagggaaaggaggataagattgctgtggtagtggggacagtgacagatgatattagggtttatgaggttcctgctttgaacgttactgctcttaggtttactgagactgctagagctaggattgagaaagctggtggagaatgcttgacttttgatcagcttgctttgagggcacctttgggtcaaaaca

SEQ ID NO: 216986 - DNA, 422 bp, Gossypium hirsutum
ggtcaagcatctttgatgccaaggctggcattgcattaaatgacaattttgttaagcttggggcgtggtacgataacgaatggggttacagttctcgtgtgatcgacttgatccggcacatggcttctgcctaagtgagtgattttggtgaaccaaactcatttcataatggactttttaataatagcctcgttcttcagctttagcaaaatatggaagagatgctatgggaataataatagaaattgctcgggattctgggagtttctaattttacactgtaattgtgttctgtctgaaacacttgtaatatatataattacaaggaaccaaacaaacaaggcaaggcttaagtaaacttgggaacaagaagctaacattctatttagcatcaaaacttaaagaatttaatttacttgttt

SEQ ID NO: 216987 - DNA, 437 bp, Gossypium hirsutum
cccacgcgtccgatcacttccagggaaatccagacggctgttagacttgttcttcctggagaacttgccaaacacgccgtttctgaaggcaccaaagccgtgaccaaatttactagttcttgaatttgatggaatttagggttagtgttttcccctccattttgtcagcgtagttttgatgactgtaagtacttgtgtcacttatggatttgaaaaggaagaccctttttctttttggatatataaaattgctaatgtttgcctatattacgactgtctttatcaaggatgttgataaataaccacagcaccataaatataattaaatgagtatgcaaaagaattaatgattattacagttgcttctaagaaagaaaaagctggtggaaaatgctttactattgatcaacttgctttgagggcaccttttggtaaaa

SEQ ID NO: 216988 - DNA, 449 bp, Gossypium hirsutum
gcggcagctagtgcgaagccacttgcaagtggaggaaaccaaaatgtgatggctatggctctctttgctatgaccctcgatctgatggtggagatggagtcatgttctacttccatggagccaggggtgggaacttcgccatagtctcagatgatcagcttcaaatcaatgctcatttcatcggcactagaccacaaagaaggactcgtgatttcacatgggtgcaagccttgactgtcatgttcgatacccacacacttgacattgcagcaaatagagtttgtcagagggatgacaatgtcgatgctctcagtgtacgatgggacgactagacggttaccatcccttacgacggagaaggtgactggaggaagggtaacggctatgaaagacaagtgttggtggaaagaaccgatgacaaaaacagtcttcatgtcaaaatatctgga

SEQ ID NO: 216989 - DNA, 435 bp, Gossypium hirsutum
  unsure (1)..(435): unsure at all n locations
agtatacagaagcaaagacatatgcatctaggaccattctgttcttgagaggggatggtacattgaagtctgtggccattgagttgagcttgccaaaaatggaagaagataaaataggatgtgttaacaaagtatacactccagctgaacatggagttgagggttggatttggatgcttgctaaagcttttgtaaatgtgaatgattctggtcaccatcagctagtgagccactggttgaacactcatgcagtgatagagcctttcgtaattgcaacaaacagacagctgagtgtggttcatccaatttataagcttctccatcctcacttccgtgacaccatgactatcaatgcattggctagagagttgctcattaatgctaatggaantatagagaagacattttgccctggaaaatactctctagagatgt

SEQ ID NO: 216990 - DNA, 443 bp, Gossypium hirsutum
cggacgcgtccgcccacgcgtccgcccacgcgtccgagggattaatgtcattacattctatgctccaatactattcaggacaattggtcttcgtgaaagttcttcactcttgtctgcagttgtgattcgttgtttcaacgttggctgtacattcatatctatgtttgtagtcgataagcaaggtcgaagagtactgtttatgcttggtggaattcaaatgcttgcaacacaagtaacaataggagggtttatgacagctttattaggtgatcatggtggattgagcaaggcgagtgcttatgtggttttagttttgatatgtatatacatttctgggtttgggttatcttggggtcccttgggatggttagtccctagtgagatttatccgttagagattcgatcagcaggccaaagtattacagtagcagtcagctttttct

SEQ ID NO: 216991 - DNA, 355 bp, Gossypium hirsutum
  unsure (1)..(355): unsure at all n locations
cccacgcgtccgaaagaacactccacaaaacttactactcttgaccctttgagggaaaccatcaagaattttaggaacaagaatgagaaaatgggcaatgagtcagacgctgctacacgggcactgtttcaggatgcagacaagtactgtaagcttatagctggaagactatcgcgaggccctgggtgcctaaaatcgttggcctttctcgtcgtcgcatttggtgtgggtgctgctgtttagctccaacatggatggtgggactggacaactgatgtagtatcnctctcaaatcctgctaaagctcggttggtatttcttctcgtaagtcattttattgagttcaactgtaagg

SEQ ID NO: 216992 - DNA, 335 bp, Gossypium hirsutum
agtgagttttgggcaaggcaatatcttgggcagcaattttacttgagagtttatacacctgtgaactcactcagggatgaatatctcattccaaagaatgctttgctttgtggcagagcccaaggaagaagcacaaggcctctttgaaacatttccagtagccgaaattgttgagaatcaaccattagtcaattataaaatatgcctcaattcttttcattttttgtttcaccagaatctgtatttggttttgtatctaaagaaatgaaaataattgtattaaattagaacattctttttgctgaggaaataatacaaggctcaatttctgtgat

SEQ ID NO: 216993 - DNA, 452 bp, Gossypium hirsutum
ctctttggtaagctattttttgccttctgggtgatcatccatctctaccccttcttgaaaggtttgatgggacgccaaaaccgtacacccaccattgttgttgtatggtcaattctgcttgcctccattttctctttgttgtgggtgcggatcgatcccttcacaaccagagttaccgggccagatgtagaacagtgtggaataaactgttaaagagagaacctataaagactgaagatttgttctggtgtcacttaagtttccaatgccaaaggtttgtttagttgtaatttgtgtatgtcagttcacatcatgttcagaatatacggttgttgatatatatatatgtcatcttgtttctactttgatgtaatattttggagttgggacataacttatcgatagtgctttctctcaagaaaacactacttcgaagtagatatatgttttgg

SEQ ID NO: 216994 - DNA, 446 bp, Gossypium hirsutum
cccacgcgtccgtcatgattatccaaccaaggatggcagcgcgatccgagactacatccatgttatggacttagctgatggccatactgctgcacttaggaaactttttaccacagagagtataggttgtgttgcctacaacttgggaactggatgtggtacatctgtgctcgaaatggttgcagctttcgaaaaagcttccagaaaaaatccccattaaactatgcccaagaagacctggagatgctactgccgtttatgcttctaccgagaaagctcaaagggaacttggttggaaggcaaaatatggtgtagatgagatgtgtagggatcaatggaagtgggcgagcagcaatccatggggataccagtcaaaaaagcgttaaaagctttgcttaagattttctcatgttacaccaacatcaacagcatgtttaagcaaaagt

SEQ ID NO: 216995 - DNA, 442 bp, Gossypium hirsutum
ggaagccaaaagatgttcatccgccatcttccttgtgggtatcaatctacttttcctcacttcagtgagtggatgctacacttgtgttcacccaagaccaagtggttcacctcccaccaaaaggagctgccctagagatgctctgaagctaggggtttgtgccaaggtgctgaatggaacagttgctggcgtagtggtggggaaccctccagatactcagtgctgctcagcgctagggggacttgtggatttggaagctgcagtgtgtctttgcactgccattaaagctaatgttcttggcattaacattgatattcccattgcattgagtttgcttatcaacacttgtgggaagaacctaccttctgacttcatttgtgcttaccaatgttttgtaggtaatttcaacaattaactctgctggatggaccctttttttctc

SEQ ID NO: 216996 - DNA, 390 bp, Gossypium hirsutum
cccacgcgtccgaaagcggcagcaaaggtgtcatcttcgattcacaatggtgaaaggtcgccaaggagaacgcgtcaggctctatgttcgtggaaccattttgggttacaagaggtcgaagtcgaatcaatatccaaatacgtcactgattcagatcgaaggggtgaacaccaaggaagaagtgggatggtactgtgggaagcgaatggcgtacatttacaaggctaaagtgaagaaaaatgggtcacattatcgttgcatttggggtaaagtaactaggcctcatggtaatagtggtgttgttcgtgctaagttcaagtctaatctccctcctaaatccatgggtgataaagttagaagtttcatgtatcccaacaacatttgagatgc

SEQ ID NO: 216997 - DNA, 453 bp, Gossypium hirsutum
ggaatcaggtattcttgctagttgatattatctgctgttgcgccattattttcccaattgtttggtctattcgttcgttgagggaaacttcgaaaactgatgggaaggctgcgaagaatttggcaaagttaactctgtttaggcagttttacatcgtggtgattggatatctatattttacgagaattgtggtgtttgctttgaggacgattgcagcttacaagtatcaatgggtaagcaatgcagcggaggagactgcatcattggcgttctatttgattatctttttcatgtttaggcccgtggagaaaaatgagtactttattcttgaggaagaagatgaagaggctgctgagctggctcttagagatgaagatttcgagctttgagaacctgggggctgttgataagtgaattggtataaagggttactctggatttttacctttgatg

SEQ ID NO: 216998 - DNA, 416 bp, Gossypium hirsutum
cccacgcgtccgcccacgcgtccgcccactcgtccgcccacgcgtccgcccacgcgtccgcgcacgcgtccgcagattaatattttcaattagaatgatttatggttggcttggttggaccgaaaaaatgaagcatccaggctccgtttagaaaaaacccaattggtaatacatttatgattaccacctatatcataatcataaatcttttttatttacaaattcgaaatagaaataagaacgatttcaaactattaatcaatcgaataatatgagaaatacgttgaatatttggcggaaaacatgaaagaaaaaggaattaaaataaaaaaggaaatgaaatcatagcaaaaagatgtggtattgggtcatttgtcctatatgcgcaaatcaaaatcgggcggatctttactcgg

SEQ ID NO: 216999 - DNA, 446 bp, Gossypium hirsutum
  unsure (1)..(446): unsure at all n locations
ggcgnncnncactnnggnnagctctacctacgtgccttgcccaccaccaccaaagagccacaggcctacccacaaaagcccaccctcggcacctgaacagccaggcacttgccccagagatgcactgaaactaggcgtttgtgctgatttgttgggctcagtgcgcgttgttgttggaccgtcgaggaccaaatgctgctctctcatttcgggtttggctgatctcgatgctgctgtttgcctttgcactgctattaaagctaatgagttgggggttaacctaaacgttcctgtttcattgtctttgctcctcaattcctgcgaaaagcaaatgcctgctggttacaaatgtgcttaagctcatttccaactgtttcctaagcaatgtttgggtttattcttttaccgggtctttttttttccgggccttgttaatttgggatttt

SEQ ID NO: 217000 - DNA, 352 bp, Gossypium hirsutum
cccacgcgtccgcccacgcgtccgcccacgcgtccggttagaccaagtctcttttcaggacagggtttgtttgataccagatgctgatgagtttctagattcactatggactaacaacaggcattgtagtcctctggagattgttttaaagttgattggataacatcttggatttgagttcccaatcctgtcgaattttagtgtatttgaagaaacattgcatgttttttagagtgtggagttggctgtatctttcatgacagtgaagttaaatagtgactgtttatcaaggatgattattcagacctgattatgtagaatccgacctcgtttgttaatttaatgttgaaac

SEQ ID NO: 217001 - DNA, 425 bp, Gossypium hirsutum
gtcaaatcaaaaggccaagatattgcggaaagttgattatccactggagttggatgtttatgatctatgttcagatgaacttcgcaaacaattggaaggtcctcgtcagatcctgagggatgaggaaggtaaaaagctcggtctgaaagctaatgggaaaagctccagctcaaaagatgatgatgtcaagatgatcgatggagaggggtcatccaatgcaagtggagaatcaactgtgacaacatctcaagaaggggttccctctgacaaggaaacacgtttaaccgggatttatgatttggttgccgtgctgacccacaagggtcgaagtgccgattcagggcattatgttgcgtgggttaagcaagaaagcgggaaatggatcgagtttgacgatgataaccctatcccgcagcgagaggaag

SEQ ID NO: 217002 - DNA, 317 bp, Gossypium hirsutum
gctacctccaacggatagaaatcttctaaacccgcgaccttaaacgcattccacataattccattgtcggaaggctacgatctatctccgttgttcgtagagaatacgagggcagagtaagaggagttgacgctcgccacgacaaggcccgctcgcatcgcgatgtccaggctaggacaggtggccatataccctaagttcaccgcttaatacagcgagttgtttgcgaggtcgcagctgcaagattgtggttggtacggtcaacttgcaattgcttcccatatatttgctgtgactcctccaatcttggccgtggt

SEQ ID NO: 217003 - DNA, 449 bp, Gossypium hirsutum
gcatcaactaggttgtctcaatcaatgtctactgctaatggggcatcccctgatgaagtggacaatgatggactagaattacttgaagccgaagcttcattagattatttatgcaacttgtcacctcacagatacgaagctctttatgccaatctacttcctcaatcaatgcttggtgaggtgtttttggagaaatatgttgatcatggtgatacagttacagtaatcgataagaaacgaacatatagtgtaacagctgccgctaagcatcctgtatatgaaaattttagggtcaaggcatttaaggcactgctgacatctgcgagttcaaatgagcaacttacggcacttggagagctgttgtatcagtgccactacagctatagtgcatgtggtcttggttccgatgggacagatagactggtacagttggtgcatgagatgcatca

SEQ ID NO: 217004 - DNA, 450 bp, Gossypium hirsutum
cggacgcgtgggtcagaatcagggtttgaaaaaaatgcagatcttcgtgaaaaccctaacagggaagaccataaccctagaggtcgaatccagcgatactatcgacaatgttaaggccaagatccaggacaaggaaggtattccaccggaccagcagagattgatcttcgctggaaagcagctcgaagatggccgtactcttgctgactacaatattcagaaagaatcaaccttgcatctggttctgagacttcgtggtggcattatcgagccttctttgatggcattggctaggaaatacaaccaggataagatgatctgccgcaagtgttatgctcgtctgcacccccgtgccgtgaactgcaggaaaaagaagtgtggacacagcaatcagttgaggccaaagaagaagatcaagtagattacatatatcgacggaggaattctact

SEQ ID NO: 217005 - DNA, 452 bp, Gossypium hirsutum
atcctattagcgaattattcggttcattcaatgggaagcaacgccgctctggcagcaaccgctgctgcgaatccgacgccggggtcttatgttgctatggttgacgttcaagatcagaaggattccaagttcgattcttcgtcgataaagtcattttcagtgtcgtcatcgagcgggaaaaccgcttccatcggggggaacaacggcggcggtggaaaagtccggtctgtagccaacggaacagacggtgacggttggtttaacaaagcaggccagttcagaaccatctttcccgatggtgcttcccagttatcatcccccggaacaacagcagaaacacaaagcgaatcaaccagagaagaagagcttactctttggaactcaatcgtcgatgaagcttcgaaaatgctcgcttcatacagagacgaaatgctcgaccatgaaacaattca

SEQ ID NO: 217006 - DNA, 445 bp, Gossypium hirsutum
  unsure (1)..(445): unsure at all n locations
agctgtaactgctgctggatctggatgcgtcgctgctttatctgttgaacgataccttgttcgaaatgatcttcttgtcgagtttcatcagcctcaaactgaagaggtcaagaaagaactgacggatagagatattcaagaaggttttgacattacactcacaaaacacaagggccagtatgctttgcgaaagttgtatcatgagagtccgaggcttatatgtgtattatatacttcaccaacttgtggtccatgtcggactttgaagccaattcttagcaaggtgattgatgaatttgatcagaatgtacattttatcgaaattgatattgaggaagatccggagatagctgaagctgctggaattatgggtaccccatgtgtgcagtttttcaaaaataaagagatgctcangactgtatcttgggtcaaaatgaaaagagaa

SEQ ID NO: 217007 - DNA, 334 bp, Gossypium hirsutum
  unsure (1)..(334): unsure at all n locations
annnncagcanncagaaacacaccaagcgaagcgcaccagcaacaacccaacaacaaaggcgaccaagacancagccgnccgggcgcacccggccccnncagggagcgcaacagaagcgngcaggcaaccacagggcncacgcgccccnagagccacaagcccacagncccncccaccaganaccacaacgggcgccgaacaaccagccgngcaagccnacaggcgacaacnagcgcnggcggcgagcgacggacaacaaccaancgcccaanggcaacaacaanccggggcacagcgaaaccaacaaaccancgcaacgcaacagcaacaaca

SEQ ID NO: 217008 - DNA, 451 bp, Gossypium hirsutum
gccacactctccaggaagctcatcaaccatggcggaacagaccgagaaagcatttttgaagcagcccaaagtgtttttaagctctaagaaaactggtaaagggaagagaccaggaaagggagggaaccgcttctggaagagcattggtttgggattcaagacccctcgtgaagctattgaaggaacttacatcgataagaaatgccctttcactggccctgtttcagtcaggggccgcatcttagctggtacttgccatagtgccaagatgatgaggacaatcattgttcgacggaactatcttcattatatcaagaaataccaaaggtacgagaagaggcattcaaacattcctgctcacatttctccatgcttccgtgtgaaggaaggggatcatgtcattattggtcaatgcaggccattgtcaaagactgtgaggttcaatgttttg

SEQ ID NO: 217009 - DNA, 454 bp, Gossypium hirsutum
gaaaatcaaggccaagacggaaggaacaaagttgaaggattttgtagcaaccttacagtcggatacatactttcaaaccgaaatcgctaagctccgacaagaagtggaggagtacgcaaaacagtttccgactattggttttgagaaagaagcaatgaaatacaaggactaaagcggatatctttacacacaatgcaaggtttgtcagctctaaagaacttcctaaactggttgctgtcttatttgttgaacgtaatcttctagaggcaactatcttagaatttattgaaatgccaaaatatgcacgttagtttttagtattaaggatgttatctggggttgagccgaactgtattcaaactgtatgaaactatgagcttttcattcaaagtttgagacttgagtttggctcacgctcgatcaattttccgtttcgaagctcaaaatcgattcg

SEQ ID NO: 217010 - DNA, 451 bp, Gossypium hirsutum
cccactcgtccgcccactcgtccggttcgagtgaaccatgtgtttgggcgagtggttgaagaagaaatggctcggattgaacgtgaggtcggaaaagagaagtttaagaaaggaatgtataaagaagcatgcaagatttttactcgccaatgcactgcttcaactttggatgattttttgacacttgatgcttataattatatcgtcattcatcatccaaaggatgtttcttctaagctttgatgaagcttccatgaaagcttagaattatggggtttgagtgaaaaaaaatagtgccattgctaaataagcaaataatcataattgtggtttttacgggaaatggttcaataaggtatgttttatttcaatgttgggttttaatgtattatttgaaagttttcatttaagtcattagacttataaaattgtagtcgtttgactttttctg

SEQ ID NO: 217011 - DNA, 451 bp, Gossypium hirsutum
cccactcgtccggaaacacactttgcacaaggtcacacagtataagaagggcaaggatagtttggctgcacaggggaagcgtcgttacgaccggaaacaatccggttacggtggtcagaccaaaccagtgttccacaagaaggcaaagaccaccaagaagattgtgctaaggctgcaatgccaaggttgcaagcacgtttcacaacatccgatcaagaggtgcaagcactttgagattggtggagacaagaaggggaaaggaacatctctgttttaaacgtgttattcatggtatcttgttatgtttgctttactttatatggagtagtttgaacttacaagactgtaatggaattttgttaaatttgcttagtttcttctgatgatgttttgcagttttctaactgttaccaaatgtttcactggcaattttgagttcaatttgttttaa

SEQ ID NO: 217012 - DNA, 452 bp, Gossypium hirsutum
gaagctcctgtcagtcttccgtgaaggagtgaagtacggtgctggaattggacccggtgtctatgacatccactctcccagaataccatcaaccgaagagattgctgacagaattaacaagatgcttgccgtgctcgagaccaacatcttgtgggttaaccctgactgtgggctcaagactcgcaagtacgctgaggtgaaaccagccctgagcaacatggttgctgctgccaagctgctccgcacccaactcgccagcgccaagtgataggctcccgagatattggaaatccgaatcccataccattccagagagattaaaaagaaaaatggcaaagaagtttcttctatcttatcatttgaataactctgttgttgatgaaatatttgttacatgcccttggcgtccctttgatttccttatttttgggtgttcttttctctaagtatca

SEQ ID NO: 217013 - DNA, 372 bp, Gossypium hirsutum
  unsure (1)..(372): unsure at all n locations
cccacgcgtccggctagggtttcaagggatttcttccggtgcaaagagcagcagccatggttctcaagacggagctttgccgatttagtggtgccaagatataccctgggaaaggcatcagatttgttcgtggtgattcccaggtcttcctcttttccaattcaaaatgcaagaggtacttccacaaccgcctgaagccatcaaaacttacatggacggccatgtacaggaagcaacacatgaaggacattgcccaagaagctgtgaagaagaggagacgtactgcanagaagccatactccagatccattgtggctgccaccttagaggttatccagaagaagaggagtgagaaacccgaagttcgtgatg

SEQ ID NO: 217014 - DNA, 429 bp, Gossypium hirsutum
gcggcttttcttgctcatgtcggcgccaagacatcttgtggagatggtgtcatagacggaggaccgttggcttggggtctttgcttcaagagagaaatgagtcctagccaggattactgtgatgattactacaaatacatgtatccatgtgcccctggagctcaatactacggccgtggtgctttgccaatttactggaactacaactatggagctgctggcgatggtataaaagttgatttgttgcaccaccctgagtatctcgagcagaacgcaactattgccttccaggctgccatctggaggtggatgaccccaatcaagaagaaccaaccttcagcacacgacattttcgtgggtaactggaaaccaaccaagaatgacacagaggaaaaaccgggtcctacttttggctcaccatgaacgttc

SEQ ID NO: 217015 - DNA, 437 bp, Gossypium hirsutum
gccgaaccctccatttctctctgcaaccagcggcacccaaagatgcaaatcttcgtcaaaaccctaacggggaagaccataaccctagaggttgagtcttccgacaccatcgacaatgtcaaagccaagatccaagacaaggaaggcatcccacccgaccaacagcgcctcatctttgccggcaagcagctcgaggacggccgcaccttagccgactacaacatccagaaggaatccaccctccatctcgtgctccgtcttaggggaggtgctaagaagagaaagaagaagacctacaccaagcccaagaagatcaagcacaagaagaagaaggtcaagctcgctgtgctacagttctacaaggtggatgaatcgggtaaggttcaaaggctgaggaaagaagtgcctaatgctgaatgtggtgctggaacttttat

SEQ ID NO: 217016 - DNA, 100 bp, Gossypium hirsutum
ctttgtttgtggcttctgatcaatttggtaaggttcctctctattggggaatcaccgccgacggatatgtggcctttgctgataatgctcaattgctgaa

SEQ ID NO: 217017 - DNA, 392 bp, Gossypium hirsutum
  unsure (1)..(392): unsure at all n locations
cccacgcgtccggaccaccatgtcatgcttgagggtactcttttgaagcctaacatggtgacccctggttcggactccccgaaggttgccccagatgttattgctgagtatactttcgtgccttgcagcgaaccgtccctgctgcagtcccagctattgtattcttgtctggtgggcaaagtgaggaggaggctactcttaaccttaatgccatgaacaagctccagaccaagataccatggtcactctcattctcatttggacgtgcccttcagcagagcactctcaagacctgtgcaggaaaagaggagaatgttgagaaggcgcangatgctttgctcgttaggtgcatggctaactcagaggccactttgggtacatacaagggtgat

SEQ ID NO: 217018 - DNA, 449 bp, Gossypium hirsutum
cataaatttaatagggaatcaggtggtgaggtttacttcacaatgccaagattgcagtctataaccattcagtgtttggaggctctccagtttttgcatggccttggcctaatacattgtgatctgaagcccgaaaatatattagttaaaagctatagtagatgtgaggtgaaggtcattgatcttgggagcagttgttttgagactgatcatctatgctcctatgttcaatccaggtcctatcgtgcaccagaggttatcctaggacttccatatgacaagaaaatagatatctggtcacttggctgtatcttggcagaactctgtactggaaatgtacttttccagaatgattcacctgcgacattacttgcaagagtaattggaatcataggtcctatcaaacaagacatgcttgccaaaggacggtatacatacatatactttac

SEQ ID NO: 217019 - DNA, 403 bp, Gossypium hirsutum
attgtgacgaatagccaccttctcaagacaatggatatctccaagatggctccgggtgatgcttctttcactgcatcttttaagcttgttgcacaacgtgatgattacatccatgcttttgttgcgtactttgatgtatcatttaccaagtgccacaaattgatgggcttctctacagggccaaaatcgcgagctacacattggaagcaaacggtgttgtacctaaaagatgtgctaaccatatttgagggagaggcaatagttggtagcatgactgttgcaccaaacaagaagaatccccgagatgttgatataatggtaaaatattcattgagtggtcggcgttgtgcggtttcaagagttcaattctacaagatgcgctgatgtttctcactactatttt

SEQ ID NO: 217020 - DNA, 224 bp, Gossypium hirsutum
aacaagctccgtgttgaacgtacgaacaaacgtcatattggtgctaggttgaagaaggctgccgaggccgagaaggaagacaagaagtaaggttacccttttggggacagtgttttgttatttggcttgctaaaaagaccttaaattttgtattcattttgtcaagtgaactgagacagctttagaaaactttggtattatgacagtaatccattttgttgagc

SEQ ID NO: 217021 - DNA, 353 bp, Gossypium hirsutum
ggctccagcacctacctaccattacaactcccctcctccaccatcaccatctcctcctccccgatactactacaaatctcccccaccaccagcccactctccctcaccaccatactactacaaatctccacctcctccatctccctcaccacctcctccatactactaccactcacctcccccacctgtgaaatcacctccacctccagtctacatctacgcttctcctccaccaccaacaccctactagatctaaaaagatcgaccacacaccgttcatgttgtagtttcgccagcaaaataaaggaaggtgccaaggaggaagggagatttggacatcaaagcagttcctt

SEQ ID NO: 217022 - DNA, 449 bp, Gossypium hirsutum
cccacgcgtccggggaaaacggcctacggattcagccgattttggtgataacaatcttgttggatgggtgaaacaacatgctaaactcaaaataagtgatgtcttcgatccagagttgatgaaagaagaccccatgctcgagatcgagcttttacaacacttaaaggtagcttgtgcttgcttggatgatcgacattggagacgacccacaatggttcaagtgatggcaatgttcaaggagatacaagcagggtcggggctcgactcgcaatcgaccattgccaccgatgaccgaggttttaactcggtcgaaatggtagacatgacaataaaagaagtcccagaaggtaagcagtagatgaaaaccaaaaaaacttcagaagagaacattcttttgcaggtgaagaagaaagaagcaggtggtgatgatgaattcccacagaattttc

SEQ ID NO: 217023 - DNA, 455 bp, Gossypium hirsutum
gcaccagaggcagctccaaaatggttcagcggctcacttaccgcacgcgtcacagctacgccaccaagtccaaccagcaccgcgtcgtcaaaaccccaggagggaagcttgtttatcaaacgacaaagaaaagagctagtggacctaaatgtcctgttaccggcaagaggattcaaggaattcctcatttgaggcctgctgagtataaaaggtctaggttgcctagaaaccgtaggactgtgaaccgtgcttatggtggagttctatctggaagtgctgttcgagaaaggatcataagggccttcttggtggaagagcaaaagattgtgaagaaggtactgaagattcagaagacaaaggaaaagcaatcatccaagtgagagctaggatttgctaatggattgatagtgaatcttggaatagtagtttgaggggatttaagatttggatttatg

SEQ ID NO: 217024 - DNA, 437 bp, Gossypium hirsutum
ttttaatcctgctggcaaagagcatggtgctcccgaagatgagaaccgccatgctggtgatctaggaaatgtcactgttggtgatgatggctgtgcaagcttctccatcgccgacaaacagattcctctcacaggcccaaactccattatcggaagagctgtagttgtccatgcagatcccgatgaccttggcaagggcggccatgagctcatcaaaagcacaggaaatgctggcggcagagtagcttgcggtattattggtctgcaaggctaaaatctgagccaagatgcgtttgaaggatgcaatgggctttgagaagtagaaagaacttggttataataataaaaaggttaaaagaatccttagtttgtgtacttttgttgtgtgttggttgtcatgagtgtcccttgaatcctaaaataccttttgttgaatg

SEQ ID NO: 217025 - DNA, 446 bp, Gossypium hirsutum
cccactcgtccgcccactcgtccgcccactcgtccggcaggaatcgcctttggtcgcttcgatgattccttcagtttggggtctgtcaaggcctaccttgctgagtttatctcaactttggtgtttgttttcgccggcgttggctctgccattgcttacaacaagttgacaactgatgcagccctagatcccgatgggctagtcgccattgctgtttgccacggatttgctctctttgttgcagtggctatcggtgccaacatctcaggtggccatgtcaaccctgcagtaacttttgggttagctcttggtggccaaatcaccatactcactggcatcttttactggattgcccaacttcttggatccattgttgcttgcttcttgctcaaggctgtcactggtggtttgacagttcctatccacggtcttggagctggagttgg

SEQ ID NO: 217026 - DNA, 398 bp, Gossypium hirsutum
cttcgggcacgcgttcgttggtggatgttgcacacaatgctatccgcaatgacccaagaattaactggatctgcagtgcggttcacaagcacagggaacttcgaggacttacatctgctggtaagaaaaacaggggtctccatggaaagggtcatttgcaccacaagaaccgtccttctcgcagggcaacctggaagagaaacaacactctctcccttcgccgctaccgctgagttactgtgttcaactttttatccttgttgattttagaagtcatcgttttgagtttgaaatttttggaagttttaaaaaacctgactctttgattttacatgcaatttattttcgttttggatgctttgaatttctgaaagtattgctacgtgcttttccgattt

SEQ ID NO: 217027 - DNA, 376 bp, Gossypium hirsutum
ggacaacaagggtttgttgattgtggatcaccaactggcgtacgacaaaaggaccagaccttatgtgaagaaaatggccaagagccaagactatttcttcaaggagttctcaagggccattactctcctctctgagaacaatcctctcactggtagcaagggtgagatcaggaagcaatgcaatcttgcaaacaagcttcactaaaatgcctcgccaaagagaaagccgagtgtggccgaataaaatgtttgtttactcagtttcttttccaagagacgagtttgttaatgtgcaggtgagtaatggtgcaatggtactggtttgtaacgatcgatccattgatttttttttttacaataacccaggttgcctttt

SEQ ID NO: 217028 - DNA, 454 bp, Gossypium hirsutum
cggacgcgtgggtttcgatggcgtcgacctcaaaccgaaccggtggcggttccttctacggcggtgcggctccttaccgatcaagagatggtttaagcacgagaccggtggctagctcagatgagatacaattgcgtattgatccgatgcatgctgatttggacgatgagatctctggtctccgtagccaagttaaacaattgagaaacgttgctcaagagataggatcagaagcaaaatttcagaaggaccttttagatcagctgcaaatgaccatgattaaagctcaagcaggggtgaagaacaacatcaggaaactgaacaagagtataatcaagcatgggtcaaaccatattgttcatgtggttctttttgcactgttttgcttctttgttgtctacatgtggtccaaagtatccaggagatgaagttcgcaagactgccggatacattg

SEQ ID NO: 217029 - DNA, 449 bp, Gossypium hirsutum
ctcttcttggcggtgccggggtaaaagtttattgtttgtggaaagagcagagattcggagatgagtaagcttcagagtgatgcgcttagagaagctatttcaaccattgtagctcagtcaaaggagaaacagcgcaaatttactgagaccattgaactccagattggtctgaaaaactatgatccccaaaaagacaagcgtttcagtgggtctgtgaagcttccacatattcctcgccccaaaatgaagatttgcatgcttggagatgctcaacacgttgaagaggcagagaagataggtttggattatatggatgtggaagcattgaagaaactaaacaagaataagaagttagttaagaagcttgccaagaagtatcatgcctttctggcttctgaatctgtcatcaagcaaatccctcgtcttttgggtcctggtctcaacaaagc

SEQ ID NO: 217030 - DNA, 433 bp, Gossypium hirsutum
gggtttcaaactgaaaaaagtctccaaaactttcaatccaaaatgcctaagcaaattcatgagatcaaggacttcctgctcacagctagaaggaaagatgctcgctcggtaaagatcaaaaagagcaaagatgtagtgaagttcaaggtccgttgctccaagtacttgtacacactttgtgtgtctgatgctgagaaagccgacaaattgaagcagtcccttcctccaggtttgagtgtccaagatctgtgaaaatagtgcttctccaagtctgttattcaattactaggccaagaaatctagattttgatttatggtttattgtatttcacgccatttggtgttcggaggatgtactttttcatgttcaattaaaccttggcactctttaaattaattgattgggagattgaacaaaagtgattttctgttg

SEQ ID NO: 217031 - DNA, 415 bp, Gossypium hirsutum
aaagaaaacaggtaacagagagtagcagcgatggttctcaagacggagctttgtcggtttagtggtgccaagatatacccagggaaaggcatcagatttatccgttctgattctcaggtcttccttttttcaaactcaaaatgcaagaggtacttccacaaccgtttgaagccatcaaaacttacatggacagccatgtataggaagcaacataagaaggacattgctcaaggggccgttaagaagaggagacgtgccacaaagaagccatactccagatccatcgtcggtgccaccttagaggttatccaaaagaagaggagcgagaaacctgaagttcgtgacgctgctcgggaagctgcactccgagaaatcaaggaaaggatcaagaaaaccaaggatgaaaagaaagcaa

SEQ ID NO: 217032 - DNA, 422 bp, Gossypium hirsutum
gtcccgaagttaatacatcccttaccacctcccattcagtctccagaaacatcgccggagcgtgttggagacgacacatggatgcaggaactaaacatccaaagaccaccaacaccaactcgtggtcgccctcaacccgaccatgaccggagctcacttgcatatatatgaacacgatgttacaaattcaaggacttaaaaccttttttctaattgacaaatctccgtgtacgtattattgctcgtgtagtttctcgaagatggaagccattgtttattgtatgcatagctatggagtttgaagatcagtatttaaccagtgaaattcaacatatgcatatagtttggttagtttttggaaaagggatttaataggataattaatagggattggggtcacctaaaatttttggtttcctttt

SEQ ID NO: 217033 - DNA, 387 bp, Gossypium hirsutum
ccttcgagttctttctaaacctaaggtggagaaacttcctgaaatttatcaacaccttggtctagagtatgatgagaaagtgcttccctccattggcaatgaggtcttgaaagccgcggttgcacagttcaatgctgatcagcttctcaccgagcgtccccaagtgtcggccttggtccggaattcactgacacagcgtgcaagggacttcaacattgagctagccgatgttgcaatcacgcatttgtcatatggttctgagttctcaagggcagtggagcagaaacaggtggcacaacaagaggcggagaggtcgaagtttgttggggcgaaagctgatcaggagaggagggctgctatcatccgcgcagaaagagaaagcgaggc

SEQ ID NO: 217034 - DNA, 335 bp, Gossypium hirsutum
gcgggctgagtataagcttattcatgtggttcgaacacatcgtggagcagatgatacggcattgaggcgtgtgtatcaagaacaggacgatgcagggaatacaggtgtttcactgtctaaagatttgatggccattgccgggggtgcactgaaaaccaatatcactactttgggtcctcttgtgctaccaatcagcgagcagcttttgtttttcacaaccttggtggtgaagaaattgatcaagtgccggaataatccttatattccagatttcaagttagcattcgatcatgtttgtatacatgcttcggggagagctgtgattgatgagctgg

SEQ ID NO: 217035 - DNA, 432 bp, Gossypium hirsutum
cttattggcaagctcgagactgatgtcgagatcgatatttctcccgaaaagttccaccatatgtggtgccacaggccgcaccatgtccaccacactagctctgaaaaagtacaaggatgcgatttacatgaaggtgaatttggaactcccggcgtcgttatctgctggagatatgtgcatgatggaaaggctaaaactgcaaagcaggtagttgaagttatggaccatgagaaaaagtcaataactttcaaaatgcttgaaggagatctgatggaggaatacaaaagcttcgtgattacaatccaaacttcccccaagagcgacggtaaaggcagtatagtgcactggactctggattatgaaaagctgcacgagggtattggacatcccgagtctctgctccagttctttatcgaactcacagcggacatg

SEQ ID NO: 217036 - DNA, 276 bp, Gossypium hirsutum
  unsure (1)..(276): unsure at all n locations
tccgccacgcttntatgtctcttcggcggacacttcttcggccccggtggcggttgtacaagggggggtcacatcggcactctaatggctgaaaacaagtataacctcaagaatccggcggcgaagaggatcttacaagaggttaaggaattgcaatccaatcctttcgatgatttcatgagcctaccactcgaggagaatatatttgaatggcaattcgcacataggggtccaagggattctgaatttgaaggagggatttatcatggaaggatt

SEQ ID NO: 217037 - DNA, 456 bp, Gossypium hirsutum
gtttttaatgtatttctttgtgtatgttttgcagctgtcatctcaagggccaacccatgatgagatagactttgaattcttagggaatctgagtggtgacccttacattttacacaccaatgtcttcacacaaggcaaaggcaacagagaacaacagttttatctttggtttgaccctacaagaaacttccacacctattccatcatttggaaaccccaacacatcatgtaagaacccatcaaataatgtcttctactttgtcttttgccttaataacattagctactttttgtctttttctcagtttcttggtggataacatccccattagagtcttcaaaaatgctgaatccattggtgtaccgttccccaagagccaacccatgaggatttactctagtttatggaatgctgatgattgggccacaaggggtgggttagtgaaaactgattgg

SEQ ID NO: 217038 - DNA, 450 bp, Gossypium hirsutum
aaaattatacgtatttatatacggaggtgatagcggcggcgctggtggcggttgtacaatcggaattcagatcggcaatctaatggctgaagacaagtataacctcaagaatccggcggtgaagaggatcttacaagaggttaaggaattgcaatccaatccttccgatgatttcatgagcctaccactcgaggagaatatatttgaatggcaattcgcaattaggggtccaagggattctgaatttgaaggagggatttatcatggaaggattcaattgcctgctgagtatccatttaagcccccttcatttatgttgctcaccccaaatggacgtttcgaaacgcagactaagatttgcttgagtatatcgaatcaccacccggagcattggcaaccatcttggaatgtgcggactgctctagtggcattgattgcattcatgcccac

SEQ ID NO: 217039 - DNA, 438 bp, Gossypium hirsutum
ggatctatcatcgcaatgcttttaatggataaacttggaaggaaaatgcttcttttgtggagcttctttggcatggctatatcaatgctcgtccaagttgctgctgcaaatacttttgtgtcaggctctgcatctttatatctatcagttggtggcatgttaatgtttgtcttaacatttgcattaggagctggtcctgttccaagtctcttattaccagaaattttccctagtcgaatcagggcaaaagctatggcaatttgtatgtcagtacactgggtaatcaatttcttcgttggcttgctcttcctgcgtttgctcgagcaacttggaccgcaactcttatactcgatgttcgcaagcgtttgtatgatggctgtagtctttgttaaaaagaacgtaatcgagaccaaagggaagtctcttcaagaaatcgag

SEQ ID NO: 217040 - DNA, 451 bp, Gossypium hirsutum
gcgttgctggttctgtggctcctgatatagattcatttccagataagcaggccatttttatgcatgaaaggaatgcagactcgaatactgctccagcaggtggtgacataactgagagcgtaagccttgagaagcaggtacattgtgaagtaagagggagtcttgaaccttgagatgtggggaaaccttgagatcaattgaatgtggggaagaactttgcagatttaagagccttaccaagatcaattggaaaccttgagatgcttgaagagttggacataagtgacaactagatcagagtttttacacgattgtttcagattattgtcgaaattgagagttttccgagctgatgagactcccttggaagttccaccaagagaagtaatcaaattgggtgctcaggctgttgttgagttcatggctgatctcgttgccaagagggatacca

SEQ ID NO: 217041 - DNA, 326 bp, Gossypium hirsutum
ggaaaatgccggaggtcaagcgttcactggaaagcaacgggcacttgacttggttccaactaagatacatgataggtcaccaatatttcttggcagctatgatgatattgaagaaattaaagcactctatgctgctgaagggaaaaaggaatgagtgtacaattctcattcttctcccactctatctttactggattcaggtttcaatcatcaaagtatttaatccatttcaaagcttattctgtaatgggatactatatttatattgaacaatagttaagtttccccaaaagatatgggatgagaataaaaaaagaagttatttt

SEQ ID NO: 217042 - DNA, 379 bp, Gossypium hirsutum
  unsure (1)..(379): unsure at all n locations
cgtccggttaaaacctggtttgaatcatcatttttcttttaaaaccggngccccttacatagcggagggtgtaatcagtggcagatgggcatggtttctttttgaggtcacagttgatatcccatacagtactgagatcgttgccaaagcggtggattcggctgcaaatgtgcaacctgaaaacgtgcaagatttttggaacctaatatgtattctcaacacttcatggcatctagttcaagttcgcgtcgggcactcaaatatgttaatggaacagttaaataacttgattagcaatgctgaaatatgtggctgaactttctttaccaatgttttttttgagaaaaaaatatcacccgctttaacaatgatgtttttg

SEQ ID NO: 217043 - DNA, 410 bp, Gossypium hirsutum
  unsure (1)..(410): unsure at all n locations
ggcgtttatcccgtgaaatgtaaccttttaccggttcgttgttgaagatatagttaggttcgggacaccgttccggtgcggtttagaagccgggtcaaaacccgaactcctccttgctatgtcttgcctttgtaaaggaaacccagaagctttattgatctgtaatggtttcaaagatgctgaatacatttcacttgctttacttgcaaggaagttccagttcaacacagtgatcgtacttgagcaagaagaggaagtgaaattggttattgacataagcaaaaagctttcggttcgaccagtgatcggacttcgagctaagctaagaaccaaacactcgggtcatttcgggtcaacgtcgggtgagaaagggaaatntgggttaacaacgaaccatattttacgggtcg

SEQ ID NO: 217044 - DNA, 376 bp, Gossypium hirsutum
  unsure (1)..(376): unsure at all n locations
aaaaaggatacaacaatgttgcctttttctttttatagatctgngttttatctaacatttggcaaaaacaagagttgctgggttttcctgtttttctttttgtatcctaaagtaagtaaacgaagtcaacaaaatgggagacagcaagcttatcctttgttgcttcattgcttgcattttgttcctcggcgttaatggagaaaacccttatcgttatatcacttggaaagtcacctactgtgatatttaccctcttggagttaagcaacaggggatcttaataaatgggcagtttccagggcctcatatcgatgcagttactaatgacaacttgattatcagtgtttataactacttaaatgaaccattccttatc

SEQ ID NO: 217045 - DNA, 272 bp, Gossypium hirsutum
ttgaagcaccctctaatggtaaaaaggctgaatacacagaagatgggctttccgtcgatgtcaaattacctattaagcatgtattatctagagaactcaaactttactttgacaagatcgtggacattacatgaataaatcagtctcgattctctttaaacaagcattattgagtttggaaacagactctggattacatcctttagttctttattgtacatgtttcattgctgatgaggttgcacggaatttgaataatttccctctcatgt

SEQ ID NO: 217046 - DNA, 401 bp, Gossypium hirsutum
  unsure (1)..(401): unsure at all n locations
tccacgcgtccgttttcttggggtgatgtatgtttcccaaaggaagnctttggacgggctgcgtattcctgctgaagatgtgcctaccgatcagttcgtcccactgagccgcatgctctacaaggcaccttctgacggcaagtggggcgagcatgaacttgattacctcctattcattgtccgagatgttaatgttcatccaaaccctgatgaggtagcagaggctaaatacgtgaaccgtgaccaactgaaggagttactgcgtaaagctgatgctggtgaaaacggtttgaaactgtcaccatggttcatacttgtcgtggataatttcttgttcaagtggtgggatcatgtcgaaaaagggacccttaatgaagtaagtgacatggaaaccattcata

SEQ ID NO: 217047 - DNA, 372 bp, Gossypium hirsutum
  unsure (1)..(372): unsure at all n locations
gtaagcttttcaaagtgtattttccattcccaatggtgaaaggtcgccaaggttagcacatcaggctgtatgttcaaaganccattttgggttacaagaggtcgaagtcgaatcagtatccaaatacgtcactgattcagatcgaaggggtgaacaccaaggaagaagtgggatggtactgtgggaagcgaatggcgtacatttacaaggctaaagtgaagaaaaatgggtcacattatcgttgcatttggggtaaagtaactaggcctcatggcaatagtggtgttgttcgtgctaagttcaagtctaatctccctcctaaatccatgggtgataaagttagagttttcatgtatcccagcaacattttga

SEQ ID NO: 217048 - DNA, 279 bp, Gossypium hirsutum
  unsure (1)..(279): unsure at all n locations
tccactctcccanaataccatcaaccgaagagattgctgaccgaattaacaagatgcttgctgtgcttgagaccaacatcttgtgggttaacccaaactgtggtctcaagactcgcaagtattccgaggtgaatccagccctgaacaacatggttgcagcggccaaactgctccgcacccaactttcgagtgccaagtgagaggcatattttaagtcggacatcatcctttatatcgaaaatggtccacaagaaatttgtcctaaatcatttgaataac

SEQ ID NO: 217049 - DNA, 372 bp, Gossypium hirsutum
  unsure (1)..(372): unsure at all n locations
acccacgcgtccggtgggtaggagagtcaacagngctcttcgcttttttgatagannnctccatcttcgggaaggtcttttaaaggcaagtggggcaaaagtctttgcgagcaagccatcacttgaacgttttatccggttgaatttcccagatgcagatgttaatgcgttctttgcttcatttgtttggaagatccctgccgttgtggaatctcctactaaagtggcagcagcgcctgcatcaccagcagaaggaacagaagatgataagcaagaaagtgacacaaaaggtctccgtagaacccaaaggaagagggcttcccctcctcccccattcaatactccgagttccatctaagcaccatcagcacc

SEQ ID NO: 217050 - DNA, 357 bp, Gossypium hirsutum
cgtccgaagcgattcaattttccataaaacttttgttatctttacgctgagaaagtcaacagcagagtccttttcgctagtggccaggccaagtctcttcgctacaagctactctgatgtcttgccgttcgcagggcctgctatggtgtactgagattcatcatggatagtggtgccaagggatgcgaggttattgttagtgggaagctaagagcacagcgtgccaaatctatgaaattcaaggatggatattgatctcttctggtcatcctgtcaatgattatattgactctgctgtcagacatgttctttttagacaaggggtgcttggtttcaatgtctaaatcatgcttgact

SEQ ID NO: 217051 - DNA, 347 bp, Gossypium hirsutum
gatcctgttatcctttcatcgaagatattgtcagttgaggacttctgcactcgaaggatgtttacatgcttaaacggtggaagtatgcacttgtatggggatcaagcgtaaaacacaagcctcaaagagttggcaaggatcatgaacttgaggatgaagatgttgttcagattatcaagaaagtgtgatttgaggatattggaatttatgccttcatgttttaggaatcccatgaatcatattgctcaacattgtaagctgctgccatttaggttgtggagctggaaattttgtgaaaaacctgacagcttgaatgtgtaattaaaaaccaatttgttgtcaagctc

SEQ ID NO: 217052 - DNA, 393 bp, Gossypium hirsutum
  unsure (1)..(393): unsure at all n locations
gaaaatgggtgttgttagtctatcacctttttttgtctgngattaagaagaagtatgggcgggattcaaccaatgtgggtgatgaaggtggctttgctcctaatatccaggagaacaaggaaggacttgaattgttgaatactgccattgctaaagctggttacactggcaaagttgttattggaatggatgttgctgcatctgaattttacggaacagataaaacttacgacctgaacttcaaagaagagaacaatgacggtaaacaaaagatctcaggagatgctttgaaagatttatacaagtcattcgtagccgagtatccgattgtgtcaattgaagatccatttgaccaagatgattgggagcacttctccaaactaaccaatgaaa

SEQ ID NO: 217053 - DNA, 406 bp, Gossypium hirsutum
gacccacgcgtccgggtttccataacatatgatcagagcttcattttcagccatggttctcaagacggaggtgggcctatttagtggtgcggagagataccctgggaaaggcatcatatttgttcgtggagattctcaggttttcctcttttccaattcgaaatgcaagaggtacttccacaaccgtttgaagccttcaaaacttacatggacagccatgtataggaagcagcataagaaggatattgcccaagaggccgtgaagaagagaagacgtgcagccaagaagccttactcccgatccattgttggtgccaccttaaaagttatccagaaaaagagaagtgagaaacccgaagtccgtgatgcttccagggaagctgctctccgagaaataaaggaaaga

SEQ ID NO: 217054 - DNA, 450 bp, Gossypium hirsutum
gaaactttggcgccccaacttgacactactcttgatcaccctcggtgaaaagggtagcatgtattataccaagtacttccatgggtcagtggatgcattccatgtgaatacagtggatacaactggcgccggggactcttttgttggtgctttactatgcaagatcgtggaagacccaaccatacttgagaatgaatcgaaattgagggaggtactgaaattcgcaaatgcatgtggagccataaccacaaccaagaaaggagcaatcccagcccttccaaccgaagctgaagtccttgccttaatcaatggagcttaagattattagcaacaaacttcaataatctatgctcatctttttcttttttaatttcttaacatttaaaaaaaaggttttgaaaaggatcgaatttttcttcccctcttttgatttcctttttccctcggttt

SEQ ID NO: 217055 - DNA, 370 bp, Gossypium hirsutum
caatatcaaagctttatggtcccatatggggtctcaccaagtctggcaattcttatggtttcccagaatggctcaactctttacctgccggaaagagtcttgagtttgtatacatccatgctgcttctcctgctgatgtctctgtttcaagctacaatatagcttaataatggaagacattgcaaaaaaaataaagggtaagttccaacatggttctggggttgtggtgttagaatttgtgcagctatacagaatgcgtcaaagaaaaaggttttcctttttttttttcttcgctgtttggggattttcaactttacttgttgaatgggttatttaattaaggttctaccagatatttagtggaagattg

SEQ ID NO: 217056 - DNA, 340 bp, Gossypium hirsutum
atcaccaaacccctaagagccgagtgatcaaaacacagataggaaaggactgaaaaagaaaaacagaaatggctccgaaagcagatacccaatctgccggcgctgtcgctgcagctgacgcatcctctcaattctcaatggacccactattccacatcttgaaagtcgtcccttactccttccttcgcgctccgcgcctccgcctcaagatcccctccgtctcccttccttccgccatgactgtcttttctctcgtcctcctcacttacttcatggtggtctccggcttcgtctacgacgtcatcgtggagccccctggcattggctctacccaagatcc

SEQ ID NO: 217057 - DNA, 362 bp, Gossypium hirsutum
cccaggaatcccttcttagcctagaaaagagaaatgtcgattctgtggactccatcgttagtggagggatggaagccaatcggatattccgtgatcaattttcttctgctgtatccactgctcttgaagacgtagacacagcaaacaacagttgcctaacatccattgatcattcgttacaacttgaccgtgatgcttgtgggaacttgaattccatgatttctccttgttgtgacgatttgagagacctgaaaagtggtcactaccacaagattgtagaaattacagagaatgcttcacaatgcctcgaggacgaatacatggtggacaagccatcttgttcgactcccaagaaaaagtca

SEQ ID NO: 217058 - DNA, 423 bp, Gossypium hirsutum
gtccgaactctctttatgattgtcagtacaaatcattcttcttagcattcgctggtctgaccgaacagataaagttggaccgttatttgcatccacatttccggttttacatgagggaggttagaactgttgtttactctcaatttctggaatcctacaagagtgttaccattgaagccatggcaaaagcttttggggtgaccgtggagttcattgatctggagctatcacgttttattgccgcaaggaagcttcattgcaagatcgacaaggttgccggtgttcttgaaactaaccgcccttatgcaaaaaatgcgctctaccaagcaaccattaaacaaggagacttcttattaaaccggatccaaaaagtggctcgcgttattgatctataaatcaagtaagcatttcttctgatttaaa

SEQ ID NO: 217059 - DNA, 325 bp, Gossypium hirsutum
ggccggagcccacgcgtccattcaaatgcagatggatcaattgggtggtcagttggtgccactcttggatatgcacaggctgttccggagaaacgtgtcatcgcttgcattggtgatggtagttttcaggtgaccgcacaagacgtgtccacaatgctgcgatgtgggcagaagaccataattttcctcataaataatggtgggtacaccattgaagtagagattcatgatggaccatacaatgtgatcaagaattggaactatattgccttggttgatgcaattcataatggtgaaagcaagtgctggacaaccaaagtatttt

SEQ ID NO: 217060 - DNA, 290 bp, Gossypium hirsutum
gacctcttcagttctcctgatgtggtgaagcagataacatctattaccattgaacctggtgtggaggtggaggtcaccattgcagattcttaaatatggagtcacttctgctctgcttagaatgatttgtagggttccttagcttgtatttttcccatactagtgttgaagtgagtcttcatctgttttatggctccaggttttgtttcctttttgttatccgaagattatgtttggattttttaaatttatttgaaatcaaaagtcaagaaacgagttgtgtagtattt

SEQ ID NO: 217061 - DNA, 470 bp, Gossypium hirsutum
cccacgcgtccgaaaagatggagtgattctgttgtgggatttggctgaaggaaagaagctttatagtcttgatgcaggttccgtcattcactcgctttgctttagtcctaataggtactggctttgcgcagccaccgagcagggtatcaagatctgggatctggagagtaagagcatagtggaggacttgaaggttgatcttaaggctgaggctgagaagtctgacgtcactgacatcggaaataagaagaaggtcatatactgcactagcttgaactggagtgccgatggaagcaccttgtttaaggggtacactgatggtgtaatcagagtttgggggattggtcgttactaaatatgcttgtcttgagttaaaaattttgttcaaatgtcggaaggttttttggtttattttcttaatatggttggatattgaggccttgccctcttctattctaatttgggttggg

SEQ ID NO: 217062 - DNA, 399 bp, Gossypium hirsutum
  unsure (1)..(399): unsure at all n locations
ggcatttatatgccatttctacaacatttattttgccaacacagccggtggtaggatcattgccaagaaggtagctgagaagattctcgacagcagggaattggagttctataaatgggatggtgaactttcgcaactattacaaaatgtaagggataagctgaataaagttgctgagaactggagtagagaagacaagaaccgttgtttgggagaaactgagatatctttcaagttttatagagagatcgttcgactcatgttgtcctagagctgggtagctagggttggttcctaactgcctgcttgttgtcgtgctattgtgttagtccaagccgcaaccctaaagatctcatgtttactgaataaaaccgtgtccttccnnnnnaaaaaannnna

SEQ ID NO: 217063 - DNA, 316 bp, Gossypium hirsutum
cccacgcgtccgcccacgcgtccgcccacgcgtccgcccacgcgtccgccagagcaagccttgtgctgtctgcggctgaataagattgattttgcaaatcatggccaaattcctaccattgtaagtgtcaaagatgattaaaatgcagatttaaattcaacaccattgtttgcattcatttattttgttatttctgccttgtaattttcatcatctttatcacaccagcaaagcaattgactagattattgagatcaaagcttgttgtaaggattaactattttggttttcaaccataaacaataatttttcaatc

SEQ ID NO: 217064 - DNA, 388 bp, Gossypium hirsutum
cccacgcgtccgcggagatcaagcaaagcattttcataacccaatttttttcttcaaacacaaatcaaagggagaaaaaagaatggaagtggagggttcatcgaagaagatgatagcaacacaagcagagatggtggagaacaaggtccccatcccgtacagggatcaatgtgcacatcttctcatcccgctcaacaagtgccgccaagccgagttttacttaccttggaaatgcgagattgaacgccactcctatgaaaagtgcgagtacgagctcgtcatggagaggatgctgcagatgcagaagatccgtgaagaagaggccaagttgaaacaagctgggaaacaaggcgcttctgttcctctcattcccaaaactgctaatgct

SEQ ID NO: 217065 - DNA, 368 bp, Gossypium hirsutum
aattttcttcctttctgccaaggctgccgcttgggagacaggatgaagaccattgtttcttcggagacgatggacatccccgatgggattagcatcaaaataaaagccaaggttatcgaagttgagggtcccaggggtaagctcatccgcgacttcaagcacctcaacctcgacttccatctcattaaggacgaggagaccggcaagcgtaagctcaggcttgaggcttggttcggctccaggaagactagcgccgccatccgcaccgctctcagccacgtcgagaacctcatcaccggcgtcaccaaaggataccgttacaaaatgaagttcgtctatgctcactttcccatcaacgcctccatcac

SEQ ID NO: 217066 - DNA, 425 bp, Gossypium hirsutum
ggcccggaacgaccaacccgtccggccacttctttttttcgtaatctctaactttaagatttcagtctcagtaaagctttttcatcgccagccaaaatggggaagactcgtggaatgggagctggtcgtaagctgagaacccaccgtagaacgcagaggtgggccgacaagtcatataagaagtcaaatctcggaaatgaatggaagaaaccttttgctggatcatcacatgccaagggcatagttcttgagaaaattggcattgaagctaaacagcctaattctgctatgcgaaaatgcgctcgtgttcagttgatcaagaatggaaagaaaattgctgcctttgtacccaatgacggttgcttaaactacattgaggaaaatgatgaggtattgattgctggatttggacgaaaggggcatgc

SEQ ID NO: 217067 - DNA, 420 bp, Gossypium hirsutum
gcggccgctcgcgatctaaaacgtctccgcccaaaaggaaaaattattttcccctttcaccataaattgaacgttgaactcctcaaaaatcttcaaagcttcaacttttccaaacatcagcgatccctttcactccaaaatcgggtgaataatggcgacgtttgagctttaccggaggtcaacgatcgggatgtgtttgacggagactttagacgagatggtttccagcagtactttaagccctgagctcgctattcaagttctcgtccagttcgataagtctatgactgaagccctggaaagtcaagtgaagagcaaggtttccattaagggacatctgcacacctatagattctgtgacaatgtttggaccttcatcttacaagatgctttgtttaagaacgaggatactcaagaaaa

SEQ ID NO: 217068 - DNA, 452 bp, Gossypium hirsutum
ccgggcaccacgcgtcgcccacgcgtccgccacgcgtccggttcttggtctgcagatggagctaagcgaagagaaatgaaagacaatccagtacgccagcaggagcttgctgcctacttcactcactgcaccttcaattaccacacctaagacttgccctgctgaatgcaatgactgtctgctacaaggcaaagaacatggctacagcaggtaactttgcccggcgactgctagaaacaaaccccacaaatgagaatcaagcgaagacagccaggcaagtgcttcaagctgctgaaaggaacatgacagatgcttctcaactgaactatgatttcagaaatccatttgtgacatggggggcaacttatgtgcctatttaccgagggcagaaagatgtatcgtgcccatattggactaatcgctttgtgcctaaccaggaaaggcaattgggt

SEQ ID NO: 217069 - DNA, 466 bp, Gossypium hirsutum
cccacgcgtccgataacatgcggcgatgtgacaagcaaagtggccggttgcttatgatacttgcagaacggagggaacgtgccgaaggcttgctgcgacgggatccggtccctgaacaacatggctcgaaccacccctgaccgccaaaccgtgtgtgggtgcttgcaagctgccgctaaggctgtcaaaattaaaggcaacttggctgagaccctcccagccaaatgtagtgtcaacatcccttacaagatcagcacttccactaactgcaaaaatgtgaagtgagatggatgaagagagggttttgcagcagcttgcaggagataaaatatatgattaaaaagaagaagaagaagaagaatgaataaggattttgggatggaattttcaaaatccaaaattagtctccactttagtgtaatgaggctttgtttattttggtttatgttttggtccctgcatgttg

SEQ ID NO: 217070 - DNA, 439 bp, Gossypium hirsutum
ctttgatttttcaaaaatgtcgggccgtggaaaaggaggcaagggattaggaaaaggaggagctaagaggcatcggaaagttctccgagataacattcaaggcatcactaagccggcgattcgtagattagctcgtagaggcggtgtgaagaggatcagtggcctgatctacgaagaaactcgtggagttctcaagatctttctggaaaacgttatacgcgatgctgttacctatacggaacacgctaggcgtaaaactgttaccgctatggacgttgtttatgctctcaagagacaaggaaagactctttatggtttcggtggttgatttaaggttttaaggtctttcttcttttgttgtaaatctttcgttgcaactgcttggtgtaagctttttttttttgtttggatcgatgtattttcgtttcgatgaaaattt

SEQ ID NO: 217071 - DNA, 404 bp, Gossypium hirsutum
gttttgtttactacacaatgcggtgcttaagacttaaaactttggagattcttggggtctatgtaaaactattctcatttcgcattgaatatcttaatactaaattaaatttacaaaaaaaaaaaaaaaaaactcaaaaaaaaaaagtgaaaaggatcaaaaaccatgatcacagaaaaaactcgtggagttctcaagatctttctggaaaacgttatacgcaatgctgttacctatacggaacacgctaggcgtaaaactgataccgctatggacgttgtttattctatcaaaacacaattaacgactctttatggtttcatttatttgattaaaggttttaaaatatttattcttttgccggaaatctttccatgcaactgcttgaaaaacccttttttttt

SEQ ID NO: 217072 - DNA, 438 bp, Gossypium hirsutum
  unsure (1)..(438): unsure at all n locations
acaagatcaagaagctcactggggtgaagaccaaggagcttctggtttggatcacactcagtgatatctatgttgatgatccaccaactgggaatatcactttcaagacacctgctgggctgttcagaactttccctgtatcagcgtttgaggttgaaggtgaagttaagggtgctgttaaggacaagaaagaagaaaaggataatgtgaagcctgctgctgtggaagcagtgaaagaggtctagagtagtgagactagaattaaatttccaaattccatccatctgcggggttgtttttggacttgctatcttttaacaagcctcttctattaatatcatcaatagcagcaatcaataaaaaataacagcatgttagtttacattcaaaaaaaaaaaaancaaaaataaaaaacacattaaaagaaaagagggtaag

SEQ ID NO: 217073 - DNA, 461 bp, Gossypium hirsutum
ggtcatggtcaacgtgaagctgtgaaagtattattagattatcatgctaatccaaatgctgaggacgaggataatatcactccattgttgtcatcagtggcagcaggttcacttgcatgcacggatttgttgattcaggcaggtgctaaagtgaatattacagctggtggagcaactccgttgcatattgcagctgatcatggaagccctgaactaataaacagcttactgaaagctggagctgatcctaatgccactgatgaggatggcctgaagcccgtcctggttgcagctgccagaggtcatcgtggagcagttgagatactatttcctttgacgtcaagaattgataccattccagagtggactgttgaaagaattctcaaatatatgcagtctgaaactgacaaacaattggagcaaatgaaaaaactgacggaagccaaagtaacaagggacac

SEQ ID NO: 217074 - DNA, 434 bp, Gossypium hirsutum
cattgctgctcaacagggtggagcctttgcatgggaaattgctccggttgaagttcctggggggaggggaaagccatccatcatagtcgacaaggatgaaggtctaggaaagtttgatgctgcaaaattgaggaagctgcgaccaagtttcaaggataatggaggcactgttactgctggcaatgcctccagtattagtgatggtgctgctgctttaatcctagtcagtggagaaaaggcacttaagctgggattgcaagtgattgcaaagattgcaagatatgcaaatgctgcgcaagcaccaaaatttttcacaacagcgccagcccttgcaatacccaaagccatttcaaatgcttgcttggatgcttctcaagttgattactacgaaatcaatgaagcctttgctggtggggctcttgcaaatcaaaaac

SEQ ID NO: 217075 - DNA, 401 bp, Gossypium hirsutum
caggaatgactgctcctcaagctgctggagtcattcactctgattttgagaaaggcttcattcgtgccgagacagtatcctatgatgatttcgtcgtatctggttcactagcagcagcaagagaaaaaggacttttgagatccgagggtaaagattacgtagtacaagaaggtgatgtgatgctgtttcgtttcaacgtttgatgactgtattcccggagctgaaggcaaattcatcattcttttacttatcaaagcaccaaacaagaaatgtaaacgtcgatggttttatatcatacagcggtctaagaccatgttcaatatcagaaatatagcataggattgcaattattctttcaccattgctaaaccgagaaatatatatattcagagattttgctc

SEQ ID NO: 217076 - DNA, 457 bp, Gossypium hirsutum
cactgcacttgctccaagcagcatgaagattaaggtcgttgcaccaccagagagaaagtacagtgtctggattggaggatctatcttggcatcactcagcaccttccagcagatgtggatttccaagggtgagtatgatgaatccggtccatccattgtccacaggaagtgcttctaagttttgtaattgcttttgatggtgatctacattttgcatttagttggctttttttgtgtgcggtgtcaagtgaactccaaagtctggtttatgtggggggagttggggatcattgtaagatggtgtacttgatattgacgtattattattttagcttttcaccggatcaccaccattaaaatgatgggtcctatggaaatggcggggggcggacaattggtgcttaattccttccttacaatccatctttgaaccatggtgctgcttaaaaagatgttt

SEQ ID NO: 217077 - DNA, 419 bp, Gossypium hirsutum
cccacgcgtccgagaacacagttattgcaggggcacaatacagaggttcactctatttgttgggacacaaatggagactttttagcatctgtcagtcaggattctgttagagtgtggtcgctggcctctggagagtgcattcatgagctcaattctagtgggaacaagtttcattcttgtgtttttcatcctagctttcctgctctcttggttgttggtggttatcagtcactggagctttggaacacagctgagaacaagtgtatgacaattccggcccatgactgtgttatatcagccctgacacagtctcaagttacagggatggttgcctctggcagttacgacaaatccgtcaaaatatggaaataactgtgtcagccaacttttaatgttgcattgggggaatgctatatatt

SEQ ID NO: 217078 - DNA, 430 bp, Gossypium hirsutum
cggacgcgtgggcttcgaatccgtgctggccaaagccaagcacttgttggagctagtggctcgggcaagagttcagtcattgcattgattgaacgattctacgatccaacagccggaaaggttatgatcgatggaaaagatatccggagattgaacttgaagtctcttaggcttaaaatcggattggtacaacaagaaccagccctctttgctgccagcattttcgataatatcgcttatggaaaagaaggagcaaccgaagctgaagtaatcgaagcagctcgagcagctaacgtgcacggtttcgttagtgcgttgcctgatggttacaaaacacccgttggtgaaagaagcgttcaactctccggaagtcaaaaacaaaaaatcgccatcgcaagggctgtacttaaagacccaacaatattactac

SEQ ID NO: 217079 - DNA, 461 bp, Gossypium hirsutum
agtatttgaaaccaaatttgctggctaatgacattgcaccttttgtgaaggattacaaggaaggaaaagtgccaccatatctcaagtctgaacctattcccgaggagaataaggaacctgtaaaagtggtggttgctgacacctttgaagacatggttttcaaatcaggcaaaaatgttctgcttgagttttatgccccttggtgtggacattgcaagaaattggccccaatcttggatgaagttgctgttcattatgaaaaagatgataatgttttgattgcaaaacttgatgccactgcaaatgatattgtgggtgagaactttgatgttagaagctacccaaccatttactttaaatcaactagtggaaacataactccttatgaaggcaataagaccaaggaagacatcgtcaacttcattgaaaagaacaaggataaaacttgccaacaagagtca

SEQ ID NO: 217080 - DNA, 472 bp, Gossypium hirsutum
cccacgcgtccgggaaaacgcaccatttcacacctttttgctgttcatttctcttccaccacaccaatacccagacccagagaaaaaatggccagcaaatctgagggtaaggaacctgtgaacgaacaagtggttgcgaatatgtacggagctatgagatctgaactaaatcaaatttattctaagatcaccgagttggagatggaagtgagcgagcattcgctagttataaatgccattcagccacttgaccagtcgaggcggtgttaccggatgattggaggtgtccttgtcgagagaaccatcaaagaggttctccctgctgtgcaacgaaacaaagaaaggctcgaggaagtaattgctcgtcttaacgagaccctggagaagaaaaagaaagaaattgctgatttcgagacaaaatacaaaattaggatcaaaaagtccgatgatgactcgaaagatgaaagcaaca

SEQ ID NO: 217081 - DNA, 452 bp, Gossypium hirsutum
  unsure (1)..(452): unsure at all n locations
gcttacacaccagccggcgaacccattcctaccaacaagagatttaatgcggccaagatctttagccaccctgatgttgttgctgaggagccttggtatggtattgagcaagagtacactcttcttcaaaaggatactaagtggcctcttggatggcctgttggaggattccctggaccacagggtccgtactactgtggtgtaggtgctgacaagtcctttggtagggacatcgtggactcccactacaaggcttgcctttatgctggcgttaacatcagtggaatcaacggtgaagttatgcctggtcaatgggaattccaagttggtccatctgttggaatatctgcaggtgatcaaatatggattgcacgatacatactcgagcgaatcactgaaatcgcaggagttgttctttcttttgatcccaaacccattncgggtgactggaa

SEQ ID NO: 217082 - DNA, 434 bp, Gossypium hirsutum
cgaatataactcatttttcggaattgcttttctttgcgctttttagcaggttttttcatggcttcccttactgtacacctgcttccgccattgcttttacaagatagaaagacccttttcgggacttttccaaaactcccagtttcttataccggagggaggcgaaactgtgctgtttttgtgaaggctaccggtgatagctcagagtcttctacctcacttagtattgtcaagtctgtgcgaaatgtttgggataaatctgatgaagatagggtaggtctcattggtctgggatttgcagctattgtggccctgtggacttcaactaatttgatttcggttattgacaaattgccaattatcccaaatgtgctggaaattattggcatacttgtttccttggggtttatttaccggtatctattgttcaaacc

SEQ ID NO: 217083 - DNA, 429 bp, Gossypium hirsutum
cccacgcgtccgcccacgcgtccgcgtcgtcagtacttaccgtgatcacgtgcacgccttaagcaaaggcgtctctgcacgtgctgtcatgagtgagctcttcggtaagaccaccggctgctgccgtggccaaggtggatcgatgcatatgttctcgagggagcacaatgtgctcggcgggttcgcttttattggtgaagggatccctgttgccaccggtgcggcttttacatccaagtataagagggaggttttgaaagaagcggattgcgatcacgtcactttggcatttttcggggatgggacttgtaacaatggacagttctttgagtgtttgaatatggcagcgttgtggaaattgcccatcgtgtttgttgttgaaaacaatttgtgggctattgggatgtctcatttgagggctacttctga

SEQ ID NO: 217084 - DNA, 389 bp, Gossypium hirsutum
  unsure (1)..(389): unsure at all n locations
gttttcttcttatttatcttcttgaattctctcaagaaagccctaaatacctcggatcaggtgtcaacttgtggttgttaagcctatttgatcaactaagtttcatgtctgatctcgacgtccagattcctactgccttgatccctttgctgatgcaaatgctgaggactcaggtgctggtgcaaaggagtatgtgcacattcgtattcagcaacgcaacggtaggaaaagcttgacgactgtccaagggttgaagaaagaattcagctacaacaagatactcaaagacctcaagaaagagttttgctgcaatggtactgtcgtccatgaccctgaattanggcaagttattcaactgcaaggtgaccagcgcaagaatgtgtcaacct

SEQ ID NO: 217085 - DNA, 412 bp, Gossypium hirsutum
ggcgcatgaacaaaaggtagttactatatttagcgccccaaattattgttatcgctgtgggaacatggcatcaatcttggaagttgatgattgcaagaaccagtcattcatccagtttgagccagctccaaggagaggagaacctgatgttacccgtagaacgcctgattacttcctctgaagctgctacattccataactgattcaagatactccgcttttcggcctctcctctccccctttacattgtcaggtagttgccgatcctttacagaaatcttttgcatctactgttcttttggtgatttggggggggggtaccaaaagcatacatgggaatgggttgggttatgaacttatgatctataatcctatcatcgagttgatcaatttatcttacacttggatattc

SEQ ID NO: 217086 - DNA, 456 bp, Gossypium hirsutum
cccacgcgtccgaaattaacaggttaagtcggtttctttaatctttaaatataaagataccagattcctttggattctttaaaaaaaaaaaaaaaaaaaaaaaaaaaaaaaaaaaaaaaaaaaaaaaaaaaaaaaaaaaaaaaaaaaaaaaaaaaaaaaaaaaaaaaaaaaaaaaaaaaaaaaaaaaaaaaaaaaaaaaaaaggggggggccgtttaaaagaaccaaagttaactaccccgtcattgcaaagaaaaatttttttaatagggcaacaaaaataaaataaacggcccggggtttaaaaacgggggaatgggaaaaacccgggggtaaccaaattaaatggcttggaaaaaaatccccttttcgcaagttgggtaaaaaaaaaaaaggcccgaaccaatcgcctttcaaaaaaattgccaaacttaaatggaaaatggaaccccccttt

SEQ ID NO: 217087 - DNA, 466 bp, Gossypium hirsutum
gatacactcatctccaccattccttacttcaataaacatggttttgggggagagaaggtgaactcatcttctttggaggcatggatggaagagagcaaggcaccagctctcgaccacacattcaagctcttccatgacattaaagatagagggatgaaaatctttctaggctcttcttaaggggtttcgaagatgaatacatgcatgtggaacaatacaagtcccaagtgaggaaaacattaatggatcaagggtaccgcatatggggaatcgttggagatcaatggagcagcttaaagggtttgccagaagcaaagagaacattcaagctgccaaattccatttactacatgtcttaacttcatctgaataaatttttatgcactcattttcccacctcatgtgcttttgtatttgcttgcggttgttttcaaaaatccaatataaaatatcagtaaaaatatct

SEQ ID NO: 217088 - DNA, 204 bp, Gossypium hirsutum
gtccgggacgcgtgggtcacgatagccttgaaaagtttacttttaaagcccttgcccttactctcaggaaggtgtttgatggtgtctatggaccggcatggcattgtattgtggggacgagttttgggtcttttgtaacacattcagttggtgggtttttttatttctcaatggatcaaaagttatatgtcctcttgtttaata

SEQ ID NO: 217089 - DNA, 386 bp, Gossypium hirsutum
ctgaaaaggatgaggaagaccaaggtcttgttatgaacttctacaaggattcttgtcctcaggctgaagacattatcaaggagcaagttaagctactgtacaagcgacacaaaaacactgctttttcttggctgagaaacattttccatgactgtgctgtccagtcatgtgatgcttcactgctgctggactccacaagaaggagcttgtctgagaaggagacagacaggagctttggcctaaggaatttcaagtacattgagaccatcaaagaagctgtagaaagggaatgtcctggagttgtttcttgtgctgatatccttgttctgtctgctaaggaaagcatcgtttcgttgggaggcccttatattcctctcaaaactgga

SEQ ID NO: 217090 - DNA, 460 bp, Gossypium hirsutum
aatctctatctcttaagaaagtagaaaatggcgagcagcaggacttccacaccattactttcattacttgtttgccttgtgctcctgtgtgaggtgggaatgctgatggctcaactttctgcagcacaagccccaggcccccaggttccagacgcatgcccgaacaagtgtgcaaagcggtgcaacctttcatggaagccaaagatgtgcaataaaacatgcatagcctgctgccacaggtgccccgatcactgtgtgcctgatggtcctagagctagccgagattcctgccattgctactcacagatcaagacccataacaagttcaagtgcccttaaattttacattacatcctcttctttttttctcttcttttattttttccagagtgggagagtttggaaactaaaataaaaggaataataaaatgacgttactgtttctgtggtggtttcaatt

SEQ ID NO: 217091 - DNA, 470 bp, Gossypium hirsutum
cgccctttgacttccctcgctttttagatctcatgtccaagcatatgaaacctgagcccttcgataggcagctacgcgatgctttcaaggttctggataaggacaatactggctttgtctccgttgcagatctgagacatatactgactagcatcggagagaagctggagccctcggagttcgatgagtggatcagggaagtggatgtcgggccagatgggaagatccgttacgaggaattcattgccaggatggttgctaagtgagaaagcttattaacgtttgttttccttgcttgttgttttctttttgggggaaccaggctttgatccggcggaagatattgtgttttcaattttttgttctctttggtttgtttctatggaacctttggaactaatggtaacactctttcttaaagaatttgattggtggggggtacttatgtattctcatattaatattcttgg

SEQ ID NO: 217092 - DNA, 453 bp, Gossypium hirsutum
agattgtgaacagctaagaaaagccttttcaggatggggaactaatgagggcttaatcatagggatattgggtcacagaaatgccgagcaacgaaacttgattcgaaaaacctacgctgaaacctatggagaggatctcctcaaggcactagacaaggagctctcgaatgactttgagaggctggttttgctttgggctcttgatcctgctgaacgtgatgcccttttggctaatgaagccaccaaaaggtggacttcaagcaatcaggtccttatggaaatagcttgcacaaggtctgccaaccaactgcttcacgcaaggcaagcttatcatgctcgttataagaagtcgcttgaagaggatgttgctcatcacacgactggcgacttccgtaagctcctcctacctctagtgagttcatacagatatgagggagaggaggtgaacatgaa

SEQ ID NO: 217093 - DNA, 456 bp, Gossypium hirsutum
cccacgcgtccgctctaaccctagccctctatcaggattcaaacatgaaaggaggtaaatccgagtcggatgccaagagcgccaagctctccgtgaataagaaatcaatcacgaaagctggaaagaaatcggggaaggcagctaaggatccaaacaagccaaagaggcctgctagcgccttcttcgttttcatggaggagttccgcgagcaatacaagaaggagcaccctaaaaacaagtccgttgctgctgttggcaaagctggtggagataaatggaagagcctttctgaagctgaaaagcgaccttatgttgataaggcagagaaacgaaaggtcgagtatgaaaagaacatgaaagcctacaataagagacaggcttggggtccccaagaagatgaagaggaatctgaaaagtctgtatctgaggtgaatgatgaaaaaaaagatgatgatg

SEQ ID NO: 217094 - DNA, 449 bp, Gossypium hirsutum
caactatcaatctttaggtttattgcattaaatagatcatgaaatctttcctttctttttttgcattcctgtcacttctcctgtttgtagacaccattgcagcagctaggaaagatgctggagagtactggggagctgtaacgaaagatcagcctatgcctgaggcactccaagagcttgttcggattgaggctgccgttgtcagccccgatgagaaaaccaagtgccatacatcaggtaatattgagcttaaagaagagaagattattgttaatgaggagttcgaaccaaagccaaacgtttcaacttatggtgatgacgctaatctaaaaagagataaatcatcatcttttgctgaagattttgaaccgagacctaacgtttcggcttacgggggcgatgatgctggtcttaaaagacagaaagaatcattcactaaaaatttcgat

SEQ ID NO: 217095 - DNA, 465 bp, Gossypium hirsutum
gccgctgataccgccatctctgtgagcaaagaatgcagtaggacatgtgagtcagagttctgtgtcagtgcctccatttttgaggtatggcaagtattgcggcctattgtacagtggatgccctggagagaaaccttgcgatggacttgatgcttgctgtatgaagcacgatgactgcgttcaagctatgaacaatgactatctgagtcaaaagtgcagccaaagcttcataaagtgcataaaggatttccagaaaggaggagaaaggagtttcaagggtaacaaatgccaagtggatcaagtcattgatgtcatctctgttgtcatgaaagctgccctgattgctggaagagtgcttcataaaccttagtctatttacccaacccaacactgtcagacacgacattcttctgcttctgcaatcctaagattgatgatggcatggcatccctcaattaaatcatt

SEQ ID NO: 217096 - DNA, 464 bp, Gossypium hirsutum
  unsure (1)..(464): unsure at all n locations
agtccttgagtactgcaagaagcatgtcgatgttgctgcttacaaggaaaagactcccgatggcgaactcagggcttgggatgctgattttgtcaaggttgaccaaaataccctctttgacctcatcctggcagcgaactatctgaatatcaagagcttgctggacttgacctgccaaactgtggctgatatgataaagggaaagacacccgaggagattcgcaagaccttcaacatcaagaacgatttcacccccgaagaaaaagaagaggttaggaaggagaatcaatgggcattcgagtgataagaaagcctttaaatttaatgttgatattattataagttctatgcttttctcgctaggttttcaagttggggaaaaaaattaaaaacattggctttcttttggcttatttntgtatatgcattagtgtcttctattctagaggatatttaatatgaac

SEQ ID NO: 217097 - DNA, 464 bp, Gossypium hirsutum
acagaaatgccgagcaacgaaacttgattcgaaaaacctacgctgaaacctatggagaggatgtcctcaaggcactagacaaggagctctcgaatgactttgagaggctggttttgctttgggctcttgatcctgctgaacgtgatgcccttttggctaatgaagccaccaaaaggtggacttcaagcaatcaggtccttatggaaatagcttgcacaaggtctgccaaccaactgcttcacgcaaggcaggcttatcatgctcgttataagaagtcgcttgaagaggatgttgctcatcacacgactggcgacttccgtaagctcctcctacctctagtgagttcatacagatatgaaggagaagaggtgaacatgaatctggcgaaaacagaagcgaaagtgcttcatgaaaaaatttcaaacaaagcttacagtgatgacgatgtcataaaggttttggct

SEQ ID NO: 217098 - DNA, 446 bp, Gossypium hirsutum
ctctctctccacttcctcttcaataggctttatgaaggggaaagtagaaacaaagggaacatatggcaagtgaggcggcggaggaagctaacgtccctgcagcggctgcggcggaagcacccacaacagggaccgagaagcaaccacataagcttgaaagaaagtggaccttttggtttgataaccaatcaaagcctaaacaaggcgctgcttggggttcctctttacgcaaagtttacacttttgacactgtagaagaattttggtgtttgtatgatcaaatattcaagcctagcaagttgcctggaaatgctgatttccacttgtttaaagctggaattgagcccaaatgggaagatcctgagtgtgctaatggaggaaaatggtctgtcactagcaacagaaaggctaatcttgaaaacatgtggcttgaaagtttgatggca

SEQ ID NO: 217099 - DNA, 457 bp, Gossypium hirsutum
gcagggtcatgaggtggattgttatggaatattaacctatttggtcacttgctatgctcaagcagctttaggttgtgttttcaagcttgttgagatcaataatcagccacgcatcaaactttcagaggatgtatccaaggtctctataccatgcaaaaaacgatgttacaggttatatggaagggaaggatattcgctggtagatataatgacaggggaaaatgaaccatgtccaaaggtgggagaacgtattctatgtcgccacccttttaatgaatccaaaagagcatatgtagtaccacagcgcgtggaagaacttctgaagtgttactggcctgggaagtcaagtaaagtaagaaaagagttaccagctctcaaagatattaaggaccattgcatcaaacagcttgagcaaatgaggcctgatcacattaagagattaaaccccacaccatac

SEQ ID NO: 217100 - DNA, 458 bp, Gossypium hirsutum
cggacgcgtgggcgagaattctacactgttatctatccctctttgctgcaacttgagagcggggtcactgatagtgaagataaacaacagaaagcggcatgcgtggaaaggtatcgtagaagagaagatgaagagtataagcagcttaccgatattgatttcgaaagagaagaagaatgtggaatatgcatggaaacaaacagtaaaatgttgctgccgaactgtaatcacaccatgtgcttgaaatgttatagggaatggcggtcaatatcacagtcatgccctttctgtcgtgatagtctcaaaagagttaactcgggggatctttgggtatatacagacagccgggatataatcgacatggccacagtgacaagggagaatcttagaaggcttttcatgtacatagataagttaccacttattatccctgataccatttttgatacttatgattc

SEQ ID NO: 217101 - DNA, 401 bp, Gossypium hirsutum
accacgcgtccggcataccatgaacagatatcagttcctgagatcacaaacgctgtgtttgagccctcaagcatgatggccaagtgcgatccaaggcatggcaagtacatggcttgctgcctgatgtatcgaggagatgtggtgcccaaggatgtgaacgctgctgttgctaccatcaaaacgaagaggaccgtgcagtttgttgactggtgcccaactggtttcaaatgcggtattaactatcagcccccagctgttgtccctggaagagatcttgctaaagtgcagcgagcttgttgtatgataagcaataacacaacagtggcagaggtgtttgcacgcattgaccacaagtttgatctgatgtactcgaaaaaagcatttgtgcattggtatgttgg

SEQ ID NO: 217102 - DNA, 442 bp, Gossypium hirsutum
cccacgcgtccgcccacgcgtccgcccacgcgttcgaatgaattaattcctagggaattaatggctatttttaatgacaaggagctggagttactgataagtggtctaccagaaatagatatggatgatatgagggcaaataccgagtactctggttttagtgctgcatcacctgttatacagtggttttgggaggttgtccaagggttcagtaaggaggataaagctcggcttctacagtttgtgactggtacctcaaaggtgcctttagaaggttttagtgcacttcaaggaatttcaggttcacagaagttccagatacagaaagcatatggcagccctgatcacttgccttctgctcatacctgtttcaatcaattggatttacccgagtatccatcgaaagaacatctaaaaaaaaagttgctgcttgcaattcacg

SEQ ID NO: 217103 - DNA, 467 bp, Gossypium hirsutum
aatcgataaaaatggcgatggcgagtgttcgatctggtctcctacgagcagcccttcgcggcggctctcgtgctactgctcctcccacgcgtggcttcgcttcctcttctcatcacgatgatgcttatgaaaccgcaaaatgggaaaagataacatatttaggtgttgctacctgcactgttttagcgatttataacctatcaaaaggtcatccccaccatgaagagcctcctgcatacccatatttgcacattcgcaacaaggagttcccatggggtccggatggtctgtttgagaaaaaagagcatcactagggatggccggatggatgcatatctttccgagttcggcgcatttttatcatttctctgagaaatcaatcagataattcttgggatcttttgtaattttagcactcgatttccaatttatggacttttaattgcaagttcatcaagttttctata

SEQ ID NO: 217104 - DNA, 399 bp, Gossypium hirsutum
cccacgcgtccgaaatcctcgaggcgatcaaggcgaacttcaatgataagtacgatgagtacaggaagaagtggggaggtggtatcatgggatccaagtcacaggcccgaaccaaggcaaaggagaagcttcttgcaaaggaagctgcacagaggatgacttaaaagatcaccatttttatccttccggttgtactttcagttttgttttcgattttgtttagattaaatggtcctctttttaagtaaaagctgcaatcaactttcaaactttagtttcttttctttttaactgaagaatatttatagatttctgtttgaacttttgaaataactttctagctacttgtttgatgaaattttgtgggcttataatgaaaaactatcaattatgcggttg

SEQ ID NO: 217105 - DNA, 387 bp, Gossypium hirsutum
ctaccatagtgcgattgggaggacgaaaccaacaaagaaaagcggacagtgaggagcaacagcggcaacaatggtgaagttcctgaagccaaacaaggcggtggttgtccttcagggtcgctacgccggtcgtaaggcggtgatcgtcaaatccttcgacgaaggaacccgcgaccgcccttacggtcactgtttggttgcagggattaagaaatacccaagcaaagttatccgaaaggactcttccaagaaaacggccaagaaatcccgcgtgaaatgcttcctcaagctcgtcaattaccagcacgtgatgccgacgcgttacaccttggatgtggacttgaaagatgtggtcaccgtcgacttccttcaaagcaaggacaaaaa

SEQ ID NO: 217106 - DNA, 442 bp, Gossypium hirsutum
  unsure (1)..(442): unsure at all n locations
gttaaagataaatcgactctgtttccactgggttggattcatacacacccaactcagacttgtgggatgtgatcggatgatcttcacactcattactcatatcagattatgttaccagaagcaatagcaattgttatggcccataccgatacattcagcccacatggtatctttcatctgtccgatccaagcggtgtgatcatcattcggaactgtcaacaacgaggatttcatccgcatgaggagcctgtagatggaacaccaatctacgagcatngctctcatgtatttatgaacccaaagataaagatcgacgttgttgatctccagtgcggtaaaattgtattgaatcaaactgaaaaaaagtagaatggcaatacagggtatactcacttaaaatttttatgaattatattcgtagaattatgaacctatgtatatt

SEQ ID NO: 217107 - DNA, 353 bp, Gossypium hirsutum
cacggctaatggaacctgtatattatgtggagatacaaacaccaatcgactgtgtctctgctatctatactgttttgtcccgtagacgtggtcatgttacagctgatgtgccgcagccaggaacccctgcttatattgtcaaggcatttttacctgtgatagagtcatttggattcgagactgatctaaggtaccacacgcaagggcaagccttttgtctctcagtattcgaccactgggccatagttcctggagatcccttaaacaagaccataagtttgcggcctcttgaacctgcaccaatacagcaccttgctcgggagttcatggtgaaaacgaagcgtaaaaaggga

SEQ ID NO: 217108 - DNA, 432 bp, Gossypium hirsutum
caaaaatggttctccaaaacgatatcgatttgttgaatcctccagcagagcttgagaagaagaagcacaaactcaaacgtcttgtccagtctccaaattctttcttcatggatgtcaaatgccaaggctgtttcaacataacaatagtgtttagccactctcaaacagtggtggtatgtggtaattgtcagactgttctttgtcaaccaacaggaggaagagctagactcaccgagggatgctctttcaggaagaagggtgattgatctcatattttgctattttatgattcacaaaaacaaaagaaagtaatctttggatcaaatatgggaatcatatgagtaatctttttcatgtgtttcagttatgacatatgtgtgaagtttatttttgtagtaagttggtacttgatgatggtattaatccattatg

SEQ ID NO: 217109 - DNA, 391 bp, Gossypium hirsutum
ctcatctctctcctttgttttcccttttgtctctctctctctttttccaaccctaaccctacctcaccaaccaggattcaacatgaagggaggaaaatccaagtcagatactaagagtgccaagctatccgtgaaatccaaagctggaaagaaatcggggaaggctgccaaggatccaaacaagccaaagaggcctgctagtgccttctttgttttcatggaggagttccgtgagcaatacaagaaggatcaccctaaaaacaaatccgttgcggctgtcggcaaagctggtggagataaatggaagagcttgtctgaagctgaaaaggcaccttatgtagctaaagcagaaaagcggaaggttgagtatgaaaagaacatgaaggcctac

SEQ ID NO: 217110 - DNA, 341 bp, Gossypium hirsutum
cccacgcgtccgcccacgcgtccgcccacgcgtccgctcgactttggtctcttccaattaggttagataacccgaaatctgaaactttagcattaaaattctcatctaaaagaatattctgagatttgatgtccaagtgaagtatcttttggttgcattcttcatgaagataggccaatcccttggctatatctagaattatcttctttctaatttgccatccaagagcaggttcttggtttttgttgaaaatccattgatctaaggagccatttgccatgtactcgtaaactaaaagcctattggaattttcagcacaaaatccaaccaaagttaccaaa

SEQ ID NO: 217111 - DNA, 445 bp, Gossypium hirsutum
cccacgcgtccgcggacgcgtgggccagtatctgaagacatgtttcattggcaagcaacaatcatggggccctcagatagcccttatgctggaggtgtgtttttagttaccatccatttccctccagattatcctttcaagcctcctaaggtcacgtttaggaccaaggtcttccatcctaacatcaacagcaatggaagcatttgtcttgatatcctcaaagaacaatggagccctgcactaaccatttccaaggttctgctctcaatctgctcgttgctgaccgatccaaaccctgatgaccctcttgttccggagattgctcacatgtataagactgatcgggccaagtatgaagccactgctcgtagcttgacccaaaagtatgccatgggatgacagtggttggtgtgtaatacctatcagcttttttatgtgttttggg

SEQ ID NO: 217112 - DNA, 366 bp, Gossypium hirsutum
  unsure (1)..(366): unsure at all n locations
ttaaaggaagaacaagagggacattagtggtaatcccagggctcttaggaggttgaggactgctngtgaaagggcgaagagaactttatcatccactgctcaaacaaccatcgaaattgactccttgtatgagggtatcgatttttactctaccattacccgtgccaggtttgaagaacttaacatggatctattcaggaagtgtatggaaccagttgagaaatgtttgagggatgctaagatggacaagagcactgtccatgatgttgttcttgttggtggttccactagaattccaaaggtccaacaacttttacaagatttcttcaatgggaaggagctttgcaagagcatcaaccctgatga

SEQ ID NO: 217113 - DNA, 390 bp, Gossypium hirsutum
cccacgcgtccggatgaagtccaaacgagagaagtatttgatgatgatggctggtttcatagaggagacattggtttgtggttacccggaggtcgtctcaggattattgataggaaaaagaacatatttaagttggcacaaggcgaatacatagcaccggagaagatcgagaatgtatatgcgaaatgcaaatttgtttcacaatgttttgtatatggtgatagtttcaattcatctttagtagcagtagttgcagtggaacctgatgttctaagagactgggccgcatctgagggtatccagtatgaggatttacgacagctgtgcaatgatccaagagcaaggaatgctgttctcgctgagatggatgatgtgggaagggaagcacag

SEQ ID NO: 217114 - DNA, 387 bp, Gossypium hirsutum
acgcccacgcgtccgcccacgcgtccggggtgagaaagatgacaagattattgctgtctgtgccgatgatcctgagtatcgtcactacaatgatatcaaggaactcccacctcaccgcctggctgaaatccgtcgcttctttgaagactataagaagaatgagaacaaagaagttgctgttaatgactttctgcctgcctctactgcatacgaggcaatccaacactccttgaatctctacgcggactacatagtggagagcttgaggcggtaattgtcggttcaccgtgccccgtctatatacaaatatatatattaatatgaatatgaatatgttgctactatacaagaaattcatcgtctccttgtgcgggcagaaacaccctg

SEQ ID NO: 217115 - DNA, 283 bp, Gossypium hirsutum
atcgactggtcttctgtgagaaatgtcatggatatgaaagctgtttatggagggtttgctgcagccctgaaagacttgaaagtctgggttatgaatgtagttccaatcgacggtgccgatacacttccagtaatctatgaacgtggattgtttggaatacatcacgattggtgtgaatcatttaatacatacccgagaacgtatgatgttcttcatgcagatcatctcttctccagtattcagaacaagtgcaagttggttgcggtaattgcagaagttgatc

SEQ ID NO: 217116 - DNA, 232 bp, Gossypium hirsutum
gctcccaccataagcattcagcattatattgatcgcatcttcaagtatgctggctgcagtgcgttgtgctttctcgttgcatacatttatgtggatagatttgttcaacaaacggatgtgcatttgacttcccttaatgttcaccgactcctcataaccagtgtattggtagccgcaaagtttattgatgatgcgtttttcaacaatgcatattatgcgcgagtgggagggg

SEQ ID NO: 217117 - DNA, 419 bp, Gossypium hirsutum
cgggtcggcccaagccgtccgccaaagggaggtttttcgaacctgaaaaggaggttaggaggaacctgccggaggccaggaaggaggtgcggaattttgccgttgcttttttattaaagtccatcgagggagtccaaaactggaaggcctaccttgccgcaggattttcgctaaagtctggcatgaaaccacatgaacttgtcttctagaagtaagttgttagctaagtcccctttacattggtgtgttttggtttttgagtatcattgatcctattttcggatgctatataggtaacctaaatcattttgtgaggcaagaaccccaaatttccatttttgtgttttcttctaatctctactggattttgtttttattttttttattgaagttatagtatggaattttgcccactagag

SEQ ID NO: 217118 - DNA, 172 bp, Gossypium hirsutum
  unsure (1)..(172): unsure at all n locations
aatccaagaatacgttcgtgaaacttttgcttggatgcattattactggtaccttaccaacgatggcattgaatttttaaggacttaccttaatctcccctctgagattgttcctgctactttgaagaagcaaactatgcccngcggtggtcgtcccatgggtccttctgat

SEQ ID NO: 217119 - DNA, 320 bp, Gossypium hirsutum
cccaaacacctcttttttcgcaaaattttctaagttttagccatttagaaaaaaagctttttgttgttgaaggccatgactatgagtaacaatattgggcaatttggtgacacaactttaaccaaagttttcgttggagggttagcttgggaaactcccagagaagccatgagagagcactttgagaagtatggtgagatccttgaagctgtgattatttctgataaagtcactggcagatccaagggttatggattcgttacgtttaaggaagctgaagctgctaagaaagcttgtgaggatgctaaccctatcataaa

SEQ ID NO: 217120 - DNA, 372 bp, Gossypium hirsutum
attgggttcctgaggagagaattcttaccaccaatctttggtctgcagagctttccaagcttgctgccaatgctttcttggctcagaggatctcatccgtgaatgccatgtctgctctttgtgaggcaaccggggctgatgttacgcaggtctcttatgctgttggtaaggacacaaggattggacccaaatttttgaatgctagtgtcggttttggtggatcctgcttccagaaggatattctaaatctggtttacatctgcgagtgcaatggccttcccgaggtggcagagtattggaagcaagtcattaagatcaatgactatcagaaaaaccgatttgttaatcgtgttgtttcctcgatgtttaaca

SEQ ID NO: 217121 - DNA, 269 bp, Gossypium hirsutum
tcaacctgctgttggcagaattccatctgaacttgccacatcacttgcggctgcggcagcagcagaactaccttgcactgtaaagcttagaatatggccacatgatatgaaagacccttgtgctttccttgatcccgagaaatgtcgcttgatcattccacatgctgtgctttgtagtgaaatgggtgcacatttttcaccttgtgggagatttttagcagcctgtgttgcctgtgtgcttcctcatttggaagccgatcctggagttc

SEQ ID NO: 217122 - DNA, 456 bp, Gossypium hirsutum
ctcaattctcaaaaccctaatttctctgcttttccttttgcttaatcaatcgatcctcgtcaatggccaacagtaatctccctcgaagaatcatcaaggaaactcaacgtctcctcagtgaacctgcacctggaattagtgcttcaccatcagaggataacatgcggtatttcaatgtgatgatccttggtccaacacagtcaccatatgaaggtggggttttcaagttggaactatttttgcctgaagaatatcccatggctgctcccaagagcaaactctcgctggttcgatttcttacaaagatatatcatcctaacattgacaagcttggaagaatatgccttgatattctcaaagacaaatggagtccagctctccagattcgaactgtacttttaagtattcaagcacttttgagtgctccaaatcccgatgatccactctctgaaaaca

SEQ ID NO: 217123 - DNA, 354 bp, Gossypium hirsutum
  unsure (1)..(354): unsure at all n locations
aacgaccggccgaccgacgcgtcccngactcatttcggactctgttttgacgtttgggcggacgcattaaccgaggggtggtgtgactcttggagtcgtggagttagcagtggtagtgggcatagctcattgggctatctgtttgggagtggagaagctccaaaaccagttacaaacaaatccgaagctgctccaattgaagcacaggatgtgtccaaacctgctcctgctcctcaacaagttgccaagcaaattcctgcgggtattaacagttcgcgtgctgatggtcagaacactggctatttcattactgatcgaccatccaccaagattcatgcttcccctggaagtgga

SEQ ID NO: 217124 - DNA, 338 bp, Gossypium hirsutum
gccaatcctaaatcggatagttctttgaagactgctgctcaggccatatattacgagtttggtgggacggatgccgagtccaatggcgcatatcatcttctactaaaagaggatgacattgagggactccttgaaaccgatcacataaacgatctcatacctcagaacaacacagtgttcattaaagttttcaaagctgatgagaaaactgacgaaagtactttgctgaccgaggcactcaccgaaaaaccttccattggaacggtcatagctgctggacctgctactgtacatgaggcaggaaacctagaaccactatcagtctcaccttgaaacac

SEQ ID NO: 217125 - DNA, 477 bp, Gossypium hirsutum
  unsure (1)..(477): unsure at all n locations
gaaagcaggccataattgttgnggtacaaaaacattaacatcaattatttggtacaatgcaaatttagtcatctcataacttataccaagttgaaattgcatggaaaattcaaaatatatgattggttgagcttcacaaattcaacaagaacatacatccaaaaaagccttggcaaacccaagcttcacattatttgagactgcggtggcatgttaacattagcaggcatcaagatcacggcatggaggaggtttgggatcggttagcaaagtggtatttccaccttctggtccgctcttgattcgttttggattttgagtgccaggcggtagcttctctccccttcttagcatctcaactatctcaataactctttttggggtaatatcttcataagaattatatgtgtatccttcagatccattggagtaatcagcaactgtgatcataggagcatttacacaacattccataca

SEQ ID NO: 217126 - DNA, 325 bp, Gossypium hirsutum
  unsure (1)..(325): unsure at all n locations
ctccatcaagggtatcggaaggcgtttcgccaacattgtttgcaagaaagccgatgtagacatgaacaagagggctggtgaactgactgcacaggaattggacaatctcatgacgattgtggcgaacccgaggcagtttaaaatcccagattggtttttgaacaggcagaaggattacaaggatggaaagtattcccaagttgtgtccaatgctctcgacatgaagttgagagatgacttggagcgcttgaagaagatcaggaaccaccgtggtctgaggcactactngggccttcgtgtacgtggtcagcacaccaagactact

SEQ ID NO: 217127 - DNA, 339 bp, Gossypium hirsutum
cttccttctgttgctacagcgacttacaattcaatgagctatgcaccaaatggggctggagtgaagttcccgaatcacaaggaggatcatagtaactctatcacgatcggtgtttctgatgagcatataggactggttcttggtcgtggtggaaggaatatcatggaaatcagtcaggtaagcggtgccaggataaaaatatcggataggggtgatttcatgtctggaacaactgacaggaaagttacaatcacgggatcacagagagcaattcatcaagcagagtccatgatactgcagaaagtagcaaacgccagtgaaagggtgatggattagttt

SEQ ID NO: 217128 - DNA, 451 bp, Gossypium hirsutum
  unsure (1)..(451): unsure at all n locations
ccaacccttccggccaaacccggatatgtttttctaggtaagaaggaatccggaggtattagtattagggaggtccaatatggttttgcttcatcgaaatctatgatgagccaatgcctcccggccaatgcaatatggttggggaaaggcttggtgattatctcattgaacagggtttttgatcttgctgctgtggcctattttgtttcaaatcttctctatttctatacaaaactcgtatccaccacctcttatagtgatgggtgggtgcaagtgaataatagtattaccagttactagtgtgaaactcatagagaacttaacgaaagctcaatgtntgtaatggcgatgttattgatcgcttactttggatttgtgccttgcttgatgaatggtatcatgaaaattgttgaggtccaattgcctaccttaacaattctggatttttttt

SEQ ID NO: 217129 - DNA, 418 bp, Gossypium hirsutum
  unsure (1)..(418): unsure at all n locations
cccacgcgtccgcccacgcgtccgcaaaaaagggaatnngatatcgaacattggcacgacagatgttaatgctgtaacttggggagtgttcccagccaaagaaatagtccagccaacagtggtggatcctgccagcttcatggtgtggaaggatgaagcattcgaaatctggtcaagagcatgggctgcactgtacccagaaggcgatccgtcgaaaaaattgctagaagaggttcagagcagctattatttggtgagtttggttgataatgattacattggtagtgatgtntttgctgtttttggagacctttaagatgagattgctgccttcaagccctgaacttaccaaagcttttaagccccatatagtatcattatgtttgaattggcaagttaattttttataatgattttt

SEQ ID NO: 217130 - DNA, 332 bp, Gossypium hirsutum
  unsure (1)..(332): unsure at all n locations
cccacgcgtccgcccacgcgtccgcccacgcgtccggctgagagcactttgttggcttacaagtctgcacaggatattgctctcggtgacctancgccaactcacccaattaggctgggacttgctcttaacttctctgttttctactatgaaattcttaactcacctgatcgtgcttgcaatcttgcaaaacaggcttttgatgaggctatttctgagttggatacattgggtgaggaatcctacaaggatagtacattgatcatgcaacttcttcgggacaacctaaccctttggacatctgatatcacggacgaagctggagacgagat

SEQ ID NO: 217131 - DNA, 302 bp, Gossypium hirsutum
cggaacgaccgacgcgtccactcgttctctcacgcctacgcccacgcgtctttctacgcgtacggaggacaagtactccatgccctagagaggaagataacagatgcctctcagctgaactatgattacaaaaaccgattagcgacttggggggtaacttatgtgccaatctaacggcgacaggaagatgtgtcctatccatattgcactgctcgcttattccatacccaggatggggcattgattgcattatgtgatatcgcctttgtcagggcatacacaacatgaatgatattgtcttc

SEQ ID NO: 217132 - DNA, 431 bp, Gossypium hirsutum
  unsure (1)..(431): unsure at all n locations
gaacttatcaaggataagatagaagctcaaatagaagtaaaggctaaagagcaagaagagaaagaagtgattgcacaacagaacatgtatgctcagttactacctcttgccttgcctgcaccgccaatgccaggaatgggaggaccaacaatgggtggtggatttgcacctccaccaccacccatgggaggaatgggaatgcctccgatgccaccttatggcatgccaccaatcggcagcagttattaactcatgacaggttggtttgaaagatattttttagccgagttgattccttctgttgctgtgacaaataagacattgatatcatagttccaatcatggcaatttcttcaggcttgaagatcaagttataataatgccatttctatgnttcatctgtgtgatattatgtgatattattatgttct

SEQ ID NO: 217133 - DNA, 381 bp, Gossypium hirsutum
  unsure (1)..(381): unsure at all n locations
ctcnttctctgaagccgccgcctgcgtctctttcttcatctctctgaaccaaaaagtcttgagcttttggcttcgagagagaccatgttggtttaccaggatctcatctccggtgacgagcttctttctgactcattcccctacaaggaaatcgagaatgggatgctgtgggaagttgagggaaagtgggttgtgcaaggagctgtcgatgttgacattggtgccaatccttcagccgaaggtgctgatgaagatgaaggtgttgatgaccaagctgtgaaggttgttgacattgttgacactttcaggcttcaggagcaaccccctttcgacaagaaacagtttgtcgtgttcatcaagaagttcatcaagaacttgaca

SEQ ID NO: 217134 - DNA, 394 bp, Gossypium hirsutum
  unsure (1)..(394): unsure at all n locations
cccacgcgtccgctgtgttagattaaagagttaataaagagagtgaaagacccggacactcgcagtctccgaccgtgcgagagccgaccgacccctcccagaatgctgcgtcgagcattggggctcttgccccgacccatagcagctgcaagggctcgatccttttccaccgatctgcccgccgctcacactgccgatgccaccttcatggaggcctggaacaaagtcatgcccaacacggatcctcctaagacccctctatctttcatgcacccttgcccgcctaccccttcctccattcctcccaaactcactgncaatttcgttcttccttatgcttctgagttgtccaccaaggaggttgacatggttatagtaccagccacaaccgggc

SEQ ID NO: 217135 - DNA, 430 bp, Gossypium hirsutum
cccacgcgtccgcccacgcgtccgggatgggttaggggggttttggaacagaggaatctcggcgtgcgctgtgtgtgatggggcagctccgatcttcagggagaagcccttggcagtgatcggtggaggtgactccgccatggaagaatccacttttctcaccaagtacggttccaaggtttacatcattcacaggagggatacgttcagggcatccaagattatgcagaacagggttatttcgaaccctaagatagaagtcatatggaactcggtggtcgtagaggcctacggcgatagggttttgggagggctcaaggtgaagaacttggtcaccgaagaagtttccgatttgaaagtcaatggtctattctttgccatcgggcacgagcctgccaccaagtttttgggaggtcagctggagctcgac

SEQ ID NO: 217136 - DNA, 407 bp, Gossypium hirsutum
tacagctttgttttatgcatccatcaaaatacaagtttgaacatcctcggttttgctttgagcggttggagtatgtcggccagaagatccaggatctggttatggcggagaggttgctgatgaagcatctagacgcccctggaagatggctacaagagaagcatcgccgtgttcttatgaacaagttctgcgggaggtatttgcgggaaaagtatctgcatcattttatcatctactcggagcaagttcaagatgcatatgagaacaatcgaagactccggaaccctgccacaactgctgttcagcaggccctccatggcctatcatacactgtgtatggtaagccagatgtgagacgccttatgttcgaggtttttgacttcgagcaaattcaaacctaatttgtg

SEQ ID NO: 217137 - DNA, 428 bp, Gossypium hirsutum
  unsure (1)..(428): unsure at all n locations
ccagcaccgcctaacaagccaccaagnccaccatggccgccgggaaggacaaaaaagganggcatcccattatgtggacaaaggtgcaaattacactcaaggactaacctatgcttgagagcttgcatgacatgctgtgacagatgcaaatgtgtcccaccagggacatatggcaacagagaaatgtgtggcaaatgttacactgatatgagaacccaccgcaacaagcacaaatgtccttgaaaaacccaaccaaagcccccaaaaaacgacacttcttgagtatgtgtntttcatattgtaatagctgaaaagcttgcagtaataagttctgtgagaagagaggaaaatggatggattcttgtagtgtcttcgtttgtaatccagaactatgaactgtcaatagtttaattaacttttactgagat

SEQ ID NO: 217138 - DNA, 346 bp, Gossypium hirsutum
ctgtgccaacaggaacaagataaccattactgcagctctaggatttgatagtttcttggttgtgcgccatgggcctggtccttttaactccatccctaacttgaaagctgaaatggaagactctttagctgctggcatggacaaccttgtcctaacaaatacagatggacaacatagactgggttgttacttctgtaatgatgtgggtgccccaacagattcaacttcaaaccgcatgttggatcaccagtgcactgttacacgtccaggacttgcacctattgcttctgcactggcagtggagcttttaatgggcattttgcatcaccctaatgggatatttctg

SEQ ID NO: 217139 - DNA, 374 bp, Gossypium hirsutum
cccacgcgtccggattgtccaaggagtatagtcgggttttgatgaggaagcatagggcaaggcaggctgctgagactaatttgttgagaatgaaaaaggaggcaattgatgcgttgccggagaaacttaaggaggcggctatgataccagatttgaccccatttccggcaaatcgattgatggcgtctttgactccacctattgaagggtatattgagaaggttaaggaagcggctaagaaaagttccaccaagcagaagcttaggtgaaggcgaggtggaagtaggcaagggacaaacttcactcgtgaaactgatgatcaattacagctgcaatgtagtgtgattttctctgaatgcaatgagtcttaaaac

SEQ ID NO: 217140 - DNA, 359 bp, Gossypium hirsutum
  unsure (1)..(359): unsure at all n locations
aaaaacataaagcttcacacgcaagagtacatcacacaatctgatgacgaaattattggaagatgtggggctaagccactggtactttggtttcncttttaattagttattgtaagcggagacatttggctctggatcgaaatctttagtgaatgattctttctgtcctttaagaccagcatcatcgcccccgtaagccgaaacgttaggtctcggttcaaaatcttcagcaaaagatgatgatttatctccttttagattagcgtcatcaccataagctgaaacgtttggccttgtttcgaactccttattaacaataatcttctctttttttaacatcattctttgcctgaggcact

SEQ ID NO: 217141 - DNA, 457 bp, Gossypium hirsutum
cccacgcgtccgcccacgcgtccgggtttttggaatcggcaacaacataccatcaacaggttcaagccgctgtgcaagaaaatttgaagaagcatgagctgacaagacctcttgcaaccaaagagcttgagtggtttgcggcatctgctctattggctctacctattattattttgttcagaatattttcagcaattttctgcaaaaagacaaagaagcgtgttcgacatactaacgcaacccaccatggtcgtcgtaagggcaaaagggggcacacagacaagtagactgcgtgtatttaggttttggtctcttaatgttgggaaatattagaagggctctaagtgatcatgttgggtatggagcttgggtgtcgcaattggaagtatttaatcttctcttacctctcaagggtccttggtttaatattattaatattttttgggacggtgtggaa

SEQ ID NO: 217142 - DNA, 391 bp, Gossypium hirsutum
cccacgcgtccggtgttctgtccactcattcccttcttgagcacacagatgtggccgtgctgttggacaatgaagcaatttacgacatatgccggagatccctcgatatcgagaggccaacttacaccaatttgaaccggctgatttctcaaaccatatcgtccttgacgacttctttaaggtttgatggagccattaatgtagacattacagagttccaaaccaatcttgtgccatatcctcggatccatttcatgctctcttcttatgcgcctgttatctcagctgagaaagcataccatgaacagatatcagttcctgagatcacaaacgctgtgtttgagccctcaagcatgatggccaagtgcgatccaaggcatggcaagtacat

SEQ ID NO: 217143 - DNA, 337 bp, Gossypium hirsutum
  unsure (1)..(337): unsure at all n locations
cccacgcgtccggcaaaagggagtgctgnaggaggcctaataggagtgatgcacatttatcagtggaagaagaggccaaattggaggagcagaccagggattactttgaccacacagcacctaaacgtcacactaagcctcaacgaagcgactattcttctaactacgtcgacgctcttgccgccgctgattccggtatccctgaatacctcgagtttcaacgtctagagaatgatccccagaaaatagtttacaatggaagtgaagtgagagaagaatttatggagactgaatattataaggatctcaattgcgtcgacaaacaccaccacacgac

SEQ ID NO: 217144 - DNA, 462 bp, Gossypium hirsutum
gttttatctctgctctgcaaaattatcaaaatacaaaatgatcagtttttcgagtttcaagtttaccttgcttctgcctcttatggttggctgtcttatggcagcagcagcgagcaacttcaacaatgattttgacatcacatggggagacgggcgtggtaagattggcaacaatggagaggtcctcactctctccctcgataaatcttctggttctggtttccagtctaagaatgagtatctcttcggcaagattgatatgcagctcaagcttgtccctggaaactctgctggcactgtcactgcctactatctttcttcgaaaggatcaacatgggatgaaattgatttcgagttccttggaaatctaagtggtgatccttacattcttcacacaaatgtgttcagtcaaggcaagggtaacagagagcaacaattctatctctggtttgacccaactgc

SEQ ID NO: 217145 - DNA, 455 bp, Gossypium hirsutum
  unsure (1)..(455): unsure at all n locations
cccacgcgtccgggcagacacctcaaaggtttctggcaatgcccgttctatttttgtggcgccaactcccggtatgcctttaagtcagatttgggttcagaaatcttctcttgctgctgaacatgctgcagctggcaattttgatacagcaatgcgtttgctgagcagacaacttggcataagaaacttttctcctttgaaatccttgtttcttgatcttcacactggcagccatagctatcttcgtgcattttcatccgctccagttgtgtcgttggcagttgagaggggatggagtgagtctgctagtcctaatgttaggtgtccgccggccctggtattcaatttctctcagttggatgaaaagctgaaagctggttacaaggccacaacagctggaaaatntactgaggcactccggctcttcctcagcattcttcatactatttccgtga

SEQ ID NO: 217146 - DNA, 462 bp, Gossypium hirsutum
gggccgaccaacccgtccgggaatggccttcccgcccttttaataaaaaggggaaaaccagcaggaaagtccactttgtgaggagcctaattcgggaggttgctggtttcgctccatatgagaagaggataactgaacttctcaaagttgggaaagataagcgtgctttgaaggtggcaaagagaaagctaggcactcacaagcgggccaagaagaagcgtgaggagatgtctagcgttctccgcaagatgaagtcagctggaggtggggagaaaaagaagtgagttgccctgcggttgtgcttcaaagcaagtattgagtttttagatttgttaaattttctcttcagttttgttttgagagtttggagtactgattccgatagcattcttttacttgtgttggatatttaaaaaaaacatgaaatttgcatcacttaattgcaatctagattcgattatg

SEQ ID NO: 217147 - DNA, 411 bp, Gossypium hirsutum
ggaaaatcatttgacaactatatttccggaggttcgactgaagaggtacttggagatgaggggagctgatggagggccttggaggaggttatgtgctctgcccgcattttgggtaggtttgttatatgacgaggtctcgctccagagtattctagacatgacagtggattggacatctgaagaaagagaaatgttgagaaacaaggttccaaagactggtcttaagacaccatttcgagatgggttgttgtggcacattgcggaagatgttctaaagttggccaaagatggtttggaaagaaagggcttcaaagaattcgggttcttgaatgaggtggcagaagtggttcgtacaggtgtaacaccaactgaaaagcttttggaattgtataatgggaagtggggacaatc

SEQ ID NO: 217148 - DNA, 304 bp, Gossypium hirsutum
  unsure (1)..(304): unsure at all n locations
tcacaagcaaanaaaccaaggcaatcgctttttttgcattcttagctcatgttcaaccaacgaccatcaggggccttggtggcagctctctcaatggaaccaagctcttggtgaagtcaactcgccagagtttcaaacccaaaaactacagggctggtgctgtggtagcaaagtatggtgataagagtatatactttgatttggaggatattggcaacacaactgggcaatgggacttgtatggatccgatgcaccttcaccgtacaacccactccaaagcaagttctttgagacatttgcagc

SEQ ID NO: 217149 - DNA, 442 bp, Gossypium hirsutum
  unsure (1)..(442): unsure at all n locations
gtccgatttaataatcaggcttggggattgggttttgaacctttgggccttaagtttttaatatataccaaagtacctgccatacttaacgtgcacatgtgctgacttggacataagtgccaatggaacaggtttttgccgagtacagtcggcttctggctactgagttggagaaacanagacaaaactatgaatctttacttgctgaagccaaaggcaaaagagatagtaccattgctgaagcagtggagaaggctgtgacatccgagatgcaagacatccaaagcaaactggataagtgtacagaggaaaaaaatgctcttgctgagatcaaccgtaaactcataaaagaccaacaagtttggcacgtaaaggtcaaggaaatcgaagagagggaagcctctgaatcgaggttaatggatgagaagatacttgatctgga

SEQ ID NO: 217150 - DNA, 350 bp, Gossypium hirsutum
cccacgcgtccggcctccgtagaagaacactacacgagtggttttgaactgcaaaaggagatcgatttcgaagccttttcaccatgagagctaagtggaagaagaagcgtatgaggaggttgaagaggaagagaagaaagatgaggcaaagatctaagtagtctaattttatcttaaagctagcaattcggtctatgtttctttagattttctgttgtttgatggatactttactttaaaaggatttaagttatctttatcgaaaccttttgaatattctggaaacatgttattgtgttttctattaaaagcttatggctttggatgttaattttctgatattttttggc

SEQ ID NO: 217151 - DNA, 471 bp, Gossypium hirsutum
taaaaagcataaaaaaaaaaaaaaacacatcttaaccaaacttcaaacaaaagggaattttcttgtcataattttctgaggaattcatcgatggcaaccaaagtgtatattgtatactattccatgtatggacatgtggaaaaactagcagaggagataaagaaaggggcggcatctgttgaaggtgttgaagcgaaactatggcaggtccctgagactctgtcagatgagattcttggaaagatgagtgcaccaccaaaaagtgatgtaccgatcattacaccacatgaccttcctgaggctgatgggtttatttttggcttcccaacaagatttggcatgatgtctgcccaattcaaagcatttatggatgcaactggtggtctatggagaactcagcaacttgctggaaaacctgctgggatattctatagcactggatctcaaggtggcggacaagaaactacaccg

SEQ ID NO: 217152 - DNA, 347 bp, Gossypium hirsutum
cttcatttcaaactacctgcttttagctcttcttttgaatcaatctccatttttggttttgcgtaaagtgaaaggatgttaggcattttcaagaaagaattaatgaatcctccaaaggagctgcatagcccagcttcactcacttcatcaaacaagcccaagcttcccaatcaaatcatcaaccatttcctttcttcaaatcccaacaatgctttctcaatggggttcggatcctcagcttgctttgcttatgctcccacagagaatcgtttccccagtcatcaaaggttgttttgtggagtggatgaaatatactgcatattcttgggggatttgaataatttgag

SEQ ID NO: 217153 - DNA, 470 bp, Gossypium hirsutum
aataaccgggccgacgcgacgcgtccgcccacgcgtccggctcgatggcttcgatgttcttggaaacatcaaagttctgatggcaacgaacatgccagacacactagacgctgcattattacgtcccggacgattagatcgtaaggttgagtttggtcttcctgatttagagtctcggacacagatattcaaaatccatacaagaacaatgaattgtgaacgcgatattagatcagagcttttagcccgactttgcccaaattccacgggagctgatataagaagtgtgtgtactgaggctggaatgtacgctattcgggctcgaaaaaaaacagtgacggaaaaagacttccttgatgcagtgaacaaagtcataaagggatatcaaaagttcagtgcaacacctaaatacatggtttacaatttaacccaaaaactggtgagaccattttgatttgcagttcctgaac

SEQ ID NO: 217154 - DNA, 190 bp, Gossypium hirsutum
cccacgcgtccgctggtttaagagaaatgtttacgtctatggatactgataacagtggtgcagtcacatttgatgaactcaaagctggtttgcgaagatacggctctaccttgaaagatacagagataagggaccttatggatgcagctgatgtcgataatagtgggaccattgattatggagaattcat

SEQ ID NO: 217155 - DNA, 275 bp, Gossypium hirsutum
cccacgcgtccgcccactcgtccgattttttctaataaccaggcaaacgccgatacttagagtaataccaaggatgctaatgatcctgatcaaacagaccaagtggctttgatacgctattcgcaacaatcggattttctgcgcgacataataaagggttccatgcgtgcccaaaggcgtaaaacaattacttgggagctgtttcaaacaaatgtacattccccccttttttttgacagagtttacaaaccactctttttttcttttaaatttct

SEQ ID NO: 217156 - DNA, 235 bp, Gossypium hirsutum
accacgcgtccggaagtggcctactttcatttagcaccctcaaatgatagcgtccgctctggcactattaatacacaataccacttgagatctttgcaagaacgtatatggagaatgcatctacccagacgatgatatgacaaatatatactattgaggaacaaaaattgcacgttcaaaaaaccggtttacaaatgggatacaagaccattgtaccattctttcaaacaaacat

SEQ ID NO: 217157 - DNA, 447 bp, Gossypium hirsutum
aaccatgttacttaccttatcgagcagatctaggctcaattggttgttattgctcatgagggggatcccatagagttggtagtgtggcttccggctttgtgcaggaaaatggaggtcccatattgcattgttaagggaaaatcacgtttgggatcgattgtccacaagaaaactgcttccgtcttgtgtttgaccacggttaagaaccggataagctggaattcagcaaagtactcgaggcaatcaaggcaaacttcaatgacaagtacgacgagtacaggaagaagtggggtggcggcatcatgggctccaagtcacaagcccgaaccaaagcgaaggagaagcttcttgcaaaggaagctgcacagaggatgacataaaagaattaatagaccttttgccgcaattcgtgtttttgataaatagtcttttgtagtaaggtacgat

SEQ ID NO: 217158 - DNA, 443 bp, Gossypium hirsutum
gtcctcgataatgaagccttgtatgatatttttttcaggacacttaagcttaccactcccgactttgttgatctgaatcacctgatatctgcaacaatgtctggggttacatgctgcttacgattccctggtcagctcaactctgatctaaggaaacttgctgtgaatctcatcccatttcctcggcttcatttcttcatggtgcttttgctccactcacttcaagaggctcccaacagtacagagccctgacagttcctgagctaactcagcaaatgtgggatgcaaagaacatgatgtgtgcagctgatccacgacacggcagatacttgactgcatcagctatgttccgtggcaaaatgagcacttacgaagtggatgagcaaatgttgaatgttcagaacacaaactcttcctacttttgtgagtggattcctaacaat

SEQ ID NO: 217159 - DNA, 342 bp, Gossypium hirsutum
ctggaaaacagtttgagatagttctaaattttcttgggctggttgagaagttcttctatctgtcaggcaaatatgacatggagctcactgttggtgatgccgctatggagaactctctgttagtagctatcggacatattgagttagatctaccagaagcacccgagaaggcacccctgccttcttctagcccgtagatccatactcaagatatggacccaaagcagagataacacacatcttcagggctcctgaaaagcgtccacctcaggagctttcccttgctttcctggggcttactatcttgccattgcttggatttttgattgggctattacgtct

SEQ ID NO: 217160 - DNA, 446 bp, Gossypium hirsutum
cccacgcgtccgttcaacttgctgctcgtgttattgttgccatcgagaaccctcaggacatcattgtccaatctgcaaggccatatggtcagagagctgtactgaagtttgcacaatacactggttgtcatgcaattgctggaaggcacactcctggtaccttcactaaccagctccagacatcgttcagtgagcctcgtcttcttatcctcacagatcccaggactgaccaccagcccatcaaggaagcagctctcggaaacattccaaccattgctttttgtgatactgactcaccaatgcgatatgttgacattggtatccctgccaataacaaaggaaagcacagcattggttgccttttctggctgttagctatgatggttcttcagatgcctggaacaattgctcccggacagaaatgggatgtcatgggtgatctattc

SEQ ID NO: 217161 - DNA, 437 bp, Gossypium hirsutum
ctctgcgaaaatttcttaatttcctcgctatctcaaacagattttacctcttatctccgggggatctcatctatggctcgtaccaagcaaacagctaggaaatcaaccggaggaaaagctccgaggaagcagctagctacaaaggccgcgcgtaagtccgctccggcgaccggtggagtgaagaagcctcaccgtttcaggccaggaactgttgctttgagagagatccgtaagtatcagaagagcactgaactgttgatcaggaagcttcctttccagaggttggtgagggaaatcgcgcaagatttcaagaccgatctgaggttccaaagcagcgccgtcgctgctcttcaagaagcggcggaggcttatcttgtcggactgtttgaagacactaatttgtgtgcaattcatgctaagagagtaacaatcatgcc

SEQ ID NO: 217162 - DNA, 444 bp, Gossypium hirsutum
cttggcaccgctgcctattgggtttgctgttttcctggtccacttggcaacaattcccgggctggaacaggcattaatccagctaggatcctcggcgccgctcttatttacaacaaggaccaagcatgggatgaccattggatattctgggtaggacctttcattggagcagccttagcagctttgtaccaccaaatagtgataagtccatccctttcaagtccaagtaagggagtgagggaggaaacaggtgcttgataagtgccagtctatgatgaagtgttctccattatcattttctcttccaaggagtgagtttgatgtttatttttcatctatgtaattaatggtcggttaaggaacgaagcatgggcacctatattgtactagtggtggttccatatcaatggttttctctaatatgaattgaaatgatgcacgaca

SEQ ID NO: 217163 - DNA, 424 bp, Gossypium hirsutum
gaaagattattcaaataatctgatcgactacctctcgatcactgaccttctatcaatactcgcacatctttatttccaagggaagatcccagttactttaacatatgttcaggcctctattctactctgcatgggcttgcagaaccgggatgtctcttatgttgaggaacaattgaagaaagcactagagaggcagcagatactacatattttaagaaggttatgataaagctgtacaagtatttgtatggggttgcatcaaaggagattgaatctgctttacctcgactaaaagaaagagtgttggaacctcatagtatctctgtggatgaggatctcaatgatgctgcaaagaaagttgaggaggaaatgaaaggcaagtcggatggtgtgttaaatctgcagttactccaacaatttgcga

SEQ ID NO: 217164 - DNA, 450 bp, Gossypium hirsutum
cccacgcgtccggttgtatgcaactcgtttttaagcccgagcaatttgatgtcatggtgggccctaatctttatggaaatctggttgcaaatacagcagccggtattgctggaggcaccggtgtcatgccaggaggcaatgtgggagctgaatatgccgtgttcgagcaaggtgcttcagccggaaatgttggaaaagaaaagatatatgagcaaaagacggcaaatcccgtggcattgcttctctcctctgccatgatgttgagacatctccagtttccttcatttgccgatcgactcgaaagtgcagtgaaacgtgtaatctcagagggccagtatcgaactaaagatctcggtgggcaaagcagtacacaggaagttgttgatgccgttattgctaaactagattgattactcgtcttcttcttcactatgggttttccacagtaag

SEQ ID NO: 217165 - DNA, 362 bp, Gossypium hirsutum
gttgaaggaaaagattgatgctcgcaacagcctgtagacttatgtttacaacatgaaaaacgagattagcgacaaggacaagcttgctgacaagcttgaatccgacgagaaggagaaagttgaaacggccgtgaaagaagcgctcgagtggctagatgacaaccagaatgccgaaaaggaagattttgaggagaagctcaaggaagttgaagctgtttgcaaccctatcatcacagctgtatatcaaagatccggcggaggtcctggcggtgctgcgtcaaatgaagaagaggatgattcacatgatgaactctaaaacaaaaaacttggctactgccgctgaaaagtgattgagtttatta

SEQ ID NO: 217166 - DNA, 437 bp, Gossypium hirsutum
cactctttttctcatcttcagatctcatctccttccctaaggttaaccaatggcaacagtgcgaaatctgaaaatcaagacatccacttgcaaacgaattcttaaagagcttcactcatatgagaaggaagttgaaagagaagctgctaaaacagctgacatgaaagagaaaggagctgacccttatgacctaaagcaacaaaaatgtgctggctgaatcaaggatgatggtccctgattgtcacaagcggctagaggcttcattagctgaccttaaagcaactttggctgaattggaggaagcgaatgagaaggaaggccctgaattcgaagatgctcgcagcaccatcatcgaagttgaaaaagttgttcaaacaacagatgcttagtgacagcttcttttaagtggctgtagttaccataaaaaaaattgacat

SEQ ID NO: 217167 - DNA, 444 bp, Gossypium hirsutum
aaaagattgaagagaagttagaaggagattttaaagaagaggacacctcagttccagtggggaagtgcgatgagccagtagtccagccagagacgccagagaagaaaggtttcctcgagaagatcaaggagaaactccctggacaacacaagaaagctgaagaggccagtagcccagctccagccccagcagctgagccccatcacgaaggggagtcaaaggaaaagaagggaattctggagaagatcaaggagaagcttcctggtaaacactccaaatcagatgaagaaaaagaaaaggcttgagattcaagttcacataaaaatactgatgggattgtgtgtttcttcaattgttaaaaaaatatctgtttttgttttgaggttgtatttgttgtatatttcatattaagtttcttcttttcccaacatttttagtacaaat

SEQ ID NO: 217168 - DNA, 450 bp, Gossypium hirsutum
gagaaagagcctgaaaacaaggagatgactctggaagaatatgagaagattgttgaggagaagaggaaagctttgcttgcccttaagactgaagaaaggaaagttgataccaaagagtttgagtccatgcaacaactttcaagtaagaagagcaacgatgacatttttatcaaactgggttctgaaaaggacaagcgcaaggatgctttaaagaagaaagagtaaaaaagtctgttagcatcaatgagtttctgaagccagctgaaggggagaggtactacggacctgggcgtggtcgaggccgtggccgtggtcctagaggtggatatggaggcaatacagctagcagtgtgttagctccctcaatcgaagatcctgggcacttcccttcattgggtggcaagtgagaccccaccgctgcaatctgcacaatggttttcattttcatgg

SEQ ID NO: 217169 - DNA, 290 bp, Gossypium hirsutum
gacacacacccggatggctgctagcgatgctttcatgtaaacgatgatctttcaccttgcgggacctagctcgggtcagaactataacaaggagaacgacaacgaagcaaccacccatgatatctatgccaacgctattataaactatgattctgagggttctgttattctctacgttggaaacaacatttcaggttgtcacatggacacattcttcaccttcggtgctgtctttggtggcaacatcactactttactcaacgttacgaacatgatcgcccaacttctac

SEQ ID NO: 217170 - DNA, 444 bp, Gossypium hirsutum
  unsure (1)..(444): unsure at all n locations
ctccaaacacaattcactaaagcaaaaacttctagaagaagaaggaatggccgcctcggagaaagttcaagaactgcatgtatatgagatgaatgaaagagatcgtggtagtccagcttaccttcgtttaagtcagaaacctgttaactcacttggtgatattgtcccttttagcaacaaaatatataggggagatatggagaaacgataggaataactgcagggatgtgtatattgatagagcataaacccgaactgaaaggtgaccgctacgaagccatcttcagcttttacttcggagactacggtcacatagcggtgcagggaccttacttgacttaccaggactcgtatctcgctattactggtggatctgngcattttgaaggtgtctctggtcaggtcaagctccaccaaatcgtcttcccctttaagcttttctac

SEQ ID NO: 217171 - DNA, 437 bp, Gossypium hirsutum
accagtttctcatgttgttgctcgtccatccccaaatgacattcttgagtggcattatgtgctggaagggagtgaaggaacgccttttgcaggtgggtattattatggaaagatcaagttccctccagagtatccctacaaacctcctggaatcacgatgatcacccccaatggacggtttatgacacagaagaaaatatgcttgtccatgagtgattttcatccagaaagttggaaccctatgtggtctgtatctagcatacttaccgggcttctctctttcatgatggataacagtcctaccacttgcagtgtgaacactactgttactgagaagctacgcttggcaaagacatcccttgcatttaatttgtaaaaccccacattcagaaaactgtttccggagtatgtggataagcacaacaaacagcagcagc

SEQ ID NO: 217172 - DNA, 408 bp, Gossypium hirsutum
gtgaaatttgggcatggtgagggttcagcttatttgtttgacccggatatttatacggatgggaggatatcggttcagggaatcgatggggttttgttcccggaagaagagacccaaactgttaagaaaccggctgctgttaaggttgcctccaagcccaggagaggtaagttgttggaagtgggatgttggatgcttggcagtcttggagggggctcaagattccgatggtgtcaatgaatataaaaagaaattggtagtgtggaggtgaacaatactttttccgggtaaaaacatgcattctcatctcatctgcggttttagggttaagattgtgtcataatacagtggaagggaagggcctaacctggtgaatgctcgtttcatatcctcaaaaaagcagacgag

SEQ ID NO: 217173 - DNA, 443 bp, Gossypium hirsutum
tcacgcgtccgaccaaatatgccgttcatttgatacgtctagatcgggagagttgctctgagtaactactgcaaagactacggcaagttggtcgtcatcgttgatgtcgtcgaccagaacagggcacttgttgatgccccggatatggtaagaggccaaatgaacttcatgaggcttacattgacagatatcacaattgacattcccgtgttcccaagaagaagacattgatcgaagctatggagaaagctgatgttaaaaacaaatgggaaagtatctcgtggggtagaaagttgattgtccagaaaagaaaaacatctctcaacgactttgataggttcaagcttatgttggcttaaatcaaaaggttcggagtcatcaagcaagaacttgctaagctgaataaagagaatgcatcttgaatttgatattgaatcatggat

SEQ ID NO: 217174 - DNA, 442 bp, Gossypium hirsutum
gctcgacatatccttgggagtggccatatggtcatcaactcagatttctatgtttgggatgcctttttgtgtggttattgggtggatgatggggcaagaaatggacttaaacttccaacttttcgagacagcaactctgttcattaccgttatagtcgtagccttttttctgcaggaagggacgtctaactacttcaaaggactctgcttatactttgctatctgatagttgctgcgagtttcttcgtacatgaagatcctcccacagatgatcaaagtaagcaaccgggaacctgatgaatgacacagttgaatcgagatatggaaattcggagcccttgaaagatgcaagaggcaagaagcaagaacccatggagatttgaaacatgtttgtcccacatggtgtaaatagtactgttgacaggcagatattccatttttt

SEQ ID NO: 217175 - DNA, 419 bp, Gossypium hirsutum
  unsure (1)..(419): unsure at all n locations
gtttgtgttttacagaagtcaggaagctctccacaaagcttctaccgaaaatgccgaagcggattcatgagatcaaggacttccttctcactgccagaaggaaagatgcacgctctgtaaaaatcaagaagagcaaagactttgtcaagttcaaagttcgctgctcaaagtacttgtatacacactgtgtgtccgatgctgagaaggctgataagttgaagcagtctcttcctccaggtttgagtgtccaggacctgtgaaaatagggccgcttcgagtttatcatccaattactaggtgaaagctagattttgactttgcttttatcatatttcatgcctttcaaactcaaaatttactgtaatggatttgtattctggttatttttatggatatgagtaaggtcgagttactttntt

SEQ ID NO: 217176 - DNA, 357 bp, Gossypium hirsutum
gaattcgtacactcggtagcgcatgttccttcatgcttggttttgggaagtgaaggacgtgggctttccgagaaatctcagctcaaatgtgagctcgtgagcattcccatgacaggaaaatttgagtctctcaacgtttcggtagctggcgggattttcttgtacatgttacagcctaagaactaaagattaaaagtctagttctctttaatttcattaatgcatcacacagttctgaatgtctgattctcttgatttttctcatttctttcttgcaatttgtcttccttttgttttcccccggagaaaaggggggattttaattgatttcattaagtttgggatacctttttagat

SEQ ID NO: 217177 - DNA, 397 bp, Gossypium hirsutum
gacaggtttcgagctctccttcccgctttttctaaagtaaagtgcatttcagatgctggggtgtttctccatgcgcaagatgtctcgggagggaagcacatagaagaattctatggcaaagtggctagactacacggatccgttaagaatttgccagcgtcttgcacttcaagaatgggagccagaccagagttgtgtttcttcccacagtacgtggtgcagactatgcaaacaccaatcttcttcgtaaattcagcttatgactcctggcagattaagaacattttggctcccagtgctgctgacaaaagtaaggagtggaaaagctgcaagcttgacttgaagaagtgtacagaaacgcagctcaaaatcatccaagatttcatgacgcaattct

SEQ ID NO: 217178 - DNA, 432 bp, Gossypium hirsutum
caaagaggaagactacccgtaccttattgtcatggtacctgtgaagaaaagaaggagggaagggttgtggtgacgattagtggttacaaagatgtgccggaaaatgatgagaaaagtctattgaaagcattggctcatcaacccctaagtgtagccattgaggcttctggcagagatttccaattctatagtgggggagtattcaacgggccatgtggaactgatctagaccatggagtagcagcagttgggtatggaacatggaaaggttcatattacatcattgtaaagaattcgtggggaccaaaatggggagaaaaagggtacataatgatgaataggaacactggaaaacctgagggtctcttgggtataaataaaataagctttttaccctaccaaaaacaagtgaagagctctaacctcaacata

SEQ ID NO: 217179 - DNA, 415 bp, Gossypium hirsutum
agttgagcttcctctgactcaccctgaattatatgaggacattggtatcaaacctccaagaggagttatcttgtatggagagcctgggacaggcaagactttgcttgctaaggcagtggctaattctacatctgcaaccttcttgcgtgttgttggaagtgaattaattcagaagtacttgggagatggccccaaattagttagggatctcttcagagttgctgatgatctttccccttcaattgtcttcattgatgaaattgatgcagttggtactaagaggtatgatgcccattctggtggtgaacgtgaaattcagaggaccatgttggagttactgaaccagttagacggctttgattcaagaggagatgtcaaagtaattcttgcgacaaataagattgaaagtcttgat

SEQ ID NO: 217180 - DNA, 432 bp, Gossypium hirsutum
  unsure (1)..(432): unsure at all n locations
anaacaatgcctttgctttctacatcggtctcttttacaatgaaattgacatgcttggtcgcgagaattatactggggtcaagcgcattaccatcaagcctcaaaccgataggtagggtcttccctgaaaccaacacccacatcattagattggctgaacgacgtctcatgaactaatgttgagctactggccaccctaactctgtctaagatgctctttcactaaccaagtgatcgcccatctggagctgtggaaggagaaggcaacaggcaagtacgagaagaaggtgtacgtnttgcctaaacaccttgatgaaaaaagtggctgctcttcaccttggaaagcttgtggctaaccttaccaagctcaccaaggatcaatctgactacattagcgtccccattgaaggttcttacaaaccccctcactac

SEQ ID NO: 217181 - DNA, 376 bp, Gossypium hirsutum
cccacgcgtccgcccacgcgtccggctatatccaaatgtccaagacttggtgaaaataacgcttcttgaggctacagatcatattttgaacatgtttgacaaaagaatcacaaatttcgcggaacagaaatttggaagagatggcattgatgtgaaattggggtcaatggtcaccggcataaatgaaaatgaaatatctacaaaagttagaggtaatggcgaaaaaacttcaacgccatatggaatggctctctggtcaactggcattggacctcgtcctctcataaaggagttcatgaagcaaattggtcagggtaataggcgtgcttttagcaacggatgaatggctgcgagttgaagggatttggtacattta

SEQ ID NO: 217182 - DNA, 450 bp, Gossypium hirsutum
tgcgagttgaggaaatggcttcatgagatttttggcggtgacattgctgcatcaactagagttatatatggaggttccgtaaatggagcaaactgcaaggaattggccgcacaacccgatgttgatggctttttggttggtggagcttctctaaagcccgagtttgttgatatcatcaaggctgcgacggtgaaaaagaattagaagttgaaaagcaggaattaaaggtgaaacagaaacaaccttctgggaaactttaatttttgtagttgagatctttccttggaacctaatgtctgttgaaaatttcccgatgtaataagccaaatttaacaatgtgtttttttttgtggtggttgaggcattgatcctcatttcggactttccctgaatttaccttacaaattgctattgctctaatctttgatctttgcagttgaattgcctatt

SEQ ID NO: 217183 - DNA, 203 bp, Gossypium hirsutum
cggacgcgtgggctgcgaccaacctcgacttctcgcggtggagcaatgaccaacagatggtgtgctatcaatgtgactcctgcaaggccggtgtgctttgcaacctcaaaaaaagctggaggaaaatctctgttatcaacattgttgtgcttatcctcctcgtcatcttctatgttataagctgtgccgcttttcccaacaat

SEQ ID NO: 217184 - DNA, 446 bp, Gossypium hirsutum
gtgaaggaggctgaattgcatgctcagaattatgaggagagaagaactttgattgacttgagaaatagtgctgacacaagcatatacaatattgagaagagcttgaatgagtacagagacaagattccgaatgagattgcttcagagatagagtccgccgtggcagatttgaggaatgcaatggctggggacaatgtaggtgaaataaggctaaaatggatgctgccaataaggctgtttcaaagattggagagcacatgagtaagggttctggttctgatggtggttcctctggctctggagggtccacgggcgaggatcagacccccgaggcagaatatcaggaggccaggaagtaaaagctgaataagaacacatgatactcgacatgtttcttccaattactaattcgatcatatttcaaggttgatttatagacgttacat

SEQ ID NO: 217185 - DNA, 409 bp, Gossypium hirsutum
aaacaatattcatctccggaagaaatgaagtatgttgctctagaaagatacaacaaaatagaaggttttgccccagagagattggtatcaagatctgatgactttaccatgttcctatgggaacctgctgtcagcaaacaccacaaagttcggatgactggtcatcaacagcttgtaaaccatgtttatttctcacctgatgggcatgggtggctagtgcgtcatttgataaatcagtcaagctatggaatggtactactggagaatttgttgctgcattccgaagtcatgttgggcctgtttatcaaatcagctggtctgcagatagcatgcttcttttaaatggaagccaaaaatccaccttgaaggtttgggatattcgaacaaaaaaattgaaacaagacctttc

SEQ ID NO: 217186 - DNA, 454 bp, Gossypium hirsutum
agaaactacaagagaaagttaaggaacaactttaaaaagtgggagaaaagatacaaattggggctatgcaccgtaatgagtgggtggaaaatgctgaccgatgggtcgctggattccttgagatgtttgaagaaggttgccacaaaatgggcactgcaatcagagatcgaatccaagagcggttaagggggcagctgctgcaaaacggcaagggtgatgacgatgatgatgaagaatattattacgatgatgattattatgatgatgaagacgacgacgacgaattctactatgatgacaacgaatataatgatgagaaagatcagaaaaatgagaaagaacagaaataaaattgtttctgcttccagtttttactaatattatggggtaccttaaaagttctaaatagtagtgttgtgggatgtgtgatatgttgatgttgtagctaaatcga

SEQ ID NO: 217187 - DNA, 455 bp, Gossypium hirsutum
ttcactgcatcctctatattaataataatgtttttgtagaagggaagagagaataaaaggggggaaataaagaaactaagccaaaaagaagaagaaggaaggactgagttgaataatattgaaaggttagtgagttgaaaaataacataaaaatggcaacatttgcagggactcaacaaaaatgcatggcctgtgacaagactgtttacttggttgataagctcactgctgataatagggtctttcacaaagcctgtttcagatgccaccattgtaagggtactctcaagcttagcaattacaattcttttgaaggggtgctttattgcaggcctcactatgatcagctcttcaaaagaactggcagtctagacaagagttttgaatgaacaaccaaagattgtcaaaccttgaaaacacatttaaaatgagattgcacagaaagtggtgaattt

SEQ ID NO: 217188 - DNA, 442 bp, Gossypium hirsutum
gccgagaagtacaagtccgaggatgaggagttcaagaagaaggttgaagccaagaattcaggggagaactatgcctacaacatgaggaatactatcaaggatgagaagattggttcaaagcttgacccggctgacaagaagaagattgaagatgccattgatggagcaatccaatggttggatggcaaccagctagccgaggctgataattcgaggataagatgaaggagctcgagagcatctgcaatcctatcattgccaagatgtaccaaggtgcaggggctgacatgggtggtggcatggacgaggatgccccacctaccggtggcagcggtgctggacctaagatagaagaagtcgactaaatcaaatattaagattagtatttgccgatgtttaacagcttctgctggtgctatattttatgttttcagccacctat

SEQ ID NO: 217189 - DNA, 303 bp, Gossypium hirsutum
gaagcatttgggtcgtttcgaagtaatggaaacttcatgaaaagtaaagaagggagccggaggaaggaaaggtggtggcccgaagaagaagcccgtttcaaggtctgtcaaagctggtctccagttccctgttggtaggatcggtcgctatttgaagaaaggaaggtattcgcagcgggtcggaaccggagccccggtttacttggctgctgttcttgagtacttggccgctgacgctcttgaatcggctggtaacgctgcacgtgacatctagatactctggttcatcccaaggcacgttct

SEQ ID NO: 217190 - DNA, 451 bp, Gossypium hirsutum
attcaatcaaaacagtatctgaagttgaacctcggagatctaatcggaagattcaaccaacgtcaagactcttggaaggcctacaaagctcattgatcatctcaaaaattccttctgtttcgcacgacagaagtcacaaaagtcaaaataggagtagtagaggtgaaccttaaatttcgtggtattcgtgaagtaatgttgctgtttttctttcccttgttggttgccgaaccgaacatgttgctgactgcatttatgactagcctaagcttatgactggacattggtgtggtttaagccgctttacatattgtaattccttcgagaaaaagggaatcttgtagcttaaattatcatctttgcttcaattttaagaattatgtaaatgtatttaactaggttgataaaaagtgaattctcatgatttccaatttaaaaccaatttattatt

SEQ ID NO: 217191 - DNA, 213 bp, Gossypium hirsutum
  unsure (1)..(213): unsure at all n locations
gttgaagatgctgttaaacaagcattgggatgacacagacgcctgagtttgcttcgtcagtgtgtctcagattccaaatctcctggtgatccgaagttgatagatgcatttgaactaagtgaagaggagggagaagatgttcttttcaaagaggcttggttaacatattngtggagaagagccaaagtacattggatagaggaggatattgca

SEQ ID NO: 217192 - DNA, 452 bp, Gossypium hirsutum
actttcgcataaaggcgacgagctctcaggctggacattaaatcatggcatccgctacattcgagcctggggaccgtgtaaatgctgcatgcgatgcgtaacacgcattccataggattaggacacatatatctggctacactgcgaaaccttgcattcgggaatggcttccaccaacatggcatctatcgcgattatagctgacgagacatgaagctaggaactataactacagccttgaaatcggagcacacggacggaaacttatatgggaaagcgccccacgtagcatccgtgatagtcaccgcaaagtcacggacagccatgatggtctaattatccaacgaaacatggcacttttcttctccagtggcgatagaaaggagctgaaactgagggttactggacgaatatggaaggaacaacaaaatgcagatgccaacatgtgcata

SEQ ID NO: 217193 - DNA, 335 bp, Gossypium hirsutum
gtttttgcacacaaagatgacaccagcaaatagttgctggaatggggatccagagtttcctgtgcaaacagccggcctccaaatcctcagtagagctgttgattctgaaatgtttagggaaagacaaactggaagcaccataagctggaaataagatagatggggcagattagcttggcttggatgagatttctgttaatcttgttactgcattaaactttgtaatcatagcaacttgattaaatgtcgaggcttttctctttgatgcaaaaaaaatagagcatataaaaaaattaaagattaaaaaaaaaatgttactctgaacttctattaga

SEQ ID NO: 217194 - DNA, 456 bp, Gossypium hirsutum
aatcttccattaaaattctcaaacaccaattcaaccgatttagggatgctgtggtgctttgagtcctacacccatgggaaagagatgctcgcttgattgaaaaagcaataagaaagggcccaaaacactataacgtgatagtggaggtggcatgtacaagatcatcagatcaattattgggtgctaggaaggcttaccattccctctttcatcactccattgaggaacatcttacccacattaaaggtcgtgagcgtaagctgttggtggcacttgttagtgcttacagatatgaagggacaggtgtaaatgaagatgttgcaaaatcagaagctcaaatcctctacgaagcaatcaacaatggcgataaaaacaaacttctcgaccacgaagatgccatcatgatcctggctaccaggagcaagcaacatcttcaagcactgtatcgacactaca

SEQ ID NO: 217195 - DNA, 351 bp, Gossypium hirsutum
cggacgcgtgggcgaatggctttaagaaatttgttttgcacaatgttggagggcttgaactgttgatgatgcacaacaggacatagtctgctgagattgcccatgacgtttccacaaagaagagaaaagagatcgtggaacgagcagcacagcttgatattgttgtcactaacaaacttgcttggttgcgaagccagtatgatgaatgaaagcttaaacattaatatgcatttgccgggagtatacatcacctttactttgtagaaatgatccttgatattccatattcttcatgcaattgcatgagaattcgttcacataattgttggtatatcgaggaaaaaagatgcc

SEQ ID NO: 217196 - DNA, 250 bp, Gossypium hirsutum
  unsure (1)..(250): unsure at all n locations
gaggactcgagcatcaagtagngagaggcgtggnagaaagtctcaagattattactcgttgggcatgctgaagggtggctgaatatgctggtcattatgctaagacccatggaagagagagagtttctgtaattgatatggccgatattatgcataaaacagatggacttgttcttaagtgctgtcgtgaagttgcagatgaaaattctgagattacttacgaggaattagtcattgacaatttctgtat

SEQ ID NO: 217197 - DNA, 415 bp, Gossypium hirsutum
gccggcttgaagaagctcgatgagtatctcctcactctcagatacatctctggataccaaggttcagaggatgatatcaccgggtacacagctctatctggggccccatcgtctagctatctgaatgtttctcgatggcacaaacacatcgatgcccttttgagcatctcaggtgcttctgaagaaggctctggtgcgaccgttgatggatctgctcccgctgaggctgtggccactcctgcaactgcacattcactggctgcagctgctgaagatgacatcaatgttcacgtaaacttgcctggtgaaaagactgatgaggaaaagaaggcaactgaagaacgtgcaactgcacttacggcctcttacaagatgaaagaatcctgaaagtccttgaggttactgcttattaagc

SEQ ID NO: 217198 - DNA, 452 bp, Gossypium hirsutum
ggcgactgtgctactgttaaccagcggaaagtcatggaagatatatcagaaatatttagagaggcagacaaggacaactcgggaacacttacagtgaaagaatttcaagagatcattgatgatatctgtgaaagataccctcaagtggagctttatctgaagaacaagcaggtgcgtaacatggttgatcttttgaaggaagccaaaggggacgctgcaaaggaatccatggagctgaatattgaagaatttaaatcagctctttctgaggtcgattctcagatgaagaatcttccagcaacagcacaggttgcaaatcagcaaggcgcctatcttgcgaagtgcttcaaccgtatggaggagtgtgaaaagaaccctgaacgtcctcctaggttcaggggaacaggtcgtcatcgattccatccctttaggtacagacacttgggacaatt

SEQ ID NO: 217199 - DNA, 160 bp, Gossypium hirsutum
acgacaggacgtgactgggagcctgaaagctgttgttatccatgtcccgtaccgattgtggagggcttttcgcaaggttcatgttaagcttgtgaggtagcttgaaaagaagttcagtggaaaggatttgattgtgattgctgcccggaggatattgagg

SEQ ID NO: 217200 - DNA, 438 bp, Gossypium hirsutum
actgttcccagactttatccgaggaatttcttttgtcatttcgttgataatccgaacttcagttctttaaaaaggctttggattcttggataaggcctctttgataaacaaagtttcatgtctgatctcgacgtccaggttcctactgcctttgatccctttgctgatgcaaatgctgaggactcgggtgctggtgcaaaggagtatgttcatatccgtgttcaacaaaggaacggtaggaaaagcctgacgactgtccaagggttgaagaaagaattcagttacaacaagatacttaaagacctcaagaaggagttttgctgcaatggcactgtggttcaggacccagaattagggcaggttattcaacttcaaggtgaccagcgtaagaatggctccaccttccttgttcatgctggcattgggaagaaggaaaac

SEQ ID NO: 217201 - DNA, 418 bp, Gossypium hirsutum
atcgtgataatggtgtaattgctaggtgtatctctagtaatgaggatttggctatgctgaggacttgtggtaatctgaactgtcgtgttagacccgctcattctaatgtgtgtgtgtgtgtatatggatttttggaggaatcaatgtgggctcgaagctttgatatcgaataatacaaattgttggtgaatgcgacttaaatagactttgatcgtgatggagctagacttggtatcgttcgcactgtcattataaagctatcaatgagtcactaggaacttctatgcaggagacatactgcaggtatggaatgaggaattgtagcctgataactccttgatggatttactgaattcttctaatgctgaacccatgaatatttaatcaaatcaaaggctaaagggaaattttatattat

SEQ ID NO: 217202 - DNA, 452 bp, Gossypium hirsutum
gcgcccacgctatctcccactcgtccttcctcattctaaggctagtcaaccctaaccagctcaaagggatcaagtatgagcctttgaacgtcacggcttatgattttccaaacaaaagtaatgtcataggtaacattttgatgccagcgttttaccagtgttacagacagaaggctacaaagcctggtcaaggcaccgctaacaccactgtggctttacgagcgtcgtctgagaacggaacaggagttttacggattgatatggcgacggcggtgaagcttaagaccttgtatggatattcgaagaggcataagattaggattggagcatatgtggtggtcaacgctagtggtgttaatgtccatcgtaaagggatcaggcttagatctatggcacccaagatgggaaattcttgtgtggtgctgcttggagctttgttcaatatcttgctc

SEQ ID NO: 217203 - DNA, 365 bp, Gossypium hirsutum
acaatgatgttgtcattaacgggtcaacaacactctgagaaagtatcagagaattgcggtgctgtgtggaaatctctgggaatctacactgatgcagatacgaaagcccttgaacaattcattgatgtcttcaaggatgaaaacttgcgacctggatctttcattctttgaagtatctcaggccaaggatcgttgactatagaccactgcaaagatagctgagtaccagaaggtcggaacgcaatgattgagaatagactacttgacaactcagagctggaatacatcatatggaagaacggagatgcttctgcagcagatgaaagcttgtcatgaagattatgatcattgtgcaatgactgatc

SEQ ID NO: 217204 - DNA, 206 bp, Gossypium hirsutum
cccacgcgtccgcccacgcgtccgcccacgcgtccggctgtatttacactacttgattattggctgtaaataatatggcatcctttggtgatgaacaatatggtatttccttttaaaatatactgcattataggactccatttatgataacatttttcccccccccttttttttttcatgaatacaaaaattgtttagcattggtc

SEQ ID NO: 217205 - DNA, 459 bp, Gossypium hirsutum
cggggcggacccacgccgtccgcccacgccgtccggattgggatggtggggatattgggaggtgtatacccttcaaaaattaaggggaccagggtgttactttgcaatgaaggtgatggacaaagcatctttagcaagtcgtaagaaactacttcgagctcaaaccgagcgagaaatactacaatccctggaccatcctttccttccaacattgtatacccatttcgagactgataaattttcatgtttagttatggagttcttgccctggcggtgatttgcatacgctacgacagagacaaccaggaaagcattttactgaacaagcagtaaagttctatgtagcggaagttcttcttgctttggaatatctccacatgcttggtattggttatcgtgatctcaagccggaaaatgtccttgttcgagaagatggacacataatgctttcggactttg

SEQ ID NO: 217206 - DNA, 451 bp, Gossypium hirsutum
aggagctgtcagagcatcttggaatccgcagactgaatgagcggctctcacatcctgcagggcaggactcagttgaatctattttcccgagggataatcccaagaacacaaggttttcgatcaactttttcacttccattgggcttggtggtataactgagaatttgcgtgagtatttgaagaacatgccccggcttatcatgcaacaacaagaaccggcatctgaatcagaatcaggtgatgagtctgggagctttagttcatcggattcagaaagtgctagttcagagccggagtcagattcgtcaagttctgatgagggtgagaggcgcatgaagaaaagaaagaaatgaggtataatggctgctgcttaattgaagcgtttagtatcaaactcgtgaatgatatatgtctttctgatatataatgcatgtcgtcggttttattcctt

SEQ ID NO: 217207 - DNA, 342 bp, Gossypium hirsutum
cggacgcgtgggtttcacaccacattcttcagtgcaggcaccatggcagcttcctcagctgtggtcacccctatcttctccaccgtccaaaagaagaatggcattgttaccccctccagcatctcattccacggccttagacccctaagcaagggcaaatcttcatccaacgccatctccttctcaagaaactcagctgctagtgccaggcttgcaatcaaagcagagctgagcgcccaagttgtgataagcgtcagcactgctctctcccttttcttgggtagatttgtgttcttcaacttccaaagagagaacgttgccaagcaagtgcctgagcaaaat

SEQ ID NO: 217208 - DNA, 392 bp, Gossypium hirsutum
cccacgcgtccggaaagaccatcaccctggaagttgagagctcaaacacgattgataatgttaaggccaagatccaggataaggaaggaatcccaccagaccagcagaggctgatttttgctgggaagcaacttgaagatgggaggacccttgcagattacaacatccagaaggaatccactttgcacctggtccttcgcctccgcggtggttttaagtgttgtgccgaacacctgtccagttattgttgatgtgttaagtttgttatgtttgtgggtcgtatgctgatgtgagctggccactaggcaggggaagcttacaagtaaaaataattgctttttataaacgcttttagttgttttttaggtttgaataagttcgtttttgcattc

SEQ ID NO: 217209 - DNA, 470 bp, Gossypium hirsutum
  unsure (1)..(470): unsure at all n locations
gcaaagcagaaatcagctaaataaacaggaaaaatggacgcaattgactcactttttggtgcgctaagggagttcgctaaggacagtgttcgtctcgtcaagagatgccacaagcccgatcgcaaagaatttacgaaggtggcgctccgtacagcgatcggattcgtggttatgggatttgtaggatttttcgtcaagctcatctttatccccattaacaacattattgttgcatccggttaggtttgctttcatgttactgactcaacagcacacatcgagagataaattgtctgacatctcgaactaatttcagtatagactttggctttcctctatattcatatttgntggattttggcttagcttttagtgttgaaatggaaactacttgaagcaaaatcaattcttgagtttttgtccaaaataaataatttttatattttattttttttgtctgcctttttttt

SEQ ID NO: 217210 - DNA, 417 bp, Gossypium hirsutum
  unsure (1)..(417): unsure at all n locations
ggaaanaccgggncggaccaagccgtccgcccacccttccgaaaagaaggaattccaccttatccagcaaaggttgttttttcttgggagggcaggtgtaaaacggaaggactttggctgattacaatattcaaaaggagtccactcttcaccttgttcttcgtcttcgcggagggttctaagccttaaggtctcccttaatgtgggtcttctggttttacgtgaaggactgtgccctgtaatggccttttaaataacttctagtctttgtttaccggttgcatctatgtatggtttctctttgaatggaatttgcatatttaccttaactgaaagacttgataaatagcaaatgataattgttccttaaagtgcctttttcctgcttgttacaagcttatatatttaaagttatct

SEQ ID NO: 217211 - DNA, 439 bp, Gossypium hirsutum
acccgtccgccaacccttccgccaacgcgtccggaagatcttgctagggtgcagcgagctgtttgtatgataagcaataacacagcagtggcagaggtgtttgcacgcattgaccacaagtttgatctgatgtactcgaagagagcatttgtgcattggtatgttggagagggcatggaagaaggtgaattctcggaagcccgtgaggatctggctgctcttgagaaggattatgaagaagttggtgctgaaggtggagatgatgaagaggaaggtgaagaatattgatgctactatcgcaatatcatttattttgaagatgatgggttcaccctgtgagggtatcctgttctttcttattcgtgtgaggtttctcaaattatgcctatggaataaatttagaagtcgtgttgcttgtcatttttttgttgttagaaat

SEQ ID NO: 217212 - DNA, 440 bp, Gossypium hirsutum
cccacgcgtccgagtttggtgacaagtcctctattgttcaagctaatccctgcattacttcatcttggggtgctcttacgatggttctcccctgagagagaaagtcccattgaggttggaattaaaggagataacctccgttcagacagcggaaagcatcacattactttgatggtgcaagaaccccatgattcctgattataccatgtaagtaaactaatcgagaagaaacatctccattacatgtttgattggccgttttttgtgacgctgcaggtgaagttaatgatctcgtgaaacacactttgcttcctgtttttgttttggtttactaaccctactatatttgattaacaaactgcattgttcctcttaaaaaaatgccaacagcatgaggtaacctctagcttgtgaagcaatgccttgtaatcattcatttc

SEQ ID NO: 217213 - DNA, 456 bp, Gossypium hirsutum
cccacgcgtccgaatatccgcctcccgacatcggcaacgatcgttcctcgatccgacggtgatgacgacctttactgtgccagctggcagttagccgtcgagaccagtaacgcaggaagttgggccgcaatcccctcccgctgcgttcccttcgtcagagattatatgaccggtcaacgctacgcttccgactgcgaggtcgtcgctaattactccctcgcttacgcttccaccgtcaagatcgcatccgacggcaaagacgcctgggtcttcgacgtcgacgagactttgttgaccaatttaccctactatcgagatcacgggttcggatcagaaacttttaacgagagctgttgggatgaatgggtggcagaagccaaggccccaactataccatcgagtttgaattgtataatgggttgaagcagatgaggttcaaaatatttgtgcttaccg

SEQ ID NO: 217214 - DNA, 335 bp, Gossypium hirsutum
  unsure (1)..(335): unsure at all n locations
agacaaactcagcactcagaccccatcatctccggagtttgcgcccaagtgaagatgactctttgaagggaccccagagatgggcaccctactgaatcagtgacatnggatgcnagctgtgcgatcaaagcttgcaaatgtaatcccatgccacctgttgaaaaagcttgatgaaaggccataagattattgaaaaaagaaaggcagcaaaataacaaggcctctgtaatggatttattttcaaggatggatgcctgcaaggtctatacatatggctctctctgtcttgtgtaatagaagctttgtttgtggtgaaaataatgtataagccattt

SEQ ID NO: 217215 - DNA, 463 bp, Gossypium hirsutum
  unsure (1)..(463): unsure at all n locations
gacgaatattttatcaagaggaagctttatccaaatgttgatttctattctgggttaatggacgcggccatgggatttccaccagagttcttcactgtgttatttgcaatccctcgaatggctgggtacttggcacactggcgtgagtctctagatgatcccgatacaaagataataagaccccagcaggtttataccggtgtatggctacggcattatatgccactcaaggagcgcatggcgttgaatgatgcagacaagcttactcaagtatccatatcaaatgcctcgagacggcgactggctggttcggnggtttaggctttactgttatattataacatcaccaagtgaaataaaatggcaaacgggccgtatatgtatctctgctaaaataaatttactaccctcgtcattgccttctgcttgaaaactgtatgcttttgagctgacataatgcaat

SEQ ID NO: 217216 - DNA, 293 bp, Gossypium hirsutum
agcacagctgaaagctgtttgtgtggaggcaggcatgctagctcttcgccgcgatgcaactgaggtgaaccatgaagattttaatgaaggcatcattcaggtgcaagctaagaagaaggcaagcctaaattactatgcataatgggagagcatttcagtgcaagaatgtgaaggtggttgtgttgagagtaggttgatatacatatttgactctctgcccaattatattgtgttaggttttacttggttgcacttaatttatataagaaacccatttacaaatggattgttct

SEQ ID NO: 217217 - DNA, 454 bp, Gossypium hirsutum
  unsure (1)..(454): unsure at all n locations
atgctgatcatgttactggaactggcctcatcaagggcagggtgcctggtgtcaaatccgttatttcaaaggccagtggttccaaggctgatgtttttgttgaacctggtgacaagatctcttttggggatctctttcttgaggttcgtgctactcctggtcatacaatgggttgtgttacctatgtcacgggagatggacctgatcaacctcagccaaggatggctttcacaggagatgctctgttgataaggggatgtgggaggacagattttcagggtggaagttcacagcaactctacaagtcagtgcattcacagatttttacattactgaaagagacattgctatatccagctcatgactacaaaggattctcagtaaccacttggggagaggaaatgctatataatccacgcttgacaaangatgaggagactttcagaaacatcat

SEQ ID NO: 217218 - DNA, 382 bp, Gossypium hirsutum
ccaacgcgtccgaaaaaaaaaaggaggcaaaaaaccatggccaaggttcggtggtccatggttgtatgggggcttccagcttgggttagtgctacacccattctgaataaccaattgggggttgaaggctatgtgtcctgtgatacttgccgtgctggttttgaaacccctaagactagaaggctagctgatgccatggttaagctggtatgctccgacaggaagaccggcggagttgttttcgagaaggagggatataccgacaaaaccggaaaataccagattcgtgtatccgaggatcacttggatcagatctgtgatgcagttctcgtgaagagcccccagcttggatgtgccacaatgtcccccggtcgtgaacgtg

SEQ ID NO: 217219 - DNA, 443 bp, Gossypium hirsutum
gctttatagtcttgatgcaggttccgtcattcactcgctttgctttagtcctaataggtactggctttgcgcagccaccgagcagggtatcaagatctgggatctggagagtaagagcatagtggaggacttgaaggttgatcttaaggctgaggctgagaagtctgacgtcactgacatcggaaataagaagaaggtcatatactgcactagcttgaactggagtgccgatggaagcaccttgtttagtgggtacactgatggtgtaatcagagtttgggggattggtcgttactagatatgcttgtcttgagttaagattttgtttcaaatgtcggaaggttttttggtttattttcttaatatggttggatattgaggccttgccctcttctattctaatttggtttgggttatttaattaccggcttaggtttgaattg

SEQ ID NO: 217220 - DNA, 438 bp, Gossypium hirsutum
cgaggcaggcaagcatctaggtgtttctggacttggtgggcttggtcatgttgctgtgagagatcggtaaggcctttggattgaaagtcactgccattagtagctccccacagaaggagtctgaagcaatcaatagacttggtgctgactcattccttgtttctaacgatccggaaaaaatgaagtcagctattggtaccatggactatatcattgacacagtgtctgcggtccatcccctacttccactgcttagtctgctgaaggtgaatggaaaattggtcactgtgggattgcctaataagccactcgaattgcctgtttttcctttagtcatgggacggaagcttattggaggaagtgatgttggagggatgaaagaaactcaggagatgctagacttctgtgccaagcacaatatcactgcaaatatcgagc

SEQ ID NO: 217221 - DNA, 467 bp, Gossypium hirsutum
ctttgctgaaggccttccattccaatatatgaagcaccagattggaggacatgacgacaagaatttgtcatacagttatagtttgatcgaaggtggacctttgggggacaagcttgagaaaatcagctatgacaacaagtttgaggcagctgcaggtggaggaagcctttgcaagagctcgatgaaattttacactgttggcgactatgtgatcactgaagatgagatcaaggctcaaatcaaagggagtgaaggagtttacaaggctgttgaagcttacctcttggctaaccctgatgcctgcaactaagatatatgttggttgctttgaattctcataacttgaatttaaagaatggtgtgcttttggtattttcctttttagtcttaaaacttaaaccgtctttcgattgtcttaataaaaaatgcggtggtggatgatctttggatcatcttgatatatgatg

SEQ ID NO: 217222 - DNA, 432 bp, Gossypium hirsutum
aagaacactgggcaactaatggaaaaaattctttttctagatatgagtacgaagaatgtgaatctgaaggtgccaataaaatgatcgaataccttagaggtctaatctcaaagagtaaggcaggtgaaaagtatggaaattatgtccttcaatttgctgatgacttttcatataccgatcccgtggatggaagtgtggcctcaaagcagggtgttcgatttgttttcacagatggttcaaggattatattccgtttatctggaactggctcagctggtgcaacggttcgaatctacattgagcaatttgaaccagatgcttctaaacatgacatggacgcccaagtggcattaaaaccattaatagacttggcatcgtctgtatcgaagcttgaagacttcacaggcagggagaaacctacagtcatcacat

SEQ ID NO: 217223 - DNA, 387 bp, Gossypium hirsutum
cccacgcgtccgcccacgcgtccgggagtctctgaatggaaagaaatttgatgataaggagtggtatgttgggaaagcgcaaaagaaatctgaaagggagcttgatctgaaacttcgatttgagcagtcaatgaaagaggcagcagataagtttcaaggagcaaacttgtatgttaagaatttggatgacagcataagtgatgaaaaacttaaagagctattctctcaatatggtatcataacgtcatgcaaggttatgcgagatactagtgggataagcaaaggatcagggtttgttgcattttcaactccagaagaagcatcaagagctcttgcagagatgaatggcaaaatggttgtcagcaaacctctctatgttgcactagc

SEQ ID NO: 217224 - DNA, 447 bp, Gossypium hirsutum
cccacgcgtccgagctgattggcttgttgagaagtgtactgaactgggagctagtagtgtaacacctttgctcactcaacgttcttctaccatctctgacaatcgggtggagagattgcagcgtgtcattttagcagcagctaaacaatgccaacggttgcatgaaatgaaactgaatcatcccatgaagattgataatcttatacctcttgttgccaagtcgaagcagtcttttatagccatagcagaaggtactcctctagttagtgcattgactgcaacaacaaaggaacctagtgggctgataatagtcggaccagaaggggactttacagagaaagaggtggatttgattacagaagcaggagctacagctgttggtcttggccctcatcgtttgcgtgttgaaactgcaactatagctattttggcaacccttactctatg

SEQ ID NO: 217225 - DNA, 385 bp, Gossypium hirsutum
catttttcccctttggattgggacctcgatcttgtgttggtatgacccttgcaaccatagaaaccaagattgctctctccatgattctacaacgttacaccattaccatttcccctacctatgtccactctccaatagctattatcaccattcaaccacaacatggaattcaaataatacttgagccgctgcatagctgctaagaactaggggcttaatatagttagttcgtgtatggatgacatttaatatgtctaaggttctagcatttgcagccccttccctattcctagctatgcccatctttatacataattaaatgcaagtagctactactttccaagatggcgaaacatgctaccaataaaaaaaatgttgcttttat

SEQ ID NO: 217226 - DNA, 419 bp, Gossypium hirsutum
gcaaaccacaaccgggacacttgttctttttgtggcactttggaaagtgcactttgatggagctgaaatggaaactggggctgaaaatggctgcaaatgtggagataactgcacttgcaacccttgcaattgtaaatgagaaagaaaaagcatccggatggtttgattgtttcttgttttactgaaatttcatgatggttaggtttttgttttatttttagagttcttttttgtgtttgggtgatgggaaagtgtctggggatgggaaaatgatgtgggatttggtctcttcttgtttgaagatgaccaaatggtttgaaataaaagtgttttgaaggatgtgttgaagaatatatagtatttggcttaattcattcttgttttgctgcattggattttttaaagcaatttcattttat

SEQ ID NO: 217227 - DNA, 412 bp, Gossypium hirsutum
gagcggattagctgtttctgcactactttacgaacatggttcacctaatgatttcctatcccagctcataagcaacattacagatatgactgatgaggtccaagaaagatcaatgggggtgactgatccaaaccttatagaaattgatggcgtggagtattatagatacattggttctttgactgtccctccttgcactgaaggtgtcatttggattattaacaagaagatagcaactgtttcgaaggaacaagtacatgcaatccgagaggctgttcatgattatgcagaacaaaatgcaagaccagtgcagacacacaatgaacgagagatggaacttcatagtccccacagctgaaaatctaaaacgctgtatttactacaccattttacgtatcttatatgctatatg

SEQ ID NO: 217228 - DNA, 312 bp, Gossypium hirsutum
cggagatcagtaccagactgtcacgctcgttaatactatggttgtacatcacgacaggtgttctaacatgctttcaggacggaactgattcattagaagatctgttgtgagatatgttcaactaccttcagacggagtcaacattgaatcgctttatggtgccactagacgtgaagcttgcggaagctgaaaaagcagcttctgacgacaaaatcaatgtgctcttaatgatgtagatggaatgcttgaaagattgtgacaagtcatcgaggatttacatcatcatgcattaatgttgacaaacgcgcttga

SEQ ID NO: 217229 - DNA, 342 bp, Gossypium hirsutum
gtcacctggtacttgaagattgcagcgggtatcgagtccggaagcagccggcctggccacttggtcgccaccactttgtccgtcagacatatttacgagattgccaagattaagcaatccgatccatattgtcagtacatgtccctggagagtatttgtaagtccattattgggactgctagtaccatggggattaaggtggtgaaggacttggattagattcttcatttactcttcaatctaaaaaaaatggtaatgttcttcttagcttttggatttgatgcatcttagctgttcgacatattggctgtgttgaaaaaccttgaaacgtttttgttggat

SEQ ID NO: 217230 - DNA, 338 bp, Gossypium hirsutum
gcgcttgcttcttcagtataaccctgtccacaagaaaatcccagttcttgttcacaatgggaaccccatctctgaatcccttgtgattcttgaatatattgatgagacatggaagcaaaatcccatattgccccaagatcctctacacagagccagggaacggttctgggccaaatttagtgatgaaaagctactaccatcagtatggggtgctttcaccaaagaagggaaagaccgagaggaagctatggctgcaacgatggagaacctgaaattcgtagaagaagagctgaaaggaaagaaattcttcagtggagagaagataggcctggtagatc

SEQ ID NO: 217231 - DNA, 235 bp, Gossypium hirsutum
actcgtccggcggttccttctgcaatttaaccctgtcttctagacaattctaacccttgctcacaattgcaaccctaggtttgaatcacgtgtgattcttgaatatatttatgatacatttaatcaaaatcccatattgccccaagatcctatacacatacccaactaacccttcttatccaaatttattcattaaaagctactaccatcactatcgtgtgctttcaccaaataa

SEQ ID NO: 217232 - DNA, 390 bp, Gossypium hirsutum
cccacgcgtccgcccacgcgtccgcggtggtcagcccgctggtcggattgtgatggagcttttcgcagattgcactcctcgcactgctgagaacttccgtgccctctgtaccggcgagaaaggcgtcggccgcagcggtaagcccctccactacaaaggctcctctttccatcgtgtgatccctaactttatgtgccaaggaggtgacttcacggccggaaacggtaccggaggtgaatccatctacggatccaagttcgctgacgagaacttcatcaagaagcacactggtcccggtattctctcaatggctaacgctggtcccggaactaacggatctcagttcttcatttgcacggctaagactgagtggctcgacggaaagcacgt

SEQ ID NO: 217233 - DNA, 341 bp, Gossypium hirsutum
ctgaagaacgtgcagctgctgttaaggcctctggcaagaagaaagaatctggcaagtcctctgtgttgttggatattaaaccatgggacgatgagactgacatgaagaaacttgaagaagcggtaagaagtgttcagatggaaggactgctttggggagcatctaagcttgtgcccgttggttatggaattaagaaattgcaaattatgatgaccattgtggatgatttggtgtcagttgacactctcatcgaggaacatctgacggttgaaccaatcaatgagtatgttcagagttgtgacattgatgcattcaacaaaatataatttgctatttgggat

SEQ ID NO: 217234 - DNA, 431 bp, Gossypium hirsutum
tgttttcagtggtgattgtttggatttattctcatttactcactgtgggtggagcttagaatggtacagcaccaaaaacacaaacaagctgtagaactgatcgttctggtctaatagatgctgctccatggataagagttccttatccctttcaatggggagcgccatcatttgatgctggtgaagcctttgctatgatgatggcttcttttgttgcccttgtagagtccactggggcttttatttctgtgtcaagatatgcaagtgcgactccaatgccaccatctattcttagccgtggtattggttggcagggagttgcaattttggtgtcgggattggttggaactgccaatggttcctcagtttctgtagagaatgctggccttttagccttaacacgagttggcagccgaagggttgttcaaatt

SEQ ID NO: 217235 - DNA, 432 bp, Gossypium hirsutum
aaggaggtagaggcagtatgcaacccaattatcacagctgtgtaccaaagatctggtggagccccaggtggtggatcaactgaagaagatgatgattctcatgatgaactttaaaaaactggtaatgacattttgattgctgaaacaagcaaagcaaagcaaagggtgagaaggatgagagcataggtaggtgagatgaagatatacaggaatttttctccatggtagaagttaaaaaagggagaattatatccccctttgttcggatgttatttttgggtgaatgaatacgttttaacggatattattttttttgttttaaaaaaaaatatatattataaaaatatatattattatttaacttttaattttatttatatttatatcttttatttttttttctttttttttttatatatttatttatttatt

SEQ ID NO: 217236 - DNA, 386 bp, Gossypium hirsutum
cccacgcgttcgtctcagtaccgtgaaccgggagttttgttatggcgtggtttcacgtggcaagaattcgccgaccagtgctttggaaacaaagctgattatggaaaaggccggcagatgccgattcattatgggtccaaaaagcacaatttctgcaccatttcgtctcccattgcaacacaactttcccaagctgcaggcatagcttattctcttaaaatggacaacaaaaaagcatgtgttgtgtcatacatttgagatggtggcaccagtgaaggttattttcatgctggtttaaattttgcagcagttatggaagctccagtcattttcttctgtcgcaacaatggctgggcaatcagtacaaatgtatctgaacaatttcg

SEQ ID NO: 217237 - DNA, 365 bp, Gossypium hirsutum
cccacgcgtccggtttatcagtttaggatggcacagagcgaaatcgaccggtatttgaagatcgttcctcttatcactctcgttgataatgctcgagtcagggagagactcgaagttatcgagaaagatcaacatgagtacacattagatgaagaggatagaagggtgcaagatgttataatgaaacccgaaccctcggaaaatgataccatgatcttgaaaaaaactctttcttgttcatacccaaacatgcgttttaatgaagcgctgcaaaaggaaaatgaaaagcttcgattggagctacaacgttcgcaagctaattacgatgtgaagcagtgtgaagtaatccagcatttgcttgatgt

SEQ ID NO: 217238 - DNA, 447 bp, Gossypium hirsutum
cccacgcgtccgggcagaacttcaagatatgattaatgaagttgatgctgatggaaatgggaccatcgattttcctgaattccttaacctgatggcgaggaagatgaaggatactgattctgaggaggaacttaaagaggctttcagggtttttgacaaggatcagaatggtttcatatcagctgctgagctgcgccatgtcatgacaaatctcggtgagaagcttacagatgaggaggttgatgaaatgatccgtgaagccgatgttgatggtgacgggcagatcaactatgaggagtttgttaaagtcatgatggccaagtaactttctcaccaaccataaagatgaaccaaacattgatattaaagggaacagggcagataagttcgctaagacttatatctctgaataggaacattcatgcttttaaattattagcttttggt

SEQ ID NO: 217239 - DNA, 316 bp, Gossypium hirsutum
  unsure (1)..(316): unsure at all n locations
gngaacagggagagacagaccagggangcaatctggagtaagcgcggaccctaagcatgggaaaggcaatggagtgaatgccgaggcataggcacagaacacccgtgctgcagaggtgagacaagtgaccgacgaggaaacaggaacatgagctaccaaccgagaaaggcaatctaggaaagaggaacgtctaagcaacgtacttaagggaggcaacagagctaggttagccaaaaccatagcttctcaaagaggcacacataccgacagaaggcttcaccaaatgatgcgtgcggacagggattatgaacagacc

SEQ ID NO: 217240 - DNA, 371 bp, Gossypium hirsutum
ctctattggggaatcaccgccgacggatttgtggcctttgctgataatgctgaattgcggaaaggtgcctgtggcaaatctcttgcttctttccctcaaggctgtttctactccacagcagtaggaggattaagaagctatgagaatcctaagaacaagatcactgcagtgcctgctgaagaagaggagatatggggtgctaaattcaaggtggaagggccagctgttgttgctgccacagagtagtcctttgctttctccttctaaatctatggatccatggaattataggagctgcaaatgcatagcatatggatcagtctccatatgaaagtacttgtagagtgggaaatgaaaagaagaaaaagaac

SEQ ID NO: 217241 - DNA, 393 bp, Gossypium hirsutum
ggggttgaaaaaaatgggtgaaatcgagttagcagttcggttcgcatgtccgtcattgtgaccggacacatgttcggcttacggtcaaccattgcttccaagaatgcattatctccgcccacttggggtggctcaacaggaggcattacgcggagctgcgacaaagatggtagcacaatggctagcgaggtcagaaccgccgcttgggcaagaagtagtgaagtacatgctggatgcggattctcatacatggagcatgagaaagagcaaagcgaattggtttcggatcgttgccgttctagcatgggcagtggggttagccaaatggttggataatattaggaggtggaaaaacccggttactacagtattggtccatgttttatacttggt

SEQ ID NO: 217242 - DNA, 333 bp, Gossypium hirsutum
ttcccgtgcatgaatttaacgttgaataagtcgtctgttgtagtttgtgtggtgtcttatatctttcagttaacctttgtatccggtactatgatgtaatggctatgcttatggccttatctggttaatgaagtatccttactataaaaaaaaaaaaaaaaaaaaaaaaaaaaaaaataaaataaaaaaaaaaaaaaaaaataaataaaaaaaaaaaaaaaaaataattataaataatattatataaaaaaataaaataaaatataataatattaaataaataaaaaatagggttgtcctttttaaagatccatagttttctttctcttactt

SEQ ID NO: 217243 - DNA, 428 bp, Gossypium hirsutum
cccacgcgtccgcccacgcgtccggggcttcttatggatctttcaccctggttgaaacgttctctgacaaacttctttcctggtttccatattattatcacttcaagtttgcatttcttgtctggcttcaacttccttctactgaaggggctaagcaaatctacaagaaccacctgcgcccttgcttgctgaaacatcaagctagagttgatcaacttatgtgcattgcaagtaccgaaatggcaagattcatcacggcacaccaaaaagagtttcgatttgtccgggcaatgatgatcaagattataggatcagacccaaaagtgagtggcacggaaccggctgaaccaagaagtctacccgcaatcaatgatgaaacaagaacgactgcaaatccggaatctgataatggagactagtttctattt

SEQ ID NO: 217244 - DNA, 444 bp, Gossypium hirsutum
cccacgcgtccgggaaggcatccctccagtccagcagcgtctgatcttcgccggaaaacggctcgaagacggccggaccttggccgattacaacatccaaaaggagtcaactctccacctcgtcctccgtctgcgcggtgggatgcaaatcttcgtgaaaaccttgactggcaagacaatcactctcgaggtcgagagctccgacacgatcgacaacgttaaagcgaagatccaagacaaggaaggcatccccccagaccagcaacgtctcatctttgccggaaaacaactcgaagacggccgtaccttggccgactacaacatccagaaggagtcaactcttcaccttgtccttccgttgcgcggcgggatgcaaatcttcgttaagacgcttaccggaaagacgatcactctcgaggtcgagagctctgacacgatcgacaa

SEQ ID NO: 217245 - DNA, 376 bp, Gossypium hirsutum
ggcaggtgagaaaatatcaccaattgaggtagacgcagtgttattggctcacccagctgtaacacaggcagttgccttcggtgttcccgatgagaaatatggcgaggaggtaagaaaatccaattcatggttttgattatttttggttttgaatggctgtttggttgtgtaatttgtctaaaagtcggtgtcaaaaaattgcagataaattgtgcggtgattttaaggggaggaagcttggatgaagcagaaatcacgaaatattgcaaaagaaatcttgcgagtttcaaagtacccaagaaagttttcatcacggattccgtgccgaaaacagctactggaaaaatccagaagaagatagtagcagaacatttct

SEQ ID NO: 217246 - DNA, 315 bp, Gossypium hirsutum
  unsure (1)..(315): unsure at all n locations
ctccngcaaggcatgggaggaaacatacatgaagaagctgaatgcaaacttctctttatgtatcggatgtaatagtggttgtatatgtaatatggtagcacttgttttctggatgtgttgtgtccttaaaaaataatgccgatagtggcatgttgttatagttttagatgttagttttcatatgatctgctatatcgttgtacgagtagtatgttttgtttgtgttgaaacaatcttcatatcttagtgataattgttgagtagtcatagctttcattttgcaaatgacattgtgaagaaggaaaacatcaaaat

SEQ ID NO: 217247 - DNA, 411 bp, Gossypium hirsutum
gggaatgtggacagaaccaagccaatcaattgtggacattgacatcaaatgataacacagttcgatctggcggaaaatgcttaaccacttatggatacagcttcaaaaattatgtgatgatctatgattgtgagacggctgttcctgatgccaccaaatgggaaatccgcagtgatgaaaccataagaaatcccagatctgggctagttttgacgggaagtagagatagttcaggtatgattaatttggttgtggatcataagtatgatggttctaggcaaactttctatgccagcaacaatacaaagccagcagtgaccaccattgtcggttacaaagacatgtgcttgctagcaagtggaagtcgggtgtggctggaagactgcgtgagcaacgatgctgaacaacaat

SEQ ID NO: 217248 - DNA, 421 bp, Gossypium hirsutum
cccacgcgtccggtttatgggttatcctttctcgtcagaggaacaacaacaaggggtgcgtgaaaacattgtgaagatgtgcagtttcgacaatttaagtggcttggaagtaaataaaaccgggagacatcgtgaagggaaaggaaatatggagacggaaaataacattttcttccggaaagggaaggttggagactggaagaattatttgaccactgaaatggctcaacgtttagaccaacgaacactgcaacagttgagcagttcaggtttaagtctctaattgaagatctataatctatttagcatccagtgttgcttaaacctgatcagagttcgtaattatctcttttaataatattacttttaaataaggtcatcttggccgaaacttgtaataatattaatagtcttatataaa

SEQ ID NO: 217249 - DNA, 418 bp, Gossypium hirsutum
cccacgcgtccgcgaaattcttggaggaggacaataagcaactcaatttcattgtgaatcaacagcaactgacttatgaaaatgtgagagagcatatggatcaccacggataccatcaagctgctcgtgctgacttcaactcgcagatgcctttcgcattccgagtgcagccaatgcaaccaaacttacaagagaggatgtgatgaacattgtgagggttatccaatagctaaagctgcctatatgagctataaggtcaaaaatggagggggtgcttagtttctgaatgataataacttttaagttctacgagtattccagtgtttatgacaatcttagtaatatagatatcaactatgaatttgatattatgaacaattattgtatctactttgagcaacttatatgtgtctctatg

SEQ ID NO: 217250 - DNA, 409 bp, Gossypium hirsutum
taggactaatatcatcacgaaaaacagccttagcagtcgatatcttgaaactcagggcctgtacatacttggtagctctatgtcaagctattgatttaaggcatttagaagaaaacttgaggaacacggtgaagaacactgtgagtcaagtagccaagaaaaccctcacaaccggtaacaatggtgaactccacccatcgagattctgcgaaaaggatttgctcaaagccgtggaccgcgagtacgtgtttgcttacatagatgatccatgcagtgctacttatcccttaatgcaaaagctaagacaagtccttgtcgaacacgcattcgccaatggtgacaatgaaaaggatacaaacacttccattttccaaaagatcacagcatttgaagatgaattcaaagctgc

SEQ ID NO: 217251 - DNA, 418 bp, Gossypium hirsutum
cggaaactaaaagttgctgaaactacacctgatagctggtttggaaagatggtatgtcatgcttcacagggatgcttaagatgtgttgagtggacaatcaaatcagtgaatcgaaatgcttatataatgatcgcaataacagggaaaagcttctgtagatcttctgcaattgcaacagaattgatcatgaataatatccttagattagtgagggtgaatgtgattggagatgttatcctgtttcttggaaagttgtttgtcagcctctcgagcgctgtctttggtttccttgtgttggatacccacaagtatagttctggtcataacaaattatcctccccattgcttcctgtgctggtttgctggactcttggttatgtagttgcaactcttttctttgccgtggtggagatgtcga

SEQ ID NO: 217252 - DNA, 416 bp, Gossypium hirsutum
atttggccagaagggcattccatacctgagcacatacgacgggcgtactattcgctacccagaccccttgatcaaggcaaatgacaccattaagctggaccttgagagcaacaagattgtcgatttcatcaagtttgacgttgggaatgttgtcatggtcaccggaggaaggaatagaggtcgtgttggagtaattaaaaacagggagaagcataagggtagctttgagaccattcatgttcaagatgctgctgggcacgaatttgcaactcgtctcggtaatgtcttcacaatcggaaaaggaacgaagccatgggtgtcgcttcccaagggcaaaggtatcaagttatccatcatcgaggaagctcggaagaggcttgcagcccaaaatgcagcataaactttagcatgagata

SEQ ID NO: 217253 - DNA, 410 bp, Gossypium hirsutum
cccacgcgtccgcccacgcgtccgctctcgccgccgcctgcgtctctctcttcatgtctgtgaacctaaaagtctttagcttttcgcttcgagagagaccatgttggtttaccaggatctcatctccggtgacgagcttctttctgactcattcccctacaaggaaatcgagaatgggatgctgtgggaagttgagggaaagtgggttgtgcaaggagctattgatgttgacattggtgccaatccttcagccgaagatgctgatgaggatgaaggtgttgatgaccaatctgtgaaggttgttgacattgttgacactttcaggcttcaggagcaaccccctttcgacaagaagcagtttgtcgtgttcatgaagaagttcatcaagaacttgacaccgaaactggatg

SEQ ID NO: 217254 - DNA, 419 bp, Gossypium hirsutum
tgattctaccacccctttgcttttcaggatgcctcatgatgttgtgcctttcatggagcgggatcatgctcatttttccgctaatcgacatcttggaattcctctcttggccactcatgctccttattctttcttacctacatcaataattgattctggttgtaaaattatttacatttgcagggaccccaaggatacatttgtttcaatgtatcacatctgtaccaggtatgcgaaatcccaaaacactcaacccatagaacttgatgaagcgtttgagttattttgtgaaggcgtaagttggtacggaccttattgggaccatgttctgggatactggaaagcaagcttggaacatccggacaagtttatgttcttgaaatatgaagaaatgaatgaagatactgttttgtatctta

SEQ ID NO: 217255 - DNA, 423 bp, Gossypium hirsutum
tggccatctcgtgctgttacctttatagagaatcatgacactggttctacccagggtcattggaggttcccaggtggaaaggaaatggaaggatatgcttatatcttgactcacccaggaacgccggctgtgttctatgatcatattttctctcatcatcgatctgagattgccagccttatctctgtcagaaacagaaacggaatccattgccggagtttagttaaaatcgtcaaggcagagagggatgtgtatgctgcaattattgatgaaaaggttgcgatgaagatcggaccaggttattacgagcctcctagtggttcccaaagatggtccttggcccttgaagggagggattacaaggtatgggaaacatcttaaatgtaaaaccattgatattatttatgtttccaaatgtgtata

SEQ ID NO: 217256 - DNA, 315 bp, Gossypium hirsutum
atttctggaatactcggatgttgaaggttccaaaaaggctcaagctgcaatgaatggtcggaaattcggcggaaatcaagttattgccgtttactatccagaaaacaagttcgcacaaggggaatatgacggctaatgtagagataaaatcatcatagcattgtgcttgtactgattctatgtttatgtctgatcattatctggttccttaggaattttgtagtggcaacctgttgtcgaacttcggaatttgacagtggaacatatcatgtcataatacgttagaactagtttagatgaatgtgttgtttaatg

SEQ ID NO: 217257 - DNA, 406 bp, Gossypium hirsutum
gccttggcaccctgcattccttacgtgagaaacaacggtgctggtggcgtgcctgcatcgggctgcaatgggatcagatctctcaacgaggctgcccaatcaactccagagcgccaatcagcttgcaactgcgtcaaagctttagctgccagcatttctggcatcaactatgaccttacgaacaaactcccaggcatgtgtggggtgcacagccctttcaagatcagccccagcactaactgcaaaagtgtcaagtgaagtaggccatggaagctcgtcagcaaatgggaaaggaaataatgatatatagctacataataaaaatggatggcagcgctctttatctttgtcgtagttgtccctagaaatataataaaacctcaagctattgcatgagttttgagtt

SEQ ID NO: 217258 - DNA, 423 bp, Gossypium hirsutum
cccacgcgtccggatgacttggaggtacttgtgatctcctcccagaaatgtaaagggaggatgtttcccaagggtggttgggagcttgatgaatctagagaagaagctgcattaagagagtcacttgaagaagctggtgttcgaggcaatgttgagtgtgaactggggaagtgggacttcataagcaaaagccatggcacattttatgaaggttatatgttccctttgcttgtgaaagaagaacttgatttctggcctgagcaaaatctgagacaaaggacgtggatgaatgttaaagaagccagggatgtgtgccagcattggtggatgaaggaagctttagacatattggttgaaagactcaactcattgaagcagcaaaatgaacaaaattatccaaacatctgctctgatttagtggca

SEQ ID NO: 217259 - DNA, 299 bp, Gossypium hirsutum
gtgatttgtgaagaacatcaaacaaaacatgcactggctttaatatgatgataagtattgtgggaattaattaattggcaaaaacaacaatgaagctaaaattttatttattgagccttgcggttactttcttgtgatgatcttttttattttctaattatatatagtttccttcgctttgaaaaaaaaaaaaaaaaaaaaaagataaaaaaaaaaaaaaaaaaaaaaaaaaaaaaaaaaaaaaaaaaaaaaaaaaaaataaaaaaaaaataaaaaaaaaaaaaaaaaaaattgtttgg

SEQ ID NO: 217260 - DNA, 419 bp, Gossypium hirsutum
cttcatcatttccaaattttgattatttttttcttttttattttatttttatttaaaaggggaaactgctaacattattacattttcattagcctcaagagaagaaaaaaaaatgtcatcgaattcaatgtctgcttcatggacagccaagcaaaacaaagatttcgaaagggctttagctgtttacgacaaggacacaccagatcgttggtacaatgttgctaaagctgtgggagggaaaactgttgaggaagtgaagaagcactatgagcttcttctggaagatgttagacacatcgagtcgggtcgggttccttcccccgactattggaccgttaccgggaatcgtcaaggtaaaaaacccgagagcatgaaagattccgaagctcaaatgaagaagaaaaaatggtggacttgca

SEQ ID NO: 217261 - DNA, 422 bp, Gossypium hirsutum
cccacgcgtccggccaggcggtggctaaggttcttgaagaaatgatgtcgaaagtgttattcgggcggtccatggatgataaaatctattttaagccgctggttgatgaggccctgcacttatctggggttttcaatctctcggattatgtgcctttccttgctccacttgatcttcagggatatacaagaaggcttaagaaggtgagtagtggccttcacgaattttttgagaaaatgatagatgaataccaacaagggattaacatggatgaccaaaaaccttatagaagtttctttcaagtgatggtttcgttgttggatacacccataaaccctaacgataaagatcaaccctacatcattggtagagaaaacatcaaggctataatggtggacatggtggcagcttccttcgacact

SEQ ID NO: 217262 - DNA, 412 bp, Gossypium hirsutum
atgacaaacatgaacatgagacccgatccttctaatggttacccaggcagaacctacagggtcgacacaggggaaaccatttatacatttggagatgggctaagctactccaaaatcacccacgaattagccaaagcacctcgattagtatcaatcccattggaggaagaccatgtttgccgctcatctgaatgtaaatcagttgaagccgtcgaacaaagttgtaaaaacctagcattcgacattcatgtgagagttcaaaacagagggaaatacggcggaagccacacggtgttcttgttttcgagtcccccatcagtgcacaactcgccccaaaagcatttgttgggatttgagaaagtttcattaacagggaaatcagagacattggtgaggtttaagggtggatgtt

SEQ ID NO: 217263 - DNA, 350 bp, Gossypium hirsutum
ctcctaacaatgattatgatgctgatcaagtcatgttcaaaatccttggactgattccaaaagctcccagttttactgaggaagaagcagaaaattgtgatgaagctgtttcaacttcaggttgatttaaagcagtgccttcttgatgtagttgtagtattgtggtcagtgacctttttcgttgttatgtttgttagttattatctgtaaggaattgcctgcgcaataataaatggcaacgagctcttttgttgcccagggtagtgtcgaaggcttagtctaatgcagtgaaagacttgtgacatatatttatttgataattaaaaaaagaagattagagttaacgtctt

SEQ ID NO: 217264 - DNA, 370 bp, Gossypium hirsutum
cccacgcgtccgcccacgcgtccgcccacgcgttcggacttggcaacttcatttgcttcgatgaagttaaaatgaaaaaattttctgcaactttcgtctctgacatggaagaagcattgatgctactaaatttcatcgatacattaaagtgaaatagaaaacatttaatttgtgtggaaatgctgcaattgccacatagacccactgcgtgttcaaaatctatcactgtaatatactattttatttttcacttacgaacgtgtctcggcatataaaattatgctattgataccattcgaacatctccacgcttctttatttagcagtgaaaatggattataagaatgaactaagttttttatttgattta

SEQ ID NO: 217265 - DNA, 420 bp, Gossypium hirsutum
gcagccgcagctagaaaagggttattgatgtaagaaatttagcaatgtctccagctaaagttgacagcaagaaaaaggccgatccgaaggctcaagcagtgaaggctgctaaggctgtgaaatcgggtgtgacatttaagaagaagtccaagaagatcaggacaaaagttacctttcatcggccaaggactttgaagaaggaccgtaaccctaagtatcctcgcatcagtgcaacaccaagaaataagttggatcaatatcaaattctcaagtatcctttaactactgagtctgcaatgaagaaaatcgaggacaacaacaccttggttttcattgttgacatccgtgctgacaagaagaagattaaagatgctgtgaagaagatgtgcgacattcagacaaaagaagtgaatacgttga

SEQ ID NO: 217266 - DNA, 413 bp, Gossypium hirsutum
agatagtgaagtcatcctatatcctcaagtctatcttcaaagacccattcaggaggggaaacagggttcttgttatgtgcgatgcttacacaccagctggtgagcccatccccacaaacaagagatgcaacgctgccaagatatttagccatcccgatgttgctgctgaagagccctggtatggaattgagcaagagtacaccctgttgcagaaagatgttaagtggccaattggatggcctcttggtggctaccctggacctcagggtccttactattgcggtgttggtgtggacaaagcctatgggcgtgacattgtggattctcattacaaagcatgtttatatgctgggattaatatcagtggcatcaatggagaagtgatgcccggacagtgggaatttcaagttggt

SEQ ID NO: 217267 - DNA, 425 bp, Gossypium hirsutum
gcaattgaccggcttaaacaattatacattataagaagatgctcgaaaacaaagtcggggggttcagctttgcacaaaggttccaccttcaagcaaaagaagcttttttgctggaagtggacctggttacaatatgtccaatgtcaagagcaacataatgaagaaagcgaagatagatcttatgaagagccaggaagtgaaaaatctcgcagccatgaagaaaaaagcagttcaaagtcatcatagtggtaccaccataacaaagtcgagtggattttgcggaaagaattcagcttcgacatcaaagcatagcaaaccattagagaggagattctagaagaagcagtttctaaaaatttaagaacaaagtcccgaaaaaggttctattgccttcctcctcttttttcactgtaatatttggaaag

SEQ ID NO: 217268 - DNA, 420 bp, Gossypium hirsutum
caaagagataacctcagaactaagccagcatggccccatttctgaaaccaatgtgtataactggtttcaaaacagacgagctaggtctaaaaggaaacaagtaatggttgcatcctccagtaataacaacaataatcataataatgcaggtgaatcagaggtagagacagaagttgagtcaccaaagacaaaaccagagaatcttctgcttgtatcagagggtcaaggtcaacatcatgatgtgtgctttcagaacccagagataacttctcaactgcatttcttgggtgtaggagatgaccatatgtctgctaaaagaatggggggaagctaccacatttatgaccaagcatggcagggtgagtgagtgaatgagtgaggcaaagaaactacatagcatgcatgctttgacatagtaaa

SEQ ID NO: 217269 - DNA, 409 bp, Gossypium hirsutum
cgaaaccctaataaagcagaaccgtaatgttatacttccgattatctttccttccttggaaaggaatgcaagaagccactggaatcctgcagtgcagagcttgacactaaacgtccaaaagattttctctgacaatgaccccgagctctttgaggagtgcttgcatatgtttcaggaagaagaagcacgagaaaatgaggctaaatcaaaacgggaagccacatggaaacggttagaagagattgcagcaatgaaagctgccagtaatcaaccagtgctcatttccctgaaagtaactactcgcaagtgatccggctaggacacgaggttaccattgttgttggcaatggtacgtttacgagatcgatttgcaaaccataaggtttggtattaaagctgagttttatca

SEQ ID NO: 217270 - DNA, 379 bp, Gossypium hirsutum
cggacgcgtgggcatctgcatattaccgaggtgcggttggagctctccttgtgtatgaggtcagcagacgacagacttttgatagcatcggcagatggctaaatgaacttcagagtaagaaccacaatagaaaaaccaaacatttgtattatttcagacggtataagacaacccagaaaagaaaatagattttatatatagccacattgtcaccggctttgtgagtgtgtcatggcttggactttaacaaagcaaatgtggggtgttaagcagagaattcacttcaatttgttggtctgtatcaacttgaacctccaaagttgaaagtactgaagaattctccaagggattaaagttggaaagtaattcacgcgaaaca

SEQ ID NO: 217271 - DNA, 421 bp, Gossypium hirsutum
cggatcagtcatggcagacgcgattgaactgaaaacagccccagctgactttcgtttccctacaacaaatcaaactagacattgtttcacccgctacattgagtttcataggtgcttggctgcaaagggtgaagagtctaatcaatgtgagaaatttgccaaatactaccgttctctttgtcctggtgaatggattgacaagtggaatgaacagagggagaatggtactttcccgggtcctctgtgactgtgatcacatattggaaaggaggtgaagcattgcttctttggcatggaaaacttgtctgtagctagtttcaatggttattcttgaacatttcgaattaataagctacaaatggaaatttgtggccgatgagttgttaaaaaactggaatatgctctgatgttttaattcatg

SEQ ID NO: 217272 - DNA, 231 bp, Gossypium hirsutum
gcggtaaattccgtccaaggctaaatacgggcgatagaccgatagcgaacaagtaccgcaagggaaaaaaaaaaaaaaaaaaaaaaaaaaaaagaaaaaaaaaaaaaaaaaaaaaaaaaaaaaaaaaaaaaaaaaaaaaaaaaaaaaaaaaaaaaaaaaaaaaaaaaaaaaaaaaaaaaaaataaaataaataaaaataaaaatttaaaaaaaacaaactttatttttaaa

SEQ ID NO: 217273 - DNA, 294 bp, Gossypium hirsutum
tatcagtgcaggaggatataggttcgagtgcattgaaacacattattctcttcaaagtagttttagacattttgtcaaaaaaaaaatcggaatctataatgagattatttaaaaaaattataaataatattcgcgtaaattattataattgaattctgaactttttttttttggttggaaatgatgttatagaaacctacttggtgaagatttagggccattggactcaaaggaacttgatcaacttgaacatcaattggaggcatctttgaagcaaataagatcaaccaaggt

SEQ ID NO: 217274 - DNA, 406 bp, Gossypium hirsutum
cccacgcgtccgcccacgcgtccgcccacgcgtccgcccacgcgtccgctttcatcttcttaattaattgttaatcttcccaatggccgcctaccaaagaaaacgacgttttgccaatcaaactaggaggaactgaggtatcaactatttgcagttgtaaaacattccggattcagacctactgctggacactatgtttgctacattcgatcctctcctaatatatggcataagatgaatgattcaagggttacttgtgttgaagaagaagctgtgctgtctcaggaagcctacattttgctctatgctaaacaggatataccttggttttcaactgcaatagaagtgcaaaagccttgtgcagaccctggaatttctgattcttcaccgaagtcctaaatgacat

SEQ ID NO: 217275 - DNA, 416 bp, Gossypium hirsutum
ctcaaatccaccctatgcatgaatcccccgacggtaactcccgttacgatcaccggttcttggccatggtgtcgcccagaaacccagcttctttcactaaccgtatcgtcgacagtagcaccacagacactgcttcttttttgcgagcttgttggctttgtaatcgccgcttagctcctggtcgtgacatatatatgtatagaggggatacatcgttttgtagtcaagagtgcagagaaaaacagatgaagcaagatgaaagaaaagaaaagctaaacattaattcttcaaagaaagaagaccgccatgcccattcctcttcaaccaccaccttctccaagacttctaaagcgaagcctgtggttgctgcttgaactttgaagaaaggtaatcgatgagtaatttccataggaatt

SEQ ID NO: 217276 - DNA, 421 bp, Gossypium hirsutum
cccacgcgtccgctcaaggaaaacaaaagaatggcgtggagaagccaattatctcgaaatgtcaaagagctacgaattctgttttgccaaacttctccttccagtgcctccgctagatcattcgtggagcaaaattacaaggatctcaagactttaaaccccaaatttccgatcctcattcgtgaatgccgtgggattgagccccaaatttgggctagatatgatatgggtgttgagagggcattcgcttggaaggtttgactgaaccacagatattgaaggcactagaagaccttgtgaaagcaggtgcatccctcaaagcctaatacattgctggtattaaatcgaattagtcgaaataagttgatcttctctgaaaagttttccctttgaaggttttccttatattcagctatcatga

SEQ ID NO: 217277 - DNA, 413 bp, Gossypium hirsutum
agcttctctaagcttcctgacaaattttgaggatgtctacaagttgtgggcatttgtggcaaagttccttaacccttcattcatcagggagggtacacttccgaccgttgcggaggaagaatcagagacttaacgtctgcaattgagcaattcaaaatcatttgcaaaataatcccagagtctgagtggaagctaaagaagaccctgagaggatttggtggtaccattatatgcatatggtttgctcttcgttaagacgtttggatgcaacagggtgaatttgttaattcatatttattgttgcttgaagttttctttctctcattttgggttattgtagagttggttttagttttagaaatatatttgtactattttggatgttatcctgaccttaaaagcagaagtatatt

SEQ ID NO: 217278 - DNA, 187 bp, Gossypium hirsutum
  unsure (1)..(187): unsure at all n locations
ggcagaaatagaatccagtttccaaagatgaatgtggctggaaaacctctcccactcttctgttctatgctcatttgtttgtcttaatattttataatcaatcatcttcttgttttctattccgacaaacattcggtttcagatttaaataaatttcatagagttctgtctctagccaatttgnatt

SEQ ID NO: 217279 - DNA, 416 bp, Gossypium hirsutum
agaagatgtcgttgtggagacgtttaagcccgttgagaagctgcctcatgcgggttcatcatcagcggcggttgagcaaccggccgtggctctctccggcgatgaacagcccgagccaaaattgtcgagccggtgctttatctgcagaaagaaggttggattgactgggtttaagtgccgatgcgggagtgcgttctgtggggagcaccggtacccagaaaaacacgagtgctccttcgatttcaagggcactggacgcgatgcgattgccagtgcaaatcccgtcatcaaagctgacaaattggagaggttttgaaaggtggggagcttggagtcagtttgcctgaatcgtgttcttcaatgggtttgccttcttttttgccctctcaactttttgagagttatattaggtttta

SEQ ID NO: 217280 - DNA, 426 bp, Gossypium hirsutum
gaaaagcggatgctgtgaggcttagtgagttgccgttgtaccatctgcttgttcggtagtgggagcaaagcaaaaccagagcaagtctgctcatagggaagctgctttgaccaaatttcgccagaaaaggaaagagagatgcttccaaaaaaaggttaggtaccaaagcaggaaacgactagcagaacaacgacctcgcatcagaggtcaatttgtgcggcaaacagtgaacaacaatgacccagcatccaatgtcaattcatgcgacaaatagtgaacaagaaaaaaagcagaacaagagatgaagtaaaccttcttgctggtactgcaaagagaccggtctagactatttgacaatgttagtcttgatgaactgtgttttatagctatagaccttcctcttttcccttttttttttcttttaat

SEQ ID NO: 217281 - DNA, 419 bp, Gossypium hirsutum
  unsure (1)..(419): unsure at all n locations
cttggattgcctgtgatggcaacaaatggtagggctaggtgcagtctagagcagaagtctggttcaaacgggctgagctcgaaccccagcatggtggcatcaatgatggcggcagcagcagcagcggtgacaacggctgctgcaccggcaacggcgttggtggatgagagactttccacggaaggaacaggacttccttttggctaaagtaacaaccttctgggatggatcctttttggagtgtttggtttgatttgggcattgtattttatctatgtttctagtcttaaagaggatgaagagtctggattgtcgctttgatgaatgatgtaagaatattgggctcatggtttttactttccgccatttcttactaaattaaccctttcatttntatgaaagtaacanatcttggcttg

SEQ ID NO: 217282 - DNA, 365 bp, Gossypium hirsutum
gcttctgccatgtttgatctgcgaaacgttgtgatttatgtacctctcccagctcttcgggagggcccaaatgttaggcagattgatggtgaatggagatatgactccagaaattctgtcttagaatggtccatacttctcattgataactctaaccgcagtggatcaatggagtttgttgtgcctccagcagattcatctgtgttcttccccatttctgtccgtttttcagcaacgagtacatacagtgacctgaaggttgtgaacatcattcccctgagaggcggtggagcttctcccccgaagttctcccagcgaacaaatttgatttacagagaattatcaagttgtgtgatgaacgactg

SEQ ID NO: 217283 - DNA, 289 bp, Gossypium hirsutum
tataagggagagagggaggagaatttcaacaagtcaaaggaggtggatttgttggatgagagtagtgaaaagttggagaatgtggattgggaagatgttatcactatcttggatgataatgaatggccatccaaaacacctagcttccaggaaaccatgaaggaatacaggtttgagttgaagaaattcgcagaaaaggtgatgcaagttatggatgaaaacttgggattaccgaagggatacataaggaaggcactcaatgatggagatggtgataatgccttctttg

SEQ ID NO: 217284 - DNA, 369 bp, Gossypium hirsutum
gcccaatgttgctgggctgatactggctggttcagctgacttcaagactgaattgagtcagtcagacatgtttgatcctcgtttacaagccaagattttgaatgttgttgatgtgtcttatggaggtgaaaacggttttaatcaagctattgagttgtctgctgaaatcttgtcgaatgtgaagtttatacaagaaaagcgattaattggaaaatactttgaggagataagccaggatactggaaagtatgtgtttggcatagatgatacgttgaaggctctggaaatgggtgctgtagaaacccttattgtgtgggaaaatctagagatcaataggtacgtgctaaagcacagtgcaaccggagaaat

SEQ ID NO: 217285 - DNA, 366 bp, Gossypium hirsutum
  unsure (1)..(366): unsure at all n locations
cccacgcgtccggaatgaccctgcttttacttatgaggaaacggtgcagactgctatttctgctgtacagtctgttcttcaagaggatttcaaggctactgagatagaggttggagtggtgaaagctgataatccagctttcagagtgttgtcaacagaggaaattgatgaacatctgacagctattagtgagcgcgactagtgagcatggaccaatattagctgctgcaaaaacctttctattatttgaaacaacatacatgctttagttgatcatgatgtttgagagggattgaacgagggttagaagagctntacatttatgttgcctcctattactgctcngaacttataattaaattcatg

SEQ ID NO: 217286 - DNA, 422 bp, Gossypium hirsutum
  unsure (1)..(422): unsure at all n locations
ccagaatcaacgtaagaattagggttgtgtctagaaatggcgattgcagcgcgcatcagatccactctccctctctttcacaggcttttgagatccgattccctgccttctcacactcccagagctgctcttcaccgaactctactttgtcccgaactgtcgaggaaatattccacttctccgaagaaggacgagaatgttaaggtgcctttggctttgtttggtggatctggaaactatgcatctgcactgtaccttgcagccgtaaaaggaaatgctctggacaaggttgagtctgaacttcttgaccttgttcaggcatcaaaaaacagtcaattcttttctcaattcactaaggactngtcagtacctgcagagacacggggtcaaagcattaatgagatatgtggccaagctaaatt

SEQ ID NO: 217287 - DNA, 332 bp, Gossypium hirsutum
gttaggtgtttggttagcaagaggtttttgattgccggtggcggtgctccggagattgagttgtgcaggcagcttggtgcttggtctaaggtgttgcatggtatggagggctattgtgtgaggtcatttgctgaagcacttgaagttattccttacacgttggccgaaaatgctgggttgaaccgtattgctattgtgactgagctgaggaatcgacatgctcaaagagagatcaatgctgggatcaatgtgaggaaaggacagattactaatatcttggaggagaatgtagtgcagcctttgcttgtaagcacaagtgcaattacactggc

SEQ ID NO: 217288 - DNA, 375 bp, Gossypium hirsutum
  unsure (1)..(375): unsure at all n locations
gatcattccaaacccgaaggaggtcaatggaatcaaggttcttcaactggaaactgcagctggtgcagcaattaggttctttgatcatgctattggtatcaacgtacctcgatcgcgattccttccagtgaaggcaacttcagatttgcttcttgttcagtctgacctttacaccttagttgatggatttgttatccggaataaagatagagcgaatcctacaaacccatccatagaattggggcctgaattcaagaaggttggtaacttcttaagtcgattcaagtcgattccgagcatcattgagcttgatagccttaaggtgactggtgatgtttggtttggtgctggcattgtgctcaagngaaagtgagt

SEQ ID NO: 217289 - DNA, 353 bp, Gossypium hirsutum
taggactaatatcatcacgaaaaacagccgtagcagtcgatatcttgaaactcatgtcctctacatacttggtagctctatgtcaagctattgatttaaggcatttagaagaaaacttgaggaacacggtgaagaacactgtgagtcaagtagccaagaaaaccctcacaaccggtaacaatggtgaactccacccatcgagattctgcgaaaaggatttgctcaaagccgtggaccgcgagtacgtgtttgcttacatagatgatccatgcagtgctacttatcccttaatgcaaaagctaagacaagtccttgtcgaacacgcattcgccaatggtgacaatgaaaaggat

SEQ ID NO: 217290 - DNA, 431 bp, Gossypium hirsutum
taaatgctgctgaacttgcaagctacgatcaagtaaagcagacgattttgaaaatccctggattcactgataatgttgtcactcatctcctttctggtcttggagctggattttttgccgtctgtattggttctccagttgatgtggttaagtcaagaatgatgggagattcagcttacaagagcacgctcgattgttttatcaaaactttgaaaaatgatggacctatggctttttacaagggttttatcccgaatttcggacggctaggatcatggaatgtgatcatgtttcttaccttagaacaggcaaagaaaattgtgagagatctagagtcatcttaaggagcttaaaaagaaccaaaatcccacaaagcaaggaattgaaggtgggactgccattgaaattgaagatttacagagaataaattt

SEQ ID NO: 217291 - DNA, 346 bp, Gossypium hirsutum
ccacaaagatggcgaaagctgatctgatggttatttctttgttgttactagtaacactgtgtttcacggcggttgacggttacggaaggatggtgggagggagaacggagataaccgacgtgaagaccaacgaggaggtacaagagctggggaggttcgcggtggaagaatataaccggagccacggcctggggcggtggcggggatttgtaagtagtagtaacggaagacgggcggagttggttttttcccgggttttagaggcgcaaaaacaggtggtttcggggataaagtactatctcaagatcgaagcaatggagaataaagctagcaagacgtttgaatc

SEQ ID NO: 217292 - DNA, 378 bp, Gossypium hirsutum
  unsure (1)..(378): unsure at all n locations
cccacgcgtccggagaactgtgcgggtccatcgtgtggtaacccatacaaatatcgagattcgaagtcgaagctacctctttgtagtctgcagtgctacaaggcaattcaaaaacagcagatggctgaaactacctgctagtgttgctgaaaatccagcacttccctcttgtgcatgtggtaaattctgcacatttatgttccatttcaacccagggacggattaaaaaatagagccaaatgcaaatttctttttggagtaatattaatgtaattattacaggtacaagaaaatcttagttgtgcttattttagtataatccataaataaaagatttcctctccattccaatccnnnnnaaaaaaannnaaanaaaaa

SEQ ID NO: 217293 - DNA, 360 bp, Gossypium hirsutum
cccacgcgtccgccaaacctgacctaatcatgggactcagggctcacactgatgctggtggaatcatcttactcttccaagatgacaaggtcagcggccttcagcttctcaaggatggtcagtggattgatgttcctcctatgaaacactctattgtcatcaaccttggtgaccaacttgaggtaatcacaaatggtaaatataagagtgtgatgcaccgtgtgattgctcaaacagatgggaccagaatgtccattgcttccttctacaacccgggcagtgatgctgttatatatccagcaccagctttgctagagaaagaagctgacatatctcaagtgtaccccaaatttgtgtttg

SEQ ID NO: 217294 - DNA, 424 bp, Gossypium hirsutum
  unsure (1)..(424): unsure at all n locations
catcagctgcttcggatgtgccatcgaaattatctatcttatattatacattgtatacgcacccatgagggataaggtttttacagtgaaatggataatcttattcaacctaggagggtattgtttgataatggtggccaccaatttgtttagagaaaggtctaaacgtgtgacagtgatgggatgggtttgtgctgttaacagtgttgcagtctctgcttctcctttaggcataatgagacgtgtgataaggacaaaaagtgtagaatacatgccatttcttctctccttttttcttacattatgttccacaatgtggttcttctatggacttttcttacaagatttatacgtggcttttccaaatgtgttgggatttctgcttggaacagctcanantatcatctatgtgatatacaagaat

SEQ ID NO: 217295 - DNA, 300 bp, Gossypium hirsutum
ggtatggggaagaaagcaggtggaggaatgtgctgataatggtgtgcttcatcttggtttacaggttcgtttcttatgtcattcttagatgtagatgctcacagaggggtctgagggcatcactttcatgacctctaattaattctctctcactcacgtgaatgtcgacaacatggttcacatgattttggaactacataagatagaaacgccaaaaggacaaaaacaaaaatgtttgtattgtaatttgtaatagaatattattataaggaaaataaatgtattaatctgcctgcaaat

SEQ ID NO: 217296 - DNA, 234 bp, Gossypium hirsutum
tttccccctcatttttcatctgagacagtcggattgttgttatgcctttatttgcattttgtgatgatcattaatttagttgggaacttatggctatattgtaactaaaaaactggctggttggatatataatacctttggattaaaaaaaaaaaaaaaaaaaaaaaaaaaaaaaaaaaaaaaaaaaaaaaaaaaaaaaaaaaaaaaaaaaaagcaaacggggggacggcccaa

SEQ ID NO: 217297 - DNA, 206 bp, Gossypium hirsutum
gagacaagtgtgggctctcagataatactgctgtgtcgttcccaacgagcaaggcactcgcggatgaaaggggcctacctgatctcgggacgtgtgccgaccattcaaactctgtggcacaggctctaatggacatggcttgttacatctcagactgaatggcgagccttccaaccatgaacaatgcaatgactgcaacggtaccc

SEQ ID NO: 217298 - DNA, 407 bp, Gossypium hirsutum
gactaatacttccaatggtgttagaatcaaaacttggccaggtgctgaacctggcacttgttcgaacattcactttgaggatattaccgtgaccaatgtcagttctcctattataattgatcagaaatattgcccatggaacaaatgcaaaataaatgaagaatcgaaagttaaactaagcaacattagtttcaaaaacattcacggcacttctgcgcgtccagaagctgtcaagattatttgtagtgctactttgccttgtgaaaatgtagaacttgcagacattgaaattacgcatagtggaccgactggacctgcagtatcacaatgttcgaatgtgaagcctaaagttagtggcaaacaaaatccagctgcatgttctgcccctatcccagcaaaacctaccc

SEQ ID NO: 217299 - DNA, 361 bp, Gossypium hirsutum
atcacgcttccgtccaaatcaacgtgggacacttggatgagcttggcagatacactggcacattctccacttttgctctttgtggatttgtccgtgcccagggtgatgctgacagtgctctcgacaggctttggcagaagaagaaagctgaagtccgacagcagtagttggatacctttttaccctagtctatctccgagcttgggaatgaaaaatctcatggcagtgactattatgttctaggtcttttcaggttaaactatgtcaaatttatatttttgttgattggatgacatttcagacttggttttcttatatttgaacctaatatatatgccttcggtcatgttaatcgacattt

SEQ ID NO: 217300 - DNA, 413 bp, Gossypium hirsutum
  unsure (1)..(413): unsure at all n locations
cttcgattcaagaggagatgtcaaagtaattcttgcaacaaataggattgaaagtcttgatccagctttgcttcgccctggtcgaattgataggaaaattgaatttcccctacctgacatcaaaacaagaaggcgcattttccagatacatacatcaaggatgactttggctgatgatgtgaacttggaagaatttgttatgacaaaagatgagttctccggagctgatataaaggcaatatgtactgaggctggcttgcttgctttaagggagaggcgcatgaaggtgacgcatgcggactttaagaaggccaaggaaaaggtgatgttcaaaaagaaagaaggcgtcccagaagggacttatatgtagtagaatntcaagagatcccatgtattccttaaattctggtttt

SEQ ID NO: 217301 - DNA, 438 bp, Gossypium hirsutum
  unsure (1)..(438): unsure at all n locations
ataacaacagcaaagtcaagtgagataaatgtgttagtgcctactggacctgatggtgactggggggagcattcattgccgcaacagtatatccatgtatttaaggatggtcaatttgaaactaccccagtgtcgcactcaggagcataagtgagatctatttgaattgaaaactcagctttcctttggggggaaaaagaattatattctttcattttcttggatacatacctatgggtgaattttacttcttccgtacggctgtttatttattttaacacacatatcatttggtcatcatctgtattatttcacaactacagtttgaatctcttccataacctgttttttggttggtgtgtttttgtttttggcgatgatgagttgggaaattttgcaaatattactgntaaatttctaaatgtctacttttctttg

SEQ ID NO: 217302 - DNA, 410 bp, Gossypium hirsutum
cccacgcgtccggcggccctttttttcctctaccaggtgattttagctttgtgtgagttcctttaagcaattagccaagatgcagaacgaagagggtcaaaacatggatctttacatccccaggaagtgttccgccactaacaggctcatcacctctaaggatcacgcttccgtccaaatcaacgtgggacacttggatgagcttggcagatacactggcacattctccacttttgctctttgtggatttgtccgtgcccagggtgatgctgacagtgctctcgacaggctttggcagaagaagaaagctgaagtccgacagcagtagttggatacctttttaccctagtctatctccgagcttgggaatgaaaaatctcatggcagtgactattatgttctaggtcttt

SEQ ID NO: 217303 - DNA, 397 bp, Gossypium hirsutum
gcctcacaatgtcatgatagatcatgagctgcgcaaacttcgcttgatagattggggacttgctgaattttaccatcctggcaaagagtataatgtccgtgtggcttctaggtactttaaagggcctgagcttctggtagatttacaagactatgactattccttggacatgtggagccttggttgcatgtttgctggaatgatattccggaaggaaccattcttctatggccatgacaaccatgatcaattagttaaaattgccaaggtgctaggtactgatgagttaaatgcttatctcaacaaataccatttggagcttgatcctcaacttgatgctcaagttggaaggcacagccgcaaaccctggtcccaaattattaatgcagataatcag

SEQ ID NO: 217304 - DNA, 386 bp, Gossypium hirsutum
cccacgcgtccgcccacgcgtccgcccacgcgtccgggcactctgcgctgaccataatgtgaaggtgctacgtgcacctagtgcaaaagctcttggcgagtgggctggtttgtgtaagatagattctgaagggaaagcacggaaagtagttggttgctcttgcgtagttgtgaaggattacggtgaacaacacgagggtgtcgaagttgttcagcagcacaaggattaagtaaagaggatggtttctttggtagaatcagagtttaattttggccattcatgatatttgcttaagtaattttgttttttcaaaggcagaacttcttggtgtttcttatgtatgctacctttctcattttaaattacttgcaaaccattttggaaat

SEQ ID NO: 217305 - DNA, 410 bp, Gossypium hirsutum
gtaactgtgaaaccccagctccagcaccaagatttgtggaagaggttgcttacccaacttgagattttctcagttgttgtaacctatgcaggaaaaagctgcatggccaagacatttacatgtacagaggggaaaaagcgttttgcagttcagagtgtaggtcaacgcaaataatgatggatgagaggaaagaacagtgcagatcagaagtttcaagatctgcaaaagtctcaacctcctcttatgagtctggggatatcttcttctcaactgggattcttgcaatttagcctccggtcctcatttgggctcttcctgcgtatgtaattatatctatcggagaaataccatatacctttatgaggattaagaataacttattaagaatataaaaaaagaaatttggtcgt

SEQ ID NO: 217306 - DNA, 383 bp, Gossypium hirsutum
gtcaagtgttgtaaaaccgatacctacggtcgctgaatttacagcccagctgcagatccttgaattacttgagaatgctatttttacagctggctataaggctgtcttgcacattcattctgttgttgaggaatgcgagatagttgagctactacagcaaattgatccaaagacaaagaaacccatgaaaaagaaagttctttttgtgaagaatggtgctgttgttgtttgtcgtattcaggtcaatagcctgatttgcgttgagaagttctcagattttcctcaacttgggaggttcactcttcgcactgaagggaaaaccattgcagtgggaaaagtcactgatcttccttcacgcagtagtgcttaaaaaaatttgttct

SEQ ID NO: 217307 - DNA, 289 bp, Gossypium hirsutum
  unsure (1)..(289): unsure at all n locations
actaccagccaccaactgttgttccgggtggagaccttgccgaggttcagagggcagtatgcatgatctctaactctaccagtgttgcggaagtgttttctcgcattgaccacaaattcgatctcatgtatgccaaacgtgccttcgtgcactggtatgttggtgaaagcatggaggaaggagagttctcagaggctcgtgaggaccttgctgccctggaaaaagattatgaggaagttggagctgactctgctgaangagatgaagaggatgagggagatgagtactg

SEQ ID NO: 217308 - DNA, 391 bp, Gossypium hirsutum
  unsure (1)..(391): unsure at all n locations
acnncatctttgccctttcattggcttccttgtcctgccttaaancctccttcaagcattagccatgactacctgaaatggtaatgtgttgatgnaagtcccttttcctccacaaatcacaactaccaagccactatctcttttgggtcatggaattaccgacattgagattcactttttgcaaatcaagttcacagcaattggggtttaccttgaaccagaagttgtaggacatttgcaacaatggaaggggaagcctgggaacgtgctagctgaagatgatgacttcttcgaggctcttattaatgctccagtggagaagtttctgagagttgtggtgattaaggagatcaaaggttcccaatatggagtgcagctagagagtgctgtg

SEQ ID NO: 217309 - DNA, 385 bp, Gossypium hirsutum
gcctcacaatgtcatgatagatcatgagctgcgcaaacttcgcttgatagattggggacttgctgaattttaccatcctggcaaagagtataatgtccgtgtggcttctaggtactttaaagggcctgagcttctggtagatttacaagactatgactattccttggacatgtggagccttggttgcatgtttgctggaatgatattccggaaggaaccattcttctatggccatgacaaccatgatcaattagttaaaattgccaaggtgctaggtactgatgagttaaatgcttatctcaacaaataccatttggagcttgatcctcaacttgatgctcaaagtggaagcacagccgcaaaccctggtccaaatttattaatg

SEQ ID NO: 217310 - DNA, 366 bp, Gossypium hirsutum
gtcacaatacaccaaagagtgaatccaggttgtttaaggttttgcttggtgccgagaatggtgatcgggttcgagctctggctgcttgtcatatggatacgtctcgatgggacgtcgatcatgtgtcgttccaattgctgaaaatcaagcccggctcttcccctgtgtgccatgttttcccaccggataatcttgtatgggtggctttgcctgcttgaatatatggagaaaaattcagtagatatcatatttcatgtgatgttatttgtaatgttattgtatgatatgaatgttaatatataacaccatgtccgagtcggctcagtgatttagaaccacgccataaatggaataaacgagttcaat

SEQ ID NO: 217311 - DNA, 383 bp, Gossypium hirsutum
  unsure (1)..(383): unsure at all n locations
cgggaaatgtatacaaagcgatatttttacggttggaggctacgattgggcgatttatttttaccccgagggtaaaaatccggaggatagtgcgatgtatgtttcggttttcattgccttggctagcgaaggtacggatgttcgagcgcttttcgagctcacccttgttgaccagagcgggaaagggaagcataaggttcatagtcactttgacagagcgttggagagtgggccttatacgttgaagtacagaagaagcatgtggggctacaaacgattctttagaagaacaactntagaaaagtctgactacattaaggatgattgcctaatcatgaactgcacttgttgagtagtcagaactcgccttgagggaccaaaac

SEQ ID NO: 217312 - DNA, 341 bp, Gossypium hirsutum
cgtccggctgaaaccgataagatcacactagaaactgctaaacttttaagggaagattatcttgcgcagaatgcttttactccatatgacaagttctgtccattctacaagtctgtttggatgatgcgcaatattgttcatttcaatgctttggccaaccaggcagtggagaaagctgccgggatggacggtcagaagataacatacagtcttatcaagcatcgtctaggagatctcttttatcgtttagtgtcccaaaaatttgaagacccagcggaaggagaagaagccctggtggcaaaattcaaaaagcttaacgaggatcttacagctggtttccg

SEQ ID NO: 217313 - DNA, 431 bp, Gossypium hirsutum
cccacgcgtccggtttgagaccaaactcagcgaacccatcgctggagcagtagtgaaacgggaatgcaggaatcgtacagacaatcaccttaccttccagagccaagaaatagtgactgacgaacgtggagactatcacattgtagtggaaggcgattatgaggaatcagactgcgacgtcgccttggtgaggagtcccaacccggattgcaatgatccctccgaaatgtggaggatatccagggtggttctcaccacacttgacggcgtcagcggtgaacttcggtttgccaacaatcttgggtttaagaagaaggttgctcttcctcagtgtactcaagttcttcaagagataggctattatgagcttagccaagaagctggagacattgccccttggtcagaactataatatgtattttcacttcaac

SEQ ID NO: 217314 - DNA, 405 bp, Gossypium hirsutum
agcttgtattggtgaattactagaagaaagagaagcaggcaaaactttcgatgtatgttggcagcaactgaaggcttttgctgatgttgtacccagttgggacaatatagttattgcttatgaacctgtatgggccatcgggaccggcaaagttgctacaccccaacaagctcaggaagtgcatgtagctgtccgtgattggcttaaaaagaatgtgtccgaagaagttgcatctaaaacacgtatcatatatggagggtctgttaatggaagcaactgtgctgagcttgcaaaagaaggaaatattgacgggtttctcgtaggtggcgcttccttgaaggggccggagtttgctacaattgtcaactccgtaacatccaaaaaggtggctggctaaatatatat

SEQ ID NO: 217315 - DNA, 172 bp, Gossypium hirsutum
ggggtgtttcctgtactcggctacccattaatggttaactcaacagtctaccgatttgcatggctaggatgccttggcttcaacttcttgtgtttttgtgcaaagagattccatgtctggttcaccaacctccacaactccattagggacgacagataccttattggtcggc

SEQ ID NO: 217316 - DNA, 389 bp, Gossypium hirsutum
cccacgcgtccggccaattcacatctagaaatctggatttttacatgttattcttcattgtgatttatgtttgaaaattttcgagaacaacgaagataccaccaaggagaacgagaacaatggtgataacagcagaaggtttgagtgccattattgttgcagaaacttccccacctcccaagctttaggtggtcaccaaaacgctcacaaaagggaacgccaacatgcgaaacgagctcatcttcagtcagcaatggtgcacacctctttatctgatgctcatatttatggacttgttaactacaggctaggctcagctccaacaccaccaatcacttacccttcatggaactctagctttacccgtagtaccagtaggttttatggga

SEQ ID NO: 217317 - DNA, 342 bp, Gossypium hirsutum
ggaaggtaaaggtgttatcgatcataatttcttgggtggactctgctctttgataaagggggtttccgaagttctctctgattcaaaggaatcctcaatcaaagattgtgtggaatctgagaagccaggcatttgtaccgataatggaaattgccaatagagttaaaatggaaggacaccgtttccagagttcttagtttgttttttgctctgttttgagtgtcggttcttttccccgggaaaatcgtgattcctttctttgcggtttagagattgatatatatgtctcaataaaaaaattcagagatgaagatcactctctgtctaacctgataaaacctt

SEQ ID NO: 217318 - DNA, 403 bp, Gossypium hirsutum
tagtaattgaaccaaagaaaagacatgggagtttcaggcactttggagtatttgtctgatgtagtgagcagtagtggtcataatcacaagaagagaaaacaattgcagacagtagagctgaaggtgaggatggactgtgatggttgtgaactcaaggtcaagaaagccctctcttcattgaatggtatatacatatatttcttccttttgatctcctttctttttggggggtgggggtggaggactgaaatgtaatgtttttttttttgcaggagtgaaatcggtgaacataaacaggaaacagcagaaggtgactgtaacgggatatgttgaagctaacaaagtgttgaagaaagctaagtcaacagggaaaaaggctgagatttggccttatgttccttac

SEQ ID NO: 217319 - DNA, 409 bp, Gossypium hirsutum
tgctccccaatggtacgatgctggaaaattcgaatacttcgcatcctcctcccccctaggggtgatcgagttcatattgttccactacgtcgagatcagacggtggcaagacatcaagaacccaggatgtgtgaaccaagatcccatcttcaagcaatacagcctgcccccacacgagtgcggataccctggtggcattttcaaccccctcaactttgctcctacacttgaggccaaggaaaaggagcttgccaatgggagattggcaatgttggccttcttgggattcataattcaacacaatgtgactgggaaaggaccatttgacaacctgttgcagcacctctctgatccatggcacaacaccatcatcaacacaatcaggggttattaaattcaatttcccagt

SEQ ID NO: 217320 - DNA, 316 bp, Gossypium hirsutum
cgacccacgcgtccgaccaggtccaagcttcttttcaaacaacaaaaccccacatgtcttccttttcgggccggtgctttgcttcacaaccggcggtactgccggccacaagttcctctttcaagcccaaaacatgggttatggcagctcccacgaccgcgccagcgacttcggtggatgtcgactggggctcgggtcataactgtaaagaacgatttggcaaaactgcaactcacatctcctgtgtgcaccaacaagggagagaagattgcactaaatcgacacgtggagaaacactggcgtctaatatgatggg

SEQ ID NO: 217321 - DNA, 426 bp, Gossypium hirsutum
cccacgcgtccgcccacgcgtccggtgtgttttgcttttcatactcatttagccccttgggttagcatcaaaatcactccagttttctttatcactgaaaaatgtcttgctgtggtggaaactgtggctgcggtactggctgcaagtgtggcagtggctgtggaggatgcaagatgtatccagacctgaacgctgccgagatgaccacaactgagactctggttcttggtgtagcaccccagaaagcacactttgagggagctgagatggaattcggggctgagaacggctgcaagtgtggagacaactgcacctgcaacccttgcaattgtaaatgattagagaccaaagccaaagctccctggaagcagaggcgcctttgtctttaagaaataatatgttttggtggttatgtgtttttaagat

SEQ ID NO: 217322 - DNA, 276 bp, Gossypium hirsutum
ttaactgaagcttcatcctctttggaactttggcataaaaggttgcgtcatactttcgacaaactaataaacttacttccttatgttaataactctagagatcatttgaataaagcatgtgaaatttgtcatcgtgctaagcagactacaaatagtattccaattagtgaacaaaaagtcacttgtatttttgagttagttcattgcgatttatggagggttttatgacactccttcaacttgtggatttcattattttttggaccaaaacccaat

SEQ ID NO: 217323 - DNA, 429 bp, Gossypium hirsutum
  unsure (1)..(429): unsure at all n locations
atacaggcagaaagaacaattcagtgatggcgttggctatagttggatcgatgggctcggggctcatgctgttgcacatgtgaccgataagatgatgcttaatgcttcaaacatcttccctcacaacactccgaccacgaaagaagcatactattataggatgatcttcgaaaggttcttccctcagaactcagcacgattgaccgncccgggaggagcaagtgtagcatgcagcacggccaaagctgtcgaatgggatgccacttggaagaacaaccttgacccgtcgggcagagcagcacttggagtgcatctctcagcttacgacgcggagacacctttcgataacaagccgtccaagattgttgagtcaatacccgtgatgatggagattcctggagttgccatacatggttaagtgccatgaaa

SEQ ID NO: 217324 - DNA, 226 bp, Gossypium hirsutum
  unsure (1)..(226): unsure at all n locations
ctggtcaattaaactcagatctactcaagtttgccgtcaatctcattccattcccgcgcgtgcatttctttatggttggctttgctccccttacttctcgagggtcacagcaatacagggctcttactgttcccgagctcactcaacaaatgtgggatgccaaaaacatgatgtgtgctgctgatcctcgccatgggcgatactngactgcttcagccatgttttt

SEQ ID NO: 217325 - DNA, 366 bp, Gossypium hirsutum
  unsure (1)..(366): unsure at all n locations
ctgacgtacatgagagcaagatttgagaaggtggtcggatcaaaggactcggaagcattgtgcatgattaatccagatggtgcacctggcccagaactgagtattttctttgtaagagctcgttagaatttgtgttatttttacacatgagcaccataaaaaaaaaatcaatgatggaaacaaacagatcaccatggctggactatgtttaatgtccnnanggtggttcaagctagctcattgntatagcgatagaattgaatgccaatataatctcctgtttctgccttgagaataagattgaataccgacacaccaagttccctttgtctcaaacgggacaatgaacatataatataattcatt

SEQ ID NO: 217326 - DNA, 366 bp, Gossypium hirsutum
  unsure (1)..(366): unsure at all n locations
aatcaatcatgggtcattctaacgtctggtactctcaccccaaaacctacggccctggcgctcgcgcatgccgagtgtgtggaaaccctcatgccatcatcaggaagtacgggctcatgtgttgcagacagtgcttcctagcaatgccaaggaaattggattcattaagtaccgctgaggaatgtttatatggctagaagttggaaacactncntagctagtatgaacctttgtttcgaaattgtagcaacttttaagataacattgctgtttttttttaatgcagtttaaaagcttgaagttttgtttctgcaaaggataatttgttgttttctcaatgaagtaatcatactgtttttatcttaa

SEQ ID NO: 217327 - DNA, 369 bp, Gossypium hirsutum
aataaaaaaaaaaaaataaaaaacatattttactataacaaaaaaaacaaaaaaacctgggtgtaaaacaaacacaaatgtatgaaaaaccctcataccataatcaagaaatacaagactcatgtgttgcaaacagtgcttcctagcaatgccaaggaaattggattcattaagtaccgctgacgaatgtttatatggctagaagttggaaacactttttagctagtatgaacctttatttcgaaattgtagcaacttttaagataacattgctgtttttttttaatttaatttaaaagcttgaagttttgtttctgcaaaagataatttgtttgtttctcaatgaagtaatcatactgtttttatctt

SEQ ID NO: 217328 - DNA, 132 bp, Gossypium hirsutum
cccacgcgtccgcactaatgcaccggatcccatcagaactccgcagttaagcgtgcttgggcgagagttgtactaggatgggtgacctcctgggaagtcttcgtgttgcacccaaaaaatttatatctcatt

SEQ ID NO: 217329 - DNA, 318 bp, Gossypium hirsutum
cccacgcgttcgcttcaagtgaagctgatatgccctcaattccattaggggatccctcagtccagaatcctttgtatggttgcatgcaatactcttcaaagttgcagagcacaaggcaagtggacccaccaacttcatctcgaacatttatcaaggtttataaatcaaggtcggtggggcgctcattggacatctcccggttcaacagctatcatgagctgcgagaagagctggctcaaatgtttggaattgaggggaagttggaagaccctcttagatcaagctggcagcttgtatttgtcgacagggagaatgata

SEQ ID NO: 217330 - DNA, 367 bp, Gossypium hirsutum
cccacgcgtccgcccacgcgtccgcccacgcgtccgaaagaattaatcttgctaccgactctctcttttcttacatgatcaacgggctgaaagtagcctgttcctcctagggtaactaagtgcttgtgtgttttcttatcatgtaatatatgattagtgttggattggcattttattcaacttttatattttatttttactctattgataccaattaatatttctagtttacaaaaaaaaaaaaaaaaaaaaaaagggcgggtcgtccacgcgttccgccacgcgtacggtttattttttaatgttcttgaatgaattccatgttcttttaagggtttttggtggtggtcatttttggagtcacaaa

SEQ ID NO: 217331 - DNA, 370 bp, Gossypium hirsutum
atgctttcgcccaaattggcacatagatttggtgggtatttggaggaggaagccattcagtcgtatacagagtacttgaaggacattgaaagtggtgcaatagaaaatgttgcagcccctgccattgcaatagattattggagattgcctaaagatgctaggttgaaggaggttataactgtaattcgtgctgatgaagctcaccatagggacgtaaaccatttcgcttctgatattcattttgcgggaaaggaattgaaagacgcgcctgctactgttggttatcattaagacttcatgttgtggatcgtgaagattctttaaaagggtccgtgcttgatgcaaaccttgattatatttatctatggtt

SEQ ID NO: 217332 - DNA, 194 bp, Gossypium hirsutum
gttttatttttgaaacccgataacacaatttaatagcttagctattagaaatactgggaaacgcaatcaattggtttgctttaccacttaaagaagtacataaactctttcaggtcgcgaactgataccacctcacaaacccgaattcattcctgtttaccaacatcattttttttacagcattactcatttcg

SEQ ID NO: 217333 - DNA, 393 bp, Gossypium hirsutum
  unsure (1)..(393): unsure at all n locations
accggggcggaccgacgcgtccgcccacgcgtccgcccacgcgtccgcccacgcgttcgaaagaattaatcttgctaccgactctgtcttttcttacatgatcaacgggctgaaagtagcctgttcctcctagggtaactaagtgcttgtgtgttttcttatcatgtaatatatgattagtgttggattggcattttattcaacttttatattttatttttactctattgataccaattaatatttctagtttacaaaaaaaaaaaaaaaaaaaaaaagggcggnncgcccacgcgttcgcccacgcgtncggtttattttttaatgttcttgaatgaattccatgttcttttaaggttttttggtgttgttcatttttggagtcacaaaaat

SEQ ID NO: 217334 - DNA, 357 bp, Gossypium hirsutum
  unsure (1)..(357): unsure at all n locations
cgnccggccttttaattncttaagtgccaccaattttttggtgggggtcatgtgggaaagcacacaagcatcgaaagcctaagggaaagtcccctaaaaggcccatcactttgcctccccttgtgaaacctccaatcaagttgccaccggttgttccttcaatagttaagccacccattgaccttccttcggttaccggcccttcaattaaccttcccccagggacggttccttcagtaactaagccaccaagtgggaaaccctgcccaacaccaccaaccaaggacacttgccccattgacacactgaaattgggtgcttgtgtggatctgctgggagggttggtgcacattggac

SEQ ID NO: 217335 - DNA, 267 bp, Gossypium hirsutum
gttgagagatacatgaacaaggaacttgaacttgataagttcatcactcactctgttcccttctctgagattaacaaggcatttgagtacatgcttgctggcgagggcctgaggtgcgtgattcgcatggatgcataaggattggctggccatggatgaagggctttttgttaagtatatgtgcattttaagggaataaataatgtaatataatgctacatcgttgtgctgtttttaatggtaaatttttatcttatcatgcatttc

SEQ ID NO: 217336 - DNA, 357 bp, Gossypium hirsutum
gagcagatcggatggcaccaaagaaagataaggccgctccaccttcttccaagccagcaaagtctggtggtggcaagcaaaagaagaagaagtggagcaagggaaagcaaaaggagaaggtgaacaacatggtgttgtttgaccaggctacttatgataagcttttatctgaggctcctaaatataagctcatcactccctcaattttgtctgatcgtatgaagattaatggatcccttgctaggaaagctataagggaattgatggcaagaggatcgattcgtttggtgtctgcccattcaagccaacagatttacactagggcaaccaacacctagatgttttggtatagttttg

SEQ ID NO: 217337 - DNA, 342 bp, Gossypium hirsutum
  unsure (1)..(342): unsure at all n locations
actaatttataattaacttttangaatgttcttgatcccatcgcaccaaagaaagataagccgccattttttaatggcaagccagcaaattaataatagtggcaagcaaaataagaagaagtggatcacgggaaagcaaaaggagaacgtcaacaacatggtgttgtttgaccaggctacttatgataagcttttatctgaagctcctaaatataagctcattactccctcaattctatctgatcatatgaaaattaacgcatcccttactaggaaatctataacggaatttattgcaataagatccattcgattggattcttcccatacaaaccaacaaaa

SEQ ID NO: 217338 - DNA, 390 bp, Gossypium hirsutum
ccgccaacccttccgttaatacgaaaccgaccaaaacccaactctgatttactcctaattggtactggccgggtattttccatcactttcctgggaaaaaaaagcataaaaggaaaaagtttcaggagaaatgtactcagctattcggtcgttaccgttgaatggaagtgtaggagattatcaagggtcgtttgatggaaccaacttgcctagcgatgcttgtttggttttaacaacggatcccaagcctcgactccgttggacagctgagctccatgaacgtttcgtcgatgctgttactcaacttggtggccctgacaaagcaaccccaaagactattatgagaacaatgggagtaaaaggccttaccctctatcacttaaaatcaca

SEQ ID NO: 217339 - DNA, 359 bp, Gossypium hirsutum
cccacgcgtccgcccacgcgtccgagcctttggaggccacatgagacggcacagggcggcggcaagcaatcaagctgctgtgagtgttgatactactagcattccaattgagtcaggcaatggtgatggaaccaagcctagaaatatcctagctctggatcttaatcttcctgcaccagaagatgatctcagggatgccaagttccaattcggagcaccccaacaagctattgttttcaccacaccagctttgatagattgccattactaaacccaaaaagaagaaaaatcatgtatcaatgtgaatcatatataatttgtattggttcaattcaatattattatttacaattattaac

SEQ ID NO: 217340 - DNA, 383 bp, Gossypium hirsutum
attgattcagattgggcaattaataatgggaattggctctggctatcatgctcatcattcttttaccagtacaaccgcatatactcaccaatatcatttggaaggaaatatgatccgaatggtaattatattaggcattttctccccatactaaaagacatgccaaaggaatatatatatgagccgtggacagctccactaagcgtgcaaactaaagcaaagtgcattattggaagagattatcccaaaccagtggttttgcatgatactgcaagcaatgaatgcagaaagaaaatggggcaagcttatgcacttaaccagagactcaatggacgtgtaagtgaagaatatttaaggaagttgagaagaaaatttgatgagga

SEQ ID NO: 217341 - DNA, 122 bp, Gossypium hirsutum
tttagcttcattctacaaccccgggggggacgctgttatttattcggcgcccgcgtttgtggagaaagaagctttgggaaaaaacaaacagggttaccccaaatttgtggttggagagggca

SEQ ID NO: 217342 - DNA, 350 bp, Gossypium hirsutum
cttccgcggaaggttgggggacttttcgttgattggttcagggacttatgctggggacttagtggctgtttcatgtaccggtgaacgtgaagccattatacgaagcactttggctagggaagtagccggcggtgatggaatataaagggttgaatcttcatgaagcggtggattatgtgattaaaactagactagatgaaggcaaagctggtcttattgccgtgtcaaagaatggggaagtggcttgtgggtttaatactactggtatgtttaggggttgtgctactgaagatgggtttatggaagttggtgtctggtaaatttgtgtttggtttagatgctgggttcat

SEQ ID NO: 217343 - DNA, 436 bp, Gossypium hirsutum
cagagaatgacatgatcaaaccagcgacctaaggagtggtgaacgttttgaaagcttgtgccaaagcaaaaacagttaaacgtgtcgtcttgacatcatctgccgcagctgtgtctatcaacacactgaatgggacagatctggtcatgacagagaaagactggaccgatatcgagttcttatcatcagcaaagccaccaacttgggggtaccctgcatccaagacgttggctgaaaaggcagcttggaaatttgctgaagaaaacaacattgatctcattacagttatcccttctctcatgactggtccttccctcaccccaattgtccccagcagcataagccttgctacatctttgatttcagccaatgaattcctcataaatgctttgaaagggatgcaaatgctgtcaggttcgatctctatcacacatgt

SEQ ID NO: 217344 - DNA, 327 bp, Gossypium hirsutum
gacgggcggaccgacgcgtccgaaggaactaaggacttcccgcagtgtggtggttcaaataccgtagtgcaaattttgaatgcttggaacgttccttttgaaaccataaacatattagagaacgaaatgctacgtatgggtctgaaggagtattccaattggcctacctttcctcaactttatatcgaaggagagttttttggtggctgcgatatcactgttgaagcatataaaaatggggaattgcaggaactattggagaaggcgatgtgctcttaaatacttatctgcattgaaaaacaaatgtagttgtacttgttcggaatt

SEQ ID NO: 217345 - DNA, 288 bp, Gossypium hirsutum
  unsure (1)..(288): unsure at all n locations
cccacgcgtccgcttgatgacacattccttgcaccagaaagtgaagagtgtgtcaggaaggtgaatcaggttgctgacaaatattgggatctctattcaagtgagtcacttgagcgagacttgcctggacacctactccgctaccccatcggtgtttctagtgatggatctgtcactgaattgcctggcatcgagttcttccctgacacaaaagctcgtgttcttggtgccaaatctgattatctgccacctatcctcactacttnagggatctttactttgttctta

SEQ ID NO: 217346 - DNA, 271 bp, Gossypium hirsutum
  unsure (1)..(271): unsure at all n locations
agaagcagtgggaagagaaagaaaaggcatggatggagagagaggcagctatgcaagtaaagaaggagcagagagagaaagctgaagctcanaggaaggtagaaggaaagagatgttcaaaaagacacgacatggtcagcctgtaatgaaatacagaatccagcatcttttgcagtccatacagggttcgtctagtgcttccagttaatacaaattagtgatcttcattagtgcttatagtagctgagagtagagaacatgtgcaacagta

SEQ ID NO: 217347 - DNA, 296 bp, Gossypium hirsutum
cggacgcgtgggttcatattggatgagatgaggttgaaatcaaaggaagatggacttgcaaccacgggtgaagggctcgagtggggtgtcctgtttgggttcggaccaaggctcactgttgagaccgaggcgcttcatattatctatgcttaaacaaggatttaatgttcatgttggctagccctggctgcactacaaattgctttgcatttttatttattttattttcctttttattaatgaaatttgggattagtatggttatttgaaagagagtaaagctctgacatatggtg

SEQ ID NO: 217348 - DNA, 415 bp, Gossypium hirsutum
gcccattattcctcagtcctatgttacacatgcgcttagagtggaaggtcttcgaggtataataacagtgccagccaagctggaatcgacaaccctcgtctttgcacatggagttgacctatttttcacgcagcttgcaccttcaaggacatatgattcactcacggaagattttagttatgccttgctactcattacaatcgtggcactcgtagcagccatctttgtaacatggaggttgtccgagaggaaagaactgcaagagaaatggaggtaaagtttcttctcattacgtttgtgtattaacacatttgcttagatgacacacacccttaattatttatttgaattagattagaaggggtctccttatgacttgtaattcttccaagttttgtagcattcaatctttaat

SEQ ID NO: 217349 - DNA, 430 bp, Gossypium hirsutum
ctttttacttgctttctttccgtttcgaatatggatattaagaaacgattactccttccatttgtatgctattttctttcagtttcccagtttttccacgtctgccatggtgatgttgggactgctgcccagtacagccctccatatttacctacggcgtgctttggggaagatcaaacccagttcccatcaagcaatctgttcgcagcagcaggagatgggatatgggacaatggagcatcatgcggaaggcaatacctggtgagatgcataagtgcttcccagccagggacttgtgtccccgaccaaactatccaggtcaagatcgttgattatgctcctaccgctctctccccaccttccgctcaatccaccaccattgtcctttccgaaactgcttttggcggaattaccaatatacccatggact

SEQ ID NO: 217350 - DNA, 416 bp, Gossypium hirsutum
gttacaatggaggttatccagtggacatccctgtggaatttatacaaggatgaatttgagaatgagaagaacatgcttggaggttctttgggtgacaaagctgcagaagatttgagaatgagaattattgaacataatatccttgttgtttcaaagtactactcgaggattacattgaagagacttgcagagttgttgtgtctcactatccaggaagctgagaagcatctttctgaaatggttgtctccaaggcactggtggcaaagattgaccgaccaatgggaatagtctgcttccaggtagcaaaggatagcaatgaaattctcaattcgtgggcttcgaacttggaaaaacttcttgatcttgttgagaagagttgccaccaaatacacaaagaaaccatggttcacaaagc

SEQ ID NO: 217351 - DNA, 376 bp, Gossypium hirsutum
cccctaaatactcgaaggctaggtatgatgaaattgtgaaggaagtctcttcctacttgaagaaggttggatacaaccctgacaagattccatttgttcccatttctggttttgagggtgataacatgattgagaggtctaccaacttggactggtacaagggccctacacttcttgaggctcttgaccagatcaatgagcccaagaggccttcagacaagcctctccgtctaccacttcaagatgtgtacaagattggtggtattggaactgtcccggttggtcgtgttgaaactggtgtcttgaaacctggtatggttgtgacctttggtcctaccggtctgaccactgaagttaagtcttgtgaaatgcacca

SEQ ID NO: 217352 - DNA, 296 bp, Gossypium hirsutum
  unsure (1)..(296): unsure at all n locations
cgttttaaacattgnnngccttttatttctttctctgttccttgttgcttccggggcagcctctcggtttctgagtaatcgaagataaaaaaggatggggctgtcttttgctaagctgtttagtcgactgtttgccaagaaagagatgcgaattcttatggtgggtcttgatgctgctggtaagactaccattttgtacaagctcaagctcggtgagattgtcactaccattcccaccattggctttaatgtggagaccgtagaatataagaacattagcttcactgtttgggatg

SEQ ID NO: 217353 - DNA, 425 bp, Gossypium hirsutum
  unsure (1)..(425): unsure at all n locations
cccacgcgtccgcccacgcgtccgcccacgcgtccgcccacgcgtccgggttcatttgcttgatgattataaggaattgtggaacgtggggagcgagtggtacaacgagacgacgttgcttaacggcgggaaaccggtcgagttcgatggttacatgagagctgttgtggataccgaggtactttatcgagcgaaaactcgtgttgaaaccttttataatctgactaaagattgcaaagatggaattaatacatgttgaacaggttgtttaattgattcatattgctttgattatgttagaaaatgtaattggttgatgtattcttgtattggttttttttattacaatttatgtcattatcagntcatcatatgtttggtggttttttgtcataagtggtattcatatatagactttgaaaatg

SEQ ID NO: 217354 - DNA, 402 bp, Gossypium hirsutum
aacccatgtatttcaaaaatatatacttttacaatgttttaagaattccaaaaaaaaagggaaaaataaaaaaaaaaaaaaaaaaaaaaaaaaaaaaaaaaaaaaaaaaaaaaaaaaaaaaaaaaaaaaaaaaaaaaaaaaaaaaaaaaaaaaaaaaaaaaaaaaaaaaaaaaaaaaaagggggcggccctttaaaaggatcaaagttaacttccccttgcttccaacgtaaaaatttttttatagggccaccaaaataaaattaattgcccgcggtttaaaaacgtgggaactggaaaaaccctggcttaaccaaattaaatcgcttggaaaaaaatccccttttcccaagttggctaaaaaccaaaaaggcccgaaccaatcccctttccaaaaatttgc

SEQ ID NO: 217355 - DNA, 326 bp, Gossypium hirsutum
cccacgcgtccggccggagttttcactcataatatcgaaaccgccaacaccttgactcgggcattgcgagtcgggacagtatggattaactgctacgacatatttgatgctgcagtcccatttggcgggttcaagatgagtggtcaaggaagagagaaaggaatttatggcctttcaagttacttgcaagtcaaggcagttgtcactcctttgaagaacccagcatggttgtaatgtttggttgttttttttcttacaaattgccatgaatctgaacttgaactaaatatctgccagttttttaaaatttgaatgatcagcttatg

SEQ ID NO: 217356 - DNA, 395 bp, Gossypium hirsutum
gtacaccatcaaagctgtcgatgaccccttaacagcgaacaggactctattcatcaagggtcccaagaacacctactcatttaacgagctcatcgccctgtgggagaagttgattggcaaagcccttgagaaaacatatgttcctgaggaccaacttctcaaacagatccaagagtctccaatcccaatcaatattgtgttggccatcagtcactcaatctttgtcaatggtgactgcaccaacttcgagatcgatccatcattcggatacgaagcttctgagctctaccctgaagtgaaatacaccactgtggaagaaggcctcagtcattttgtttgagaaagctagaaatcaaatcagatcattgttattaaactgataccagtaataatgg

SEQ ID NO: 217357 - DNA, 413 bp, Gossypium hirsutum
  unsure (1)..(413): unsure at all n locations
cacaaaataagcggcagaatgcttggcagcagtttcagacaaccaaaggcaagactaaaaaggttggttttttctcggggcgtaagcgtgagagcattttcaaatcaccggatgatcctcaaggtaaggttggtgtgacagggagtggaaagggcttgacagatttccagaaaagagaaaagcacttgcatcttaagggaggtaacgttgagataagtgatgactaggcaggtagagttcctactatacttttagttgccttagctttgtttcgcactccattcaatagtttgacaagttcccaagtagggggtgttgtaaacatgtacttaccatcattcctctgcgccagtattttgtgcttgcaacttgttaattatacttgaatngntcttttttttcttccttttcta

SEQ ID NO: 217358 - DNA, 426 bp, Gossypium hirsutum
  unsure (1)..(426): unsure at all n locations
gtttgatttcttctaattagtgaatcatatggctagcactatggccctcaagcttgcatgtcgtgtggtcttgtgcttggttgtgggtgcacccctggctgaaggggccataagttgtggccaagtcatatcagccttggcaccctgcattccttacgtgagaaacaacggtgctggtggcgtgcctgcaccttgctgcaatgggatcagatctctcaacgcggctgcccaatcaactccagagcgccaatcagcttgcagctgcgtcaaagcattagctgccagcatttctggcatcaactatgaccttacgaacaaactcccaggcatgtgtggggtgcacagccctttcaagatcagccccagcactaactgcaaaagtgtcaagtgaagtangccatagaagctcgtcagcaaatgggaaag

SEQ ID NO: 217359 - DNA, 212 bp, Gossypium hirsutum
gctaaataaaacatcagacatcaggtttcatgctacattccatacaaaatactgctcccaggaaattgagttacttgaaaggcttgatcgtgttcgatgcaagatctgtaagactgtaattgccaggcgcagtgatatgttggtgatgtctactgatggtcctatgggtgcttatgttaactcatacggctatgtgcacgaggtaatgactt

SEQ ID NO: 217360 - DNA, 392 bp, Gossypium hirsutum
caacccggagaaccccatcatggaagagctgagaaagagagccgatgcagagaagaatgataaatctgtgaaggaccttgttctccttctcttcgagactgctctcctcacctctggcttcagccttgatgagcctaacacctttggcaacagaatccacaggatgctgaaactcggcttgagcattgatgaggatgcaggtgaaggtgaaggtgatgctgatatgcccccattggaggatgctgatgccgaaggcagcaagatggaggaagttgattaagcctaacatgtttttataagatcagtagatttatcttacttttgaagcatctgttagcttgttttacattttgtttggtgcttttgcttttgttatgttgttgttagttatt

SEQ ID NO: 217361 - DNA, 368 bp, Gossypium hirsutum
  unsure (1)..(368): unsure at all n locations
atctgaggctggcaagaaactctatactaggggtgattttgctgaatcaaaaatctccaatcttgatggttatctcttgaaaaaggttggactgtttccagatttgttggagcgaaaagttatgcgacattttgaggaaggggatcaagtttctgctttggtgacaggggaattctatacaaagaaggatctctttccgggatttggaaggccttttgtatttaatgcagaggttttgcttaaagtagggcgcacatcagaggcaaaagattctgcaagggtggctttgaaatcaccatggtggactttaggctgcacatatcangatgttgccagtattgcacagtgggaagatgagcaaatcgagt

SEQ ID NO: 217362 - DNA, 422 bp, Gossypium hirsutum
gggtttcttccatagccgcccctgaaattatatagaagagagagagaatgaaggttgttgctgcttatttgttggctgttttgggaggcaacacttccccttcagctgatgatcttaaggccattcttggctctgttggtgctgaagctgaagatgaaaggattcaacttcttttatctgaggtcaagggcaaagatataacagagcttattgcatccgggagggaaaagcttgcctccgttccatctggtggtggtggtgttgctgttgcaactgctgctcctggtgtcggtgccgctgcagctccagctgcagccgaggctaaaaaagaagagaaagtttgagagaaagaagaatccgatgatgatatgggattcagtctctttgattaaagagttggtattttgcagaaattctcttct

SEQ ID NO: 217363 - DNA, 425 bp, Gossypium hirsutum
  unsure (1)..(425): unsure at all n locations
tcggattcctttcgtctgggggtgccggaatttgggggaagcgctccggagaatccgagaaggggccgcgatgatccgaaccaaaggagaagcggggaccgggaatgttatcgaagctgttaggcatgtcagatccgtgatgggggatattagggcccttaggaacatggatgatgatgaggttttcagcttcgctaagaaaatccagtctccctacgatttggttatgcaaacgaagcagctggggaggttgccagtggttcagttcgccgccggaggagtggccacaccggcagatgcggcgttgatgatgcagttgggttgtgacggagtgtttgtcggatctggggttttcaagagtggtgacccggctaagcgtgcccgagctattgttcangccgtcactcactatagtgaccccaaca

SEQ ID NO: 217364 - DNA, 407 bp, Gossypium hirsutum
cccaatgtcacgaaacgagtgtatggaggcaaagttccagtgcttgacgatgaaaactacaatatgagggtattggtggatcattcagtagtggaaagctttggagaaggagggaggacggtgataacatcaagagtgtatccaacggaagccatatatggagcagcacggctgttcttgttcaacaatgcaagtggagtgaatgtgaaggccacactcaaaatttgggagatgaattctgcttttattcgtcctttcccctttgaagaaacattatttcaggaaatggttgcttccacatgattatcatttgggaagggtggatgcaatacatattactattagtattatgtttgcagtgcttaatttttttttattggttgggcattatccattcactttgtttt

SEQ ID NO: 217365 - DNA, 164 bp, Gossypium hirsutum
ctcgctcaatgagaaaatgggtcagattctataggatcaaacctatgggacttagggaatgatggaagggaataaaataaaaaaaaaaaagaaatcaaaaaaagaggggaaaaaaataataaaaataataaataagtaaataaaaatgaagtagaagaaccgaa

SEQ ID NO: 217366 - DNA, 351 bp, Gossypium hirsutum
caaaacctttattcgagggagctgattggaccaggtgagagacgagatggattttactgcttctggcaggttttgacggtcaaagcgattttggttgaagcttcatcctctttggaactttggcataaaaggttgggtcatcctttcgagaaagtagtaaagttacttccttatgttagtaactctagagatcatttgaataaagcatgtgaaatttgtcatcgtgctaagcagactagaaatagttttccaattagtgaacaaaaagtcacttgtatttttgagttagttcattgtgatttatggggggttttatgacactccttcaacttgtggatttcattatttttt

SEQ ID NO: 217367 - DNA, 293 bp, Gossypium hirsutum
ggtcaagaatgtgggaggaaaggtaaacttgccattgctgccgatatatttgcggtgacgccgtcgttcttggtggtggaagttaaaaaggaccatggcgacacattcgagtacaatcagttttgcagtaaagagctccggccggcgcttaaagacatcctatggacgtcgccgcccgagaactcgactgtggcttgatttatgtgaagtgggaagtcattgtttgatgatgaaggttattgttgttattgcgaaagtgtgattatgtgattgttttagatgggaaatgaaac

SEQ ID NO: 217368 - DNA, 443 bp, Gossypium hirsutum
ctctctctctgtcaataagtcttgccaacaataagttctataataaagttccaaatggatcgttcctctcattcagtctcagttgctttctttcttctgctgattcttttaaccacagagatggggcctatgtcagcggaggctaaaacatgcgagactaaaagcggtaaattcaaggggatgtgcatgagttctaccaactgtgctagtgtttgcaaatcagagcctggttttgatggtggacattgccgaggttttcgtcgtcagtgcgtttgcactaagccttgttaaaccactaagctttgttagatcagtaatctattatatttcattgtcacgaagatttcccctttttttttgcttatcatgcattttgtgcttgagagttgagagaaataacacatctccaacatatattgtataccagtaattttgttattata

SEQ ID NO: 217369 - DNA, 402 bp, Gossypium hirsutum
gggaaacttcgacaattacgaggaatacatgtatttgttagcaatcgcaattctatcgactttgtacacgggaatacaagcgttgatacacgtgaatgcactttggaacgtgaagcagatattgaatcaacgtatctctgccatggtggactttgttggtgatcaggtgatgtcgtacttgttgatatcgtcagtatctgcagcaattccattgacaaacaggatgagagaaggacaagacaacgctttcactgattcctcagcttcggctattagcatgtctttctttgccttcctaacactggcaatatctgctggtgtttctggctataaattgtctactcaatcgtacatataatttttctttaaaaaagaaaaaaaaaaaaaaatatttaaggatgt

SEQ ID NO: 217370 - DNA, 394 bp, Gossypium hirsutum
gttccaggacagttgatttgggaggtagtgaagaagaacaattgttttttggtgaagcggttcggaagaggaactgctgcccttcagttcagcaaagagcccaacaatctctacaatctcaactcctacaaatactctgggttggcaaacaagaaaacagtcaccattcagagtgggggaaaagaccagtctgtgctactagctaccaccaagactaagaagcagaacaagccatcgaccttgcttcacaaatcttccatgaaaaaggagtttcccaggatggccaaggctgtcaaaaaccaggtgacagacaactactacaggccagacttaaccaaagcggcccttgcaaggctgagtgctgtgcataggagtctgaaagtgccaagtctgg

SEQ ID NO: 217371 - DNA, 399 bp, Gossypium hirsutum
  unsure (1)..(399): unsure at all n locations
tgttaggacaaaaaaggattgcatcccattatgtggacaaaggtgcaaattacactcaaggactaacctatgcttgagagcttgcatgacatgctgtgacagatgcaaatgtgtcccaccagggacatatggcaacagggaaatgtgtggcaaatgttatactgatatgagaacccaccgcaacaagcacaaatgtccttgaaaagcccaaccaaagcccccaaaaaacgacacttcttgagtatgtgtttttcatatttgtaatagcaaaaaagcttgcagtaataagttctgtaagaagagaggaaatggatggatttcttgtagtgtcttcgtttgtaatcctagaagctatgaacttgtcaaatagttntaattaacatataatngangattaat

SEQ ID NO: 217372 - DNA, 402 bp, Gossypium hirsutum
gatcaagtgcttgaccaccccagagcaatatttcgagaaggttctacgtcaagccatcaataagttgggatccgatgaatgggctcttacccgagtcgtcacaactcgtgcagaggtcgacatggtacgtattaaggaggcatatcaacgaagaaacagcatccctctcgaacaagcaattgctaaagatacttcgggtgactatgagaagtttcttcttgccttgatcggagctggagatgcatgaaccgtcttcggtattaagttcctctgtatgaatgtctagtttgccttatccgctatgacttaataatttatgcttggtttttcatcgttttcattatctaaagcattgcttgcttccatgatagaacattcaaaataaaatgattgagttcgttt

SEQ ID NO: 217373 - DNA, 327 bp, Gossypium hirsutum
cggacgcgtgggcggacgcgtgggccaagatcgacttaacttgatcaataagttcgctcgttgctcactactaagatggccaatatgtttgaagagatacaaatgacaaagatgacagtaaatgaaacccaattgtacattaacattgctccccaaataataatatatatttgttataactaatgtatattttatacatttggtttaaaaaaaaaaaattgcataaaacaaaactagaaaaacaatgaaccggcttcggtattaagtccctctgtacgaacgtctagttggcctgatgcgatatgacttaataatgaatgcttggat

SEQ ID NO: 217374 - DNA, 340 bp, Gossypium hirsutum
  unsure (1)..(340): unsure at all n locations
cccacgcgtccggtggaaatgtgtcgtggagttcaacatcccatacgtggactctttttaaggagttaccttgctcaaataagccgagataagttaccagatattggttccgagtatgagggtgatgctgacactgtgatggatgctgtggactttgtgctacagaatttcaccgagatgaataaactttgggtgagaatgcagcatcaggtgtcatggtgcttgtgaataattcatactctttggtcatcctgagttgaagccttcaattgcgatttctggtctgcagggacctggtagagttagagagaaccgagaaaatcgaatccgnaccananna

SEQ ID NO: 217375 - DNA, 417 bp, Gossypium hirsutum
  unsure (1)..(417): unsure at all n locations
cccacgcgtccgtttaagagacaacattcagggcattactaagcctgccattcgccgtttggctcgtcgaggaggtgtcaagaggatcagtggcttgatctatgaagaaaccaggggagtattgaagattttcttggagaatgtgattcgtgatgctgtgacttataccgagcacgccaggaggaagaccgttaccgctatggatgttgtttatgccttgaaaaggcagggcaggactctctatggttttggaggttaagtttaggatcattcttaagttcgtaactgtaatgcctttagatcttgactctagatctatatcgntatgtacttgtttgtgtactctgagtgatgttataatgatttgtaaccttaagattgatcgtataattttcatttgcaaagctttctttgngc

SEQ ID NO: 217376 - DNA, 362 bp, Gossypium hirsutum
ggcgggattacccgctgagtttaagcatatcaataagcggaggaaaagaaacttaccaggattcccctagtaacggcgagcgaaccgggaaaagcccagcttgagaatcggtcgccatcggcgtccgaattgtagtctggagaagcgtcctcagcgacggaccgggcccaagtcccctggaaaggggcgccggagagggtgagagccccgtcgtgcccggaccctgtcgcaccaagaggcgctgtctacgagtcgggttgtttgggaatgcagccctaatcgggcggtaaattccgtccaaggctaaatacgggcgagagaccgatagcgaacaagtaccctgagggactgtaaaaaggaca

SEQ ID NO: 217377 - DNA, 377 bp, Gossypium hirsutum
cccacgcgtccgaaaaaaggtggaggaattgctcaagaattatgaaaatgtatgtaccttgcgagttaggatgcctatttcatcggatttagccaatccccgaaacttcatcacaaaaatcactcggtatgataaagtggttaacattcctaactcgatgaccatcctcgatgagcttcttccgatttccatcgagatgggaaagaggaacttgactggaatttggaactttacaaacccgggagtggtcagtcacaatgagatattagaaatgtaccgtgactacattgaccctaacttcacctggaagaacttcaatctcgaggagcaggccaaagttatcgtagccccgagaagcaacaacgaactcgatgcca

SEQ ID NO: 217378 - DNA, 419 bp, Gossypium hirsutum
ggatgattgggaacctgacagcgagtcccaattttattaagctggagcagacatagcagtgttcactgtgagcaatcatcaaccattcatttgcatcgacacttaatcaaataaaagatctgggcgctaaagccggagtcgctaaaccctgcaaccccgcttagtacgatagaatatgtacttgatgtcgttgatctagtcttgattatgtcggtcaaccccggctttggtgggcagagctttattgagagtcaagtcaagaaaatctctgacttgagacgtatgtgcgcggagaagggtgttaatccatggattgaagtcgatggtggagttggtccaaagaatgcatataaggttattgaggcaggagcaaatgctctagtggctggttcagctgtatttggtgcaaaagattatgc

SEQ ID NO: 217379 - DNA, 432 bp, Gossypium hirsutum
ataaagaaaatctaaagattgggttgagacaggtgttaagggttctgattgcagctggggcagtggaagtgggaacctatcgaagcgatggccagagaattaaatgcaaaggtcttacagaagaaagtttgcaggagtttttggataacgttcccgtggtaggagggcttagttccaaggatgagtattggaccctctatattacagctcatcagataggaagttgtagaatgggcgcaaccgaagaagagggtgctgtggatgagaatggtcagagttgggaagctgaaggtttgtttgtttgcgatgctagtgtcctgccaactgcaattggagtcaatcccatgatcaccatacaatccacctcctactgcatttccaacaagattgcacaattgttgaagaaggaataaattaacacctttcatcact

SEQ ID NO: 217380 - DNA, 413 bp, Gossypium hirsutum
cccacgcgtccggtcctacgggtattattgctcaaatcaatcatgctattggagcatctggggttgtaagtcaagaatgcaaggctgtagtttctgaatacggagagaagatacttgatatgctattagcgaaggatgaaccgaagaaaatctgctcacaaattggtctatgcttatttgatggaactcaaggtgtaagtatggggattgaaagcattgtgaatgagaatgctggaaaagcctctggcagtttacgcgatgctatgtgttctacatgtgagatggcagttatatggatgcaaaaccagcttaagcagaaccagacagaggaccatataattgactatgtcaatgagctctgtgatcgattgcctagtccaatgggagaatcaagtattgactgtaaaagtcta

SEQ ID NO: 217381 - DNA, 368 bp, Gossypium hirsutum
cccacgcgtccggtcctacgggtattatttttcaaatcaatcatgctattggagcatgtggggttgtaagtcaagaatgcaaggctgtactttctgaatacggagagaagatacttgatatgctattagcgaaggatgaaccgaagaaaatctgctcacaaattggtctatgcttatttgatggaactcaaggtgtaagtatggggattgaaagcattgtgaatgagaatgctggaaaagcctctggcagtttacgcgatgctatgtgttctacatgtgagatggcagttatatggatgcaaaaccagcttaagcagaaccagacagaggaccatataattgactatgtcaatgagctctgtgatcga

SEQ ID NO: 217382 - DNA, 360 bp, Gossypium hirsutum
ccttaccagacagaatttgctgtcaggtttcttaacatagctgaggtaaagagagcattaggagtgaatgaatccatggttttcgaggagtgcagcgatgttgttggggatgtattgcatgaagatgtgatgaagagcgtgaagtacatggtggagttcttggtgaagaatagcaaggtactgttgtatcaagggctatatgatttaagggatggtgtggtatcaacagaggcatgggtgaagaccatgaaatgggaagggattgagaagttcaagatggctgatagagtgatttggaaagtaaacggagagcttgcagggtacctgcaaaaatgggggagcttgaccaaatgtgtagtt

SEQ ID NO: 217383 - DNA, 413 bp, Gossypium hirsutum
gcccccccattttccttattatgccttaatcatctctgatagttccctcttccaagttttcacttccaattcgatcaaaaaacccttctttttttccctcatcaatccaccatgggaggaggaaatggccaaaaatccaagatggcccgtgagaagaacttggaaaagcaaaaagctgctggcaaaggaagccagcttgagtctaacaagaaggccatgtccatccagtgcaaggtgtgtatgcaaacattcatgtgtaccacaacggaagtgaaatgccgggagcacgctgaggcgaagcatccaaagtccgacgtgtacgcgtgctttcctcatcttaaaaaataaacatcgaaactccacagaaagaacggagatgtcaagacagcttgtaatgcatatcatctatctat

SEQ ID NO: 217384 - DNA, 331 bp, Gossypium hirsutum
cggacgcgtgggcaagtaccgcgagagaataagatgtaaagggataagcaatgaggagtttgaggagtttttggactcgatttctatgttaacaagcccgttgtgtaccggggaaaactgggtggtgcacaccagtgctcaccagatgggaagctgtaggatggggataaatgaagaggaaggtgcagttgatgaaaatggagagagttgggaagctgaaggattgtttgtttgtgatgcaagtgttttgccaagtgctgttggtgtaaatccaatgatcactgtccagtccactgcttattgtctgtcaaagaagattgcagagtcttta

SEQ ID NO: 217385 - DNA, 424 bp, Gossypium hirsutum
gggtcgcgccacgcgtccgcttctatctttgtgcccatgctggaatgattggaaccacgaggcctactcattatcatgttctcttagatcagattgggttttcggctgatgatctgcaggaactagtccactctctgtcgtatgtgtatcaaaggagcaccactgccatatctgtagttgctcctatttgctatgcacatttggcagccgcacaggtgggtacattcatgaagtttgaagatgcctcagagacaaactcgagccatggtggagttaccgcacctggagccatttctgtccctcagctgccgaggttgaaggagaacgtctgcaattccatgttcttctgctgatcccccatgttttgtataggcttttggttgttaccaaaatgactgaacgtttttaagttatatgaaagttt

SEQ ID NO: 217386 - DNA, 352 bp, Gossypium hirsutum
  unsure (1)..(352): unsure at all n locations
ggaagcatggcatctgtgggtcgttacaaggccctagtagatcttcgccaatctaaggacgcgcaaggcatatcacttgcggggttcataagttggttgatatggcgctcggcttacttgacgcgtgtggttagttggaggaacaggttctatgtggcagtgaactgggccaccacgctggtctttggcagagacgattccaggataggttgaggcatggcatggcatagtcattgccttgcgctgcacttttaatattttcaatcttatatgctgctataaatctttcatttttgtatggtttattattaacttaataaaatacccagaaaaaggaaacatagattcangc

SEQ ID NO: 217387 - DNA, 389 bp, Gossypium hirsutum
  unsure (1)..(389): unsure at all n locations
ccaagagtttgatgtggtgggttggtgaatgctgaacaagatgaagtatccaactctttccaagatggctcgtgacattttgtcgattccggtgtctgctgctgcccccgaatcaatctttgatatcacagacaagcaactagatgaatatcgtagctctttgcgaccggagacagtggaagcactaatctgtgccaaggactggctacattttggatcttctgatgtttcaaatgcgcttgttaaaatggaattttagatgtagatgatattccagagtatcatgtttatggacatgtttcactgttaggcctctatttgtacaattagaaagatttgtttggatgcttagagtattttttcttaaaaaaaaaaaaaaaaaaanaaaa

SEQ ID NO: 217388 - DNA, 370 bp, Gossypium hirsutum
cccacgcgtccgaatggacattcctacttcaatttagtactgatcaccaatgtttgaggtgctggggatgtacattcagtatccattaaagggtcaaagaccagatggcaagcaatgtcaaggaactggggccagaactggcaaagcaattcttaccttaatggccaaagcctctctttcatcggcacgaccagtaacggacacagtgttgtttctttcgacgttgctccatccggttggtcctttggacagacttacactggaggccagtttggggctaccaaaatataacagccccttgctatatactatatgatattatagtaaaaatatgtctgaagaaaaacttaagcgagttttttttttttaa

SEQ ID NO: 217389 - DNA, 322 bp, Gossypium hirsutum
cccacgcgtccgcccacgcgtccggtgagggtagaaatggtttctctgaagctacagaagcggctctccgcgagcgttctaaagtgtggaaaaggaaaggtttggctcgatcctaatgaagtcaacgagatctctatggcaaactcccgccagaacataaggaagttggttaaagatggttttatcatcaggaagccaaccaagattcactctcgatctcgtgctcgtcgcatgaaggaagccaagagaaagggacgtcactctggatatggtaagcgcaagggtacaagggaggcatggttgcccacaaagatcttgtgga

SEQ ID NO: 217390 - DNA, 338 bp, Gossypium hirsutum
gggagattctggatgcagctttgctcaacatgcggattcacggtcgtatagctgtttgcggaatggtgtcgctacatagtatctccgatccgaaagggatccacaatttgtattgtgttgtaccaaagcgcatcaagatgcaaggattcttgcaaagcgactacttagataaattccctgaatttttagaacatgtcactaagaacttcaaagaggggaagattgtgtacattgaagacatgaatgacggtttagagagtggtccagctgcttttgttggactgttttcaggccaaaatattggcaagcaggtcatatgtgtagccagagactgagct

SEQ ID NO: 217391 - DNA, 388 bp, Gossypium hirsutum
cccacagtagcgtttagcctgccttgacccacagagatggcaactaagcagagggtaacaattgttgttgccaccgtctttgtgctaacattctgcagggtggcgacgggacaggaaccggcagcggtggggttggggttgggaccatcagcagaggcaccgacggcggattgttttacgaacttgttgaacttatcggattgcttgacgttcgtggaggcagggagcaatctaacgaagccggtgaaggcatgctgtccggagctggcggggttagtggaaagcagtccacaatgtttgtgcaatctattgggtaaaaacgcaaccgcagtggttgggatggacattgatatgaagagagctctgaatcttccccacagttgtaatg

SEQ ID NO: 217392 - DNA, 362 bp, Gossypium hirsutum
ggaattcggtcgcccagctccggaaagctatgagcttctgttctttgtgatgctgaggttgctcttatcatcttctctagtcgcggcaagctctacgagtttggcagttcacgtatgagcaagacccttgagcgataccagcgttgctgctttacttctcaagacaacagctcttggacgcgaaacacagaattggtaccaagaggtaaccaagttaaaggcaaaatatgaagcactgcagcgcactcaaaggcatttgcttggagaagatcttggaccattgagtgttaaggatgctgagaaccttgagaaacagcttgaaggagctcttgcactggctagacaaaggaagacacacatca

SEQ ID NO: 217393 - DNA, 380 bp, Gossypium hirsutum
  unsure (1)..(380): unsure at all n locations
cccacgcgtccgggagtatcctagatgacacagggttctcttttgtgaagtgtaaggtgacaggggcaggggctttatatttagggagggcatggggtcctttctcgagggtggtctttgcttacacttacatggacaacatcatactgcctaagggctggtataattggggtgaccctaaccgtgagatgacggtgttctatggacagtacaaatgcacggggccaggagcaagctttgcaggcagggtttcatggtcaagggaacttacagatgaggaagctaaaccttttatttctcttagtttcattgatggctctgaatggatcanattataattatacaatgatccatcaatttttatttttttaatgtatatc

SEQ ID NO: 217394 - DNA, 397 bp, Gossypium hirsutum
aactccctcctttaagccttaactgcattttggtgctttttaacattttgcttgttataatgctacatcagtgttctcccttgtatgtttgatgctcatgagttctgcaaatgtgcactgcagatgtcttactgctggttggctatgttgcaactatcaatcccttttaattttcctgttaattttttgcttttcactggccatcttcatggtagttagttactgctgctggtctcattactgatggtaaaaagttgggttttggtatcttatttgaattatttgtagaatttgaatcataaaaacattgtcaagtatcttggatcattgaagacaacaactcacctgcatataatccttgagtatgtggagaacggttcacttgcaaacattatca

SEQ ID NO: 217395 - DNA, 390 bp, Gossypium hirsutum
cttcttcaaagaacaatgatgaagttgatggaaaaccgggacctggtactctttttgtcaaggtcagtatggatggagctccttatctgaggaaggtagatttgagaatgtattcaacttaccaggaactgtcttctgctcttgagaagatgttcagctgtttcacccttggtcaatgtggggctcatggtactcctgggaaggaaatcttgagtgagagcaagttgaaggatcttttgcatggatcggaatatgtgcttacatatgaagataaagatggtgactggatgctggttggggatgttccatgggagatgtttattgaaacatgcaggaggttgaaaataatgaagagtgctgatgcaatcggattagctcctaaagcaatgg

SEQ ID NO: 217396 - DNA, 416 bp, Gossypium hirsutum
  unsure (1)..(416): unsure at all n locations
aggggatgttatctgccatggggatgcaaagattgtaaaggaaggatacaaaagtttccctagtggtcatacttcatggtcctttgcaggtctttgtttcctttcgttgtacttgtcgggaaagctaagagcattcaatcgcggaggcaatgtctcgaaactttgtatcgtgattttcccggtacttgccgctgttctcgtgggtatttctcgagtggacgattactggcatcattggacggatgtttttgccggagctcttataggaacgtccatggcagcattttgttacctacaattctttccctgtcctcattatgaagatggttgggcacctcatgcatactntaagatgatntgcggaagacanagtgatgaaagtncagaaagcacagtcagatcttcaagcaagaatg

SEQ ID NO: 217397 - DNA, 174 bp, Gossypium hirsutum
cccacgcgtccgcccacgcgtccgcccacgcgtccggtttttgcttagaaaacaaaggaaacccccgaaaaagaccagactagccatttttttcttttttcctctgtagggctatgattaagtgaagcagagtccatacctatcttcttcgtcaacttcattgttgttgtagtg

SEQ ID NO: 217398 - DNA, 382 bp, Gossypium hirsutum
agaagttccatcgatttcagtttagcattcataatgtcaggaagaggaaagggaggcaaggggttgggcaagggaggaacaaagcgtcaccgtaaggtcctccgtgataatatccagggaattacaaagccggctattcggcgtttggctcgtaggggaggcgtcaagcgcatcagcggcttgatctacgaagaaacccgtggtgttctcaagatcttcttggagaacgtgattcgtgacgctgtcacctataccgagcacgcgaggagaaagactgtgactgctatggatgtggtttatgcgctcaagaggcagggcaggactttgtatggattcggtggttaaatgtgatttagggtttaggttttagaatggtggtgtc

SEQ ID NO: 217399 - DNA, 405 bp, Gossypium hirsutum
  unsure (1)..(405): unsure at all n locations
cccacgcgtccgtgaattctttaaagccattgaagcctgtgccgaggaatacatggaaacgtacaaggctgatctggacaagagacgagcagaaaaacaacgcctagaggaagaacgccggaaagagagcatggataagttgaggagggatatggagcaaacgagaggcgaaaccgttgtcttgagtactggtttgaaagacaaagatggaagaagaaatacaatgatggatcctgaagatgaagtggaagaaccagaagatgaagatgattatgacaggttcaccgacgaggatgaagatcttatccaggaggatgaagatgaagagattgccaggttctccttttaggaattgtttagcaccggcaagtctagcatctacgatcaaatngaactgggatttgt

SEQ ID NO: 217400 - DNA, 372 bp, Gossypium hirsutum
tctggacatttggtacctgagcttgggaagcttgagcatttgcagtatctggagctttacaaaaatgacatccagggaaccatcccaactgaacttgggaacttgaagagcctcattagtttggacctatataacaacaacatctcagggaccattcctccttcactagggaaattgaagtctcttgtatttttacagcttaatgacaacaaattaactggacctatccctaaggaacttgtcggtatttcaagcctcaaagttgttgatgtctcaaacaatgacttgtgtggaacgattcctaccagtggaccgtttgagcacattcctttgaacaactttgagaaaaatccccgactggaaggtcctgag

SEQ ID NO: 217401 - DNA, 399 bp, Gossypium hirsutum
ggagattggatgttggtgggagatgtaccatggcatatgtttgttgaatcttgcaaacgcttaaggttaatgaaaagttcagaggcagttggattaggtctaacgacaggtccaaaatactcaagcacaaattaaagaaagaagcctttttaattcaagcatccaagaaagaaatcataaagaattgtacagaggcttttttgctttgtttgaactatttttacctgacgggcagggtttttgactaagatatagactgccaaattgcaagaaacataaattaaataagctgtaattgtagtgcattgatgttgtgggcttttttctccacattacttaatcatctcttcttccttttgtttcacttttcttaataaaaagattcattttcaacttaaa

SEQ ID NO: 217402 - DNA, 409 bp, Gossypium hirsutum
ggttgatttctgcacaactagcaaacgcaagtgaaattactaccggagatgctgtttacgaggagcaagtcagaagtggagatgccagtgcaacagagctttttgagctaggtgccgttatgttgagaaggaaattttacccagctgcaaataagtttttgcttcaggcaatcgaaaaatgggatggagatgatcaagatcttgcccaggtttacaatgcccttggtgtcagttacgttcgggatgggaagcttgagaaaggaatcaatcaatttgaaactgctgtgaagattcaaccaggatatgtcacagcttggaacaatcttggcgatgcatacgaagaagaaaaaagactacaagtctgcactgaaaagcatttgaagaaattattgcttttcgatcctaataa

SEQ ID NO: 217403 - DNA, 372 bp, Gossypium hirsutum
cccacgcgtccgcccacgcgtccgtaaactttcaagtttgtccgcaaagccgctgagcacaagtgtttgaagagaggagtaaaggaagtagttaaaagtattcggcgtggtcataaggggttatgtgttatagctggaaatatatctcccattgatgtcataactcatgttccaatcctgtgtgaagaggctgacattccctatgtttatgttccctcaaaagaggatcttgcaactgccgggtctaccaagagaccgacatgctgtgttctggtgctaaccaagcccacaaaaggggaactaagtcccgaggaacaacaaaagttaaaagcagattatagccacattgtaaaggatgtatctgagctcaca

SEQ ID NO: 217404 - DNA, 404 bp, Gossypium hirsutum
  unsure (1)..(404): unsure at all n locations
gcagaaacgtgttaacaaaggaaaatcagatccttgtggcaccgttcatattactataggagatggaggcaatagagaaggattagctcaaaagtacattcacccaacaccagagtggtcaatgttccgtgaagcgagctttggtcatggcgagctcaagatagtgaattcaactcatgcattttggagctggcaccggaatgatgacgatgaaccagtaaggtccgatcaggtttggataatctctctcatcggttctggatgtcttgcagaaaaggcttatgaatcaagtaaaattcttgtttctccttaaactaagacttggcggtcagtgtccctagattcgagctaagttgttgctaaacagctngatctgnngtatgtgtatatatacactaatacta

SEQ ID NO: 217405 - DNA, 312 bp, Gossypium hirsutum
  unsure (1)..(312): unsure at all n locations
nncgaacaaaaaaaatctttccagtttctattttttaaaaacaaaactgaaaatgtcttgctgcggaggaaactgtggctccanctctggttgcaagtgtggcaatggctgtggaggatgcaagatgttccctgacataatagagaagactacaactgagactattgttcttggtgtgacaactcaaaaaatgccctttgagggatctgagatgggagttggggttgagaatggattcaagtgtggagacaactgcactttgcacccttgcaattgtaaataagaggggggggaaaatgaacaacaaagaga

SEQ ID NO: 217406 - DNA, 233 bp, Gossypium hirsutum
cccacgcgtccgaagaaaagcacaactttaaaacgctaacaggagagaaaacgaaatacaaacagaaaaaaaatgaagctagtttggtctccggagacagcatccaaggcttatatcgatactgttaaatcttgtgaacttcatcatgaatctggtgtagcagagcttgtttcagccatggcagccggctggaacgcgagattcattgtggagacatggtcacagggtggcgc

SEQ ID NO: 217407 - DNA, 320 bp, Gossypium hirsutum
cccacgcgtccgcccacgcgtccggcaaaaataacaggcctctgtaatgatatattgtcaaggatggatgcctgcaaggtctataattatgtctctgtctgtgtcttgtgtaatagaagctttgtttgtggtgaaaataatgtataagccatttggttgggagcaaattgtccttttctccaaaggatttttgctgctcattcatggtgacttggtttatggttttatctgttgttgttaaaatcttataaaaatatatatcggttgctgctcttggtttgtatcaaatcattgtctgaaaatatatggcatcttttatt

SEQ ID NO: 217408 - DNA, 289 bp, Gossypium hirsutum
gtttcagttacttcccatacaatggctgatgatatgcacatgcgacttctatacctagagaaccgagtggcatttgcaaggttacttttcccgagtgaagcgaaacttgccatggacatcgcacatgcagagagaacctccgagttttctggtctctcatcaaaaggttcaaatgggaacttaagtcaagttgacttgaacgagacgcctgtaatgcagaagaaacgacttcttgcgaagatggaagcccttatgaaaacagtggaaatgggtcggcgttatttcccgc

SEQ ID NO: 217409 - DNA, 294 bp, Gossypium hirsutum
caacaaaaaaaatctttccagtttctttttttttaaaaccaaaccggaaaatgtcttgctgcggaggaaactgtggctgcagctctggttgcaagtgtggcaatggctgtggaggatgccaggatgttccctgccttattgagaagacctccactggaactattggtcttggtgtgacaactccaaaaaatgcactttgagggatcttggaaaggagtttggggttagaattgattctaatgtggagacaactgcacttgcgacccttgtcagatttgaaaataagaggggggg

SEQ ID NO: 217410 - DNA, 368 bp, Gossypium hirsutum
cacattcccgctacagaaacccccccccctccaaaaaaaaaaacatggcaaacacccttttagaagctttcaacgtacgagttgtcggctccggcgacagaatccttgtcttggctcacggtttcggtacggaccaatcggtttggcaacggattctcccatttttcacacctaattatcgtataatcctatacgacctcgtttgtgccggcagcgtcaaccccgattacttcgattccactaggtacgacactctcgatgctttcgtcgacgatttgcttaatattcttaaagctctcggcgttcaccgttgcgcttacgtcggccactccgtctccgccatgatcggtatcttggctttcattcgc

SEQ ID NO: 217411 - DNA, 238 bp, Gossypium hirsutum
actgcgtttacttcgaagaaagactacgggaaagatgaccgggcagcccaatggattctgtgctcagaggagcctacagggcttgatggctgcagacttggatttcaatggaagaagatcgagaacttctttgatagccgatcaggctaggcggcgtgctgaaatagccagacttggggagctacacactttaagaggtcatgtagaatcagttatgaggctaaagaatttggaccgc

SEQ ID NO: 217412 - DNA, 429 bp, Gossypium hirsutum
gttgctaatgcctaatggatcagaccggatcacattgcaaatgcgacacctgaacagcagaggacgatgcttggtgaaagcttgtacccccttgtggaacggcttgagcgtgatgcagctgccaaggttacaggcatgcttctggagatggaccaaacagaggttttgcatctcctggaatcaccagaagctttgaaggccaaagtagctgaagccatggaggtgttgaggagtgttgctgctcagcaacaggccaacaatcaagccgaccaattggcttcattgtccctgaatgataacctcgtttcctgagtgacttaattcgggtccagtttcttggcaaagaagttgcttaattctttatcaaaactgggctatcttttgttattaagctttaagtttggaacctttatatatttgctttggttt

SEQ ID NO: 217413 - DNA, 385 bp, Gossypium hirsutum
aaaaaaaaaaaaaaaaaaaaaaattaaaatttaaaaaaaaaaaaaaaaaaaaaaagcgaacagaagaaattcaaaaatacaaacacatacatacggggcgccccttctataggttccaacctttcgtccccgttcatgcgacgttatttctcttctttagggccaccaaaatccatttccctccccgactttatacaccggccgtactggaaaaacccgcccgttacccaattataaaggttggccgaaaatcccctttttaccaactggcgtaataactaaaaggcccgacccactcgcccttcccaaaattatcccaccctgaatgggaaatgggacccccctctgaacccccattaaaccccgcgggtgggggggtaccccc

SEQ ID NO: 217414 - DNA, 344 bp, Gossypium hirsutum
cccacgcgtccgtatcctgcttcatcatttccaaattttgattattttcttcttttttattgtatttttatttaaaatttgaaactgctaacattattacattttcattagcctcaagagaagaaaaaaaaatgtcatcgaattcaatgtctgcttcatggacagccaagcaaaacaaagatttcgaaagggctttagctgtttacgacaaggacacaccagatcgttggtacaatgttgctaaagctgtgggagggaaaactgttgaggaagtgaagaagcactatgagcttcttctggaagatgttagacacatcgagtcgggtcgggttcctttccccgac

SEQ ID NO: 217415 - DNA, 360 bp, Gossypium hirsutum
caaactcatcggtagagaagacttacgagttaccagacggtcagattattaccatcggggccgagcgttttagatgccctgaagtgcttttccaaccatcgatgatcggtatggaagctgcaggcatccacgagacaacttacaactcgataatgaaatgcgacgtcgatattaggaaagacttgtacggtaacattgtactcagtggtggtacaactatgttccccggtatcgctgatagaatgaccaaggagatctcggctttagctcctagcagcatgaagattaaggttgttgctccacctgagaggaagtatagtgtctggattggcggctcgatcttggcttcccttagcacat

SEQ ID NO: 217416 - DNA, 418 bp, Gossypium hirsutum
gagaatagagaaatggtggagggaggaaaaacgccacgaggctatggtactgccggatgtgggaacttcatttgcagatagcatctcagaagagatttgtaattctgcagccaagatggctaacaatttagaggtagatgccctttttgtttacacaaagacaggtcacatggcatctctcctgtcacgttgtcgaccagattgccccatctttgcttttacgaccacaacttctgtcaggagacgtctgaacctacaatggggtctcattccgttccgtctcggcttctccgacgatatggaaagcaaccttaacaaaaccttctcgttactcaaggccaggggaatgatcaaatctggtgacctcgtaattgccgtctcagacatgttgcagtccatccaagtcatgaatgtccct

SEQ ID NO: 217417 - DNA, 415 bp, Gossypium hirsutum
  unsure (1)..(415): unsure at all n locations
atcttgacccaatgccattcgacatggaacgcgaccttctcactccaacatataagaagaagaggcctcagttgcttaaatattatcagagtgtaatcgatgagatgtacaagagtgcaaacaaaccaaatgcttgataaaatgcttccaaaggcgtcggtgatatgttagatgatatggagttaaaacttgtgtattctttggtagtttggactgtacatgtagttccttcatcatcagaatttgtttaccaaaaaccaaattccctttgacacaactttgggaataatattacttggtaagttgtttaatgacccaaatgttaaaagttccaaaattacttatgatccggttttcaagacaactatttatggagttattgattatgatttttttttnaaaaaaaaaannnnna

SEQ ID NO: 217418 - DNA, 133 bp, Gossypium hirsutum
cccacgcgtccgcggacgcgtgggcccacgcgtccgcccacgcgtccggggcgctcgcctaaggtctcctcaagtaggagagcctacgtcataatttgtggtagtgggggcctgcgttcgcgcggcccctgtc

SEQ ID NO: 217419 - DNA, 415 bp, Gossypium hirsutum
  unsure (1)..(415): unsure at all n locations
atttggaagtgcatacaacatgggggcttaagatggcgtttgttgtggacaatggaaaaggcccaaatgagtctcttctaccacctccaagtgatttccccaagtgctgaattaaccaaaccaaaatgctgaggaatggagaagtagctaaaaggaaacaaaaggaggtggtagaaaaggcccaaatgagtctcttctaccacctccaagtgatttccccaagtgctgaattaaccaaaccaaaatgctgaggaatggagaagtagctaaaaggaaacaaaaggaaatggaatttttatacaacggcttaaagctataataacaaataagaagagtttattttgagcaagccaaggaaagtttgctccatatggaataaaagagagnctggatttgtttttctttttttctctta

SEQ ID NO: 217420 - DNA, 385 bp, Gossypium hirsutum
cccacgcgtccgaaaggtcccaaaggaatttactgggagaagatttgggacctttgagcagcaaggaactcgagtcacttgagaaacagcttgattcatcattgaagctaattagatcgacgcggacccaatacatgcttgatcagctcaatgatcttcaaagaaaggaacatcttcttaatgaagccaataagaccctaaaacaaaggttggtggaagggtatcaagtaaattcgttacaattgaatccaaatgcaacggaagacgtcggctatggccgtcaacaggttcatcatcagcctcatggcgatgccttcttccatccattggattgtgagccgactttacaaatcggatatcagcatgatccaatgtcagtggtgac

SEQ ID NO: 217421 - DNA, 404 bp, Gossypium hirsutum
cggacgcgtgggcggacgcgtgggccggttacctcgatgatgcattgttccccactgaagtccgggtcgagaaattctcaccacattacttggacccgaacttggccatgttccgacaagagatcattgtcgagaagtccaataaccaagtgaagtacggccagaaactcacagtacagatccgtggaaatggcgaaatcgaccaacaaaaacttcaagtgacggtttactcaccaccatttgtgacccatgggatctccatgaatcagagattgattcaattgggaattgtggaatttaacaaaaatgttgctccaaatacaaacaacattgttcttcaagctcccatgaatggcaacattgcgccacctggttattacatgctcttcgtaaactataatggg

SEQ ID NO: 217422 - DNA, 413 bp, Gossypium hirsutum
gcagaaggcaagcattgcgggaactgctatcatgagcaacagctacgtatctacaggagcttcatggctttcaaacgcattcactgcagttgcgagggcagctgaggacgtaggtatgttgacaaaggagaaagttggaaaagcagaggaagaaaaaaagggttctgtctacaaggagagagcaaggatcatcgaagactttgcagagctccatcttgatgaatctaccaaggcagaaccttcagtaggtctagttgattcaacaactgataagcaagcttagaatgatatgaaatgattgcttttgaactttgattttccttcaatgccttgattctttcattggtgtacaatacacttgtacatgggattggaattcaaaagaaattctgaaatatattattataatgtct

SEQ ID NO: 217423 - DNA, 399 bp, Gossypium hirsutum
acggtattgtgattctgtgaatggtggaatcatgaatgagaattatgatcctgttgaaagaagacttaaaggtggaaaagagcggaactcgaagggttctcttaagagctcaaaatctctgcaggcaaacaatctccataaccttgcctctggagatgcagctggcattaataaaaacactgtttccaagcaaggtaagactggtgtagcagcatcttcaagtgaggtccgggctttgtccaaggagattaccgatttgaaactctcggttgacctcttggaaaagggaagagatttttacttcgccaaactgcgggacattgaaatactttgtcagtctaccaaagtggagaatcatccgatggcagtagtaataaagaaaatactgtatgcagctga

SEQ ID NO: 217424 - DNA, 394 bp, Gossypium hirsutum
tacaaacacaaggcaaatgtttgggacgggctaccagcaatttgaggagcaacaaacccagagcttaatcgaccaaagaatcaaggaacatcttggccaagctgcagctttccatcaggttggagctgctttcaatcaacatctaatggctcagagacctcgacttcctgttcttccgactcctgttatgcctattccgagggttgcacctttacgtataaatcaaccaatggtccctgggattaggccacctgtactgccaagaccagttccaggttatgctcctgttccaggcatgccaccaacggtagcaccacctggtgcaccttccttccctggtcaaataaatggccttccacaacctcctacattggttcccccatcaaccgttact

SEQ ID NO: 217425 - DNA, 413 bp, Gossypium hirsutum
gtgatgttgaatcttcttcgagaccagtttccgggagccaatgattttggaagtgaaataattccaggtgctacttccattgggatgagggtgcaagcttacctgtatgatggctactgggaggacattggtacgattgaggcattttataacgcaaatctgggaatcaccaaaaagccagtgccggatttcagcttctatgaccgttcgtctccaatctacacacagcctcgatatttgccaccatccaaaatgcttgatgctgatgttacagatagtgttatcggtgagggttgcgttattaagaactgtaaaattcaccattctgtggttggtcttcgatcttgcatctccgagggtgcaatcatagaagataccttactaatgggagcagattattatgagactgatgc

SEQ ID NO: 217426 - DNA, 410 bp, Gossypium hirsutum
gtcgaatggtgttaaacaagaacatcgatttcttctttgctgagaacgagcaattagcctgctgcccttccctcattgtccctggcatctattattcagatgataagttgcttcaaactagaatcttctcctattctgacactcaaaggcaccgtcttggaccaaattatctgcagcttccagctaatgctcccaaatgtgctcatcacaataatcaccatgaaggttttatgaattttatgcatagagatgaggaggtgaactacttcccttcgaggtacgatcctgttcgccatgctgagaagcaccctattcctagcaccgttttgagcggcaaaagagagaagtgcattattgggaaggagaacaactttaagcagcctgggggacgataccggtccttttcagct

SEQ ID NO: 217427 - DNA, 418 bp, Gossypium hirsutum
cgactctccatcagttagaaaacaacacaattcagggtacaaacacaaggcaaatgttaggacgtactaccagcaatttgaggagcaacaaacccagagcttaatcgaccaaagaatcaaggaacatcttggccaagctgcagctttccatcaggttggagctgctttcaatcaacatctaatggctcagagacctcgacttcctgttcttccgactcctgttatgcctattccgagggttgcacctttacgtataaatcaaccaatggtccctgggattaggccacctgtactgccaagaccagttccaggttatgctcctgttccaggcatgccaccaacggtagcaccacctggtgcaccttccttccctggtcaaataaatggccttccacaacctcctacattggttccccca

SEQ ID NO: 217428 - DNA, 148 bp, Gossypium hirsutum
cccacgcgtccgcccacgcgtccgcccacgcgtccggtaatttgttattaagatatgtaagaactacttaaataattcaagagtctttatgaattaaaaaagtaaaaaaaaaatccaaatttaaggaatgaatccaaactattactac

SEQ ID NO: 217429 - DNA, 407 bp, Gossypium hirsutum
ggaacaggaactgctaaccagtgcccaaccatcgatggtggtgtcgactcttttgccttcaagcctggcaaatactacgccaagaagttctgcttggagcccacttccttcactgtcaaggctgagggtgttaacaagaatgcccctcctgagttccaaaacaccaagctcatgacccgtttaacctacacccttgacgaaatcgagggccctttcgaggtatccaccgatggcaccgtcaaattcgaggagaaagatgggattgattatgctgccgtcacagttcagcttcctggtggtgagcgtgtgcctttcctgttcaccatcaagcaattggttgcatcaggcaaacctgatagctttggaggagacttccttgtaccatcctaccgtggctcatctttctt

SEQ ID NO: 217430 - DNA, 412 bp, Gossypium hirsutum
  unsure (1)..(412): unsure at all n locations
gtcggaatcattttggtgttttgtggcactgatggaatgccttggtcccaatttcaaccgtgaccaaagtggcttgcactctcagctctttgccttatctaagctggtggagttgttagacaacccattgcataactatttcaagcagaatgattgcttgaattatttcttttgtttccgctggatgctaatacagtttaaaagggaacttgaatacgagaaaacgatgcgattgtgggaagtgttgtggacacattatttatcggagcacatccatctgtacgtgagtgtagctatcttgaagcgttatcgtggcaagataatcggagagcaaatggatttcgacaccctcttaaggttcataaatgaactgagtggtcggattgacctagatgcaacactcanggatgct

SEQ ID NO: 217431 - DNA, 419 bp, Gossypium hirsutum
gctgagaccaatataaggccgtggataaatgtattgaaggagataaagaagggcaacgagaggaggaagtggaaggaaagggtgccttatgcttattggagagagaaccccagcgtcgcccctactaggaaggaccttatgaaatgcaatgctaccgacaaaaattactggaacaccctcctatacgttcaggattgggaccgagaatctaaacaagggttcaagcactcaaatgtagaggaccaatgcagccacagatataagatatatacggaaggatgggcgtggtctgtaagcgaaaaatatatcctagcttgtgattcaatgaccttatatgtaaagtctcgtttctacgacttcttcatcagaggcatgctaccactgcagcatttatggcccattagtgaaaacaccaaatg

SEQ ID NO: 217432 - DNA, 407 bp, Gossypium hirsutum
tgcggataaaagacgtggtattggttcattgaatgctgtaatgggcaataagttggctgtactagcgggagattttctgctttctcgagcttgtgtggcccttgctgctttaaaaaatacggaggttgtatcattagtagcaacagttgtggagaatctggttatgggtgaaaccatgcaaatgacaacttcatctgaacaacgttgtagcatggactattacatgcaaaagacatactacaagactgcttccttgatttcaaacagttgcaaggcaattgcgcttcttgctgggcaaacagctgaagttgcaatgttggctttcgagtatggcaaaaatctgggattggcatttcaattgatagacgatgttcttgatttcaccggcacatcagcttcccttggaa

SEQ ID NO: 217433 - DNA, 311 bp, Gossypium hirsutum
aaaagaacaaacaggtttaccccaaatttgtgtttgaagagtacatgaaactgtatgcaggactgaaattccaggccaaggaaccaaggtttgaagccatgaaagcgatggaagctactgctcccattgcaacagcttaaaataaaaatattataacttagcttttgactttgtggaaaggaaaaaaaaaaaggaaaaaaaaggtgttccagtgttcctcctatattatagatgtgtgttgtttgcactgttgaatttattattgtagacgacaattctattatataataaaagaaaaggatttttgtctc

SEQ ID NO: 217434 - DNA, 423 bp, Gossypium hirsutum
acgctggctcaaacggagttaataatcggaatggagatcggatcccgcattacaatctatgacatggaaaacataaaagtgctgattagccggttggaaattgagatggaatctttattgcataatgctgattttgcagttagagaagaagatgcagtgaagcttgcaatcaatgagatcaagggaaaattagaagcatttatgaaaaccattgaggaattgggtcgacaggccgaaaattgtagccgtgatattaggatggcgaggacggtagttttgcagaagatgatgaaacgttctgggaattcatcaacgggtgacagcccgtgggaagtgtagcaatgaggtaaatttcagtgtgttaatgttgtaataattttatgctgtattcaaggtaatgaagttgctccactggatttgatc

SEQ ID NO: 217435 - DNA, 413 bp, Gossypium hirsutum
gggtgtaaaagcagtcattgccaagttttttgagcgaattcaccgtagtaatttggtgggcatgggcatcattcccctatgtttcaagtctggagaggatgctgacactcttggattgactggccatgagcgctacacaattgatctttcaagctgtgtgagctaaattcgacctggccaagacgtcacattggctacagactgttgcaagtcattcacctgcacaatccgatttgttacacaggtgtatctttcatatttcaaccacttatgcatcactttttttttttattaataagtcctttttttttttaaacattttttaacttttttgttaattttttatttttttataggtttctccacctttttttcattatctatttatcccctttccttttttttttcttttt

SEQ ID NO: 217436 - DNA, 418 bp, Gossypium hirsutum
cccacgcgtccgcccacgcgtccgcccacgcgtccgcaacaacatgcctagtcgctgcgaaattctgtgtgaactcttgatcgcgattttgatccctcctttgggagtttgcttcaggcacggttgttgcagcgttgagttctggatttgtgtgctgttaactattctgggttacgttcctgggattatttatgctctctacgctattgtttttgtggatcgtgatgagtacttcgacgagtacaggcgtccactttattactctgcttagttctcttttatgatctctctctttttctgtaaagtggtgatcctgaaactgtttgcatttgtgtttaattgaactcgatattgatgtgcttctactctttaattgatcttgacattgtgcgattgtaaatttgtaatggttctttga

SEQ ID NO: 217437 - DNA, 278 bp, Gossypium hirsutum
aaacaatcctttcatgattatctttgcttgtattcaaattgttcttagccaaatcccaaattttcacaagctttcatggctttcaatccttgcggcggtgatgtgttttacacttgcgctcacaggggtcgggcactctatattgctaacgctgcatgggggggagcacacgtggagacacgctactctggtgtacaagtaggggttggcctgtcaggctctgaaaaggtttggagaacattccaagcttttggggacattggctttgcttatgctta

SEQ ID NO: 217438 - DNA, 423 bp, Gossypium hirsutum
cgagcaccttatcctccaaaccatgtggttggccatctaattgggagctttgctttcattgtcttggacaaatccacctccactttgtttgtggcttctgatcaatttggtaaggttcctctctattggggaatcaccgccgacggatatgtggcctttgctgataatgctgaattgctgaaaggtgcctgtggcaaatctcttgcttcttttcctcaaggctgtttctactccacagcagtaggaggattaagaagctatgagaatcctaataacaagatcactgcagtgcctgctgaagaagaggagatatggggtgctaaattcaaggtggaagggccaacagttgttgctgccacagagtaatcctttgctttcttcttctaaatctattgatccatgggaatataggagctgcaaatg

SEQ ID NO: 217439 - DNA, 405 bp, Gossypium hirsutum
tggtattgcttgggcctttggtggcatgatcttcatccttgtttactgcactgctggtatttctgggggtcatattaacccagcagtgacatttgggctgtttttggctcgtaaggtctcattgatccgagccattgcatacatggtggctcagtcgttgggagccatatgtggggttgggctggttaaggcattccaatcagcatactacaacaggtatggaggtggagccaacactctagcagatggttacagcacaggaactggtttgggtgcagaaattattggaacctttgtgttggtttacactgttttttctgctactgatcctaagaggaaggctagagactcccatgtccctgtattggctcccctcccaattggatttgctgtattcatggttca

SEQ ID NO: 217440 - DNA, 420 bp, Gossypium hirsutum
gtagccgacaaggttttcaagtatgataccattcccgatgagcctccaagtgacaacactaaggtaactttggcacctattgtcctcaacatgacacatagaaactttgtggaaatcatcttcgagaatcacgagaccgccattcagtcctaccacttgtctggctactcattctttgctgtgggcatggacgttgggaaatggagccccgagaagaggatgaactacaatcttcttgacgccgtgagcagacacaccatacaggtattccccaactcctggtcagcaatcctattgacattcgacaactgcgggatgtggaacctgaggtcggagacatgggacaggcattaccttgggcaacagctttatgctagtgttatttcccctaaccgatccctcaaggatgagtacaactta

SEQ ID NO: 217441 - DNA, 418 bp, Gossypium hirsutum
gttttcctcgtaatgaagaaaaccgtgcagcattcgaagctgttacaaaaatcgagccagaatttgtcctgtttttcaattgccctgaagaagagatggagaagcgtcttctgagtaggaaccagggaagagaagatgataacatcgaaacaataaggaaacgattcaaggtgtttctcgattccagccttcctgtaatcgagtactataaggtcaagggaaaagttcgagagattgaagctgcaaagcccataagagaggtgtttgaggccgttaaagttgtcttcaccccaaaagctgaaaaggttgttgcctaggccgggtttgcaaactctaccagtgataaattagcatattcatttgaggttaaatatgtcaacagtttggtgcacatcattactgtattcttaataatttg

SEQ ID NO: 217442 - DNA, 404 bp, Gossypium hirsutum
cccacgcgtccgtgaagaaggaattcagatgcttaaggatgctggtgtggaagttgaccctcttggggaccttaatacagaagcagagagaaaattgggccagcttgttttggagaactatgacactgaattttatttgctgcatcgctatcctttggctgtgaggccattctacaccatgccttgctatgataatgccctttacagtaattcatttgatgtcttcatacgaggtgaggagataatttctggagctcagcgtgtccatgtaccagaatttttggcagaacgtgcacaggcatgtggaattgatgtcaatacaatctcaacctatattgattctttcagatatggtgcaccaccacacggtggggttggagtggaattggagcgtgtggtgatgc

SEQ ID NO: 217443 - DNA, 147 bp, Gossypium hirsutum
cgagcaccttatcctccaaaccatgtggttggccatctaattgggagctttgctttcattgggttggacaaatccaactccactttgccttccggcttctgatcaatttggtaaggttcctctctattggggaatcaccgccgacgg

SEQ ID NO: 217444 - DNA, 312 bp, Gossypium hirsutum
  unsure (1)..(312): unsure at all n locations
cccacgcgtccggggatgtgaaattttgatttacccatctcggatttttggtttggttttaagaaatgaagtgatggatgttttatttatatctgaaaaaaaaaaaaaaaaaaaaaaaaaaaaaaaaaaaaaaaaaaaaaaaaaaaaaaaaaaaaaaaaaaaaaaaaaaaaaaaaaaaaaaaaaaaaaaaaaaaaaaaaaaaaaaaaaaaaaaaaaaaaaaaaaaaaaaaaaaaaaaaaaaaaaaaaaaaaaaaaaaaaaaaaaaannnaaaaaggggcgccccttaaaaaaaccaaaatttaaccccccgg

SEQ ID NO: 217445 - DNA, 354 bp, Gossypium hirsutum
tgaaaatcaaagagtaactgaagaagatgcaaatattcgtcaaaaccctaacagggaaaactatcactctcgaggttgaaagcagtgataccatagacaatgtcaaggccaagattcaggataaagagggcatccctcctgatcagcagaggttgatttttgctggtaagcaactagaagatggccgaaccctagctgattataacatccaaaaggagtccactcttcacctagttttaaggcttagaggaggaaccatgatcaaggtgaagactctcaccgggaaagaaattgaaattgacattgaacctactgataccattgatcgtatcaaagaacgggttgaagagaaag

SEQ ID NO: 217446 - DNA, 109 bp, Gossypium hirsutum
ggaaaataaagaggtctatgaaggagaggttactgaactctctcctgaagaaacagagagcgtaacaggtggttatggtaagagcattagccacgtaattattgaattg

SEQ ID NO: 217447 - DNA, 386 bp, Gossypium hirsutum
cggctgacgagagtgggttagcgaatgagtgcagcaaagatttccagagcgtgatgacttgcttaagctttgctcaaggaaaagcagcgtcgccgtcgaaggagtgttgtaattcagtggcggggattaaagagaataaacccaaatgtttgtgttatattttgcaacaaacacaaacttccggtgctcaaaatctcaaaagcttaggtgttcaagaagataagctgtttcagttaccgtcggcttgtcaattgaagaacgctagcgtcagtgattgcccaaagcttcttgggttatctccgagctcaccagacgccgccatcttcaccaactcctcctctaaagcaacgacacccagtacttcaacaaccaccgcaacgccgtct

SEQ ID NO: 217448 - DNA, 454 bp, Gossypium hirsutum
ccgaatcggaggttcgacccacgcgtacgcccacgcgtccgcacagcaggacccgaaggtcatcaagcagtggcctttagggcaactagtaataaagtcatcatgttcaattgccatttcaatgggtaccaagacaccctttaccctcacaaagggcaacaattttatagggattgtgtcatcagtgggacggtggacttcatctttggggattcggcaagcgtgttccagaattgtttgatcatcgtgaggaagccaggtgagaaccaaaacaacatgattacagcacctggaaggcaatacatagacactgactcagcccttgtacttcaaaactgtaccatcacgggtgcccctgattaccttcccgtgaaggacaagagcaagacgtaccttggtcgtccctggaaacccttggcgagagccatcataatgcaatctacgattgaagaca

SEQ ID NO: 217449 - DNA, 401 bp, Gossypium hirsutum
  unsure (1)..(401): unsure at all n locations
ccaacgcgtccgttccaaggaagcaacttgttaccaaggttgcccgtaaatctgccccaaccaccggtggtgtgaagaagcctcatcgctaccgtcctggaactgttgctcttcgtgaaattcgaaagtaccaaaagagtactgagcttcttatcaggaaattgcctttccagaggcttgttcgtgaaattgcccaggacttcaagactgatttgcgtttncagagccatgctgttctagctctccaggaagctgcagaggcataccttgtgggtctttttgaagacaccaacctttgtgcgatccacgccaagcgtgtcacaattatgcccaaggacatccagttggctcgtaggatcagaggagagcgtgcttaatttccatgtgtgtggatcagtcgc

SEQ ID NO: 217450 - DNA, 388 bp, Gossypium hirsutum
  unsure (1)..(388): unsure at all n locations
cccacccgtccgaagaattgtccgtcatattttcgatgttcatgtcattaatcaagagagaggaaacaaaagggacaccagatcaataactgttaccacaaacttgcctaaaacatgtgataatccaaccactggtgggttagaaattgaccctgcgaggaaaagaaacagtttaaaaagacctggtgggttaccgccaattggtccttcacgagtcaaatcttcacctttcatttctcgtagaaattccacgtctgctttagattatgaaaagtttaaaatagataatgaagtcggtttacttagagaaaggctaangattgtacagcaaggaagagaaaagctcaacgtacctgcagggcgcaaggaaagagaacaagttcaaatg

SEQ ID NO: 217451 - DNA, 308 bp, Gossypium hirsutum
ggtagtggctgatactactttgaagtatttgggcactgtccatgtcaagagtggtgtcaaagacccccatttcgaggtggtgaaagaggcactcataaggacaattgaagaagcaattggagaagagaaatggaatgaagagatgaagaatgcttggggtgaagcttatgatcaattggctgagatgaagaaccatcatgatgaaactgcttaattactcttttacttcaattttattgttgtttgccaatattttcacaattttaatgaataaattttagtaataaagactattttgtttttctatc

SEQ ID NO: 217452 - DNA, 417 bp, Gossypium hirsutum
  unsure (1)..(417): unsure at all n locations
gaacagaaacaagagcctcctgcagtgataacggtagtattgaaggtcggcatgcattgtgaagcatgcgctcaagcattgcgtaagcgaataaggaagatccaaggcgtagagacagtggaaaccgatgtgggaaatgataaagtaaccgtaaaaggcaccgtagatcctacaaagctggttgattatgtttacaagagaaccggcaagcaagcgtccatagtgaaaggcgaagaaaagaaggaagaacaacaactacaagaagcagagaaaaaaccagcagaagaggccaacaaagaaaccaaaccagaagaagaagacgacagaaagagtgatgatgtaataaagcgaagtgaatacttacaatccaagtatttctcggagctggaatatcctnctcagttttcagtgatgaca

SEQ ID NO: 217453 - DNA, 358 bp, Gossypium hirsutum
cccacgcgtccggcagaaatgcctgggtgaggctgaaggataccttgaacctgttgaggagaatgaagcgattttggaagcttatgtgaagtcatgggtgtctggtgcccttgacaaagctgcaactcgaggatcagtcgcattcacattagttctgcatcacctttcatcttttgttttcagctctcataaaagtgacaagccattgctacggaataagcttgtgaagtctctactgcgagacaatgccaggaagaagcagcacgagggaatgatgctgcagttcatcgaatatatgaagccatcgagtgttacaaaggccgaaaaagaggaaggtttgacaatggagagtagcaat

SEQ ID NO: 217454 - DNA, 327 bp, Gossypium hirsutum
  unsure (1)..(327): unsure at all n locations
gaagaaatcaagggaagatgggcttcagaccacaggagaagggttggagtggggagtgctctttgggtttggacctggcctcactgttgagactgttgtgctccatagtgttgctgcttaaagttaaacaaacatgctttttaagtaattggtcgtgctccacttggcttgcagntttatcttcttcttttttcctttttagattatttaaatcccatgaatttgtgtgtttattgttaaagactagaggtctttgatggtgtgggcgggaagcttaacgcctattcaattcatgtatcaacttatattaaatttatggcaattatt

SEQ ID NO: 217455 - DNA, 414 bp, Gossypium hirsutum
cgcttgcatagagaagaatctccaacgaaatctcagttgcatacattgatagacttgaatgttggtcaagtttcaatggatttcgaaacggagggccccttcgtcacggagaccacgcaaaatagtgagaatttgtttgcacatacgtcattcaatcagtccgaagttaccatgcaacctgataaagttgcagaggtgaatcagcagccagtagtgcacaatcgaaggcaaagtaccaggaaccggccattaaccactaaagcattagaggctcttgaatgtgggttcttaagtcccaagaggaagcgaacggcagcggagactccacagattaactcacaaagaattcgcagtaagccggttgtgaatgccacttttaagaaggaaaaggcggtggagactccacagaatagc

SEQ ID NO: 217456 - DNA, 389 bp, Gossypium hirsutum
  unsure (1)..(389): unsure at all n locations
tattcccatggttgtcgacaaatatttgaacaaggagctggggctggatatggacaagttcatcacacactctgtgccttttgccgatattaacaaggcattcgactacatgctccagggtataggtctgagatgcatgattcatttggatgcttaaggaaatgttgctgctgtatatttgcccatccaaggatcaaaactctaatgttttgtcctactatgtgttatattatgtgcctacttaagctacctttcccggttatcaagagtgcctatatagaactctctctctctcaaaaaaaaaaaaaagagaaaagaggtctntatatggagttttatattatatgctgaaagaaataaataattttgaaaaagcttgctttgtaatg

SEQ ID NO: 217457 - DNA, 413 bp, Gossypium hirsutum
gtgaacttgaacaaagttccatcggatgcttttgtggtgtatcaggggcaccatggggaccaaagtgtctatcgtgccaatgtaattcttccttcagcagcattcagtgagaaggagggtacatatgaaaatactgaaggttgctctcagcaaacattacctgcagtccctacagtgggtgatgctagggatgattggaagattattcgagcactctctgaggttgcaggaattcgtttaccttatgatacattaggagccatacgatccaggatgaggactgttgcaccaaacctactcaacacagatgagatagagccagctgcttttggaccttcattgagtccagactgtagtcagaagataagcttgacaccgttcaaggctgctgttgagaatttctacatgactga

SEQ ID NO: 217458 - DNA, 397 bp, Gossypium hirsutum
ggcaaacgcttgcgatatgaacgtgcatcttccgttggagagggagttgtgtccgtttgatttggcgccggttacttcgacagcgatccagatggttttcggagatacggtggcaatagcgcttatgggagctaggaacttgactaaggatcaatatgcggccaatcatcctgctggtcggattgggaaaagccttatttttaaggtaaaagatgtaatgaagaagcaagatgagcttccagtttgcaaggaaggagatttgataatggagcagctggtggagcttactaggaaaggatgtgggtgtttgctggttatagatgaggaatatcacttgcttggcacatttacagatggtgatttgcggcgtacgcttaaggctagcggagaagccata

SEQ ID NO: 217459 - DNA, 360 bp, Gossypium hirsutum
gagagaggaggaatcaaaggatgacccagttgattccgatgctgaggatgaagatgatgccgatgatactgaagggcacgagtctgattccgataccaaatcagacgatgatgacaaggaagatgctcatgatgagctctaagcactgcaatatctcgcagacaattcggtttggtataaatttttccctaccctttattttaaaaaaaaagttctagttttaggagtttcctgttagaggaaaaaggaattgaatgcttcaggcaaaagaactttcactgatgctttcttaatatgattttaactgtctgaacaaaggcatgctctttttcttttttatgatcactagatatttttact

SEQ ID NO: 217460 - DNA, 414 bp, Gossypium hirsutum
cccacgcgtccgtcttgttcatcaaagactgtgtaagtatattctttacattgcaaaagcgcttttttgtgtttatttggagtttgtttattttgttcttcaaattatatttagtcaaaacatgttttgtttctttcctcaggcttttgatgaagccattgcagagctggatactcttggagaggattcatacaaggatagcactttgataatgcaacttctccgtgataaccttactttgtggacctcatacatgcatgatgatgggactgatgagatcaaagaagcttccaagcctgaggaagagaatacaaccgtgaagttcccagtctttgtggttgcattttacttctcttcttgtttttgtatggagaaattggttgatcccactcttctttttagttacttgctttt

SEQ ID NO: 217461 - DNA, 81 bp, Gossypium hirsutum
cccacgcgtccgcccacgcgtccgcccacgcgtccggcatttttaagtaaatcaccccaaataaataataagttactttgc

SEQ ID NO: 217462 - DNA, 370 bp, Gossypium hirsutum
  unsure (1)..(370): unsure at all n locations
gtaaaaattaaaatggcatagatttaatatatgaataaaagcatggaccttgtacggattgtttgtttcacaatttggagacgtggaaacacccctagaagatggagacttcattggtcaaacagtggaacaatatttgagaagtcgatatggtttcagacatgaattcctgggagttgtcgttgccgtaattcttggtttcactgttttgtttgcatccatctttactgtgtccattaaggtctttaatttccaaagacgttagaatttatggtttccatctctgtaatgtttaaggtcatgcttttattcatatattaaatctatgccattttaattttaacatacaaattctttcattgtnnaaaaa

SEQ ID NO: 217463 - DNA, 413 bp, Gossypium hirsutum
aacagggatacaatctgcagtgctgtgagtgaaattcacccaccatccccgagattgttcgacaccaaaaatggtagtctccaacccaaagtgaatgatttgaaaccaagggctgaattaatatgtccaggcaagaagcaaatcgtggcagtggagtttgccagctatggtgatccatttggcgcttgcggagcctactttattggaaattgtacagcgccagaatccaagcaagttgtcgagaagtattgcttggggaagcccagctgccaaatcccactagatagcattcatttcagtgaccaaaatgacgcatgtacccatctcaggaagactttggccgtccaagtcaaatgtgcctaaacaaatgcgtgcttcgacacaactttggattaagctcacattttattttt

SEQ ID NO: 217464 - DNA, 199 bp, Gossypium hirsutum
aagcacaccggacctgaacccgcaacatcccaatgtttgaatgtcaagcctaaaactagtggcaaattaaacccgactccatgttccagccctgtcccaaaaaccctaagtgccaccccttaaaccataccaacagattcagtgcaattgtaattaatatatttattcatattacataaaaaccgttctttttcatttt

SEQ ID NO: 217465 - DNA, 416 bp, Gossypium hirsutum
  unsure (1)..(416): unsure at all n locations
gagctacaaccaaaagaaaaagaatgggaaataaagcctccactgccaaaatcattgaaatgcagtcggcgagtcagtggagagcccagctagaggcctccaagcaaagtaacaagttgctggtagtagatttctcggcgacctggtgcggaccctgcaaatggatggaaccggtgattgaagaatatgccaacttatatgctgatgttgagttcatcaaaatcgatgttgataccttggaggatgtggctcgtcaattcaaagttgaagcaatgccgaccttcgttcttgttaagaaaggcaaagaaatatgcaggctggtgggtgctaaaaagactgaactccagaagctcattgagaaacacangtttgataattagcttgtttttgggggcaaactataaatatgggtgatg

SEQ ID NO: 217466 - DNA, 417 bp, Gossypium hirsutum
cccacgcgtccgggctgaccctgatgagcttcgtgaccctgctgagaaagctcactatgctgccagagatcccatcacagcactgaaaaaatacctcattgagaacagtctggccagtgaagcagacttgaaggctatagataaaaagattgatgaggtggtagaggaagccgtggagtttgcagacgaaagccctgttcctcctcgaagccagctgctcgaaaatgtatttgcagatccaaaaggttttggaatcggacctgatggccaatatagatgtgaggacccaaagttcactgaaggcactgctcaggtctaagctttcaaaataagaagttgatcaaaactatttttgtcaacttatttattatttcatggtcacatatggttagtttggggagcagtcacgcgttcact

SEQ ID NO: 217467 - DNA, 399 bp, Gossypium hirsutum
gcaggttctggatttagaatgttgtggaactctgtcaagtctttcctagatcctaaaaccacagccaagattaatgttcttggcaacaaatatcatagcaagttgcttgaaataattgatgaaagtgagttgccagattttctgggaggcacttgcacttgtgctgataaaggaggttgtatgctgtctgataagggtccatggaaggacccagagatcattaagatggttcaaggtggtgcacataaaggctcaaagaaatcacaggatgaaagcactgaagagaaaacgacatcagaggataaaactgagttcccaaagtctatgcctgctagtgaagccgtggctgctgagccagttccagatgcaccaattaaacaatcagacaattcttttgag

SEQ ID NO: 217468 - DNA, 415 bp, Gossypium hirsutum
caccgagtcatagcccaaaccgatggaactcggatgtctttagcttcattctacaaccccggcagcgacgctgtcatctatccggcgccggcgttggtggagaaagaagcttgggaaaagaacaaacaggtttaccccaaatttgtgtttgaagagtacatgaaactgtatgcaggactgaaattccaggccaaggaaccaaggtttgaagccatgaaagcgattgaagctactgctcccattgcaacagcttaaaataaaaatattattacttagcttttgactttgtggaaaggaagaaaaaggtgtttcagtgttcatcctatatcgtagatgtgtgttggttgcactggtgaatttaattattggaacgaccattctattatataattattattaaaagggtttttggctt

SEQ ID NO: 217469 - DNA, 413 bp, Gossypium hirsutum
cccacgcgtccggccgatggaagtgcacacttaaggatggcatcatgcatataaacaataaagacattctctttaataaggcaacaggcgaatttgatttctgattttgttaagagaaaaatgtagtcgccatcgtattgcagcagttaccttaaaaagagcaggtcaaggggtgttattctgtgtttcgtaatttgtcttttaattattattagagtgaaaggttgattgaggggcatgggatatgctttattttaatgtcttccttaagacttgggttcgatggttgtcgtattgtacataaaggaagagagcattttcggccttagaatggattttctacttgtgacagtttctttgatttcttaaaactttttcattgtaatttttaattttttttatttcttttttct

SEQ ID NO: 217470 - DNA, 385 bp, Gossypium hirsutum
gtaaatttttcagggctaagaaagagaaaaaaatggctttgcaaaaggctaaggacatcatatctaccaataccgtcgtcgttttcagcaagtcctactgtccgttctgtgtggatgtaaagcaattgcttcaaaaacttggagcttctttcaaggccattgagctcgacaaagaaagtgatggagctgatattcaagcagctctggctgagtggaccggtcagcgaactgtgccaaacgttttcattggtgggaatcacattggtggctgtgattctacaacaggcttgcataaccaaggtaagctggttcctctgctgactgaagctggagcttttacaaaatcatctgtttagaatagagttaagctgcttgtctcccctaa

SEQ ID NO: 217471 - DNA, 408 bp, Gossypium hirsutum
aaagctagcacttagcccggttacaccattaaatgaagaccctttcaacaagtcttcaccttctttagggaattcatctgaggaagagaaagctatagctgagaaaggcttttacttgcatccatcacctatgtcaacacctagagatactgagcctcagcttttaccactttttcctgttacttcaccaagagtttcaggctcttcttaaacatatgttagtttgagagtgatttgtcaagtgggttttggctgaaatttgagtgataaaaaaaaaaggaagttaagaagatctttcttcaattgtatgatttggtctccctttgattatggtaaagctcttctttttaccttctttcttcattttacttggattatggctaactagattattcccatatgaaaaag

SEQ ID NO: 217472 - DNA, 388 bp, Gossypium hirsutum
tccgagacgaagaaaaatggttcaacggctgacataccggacccgccatagctatgccaccaagtccaaccagcaccgggtcgtcaaaactcctggtggaaaacttgtctaccagacaactaagaagagagctagcggacccaaatgtccagttactggcaaacgaatccaagggattcctcacttgagacctgcggaatacaagaagtctaggttacctaagaacaggaggactgtgaaccgtgcctatggtggtgtgttatctggcagtgcagtcagggagaggatcattcgggcctttttggttgaagaacagaagatagtgaagaaagttttgaagattcaaaaaaccaaggaaaaagtttcatcaaagaactaaaagatgaga

SEQ ID NO: 217473 - DNA, 412 bp, Gossypium hirsutum
cccacgcgtccgaaatcagaacaaaacttccaaagctttcagacaagactagtgattcgtgttcaaagaaccaaacaagccaagtacatggttgatttggacgttcagatccctacaactttcgatccattcgccgaggctggggaatttggtggcactggaaccaaggagtatgttcatatacggattcaacaaaggaacgggaagaaaagcttgacgacggttcaaggcctgaggcatgacctgagctacgagaaaatcctcaagagtctcaagaaggacttttgttgcaacggcaacgttgttaaagacaaagagctcggcaagatcattcaactccaaggcgatcaacgcaagaacgtgtcgcaattcctcgttaatgccgggatcgtcaagaaagaccaaatcaaaa

SEQ ID NO: 217474 - DNA, 394 bp, Gossypium hirsutum
cccacgcgtccgcgacgtgatttaccaatgaagaaaaatgtcagcccagttttacgggttgcaagtcttggccatggaatccatgcctatgtaaatggtgaatacgccggttctgcacatgggagcaaaattgagaagagctttgttttccagagagctgtaagcttgaaggaaggggaaaaccatattgctctcttaggctacttagtgggactccccgatagcggagcctacatggagaaaaggtttgctgggctcgttctatcaccatccttggtttgaacactggaacactcgacatatcacaaaatggttggggccatcaagttggaattgatggagaaaagaagaaattgtttactgaagaaggctcaaagtctgttcagtggacaaa

SEQ ID NO: 217475 - DNA, 400 bp, Gossypium hirsutum
ttccgaataatgggatcatatgcagttcaaagacattatagtcaaagttgctagtgttgagctatattacaaggctgtccacttctacttgcaagagcaccctgatctcataaatgatatgttgaacgtgcttgcacttcgtgtggaccacactcgtgttgttgatatcatgagaaaggcaggtcatctgcgacttgtgaagccttacatggttgctgttcagagcaacaacgtgtcaacagtaaatgaggcgttgaatgagatttatgtagaggaagaagattacgatagattgagagaatctatcgacttgcatgataactttgatcagattggtcttgcacaaaagatcgagaaacatgagctgcttgagatgaggcgagttgcttcatacatttac

SEQ ID NO: 217476 - DNA, 417 bp, Gossypium hirsutum
gggtcatgtttggtatctcggaattgctaagccttccttggtggactcggaagaagttgagagtgagaaagggaagatagcggtgcagtctcgttgtggtcatttctacgtgcctccagccattgaagatgttcgtgtttttagaattgcaggtcctaagtttatcaaacttaatcgtggaacatggcacgccgggcctttgtttaaagctgatgctatggacttctacaacttagagctaagcaataccaatgtggtggatcatacaacacatgtgttcaagaaggaaaacggagtcatcttttcaattgatgagtagctttgttcgtccgatgccgaagatgttgagagatgtgattttggagagtgaaaacttttccaacactatcaaatatgttgattttgcgttttattttt

SEQ ID NO: 217477 - DNA, 432 bp, Gossypium hirsutum
gctgactgcacaaatgacaaggcatgcaacaactgtaggagaccaggtcacttggcacgggagtgtacaaatgatccaatttgcaacttgtgcaacgtagccggacatgtggctaggcattgccctaaaggcaacatgataggtgagcgaggcagttttggtggtggtggtggtggtagtggtagtcgtggcggtggctatcgagatcatcatcatagagatgtagtgtgccgtaactgccatcaattcggtcatataagccgggattgcatgggaccgttgatgatctgtcacaactgtggtggaagaggacacatggcatatgagtgtccatcaggaaggtatttggaccgttatcctcctcggaggtactagatgatgatgccagccaggttatggcaggatcaaaaaatattttaattaataacatgc

SEQ ID NO: 217478 - DNA, 349 bp, Gossypium hirsutum
ggcttcctcaaggtgattattatcccaaagcttgccatgttggttttggacttgttcttggagaatatggcatgcgtttgctaacccccaacactgaagtggttcgtctagttgatctacttgacgatgccaagatccgatgttaagctacacttatcgagcatggtctgggtgaagaatggaccgaggaggagattgctagtactgctgatgcacttggttatggtgctgttaagtatgctgacttgaagaacatcagattgactaattatacacttaattgtgaccatatgcttaacgataataaagcatttcgcaaggtgcctcaatagtcaaagattcccccatc

SEQ ID NO: 217479 - DNA, 379 bp, Gossypium hirsutum
cccacgcgtccgcaggtgacacagtttgaatttgaaaagccacccaaacactatggaggatgtcacaggaccatagaaggtggtccatatcttctggtgccttcatgcaaagagggcaatgaacatcaacctttagagttctttgtgacagattactataatgaggcagaaagttgctaaacaacctccaaagatgtattttgatttttggtgtgagtatagatcaaaaaaatttgtaaaagtccttgcaagcctcaaagataggcatgttgtaattaataccctatagggaatctgtaactaagacccgatatccacttcttatggagtaatctccaaaacccacatatttccagaccaaaccaataaaaacttgatc

SEQ ID NO: 217480 - DNA, 421 bp, Gossypium hirsutum
  unsure (1)..(421): unsure at all n locations
ggcagccaaagccgccatcacgtgcagcgacgtggtgaaccacttgatcccgtgcttgtccgacgtacaaaacggcggtacacccgctgctgcatgctgcagtggggtaaaagcactctacggcgaggttcagacctccccggaccgccaaaacgtgtgcaagtgcatcaaatcggcggtgaacggaattccgtacaccagcaataacctcaatctcgcagccggcctacctgctaaatgtggtctccaactcccttacagcatcagcccctccactgactgcaacaaggtgcagtgaggttgatgatgatgatatggaaggagtggaagagggtccagctcagctagataaagtagctagctanagtaaaataagctgagtgagtgtgttgttttttagaaattccatatataatcgggg

SEQ ID NO: 217481 - DNA, 406 bp, Gossypium hirsutum
cccacgcgtccgaagaaaaccaaggttgcaatggtggtttaatggacattgcattcgattggattaagaagaaaggtgggatcactactgagtccaattacccttaccaagctaatgatggaagttgcgatgctgccaaggtgaattctccggctgtggctatcgatgggcacgagaatgtgccagctaacgacgaggatgctctgcttaaagctgttgcaaaccagccggtttcagtggctattgatgctgggagtatggatttccagttctactccgagggggtattcacgggagaatgtgggacagagctgaaccatggtgtagcagcagtggggtatggaacaaccttggatggaaccaagtactggatagtgaagaactcatggagagcggaatggggtga

SEQ ID NO: 217482 - DNA, 392 bp, Gossypium hirsutum
cccacgcgtccggtacggtgccgcagtccaagccgcaatcttaagcggcgaatgcaatgaggaggtgcatgacctcctgcttttagatgtcaccccgttatccctcggattagaaaccgccggcggtgtgatgactgttttgatcccaagaaacactaccatccccaccaagaaagaacaggtcttttcaacatactccgataaccaacccggtgtattaatccaagtttacgaaggtgaacgaacaagaacaagagataacatcttattaggcatattcgaactctccggcatcccaccggctccacgaggtgtaccgcatattactgtgtgcttcgatattgacgccaacggcatcttaaacgtttcagccgaagacaaaacaaccggtc

SEQ ID NO: 217483 - DNA, 394 bp, Gossypium hirsutum
tgcaattgctaaagaagttgaagctgagctggtttcgagggacataggctgccatctggttgaagtgctggaagcagtcaatttagttctttttgagtcaagaggcttgacaagatcccccgttcttgtagattctaagcattcgtacttacactcagtactgagctccagatgtggcagtgcaattttgcttagcataatttacattgaagtttgtcggcggcttggtctaaccattgtgggatctcgagttggggaagattttttgatatggccccagacagggtacccagaggaactcttcaaagtgacttcaggacacatcttgtttgctattgtcaatggaaggtgtgtggaggaccctagatcaatggcatcagatttaactggtact

SEQ ID NO: 217484 - DNA, 329 bp, Gossypium hirsutum
cccacgcgtccgcccaatcattgctgttctttttttctaacacactcacttaatctaatgggatgaggttcacagaggacaggctctttatccacataatccatatcatattaagagtgtctaccatgtaagctccaagattacttaacttttctgcattccaagagttacttattctcttactcatggtattgacataaacatcataccatccattgcttccaccaaagcaattatatctgctgcatgtacttcggaaaccttaaagattgcatcaggatacactaatactctatcaaactatcttacgtataatggtgttgaaagtc

SEQ ID NO: 217485 - DNA, 312 bp, Gossypium hirsutum
cttagcagaaacccctataaatgcagctcattgtattgaatatgctcacttaattaaatgggatgaggttcacagtggacaggcttttgatccatataatccagatcatatgaagtgggtctacgatgaggctgtcaagagagctgaacttttcggcattccaggagttacttattctcttactcaaggtgttgtaaaaaacatcataccagccattgcttccaccaatgcaattatatctgctgcatgtactttggaaaccttgaagattgcatcaggatgcagtaaaactctatcaaactatcttacgta

SEQ ID NO: 217486 - DNA, 307 bp, Gossypium hirsutum
aagtttcagctgtatactgtgatgattataaagttaggcgtgctggacctggtacaagaatgactggttaggttatctgggattgatgaggaggacatatcgcctggtttagtcttgtcatgtgttggaaaaccgattcctacggtcgctgaatttactgcccaactgcacatcctagaattacttgagaatgctatttttacagctggctataaagctgtcttgcacattcattctgttgttgaggaacgcgagatagatgagctactacagcagattgatccaaagacaaagaaacccatgaaaa

SEQ ID NO: 217487 - DNA, 388 bp, Gossypium hirsutum
cgagcaattcactgccatgttccgaagaaaagctttcttgcattggtacactggagaagggatggatgaaatggagtgcacagaagctgagagcaacatgaatgatttggtttcggagtaccaacaataccaggatgccactgcagaagacgaggagtacgaggaatatgaggaatacgaggaagaggcttaaaggatgctccttgttctttttatcatgtaggacattcggttgtgcaatctcggctttgctggttttcagcatttggatcgcttattgctgctgtctttgtgatttacagactagtattgctgctttgttttttatcaataattttcagcagtcagattcgtttctctcacaaatgtagcttacaattgtgagagc

SEQ ID NO: 217488 - DNA, 363 bp, Gossypium hirsutum
cccacgcgtccgggcaaatattcccataatcgctcttttctgcttcaccatttttgtttcggcctcgctcaatttcgtctatggggctgaaaatatgagctacgtcgtcgtaggccatgtttactgtgacacttgccgtgttgagtttgagaccaaactcagcgaacccatcgctggagcagttgtgaaactggaatgcaagaatcgtacagacaatgaccttaccttccagagccaagatattgtgactgacgaacgtcgtgactatcacattgtagtggaaggcgattatgaggaatcagactgcgacgtcaccttggtgaggagtcccaacccggattgcaatgatccctccgaaatgtg

SEQ ID NO: 217489 - DNA, 413 bp, Gossypium hirsutum
cccagtcctaaaaaccctctttatgaagcattgggtctctatgatatggcctcctcccaggctattcataccttctgctctcagttggatgcctctccttcacaaagagacgcagtagagaagtatgctaaagcaatacatgaggtaatcatggatataggtggaaaaatagcagagagtatgggattgaagggtgattactgcaaggaatggccttgccaatttaggataaataagtactatttcacccctcaatctgtaggctcggctggggtccaattacacactgattctggcttcttaacaatacttcaagacgatgagaatgttggtggacttgaagtgatggacaaatctggtgaatttgtagctgttgatcccttgcctggcagcctccttgtcaatcttgggga

SEQ ID NO: 217490 - DNA, 391 bp, Gossypium hirsutum
ctcccatcaaacctctccgctagtaagaacccgagtcttgattatggtttcaaaggtgctgaaatcgcaatggcctcctattgttccgagctccaatacttagctaatccggtcactaaccatgttcaaagtgccgaacaacacaatcaagatgtgaactcattaggactaatatcatcacgaaaaacagccgaagcagtcgatatcttaaaactcatgtcctctacatactaggtagctctatgtcaagctattgatttaaggcatttagaagaaaacttgaggaacacggtgaagaacactgcgagtcaagtagccaagaaaaccctcacaaccggtaacaatggtgaactccacccatcgagattctgcgaaaaggatttgctcaaag

SEQ ID NO: 217491 - DNA, 424 bp, Gossypium hirsutum
cccacgcgtccggaggaaactccctaaagagagttgaagctgtgactgagtgtagggtgtacggaagaggcaaaggttctgtcaaagattctgttaaggaagagaaactaaaagataaacctggattcaaacaccttaatgagccgttgcatgtgttggtggaggctgaacttcccgaagatgtgataaattctcgtttggactacgctgttgccatactagaaaatcttctgaaacctgtggatgaatccttggataactataagaaacaacagcttagggagttagctttactaaatggtacattaagggaagagagtccgaaaatgagcccgactatgagccctagtatgtcaccctttgacggtactggaatgaaacgagccaagacaggaagatgacccttacagtgatgggatgttga

SEQ ID NO: 217492 - DNA, 399 bp, Gossypium hirsutum
cccacgcgtccgggttgaatttctgcttgaatctcttgggctaagtgatagagatgatgtggtccgaatctatattggagatgacaaaactgatgaggatgcgtttaaagtcttaaaggaaggaaatatgggttatggaatcttggtatcttcagtgcctaaagaaagcaatgcaattttctctgtcaaggacccatcagaggtgaagaaatttctgaaggcacttgtgagattgaagatgcttgaagaagcttgaatgaaaagcaaggctttgggagcaaaaaaaaggcagaatataaatttcattgaagaggataatttagtttttatttttatattttgcagattatgtaaatattttgcatttcaattttttatcaacgatttattccccccttt

SEQ ID NO: 217493 - DNA, 395 bp, Gossypium hirsutum
gcaagttcaaggctggtgattcacctgccgaggagctcgcaactgcaacccaagtccaaggaccatacatgcctatttctcgtgagaagccttccgttgagctcgtgaaggtcaccgacgacatgaaatcattcaaggcatacaacaagctccgtgttgaacgtacgaacaaacgtcatattggtgctaggttgaagaaggctgccgaggccgagaaggaagacaagaagtaaggttaccctttttggggacagtgttttgttatttggcttgctaaaaagaccttaaattttgtattcattttgtcaagtgaactgagacagctttagaaaactttggtattatgacagtaatccattttgttgagcattttattaaattgagaagtttcttgc

SEQ ID NO: 217494 - DNA, 391 bp, Gossypium hirsutum
cggacgcgtgggatttttatcatggtcggctgaaccggaaatggaagagagaaaacggaaggggtttaagtggatatttgtgctatcacttgcacttctccaagcagcttattaccggcgtttgaaatggtcagttttgaaatcccgaaaactggtgcttgatgttgtcaattgattcccttctgtttatttgagaagagatagattggtaataattaattcattaaactgctaatacagttggacagattgatctccttttcgttgtactatttgtttacttagctaaagaataagctgcattgaattgtattaggatcagaaaccgaagttactcggatttgggtgtgaatattcgatttgagtatgtatgggtaatttatctaaaata

SEQ ID NO: 217495 - DNA, 315 bp, Gossypium hirsutum
ggcagagcaaatggcaatatatgacgccaacaacggaggaaaaatgccattaacatgggaacaaacaagaagcatgcctcttacacatagggttgtaatggagagcttgaggatggcaagtattatatctttcacattcagggaagcagtagttgatgttgactacaaaggatacttaatacccaagggttggaaagtgatgccattattcaagaacattcatcataacccagaattttttcccaatcctcaagaattcgatccatctagatttgaggtagctccaaaagccaacaccttcatgccatttggaaa

SEQ ID NO: 217496 - DNA, 422 bp, Gossypium hirsutum
caacgtatgattaatcaacgacgggaacttggtttttccgacaagagtgatcttttgtcgagatttatggcgacaatgatcgacgacgaccagtatcttcgtgacattgtcgttagtttccttttggctggtcgtgatacggttgcttccggtctaactagtttcttctggttattatctcaaaacccgaaagtcgagttcgccattagagacgaactcgaaaaggtcactgccgggatttcgccgagcgacgatcaagatttcgtaatgttcgatcaaatgcgtgaaatgcattatttgcacgcggcattatgcgagagcttacggttgtttccgccggttcaattggactcgaagttcgctcaacacgacgacgttttgcctgattttacttttgtaaggaaaggtactagggtcactta

SEQ ID NO: 217497 - DNA, 421 bp, Gossypium hirsutum
cccacgcgtccgcccacgcgtccgcccacgcgttcgcccacgcgtccgcccacgcgtccgcccacgcgtccgcccacgcgtccgtgcagctgtaccacacatgttcatcaatggctacaagaatgtcttggctgttgcagttgcaacagagtattctttccgtcaggccgataaagtgaaagagtatttggcggatccaagcaaatttgccgttgctactgcccctgttgctgctgctggtggtgctgctccggctgctgctgtccctgcagaggagaaaaaaccagaaccagaagaagagtctgatgatgatatgggattcagtctctttgactaagtttgtctttattagtataaagattcaggattggaagactagagaaaaatctgagaacgctatgagttgtttatcgtagttttg

SEQ ID NO: 217498 - DNA, 413 bp, Gossypium hirsutum
tttccatttacttctctattgctacgtttgtgaatttttagtgagcgaaaatgagagagtgcatttcagtccacatcggtcaggctggtattcaagtcggaaatgcctgctgggaactttactgccttgaacatggaatccagcctgatggccagatgccaagtgacaagactgtcggaggaggtgatgatgcttttaacacctttttcagtgaaactggtgctggaaagcacgtccctcgtgctgtctttgtggatcttgagcctactgttattgatgaagtgaggactggtacttaccgtcagcttttccaccctgagcaactcatcagcggctaggaagacgctgccaacaacttcgctcgtggccactacactattggcatagagatcgttgactagtgcttggaccgt

SEQ ID NO: 217499 - DNA, 413 bp, Gossypium hirsutum
cccacgcgtccggcgactcactgggtattgaacaagacgaaccattggccgttaatttcgcgttcaagctttaccggatgccggacgaaagcgtctccatcgagaatccaagagacgagctcttgcgccgcgtgaaaggattagcaccgcgcgtgctgacattagtggaacaagaaatgaacacgaatacggcgccgttcgcgtcaagggtgggagaagcatgcggatattacggagctttattcgactcggttgagtcgaccgtgttgagggataacccggaccgagcgaagctagaggaagggctgttacgcaaaatcgccaactcagttgcttgtgaaggtagggaccgcgttgaaagatgcgaggtttttcggaagtggcggcccagatgagcatggcggagttcgagt

SEQ ID NO: 217500 - DNA, 393 bp, Gossypium hirsutum
atgaaaatgaaatatctacaaaagttagaggtaatggcgaaaaaacttcaacgccatatggaatggctctctggtcaactggcattggacctcgtcctctcataaaggagttcatgaagcaaattggtcagggtaataggcgtgctttagcaacggatgaatggctgcgagttgagggatttggtaacatttatgcacttggcgactgtgctactgttaaccagcggaaagtcatggaagatatatcagaaatatttagaaaggcagacaaggacaactcgggaacacttacagtgaaagaatttcaagagatcattgatgatatctgtgaaagataccctcaagtggagctttatctgaagaacaagcaggtgcgtaacatggttgatcttt

SEQ ID NO: 217501 - DNA, 272 bp, Gossypium hirsutum
gccgatatatttgcggtgacgccgtcgttcttggtggtggaagttaaaaaggaccatggcgacacattcgagtacaatcagttttgcagtaaagagctccggccggcgcttaaagacatcctatggacgtcgccgcccgagaactcgactgtggcttgatttatgtgaggtgggaagtcattgtttgatgatgaaggttattgttgttattgcgaaagtgtgattatgtgattgtttttagatgggaaattgaaaacccagatttggtggtg

SEQ ID NO: 217502 - DNA, 339 bp, Gossypium hirsutum
cttttggcaattccaatatcgactgtagcttctgaatcggcttttagcatgggcaagaaagttatcacacctttgaggagttcacttaagccaaaaacggttcaagccgttgtttgcttggatgattggatgcgagctaaggaattttcagcagaaattggttgcaaaaatgacgatgacgatgatgatgacgatgaggatgatgtttcttcggttgctttttaagatactctctttctaaatgtttaaaatttaatttagcttacaatttatattttgttataaaattaaatatgttgatggattaatatatgaatattatggttttttgcttattgc

SEQ ID NO: 217503 - DNA, 397 bp, Gossypium hirsutum
cccacgcgtccgcccacgcgtccgcccacgcgtccgtgactttgcaagcacatatcccaattcttatcgaggaactcactaagggcgatactagtgtccttcccgtcatcgttgctgcaagagatgtctccattcaaggactttgcaatggaaagtgtgccgatcatctacttactgaggatcccaagccgcgcccatacatcatcgtcgggaacccggaaactgagtgccctgaagaatgtggatggcctttcgttcccgctgaacctggctcaaaaggaccagtccttaaaccaccaagtggcaatatggcagctgatgctatggtcattgccttcgccagcactttggctgatgcggtcacaaaccctatggagaacggcatctaccatgagaa

SEQ ID NO: 217504 - DNA, 388 bp, Gossypium hirsutum
  unsure (1)..(388): unsure at all n locations
ttcaggacaaagaagggattccaccagatcagcaaaggttgattttcgctgggaaacagttggaagatggaaggactttggctgattacaatattcagaaggaatccactctccaccttgtcttgcgtcttcgtggtggtttctaagctctcctatgaaaatgaggtttctggattttatgtgaatgattgtgatgtctggccctgttaaggcctcataaataaacctaaactattttatctatgttttatcttatgtaatgatattatatgaataaaaattacatgtttaccttaaaaaaaaaaaaaaaaaaaaacccccnnaaaaaaaaaaaaaaaaaaaaaaaaaaaaaaaaaaaaaaaaaaaannnnnnnnnaannnnnnaana

SEQ ID NO: 217505 - DNA, 415 bp, Gossypium hirsutum
aaagagacacttaggctccacccaccagctcctctattggtcccccgagaaacaactgaggactgtgttgtcggagattacgagatcccggccaaaacaagggttatcatcaatgcgaaatcaattggaactgatccgaaatattgggaaaaccctcatgactttcaacccgatagattcatgaaaagttcagttgatttcaaagggcaacatttggagtttttgccttttggagtaggacgaagaggttgtccagggatgagtttcgcaattatgcttcttcagctcatggtggcaaacttcttatatcggtttgattgggaattgcctgaaagaatgagtgttgaagacgtggatatggaagaagaattagggatcacagtattcaagaaaactcctcttttgttggtaccta

SEQ ID NO: 217506 - DNA, 378 bp, Gossypium hirsutum
ctgcgtccgaattttatggatcagcagataaaacctatgatctgaacttcaaggaagagaaaaatgatggttctcaaaagatatcaggagatgctctcaaagacttatacaagtcatttgtttctgagtatcctatcgagtcaattgaggatccctttgaccaagatgattgggagcattactccaaactaaccaatgaaatcggaacaaaagttcagattgtcggagatgatctcttggtcaccaatccaaagagggttgagaaggctatcaaagaaaaaacttgcaatgctcttcttctcaaggttaatcaaattggatctgttaccgaaagtatcgaagctgtcaaaatgtccaagaaagctggatggggtgtga

SEQ ID NO: 217507 - DNA, 409 bp, Gossypium hirsutum
ttcagttcagagtcataagcaacatcaatggctccttcaactctgacggctcttgcggaagagaaaaccttgcaggcaagcttcgttcgtgatgaagatgagcgtcctaaggttgcttacaaccaattcagtaatgatatccctgtcatctctcttgctggtatcgatgatgttgatggcaagaggggtgagatatgcaagaagattgttgaggcttgtgaggattggggtgtcttccaggttgtggatcatggtgttgatactaaactcgtgtccgaaatgacccgtcttgcgagagagttttttgctttgcctgctgaagagaagcttcggttcgatatgtctggtggcaagaaaggtggtttcatcgtctccagccaccttcagggagaagcagtgcaagattggc

SEQ ID NO: 217508 - DNA, 396 bp, Gossypium hirsutum
attccctagcatcgttggtcggccacgtcacaccggtgtgatggttggcatgggccagaaagatgcatatgttggtgatgaagctcaatcaaagagaggtattttgactttgaaataccctattgagcatggtattgtgagcaactgggatgatatggaaaagatttggcatcataccttttataatgagcttcgtgttgccccggaagagcacccagttctccttactgaggctccacttaacccaaaagctaatcgggagaaaatgacccaaattatgttcgagaccttcaatgcccctgctatgtatgtagctatccaggccgtgctctcactttatgccagtggtcgtacaaccggtattgtgatggactcgggtgatggtgtcagccacac

SEQ ID NO: 217509 - DNA, 386 bp, Gossypium hirsutum
attaatgtctttcattcatccttattttgttctatttgtattttgttagatttctggtgtagtatgataagtgcggtattttgtttggcgggatgtatttatatcatagattattcttcttctcaaaaaaaaaaaaaaaaaaaaaaaaaaaaaaaaaaaaaaaaaaaaaaatgatgttgatggcaaagaggggtgagatatgcaagaagattgttgaggcttgtgaggattggggtgtcttccaggttgcggatcatggagttgatactaaactcgtgcccgaaatgacccgtcttgcgagagagtttatcgctttgactgctgaaaagaagcttttgttcaatatgtctggtggcaagaaaggtggtttcatcgcctgcagccat

SEQ ID NO: 217510 - DNA, 423 bp, Gossypium hirsutum
acccgtggggatgatgctcccctagcccaattgcccaaatcctaaaacgactacggaatgcggaagcagaaattgagcaagggaaatcttctggcatctttggtcatatattatacaatgataatctcgaggagtgctatgagaatcttaaggaactgctagggctgaatggaagtgcaccaactaatcataagccatcacccaaagggattgatctgccttcgaaccattcggtgtcaaaaatcgataacaagatcctcataaattgtgagactccggaactcgagaaagcgtcaaagaacttgattgcattggatgtgtcgtcgctaaaaggtggggcacccggtcggacaagaggactaaatgtctatgcccttgattcattttcagatggcttaaatgagaaactgagctgacgactgc

SEQ ID NO: 217511 - DNA, 111 bp, Gossypium hirsutum
cccacgcgtccgcccacgcgtccgcccacgcgtccggtttttggccaaattgtttgaagatgtgtgctttttgattgtcattattatgcaactccatgatcataacctttc

SEQ ID NO: 217512 - DNA, 409 bp, Gossypium hirsutum
cttttctccggtgtctccgccacgatgcttcgacaaacgttgtactctactacccgtatgggactttatgaaattataaagaacaaatggactgacaaggaaactgggaatttgccacttacgagcaagatattggctggacttattgccgggggtgtcggcgccgccgttggcaaccccgctgacgtagcaatggttcgaatgcaagctgatgggcgactccctattgatcagcgacgcaattacaagagtgtaatcgatgcattgagtcaaatgacaaaacaagaaggtgtgggcagcttgtggcgcggctcagctctcacggtgaatcgcgcaatgatcgtcaccgcatcgcagcttgcgacgtacgatcaagtcaaggagacgatactggaaaaaggagtgatgg

SEQ ID NO: 217513 - DNA, 409 bp, Gossypium hirsutum
ggtttgtattaggggattgaatgtaacaagggatataagaacaacccagaggctaataaatcggcttttcaatttggttggttccacactggggatgtcgggttttttgactccgatggatacttgcatcttgttggtcggatcaaggagctcatcaatcgtggaggtgaaaaaatatcaccaattgaggtagacgcagtgttattggctcacccagatgtagcacaggcagttgccttcggtgttcccgatgagaaatatggcgaggagataaattgtgcggtgattccaagggaaggagtaagcttggatgaagcagaaatcacgaaatattgcaaaaggaatcttgcgagtttcaaagtacccaagaaagttttcatcacggattccgtgccgaaaacagctactg

SEQ ID NO: 217514 - DNA, 409 bp, Gossypium hirsutum
cccacgcgtccgatgaaaacttgacgtgtttgccggctgatgccggtgccataaggagtatgattagtgttccacttgcaggatttaacagcaaagatgatctttataacttacacatgaactgttgtcttcttttacggatttggttcagaacaacctagtaaacgtaacccttgacgaacattccttgcttggcttcctcggaccacccttcacccatgtacttgccgagttgagcgagagagttggcctttgccgaaacaagcagcacatcctgagccaccttcacgttctcaggtccgccttcccatttctttaggcaagtattttgaagggctcttgcatatgagaatgacacatgccatggattcggagcaaggtagcctcaatttcagactgcccaccggac

SEQ ID NO: 217515 - DNA, 413 bp, Gossypium hirsutum
cccacgcgtccggatgacggatggtgttccggggcttcagatttgcagggagaaatccaaacaaccacaggtttgggaggatgtgccaagcataagtggggcattcattgttaacattggggacatgatggagaggtggaccaattgtttgttcaggtcaacactgcatagagtgctgccacctagacaagaacgttactccgtaatgattcacccttttgctgtttatgcagaacagttccatttttttggaaagttcaactatgttaggaaataggaacagtttgttgaatgtccttttgatttcgaaatcttcatgttgaatgatattatctgttcataatctgattatttgatgagggtgcaaaagattgaaatgtattcaccagtcattgcacattgtttattctata

SEQ ID NO: 217516 - DNA, 377 bp, Gossypium hirsutum
  unsure (1)..(377): unsure at all n locations
gtgagaagccttccgttgagctcgtgaaggtcaccgacgacatgaaatcattcaaggcatacaacaagctccgtgttgaacgtacgaacaaacgtcatattggtgctaggttgaagaaggctgccgaggccgagaaggaagacaagaagtaaggttacccttttggggacagtgttttgttatttggcttgctaaaaagaccttaaattttgtattcattttgtcaagtgaactgagacagctttagaaaactttggtattatgacagtaatccattttgttgagcaaaaaanaaaaaaaaaaataaaaaaaataaaaataaaaatatttaaaaaaataaaaaaaataaaaaaattaataaattattttattttttt

SEQ ID NO: 217517 - DNA, 385 bp, Gossypium hirsutum
gcataccaaaccctagcgccaagatttagtgttgaaaatctcgagcacaatggccaccggtgaactcgcctgtacttacgccgcgttgattctccatgacgatggaatctcaatcaccgccgagaagattgctacattggtgaaggcagcgaacttgagcgttgaatcttactggccaagccttttcgccaagctcctcgagaaagtcaacgtcgatgatctcatcaccagcgttggctccggtggtggtgctgcccctgttgccgttgctgctgcttctggtgcagctggcggtggtgctgctgcggctgccccggctgttgaggagaaaaaggaagaagagaaggaagagagtgatgatgacatgggattcagcttggttgac

SEQ ID NO: 217518 - DNA, 211 bp, Gossypium hirsutum
cccacgcgtccgctttctcccaataccaccccctcttgcctcatttgacaccaaaatggcgaactcagcatccggaatggcagttaacgatgaatgcaagatgagattcttggaactaaaggccaaaagaagcttcaggttcatcggtttcaaaattgaagaaaaccttccaccaggtattggtggaaaacttggggggacctaaggaaaa

SEQ ID NO: 217519 - DNA, 343 bp, Gossypium hirsutum
cccacgcgtccgcttcaccggagaatgcaaagaatgtcgccactgtctgtcagaagaaagcaatgacatgtgcgaactgcttaggatcaactgcgaccgaggtgttatgcttgctgatgggaaaaccagattttccatcaacggcaagcctatctaccactttgttggaacctcgacctttagccaatatactgtcgtccatgttggccaggttgccaagatcagtccaaccgcccctcttgataaagtctgtcccattagctgtgggatatgtacaggttttggggccactgtgaatgttgctaaacccaaaaagggtcaaactgttgcagtttttggactg

SEQ ID NO: 217520 - DNA, 339 bp, Gossypium hirsutum
gctatgcctcggttgctgtggggactgacattctgtctgccgcatcccaagttagtctccagagagctcgaagctgggatgaaggcgttacctccaatttctccactacttctgtcaatgacatcttcaagggcaagaaagttgtcatctttggactacctggagcatacacaggtgtgtgttcacaacagcatgtgcctagttacaagaagaacatcgatgagttcaaggctaaaagaatcgattcaggcatttgtgtcgccattaacgatccttatgttatgaatgcctgtgcagacaaactgcaagccaaatgatgtgattgaattttatggggac

SEQ ID NO: 217521 - DNA, 411 bp, Gossypium hirsutum
cccacgcgttcgctgagacagaggagcaattcctaaaacgactacggaatgcgggagcagaaattgagcaagggaaatcttctggcatctttggtcatatattatacaatgataatctcgaggagtgctatgagaatcttaaggaactgctagggctggaatgatgtgcacaactatatgctgaccatctcccaaagggattgatctgccttcgaaccattcggtgtcaaaaatcgataacaagatcctcataaattgtgagactccggaactcgagaaagcgtcaaaaaacttgattgcattggatgtgtcgtcgctaaaaagtggggcacccggtcggacaagaggactaaatgtctatgcccttgattcattttcagatggcttaaatgaaaaactgagctgacgact

SEQ ID NO: 217522 - DNA, 410 bp, Gossypium hirsutum
ctttcttgggctacaaggcaatgttctaagggttcattgagccaaaaaaaattgagctgaattttgcagatattgatggactaagacgtaagctttccaacaagctttccgcgagcagggatggcaacgaaacagaatgggaggtgggagagtgtctaggcatgtggtggcgacatgatttcgaaacactgttgtgtccctacttaccacccaccgttaaaaagcccaaggagtgcaccaaactctttcttgtccggttgccggagagtcggaaatttatcgtacccgaaaacctaaaattgcttgcggttccgttgtcccaggttcatgaaaatcacaagacatatggaacggtaatatcaggagtgccgcaattgctgtccaaatactccatcaacattattgatatt

SEQ ID NO: 217523 - DNA, 337 bp, Gossypium hirsutum
aggcagcatctgctggcacccgttataatgtaccgttaatcaactctctggtgctttacgttggaatgcaggccatccaacaactgcagtcaagggtacctcatgcacaggcaacagcaaacactgttccgatgtctgtgttcttggttagtgctgccttggatatcttccagagtctaataggggaccttgatacggaggggcgttatcttttccttaatgcaattgctaatcaattgcgatatccaaacagtcatacacattacttctccttcatcttgctatactcgtttgctgaagcaaatcaggaaattatccaagagcaaattacaagagt

SEQ ID NO: 217524 - DNA, 403 bp, Gossypium hirsutum
cccaattcaagtcattgttgatgctattatcaacagtgggccacgtgaagatgctactcgaattggttctgctggtgttgtcaggcgtcaggctgttgatatttctcctcttcgtcgcgtgaatcaggccatctatcttttgaccactggtgcacgtgagtctgcattcaggaacattaaaacaattgcagagtgtttggctgatgagcttattaatgctgctaagggatcatctaacagctatgccatcaagaagaaggatgaaattgagagagttgctaaagctaatcgttgaggaattggaagaagattaaacaccatgggagtggagaattttgttgttttagtcagtactttataagccgtttttgtattctggacatgctatgaatgtctcgttttt

SEQ ID NO: 217525 - DNA, 372 bp, Gossypium hirsutum
gctttgcaaagtatggaagaagaagcagaacgaatttataaagatgagcgtggattgcttcttgatgatgaagctgcgtcaacaagagatgcaatgtatgagcaggcagaaaatgtggagagggaactggagcatatgacggaacagatcaagtcgattattgagacagtaaactctagtcagggtggggaactcgaggcacttgacggaatgactcccctagatgtggtggtcaagatcttgaataatcaactaacttctttaatgtggatcgatgagaaagctgaagaattctctggtcgtattcggaagcttgcagcccagggtaatgctgcagatggagaattaattgctgctccaaaatattggatg

SEQ ID NO: 217526 - DNA, 412 bp, Gossypium hirsutum
atcaatattcacgtattatacgttttgggtcatcatcctgccatttgtggacagtgataagttcatccacaattattttctaccccaggaatatgccatactgatccctgtgtgtgccggtgtggtgctcctttgcctcctctgtatttttattgggttcgtgctgctcaaatccaagaagaagaaggcttgaagcttgatgctactttatcatctctgcttaaaacatgccttgggtatagctttgcttgttttcttccatatatttttgcttcgagtttaagttttgagatgagaatttgtgtttaggccatcataattttgttaaagactgttgcatttgaggacaactttctttgatttttctgtctaatatacaactgctacagagaacccagtgtatttttctttc

SEQ ID NO: 217527 - DNA, 410 bp, Gossypium hirsutum
gcgtacgagcaaacaatccagtcatgcattccaagtttaaacttgtggaactagacttgttctttgtaagagaaaaagtggtagatggttcgctgctagttggtcatgtttctgggcaagatcaagttgctgacatgctgacaaaacctttggctgtagggttatttgacaagtttagaaagagacttggagtggcctccatagcagaggatattatgcaaaagcaaggaacgtcgagaagcaggagccatgttaaggataagaaacagttagttcaaagcagttagtcagttagtatcagttagctgttatggttagcagttaataaatttgtatattaaatacccagttgtaagtatgcttatgatatgagaaaatcaataagaatcagtccgtatttttcagatctt

SEQ ID NO: 217528 - DNA, 393 bp, Gossypium hirsutum
gacggttcctttgatttcgagagtagatattcgctcgtttctctctttcgtcgaactccgcgtaataatcgctcatatttctcgcagacgtgaagaatggggctgtctttcacaaagctgttcagccggctttttgccaagaaggagatgcgtatattgatggttggacttgatgctgctggtaaaaccaccattctttacaagctcaagttgggagagattgtcaccacaattccaaccattggtttcaatgtggaaactgtggaatacaagaacatcagctttactgtctgggatgttggtggccaagacaagattcgtccattgtggaggcattacttccaaaacacacaaggactcatttttgtggttgatagcaatgatcgtgatcgt

SEQ ID NO: 217529 - DNA, 412 bp, Gossypium hirsutum
cccacgcgtccgatttggtcttttgatccaacggctaagagggctctttttagaattttgcctaatacgacgactgcaatttctttttaatagaagaggaaattttcattacagcaactggtccaggccttttcgttcgtctttacaatacttccctccgtttgagcacttccagatctgaagaaaaatgcctcccgccgctcctcgatccggagatgcgatcttcgccagcgtagaacgcgtgaatgcagaactattcactttgacttatggagcaatagtgcgtcaattgcttactgacttggaggaagttgaggaggttaacaaacagcttgatcaaatgggctataatataggaattagactaattgatgagtttctagcaaaatcaaatgtgtccagatgtgttgac

SEQ ID NO: 217530 - DNA, 317 bp, Gossypium hirsutum
gtctggcagttgaaggaatacgacggcaagatgcttgtctctgccacaaaggaaggtttaaagctcgaggacgagacggaggaggagaaaaagaaaaaggaggaaaaaaagaagtcttttgaagatctctgtcagacaatcaaagatatcttaggtgacaaagtggagaaagttgttgtctccgacaggattgtagactcaccttgctgtctggtcaccggagagtacggatggactgctaacatggaaaggatcatgaaagcgcaagctttgatagataatagcatgagttcttacatgttcagcaagaaaacaat

SEQ ID NO: 217531 - DNA, 180 bp, Gossypium hirsutum
ggctaaacgaaattgaccgctatgccagtgacaatgtgaacaaacttttggttgggaacaagtgtgatctaacagcaaacaaagttgtgtcatatgagacagctaaagcttttgctgatgaaattgggattcccttcttggaaacaagtgcaaaggatgccactaatgttgaagaggctt

SEQ ID NO: 217532 - DNA, 380 bp, Gossypium hirsutum
ccacagctacaagggtttccagcagcttagcagtttggttgatgttggcggtggtcttggaatcacactcaaccttatcacttccaaatatccctctattaaaggaattaattttgacttacctcatgttataaaacatgctcctgcctaccatggtgtccaacatgtagggggagatatgtttgaaagtgttcctaaaggagatgcaatttttatgaagtggattctccatgattggagcgacgatcattgcttgaagctattgaagaattgttataatgccattccaaaagacggaaaagtaatagtggtggaagcagtggttccggttgtaccggaagctaatgcctatttgagaagcatcacacagcttgatgtgc

SEQ ID NO: 217533 - DNA, 355 bp, Gossypium hirsutum
tgcagctcccccttctccaacaccacaggtctatttgggggagcaatacgtcaacaatgctacattatctgatgttactttcctagttgaaggtagacggttctatgcgcacagaatctgccttcttgcttcttcagatgcatttcgtgctatgtttgatggtggttatcgggaaaaagatgcaagggatattgaaattccaaacattagatgggaggttttcgagttgatgatgcggtattacaaattcttcgatctggatatataaacactggatttacttcattttggttattttgatcatcattttatgtaagtgacttcgtttctttgtacagatttatatacactggat

SEQ ID NO: 217534 - DNA, 416 bp, Gossypium hirsutum
cggtggagctgaggcggccgaagacgcttcccgacctgcttccagagaggtctacttcactctcatccgatgcgaggccgccgaagttgacgaagctgctattgaacgtgacgattcaagggagcctcggagccgtgcaagtggtgatgtcaccggaaaacactgtcggtgacgtaataacggtatccgtcaggcagtactcgaaggaaggtaggcgaccgatgctgccgccaacggacgccgcgctattcgatctccattattctcaattcagcttagaaagtttgggaagggaagagaagctgatagcgttgggatcaagaaatttcttcttatgcacaaaaacggcggcatcgaaggacggccagaataaaacggcgtcgtgctcaaatgaagcggaaagtgttacaaaaagc

SEQ ID NO: 217535 - DNA, 350 bp, Gossypium hirsutum
cttggcgtggcaccccggaaagtgaactttgatggagctgaaatggaaactggggctgaaaatggctgcaaatgtggagataactgcacttgcaacccttgcaattgtaaatgaggggaaaaaaaaaaccgaagcatattatggaagctgatctaaataatatatgatgtatttgggtttttattattagaataaagcagccatggttcattaggtgttttgcttcttgtatccatggttgcttggtatgtatgtgaaatgaaagtattttaactagctttgttgtgttactgccatgttatataactgatgaatgaatgaaggaaagctctatttggcttttccttttt

SEQ ID NO: 217536 - DNA, 271 bp, Gossypium hirsutum
gagctgatttgcagaacctgatgaatgaagcggccattcttgcagccaggcgtgacctcaaggaaataagcaaagatgaaatatcagatgccctagagaggatcattgctggaccagagaagaaaaatgttgtggtctccgtgagaagaagaaattggttgcctatcatgaggctggccatgctttagttggtgcacttattcctgaatatgatcctgtggcaaagatttctattatttctcgtggtcaagctggtggccttacctttttt

SEQ ID NO: 217537 - DNA, 421 bp, Gossypium hirsutum
aaactttgtctgctgcaacttcttcggaaccatcgatccctccttcatctgccaatcctgaagaaactttgcagcggatgctttcttcagaccctcaaagttctgcaatggaatacttggaagcttctcaattcgataaaaaaagtcagccttgtgttgctgtcgataaaccggctgaggatggttacaactggcgtaagtatggacagaagcaaattaaaggttgtgagtatccgcggagctactataaatgtacacatccgagttgccctgtcaaaaagatagtcgagcgttctgccgagggcctaataactgaaattatatacaaaagcacacataatcatgaaaagcctccaccaaataaacaaccgaagggtggaagtgatggaaacgcaaattcgcagggtaatctggaactagg

SEQ ID NO: 217538 - DNA, 419 bp, Gossypium hirsutum
  unsure (1)..(419): unsure at all n locations
cccacgcgtccggcccattggagcagtcatggtgagccctgaagtttcagaagtcatttattctcaaagcaacaaacttggtagtttctctcatggattcacctactctgggcaccctgtatcctgtgctgttgcaattgaagcactcaagctctacaaggagagaaatattgttgagaaggtgaagagcatttcaccgaggtttcaagatggtctaaaatccttttctgacagtcctattgttggagagatcagaggtaccggcttgattcttggtactgagtttacagacaacaagtcgcctaatgatccattccctcctgaatggggggttggtacatattttggagcacaatgtgagaaacatgggttgctagtacgtgttgcaggggacaacataatgatgtctncaccattta

SEQ ID NO: 217539 - DNA, 391 bp, Gossypium hirsutum
  unsure (1)..(391): unsure at all n locations
ggaagatgagcaaggatcttgagcttgccaggctgaagaagctggccaaagagcagcaacagttgaaggagaaagaggctgagaatgagaagcccaagcttgaagccaagccattggaggaaatccttgcctaaaacttttaccctactggttattgtgttagcactgtttcgtcttccactatgttgtgttaattttatttcatttctacttttttttttgtggtgatacccgtttctatttattttctagcgagtaatgtatgtcatgtttcccacannanaangtaannaaaaaataaaaaaatataaaaaaaaaataaaaaaaaaaaaaataaataaaataaaaaaattataaaaaaaattaatatataatatattattaattaatt

SEQ ID NO: 217540 - DNA, 384 bp, Gossypium hirsutum
gcagctcaattcagacatcgaagtttcctttattatgaccaacttactgccatctacgcaaaagatcgagccattggaaaagatgctcaaacatctgctgatatttttgaagaaataaatgttgaggatgtagctgctacaaatactcatgaagaaataaacgatttctatggatccgaagctgatgtttctttggatgacatggatctttcagctacacaacagcaatcagaatccaaccagctagaaatcaaggtgattctgtattttcaaagaagaaaaaaaggatttctgatgcaagtgatttttctacttcatttaatgatgctgccgctttattcgcggaaaatatacggaccgttggccttgaaatcagtaagagta

SEQ ID NO: 217541 - DNA, 416 bp, Gossypium hirsutum
cccacgcgtccgtgcaaacttactcttggcaacactccacgtcggcagaccaagattgtatcaactggtcctaatccagagtggggtgaaagttttgcgtggacttttgagagtcctccaaaaggccagaagctgcacatatcttgcaagaacaagagcaaaatggggaagagttcctttggaaaagttacaatccaaattgatcgagttgtaatgcttggatcggtagctggtgagtacacgttattgcctcaaagtaaaagcgggccatcacggaatttggaaatcgaattccagtggtctaacaagtgaagaagatgagagagataattatcaccattattattattattactattattatttttcccggaaatttgatgattgatcaagtagggaacatacgttttggtttt

SEQ ID NO: 217542 - DNA, 411 bp, Gossypium hirsutum
  unsure (1)..(411): unsure at all n locations
ccaaggcgtccggacctggagaggtttttggaacttaacaaaccccggggccgttagccacaacgaaatcctcgagaatgtacaagacttacatcgaccccaacttccagtggacgaacttcacattggaagaacaagccaaggtaatcgtcgcccctcgaagcaataacgaaatggatgcatccaagttgaagaaagagttccacgagttgttaccgatcaaagaatcattgattaagtacgtcttcgaacccaacaaacgaacctaaacctatgaacccagttttctcagctatagaacccgagttttgacccctctaacttctgcatttactataattaggttgtattggaggttacttagccattccttttactaaagaaaactcnctttaggtgtatttttttttt

SEQ ID NO: 217543 - DNA, 161 bp, Gossypium hirsutum
cccacgcgtccgccccaccatgaatagccttctgcatacccatatttgcacattcgcaacaaggagttcccatggggtccggatggtctgtttgagagaaaggagcatcactagggatggccggatggatgcatatctttttgtgtacggttcttttttat

SEQ ID NO: 217544 - DNA, 434 bp, Gossypium hirsutum
gccctgatgtatcgacttacttgtacaacaggaccgaagctttggccggtgactggtattgcgttgccatgaactgtggagctcacaactacgctagccgaccaaactgctatcgatgtggtaccataaaaaccgactatggtggttacactgtgatggggtctgaaagcagtgccccacctggttggaaaactggtgactggatgtgcaccagatatgggtgtggagttcacaattacgctagcaggcttgaatgcttcaaatgcaagacaccaagggattttggtggtgcttaggaaaatcatgaataacatgttttgaaaaagtttcaatatttttcattaacatgtttctgtttttgttaacaaattttcatttttaatagattggatatgtttttattgattatccattggtttatggtctatttttac

SEQ ID NO: 217545 - DNA, 316 bp, Gossypium hirsutum
caattttctcacaaagcagagtagcagcagcaaaacaacccaaatggccctccaagcgcccactatctccataaaaccatctaattctccacttgctcctacacccaatgctggcctgcggccaccctccgatcgttttgctttgaaatcatccttcttttcttcatcgctccatctcttgctttcctcttcccaccagcgcctttcaactaatactgcctcacctgcaccaaagttttccatgcgtgtggcctccaagcaagcttatatttgccgtgattgcgggtatatatataatgagaggactccctttgag

SEQ ID NO: 217546 - DNA, 382 bp, Gossypium hirsutum
ccgattggaactcccttttttggattgctcatcctggtggtccagcaatattagatcaggtagaagccaagttagcactgaagccagagaagctacgagccacaaggcacgttctttcagagtatggtaacatgtcaagtgcttgggttctatttattttggatgagatgaggaagaaatcaagggaagatgggcttcaaaccacaagagaagggttggagtggggagtgctctttgggtttggacctggcctcactgttgagactgttgtgctccatagtgttgctgcttaaagttaaacaaacatgctttttaaagtattggtcgtgctccacttggcttgcagtttttaaaaaaaaaaaattatattaatttatatatt

SEQ ID NO: 217547 - DNA, 308 bp, Gossypium hirsutum
  unsure (1)..(308): unsure at all n locations
gcggcggtcgccgaaaaacccgggccccaagcccggccggaccggccgtcggtccaaatcttggtggtagtaccaaattttcaaatgagatgaggaagaaatcaagggaagatgggcttcagaccacaggagaaggattggagtggggagtgctctttgggtttggaccttgcctcactgttgagactgttgtgctccatagtgttgctgcttaaagttaaacaaacatgccttttaagtaattggtcgtgctccacttggcttgcagntttatcttctttcttttttcccttttttagaaatcctat

SEQ ID NO: 217548 - DNA, 416 bp, Gossypium hirsutum
gcccctacgcaaggccccctcctccaagctcgcccccttgtcttgtggtagaaaggttggtggtgtgaaggctgagctaagcgccccagtggtgataagcctaagcacaggcctctcccttttcttgggtcggttcgtgttcttcaacttccaaagagagaacgtggcgaagcaagtgcctgagcaaaacgggttgacccatttcgaagcgggtgacactcgagccaaggagtatgttagcctcctgaaatccaacgatccggtgggattcaacctggtggatgttctggcttggggatccctgggtcatattgttgcttactatatcttggccacctccagcaatggctatgatcccaagttctttagttgaacaatcttgtccttagtttatgtgtttatgttgtacaagatta

SEQ ID NO: 217549 - DNA, 367 bp, Gossypium hirsutum
tgacttcttcagaaactatctttccctcaaaaatggttactttcaggtttcaccagtaccaagtagttggaagggctcacccaacagagagcgatgagcatcccaagatctataggatgaagctctgggccaccaatgaggttcgggccaaatccaagttctggtacttcttgaggaagctgaagaaggttaagaagagcaatggtcaggtccttgccatcaatgagatatttgagaagaaccctaccaagattaagaattatggtatatggctccgctaccaaagccgtaccggttatcataacatgtacaaggaataccgtgacactactctaaacggagctgttgaacagatgtacactgagat

SEQ ID NO: 217550 - DNA, 429 bp, Gossypium hirsutum
gtggatatttacaggaaaaagtacaaggcaaagcaacatggatctgttggggtatcgtttaatgttatttggtttgaaccagagactaattcaactgaagacattgaagcagctcaaaaagcccaagattttcagcttggctggtttttggacccattgatgttcggagattatccaagttcgatgctaacccaagtaggaagctggttgccgaggtttactaaagctgagtctgctcttcttaagggatctttggaatttgttggcgttaatcactacactaccttttatgcaagagaaaacaaaactaatctgattggtagtatactaaatgacactgtttcggactccggggcctttacattacctttcaagcatgggaaacccataagagacaaggcaaattctatattgttatacataggaccc

SEQ ID NO: 217551 - DNA, 427 bp, Gossypium hirsutum
tatggacccacgtataaatcgtgcggatagtattctacctgcaatggcgacaaacatggcatagcggacaacctgcttcgccaccaccacccttaccatcgacaacaaatcggctgcctcatcctcctcgtcgcaacctcaagaagccctcgtcctcgaacttcgccctaggaaaaagagagttacctggaaagaaggaaccgttgacaacgaattcatgaacaagaagagctccaagatctgctgcatttaccacaaagaaaagcccttcgatgaagacgacagtgatgatgattgccatgatcatcatcaccatccatcccacggcaacgatttctccaacgatggccgcaggctcaaccctagcaatagcacctaatttttttgttttgaatatgggtttattaccccttattattgatgtaat

SEQ ID NO: 217552 - DNA, 180 bp, Gossypium hirsutum
ctcgctagtgccaatgagtccgttagaaagcctggcttcttcagctgttagaacagcaaattcagcaaaagcatctcttatattggtcttaaccaggggaggaagtactgcaaagcttgtggctaagtataggcctggaatgcccattttattcatggttgtccctgagatccaaactga

SEQ ID NO: 217553 - DNA, 401 bp, Gossypium hirsutum
  unsure (1)..(401): unsure at all n locations
tgttaggacaaaaaaggattgcatcccattatgtggacaaaggtgcaaattacactcaaggactaacctatgcttgagagcttgcatgacatgctgtgacagatgcaaatgtgtcccaccagggacatatggcaacagggaaatgtgtggcaaatgttatactgatatgagaacccaccgcaacaagcacaaatgtccttgaaaagcccaaccaaagcccccaaaaaacgacacttcttgagtatgtgtttttcatatttgtaatagcaaaaaagcttgcagtaataagttctgtaagaagagaagaaatggatggatttcttgtagtgtcttcgtttgtaatcctagaagctatgaacttgtcaaatagttttaattaacatataattganagataataa

SEQ ID NO: 217554 - DNA, 352 bp, Gossypium hirsutum
aaaaaacccaatgttcaaattttgatttggtgtgtgtctaagcaagaaatatctgtagtattgttctagtttattctaaatcatgtcgttttatctatgttcttatttctttccatctgttgcttctgtatgtgagacttgaggggacgattatgtcgaatggaaacgtgattattttagatcattggacttgcctctatggttaacaaagaggacttgacttgcaatggagggcagagttacaaaaaggcttatcttataattatagccaccacattgtttggattccttgtttctggtattttggtcattaggaccataagcttttacaaaagtgacatttacaagaaat

SEQ ID NO: 217555 - DNA, 303 bp, Gossypium hirsutum
cagatgtcatcacaaaaagactactccatggcaacagcagatgtggtggatgcagaggtaagggatctagtagagactgcatacacaagggcaaagcagataatcacaactcacattgacattctccacaagcttgctcaacttctgatggagaaagaaactgttgatggagaagagttcatgagcctcttcattgatggaaaagctgagctatatgtttcttagattgtacattatatagtccccatacagtccttgtataactatgacccttaaatgttcagattcatctgtgtatgcttt

SEQ ID NO: 217556 - DNA, 408 bp, Gossypium hirsutum
gattctgtttcggagcacaatggccattaatgtacgccatcatctccgaaatcttcggccttaaatactactccacgttgtacaacttcggttccgtggctagtcccgtcggttcttacattctgaacgttaaagtagccggacatttatacgaccaagaggctttgaaacaattgaaagctttgggtcgtacgaggaatcacggggaggacttgacttgcaatggagggcagtgttacagaaaggcttttcttataattatagccaccacattgtttggattccttgtttctggtattttggtcattaggaccagaagcttttacaaaagtgacatttacaagaaattcagggaagaagctcaggttgccgaaacagacatgggttcaagttctacttcaaaacaaa

SEQ ID NO: 217557 - DNA, 381 bp, Gossypium hirsutum
  unsure (1)..(381): unsure at all n locations
gcacaccgaaaaaggcaaatagccttgagaaagaaaaacagcctcaaaatgcagcagaagtcaggcttcctcatcctcttcctctccctcattttccttcctctcatcttctccgacgccagaaaggaggctcccctcggaggttggaggccgatcaaagacaccaaggacccacacgtgatggagatcgcggaattcgccgtcgaggagtataacaagcagtcaaatgggagtttaaagttggataaggtggtgaaaggcgagactcangtggtggccgggacaaattaccggctgattttgcaggcgaagaaaggggcagtcgataacacgtatcangctgtggtgtgggagaagttgtggctgaatctcaagaatctc

SEQ ID NO: 217558 - DNA, 315 bp, Gossypium hirsutum
gtcttggagctgccatcatatacaacaaagaccatgcttgggatgaccattgggtgttctgggttggacccttcattggagctgcacttgctgcagtttaccaccagataatcattagagctattccattcaagaccagagattgaaatgattaaatctgtgtgtgtgtgtgtgttgggatcttcatctactttttgtgttcctactagtcctttgttgtgttgaactgcattttgaattatggtgttaatgtgtgtaaattatccctagagttgtgctgtattcagcttttattaatggaggattcttttatgg

SEQ ID NO: 217559 - DNA, 397 bp, Gossypium hirsutum
ttccaatcaacaccgtgtcgttaagacccctggtgggaaattggtctatcagacaactaagaaaagagcaagtgggcctaagtgtcctgtcactggcaagagaattcagggtattcctcacttgagacctgctgaatacaaaaggtctagattgccaaggaaccgccggactgtgaatcgtgcttatggtggtgttttgtcctgcagtgctgttagagagaggataattcgagccttcttggtggaagagcagaaaattgtaaagaaggttctgaagatccagaagtccaaggaaaagcaagcttcaaagagctaagaaattagatgtcgaatcatcatttcaattctgatatgtgatcagcaaggctttggaaagtgccaccaatgacttcagaag

SEQ ID NO: 217560 - DNA, 387 bp, Gossypium hirsutum
  unsure (1)..(387): unsure at all n locations
ctccatgcaggtctgagcgtttagccaagtacaatcagcttctgcgaattgaggaggagcttggtgcggaagctgtctatgccggagctagcttccgtgctccagttgcaccctattaagatgcttgtttagatgataatgtgctgagactggatgcgtgcggcagagcttcagtggtttgttgagaccctaaaacatatttcaataattttgatagcaattttgtacttgtgttcagaattatatcgatctccgtgttatttttgttggactttgcctgcatatatgctcgctatattcataaatacatgatgcttgaaatggaaaanaaaaaaaaaaaaaaattannaanaaaaaaaaaaatataaattaattaattttatattt

SEQ ID NO: 217561 - DNA, 365 bp, Gossypium hirsutum
cagggccgattccgtttcacttaatagagaatctagtgtcgagcatgaaacaagatcattacgtgagcaacagcggagagattgtattttatcagacggatcccaacctgttttctcctcccaaatccgcatgagccattttatttagagatcatagagctgaaacaaacaagggccttcattcttttcgcttttagaagggactttgtatttgtttttgttttgttttgttttttttttctttttgtgtcttcaaaataattaaggttgaagttcctgtagtctcatcaaaaacatgattattgttaccaaacatatacacggtactgtaggagaatgaaatacaaattttattattatttttt

SEQ ID NO: 217562 - DNA, 404 bp, Gossypium hirsutum
  unsure (1)..(404): unsure at all n locations
gctccggcgaccggtggagtgaagaagcctcaccgtttcaggccaggaactgttgctttgagagagatccgtaagtatcagaagagcactgagctgttgatcaggaagcttcctttccagaggttggtgagggaaatcgcgcaagatttcaagaccgatctgaggttccaaagcagcgccgtcgctgctcttcaagaagcggcggaggcttatctcgtcggactgtttgaagacactaatttgtgtgcaatacatgccaagagagttacaatcatgcctaaggatatccaacttgctaggaggattagaggtgagagagcttangttgcttgtatttgctcgatcgattttaaaattcagaaagacctagatcttggatttagtttctggaatttgctttctcg

SEQ ID NO: 217563 - DNA, 392 bp, Gossypium hirsutum
cccacgcgtccgcttccatctccaacactatcacacacacacaaacaccaaaaatgccgttcaagagatacgtcgagatcgggagagttgctctcgttaactacggcaaagactacggcaagttggtcgtcatcgttgatgtcgtcgaccagaacagggcacttgttgatgccccggatatggtaagaggccaaatgaacttcaagaggcttacattgacagatatcacaattgacattccccgtgttcccaagaagaagacattgatcgaagctatggagaaggctgatgttaagaacaaatgggaaagtagctcgtggggtagaaagttgattgtccagaagagaagagcatctctcaacgactttgataggttcaagcttatgttggct

SEQ ID NO: 217564 - DNA, 402 bp, Gossypium hirsutum
ggatgagagctcgcattctaagcatgcaatgatttgggcactcactcatgtggctaacaagggtgatttgcttactttacttcatgttattcccccaacccaaaagacttcttattcttcttcttctttttctccttaccttgctaactctcttgggtcactttgcaaggcttgtaaacctgaggttgaagtggaagcactggtaatccaggggccaaagctggggacagtgatgagccaagtgaagaaacttgaggtttcagtgttggtactgggtcaaaaaaggcattctccatttctaagctgtgtttgtgggagcagcagcacagaggagttcgtggagcggtgcatcaacaatgcagattgtttaaccattggggttaagaggcaaagcaaaggcgt

SEQ ID NO: 217565 - DNA, 406 bp, Gossypium hirsutum
gaaagcgagttgaatctatggcgtcctccaagttacaggctctgtggaaccaccctgccggacccaaaaccattcacttttgggcaccaacttttaaatggggcattagcatagcgaatgtggctgactttgctaaaccaccggaaaaactttcctaccctcagcaaatagcggttactgcaactggaattatctggtcacgctacagcactgtaatcactccgaaaaattggaatctcttcagtgtaaacattgctatggctggaacaggcatataccaactaacacgaaaaataaaacatgattacttttcggaggcagagccagccgttgcatctgaatgatgacgaaatcttctgaaatcctttgtttttaatggaacaaattatcagttatcttgccttgt

SEQ ID NO: 217566 - DNA, 356 bp, Gossypium hirsutum
ggtaactttggcacctattgtcctcaacatgacacacagaaactttgtggaaatcatcttcgagaatcccgagaccgccattcagtcttaccacttatctggctactcattctttgccgtgggcatggacattgggaaatggagccctgagaagaggatgaactacaatcttctcgacgccgtgagcagacacaccatacaggtattccccaactcctggtcagcaattctattgacattcgacaactgcgggatgtggaacctgaggtcggagatatgggacaggcattaccttgggcaacagctttatgctagtgttatttcccctaaccgatcccttaaagatgagttcaact

SEQ ID NO: 217567 - DNA, 312 bp, Gossypium hirsutum
cccacgcgtccggactggtgaggccatacccaaggcgtgcttttaatgatgaagagagcagtttgacactaaatgaacttgggttaacaagcaaacaagaagccctattcctggagttgatctgatcttaataacatctcattcctacacgaatatttgtagaaatttactctgaaatttatttagttttattgaaatatgaagtgctacatggagtagtggaatttcctaagggttgcttggttgcatttggttgatgaaatttcaggagagagtacaattaatatgacttgacgatggtcagtattctgc

SEQ ID NO: 217568 - DNA, 380 bp, Gossypium hirsutum
  unsure (1)..(380): unsure at all n locations
cggacgcgtgggcggacgcgtgggcggacgcgtgggtttttctgggacgcgagagtataaattattggctgacattgcttctgctattgacgaggaagatgtctcaaagtttacggaagttgtcaaggaatttgatagcatgaccccattggattcttggaagacaacccttttacttcgagtgaaagaaaagctgaaagctaaagaactggaagaagatgatcttacctaaaagagctttgcgtcgtgagagttgcctatgtttctcagttnttcattttaatggtgattgctttgttttatgtgtctgtgtgcaattatactccgtatactctcccttataacaattattttcggaaatgtttcacttgtttggcctt

SEQ ID NO: 217569 - DNA, 406 bp, Gossypium hirsutum
cccacgcgtccgtattggtttacaggtatcatcatcatcattggatgttggggtagtcccagacggaagtacgatgacggacatatcaaacccgtacggaagagggcctgagtcaacacatcagacggtgcagctatcaccggcggacagagaagcaagggtgctgaggtacagagagaagagaaagaacaggaagttcgagaagacgatccgttacgcctccagaaaagcatacgcagagatgaggccgagaatcaaaggaaggttcgcgaagcgtacggacatagaagtcgaagtggatcgcagtaacatgtatgggtttggagttgtcccgtcgttttgaacttaacctctcctctccagtcttccccagcatggtctagtaatatgttcaattttgaacttt

SEQ ID NO: 217570 - DNA, 303 bp, Gossypium hirsutum
ctcgagtcaatagatctgcgagataattctcttctcctcgaatgtgttcgatggtgaacttgtagtaattaaaccactgttgccatcttaataatcgtccttgtttatagtctcctgtaatattgttccttataaaaggtccaaattgtttattatccgttcggacaacaaactccttaggtagtaaatcctgaattttcctatggctttctttacagcgagccattccttttcattactgtgataatttagttcagctcctgtaaatgtacctgaggtatatctacaaagcatttcctgatt

SEQ ID NO: 217571 - DNA, 404 bp, Gossypium hirsutum
  unsure (1)..(404): unsure at all n locations
gagaaggaacccaagttcttgaagaacggtgatgcaggtatggtaaagatgattcccaccaaacccatggtggttgagactttctccgaatacccaccactcggacgttttgctgtccgtgacatgcgccagaccgttgctgtcggtgtcatcaagagtgttgagaagaaggacccaactggtgctaaggtcaccaaatctgctgccaagaagaaatgagagattattgcagagataattatatcagttttcattacagctttggacaattatcttaaatttggactttaaatttactttttgtgagacttgttgatttgctttttaaacaaattctagttttatgttttaatgtttttcaaaaaaaaaanttttttttttaattttattaattaataataaaa

SEQ ID NO: 217572 - DNA, 394 bp, Gossypium hirsutum
cctaaagatgcgaaggttaaggcagcgaagttggtgtgtgtagtaaatgttggtgtccttggaacggttaccgctgtaactctttttgcagttcataaaaacacaaggctcacttttgttggaattttatgtactgctttaaccattggcatgtacgcatcgccattgtcagccatgagcacggttgtaaagaccaagagtgtggagtatatgccatttttactctcattgtttctgttcctcaatgctggtgtttggtctgtttatgcagtgcttgtgaaggatatctatattggtgtgccaaatgcagttggattatttctaggatcagctcagttgattctctatgttatatacaagaacaagcctgtttcaacaaacccaagtgaggcaa

SEQ ID NO: 217573 - DNA, 355 bp, Gossypium hirsutum
ctcatccatgagatcatgactgtgggacctcattttaaggaggccaacaatttcctctggcccttcaagctcaaggcacctttgggaggtctgaagaagaagagaaaccactatgttgaaggaggagacgctggcaatcgtgagaattacatcaatgagctaattcggagaatgaattagacgttggctttatttgttaattcagtatttttggtttgttttgaaggatcctgatatgatttcttttggccttttagaaacagttttgtttaaaaggatgaatatttttcacggtgtttaccatttaaaaaaaaaaaaattatttaaaaataaataaaaaaataaaaaaataata

SEQ ID NO: 217574 - DNA, 402 bp, Gossypium hirsutum
cccacgcgtccgcccacgcgttcggagacaattatataccaactgtctcattaccggaacggtggatttcatcttcggggatgcgacgagcattttccagaactgtatgctcatcgtgaggaagccagggcctggccaaaattgcatggttactgcacagggaaggaatgatcttggaacaaactcagccattgtgcttcaaaactgcaccatctcgggcgcccctgattacatcccagtgaaggatacgaacaaggcatacttggggcgtccctggaaacaattcgctaggtctatcataatgcaatctcagatcgacgacatcattcaaccagagggttatgcccccatgacaggcaccataggaatagacacttctttcattgccgagtttggaaacag

SEQ ID NO: 217575 - DNA, 404 bp, Gossypium hirsutum
ctgaaagtgatgaactcgtttggtggcaccttagaaaaatgtgcggcctgttctaagactgcttatccaattgtgaggggttctgtgaatggtacaatataccacaagagctgcttcaagtgtacccatggagggtgtaccattagcccatcaaactatatagcacatgaatgttaactctactgcaaacatcaccatatccaactcttcaatgagaaaggaaactacattcaactcgagaccgaacgagagaaacaagccttcaccgcctccaataaggttactgcccctgctgcatcattaaccactaccacatccactgaaaattgaactgagtcgtaattatctcaatgtgcatcactgctggcttaatgaaaaaaactttgtaaaactatccaatgtca

SEQ ID NO: 217576 - DNA, 390 bp, Gossypium hirsutum
gtgcactggacgcagaatcagaatgcgtgctacaagaagcactcgaaaggctcatgaggggccgcacgacggtacttgtggctcaccgtctctcgacaataagaaacgtcgacagtattggagtagtacaagacgggcgaatcgtagaacaaggcagccattccgaattgattagccgaccggaaggagcttattctaggctcttgcaactgcaacaccatcacatatgaaagtttttattttttattttaattgaatcaacatgggcttgttgggtggtataattatgtttgggtccctttaacctcttatgtttttcatattttccttttttgaatgatgatagttgtagatattgttaaagtggagactgtatctttgggttctact

SEQ ID NO: 217577 - DNA, 297 bp, Gossypium hirsutum
cttttatttgttataaatgaattagaagacaatgaaacccctcgctttctctcaatgttcaagacgacaaaacaaatagatgaaatgcagatgttgagaaagccattattaaagctttagagagacaatatgctgatgttctagctccactgaaggatggccttgctcctaagataattggcaaatatgttcagaaattcaccaaaggaactgctgtcatctacgttgttccggatgagttgggagttcttttgaattccatgaaaaggatactttttgtactgcatcccaagatag

SEQ ID NO: 217578 - DNA, 405 bp, Gossypium hirsutum
gggagatcatatgctggatgctcaacagaagggggaaatcaatgaggacaacgttctctacattgtcgagaatatcaatgttgccggaattgatacgacactgtggtcgatcgagtggggcattgcggagctggtgaaccaccctgaaatccaaaagaagctgcggcatgaacttgacactgttctaggacctggaaaccagattactgaacctgtcacccacaaactcccctaccttcaggctgtgatcaaagagactttaatgttacgaatggtaatttcactactcgtgccccacattaaccttgatgatgccaaattgggtggctatgatatacctgcttagagcaaaatcctgggtaattgcatggtgggtagccaacaacccttgctaacttgtaaaat

SEQ ID NO: 217579 - DNA, 339 bp, Gossypium hirsutum
  unsure (1)..(339): unsure at all n locations
acattgttaaatctagccccatctggtggaggcccaattttgagacaatgatgtatccatattgccctccccacattacaaaacccaaggagtgcacgaagccccccctcgnccacttgtctgagaaagagtattttgcagaaccgaagaatctgaaacttcttgctgtaccattgcttgagctctacgataatgtgcagagatatgggccagtcatatcaaccattcctcagcagctttctagattccagttcaacatgatcagtatatgactttggcacgggatgccaagattgtgaatctttctgctcgctttctgacagctacatcatgagagta

SEQ ID NO: 217580 - DNA, 334 bp, Gossypium hirsutum
cccactcgtccggccaatgaagcacccagtatcccattcagttggatctttgatagagaagtgaaactttaggccatgaaatacagttaagactcctgcaatgcatttgtggaaacaaacacgaagaagctgaatgcaaacttctctttatatatccgatgtaatagtggttgtatatgtaatagggtagcacttgttttctggatgtgttgtgttcttaaaaaataatgccgatagtggcagctgtgatagttttagatgtttggtttcataatgtctgttatatcgttagacgagtaagatgtgttgtttatgttgaaacaatctttcatat

SEQ ID NO: 217581 - DNA, 306 bp, Gossypium hirsutum
ccccgcgtccatgctaattgtcaatcttatcacagcacaatccgtgctgccaagacaatctgacttcagtccgggaatttttgttaacgatcacactgaaagttgtgcaaagggcacttgtaacgatgaaaacaaggaaaatctggttgatgttcttttaaggatccagaaggatggcgaatttcccttgactgacaacaacgtcaaagccgtcatcttagacattttcagtggcggaagtgagacatcagcaggagctgtagagtgggcattgtcggaaatgattaataacccaagagttatgac

SEQ ID NO: 217582 - DNA, 403 bp, Gossypium hirsutum
cccacgcgtccgttggagctggagactggtttgtggtgcttttttattttattttattatggaatattcaagggttttgaggacattaatgttcatagctattattgtacgagattttttttgaaaaattagagtcagtttgcggtccaaaaaaaaaaaaaaaaaataaaaaaaaaaaaaaaaaaaaaaaaaaaaaaaacaaaaaaaaaaaaaaaaaaataaggcatataaaaaaaaacgaagacatcattaaaaaaaaacaacctcaaaaataaaactaaataaaaaaattaatagtatattattttgagataaaaaaaaatatacctaaaggggggggcctttttaaggaacaaaaaatacaccgcttgtcggcataaaaaaatttttttttttttagccc

SEQ ID NO: 217583 - DNA, 421 bp, Gossypium hirsutum
agccgtcaaggttgtggacatcgtcgacactttcagacttcaggagcaacctgcttttgacaagaagcagtttgtgaccttcatgaagaggtacatcaagaacttgacacccaaattagagcctgaaaagcaagagtctttcaagaagaacatcgagggggctactaaatttttgatgtcgaagcttaaagatctccaattttttgtgggtgagagcatgcatgatgatggtagcctagtgtttgcatactacaaggacggtgccaccgatccaaccttcctctactttgcctatggcttgaaagaaatcaagtgctaaatggagttttcacccgataccggaccggctttgttatacctaaagacttagttttaattctagatataaggagttcttaactatctattttagtctttttta

SEQ ID NO: 217584 - DNA, 411 bp, Gossypium hirsutum
caccatcttacttgaccggtgagttccctggtgactatggttgggacactgctggactctcagctgatcccgagacctttgctaggaaccgtgagctcgaagtcattcactgcagatgggccatgttgggagctcttgggtgtgttttccctgagctgttggctaggaacggtgtcaagttcggtgaagctgtatggttcaaggccgggtctcaaatcttcagtgagggtggacttgactacttgggtaacccaagcttgatccatgctcaaagcattttggccatctgggcttgccaagttatcttgatgggagccgtcgagggttaccgtattgccggtggaccactcggtgaagtgactgacccattgtacccaagtggtagctttgacccattgggtcttgctgatg

SEQ ID NO: 217585 - DNA, 178 bp, Gossypium hirsutum
gcgaggtctatcgggtaaagccaatgattttaggcatcgggggcgcaacgccctcgacctagtctcaaactttaaataggttggacggcgccatttcttcgttgaccctggccacagagtggggggctgctcgagggccatttttgttaagcataattgtcgatacggtatggatctt

SEQ ID NO: 217586 - DNA, 303 bp, Gossypium hirsutum
cccacgcgtccggtgattacccgctgagtttaagcatatcaataagcggaggcaacagcgggggaagaggagtagaacagaaggtacaattaactccaactacagcttcagtctatgatgactatgttccagcaatttcaaaatccgccatcttagacatttgttttcttgtaacttttaacattattgtaagaatattttgaatattcatttacaatttatataatatatttttcgtaaaaaaaagggcggcctttcaagcgggcccaaaatccttgcttcatcaatcacagctcaatcttt

SEQ ID NO: 217587 - DNA, 395 bp, Gossypium hirsutum
  unsure (1)..(395): unsure at all n locations
cccacgcgtccgggcagccatgcctttgtcagcagaggaagctgagaaattggggtttgtcaattatgttgttgaccaaaatgaagtgctgaataaagctcgacaacttgcaggagcaattatgaagaacagtcaagacttggttctcaggtacaagtctgtgatcaatgatgggtacaaattggatcttcgtgagggtctcgccatggaaaaggagaggggtcataaatactacgatggaatgacaccggagcagtttaagaagatgcaagagttcatagctaggcggngttccaagaaaccatcttccaagttgtaatatgatctcttccatgcatcttctgacttggtgtttagtcactgttttataatggaaacataatggaaataaattt

SEQ ID NO: 217588 - DNA, 308 bp, Gossypium hirsutum
  unsure (1)..(308): unsure at all n locations
cccacgcgtccgcccacgcgtccgcccacgcgtccggttcctcgttaatgccggcatcgtcgagaagagaccaaatcaagattcatggtttttaaggataacccaagttgctatttatgaaaaaaaaaatcagcactgttccttttttagcttaaataaaacactagtgctgctgtctctctaatttatacacccttggtggttttaaactgtcatggaatatgggatttctttaataaaaaatgggttttttatttgctttncgaaaaaaaaacanntatnaaagacaaaattaagggaaaaagaaa

SEQ ID NO: 217589 - DNA, 353 bp, Gossypium hirsutum
cccacgcgtccgcccacgcgtccgcccacgcgtccgccaacggctgagatccctcagaggagcttcgctgtgtatacaggatagactgcatggtgccgcccgtacagacgccctgccctttgaagtttgaaacacagaagactaggcctacttccctctgtaacgaatggaaagggtagattggtaatttcttaagtgctagtgccgggtactttaggaagataaaaataatgggaaattttttttatttattttactggatttttttattcgtttatttattttataagaaaatttgttgaatatgttttaggttcaaaacgaatttgttgattttttttttcttttcaaag

SEQ ID NO: 217590 - DNA, 391 bp, Gossypium hirsutum
agtgactaaatcggtttcgtgtcaccagagtttgtacccgtatttactttactattgccactcggttcccaaggtccgggtctatgaagctgatattctggatccgaattcaatggagaagattaaccatggtgttgccatctgtcatttggacacatctagttggagttcgggtcatggagctttcttggctttaggttcgggtccgggtcgaatagaagtttgtcattggatatttgagaatgatatgacatggacaatagccgattcctgattagcaagaagggggttttatggttatagttcaagtttgggagggcaaattcctataaggatttcgctaccttcttaagattatcatatataatattattgaaaatgaagaataaag

SEQ ID NO: 217591 - DNA, 382 bp, Gossypium hirsutum
cccacgcgtccgcccacgcgtccgccaaaaactacagggctggtgctgtggtagccaagtgtggtgataagagtgtatactgtgatttggaggatattggcaacacaactgggcaatgggacttgtatggatccgatgcaccttcaccgtacaacccactccagagcaagttctttgagacatttgcagctccatttaccaagagaggattgttgctcaagttcctgatcttgggaggcggttccctcggtctttacctcagtgccactgcttccgatgaccttctaccgatcaagaaaggtccgcaactcccacccaagcctgggccgcgtggcaagatctaatttagttaaactctttaagcttttcattgtatgtatct

SEQ ID NO: 217592 - DNA, 365 bp, Gossypium hirsutum
gagagatccctataccttacaagccggatatcgatatggagaagatacactttgagagatggtcttgggaggaaactatagcagttcttcatttgaaattggagaatatgaatgactttgacttgggactcaatgcccttgactatgaggtctggctatctgaggtcagcattggatctgcagaacttgaaaaatctgcaaagataggcaaaaacggaatcagttatattgagattcctatctctttcaggcctaaggatttcggatctgctctgtgggacatgattaggggaaaaggaacaggttactctatgaaaggtcacatcaacgttgacactccgtttggagctatgaaattacccatc

SEQ ID NO: 217593 - DNA, 403 bp, Gossypium hirsutum
cccacgcgtccggggaaaaatggacgcaatttattcagttttcgatccgctaagagagttcgctaaggatagtggtcgtcttgtcaagagatgccacaagcccgatcgaaaagaatttacgaaggtggcgtttcgtacagcgatcggattcgtggttatgggattcgtagggtttttcgtcaagctcatctttatccccattaacaacattattgttggatctggttaggaagcatgagaatcagtaccaagtttcagactgtaggcaaaagatagaagttagaactggatgcaattgactgagaggtacatcatctggtttcatggactaattcaaacttaaacatgggaaattctaagtttctttatattcaatatggttgagaatatttttggtttaaca

SEQ ID NO: 217594 - DNA, 397 bp, Gossypium hirsutum
cttttgaggaggaacttcagtgatactggctgctttggattcggcatccaggagcacatggatcttggaatcaagtatgacccttcgaccggtatctacggtatggatttctatgttgttcttgaacgagctgggtaccgtgttggccgtcgtcgcagatgcaagtcacgtgttggtattcagcacagagttacaaaggaggatgccatgaagtggttccatgtcaaatatgaaggtgtcatccttaacaagtcccaaaatattggagcttagaagtagcagtttgagattgtttttagttttgagtacctgattttggctagtttatatttatcagatagtattttcctgaacaaatttattttatgttttagggtggaatcctaaagttttcttt

SEQ ID NO: 217595 - DNA, 343 bp, Gossypium hirsutum
cagatagcccgtatgccggtggggtgtttctagtcaccattcatttccctccggattatccatttaaaccaccgaaggttgcattcaggacaaaggtatttcaccctaatattaacagcaacggtagcatttgccttgatattttaaaggaacagtggagccctgccctcaccatatccaaggtgttgctgtcaatctgctcactcctgacggatccaaatcctgatgaccctttggtgccggagattgcccacatgtacaaaacggataggaacaagtatgagacaaccgctcggagcttgacccaaaaatatgctatgggttaaagtgctactacgtatgt

SEQ ID NO: 217596 - DNA, 417 bp, Gossypium hirsutum
  unsure (1)..(417): unsure at all n locations
ggtgttaattaagctgtcggatagggctaataaaacagtttgaatgtgatgctattaagcggatttaatgtaaggtgaactttttttttcagaaacaagcacattatgattgatcttggcatcgataataacaagattaactgggctctcaaggacaaacaggagttcagagacatcattgggactgtatatcgtgaggcatggaaaggccgtggtttgaaagattactcgaaaaagtgctgctattgagtattcttccaacatgtagttgatcagaatgtaaattgtatgtagatatgtgtgtcatttgcaatgttgggtgcatgaatgtggaggataatcaaattgagaatgaacctttganttnnanaaaaaaaaaaaaaataaataaaatanaataaaaggttttttttattt

SEQ ID NO: 217597 - DNA, 342 bp, Gossypium hirsutum
  unsure (1)..(342): unsure at all n locations
gnagaaaaaggtatatnagggaacatcatcttagtcctcggattgctggcaccagtgccgggattctgtcggatgtacaaagggaaatcgactganagtttccagtcactgccataccaggttgcattgttcagttgcatgctatggctgtattacgcgttgattaaaaagggtgctttccttctgatcaccatcaactcttttggatgtgttgttgagactatttatatatctatgttctgggcttatgcttcaaagaatagcangatgtcggctatgaaactttttatatcaatgaacctggggctcttctctttcattctcatcctcacacacttttct

SEQ ID NO: 217598 - DNA, 402 bp, Gossypium hirsutum
cccacgcgtccgcccacgcgtccgattattatgacttgaaggaaagaccctttttcaatggcctgtgcgaattgctcagctgtggtcctgttcttgccatggtctgggaaggagagggggtgatcaaatacggccggaaactcatcggagcaacagatcctcaaaaatcagagcctggaaccatcagaggtgatctagccgtggttgtcggaaggaatataattcatgggagtgatggtcctgagactgccaagcatgaaatcaacttgtggttcaagccacaagagttggttaactatacaagcaacgctgagaaatgggtctatggaaacaactgatgagggcatcttttttcaagttaatcagtagtagttcaggaaaatttagtcccacatcaggtgt

SEQ ID NO: 217599 - DNA, 398 bp, Gossypium hirsutum
cccacgcgtccgcccacgcgtccgatttaacttaggttgatctaggccagaagcagaccggggtcaagataacgcttgcccggtttgaaacactttggaagtgctcctgtatcagtaatgaatcagagcacaatgaatcagagcacacggaaccgtcttctttttttctgttagaaaaaaatatatatacggtagactaactgatatttctatcagttaatgaaagagcccagtgcaaaaaaaaaaatgcatgttgggtctttgaaataggccgaatcattttgataataatcagttcgatctgttttaccgagaaggtctacggttcgagtccgtatagccctatattttcgaattttctattttattaaatttaaatattcattaaatttattaaa

SEQ ID NO: 217600 - DNA, 323 bp, Gossypium hirsutum
cgaatacgaagtcgacgctgacccagatcctgctattgacgacgaaggcgggccccagaggcggagcggcatggactcagaggcttaaagaggaatacagagctctaatagcctacacccagatgaacaagtccaacgataacgattggttccgtatatcggcagccaatcccgaaggtacccgttggacaggcaagtgttggtacgtccataatctccttaagtacgagtttgatctccagtttgatatccccgttacttatcccgccactgctcccgagcttgagttgcccgaactcgatggcaagactcaaaaaatgtat

SEQ ID NO: 217601 - DNA, 369 bp, Gossypium hirsutum
tcttcatcctggttcagtcactgtcaatcttggttcttctggtttcatggcttactctctggataaacaaaacgcacttctgcccaggctctttgcagttgtggatgacattttctgcttgtttcaaggccacattgagaatgttgctgttcttaagcaacaatatgggttgaacaaaactgcaaatgagggtatcattgttattgaagcttacaggacgcttcgagacagaggtccataccctcctgaccaggttgtaagagatatccaagggaagtttgctttcattatctacgatagctcttcaaaagctacgtttatagctgcggatgctgatggaagtgtacctttttttttggggtactgatg

SEQ ID NO: 217602 - DNA, 286 bp, Gossypium hirsutum
  unsure (1)..(286): unsure at all n locations
cgcagcacgagtaagtcttcaggatttagtttaaagataccatgttatagaatcagcaacgtgtaaacagaaggcggatcatgcgatgactattacganactacattacattttatgattgttaaactcacattgacaatgttgctgttcttaaccaacaatatatgttaaacaaaactgcaaatgacggtatcattgttattgaagcttacaggacgcttagaaacagaagttcataccctcctgaccaggttgtaagagatatccaagggaagtttgctttcat

SEQ ID NO: 217603 - DNA, 344 bp, Gossypium hirsutum
gtggacttgttgacacagtcaaggaaggatttacagggttccaaatgggagctttcaatgttgaatgtgatgaagtggatccgagtgatgtgattaaggtggtaaaaactgtcaagagagctcttgcaacatatgggactcaagcactgaaagaaatgatccagaattgtatggcacaagatttttcatggaagggaccatcaaggttgtgggagaagatgttgttgagcctcggggtggctggcagtgaacctggcattgaaggagaggaggttgctcctcttgccaaggaaaatgttgccacaccctgagcataatcagaaggcaactatggataaagctta

SEQ ID NO: 217604 - DNA, 398 bp, Gossypium hirsutum
cttgattgggaggtaggaaagcatggcataattattgagtttgttgatgattataatacaaggcgaagtgccacatatttacctgaggtgccggcacatgaaggttggactagagtggaggcaattgactcacttatccggaaggcaggcttcagtggccccataaccgagtcgctcaggaagcatataaaactgacccgttaccaaagcacattatttaccatgcactacagtgactatgcctcccatgttaaggcaaccaggggggcagcgcctactattgctggcgctaagctcggaaaccactgattcttccaacagctttttaccagaaaagaaggtaaagctgcttttgctaaaatataatgacattatattaaaacaaaagaaaaatgggt

SEQ ID NO: 217605 - DNA, 142 bp, Gossypium hirsutum
cccacgcgtccggaaattgaaggagagaaatggcatatagctgaaaggacgaatgggaagtggtggagacagggcaggttgcgtgccaatgtggatatggatcgtatcaaagctcatatggaagatggggttttgaggatca

SEQ ID NO: 217606 - DNA, 404 bp, Gossypium hirsutum
cccacgcgtccgcggacgcgtggggggaaaaacccgatgaggacactatcgagaacttgatctcgagtggagaaagcgagagttttctccaaagggctattcaagaacaaggaaggggtcagattatggacaccatttctgaaatacaagaaaggcatgatgctgttaaggagatagagaagaacctgattgaactccatcagatattcttggacatggcggcactcgttgaagctcaaggtcaacaactcaacgacatcgaaagccacgttgcgcatgcgagctccttttgtagaagagggaccgaacaacttcaagaagctagggaacatcaaaagaactccaagaaatggatgtgtatagcaatacttgctgcaattttgctcattatagtcatcctcata

SEQ ID NO: 217607 - DNA, 343 bp, Gossypium hirsutum
  unsure (1)..(343): unsure at all n locations
gtgagttttgggcaaggcaatatcttgggcttcaattttacttgagagtttatacacctgtgaactcactcagggatgaatatctcattccaaagaatgctttgctttgtggcagagcccaaggaagaagcacaaggcctctttgaaacatttccagtagccgaaattgttgagaatcaaccattagtcaattataaaatatgcctcaattcttttcattttttgtttcaccagaatctgtatttggttttgtatctaaagaaatgaaaataattgtattaaattagaacattctttttgctgaggaaataatacaaggctcaattttctgtgtnaaaataaa

SEQ ID NO: 217608 - DNA, 403 bp, Gossypium hirsutum
gctgataatattttgaagaaaacatgacaactgctgctagaccgacatggcaacctgccgaaggtgggaatgaacagggtggcactcgcattttcggcccatctcagaagtattcgtcgagggaccttgctgctcatactactctaaagcctagaaaggatgggcaggacacccaggatgagttgcagaagagaaacctccgcaatgagcttgaagagcgtgaacggaggcatttctcatcgagggacaagtcctataatgatgacagagatcataggaagggaaaccatcttcttttagaaggggcaaaaagggaggctgaagaccgaattgttccgcgcagtgttgatgctgatgattctgatgtggaagtcaacagtgacaatgaaagtgatgacgacga

SEQ ID NO: 217609 - DNA, 383 bp, Gossypium hirsutum
gatgaatacaggaaggtgatgaaagaattttcattgaaattggagaaactagcagagaaggtgctggacttgggctgtgagaaccttggtctagaaaaaggatatctgaaaaaggctttctatggggcaaaaggtcccacctttggcaccaaagttagcaactacccaccatgtcccaccccagacaaaatcaagggactcatagcccacacggacgccggtggcatcatattgctgttccaagacccccaagtgggcggccttcagcttcttaaagacggggaatgggtggatgttcctcccttgcgccactccatcgtggtcaacctgggagaccagctggaggtgatcaccaacgagcaatacaaaagcgtggagcacac

SEQ ID NO: 217610 - DNA, 419 bp, Gossypium hirsutum
gtgaagggtaatgtatttaagaacaagcgtgtcttgatggaaagcatccacaagtccaaggctgagaaggcaagagagaagacactctcagatcagtttgaggccaagcgagctaagaacaaggcgagcagggagagaaagatggccagaagggaagaacgccttgcacagggacctggtgtgaaagcagcacctgcagctgcaccgcaacaggccgagggagttaagaagtcaaagaagtgaatgaagtaatgttttgtttttctctgtaggagtttgaatgcaaaactcggttttcattttgtgttttagatctttagttttatataattatagaattttgatgaaaccactgagctgttataagaaatggaagatgtttgtggtattgtttattagtataatgtactattatgttg

SEQ ID NO: 217611 - DNA, 342 bp, Gossypium hirsutum
aaaggttcttgtcaatttattcatagaaactcatttctacttctacaaagtgaaaagagcggccgctaaatgagctctcaagagtagttgcttttcattaaatactaataataccaaccctggatttgctgtcattattagtaccgggatcaatcctaaggcaaaatcgtattaccttttcgatggttatgcccatctttcatctggtcttgcttgtggccttgccggtctttctgctggaatggctattggaattgttggtgatgccggtggcagagctaatgcacaacaaccaaaactttttgttggaatgatccttattctcatctttgcccaaacttt

SEQ ID NO: 217612 - DNA, 377 bp, Gossypium hirsutum
cccacgcgtccggcactgtccctcttttcggatcaattcatagttcagacactcaacgtagcattcctcgtctacctcttgggcatcaccctgaccctttgtgctcttgcggtgctagaaatcaagtggtccggcattgaactggaagagtggtggaggaatgaacagttctggttgattggaggcaccagtgctcatcttgctgcagtgctccaggggctattaaaaggtgatgccggtatcgaaatatcattcaccctgacatcaaaatccgctggtgatgatgtggataatgattttgctgatctctacatcttcaaatggccatggttcatgatcccccacctcaccatcatattggttaattggatggccat

SEQ ID NO: 217613 - DNA, 383 bp, Gossypium hirsutum
cccacgcgtccggtgaatcatatggccagcactgtttccctcaagcttgcatgtggtgtggtcttgtgcttggttgtgggtgcacccctggctgaaggggccataagttgtggccaagtcatatcagccttggcaccctgcattccttacgtgagaaacaacggtgctggtggcgtgcctgcatcttgctgcaatgggatcagatctctcaacgaggctgcccaatcaactccagagcgccaatcagcttgcaactgcgtcaaagctttagctgccagcatttctggcaataactatgaccttacgaacaaactcccaggcatgtgtggggtgcacagccttttcaagatcagccccaacactaactgcaaaagtgtcaagtg

SEQ ID NO: 217614 - DNA, 388 bp, Gossypium hirsutum
  unsure (1)..(388): unsure at all n locations
tatgcatcggatccacaagtagtgtatgttgtgaaaggaagtggtgaagtacaaattgtgggtcttcaaggcaagcttgtgttgaacactaaagttgagaccggccaattgtttgtggtgccaaaattgttcatggttgccatttctgctgatgaaaatggcttggaactgatctcaatcgtaacatctactagagctataatgggagaaatggggagtaaaaattcggttttcaatacaagtccttcaattctgcaagtgagccttaatgtgagctcagagctaaatcaacaattcattgagattatggaaactggcaccattattgttaccccatgaacttgtactangtcctatgattgtgtcattttaggggttcaataaaaat

SEQ ID NO: 217615 - DNA, 399 bp, Gossypium hirsutum
gatcttacatggaccgagatccagagcttgaaacctaaaatgtatagccgttttgaacaaaactctgggttagagagaaaccctgaggccaaaaacaaaggaaaactcatctcacttggtgactttttagggtttgctaaaacaaaaccagttggagttttgatcaacatagaaaatgctcgttacttggcatcgaagatgcatcttgacgttgtagatgcagtgaccaaaaccttgaaaaatgcaagcttagaaaagaagcaagtcatgattcaatcagacgacagtgcggtgctatcgaagtttaaaggtgagtctggttacaaaagattgctccggttcgaggagatcagcggggtatctaaacaggcagcggaagaggtcaagaaatacgctgat

SEQ ID NO: 217616 - DNA, 433 bp, Gossypium hirsutum
cccacgcgtccgaaaaacttttaaaaaatcttgtagatatcagcagtagagttgatgtagttgatgttctgtaagtagtcagtagcaagaactctataaccacttttcaccgaatactccccagacccctcatacttccacaccagtaaatcctccgttgaagtctcaaaaatcgggatggaaataatacgttgtgcctgatcttcattcacaaggctataaataagtcccttattccaggcaaccaaggatcattccaaatgtttaccataacaccgttgtcgattctctacaaaactccatcagcaatcaaatcacaagcgttgcaaatgctctgcctagtaaacgaaggaatgagaagatggttactgaaaaaccaatgagtacccgagatcactatttgcatattaatctcatggaaaaactgaaaaag

SEQ ID NO: 217617 - DNA, 413 bp, Gossypium hirsutum
catgaacaacaccgtctcttttgctctgcttcactttgcattttgcttcactttagtttcattcactcctatttctgccctggaattgcatggaactggtgccaacatggtcgaaacaacttgccaaaagacacccttttacaatctatgtgtctcggctcttaaatccgaccctcgaagttccggtgcaaacgtagcggggctagcgcaaatcggaacagataaactgaaggccaaagccaccgcaacgctgcggcagatcacagcgctgcttaaagtggccaaagatccgaagctgaaaatggccttgcgtgactgtgctgattattacaacgccattgttaaatacgatatcccggtagctgtagaagctgtcacgaaaggcgacccaaagttcggtgtcgagggggcga

SEQ ID NO: 217618 - DNA, 416 bp, Gossypium hirsutum
gttggctgaaggacgtctgatgaacttgggttgtgccactggacacccaagttttgtcatgtcctgctcgttcactaaccaggtgattgcccagctcgagctatggaaggagaaggcaactggaaaatatgagaagaaggtttacgtattgccaaagcacctcgacgagaaagttgctgcacttcacctcggcaagctcggagctaagctcactaagctcactaaagatcaagctgattacattagtgtgcctgttgaaggtccttacaagccttctcattacaggtactgagggggacagttaatgagtttttatcgagaaagaaaaagcattcggatgggaaaatgatgtgggatttggtctcttcttgtttgaagatgaccaaatggtttgaaataaaagtgttttgagggat

SEQ ID NO: 217619 - DNA, 145 bp, Gossypium hirsutum
accggaaggccgacccacgcgtacgcccacgcgtccgcccacgcgtccggtttaaaaagttttgaataagtgatggaaatatgatatattgattgaattgtattacatctgggtattaataatacaaaaaaaaaaaattgagttc

SEQ ID NO: 217620 - DNA, 383 bp, Gossypium hirsutum
  unsure (1)..(383): unsure at all n locations
gccgaccgcgtacaatccctgctaaacttgagaatgctgatgccatactacagaacttttgattatgnccttctcttttacnagtttgatgaacaagagggatcanagtgactattagaaagaattttgcgggttgtatttctagatatggggcggcctagccctgcattggacaaacttaagcgtcagttagctgaggccgaggctgctttcgaagcacgcaagaaacctgcccctgatacaggtccccgtgttgttggcgaaggtcttgtaatcgatgaatggaaagagcgaagggaaaaatacctggcacgtcagcaagttgaagcggtagattcaacatgaagcgatgtttgatcttgctgtgaatgctttctttcttc

SEQ ID NO: 217621 - DNA, 357 bp, Gossypium hirsutum
gggcggacccaggcgtccgcccacgcgtccgcccacgcgtccgcccacgttttttgaaacaccgtcctgtattcaaagtatgcggggaatgacttcaagggcaatgatggtagtaactatattgctctgagagcatctgatgtaatggctgtgctctcttagttgtgtaataaggaacggtgttagatattgaggttaaaactggaacgattggatgagtctatactaaacatacaaagactgggatgacttattcgttagagaaagcgggtgtggcatttggtagcagtatgcagtgtttgatgcaaaggttcttagtaagaatccaaagggaccattaggggggacgatgaagga

SEQ ID NO: 217622 - DNA, 398 bp, Gossypium hirsutum
cccacgcgtccgcccacgcgtccgaaactttttagttctcaactctctcaaattcaccatggctgacaagtgtggcaactgcgattgcgctgacaagagccagtgtgtgaagaaaggaaacagcttggtcattgagactgaggagagctacatcagcaccgtagtggtcgagcctctggcagagaacgatggcaagtgcaagtgcggaactagctgcagctgcacaaactgcacatgtggcagtcactaagcagacatatagaatgatgaagtttgggacctaaaaagaataaaagttgggttgaaataattgtgtcttttgttgtagttggagtgtgttttcttgtctatctgtccgatgatggtctatgtctctcattttatacaatgatggaatg

SEQ ID NO: 217623 - DNA, 430 bp, Gossypium hirsutum
cccacgcgtccggctgaaaaggagagttccaccagctgttccaggaatcatgtttttgtctggaggacagtcggagatggaagccacattgaacttgcatgcaatgaatcagagccccaacccatggcacgtttctttctcttacgcacgtgcattgcagaacactgtgcttaagacatggcaaggacgtccagagaatgttgaagctgcacagaaggctcttttggtgcgtgcaaaggcaaactctctggctcaactcggaaaatactctgccgagggtgaaagtgaagaagccaagaaaggaatgtttgttaagggctatacctattaaggcgtaagacactgtaatatctggtttttgggcatctatggctttttgtgcgaggattattacttgctgttagataagttttttacatattattgttat

SEQ ID NO: 217624 - DNA, 390 bp, Gossypium hirsutum
cccacgcgtccggctcaggcacttcggtttgagatcaaccgggcttttgctgtcctacgggatattgcatcaggaagagaactcaagaagttcctatctgtgatcgccggcttatgggtcttgtctattgtcggaagttggtgcaacttcttaacactgttttacatagtcttcgtacttcttcacacggtacccgtgctatacgagaaatacgaggacaaggtggacccatttgctgagaaagcaatgcatgagattaagaagcagtatgcagtgtttgatgcaaaggttctaagtaagattccaaggggaccattaaaggagaaaaagaaggattagatttaccggccaagatgtgcttttgctaggtttctgacatacatttggtag

SEQ ID NO: 217625 - DNA, 264 bp, Gossypium hirsutum
acccacccgttcgggctgttgccatcttttcaaacgataaagatagttttcatcttaactgcccctttctattcaccgcggaattttttgtgcggcttgtacatttcaaaaccaagaatccctccatggggggtattgtattatttgatctgcccaatggcctggacaggttatggattgaacaccttccaatatggacattaccagcgctccataaaaataccaggggttaaacctgacccttctattaaatggtacttaaaa

SEQ ID NO: 217626 - DNA, 429 bp, Gossypium hirsutum
  unsure (1)..(429): unsure at all n locations
cccacgcgtccggcaaaagaaagagacgatgggagtgacgaaggaacaagttgagtcttcgttgacttcaaaattgaagccttctcatctggaagtaatcgatacatctggagggtgcggtgcaagttttgttattgagattgtatcggagcaatttgaagggaagagactcctggaaaggcaccgaattgtgaatgctgctctcgaggaggagatgaagcaaatccatgccctgtctataaagaaagctctgaccccggagcagtggaaacaacagcaagaggctgaaaaatctaaaccagatgcttagagagacactcaaaactataatttagacatttgaataagagttcatgagaactcagctggaatactaagccatcatttcacctttagcatacattntagaaccatacttcgtaattactg

SEQ ID NO: 217627 - DNA, 421 bp, Gossypium hirsutum
gtccggttgggaaaagagggtccttgctatatggtcttcttggaactggtaaatccagtttggttgccgccatggctaattatctcaaatttgatatatatgatttggggctcaccagtgtacgctctgatgctgagttaaggcggacactgctatccactaccaatcgctctatactgttgattgaagacatagattgcagttctgaggttcttgaacgacaaatgagaaacaaaaacaaaaagctaccagatagaactgggcagttgacactatctggtatattgaactgcatcgatggcctgtggtcaagctgtggggatgagagaatcattgtgtttacaaccaactataaggatcggatagaccctgctctgttacggcctggtcgaatggacttgcacatcaacatgtcctattg

SEQ ID NO: 217628 - DNA, 418 bp, Gossypium hirsutum
gccacgcgtccggctggaacaaacataattgcactgctgagtgttgctgatggatgaccgcatgttggtggacactatgagacatggaatacagggatcctacgtccagatgcactgcatgacttgaccaacgcaaatgggacctgtgcaggcaaaaatggacttaccagggtggtcttaaaggagaggccatggatctggtctcaccaaatggattttgctcaactgagtggatgacggcatcattggttgcacaaaaaccagagccattaagatggcataaggcttattttaatgcacctgacggtgatgagccgatagctatggacatggagagcatgggaaaaggtcaaatctggattaatgggcagagcataagcagatattggacagcatatgctcatggtgactgcaatgg

SEQ ID NO: 217629 - DNA, 424 bp, Gossypium hirsutum
aaaaaagtctgcattgctcattcgtccctttattgaaaacccaagacacaatcggaaaatgtggttggtatcttcttctccttgatggcatctcatgcagtgatcctcgatcgtcactcttctcagctttggattagaaaaagtgggcatgtaattccatgaaattttccacactgtaattttgattttcgagggcatgtttaggcgccacaatttcctgtaaaagtttttagtctcggcctgtgcgtaattactaggattcattgtagtatcctgtaatagtttataggtacttcttactgaaaagttcccagatggctctcctctccacacctgaaagtcttcatgggtagactttgttagcggaatttacagtattttcctagcaatatctgtaggaaatgtacggactatcaaatcactt

SEQ ID NO: 217630 - DNA, 179 bp, Gossypium hirsutum
gcaacatcccaatgtttgaatgtcaagcctataattagtggcaaattaaacccgattccatgttgcggccctatgccaaaaagcccgtagcgccaccgcttaaagcataccaacaaattcaatgcaattgtaattaatatatttattcatattatataaaaataattatttttcatttt

SEQ ID NO: 217631 - DNA, 417 bp, Gossypium hirsutum
acggcttgcaagtttacagaatctggtgcttataatgtttgaggacgatacagttttgataccaaaagaaacagcctggttcagttattttccagacggtgctttcgaacctgtattgcctgtacaagcggtaaacatatacataactgttctataagcaaagtaaaactaaaacctttcgttttggtattgtccggatttgtttgcttttctgcaggccaagctctataaggaagattggatcggtttgaaaactttggatgaagctggaaaagttaaattcgtaaatgtctcgggtaatcacctacaaatctcaacaagcgacatgaagaagtacatggtaccatatttggagtaccaaacacctgcaccaacagggcagacaccgacagaagcttcatcgtatcaatggttttc

SEQ ID NO: 217632 - DNA, 418 bp, Gossypium hirsutum
cccacgcgtccggcttgcctggttccattgtggtcaccgccactaacttctgcccacccggtggctggtgtgaccctcctaaccaccactttgacctctctcagcctattttccagcacattgctcagtacaaagctggaattgtccctgttatttacagaagggtaagatgcaggagaagtgggggaataagattcaccattaatggccattcttacttcaatttggtgcttataaccaatgttggaggtgccggtgatgtccattcagtcgccgttaaaggttcaaggaccagatggcaacagatgtccagaaactggggacaaaactggcaaagcaatgcttacctcaatggccaaagcctatcctttctcgttacaaccagtgatggccgcagtgtcctctcttacaacgttgc

SEQ ID NO: 217633 - DNA, 383 bp, Gossypium hirsutum
ctcaaagagattttctctactggcattgtgcttggaggttatttagcactaatgaccgtgttattcttctgggccatgaaagacactgatttcttctctgacaagtttcatgttaggtcactgagggatcgtcctgaacaaatgatggcagctttataccttcaagttagtatagtaagtcaggccctcatttttgtcacacggtctcgcagctggtcctttgtcgaacgtcctggacttctattagtcactgcatttattgctgctcagctggtggccactttgatagctgtctacgcttaatggcgttttgcaaagatacaaggcatgggttggggatgggctgctgtaatctggctttacagtttggtcacttatattcc

SEQ ID NO: 217634 - DNA, 414 bp, Gossypium hirsutum
cccacgcgtccggttttcttcactcattagggagatggcccaactacagtgacgggcaacgtttctggtcttaagcctggcctccatgggttccatgttcatgccctaggggacacaacaaatggttgcatgtcaacaggacctcacttcaatcctgctggaaaagagcatggtgctcctgaagatgtgaatcgccatgctggtgatctaggaaatgtcactgttggtgctgatggctctgcgagtttctctattgtcgacaaacagattcctctctccgggccacactccattattggaagagcggtcgttgtccatgctgatccggatgaccttggcaagggggggcacgagcttagcaaaagcaccggaaatgctggtggtagagtagcttgctgtattattggtctgcaa

SEQ ID NO: 217635 - DNA, 412 bp, Gossypium hirsutum
caaatagttctactttagaacttgctaccattgatgatgacaatggcccggtaacaagtgtgagttgggctcctgatggtcggcatattgccattggcttgaacaattctaaagtacagttacggtattctgcttcaaataggcagttgcgcactctgagaggttgtcaccgaccaagagtgggttcaatggtatggaacagtcacattcttacaactggaggaatggatggtatgatagttaacaatgatgtaaggaattagatcccatgttgttaaaacctacagaggacattaataagaagtttgtgggctgaaatggtcagcttctggacaacaactggccagtggaggtaatgataatcttgttcacatatgggatatgtccaaggcatcttcaaattcaccaacac

SEQ ID NO: 217636 - DNA, 395 bp, Gossypium hirsutum
aaataacaacaaagatccagctctgcttggttatggttcaaagggacacaaaattcactattctggtcctttattagtcccatcaggcaacatggatcagatgctcaaggatcatgatcgccaaatccaagaagctgttcggcgagcacgtgttgacaaggcaaagatgagaaaaaatctgttagaagggaaccaaatatcaaccaaatcattatttgtctccggtcgttgaggtaaactctgtaagcagcaaatcagtatgaacattgtcaagatgatcccacaagcaaatcagtagagtggattttcttgtataggttgatgcttttaggaaaatggctagtgggggcatattttagctaagcttatggttttattgagaaatcattctatga

SEQ ID NO: 217637 - DNA, 419 bp, Gossypium hirsutum
  unsure (1)..(419): unsure at all n locations
cccacgcgtccgcccacgcgtccgcccacgtttccgcccacgcgtccggtcttttaaaggaatgggatacctggatgatggtccagttgcagcacattattcttgctcaatccgttgaatccattcctgagtgggcagcttgtatacgttacgcagttactgggaaaggaaagcatggaacacgagtaccccttctgagacaacagattttgaattgcttggtgacacctttacctncagctgtaactactacagtagttgcaaagcggtatgcttttatttctgctgcacttatagaactatccccacaaaaaatgcctgtgcctgagatacagctgcacagtaaacttctggatgagttgctgggtaatatgtgccactcttcagcccaagtaagggaagctattggggttgcccta

SEQ ID NO: 217638 - DNA, 417 bp, Gossypium hirsutum
caatgttgcatcacaatgtggcttgaccaattccaactacactgagctaagtaaattgtatgagcaatataaagatcaaggttttgagattcttgcattcccatgtaaccagtttggaggacaggagccagggaacaatgagcaaatcttagagtttgcttgcactcgctttaaagctgaataccccatatttgataaggttgatgtgaatggtgagaaggctgctcccgtatacaaattcctcaagtctagtaaaggtggactttttggggacagcatcaagtggaatttttccaagttcttggtcgataaggagggccatgtcttcgatcgttatgctcccactacttctcctcttagcattgagaaggatattaagaaactgctggcttgaatttgatgagtggaagagattag

SEQ ID NO: 217639 - DNA, 413 bp, Gossypium hirsutum
cggagattggtagggagcaaggtggtttttatatccttgaaccgtcttgacagactagtgtggctttgactccgtgtgttgcatctgttacattcgttggaccatctttttttggcacactagacttggccatacttctatttcaagattgaataagatgcttaatcttccctgcacagttttgaatagtgatagcatacaacaatgtcctatgtgtcctcttgctaaacaaactagactttcatttcccataagtacgtctcgtgttgatattggtttttccctttttcatatagatttgtgagggccctatcgagtttctactcatagtggccataggtattttttttaaccattggtgatgattactctaggatgacataggtgcatatgttatgatataaaagtgatgc

SEQ ID NO: 217640 - DNA, 439 bp, Gossypium hirsutum
ggggccgaccgacgcgtccgaagaaaacgaaaaaagaaaaatcaatagctggttgggacccccgaaaacccgatttcgaaacccgaatcggatctcccaaatagcttcgaagcagaagaaagaagatgacgggagtaaccaatcaggaggaagacaagaaacccgctgatcaaacggctcacatcaatctcaaagttaaaggccaggatgggaatgaagtgttctttaggattaaaagaagtactcaactaaagaaacttatgaatgcttattgtgatcggcaatcggtggagttcaactctattgccttccttttcgacggtcgccgtctgcggggcgagcagactccggatgagttggaaatggaggatggggatgagatagatgcaatgctgcatcaaactggtggtaccatggcctaactagcttctttataggt

SEQ ID NO: 217641 - DNA, 214 bp, Gossypium hirsutum
tgaaaacccggggccgacccacccgtccggttttttgttttttctaatcatcttttaggtcatgatggtagtggtaggttcaatgtgatgtgatgatgaagtggggcgtctgatatgttaatggacaatagctcatgtctggtatagtctgtttaaatgtgtttttgcttaatcgaaagttgctttgccacacagtagtggcttttggttgttt

SEQ ID NO: 217642 - DNA, 399 bp, Gossypium hirsutum
cggacgcgtggggcggcatcatcttccaacgatccaccgacctcactgagtctgtctttaccgggggtggagtcatgtgaggtggtgtcaacccagccaataacggagtcaactcagaatcggagtgaagaaaggggaggtggggtgatgggtttcagtgcggagtttatggcggtgatgcaagaaatgataagggttgaggggaggaattacatgacgcaaatgcaacaacagcagcagcagcaaaacggcgcagttccgggaggagcgggaatggggatgtgtttggatggggggttcaagaatcttatggctgggaaccgagtcgggatgagtaagatccagtgaaaaagcctaaaaatgacacgttaaagaaaaaaaaggccaatttttttaatt

SEQ ID NO: 217643 - DNA, 419 bp, Gossypium hirsutum
aaaagatagcattcttgtcaacttcggtgaatgttgtctagcttcttcgctcagatctttgcaagttaaatatgtcaattcaattacaaagctgtgtattatcagagcttcaagagatgaatacaaaaaaatttggtattcaattagcatggttagaagtattgggaactgtcttgtgctatttaatttgttggatcttagtggtagtataaaagcatgtaaaactgctgccttgaagtgcgatgagttaaaattcgagcaatacaagcttatggttggagcacggctctcggttgatgttattcggcacatgcaaaattgtattgagaagatcaaaattttagaacactaagactccgtttgtttgtcagtaaaatatttttcggaaaatgatttacttttctagatatattaataaa

SEQ ID NO: 217644 - DNA, 278 bp, Gossypium hirsutum
  unsure (1)..(278): unsure at all n locations
gcatgactgagcaatgcttcctttacagatctggtaggcttctttcagctgtccatcatgggttgcatctggtgctaggaatttgattaaccgtattcttgatccaagccctcttacccgtataactattcctgaaattctacaagatgaatggttcaagaaaaggtacaagccaccaaaatttgagcaagatgaggatgtaaatcttgatgataatatcttatattttacatggttatgatttaagtccttatttcattgatntcttnnnnnaaaaa

SEQ ID NO: 217645 - DNA, 226 bp, Gossypium hirsutum
  unsure (1)..(226): unsure at all n locations
cccacgcgtccggtttagcctttttcttgatatgtgtcctccaatagttctttatctcattgtcagttcttcctggtaagcttcttgcaatggttgaccaccttaaaaattttgttcaaatacgaatattaaatacgaatacttcaagaaagtttaatccgaacaaatttatatattaaaatcattacctgtttccccaannaaaaaaaaaaaaaatatatatttt

SEQ ID NO: 217646 - DNA, 351 bp, Gossypium hirsutum
  unsure (1)..(351): unsure at all n locations
cgaccgacgcgtccgaaagaaaagaaaaatggttctggctagagaatctttgggatgatgtanntggccggacctcagccggaacgtgcgcttggccggctgangaagatcacaaccaccccacccttgtccaccaaagatgaggcttcattaatggcgatgccgacgagtccgacgacacctgggacaccgtcgacgccggtgtcggctcgtagggacaacgtgtggaggagcgtgttcaatcccaggtagcaccttgcaaccaaaggtatgggcgctgaaagtttcgacaagcctcaacctaactctcctactggttatgactggctttacagcggggagacccggagc

SEQ ID NO: 217647 - DNA, 376 bp, Gossypium hirsutum
  unsure (1)..(376): unsure at all n locations
gcgcgggcgnncaagaactgataaagtatggcaaccattttagctttctcatcaatcaccattgcanctggtcttgcgtacaagccatggtactcgggctcacctccccaattgccattgggttgccaacaatggcgaagaaagggaaagtgatgtgttctatgaaggaggaggaaaagaatagctctagcgntggcatgagtgctgcatcgctgttagctgcagcagtcatgtcaagctcaccagctatggctctggtggatgagagaatgttcaccgaaagaactggacttccctttgggttgagcaacaacctttttgggtggatcttggttggtgtattcggcttgatatgggctctttacttcgtttacac

SEQ ID NO: 217648 - DNA, 434 bp, Gossypium hirsutum
ccggaccggaagggccgagccgagcgacccgtccgactgtgaacgtaacgcatactatggctccatcggggagtacatgtcacatgaaaatgcgtgaggggtgatcaacggactagattgccacagggatagcatgttggactatgaagatttcttgaagctaatgaaaatagaaaagcgggatgatgatgatgatgatgatgacctgaagaaagcgttcgagatgttcgagttggagaaaggctcgggttgcataactcccaaagggttgcaaaagatgttgaatcgccttggggatgcaaagtcttatgatgaatgtgtcgctatgattcaggtttatgatattgatggtaatggggtgcttgattttcatgagttccaccaaatgatggcttaatttgataggacactcgtacctttaatttgtgcttaag

SEQ ID NO: 217649 - DNA, 430 bp, Gossypium hirsutum
cttgttgacaatggctacacatattgtgttgttgcagatgaatcagctggaagccaagtaccgagtggttttttggagcgtgtcagggaggactttgtgtcaaaatatggtagtggaaaggctgctactgctcctgccaacagcctgaacaaggaatttgggccaaaactaaaagaacatatgcagtactgtgttgagcatcctgaagaaataagcaagcttgctaagatcaaatctcaggtttctgaagtcaaaggtgttatgatggagaacatagagaaagtgttgataagagggaaaagatagagctgctagtggataaaacagagaatctttatcagcaggctcaagacttccggaatactgggacgaaaatccgtagaaaaatgtggctcaaaacatgaaatcaagctgattgtctaggatactg

SEQ ID NO: 217650 - DNA, 444 bp, Gossypium hirsutum
cccacgcgtccgctacttggctggtgatagttctggtggaaatatagctcaccatgtagccgtgagagcggccgaagctgatgtcgaggtattaggtaacattcttcttcatccgacgtttggtgggcagaaaagaacggaatccgaaaaacgattggatgggaagtattttgtcacgctgcacgaccgcgactggtattggagagcgtatctaccagaaggggaagatagagaccatccagcttgtaatccatttggttcccggggtcgaaacctcgaagggcttaagttccccaaaagtcttgttgtcgtggccggtttggacctcattcaagattggcaattggcatatgttgaagggcttaaaaaatccgggcaagaggtgaaacttctcttcctagagaaggctacgatcgggttctacttcttgccgaacaacaatca

SEQ ID NO: 217651 - DNA, 416 bp, Gossypium hirsutum
tccattttgtacacctaaactctttagcgccagcatcggttttgggctagtttggatcggatgggcagttaaccaattgagagacacggttgtacaaatcagcaaaatactagcaagtctggtctgaaggaagaggagatggttgagagagtggagaaaagtgttaatcagatatatttcagagccgcgacattgatggctatagcagtgctgagatttgcatgaactctgaagatctagacagtcgaaagttagactcaattatattgatctgggatgtcaatatctgaagaacagagaggggttctgagggcaacaatggaactctgacttactatgctatatccatggggggtcctatgatgggcttgagagcacatactctggtgcttttgtatgtataacaatcgtaaaca

SEQ ID NO: 217652 - DNA, 450 bp, Gossypium hirsutum
cgagaatctgagcagcgtcgaagttgagtcggttctgtacaatcacccggcaatcaatgaagcggcggtagtggctcgaccagatgagtattggggagagactccttgcgcgtttgtgagtttgaaaaatgagttgactcagaaaccgagtgagcaggacataatacagtattgcagagctaagttgccacactacatggtgcccaaaacggtggtgtttaaggaagaattgcccaagacgtcgacggggaagattcagaagtttgctcttagagatatggcgaaggcgctgggtccttcgtcatcttcctcacggctgagtcggatgtaagctcccttgtactcactatctgcatggtcaacatcggattgccgtaattatgaaatagtagtgtaaagacttattcttagtgcctcgactgcattattacaatatattaaaaattaagt

SEQ ID NO: 217653 - DNA, 428 bp, Gossypium hirsutum
cccacgcgtccgaccttggcatgcttgatgacacattcctcgcaccagaaagtgaagagtgtgtgaggaaggtgaatcaggttgctgacaaatattgggatctctattcaagtgagtcacttgagcgagacttgcctggacacctactccgctaccccatcggtgtttctagtgatggatctgtcactgaattgcctggcatcgagttcttccctgacacaaaggctcgtgttcttggtgccaaatctgattatctgccacctatcctcactacttaggggatctttactttgttcttaagcaataataacttgtctagtttggtgttactggctttggtagtaacaataaaacttgtttttgtgcttgtgtcatagtctgcagagctgcagtgttgtgttggtattgcttttccgtcagctgtgata

SEQ ID NO: 217654 - DNA, 438 bp, Gossypium hirsutum
gcttggctcaagaggatccagtgttgtggtgcctcggtacttcagattgctggaggagcttgagcgtggagaaaaaggtattggagatggtactgtcagctatggaatggatgacggagatgacatttacatgcgctcttggactggcaccattattggtcctcataatactgtacatgaaggtcgaatctatcagctgaagctgttctgtgataaagattatccagagaagccaccaagcgtccgttttcattcaagaatcaacatgacttgtgttaaccacgaaactggagtggtggaaccaaagaagtttggacttcttgcaaattggcagaaggagtataccatggaggatttactgacacagctgaaaaaggagatggcggcaccacataaccgaaagctggttcaacctcccgagggtacctacttctagtc

SEQ ID NO: 217655 - DNA, 318 bp, Gossypium hirsutum
cggacgcgtgggcggacgcgtgggcggactcgttgtcggacgcgtgggcggacgcttgggcggacgcggtttttggtaagcacaggaggcatcctggaggtcgtggaaacgccggaggcatgcaccaccacaggatcctctttgacaaatatcaccctgggtatttcggtaaagtctttatgaggtacttccacaagctccgcaacaagttttactgccccattgtcaacatcgacaagctctggtctctcgttccacaagacgtgaaggcaaaagccaacaaggacgcctcgccgatgatcgacgtgacctatttcg

SEQ ID NO: 217656 - DNA, 447 bp, Gossypium hirsutum
ctagattcaaagggggcacttttatatcatcaaaatctgtggcgggaacacctgagtggatggctgcagaattccttcgtggagagccttcaaatgaaaaatctgatgtttacagtttcggagtaatcctatgggaacttattaccatgcaacaaccatggaatggactcagtcctgcccaggtggttggtgctgtagctttccagaataggaagcttgccattcctccgaacacctcccccaaattggtttccctcatggaatcttgttgggccgatgatcccgctcaacggccgtcttttggtaatatagtaatagcactaaagaagttgctgaaatctccattgtagcgatgcagaaaggaaaacagtaacaatgggtgtcgtttgaataacctgaaagcagctgattttggagattccactaactttttgtttttggttccag

SEQ ID NO: 217657 - DNA, 442 bp, Gossypium hirsutum
  unsure (1)..(442): unsure at all n locations
cccacgcgtncgcttntgatagactgtggcgaggtagcccgctgagagcttacagtgatagaaatgactggttatcaaaggaaatgcagcagaatattccaggcggctacaatatggattctttatggctaattgaggctaatcaaaagaatcacccatatcttctagattggtactatacctctcgagcgcaacagatgcctagttatagaagagacactgcagcaaggccatttgaaccagctgaggagcagcataagaattactggggtccgatcaacacaacgcatgatgaagcaagagataaagaataccggccacaccattttgatgatgggtccctgtcgcatcttgaagcttcaacatcagctcctttcttccatgagagtgtacttcagcatcatgatacaaatgtatcggtgcaccatacacnggagctgtg

SEQ ID NO: 217658 - DNA, 443 bp, Gossypium hirsutum
cttaacccttcgtcctcccaacttccacacccatacgaaaatgacaacccgcttcaagaagaaccgcaagaagcgcggtcacgtcagcgctggtcacggacgtattggtaagcacaggaagcatcctggaggtcgtggaaacgccggaggcatgcaccaccacaggatcctctttgacaaatatcaccctgggtatttcggtaaagtcggtatgaggtacttccacaagctccgcaacaagttttactgccccattgtcaacatcgacaagctctggtctctcgtcccacaagacgtgaaggcaaaagccaacaaggacgccgcgccgatgatcgacgtgacccagttcgggtactttaaggtccttggaaagggtgttttgcccgaggaccaaccgatcgtggttaaggctaagttggtgtccaagacagctgaaaagaaga

SEQ ID NO: 217659 - DNA, 408 bp, Gossypium hirsutum
tgctatggcatccaatgaatctattatcaggaaggatttaagataccctgaaattgaagaaaaagcactgcaatttattcttgacaattgtgaatcaagcatatcaaagtattctaaattcttgaaggaaagtggctccatggatttggatataacatctcaagaactacagaatcgaggagtgtttctgaaacagctagcagtagatttatgcataagtgagcagaaaatactacatcgtgctcaatatatactgaagaggagattgagggatatgagaagtggtgaactgagagcttaatcttttgatggctacaaccttttccccctctaccttcgccagtgacgaaacttgaacttagaaatgcattattggaccgtctctttggcgtctttggaggacttagt

SEQ ID NO: 217660 - DNA, 379 bp, Gossypium hirsutum
cgatgattggatggacccagttggagctatcattctggctctatacactatccggacatggtcgatgacagtactagagaacgtgaattcattagtcggaaaatcagcagctccggaataccttcagaaactaacatacctgtgttggaaccaccacaaggccataagacatatcgataccgtccgagcctacaccttcgggtctcactactttgtggaagtcgacattgtactcccagcaaacatggcattgcaagaagctcatgacattggggaatcattgcaagaaaagctggagttgctgcctgagattgagcgtgcctttgttcatctggattatgaattcagtcacaaacctgaacatgcacaagcacatgct

SEQ ID NO: 217661 - DNA, 395 bp, Gossypium hirsutum
gtccaagttcttggctggatttgtgttgccatctctgtatccgtctttgcagcacccttaaacattatggcacgagttatacgaacaaagagcgttgagttcatgcctttcaccttatcatttttcctcacattgagtgcagtaatgtggtttgcttatggactatttattaaggacctctgtgtagctctccctaacgtactaggcttcatcttggggatgctccagatgcttctctacgccatttacagacacagtgaaaaggttaacatagaggaaaagaagctaccagctgaacaaatgaaaagcatcaatgtcgtccttaccacattaggtgcctctgaagttcaccccgtagttttggatattcacactgatgatacaaaggaagaaga

SEQ ID NO: 217662 - DNA, 443 bp, Gossypium hirsutum
cccacgcgtccggctcgattgacacagtttaaatacttggcaagtgactgcttcaccttggccgacctgcatcacattcccaacattcaatgcttgttggctacacctgccaagaagctgattgattctcgtccgcatgtttgtgcttgggtgaaggagatcactgctaggcctgcttggtctaaggtcctcgctatgcaaaaacagtgaaaggtttcggcgatttggcgcccacccgagctgatatcagtagtccaatgttgaataagtccttcgcatgtttatttcggtgtttaaagtctaattcgcatagactttttttgagtgtggtctgcattcttggggccctcttcttatgttttttggccttttatgtgtcgattgactttgtgcttgtggttggttcatcgctcatctacgactaatatactacaataatttac

SEQ ID NO: 217663 - DNA, 347 bp, Gossypium hirsutum
gagatgaggaagaaatcaagggaagatggacttcagacaacaggagaaggactggagtggggagtgctctttgggttcggacctggcctcactgttgagactgttgtgctccatagtgttgctgcttaaagttaaacaaacatgccttttaagtaattggtcgtgctccacttggcttgcagttttatcttcttcttttttccttttttagattatttaaatcctatgaatttgtgtgtttattgttaaagactagaacactttgatggtgtgggcgggaagcttaacgcctattcaattcatgtaccaacttatattaaatttatggcaataataagttcctttgc

SEQ ID NO: 217664 - DNA, 93 bp, Gossypium hirsutum
cggacgcgtgggcggacgcgtgggcggacgcgtgggcggacgcgtgggttaaggctccatagttggttgtcaaagtatttcagttcattttgt

SEQ ID NO: 217665 - DNA, 444 bp, Gossypium hirsutum
  unsure (1)..(444): unsure at all n locations
caaatttgcaatccgctatgttcttagtggaaaggcttgggataaccttttggagaacaagactggcttgactacnaagaaagattacggaaaagaggaaagggaagcacaatgggcagctgcgcagaggactctgcatggccttcaaccacctgaaaccacaagcattttcaatgaaaggagcagttacagggaactttcagaaatcgcagagcaggccaagcgcanggctgaggttgcaaggctgagggagctgaatacactgaaggggcatgttgaatcagtggttaagctcaaggggcttgatatcgataacatccagcagcattacaccgtttaaagatggatgctatttcccgtccaagaaaaaaagtagttataatgacgaacaatcacccccgatattaatattaatattggtatcaatcggcttatagtagtagt

SEQ ID NO: 217666 - DNA, 305 bp, Gossypium hirsutum
gcatgtatcaacttgcattaggtaactgtttgttgacttatcggcagtataaaacaagttgggagggttgacaaatacggggagtgaagcaagatttgagctgggacaatgcagctgagaagtatgaggaagtgcttgttgcagccaaatatcagtggtgagagctctgtttgatctgatttaacctttttatcacctttttaccacaaattttgggtcttgttatcaaatgttgttttaaatgttgtattcttatttcttttgctctcttttattttgattgtttgtgttttttttttttaatt

SEQ ID NO: 217667 - DNA, 411 bp, Gossypium hirsutum
ccaaggagggagatacttttggatacacaatacaggtcctgttgggtgtttaccatatgtaatggagcgtatcccggtcttagcaggtcaaattgatgactatggatgcgcctctccattcaatgaagttgctcagtttttcaaccgtggattgaaaaagattgtggaacagttacgcaaaaatttgccccatgctgcaatcacttacgttgatgtctactcagtgaaatactccctaattagccaaggtagcaagcatgggttcaagcaccctcttagaacatgctgtggccatggtgggaagtacaattataacaagaacttggggtgtggagcaaaggttaacaaacatgggaaagaagtgttggtgggagctccttgcaaagatccttggacttacgtaaactggga

SEQ ID NO: 217668 - DNA, 405 bp, Gossypium hirsutum
aacaaaaggaagtgaaaaaaaccagagtttgcatccatggcgacgttggctactgtgggaagtagtgcagttctggggttcaacaaaacagagcctctgaagacgaacccatcttcaccatttcttggtttcgttacttcccaactcagcggcatcaaaatctcttgcaacctccctgtcgtggtggcgcctttaaaacccatatcttcccctttcactcctgctctccagcctgttgctcgtaggatatgccctttcaccggcaagaaagcgaacaaagccaacaaagtttcgttctcaaatcacaagacgaagaaattacagtttgtcaacctccaatacaagaaggtttggtgggaagccggtaaacgctatgtaaaattgcgtttatcgaccaaggcgttg

SEQ ID NO: 217669 - DNA, 300 bp, Gossypium hirsutum
gttttgaaatcataaaagctgtccatcttgacctaatgccgttcgacatggaacgagacctgctggctccaacatataagaagaagaggccccagttgcttaaatattatcagagtgtaatcgatgagatgtacaagagtgcaaacaaaccaaatgcttgataaaatgcttccaaaggcgtcggtgatatgttagatgatatggggttaaaacttgtgtattctttggtagtttggactgtacatgtagttccttcatcatcagaatttgtttaccaaaaaccaaattccctttgataca

SEQ ID NO: 217670 - DNA, 433 bp, Gossypium hirsutum
  unsure (1)..(433): unsure at all n locations
aggccattacatcattgcttctgactggaagtttttcgttcacatgacagaagatatgttttgtggtgaagtccacctggttgatctgcgagtcatgganaattgcttgaaagtttccaaaggagtggaccatgtcttcaacctcgctgccgatatgggtgggatgggtttcattcagtcaaaccactctgtcattatgtacaacaacactatgatcagtttcaacatgcttgaggctgctaggattagtggagttaagaggtttttctatgcctcgagtgcttgtatctaccctgaatttaagcagttggacactaatgtgagcctaaaagaatcccatgcctggcctgctgagcctcaagatgcttatggcttggaaaagcttgcaactgatgagttgtgcaagcactacaccaaagattttggaatcgag

SEQ ID NO: 217671 - DNA, 408 bp, Gossypium hirsutum
cccacgcgtccgacaaaagcaaaccctacccttttttttagagatctgagatcagaggtttcagagggagggaagacagagaagaatagaacattggagatcagtgatgggatctggggctggaagtttccttaaggttctatttaggaactttgatgttcttgctgggccagttattagtctgctgtaccctctatatgcctcggttagggcaattgaatcggagtctcgtgccgatgacaggcaatggcttacatattgggttctctattccatgatgacattgctggaactcacttttgccaaagtcattgaatggattcctatctggtcctatgcaaagctgattttcacttgctggctggtcattccgtacttctctggcgctgcctatgtttacgagcacta

SEQ ID NO: 217672 - DNA, 109 bp, Gossypium hirsutum
cccacgcgtccgcggagattcccgaataggtcaacctttcgaactgctgctgaatccatgggcagacaagagacaacctggcgaactgaaacatcttagtagccggagg

SEQ ID NO: 217673 - DNA, 400 bp, Gossypium hirsutum
cccacgcgtccgccaaacctgacctaatcaagggactcagggctcacactgatgctggtggaatcgtcttactcttccaagatgacaaggtcagcggccttcagcttctcaaggatggtcagtggattgatgttcctcctatgaaacactctattgtcatcaaccttggtgaccaacttgaggtaatcacaaatggtaaatataagagtgtgatgcaccgtgtgattgctcaaacagatgggaccagaatgtccattgcttccttctacaacccgggcagtgatgctgttatatatccagcaccagctttgctagagaaagaagctgacaaatctcaagtgtaccccaaatttgtgtttgaggactacatgaatctctatgctgacctcaagttccaagc

SEQ ID NO: 217674 - DNA, 293 bp, Gossypium hirsutum
  unsure (1)..(293): unsure at all n locations
cccacgcgtccgggaccaagctaggtcggcctaagctaatcgttgcgcccatggttgataagtcggagcttccgtttcgaatgctttgtanaaaatatggggctgaggctgcttatacccccatgttacattcacgtatttttaacgagaacccaaagtaccgttctgaagaattcaccacttgcaaggaggaccgtccattatttgttcaattttgtgccaatgatcctgatatattacttgaagcttgcaggagagtggaatctcattgtgattatgtcgatattaatttg

SEQ ID NO: 217675 - DNA, 405 bp, Gossypium hirsutum
aaaaactgtcaagagagctcttgcaacatatgggactcaagcactgaaagaaatgatccagaattgtatggcacaagatttttcatggaagggaccatcaaggttgtgggagaagatgttgttgagcctcggggtggctggcagtgaacctggcattgaaggagaggaggttgctcctcttgccaaggaaaatgttgccacaccctgagcataatcagaaggcaactatggataaagcttagtaacctgttttcttagacaaccaagtccaagtacctgtctactctcgatagccattggcttgaccggcggaaaacaaactgacctgccatacgtgaagtcagtagtgctatttttgagggtgaaaagtcaggagatagtatgatatatatccatagttatagc

SEQ ID NO: 217676 - DNA, 307 bp, Gossypium hirsutum
aagcaagaaggatgttttatgccagccttttgtatcttcctgtatttatgtctggcctccgatttcatcgtctctcagacaatccgcagtgccttgcggaaaatcccaacagtattgttgagcttccatcattccccgaagctgttactgagagtgaagaagatgatcagaagaagaaagggagggatgccactgctggtccacaaagacccccacctgtggcataagcatccattgctgcatttgcctttcatcctgttccctcctaaggtgagcaatgacatatcgaactggcatctattttttg

SEQ ID NO: 217677 - DNA, 331 bp, Gossypium hirsutum
gtgctgggaaattttctggagaggtatacagtttggacacagacacattggtgtggaagaagtgggaggattagcggggtgtagaaactcatcccgggcctcgtggatggtgtgctttttccagcggcgtaagggatggccaacttgggcttctagtttacggtggcaactccgctagcaatgataggcttgatgacattttcatttttacgccatccgtagcatagcaaagaaactgaaaactgagcaggggttaatggtgattcagtattaggattacaaagataatgtgtggctgtgtctagtaagtaatcttggaagtgctttatgt

SEQ ID NO: 217678 - DNA, 371 bp, Gossypium hirsutum
  unsure (1)..(371): unsure at all n locations
gtgagaaccctgaagctatggaggaagatgttgaggatgaagtggcagaaatcaagcctgcgcattttgaggaatcaatgaagtttgctcgtangagtgtgagcgatgctgacatccgcaaataccaagcatttgctcaaacattgcagcagtcgaggggatttggaagtgaatttaggttcgctgaaactggttccaggactgcagcctctgatccttttgctgctgctgctggaggagctgatgaagatgacctttacagttaaaattacctgtcatctatgttttccctaattcatgatttgacaattatcttctatctaaatacgtagtaagtaattaagttgactgtatgatttaaaacagtaaaa

SEQ ID NO: 217679 - DNA, 331 bp, Gossypium hirsutum
tcaaactgaggaagataaagaatgatcagctcaaggcagaggccaaggcaaagggtgaggtgattagcacaaagaggcagcctgagggcccaaaacctggtttcatggtcgagggtgcgatgttggaaacggttactcccattccatatgatgttgttaatgatctcaagggtggctactagatctactctgttttttggtttattcttggcataacttaagtaagctttgttagttattttggatgtgttgtttacgttttgtagtttattttgaagagttactgcttctgcaaagattttaatcttatcaatcattttattttagagat

SEQ ID NO: 217680 - DNA, 403 bp, Gossypium hirsutum
cccacgcgtccgtgaagggtctccttggtacaaagagctcccaaaaaccaacatggggttggagactggtcactgccaagtcttcacggaatcagagaatgtgggaagaaccctagatctttcagttctcagatcatatgaagagctgcacggcaagctagccaacatgtttggcgtagaaagttcagatatgctgagcaatgtgttctaccacgatgctgctgcttctgttaagcacacaggagatgagcccttcagtgagtttttgaagacagcaaggaggctgaccgttcttacagattcaggcagtgacaacatgggaagatagagattgcctattttcgctaattgtacagtttcaaacccttggttttgattttcatttcatttcatttctttttgg

SEQ ID NO: 217681 - DNA, 405 bp, Gossypium hirsutum
cccacgcgtccgcccacgcgtccgctttgcatcaaggctatttttcgaagtttacagttggtgcgttgttctatgtattttacagcatgccaaaagacgaagcccaattatatgctgcaaatgaactttataatagaggctggttttaccacaaggagttccgattctggttcatgagggtccccaatgtggagccactagttaagacaaacacatacgagagaggttcataccactattttgatcccaactcatttgaaataatccgcaaggataattttgtcgtccattatgagttgttggaaaagagaccgtcgctacctcaacattaatatttttccccctcatttacactgtaaagcacaagcatgtaactcattcctttataacatcagtttgcagcgt

SEQ ID NO: 217682 - DNA, 358 bp, Gossypium hirsutum
cccactttcactgctgaaggatttgaacttattgcggcgactaatcacctcggtcacttccggtctatcgcggttgttgctcgatgataagaaacaatccgattatccatcgaaacgcctcatcaacgtcggtgtccataacaggaaacacaaatacatgggccggtaatgtacctcctaaagcaaaccttgtggatctaagaagacttacatgttgactaaatggactgaacagctcttccatgatagatagaagagattgggatggtgcctaagcgtacaaagactgcatactctgccatatgctcactatgcaagatattcataggcgcttacatgaagtaactggcattacatt

SEQ ID NO: 217683 - DNA, 186 bp, Gossypium hirsutum
  unsure (1)..(186): unsure at all n locations
cggagcataagtatgagtcattttcagcaaatgtctgacgatcccatgaagcaagtttcccaggggttctagaagtcactgcaggatgtaaaacacaacanccgttataaaaatccagatgctgatagacaagttcgagatatctcgagtcgagaacacatcgctcaattcttgctctgagcacgc

SEQ ID NO: 217684 - DNA, 405 bp, Gossypium hirsutum
agtatttattctatcattaaagacaatgatttacacactaagaagaccgccaaagcattttgaggactttgttactggtcattttcgcaaccgtgcacaagacatccttgtggcatgtcaagcatataaagagggtgctatagtaggctctgttgcggttaaagaaggtgttccagatgctaacaaaattgtaaagggtagctctgaggaatttaaaggaacgattccaaagatgatcaatgcggtggctaaagaatttgtgaaaaacgggtcaacgaactgtgagcagtttcagagttgcagaagctgattacggttaagaagagttggttagatctaaagtgtaggatgggatgtgttaagccattatagaagctaatgtagtgccgtttagtatgaatgatt

SEQ ID NO: 217685 - DNA, 354 bp, Gossypium hirsutum
ctggactcaaagccgatgctcgtgtcctcatcaacagggctcggatcgaatgtcaaagccagaggctgactgttgaagatccggttaccgttgagtatattactcgttacattgcgggtcttcagcagaagtatactcaaagtggaggtgttagaccatttggtctctcaactctgatcgttggctttgatccatatagcggtgtaccggcactatatcaaactgatccatcagggacattttcagcttggaaagctaatgcaactgggagaaactcgaactcgatacgagagtttctagagaagaactataaggaaacttctgggcaagaaaccattaagcttgcaattcgtg

SEQ ID NO: 217686 - DNA, 395 bp, Gossypium hirsutum
cccacgcgtccgcccacgcgtccgcccacgtttccgcattaatggtgttccaacagtttggggggatcaatggaggaagcttgtatgcaagtcaaacttttgcattagctgggctttcctcagcaaaagctggaaccgttgcatatgcttgtgttcaggtccctataacttttttgggagcaatgctaatggacaaatcaggaagaagaccactcataatggtttcttccgctggcacatttcttggctgttttctagctggtacttcattttatttcaaggaacatgatcttttgcccgaatggagaccaatattagctgttgctggtgtcctgatttatgttggttctttctcaattggattgggagcagctccttgggtgataatgtctgag

SEQ ID NO: 217687 - DNA, 411 bp, Gossypium hirsutum
aaaattcataacattgaacaacaatatggtacaatcaaagaaattcagaggtgtcaggcaacgacagtggggcacttgggtctcagagatccgccaccctttgctgaaaagaagggtttggcttgggacattcgaaacagccgaagaggcagctcgagcttatgacgaggcagccattttgatgagcggacgtagcgccaaaacaaacttcccagtgcccaaaaaccaaacaggagatgagaataccacgacttgcaatgccctttcttcaatcctcagtgaaaagcttcgcaaatgttgcaaaatcccatctcctccttcccttacctgtttaaggcttgacactgagaattctcacatcggggtgtggcaaaggagagcagggagccgatcagattcatgctgggtaat

SEQ ID NO: 217688 - DNA, 400 bp, Gossypium hirsutum
gttacaccacctgcagaagtaccagctataagtgttcttaaatctgcaattgctgggggtggttcatgtggattatcttcagctctaatgtatccaatcgatactgtgaagactcagttgcaagcgtcaaccaccctgacattcctggaacttatgtcaaacattccgcaaatcggattacgggggctttataagggttccatccctgcaattcttggacagttttcaagcaatggattgcggacaggaatatctgaagtaagcaagcttgtattgatcaatgttgctccgaacctccctgacatccaggttaaatccatggcatcattcctcggtacagttctaggaacaatggcgcgtttacctagtgaggtactgaagcagcgtttgcaggctaatc

SEQ ID NO: 217689 - DNA, 387 bp, Gossypium hirsutum
cgaagaaatcaaagcagaaactgcttccttcctcttgaattttagccttatctttatcttggtccccagccaacgctttacttcgcaagttttcagacaagaaaagcaacaatttcaatggctcctgaacttgttgtaaggcgtagtagcattaggcaaagggttgaggaaagtcaaatccccattggtggtctggggagcataggctgattcttgagaaccagggttgtatatcaacccgtttacccgccggtgaatcagacccagttcgccatggcttattacggcattaactattccaagctccgtctttgggagttcgtcgagtacagtaaaatgctatacctggacggcgacatacaattatatgacaacatcgatcactta

SEQ ID NO: 217690 - DNA, 371 bp, Gossypium hirsutum
  unsure (1)..(371): unsure at all n locations
cccacgcgtccgaatacataaccagaaattctcagagctatccggaaacgacatatttaagggtgatgttcctcggggttctgctgaaaaaccactcagtgtagcgaaactgcgagagatgagcggtagcaacatctttgctgaagggaaggtagagtctcgagtcagtagcggacgcaaaccccctggcggggaaagcaccattgctttggtttaacttcataggtctaacactgtttccgattaccgtgtttttctgttatcttcagtgggggtgtgtgattatgggttctgggaattatgttttaggtttaacatgtcaacttgacctaagagcgtatatgctaattacttgtttcattttnnaaaaa

SEQ ID NO: 217691 - DNA, 233 bp, Gossypium hirsutum
cccacgcgtccgcccacgcgtccgcccacgcgtccgtgccttttaagtaattggtcgtgctgcacttggcttgcagttttatcttcttcttttttccttttttagaatcctatgaatttgtgtgtttattgttaaagactagaagcctttgatggtgtgggcgggaagcttaacgcctattcagttcatgtatcaacttatattaaatttatggcaataataagttactttgc

SEQ ID NO: 217692 - DNA, 204 bp, Gossypium hirsutum
cccacgcgtccgcatattataagctcctgttattcttccgtgaaggagtgaagtacggagctggaattggacccggtgtctgtgacatccactctcccagaataccatcaaccgaacagattgctgacataattaacaagatgcttaccttgctctagaccaacatctggttgtttaaccttgactgtaggcctaaaactatca

SEQ ID NO: 217693 - DNA, 361 bp, Gossypium hirsutum
  unsure (1)..(361): unsure at all n locations
cccacgcgtccggttctttgggtgattgcatggatttttctgttcatctatttttttgccgacatgtttaaccactttgatgaggtcaagaagatatttccgttggggttctacagcttgctcactgtacctccggtgctggggttgatgaatgtggtatggttttggaagatcgtgaagggattgattaaaacaatttcaaaagcaagacacagagaataataacaatccgaattaatatttgttttctgtgtaatgttaaaaattgaagaaaatccaattaatatttgtctnanaaaaaaaaaaaaataaaaaaaaaaaaaaaaaatattttgaaaaaaaaaaaaaaaaataaaaatgg

SEQ ID NO: 217694 - DNA, 396 bp, Gossypium hirsutum
agctgccaaagcaagtggagagctctgcttaaaatatatatttgcatttggagcatttaatcgggcacttttaaacagtgcatctgagtggaaagtgccaaccacttttatatatggggctgaagattggatgaactaccaaggagcccaagaagctcgcgagcaaatgaaggtcccatgtgaaattatcagggttcctcaggccgggcattttgtgtttcttgaaaatagagatggattccattcagctgtgttgtatgcctgtaggagatttctttcacctaaccctgataaagaaccctttcctgaagatttagtatcagcatagaagaagcaaagtattttttaatttctttccacatgttgtatgacgcattacaccgagtttcattggtc

SEQ ID NO: 217695 - DNA, 403 bp, Gossypium hirsutum
gtttcgacattgatgcaaatggtatcttgaacgtgtctgctgaagataagactgcaggtgggaagaacaagatgacaattacgaatgataagggaagattgagcaaggaagagattgaaagaatggtacaagaagcagagaggtataaagcagaggatgaggaagtgaagaagaaggtggaagctaagaatgggcttgagaattatgcttacaatatgaggaacactgtgaaagatgacaagtttgctgggaaactcgaccctgcagagaagcagaagattgagaaagcgattgacgatacaattgaatggcttgatgggaaccagctggctgaagttgatgaatttgaggacaagttgaaggaattggaaggtatttgcaatcccatcattgcaaagatgta

SEQ ID NO: 217696 - DNA, 324 bp, Gossypium hirsutum
cagagttcgtgacgggaacctccatatttatgaagatggatttgcaagggattgctgaaggagtgggtgcgtgcttaggcgcagtgacttgtgctgcggcttttgcttggttatcgagtgctcggaacaaagtgggtcggatcttcaccgtcggttgcaactcgtttattgattcggtgatagaccaaatcgtggatggattgttctatgaaactgatggtactagtgactggtctgatgatatttgaaagtagggaatggtaaattatatattgatgtttatatatagataggatggtctccctttgagagaaatgataataa

SEQ ID NO: 217697 - DNA, 410 bp, Gossypium hirsutum
aaatatcaggagctgtcttctgcacttgagaagatgttcagctgttttaccataggtcagtgtggatctcatggaacctcgggcagggagctgttgagcgaaagcaagctcaaggatctacttcatggatcagaatatgttcttacttacgaggataaagatggtgactggatgcttgtgggtgatgttccatgggagatgttcactgacacctgcaaaaggttgaggatcatgaaaagctctgatgccattggactcgctccgagggccatggaaaaatgcaggaaccggaactagctaccatcatacatgatcttttcccacacaccgaagattattatttctgaaagagatgacatgatgctggagtgggtaggagatcatcatgtaagcctgtttttgttctactg

SEQ ID NO: 217698 - DNA, 395 bp, Gossypium hirsutum
gaaaatctttccagtttcaattttctcacatcaaaactgaaaatgtcttgctgttcatgaaaatgtggctgcggcgcttattgcaagtgtggcaatggctgtaacggatgcagtatgttccctgacataatagagaagactacaactgagactattgttcttggtgtggcaactcagaaaatgcactatgagggatctgagatgggagttgaggtttagggcggatgcccgtgtggagacaactgcaaatgcaacccttgcacttgctggaagtgaacaacaaatagaagcagagtggcctttgtcattttaactaaagtaattctattacttgagtatgtatcagcaaatcttcatgaggatttggttcttaattatgtgtaatgtggcttttc

SEQ ID NO: 217699 - DNA, 407 bp, Gossypium hirsutum
cccacgcgtccgctgacgagaacttcatcaagaagcacactggtcccggtattctctcaatggctaacgctggaccgggaactaacggatctcagttcttcatttgcacggctaagactgagtggctcgacggaaagcacgttgtgtttggacaagttgttgaaggcatggatgtggtgaaagccattgagaaagttgggtctagcagtggaagaacttccaagcccgttgttgtcgctgactgcggacagctctcttagagaagaaaaagagaactatgtgttaagctgggatgttgtctaatgtctagaaatattaatgtctgtcatttagactcttttatgggtgctgttttatcgtcactgggtttggtggttttcaagaacttgctttatgtaagttttatg

SEQ ID NO: 217700 - DNA, 250 bp, Gossypium hirsutum
cggacgcgtggggccagaaaccctcgttattaatcggcggaagcagatagcctctagccatgactttcaagcgtaggaatggtggccgcaacaagcatggccgtggccatgtcaaattcatccgctgttctaactgtggcaaatgctgccccaaggataagtcaattaagaggtttcttgtgaggaacattgtggaacaagctgctgttagagatgtccaagaagcctgcgtttatgacacttatacttt

SEQ ID NO: 217701 - DNA, 412 bp, Gossypium hirsutum
atccgatccgactagcgccaattcggacacaaagggcttggctatgatcatggtgggagtcggaatggctaatgccacggccacatcgaccctcttatcatcccaattacttactaccaaaaatgacacaatcatgaggaaagtattgaaagaatgctctgacaagtatgctcacgctgccgatgctcttcaagattccgttcaagatttcgactcggagttatatgattatgtctacatgcatataatggcagctgcggactatccaaatgcttgccataacgcgtttagaaggtacccgagattggtttatccgcaacaaattgcacgtagagaagatggtttgaagcatatttgtgatgtgatattaggcatttgtgatcatcttgcttcttaaacttttgggtttctc

SEQ ID NO: 217702 - DNA, 412 bp, Gossypium hirsutum
aagcgcatgtgcgaaaaatcaatgatcaaaaagcgttacatgtatctaacggaagagattttgaaagagaaccccaatgtatgtgaatacatggcaccatcactagatgcaagacaagatatggtggtagttgaggtaccaaagctaggtaaagaagccgccacaaaggctattaaggaatggggtcagcccaaatccaagatcacccacctcgtgttttgcaccaccagtggtgtcgacatgcccggtgccgattaccagctcactaagcttttgggccttcgcccgtcggttaagcgtctcatgatgtatcaacaaggttgtttcgctgggggtactgtgctccgtgtggccaaggacttggctgagaacaacaagggcgctcgcgtgcttgttgtttgctcggaaatca

SEQ ID NO: 217703 - DNA, 313 bp, Gossypium hirsutum
  unsure (1)..(313): unsure at all n locations
gcttcaaactccatagatgatccgttcaatgtagctgccaacttcacctctcaggtgatcatgataaaccaccctggccaaattggaaatggttatgccccagtcctcgactgccacacctctcacattgctgtcaaattttccgaactgttgaccaagattgacagacgatctggcaaggaactcgagaaggaacccaagttcttgaagaacggtgatgcangtatggtaaagatgattcccaccaaacccatggttgttgagactttctctgaatacccaccactttggacgtttttgctgtcccgtgaca

SEQ ID NO: 217704 - DNA, 219 bp, Gossypium hirsutum
cccacgcgtccggctgtttgggatattttctggagggaggatgtacccaagttaatggagtgcttacagaagcatgacatagaattctatcacatcagtaatcttcccgtgaattttgttattcatcctattcatgtgctgactctccatcttaccgaaagacataaaatgcagctgaaggaggagttcaatgttgaaccttggacgttcgagcaacat

SEQ ID NO: 217705 - DNA, 163 bp, Gossypium hirsutum
  unsure (1)..(163): unsure at all n locations
cccacgcgtccgcccacgcgtccgcccacgcgtncgatgaagtgtttttattttgagaaaatcaatagaacaataatgctaaagttggaggccccannaaaaaaaaaaagaagaaaaagaaggacaaaaaaaaaaaaaaaaaaaaacaaacaaggaaagggcg

SEQ ID NO: 217706 - DNA, 405 bp, Gossypium hirsutum
caaccgatttagagccccacgtaacattgcagctaaagaggtttgcaagagggaatatgcaactgaacaagagtggaagaactgggattggagatcagagggtgatttgatgttgaacggtgccattttcacacaatcaggagacccgagggccgccaagaaattcggaggcgacaagatgatagcatataagccggctcacatggtgccactcctggtgaggtggtcaggaacactcgagtgccgccaaaacaagccttgttagaccactcgcaattaactctcatcatgtaactgcttttcaacttcaagaaatgagcgagatgcttggggatattgaggaaatgtttctttctttattgtattcattctccttgcaaggagtcttaatcatttaatattgat

SEQ ID NO: 217707 - DNA, 256 bp, Gossypium hirsutum
ggaaaccccaacacatcattttcttggtggataacacccccattagagtcttcaaaaatgctgaatccattggtgtaccattccccaagagccaacccatgaggatttactctagtttatggaatgctgatgattgggccacaaggggtggattagtgaaaactgattgggcaaaagcacctttcacagcttattacaggaacttcaatgccaatgcttgtgtctggtcaggaacaagttcatcatgtggctaaac

SEQ ID NO: 217708 - DNA, 379 bp, Gossypium hirsutum
gttgtctggctcgaggccatcaactagatctatggatttctttttcatatatcaaaatttgagagatgatgatgatttaatcattaatcataggttaatgacgtcggaccaggcttcattccccccaattatttgcttccaattttgattatgttctcttggtcttttgttggtaaaacaagaagtggtgggtggtggatgataaggatgctggagctatgtaatctccaccatttatgttttgtttttatgcttgcttttatctctgcttaactttggtacttactaatactatacatgctgttactggtttagatctgtagtatcctttgcaagtttcaaggttaaatacatggaattcactccctggattggaagt

SEQ ID NO: 217709 - DNA, 375 bp, Gossypium hirsutum
gagaaacccactcttggcggtacgcggattaagacccgcaaacggaatattgctgcacccctggacccttcagcatttgctgatgcagtagtccagatctatttggataatgctggtgacctggaacttgttgccaggagcattgaatcttcagatcttaacttctcaagatacggtgacaccttctttgaggttgtttttgctggaggccgcacacaacctggcacacttaaacctgatgaaggggagtgccacccttactctatcatagagtgtgaggctaaacgtgatgccattttactatctgtgatttacattcagaaaatcttgcgccgaagaccttttctgattaagaaatcttgaaatgttatgcga

SEQ ID NO: 217710 - DNA, 307 bp, Gossypium hirsutum
cccacgcgtccgcccacgcgtccggtatggatctaaggtggcaactacttatatatgtagggtctttgctgcagctctctctggttcttccaagaatttattggacttaactgttcctaacacgctaccatgggcacaagttttttctgatgtccaaaatactgtgaatgtaaagattagaaatatattttcttgcggaaaatttacagttgtaagagaactggatgctgttgatgcatgcgtcaaggaattgtcaactttgctccaagatggggtgggaacaagtgaaagggagtcattcaagaat

SEQ ID NO: 217711 - DNA, 347 bp, Gossypium hirsutum
cccacgcgtccgtatggcttgcgcaaataatgacagagcagcagttattgagatgtcacagagacttggattcttgacaggaaaggaatcagaggtaatgttggaggctcacgttcaagctggttttgttgtgggattgccattctcaaagtctggtggctatgatttccgctcaactaatattactcaaagcatttcaaacctcggggcaacaatgctgaggcaccgccttacaccacccccagacgaggcctacagtcttcatcggaaattgtcaggtgctttcttggcttgcattaagctaagggcttgtgtaccatgcagggaatttgtgcttgatgtctatg

SEQ ID NO: 217712 - DNA, 214 bp, Gossypium hirsutum
cccacgcgtccggcaggatgggaagaccattaaacttcaaatttgggacactgctggacaagaaagatttaggacaatcactagcagctactaccgtggggcccatggcataataattgtttatgatgtgacagaccaagaaagcttcaataacgttaggcaatggcttagtgaaattgatcgctatgctagtgataatgttaacaaaatactg

SEQ ID NO: 217713 - DNA, 393 bp, Gossypium hirsutum
  unsure (1)..(393): unsure at all n locations
cccacgcgtccgctcaggtgagaatccgtattaggaaactctgcaaggcattggaagaggatgcgtttaggccagtcttgcaccactatgatggccccaagtttcgtctcgagctctcagttcctgagacgttggatctattagacctttgtgaacaagcaggttctccataaggcaaaagttatctgagtgcaaatgtgctagggttaagggcttaaggctgcctgcttttcgcagattttccatagagcgcaagctgtgggttaaagaccagttggtgaatcaactcangaaaagtgggaaatggcgttagccagctgaataaaattgcgtttgtgtcttgtgaaagatacttttttaaacttttgcattatatttntatgtattaaaaat

SEQ ID NO: 217714 - DNA, 411 bp, Gossypium hirsutum
gactatgtgttgggttattggccttccttcttattctcctacttggcggacagtgcttcgatgatcgagtggggaggtgaggttgtgaattcaaaaccagatggacatcacacttccactcaaatgggcagtggccgtttccccgaagaaggttttggcaaatctagttatttcaggaacatacaggttgttgatgactacaataatctcaaggctcccaaagggcttggcacctttacagaacaatcaaactgctatgatgtacaaacagggagcaacggggattggggccattacttttattatgggggccctggtaaaaaccccaattgtccttaagagcaagaaggaaaagcacctttttctttttggcgttgagttttctacctttgttcccgagtatcattcaaa

SEQ ID NO: 217715 - DNA, 383 bp, Gossypium hirsutum
ctggagttttataggaaacttgtcgttgcttctgcttggagaaaacaaatgcccaaactcggcgtttcgcttggcctcggcgatcagatgcctgacatgattgaagaattgatcagcaagggacagcagcttgatgcagttcattttacttatgaagttggccttggacaagttcccccctgtgcccctgctgaaatctttcttgagggatgcaaagaaggctgcatcttctattttagatgatcccaataatactggccgggctgcgcaacttgctgcacgcaaagagcaatcagcacttcgggctgtcatcaagtgcattgaagagtacaaactcgaggctgagtttccacctgaaaacctcaagaaacgccttgagcagc

SEQ ID NO: 217716 - DNA, 390 bp, Gossypium hirsutum
  unsure (1)..(390): unsure at all n locations
tttcattgcaacttctcccaaattgtaattgatgattttattaatgtttcctgtattaaacactggaaaactataggaaagattattaccaagaaggtagtcatgtttacgaggaattgaatgttcttgaggctttccggaaagcattgacaacatggtctagatggattgatgccaacgtaaatccgatgaagactatggtgttcttccgtggctattccgcttctcatttcagtggagggcagtggaattcaggaggggcatgtgataacgaaaccaatccgatcaagaacgagaaatatctaacgccatatccgtcaaagatgttggtgttagaatncgtgctaaaggggatgaaaacgcatgttacctacctaaacgttactcgac

SEQ ID NO: 217717 - DNA, 280 bp, Gossypium hirsutum
cccacgcgtccgcccacgcgtccggtcgataccatcgaaatggaacccaagcaaagaggtggagttcccaggtcaagtgctgaggtatgaggacaacttcgacaccaccagcaatttgagcgtcatgatcactcccaccgacaagaagtccatcaccgactacggttcccctgaggagttcctctcttcggtggattatcttcttggaaaacaagcttactttggtaaaaccgattctgagggtggttttaactccggtgcggtggcgaccgcaaactta

SEQ ID NO: 217718 - DNA, 229 bp, Gossypium hirsutum
cccacgcgtacgcccacgcgtccgcttggtcccaaaggatcagaaccacataaggcagctggtatctgtgacaccagtggggaccctctaaaggatacatccggaccatcactgaacatgctcatcaagctaatggctggtgaatcacttgtctttgcacccttcttctctacacacggtggactgcttttcaagatattttaatgaaaagaacacaaatacggttaca

SEQ ID NO: 217719 - DNA, 414 bp, Gossypium hirsutum
cccacgcgtccgggcttttgcgagagctttaagtccacattctcacctttcatgggttctaccatcacgggcatctcaatgggtcttggaccagatggtgaactccggtatccctcacaccacaagcctgccaagagtggcacgattactggagtcggggagttccaatgttatgacacaaacatgcttaaccttcttaagcaatatgctgaagcaaatggaaacccattatggggtctaggtggtccacatgatgcccctacttatgatcaggcaccgaactcaaatagtttcttcaaggatcacggtgggtcgtgggaaagtccttatggtgacttcttcctttcctggtactcaagcgagcttgtatctcacggcaatcgtctcctctctcttgtctcgtccatttttggg

SEQ ID NO: 217720 - DNA, 344 bp, Gossypium hirsutum
ctttttacttgctttctttccgtttcgaagatggatattaagaaacgattactccttccatttgtatgctattttctttcagtttcccagtttttccacgtctgccatggtgatgttgggactgctgcccagtacagccctccatatttacctacggcgtgctttggggaagatcaaacccagttcccatcaagcaatctgttcgcagcagcaggagatgggatatgggacaatggagcatcatgcggaaggcaatacctggtgagatgcataagtgcttcccagccagggacttgtgtccccgaccaaactatccaggtcaagatcgttgattatgctcctac

SEQ ID NO: 217721 - DNA, 411 bp, Gossypium hirsutum
gtacctgaaaatctagatagtgtagccgagtttgaggctccagcgtctccaacttccagttacagtcaggcatttccaacggaggaagatttcgcaaaggagcctgctgtagttccatcccagctacatttaactgtcctcggtacagatgaccaagatggagcatcatcctcgaagcctcaacatgttgtacttaaccatcttttcatagagaagggatgggcatcacagtctgttgttgccctcggatacacccataggtttgagtccaaatatgtgactgttgtactctataagccactcaaaaggtaacatgtgcttttcccatgcttgactctgtaaagaaatcaaagtgactttcatattcgtttgtgaaggtacacctctgttttatagatgatgcttcgacac

SEQ ID NO: 217722 - DNA, 417 bp, Gossypium hirsutum
ctttcctctctccttcttgtactatcaccactccctttgtttctgtcggaggtgaaaccgagaagaacccatctccggcaggtgcattggcatcggtctcccctcgttgtcctctaaaaagaatggacgctgctgagttgaagagagtgttccaattgttcgacaagaacggagatgggtccatctccaagaaagagttgaacgattcgttggagaatatgggtatctgcatccctgatcctgaattaacccaaatgatcgaaaagattgatgtcaacggcgataagtgcatcgatatcgacgagttcagtgagctgtaccgatccattatggataataaggatgaagaagaagatatgaaggaagctttcaatgttttcgatcaaaacggtgacggatacatttccgtggaggagt

SEQ ID NO: 217723 - DNA, 327 bp, Gossypium hirsutum
  unsure (1)..(327): unsure at all n locations
cccacgcgtccgcccacgcgtccggcttgctgccggaactggatcatttataaaaattttagctgatttttctggatctcagaattataatagttatatgactcattctatggctaaaggttaccaggtagggaaagttttgtttcgaccgtatgaagatgttttggggataggacactccatgggttggtctagtattcttattccaggatccggggaacccaactttgattcttgggtggcaaacccattcgaaacatctaaacagaggcgagagaaggaagtgcactctctgctcgacaagcttncacccgaaacaataatgtt

SEQ ID NO: 217724 - DNA, 363 bp, Gossypium hirsutum
cccacgcgtccgcaaggaaatttccaacaccatttcatttgcaccaatcggccttcttgacatgtgcaacagcagcggtgccgtggagaagttcgaagtacaaatgacatccaatgagaaactgcagttctttgatggcgaggtttcctcggagttgacaacttcactcagcaacaaccggaatccaacagcagcgatcagtctcaaagtccggggttgtgggaggtttggtgcatactcatctcagcatccgttgaagtgttgtgtggacaatgccgacactcacttcaactatgactcatccaccggattggtgacacttacattgccagtgccatcggaggagatgtacagatggcacgt

SEQ ID NO: 217725 - DNA, 191 bp, Gossypium hirsutum
ggaaagttgatctcaaaatctatttctgctacaaagatctctcctcggcactcgaaaaggtgttcatttgcttcacaatcggtcagtttggttctaaatgagattctagcggtgattgaatgactttgagcctgttcaattatctggttaacagtactgtatactttgtttccttttatgatatggacgga

SEQ ID NO: 217726 - DNA, 368 bp, Gossypium hirsutum
cccacgcgtccggttttctgcatttttttctcattaccatttttatctttctgaatgtatggataatgtgcaatctcttacagataaaccgacttcctccagaggttgtaaaatactttacagatccaaatgcagttgatccaccagatatggaactactatacccatttgtagagtcagcattgcccctggcatatggtgttttgggtgttcttttatttcatgaacttgggcattttctggctgcttttccaaagaaagtaaaactaatcatttccttttttatttcgaacatcacttttggaagctctggagctattactcaattcaaatctattcttcctggccgtagtacctaagttgacatt

SEQ ID NO: 217727 - DNA, 400 bp, Gossypium hirsutum
cggacgcgtgggcagaagtctacaggcgaatgggacacggttcgtcatatggtgttggcgtcaaactaggactagtaagagctgagtatgctgttgaccataacaacggaactggtgcagtcttcttccgatttggagaaagatattaaaatgtgattttgggtctaattctgctaaggtgggccgttacaggttccggttatggttgagctgttcttgatcttagaaaatcctgttgagaagtatggaactaggcatattcttgtgtcaaataaattttgtttcaattttgtgctatataattttatcttgatctgtaaaaccaaggatttataagggaattgttggtgttggattacatacttttttatgttctcaaagaataaaaacagaaccgaat

SEQ ID NO: 217728 - DNA, 410 bp, Gossypium hirsutum
gaaaaaattgagcttttggtggataaatcagaaaatcttcgctcccaggcacaagatttcaggcagcaggggacccagatgaggagaaagatgtggttacagaacatgaaaataaagctgatcgtgctcgggattctgatcgccttgattctcatcatcgtactgtctgtctgtcatggcttcaactgttgatgaatcactcagttgctatattctattcatttgcccactcattgatcggtgttgtagctgtcaccagtaatattgatgctcctcatagttagtagttacagttttctttaattccacgtccttttctgctgtagcctaatatcagaagactctctgcatatatactgagattcgaactatggaaattgaattttgaaatatataaaaatatcaaataa

SEQ ID NO: 217729 - DNA, 318 bp, Gossypium hirsutum
  unsure (1)..(318): unsure at all n locations
ttcgtgatgctgtgacttataccgagcacgccaggaggaagaccgttaccgccatggatgttgtttatgccttgaaaaggcagggcaggactctctatggttttggtggttaagtttaggatcattcttaagttcttaactgtaatgcctttagatcttgactctagatctatatcgttatgtacttgtttgtgtactcgagtgatgttataatgatttgtaaccttaagattgatcgaataattttcatttgcaaaanaaaaaaaaaaaaaaaataaaacatataaaaaaaaaaaaacaaaaaaaaaaaaaataaaa

SEQ ID NO: 217730 - DNA, 338 bp, Gossypium hirsutum
gcggcataagagttttaaggaaaatgcagatcttcgtgaaaaccctaactgggaagaccataaccctagaggttgaatccagcgacactatcgacaatgttaaggctaagatccaggacaaggaaggtatcccgccggaccagcagaggttgatcttcgccggaaagcagcttgaggatggtcgtacacttgccgactacaatatccagaaagaatcaacattgcatctggttctgaggcttcgtggtggcattatcgagccatctttgatggcattggctaggaaatacaaccaggacaagatgatctgccgcaagtgctatgctcgtctacaccca

SEQ ID NO: 217731 - DNA, 358 bp, Gossypium hirsutum
cccacgcgttcggattcaaatcccttttggtatcaattgaaaacaagcagccaacatggggaagacacgaggtatgggagctggacgtaagctgaggacccaccgaaggaggcaaaggtgggccgataagtcatacaaaaaatccaaccttggtaatgaatggaagaagccatttgctggttcttctcatgccaaaggcattgtccttgaaaagataggtattgaagctaagcaacctaactctgctatcagaaagtgtgctcgagttcaattgatcaagaatggaaaaaagattgccgcattcgttccaaacgacagttgtttaaattacatcgaataaaatgatgaggtgttgatt

SEQ ID NO: 217732 - DNA, 144 bp, Gossypium hirsutum
  unsure (1)..(144): unsure at all n locations
ctnccgcttacttaatgcagtgctggtcctgttgctgaagacatgtttcattggcaggccacaatcatgggtccaccagacagtccctattctgggggtgttttcctagtgactattcattttcctccggattattcctttaag

SEQ ID NO: 217733 - DNA, 388 bp, Gossypium hirsutum
  unsure (1)..(388): unsure at all n locations
cccacgcgtccgcagagggtcaatggacacctgaggatttgttagagttgctgcagagtcgtcctttccgtcaacaagtagattcatttacctatgtacttcgaaccggacagatagatttgtttcagttcggtattgatccaagtaaatataagttcaccgttttatctttccttgaggcacttgaagattctgtttccaaaacttccggagaaacacaagatgaaaaagatgtaagacctcaatcctgtaatcgtaatgaccccatggatgagagcaagtgacggagataatttcatctggtatcgntcccatcaccctcgtttatcataggagagaatggtcatccctgtttaaattaatctttctggttgagtggggtgtctgg

SEQ ID NO: 217734 - DNA, 382 bp, Gossypium hirsutum
gatgctctcaaggttttgaggcttcagaaaggacacaagtattgtttgttgggcaagctctcgtcagaggtcggatggaaccactatgacactatcaaggagcttgaaaggaagaggaaggaaagagctcaagtggcatacgagagaaggaagcaactcactaagctcagggttaaagccgagaaggtggccgaggagaagcttggcacgcagttggaagttatttctccgatcaagtattgattcatctgggtttaagtttaatgcatctttttgagtagctcggaatttttgtggtctaatcttttgaagtagatgttaatgcttacatgcatttggaggagactttttttttttccctttgaaaaacatgtccttttac

SEQ ID NO: 217735 - DNA, 358 bp, Gossypium hirsutum
  unsure (1)..(358): unsure at all n locations
cccacgcgttcgnggactctttggcggacgttttgtctagaattgtgggaagccatctcaggcgagtgtatcatgtacctcggtcatggttgaaaccaagtggcaacattcttgtattgttcgaggaaatgggtggcgatccgacacagcttgcttttgcaaccagaaagatgggaagtttgtgctcgcatgtatctgactctcacccattacccatggatatgtggggtttggattcaaaaacaagaagggcttcaaaccctacgctatccctcagttgcccatttccgaatcaagttatttctgcaatcaaatttgccagctttggaactcctcttggcacttgcggcagttttag

SEQ ID NO: 217736 - DNA, 408 bp, Gossypium hirsutum
  unsure (1)..(408): unsure at all n locations
cccacgcgtccgcacaaacagagaagagatataattgaaagaaaagaaaaatggttctgctagagaaactttgggatgatgtagtggccggtcctcaaccggaacgtggccttggccggctgaggaagatcaccaccaccccacccttgtccaccaaagatgaggcttcatcaatggcgatgccgacgagtccgacgacacctgggacaccatcgacgccggtgtcggctcgtagggacaacgtgtggaggagcgtgttcaatccaggtagcaaccttgcaaccaaaggtattggcgctgaagttttcgacaagcctcaacctaactctcctactgtttatgactggctttacagcggggagacccggagcaagcatcaccgttgattangcggtggctgacggcggc

SEQ ID NO: 217737 - DNA, 311 bp, Gossypium hirsutum
tgaagaaaatatggaagtgtcaactacaattaaagccaaaaataagaaacaagctgagcctgatattgatttcacaaaagccttggataatgaaatgcctgacatctttgctcctccccaaaatcttaagtcattgcttctaccttcaaacagagcaccttgtaatacaaagcttcctgaagattgtcactatcaacctgaagaccttgtcaaattgtttcttatgcccaacaagatagtaatgtttaccaccagtttgctactaaacattatagccggatctggaacagttacattagttttgttaaaaa

SEQ ID NO: 217738 - DNA, 250 bp, Gossypium hirsutum
cccacgcgtccggtgaggaatgtggaagatatacacaaaaatctcttacatgaactggaatccctgaaagaagatccatatggattagttgataatggaggggattatgataccctgatcgggtatcaaaatggaggtcctcgtatatttgctttacgcctgcagccaaaccatcctagccttcacagtggcggaggctccgatctcaccacctatcccttgcttgattaaaatatctatctcgcgatga

SEQ ID NO: 217739 - DNA, 259 bp, Gossypium hirsutum
acgatggcaagtgcaagtgcggaactagctgcatctgcacaaactgcacatgtggcagtcactaagcagacatatagaatgatgaagtttgggacctaaaaagaataaaagttgggttgaataatttgtgtcttttgttgtagtttgagtgtgttttcttgtctatctgtccgatgattgtctatgtctctcattttatacaatgatggaatgaccatgtcaatggcctttgtctgattaatgaactattattagtttt

SEQ ID NO: 217740 - DNA, 413 bp, Gossypium hirsutum
  unsure (1)..(413): unsure at all n locations
ccacgcgtncgcttttggctaacactgttatcaacttttttaacaacggatatttccagggacccggggacgcgccgttggaggcgggttcagcttgcacggggattttcgggtcgggttcgtacccgggttatccgggtaaactgttggtggagaagagcaccggagcgagctacaatgccaacggcattaacggccggaaatacttgttgccggcgatgtgggatccgcagacgtcgaggtgcaaggcgctagtttgacggggacaggtggcggaaatcagtggtgaaatggggatgtaatgtagatattagggtatgggtatttatggttgatcacgtgacgggtaaaatttgtttttggtactgggggagaaaaggaattgtaggttgggggtaaaagaaaagaaaata

SEQ ID NO: 217741 - DNA, 447 bp, Gossypium hirsutum
cttgtgaataaattgatttctggagaagcatattcaccataacgcgtaacagaatagtagacatgggcccttgtcgctcctcttgaagacccaggacattctcggaagacgtggaggctaccttcaaccgcagaactgcatcgaggacatatgtcatttgaaacaactctcctgattctgaggttaacaaagtttggtaaaaaatcccaagagatccgccagattgtaaatgcaatttttgatggcatctgtaggttccacagtttcttgtaaaattcttttatttcggtttgtaataaatagtaactaggatccgagttagcaatttgtaatagtttataggcactacagactgagaacccaccaaataattctcctttccaaacctgaaaattttcatgctcaatctctacaaggggaatttgaagaattttccgagcaatgtcc

SEQ ID NO: 217742 - DNA, 333 bp, Gossypium hirsutum
cccacgcgtccgcccacgcgtccgcttgttctctccaccatttgttgtcttttaaacctaccaaataaaaatggccaaaaccatttttgcattatcaatcttgcttggattcaactatcttgctacgaccgtgaatgcctacgcggcttctggctggactaaagctcatgccaccttttacggaggcagtgatgcctcgggaactatggggggagcttgtggatatgggaacttgtatgcgactggctatggaacaatgacagctgctttaagtaccgccttgttcgatgatggagctttatgtggacaatgctacaacatcaaatgcgatta

SEQ ID NO: 217743 - DNA, 424 bp, Gossypium hirsutum
gtggccctcaagcttgcatgtggtgtggtcttgtgcttggttgtgggtgcacccctggctgaaggggccataagttgtggccaagtcatatcagccttggcaccctgcattccttacgtgagaaacaacggtgctggtggcgtgcctgcatcttgctgcaatgggatcagatctctcaacgaggctgcccaatcaactccagagcgccaatcagcttgcaactgcgtcaaagctttagctgccagcatttctggcatcaactatgaccttacgaacaaactcccaggcatgtgtggggtgcacagccctttcaagatcagccccagcactaactgcaaaagtgtcaagtgaagtaggccatggaagctcgtcagcaaatgggaaaagaaataatgatatatagctacataaataaaatgggatg

SEQ ID NO: 217744 - DNA, 293 bp, Gossypium hirsutum
gaaaggcatgggaggttcttgatcatattatggctaaatatatatgccaaaaaaggaaagatttgaaccaagggatgatatcagaaactgtggatggtggtgtggatatcttaacatcatacattcttgaagagaagtcatgtgatgataaattcttgagagataccattttgaatatgatgcttgcagggagggacaccaccagctctgctcttacttggttcatttggcttgtttcgaggcatccgatagtggaaaacaagatcattgaagagctccaatcgataatacct

SEQ ID NO: 217745 - DNA, 429 bp, Gossypium hirsutum
tcttaccggaaagaccattactttggaggttgagagttcagataccattgacaatgtcaaggccaagatccaagacaaggaaggaatccccccagaccagcagaggttgatcttcgcagggaagcaacttgaagatggaaggaccttggcagactacaacatccagaaggaatcgactctgcaccttgtcctccgccttcgcggtggtttccgaatggtcttttgaagaagtgtcttttatgatggggttcaacattatgtttctagttttatgtttgtctaattaagcctgctgtgatgcagtggctaaatgctacaagttgtaatttataaacccttttttagttctctgcttatgtttaaggtttcatggctgccagcactttggtcattgaaataatttatcatataaagtttctaagctaaaaa

SEQ ID NO: 217746 - DNA, 451 bp, Gossypium hirsutum
gatccttcttccaaggaagtagatgatatgacaatgagaagatttctaagaggtcgtgatttagatgtggagaaagcatcgagcatgttcctcaagtacctgaaatggagacgaagctttgttcctaatggtttcatttctccatcagaactcacacatgaaatccaacagaacaagatgtttttgcaaggttccgacaagaaaggacgacctatttctgttcttcttgctgcaagacatttccagcataatggcggcctcgacgaattcaagcgttttatagtctacattttcgacaaaatactgaccaggatgcttccaggacaagataaatttattgtgatcggagatcttgaaggttggggatatgcaaattgcgacatccgggcatacctttctgctctctctctcctgcaggattactacccagaaagattaggaaagatgttcg

SEQ ID NO: 217747 - DNA, 322 bp, Gossypium hirsutum
caaaacagaacttccaaagctttcagacaagactagtgattcgtgttcaaagaaccaaacaagccaagtacatggttgatttggacgttcagatccctacaactttcgatccattcgccgaggctggggaatttgatggcactggaaccaaggagtatgttcatatacggattcaacaaaggaacgggaagaaaagcttgacgacggttcaaggcctgaggcatgacctgagctacgagaaaatcctcaagagtctcaagaaggacttttgttgcaacggcaacgttgttaaagacaaagagctcggcaagatcattcaact

SEQ ID NO: 217748 - DNA, 417 bp, Gossypium hirsutum
cggacgcgtgggcatgggttgaagaaagctgctgttactaatgctccaagacctaatgctgaactcatgatctcaaaacttgggctcaaggatttctttgatgttgttattgttggaagcgagtgtgagcatgccaaaccatacccagacccttacttgaaggcacttgaactactcaaggtgtcaaaggatcacacatttatatgtgaggactctgcatcagggataagagcaggagttgcagctggaatgcctgttgtggggttgacaaccagaaatcctgaaaatgtacttatggaagccaatcctactatgcttgtaaaggattatgaggatccgaagttatggtcggccttagaggagcttgataagaaaggagattctttgaaaacagcaacttgagcgtgaattccaaag

SEQ ID NO: 217749 - DNA, 408 bp, Gossypium hirsutum
agaactgttatttatatttaacatcattgtttcaggtcaagtgtgtagaagttttcaaagggttctgtgaaacaaaaacaaaacacagaaagcttacatggatatactcacagcggtatcgttttgtatttttgcattctcataatttaactgtatattgtttttctggatatcattttgatgattacttttgtgtggcaatagctcttttatgttttgactggtggcaaatggaataggaaaaaccaactacactagattgcggtccaagaacaatttgcaggaggcacataatgactagctcctacctctacgaacgcttgtgggaggcattgcagcagcgaataaagatgataacatgcaattgacaccgtatgtgctatgaatccgaaatcaagtgtgactttt

SEQ ID NO: 217750 - DNA, 411 bp, Gossypium hirsutum
  unsure (1)..(411): unsure at all n locations
ggaccgttaaagaggaacattattccaaaggtaccacataaggagaattcggacgacgatggggctggaatgaaggagttcaatgatgcaaactattggaaggttgatcaagaggtcgctgttttagagtaatggtggttgagtcgaaagtaagatcgacatcacagttttgttcgctctgagggctgaagcagcaaaactcacatgtacattataatttttttttctttccactgttatttactgttttatgttcctttaattgttagcgttaactcctctttattgttgttttaatgttttcattatttgaaggtatttggttcttctcgttgccctgatttaaggtaagggcttctcaatattatgttagtctttatggaattttaatgcaatcatatntggttgtaa

SEQ ID NO: 217751 - DNA, 453 bp, Gossypium hirsutum
agaaaacctacgaattacccgacggtcagatgattaccattggtgccgaacgttttagatgccctgaagtgcttttccaaccatctttgatcggtatggaagctgcaggcattcacgagacaacatacaactccataatgaagtgcgacgtggatattaggaaagacttgtacggtaacatcgtcctcagtggtggtacaaccatgtttcccggtatctccgataggatgaccaaggagatctcctcattagcacccagcagcatgaagatcaaggttgttgcaccacctgagaggaagtacagtgtctggatcggtggctcgatcttggcttccctaagcaccttccaacaaatgtggattgccaaggcggagtacgacgaatccggtccgtcaatcgttcaccgcagatgtttctaaacagttcaatgggagaaaatgatcagaaagagaa

SEQ ID NO: 217752 - DNA, 448 bp, Gossypium hirsutum
cccacgcgtccggcgcagtacaacggagagttgtatgctgcgttcgggaaggatgaatcgctcccgaaaaggaatctattgattctctcccaattggttggaccgtaggtgcgatgatttacttcacgggcgaggtctctggttcaagtccaggatggcccagctgcgccaaggaaaagaatagaagaagcatctgactccttcatgcatgctccacttggctcgggggatatagctcagttggtagagctccgctcttgcaattgggtcgttgcgattacgggttgggtgtctaattgtccaggcggtaatgatagtatcttgtacctgcaatcatcaaagctaggaaactctcaagtgcactatctgctgctagtgctgcatgtgatcacatacgtgattgggtccttggaactccagagggcacatgggtttccatgggggtgta

SEQ ID NO: 217753 - DNA, 441 bp, Gossypium hirsutum
cccacgcgtccgatcgttatagacggcaaggtatatgatgttacttcttatttggatgagcatccaggaggtgatgatgtagtcctcgagtcgacagggaaagatgcaaccgatgattttgaagatgctggacacagcaaaagtgcaaaggagctcctgcaaagcttttgcattggtgaacttgacacatcctcccctatcatcccagaacttgaaatttcctctaagagggaagccgttaagtactctgagaagctcatggacttgacaaagcaatattggaccatccccgtggcaattgttggcatctctgtgttggttggtttcttatacctgcataagaagtaaaccagtataatgttttcccctattggctgctgaatggaaattgctaccccaatttttgaataattaaattgataatgattaagaacagttacc

SEQ ID NO: 217754 - DNA, 198 bp, Gossypium hirsutum
cccacgcgtccgacgatttcaaactattaatcaatcgaataatatgagaaatacgttgaatatttggcggaaaacatgaaagaaaaaggaattaaaataaaaaaggaaatgaaatcatagcaaaaagatgtggtattgggtcatttgtcctatatgcgcaaatcaaaatcgggcggatctttactcggagtagagcat

SEQ ID NO: 217755 - DNA, 452 bp, Gossypium hirsutum
cccacgcgtccgcccacgcgtccggaaaaaatataagaagccttggagtttgctcaagaggagctagcacctaggggagaagaaaatcaaagctttttagaagagttggagaggaccgtttcactcttggttttcaaagacgtttcgaactgtcccgtaagagagcttttggatatttcacagcgccttaagacagcaaacgaggtcaatgcagccattcttactagccagagtcatgaaaaagacccaaagcttcatagcttgctaaagatgctgatatgggcacaaaatcaactagacgaaaaagctacttatcctcggataaaagattttttgaaagccacacttgaaaatcccgctgtttgaaaggttagcaaaatcattataacctcttcattgtgattatagctccaaatttattggatgtcattgattaagacatggtttctttt

SEQ ID NO: 217756 - DNA, 450 bp, Gossypium hirsutum
cccacgcgtccgctgatatagcagagtgctgtgtgtttggcttaccggataaggattatggagaagctgtatctgcaatagtagtgctggattcggaacaaaaaaggaaacaagaagagtcaaactctgctttcagtttggaagagctttgcaactgggctaaagacaaacttgctccatacaagcttccaacgagattaatgttgtgggattctcttcctcgtaacgcgatgggaaaggtgaacaagaaagagctgaagagacagttgggcagtgaaaagtaagcaatctttattctgagctacatgatagaacacaataattagggattgaatatcagacttgaaattttagaactgagaagcttatgtcatgctcagaaatatcaaataagagaattttttacaattttttttggggagtgaaatgaaccgtttttcttctggtacg

SEQ ID NO: 217757 - DNA, 440 bp, Gossypium hirsutum
cccacgcgtccgtgaaaacattcctaacctctttaagaaaataaagggtggcatatatactcttccaagccatttatctcctggtgctagagatttaatcccacggatgcttgtagttgatccaatgaagagaatgaccattcctgagattcgccagcacccatggtttcaagcgcatcttccaagatatttagctgtccccccaccagattcaatgcaacaagcgaaaaagattgatgaggagatccttcaggaagtgattaggatgggattcgaccggaaccatttggtcgaatctcttcggaacagaattcaaaatgagggaactgttgcttactacttactattggacaatctgttccgggtctccagtggctatcttggagctgagtttcaagaaactatgtctcgtgcccaccctcgtgaaatcatgacagaag

SEQ ID NO: 217758 - DNA, 405 bp, Gossypium hirsutum
gctgcaagagctctcaaatcggttttacaaggaattttgctttcttctgaaggagagaaactgaattccatgaacctcctcctttacatggctccaatagccgttgtatttctacttcctgcaacgctctttatggaagaaaacgtggttggtattaccctcgcccttgctcgagatgacgtcaagatcatttggtatctcttattcaattcagcactagcatattttgtgaacctgaccaactttttggtcacgaaacacaccagcgccctcactttgcaggttctaggaaacgcaaaaggagccgtagctgtggtggtttcaattttaatttttagaaacccggtgtctgttaccggtatgcttggttatacactcacagtctttggagttatactttacagt

SEQ ID NO: 217759 - DNA, 422 bp, Gossypium hirsutum
tggagaactggtactatgacatagtgctggttatgaaggaaaccaatgggtgcatagaggttttaatgttagaacgtgtggatggcttcaattctgttttcagggttcaagcaaaagggggatctaatgttgcagccgaaatctcttgggtggatcagctaaggttttcgcatcaaattccatttttcgagctaaccgaagagagaaatggcagcctaagaggttgctgggaacttgatcctgcagcattgccggtacattatttttcttaatttaagaagtaccaactagtaaagactagaattctaatgtttgtcttcatggaaccaactctgggtgaaagtctcaattacttagctgcaactgaaatgcttttcttcatgtttctgattcatattttcgatgtaaaatataagttgttt

SEQ ID NO: 217760 - DNA, 427 bp, Gossypium hirsutum
gcatggaggaactcctgccaattttctggatgtatgtggaaatgcttctgaaggccaggtggttgaggcatttaagattttgacttctgatgataaagtgaaagccattttggtgaatatatttggaggaataatgaaatgtgatgtgatagcaagtgggatcgtcaatgctgccaaacaggtggccctaaaagttcctgtggtggtccgtcttgaaggtaccaatgttgaccaaggaaagcggattttgaaggaaagtggaatgacactaattacagcagaagatttggatgatgctgcagagaaagccgttaaggcagccaaatgagaaatttaagatacgagtccttttttcttattgtttctcatctttcacagcattgatgagtttttcctttatttttcttttcatcaagcccatagaatc

SEQ ID NO: 217761 - DNA, 380 bp, Gossypium hirsutum
  unsure (1)..(380): unsure at all n locations
agacagtgcaaggttgcttgttctgcggctacacacacgatgggtagtagctgctggtggcttcttaacacattcagtgccattatatgcaactggtgtggaggtatcaccgctttgttcgtacactggagaaaacttggagtccatatgccgtggaagaacatttcatgcaccctgtgaaattgcattttagttcaactttgtgacgtagccacacattctttttgatttgtgcagtgtgtttgggttgatgatgtaagatccattgtacggcatggatgtaattcgatggagtggatggagagtgggtgaaaaatgcaaaatgttggatttaaggatttttgcaataatgttcacccttgtgactgttaaaaaanaaa

SEQ ID NO: 217762 - DNA, 345 bp, Gossypium hirsutum
cccacgcgtccggtcgttagggcacaaaagttcggggaatccagccgccatcctttcttctctcatgaacaaaagagaaaagcttcaagacgagctcgcaatatcgaaaagcaggtttttgagttagaaactaattatttgcaagattcgagccatttcgggcatgttttgaaaggattcgaagggtttctttcttcatccaagaacacggcaaacttgaagaggtctaggaaatttcagcctgaagatagattgttttctttgtcatcagtcacgtcaccagtggctgacgaactcggagttagacaagatgatggaagatctgactttggctcagctcggtct

SEQ ID NO: 217763 - DNA, 393 bp, Gossypium hirsutum
tgtgtgtcttcccatctcgctgctagcttccctgggaaagctgttggcgtttcacttgctggcaaagctgatccagctcaatctgctgaagctaatctcctgctgcggatgacgacgatgatgacttggatctgtttggtgatgaaacggaggaggataagaaggcagcagaggaaagagaagcagctaaaaagtctgctaagaagaaagagagtggaaaatcttcagtactgatggatgttaaaccatgggatgacgagaccgacatgaagcagttggaagaagccgttcgatccgttgaaatgcctggacttttatggggagcatcaaaattggttgcggtcggatattggattaagaaactccagatcatgcttacaatagttgacgatc

SEQ ID NO: 217764 - DNA, 377 bp, Gossypium hirsutum
cgatgactaatttaagtaaataaaatttttttaaccaaaaacttgatcatcatgaattttatatataaagcataaaataatgaacaatttgaatgtttgaataatggcaggtgggatgataggatgtcagctgtaataccagatgaagaaatattctacacagtgggttttttacatttaagtggatttgatacttggaaagcttttgaagaccaaaataaagacataatgaggttttgtaataaaactggaattatgcttaagcaataccttcctcattacagtactaaagaagaatgggttcatcattttggctcaaaatggaaggtttttcaacacagaaaatatcaatttgatccaagaatgttattgtcacc

SEQ ID NO: 217765 - DNA, 414 bp, Gossypium hirsutum
  unsure (1)..(414): unsure at all n locations
ctcgcccatattctcttttactgcaaactgtgagcgagtgagtgagatggcttgctcagctactggatcggccgcggctctcatctcctttaagccaaggctttctcctccaattccaagcccttctcccaatccctttctctccccaatcccttcactggtctccctgcccctctcctttctcgtcccgcctacttttccctctcccgcacctgcccttctcgcaagtctttcgtcgtcaaagccaccagtgagcttccattggtgggaaatcctgcccctgattttgaggctgaggccgtctntgaccaggagttcattaaggtcaagctctccgaatacattgggaagaaatatgtgattctcttcttttacccgctggacttcacatttgtttgccccacagagattact

SEQ ID NO: 217766 - DNA, 346 bp, Gossypium hirsutum
  unsure (1)..(346): unsure at all n locations
acgtaaacatcttcctgccagtgctcgtgtaacatctaagcataaagcataccaatacctatttttggtgatagctatggttttactcattgttgtttcacagtggggttggtaatgctgtttagaggagagaatggacatgaccattgcagctggtgccattacctgagctgtgttcctacatcaaaatggcactgtgggaactaagcagacctttattacatatcgntccctgattcttttctggtttcctttacattttttacattttttaatttcttggtgttgttacgtgcctatgtgtatatatatacatacatacatacatacgtacatggttagtttt

SEQ ID NO: 217767 - DNA, 310 bp, Gossypium hirsutum
  unsure (1)..(310): unsure at all n locations
cccacgcgtccgaagctgcatttagttccacaaagaaacaacatatagattataagcacctccccataagcaaaccacaaaggaaagcttggagagagacccaaaacaatgtctaaggaagtgagtgaagaaggacagggtcgtaaggactatgtggaccctccaccggcacctctgattgatatggctgaactcaagtcatggtctttttacagagccctcatagctgagttcatagccactctcctcttcctctatgtcactgntgctaccgtaattggtcacaagaaacaacaagatgcatgtgatg

SEQ ID NO: 217768 - DNA, 411 bp, Gossypium hirsutum
ctctgctcgaaatcttcttcattctcattctctctccactgaactcttgctaaacggtatcgttttagtcagtctttcatcaatggcgaaagaaccgttcgcgtcctcgttactggagctgcaggacaaatcgggtatgctcttgtacccatgattgctaggggagtcatgttgggtgctgaccagcccgtgatccttcacatgcttgatatcccacctgctgcggaggctttgaatggtgtcaaaatggagttggtggatgctgcatttcctcttctaaagggtgttgttgctacaactgatgcttgtgaagcatgcactggagtcaatgttgctgtcatggttggtggtttcccaaggaaggaaggaatggagaggaaagatgttatgtcaaagaatgtgtctatttac

SEQ ID NO: 217769 - DNA, 367 bp, Gossypium hirsutum
tggatactgggcttcattcaaaaaaaaaattaaaattttaaaaaaaaaaaaaaaaaaaaaaaaaaaaaaaaaaataaaaaaaaaaaaaagataaaaaactaaattcaaaataaaaaggggcgccccttttagagattcaaacttaactaacccttccttgcaacataatactttttctttattgaaacctaaatcaaatccactgcccgttttttaaaaacttcgtacctggaaaacccctgccattcccaaaataaatcgctttgaaaaaaatccccttttcgcaagttgccgaaataccaaaaaggcccgcaccaatcgcctttccaaacatttccccatcctaaatggcaaaaggaaccccccc

SEQ ID NO: 217770 - DNA, 362 bp, Gossypium hirsutum
  unsure (1)..(362): unsure at all n locations
gttagcttccgttccttccggaggaggggttgttgcggttgccgctcctgcacctggtggcggaggcggcgatgctgcacctgcagctgaggccaagaaaaagagaaggtcgaggagaaggaagaatccgacgatgatatgggtttcagcctcttcgactaagcaagcaaagcaaatatcaaggctttttagggtccctcggatgtaagttttcaatgttttggattttgtaggtggatatggtgttaactcttctcggattttgtttgagaaagttttagttaatgacattaacattttggttattnaaaaaaaaataatttatattagtaattttttttattattgtttaaatttaataa

SEQ ID NO: 217771 - DNA, 402 bp, Gossypium hirsutum
cccacgcgtccgattttgagcagaatcaggctgaggctcttgatttagataaaacagtgcttcagacagtggaagacgttgcagaggactggagattgatgatattaagggacttcttggtcgttgcaacttcaaagctgatatgcttgacagaaaggtttcccttttgagtggtggtgagaaggcacggcttgcattttgtaaattcatggtaaaaccgtcaaccctgctagttttggatgaaccaacaaatcacctggatataccctcaaaggaaatgctagaggaggcaattagagagtacagtggcacagtcattactgtttctcatgaccgattctttataaagcaaattgtgaacagagtagtggaaagtaaagacgggcatttgcaggactatgt

SEQ ID NO: 217772 - DNA, 393 bp, Gossypium hirsutum
cccacgcgtccgcccacgcgtccgcccacgcgtccgcggacgcgtgggtcagcacctcaagggccaatcactggtcaaacaaatggtgctgctgctggaggtcatccggaaaatcagccaaacagccccctcaacatcctgctgcactggctggtgtaggtgtgtatggtgctccaactatggggcagccgataggaggcggccccctcgtctcagcagttggcacaccagtgaatcttcctgcccaggcacatatggcttatggagtgagagcttctgtaccaggagcggtagttcatggtgcaccgatgaacatgggtcctgcgacatacccaattccgcatacatctgctcataggtaacatgctgtttagctgccaaatgtacaaaaga

SEQ ID NO: 217773 - DNA, 407 bp, Gossypium hirsutum
  unsure (1)..(407): unsure at all n locations
gtcggcccacgcgtcgggcgattttatgatggacttttttttgagttattatccaaaggtccacatgatcgtcctaaacctcagcctagccgccgatattctnctgtaatatcatgtctggccaagaagaaagatctgacaaggtctcatctttgaatggtagagatgacaagtcatattgcggttatggccagatggctcatagtattgagccaaatagtactgcagatatatctcctgtcacagctaacgatgataatttagatgagattgaagatgatgatccattctcgaaacggaggaagatggatggtgggattgatatcactcctgtggtgaagccaatccgggaaccacgtgttgttgttcagactgtgagtgaagttgatatacttgatgatgggtat

SEQ ID NO: 217774 - DNA, 368 bp, Gossypium hirsutum
aaaaaaaagaaatcgttgcataaaccaaccttaggtgggattcaaaagactcgattcttcaatcgtttaattcttcatttgttcaaagatgtactcaagaggtcaaggtattcaagttctccttccccgaacaagcgatacacccggtctgtgtcgagatccttgtcgagctcaaggagtcggtcccggagtaagagtaggagtgctgaaagtgatgttgaaaatcccgggaacagtttgtatgttactggcttgtcacctcggatcaccaagagagagttggagaagcattttgcaagcgagggaaatgtgatcgatgttcaccttgtggttgatccaaggaccatggactctcgcggatttgggtt

SEQ ID NO: 217775 - DNA, 362 bp, Gossypium hirsutum
atttaaagagcaggatgaacactgttgcaccaaacttgactgctcttgtcggagaacttgttggtgctcgtctcattgctcatggtggcagcttaataaatttgccaaacagcctggtagtactgttcagattctaggtgcggagaaggctctcttcagagctctgaagacaaagcattcgactcccaaatacggactcatctaccatgcatccttggttggtcaggcagcaccaaaacacaaggggaagatttccaggtcacttgccgcaaaggctgcattggcaattcgttgtgatgctcttggagatgaccaagataactctatgggacttgagaaccgagccaagcttgaagcaagat

SEQ ID NO: 217776 - DNA, 363 bp, Gossypium hirsutum
  unsure (1)..(363): unsure at all n locations
gtgagggaagagtgtaggattagagaacaggattttgggaattttcaggtggaggaaaggatgaaggccacaaaagaaacaagggaaaaatttgggaggttttttataggttccctgaaggtgaatctgctgcagatgtttttgatcgagtttccagtatgttcttcttcatcaccagttttgctttctctttaatggaaacttggcattttttgcttaggagggtgcttcgggaatcaagtttccattgagaaaattggttattttgaaatgggtctgtactgtttgttgcttttgtttaaaagaaatgcttctcggaattcatttancaaagaaaaccaaactcaacttgaaacaagatta

SEQ ID NO: 217777 - DNA, 344 bp, Gossypium hirsutum
  unsure (1)..(344): unsure at all n locations
gaaaatagcccactctttattacttttgtttgcataggcacaaaccttggacagagttgagttatgctgataatcaacatctggcattaccngnaccattgatttcctcgataaggtgcttcgatatgatcatttggaaaggctaactgcataagaagcaatggctcatccttatttttacccgattagaaatgcggaaagcagcagaactcggacctagcatgccaacttcacggtgatgatgttaaggcatggcatcttctgctttcttcatatgcatggtcagatcctcatccctttttagaatgacataagattaaagtctctcttattttttcttttga

SEQ ID NO: 217778 - DNA, 399 bp, Gossypium hirsutum
cccacgcgtccgattttcgcgagaaagtgtgagatcgagagagaaaatacttcgcagggaattagcgagatcctgaaattttcctgcgttttctctttcaatcttctccggctacctgatttatccgtcatcatgacaacatcaaggcgacttgcagaaagaaaggtggagaagttccaaaagaacataacaaagagaggagctgtgcctgagacaaccacaaagaaggggaaggattatcctgtcggtcctgtgcttcttgggttcttcatattcgtcgtcattggatcatctctcttccagattatcaggacagcgaccagcggaggtatggcataagtctgcacttctgatgtaagagaattgcgaggagactggtcatgcattgggctttgcttt

SEQ ID NO: 217779 - DNA, 283 bp, Gossypium hirsutum
gcatgctcgagttgaaaagaaacttacccatgcacaacttgctcagttgatcaatgagaaacctcagatcatacaagagtacgaatctggaaaagccattccaaccaacagataatcggtaaactcgagagggctcttggtgcaaagctgcgaggtaagaagtaaggcgagttgggtcttttttccttttgtggtgtaaatgaatgttctctaccattatggttttgcttgtaagaacagtgttttggactttgtggtgaccatgaaatgaagtgtgttcttc

SEQ ID NO: 217780 - DNA, 403 bp, Gossypium hirsutum
gggtgccagaccatggcaaatagcatttgtttcaggattcaagtgtaacagtgcagtttggaaagctttgaggacgataaatccggtaaaggagaaaaaccatggatggatgagatccataatttcccagttgatgttccaagggtctccaccatctaaatgacagaattgggtggtggtttcagcattgggtggaggaaacctttgcatttagataatctagttttttaagttatttaaatgggactagctttgagtgggattattattgttgtaacaatttgtggaaagcattgattcgagggtgttatgagaaaacattagaacatttttttttttactgacattatttcatgagatgcttgggctttcttccaagatcttcatcattttaaactgggat

SEQ ID NO: 217781 - DNA, 412 bp, Gossypium hirsutum
gactgatgctagagattgattgtgtaggattatgcaagaaaagatgcagtcaacactcgaggccaaacagatgcaacagggcgtgtgggacttgctcttgaggtgcaagtgcgtgccaccggggacttcagggaacagggaggtctgcgggacctgctatactggcatgaccacccatggaaacgtttccaagtgcccttaacctttacgtcgcccaatttgtgttgcagcctttatgggaaaaaattgaattgtttgtttgtgtaatatgtttgttgtatcttaaaacctatcaacttactttgaaatataatatagtacttggtagtttattttttttaaaaatttttattttttttaaagtcctttctttattttttatatttaaatttatttttaatatatttttatt

SEQ ID NO: 217782 - DNA, 297 bp, Gossypium hirsutum
  unsure (1)..(297): unsure at all n locations
gcgagatggatctactcgatcctgatatgattattgtagaaattaatgctattaacgacaacttaatttcttggagcttgttaaaaaaaaaannnnaaaaaaaaaaaaaaaaaaaaaaaaaaaaaaaaaaaaaaaaaaaaaaaaaaaaaaatttaaaaaaaaaaaaaaaaaaaaaaaataaaaaataaaataaaaaaataaaaataaaataaaaaataattaaaataaataaaaaaaggggggcccttctaaaaaaataaaatttttctacccttttattgctataaaaattttttt

SEQ ID NO: 217783 - DNA, 422 bp, Gossypium hirsutum
  unsure (1)..(422): unsure at all n locations
ggaantggagggccgacccagccgtccggtaagaatggagaatggacaattgtccaagggctggcaattgatgaattctcgaggaagaagttggacttgaccggagtggagctgaccgaggagaaggattggcatactcgtgcctctcatgaatgcattcatcatttccataatctgtttggaagaggagtggtttgccttaataggattagctgcagttttgaataaaaaaccgttctagatgaactgttagtgattggtaagcgacgtcctctgatcgagatcttcattatacttgtcacttgttcatggatattttggatattttaccggaatcccggattttatgctccaattttaaatgggttaatcgacactgttggtgaccattggtttttttgtctatctaggggattggttac

SEQ ID NO: 217784 - DNA, 318 bp, Gossypium hirsutum
  unsure (1)..(318): unsure at all n locations
tttcattgccaacaactgccctcctcttaggagtcggagattgagtattatgccatgttgtgcaaggttggagttcaccactacaatggaaacaacgtanacttgggcactgcttgcggcaaatactttagagtgtgctgcctcagcattattgaccctggtgactctgatattataaaaagcatgcccggtgatcactaagctatggggggataacttcctaagtgctgatttaatttcaatttttgggtgtctaaaaacattgttgatgttaaagacaaacttattctgaaaatcaaaactttttttgtagtgttt

SEQ ID NO: 217785 - DNA, 328 bp, Gossypium hirsutum
cccacgcgtccgcggacgcgtgggggcaactttgggtgattttccggctccgatgtccttatgtgcaataacatcgtttattggactggttataactcaatagtgcagttgttcaaaaatcatggtgccgaatggggttggccccttgtcagtgttttggacctagttggctattctctactgggaggtgctgtgagcggagcatgtgtaagcttcaatggatgggcaatgaagaaaaggggaccagtgcttgtctcaatgttttgccccattggaacagtcattacagtagttctctcctttattactttaggccagaccatttcgt

SEQ ID NO: 217786 - DNA, 401 bp, Gossypium hirsutum
cccacgcgtccgcgtatacatcaaatgttcatgatgcaatccttccagcggaaacaattgagtgagtctggtcatggtgtgtcagatgagcatgctattcacttctaactgctaaggcacgcaggccattacatattgatggggtggctcatgctgctgcaacacaaatccagaaaaagtaccgtggatggaagaaaagaaaagaattcttattgatccggcaaagaattgtcaaaatccaggcccatgttagaggacaccaggtgaggaaacagtatagaacaatcatctggtcggtgggtattctggagaaagttattctacggtggagacgtaaaggaagtggtttgcgaggatttcgacgagatgcaattaccaaggaacctggaccacagtgcacg

SEQ ID NO: 217787 - DNA, 382 bp, Gossypium hirsutum
agttattgagatagttgagatgctaagaaggggagagaagctaccacctggcactcaaaatccaaaacgaatcaagagtggaccagaaggtggaaataccactttgctaaccgatccgaaacctcctccatgccgtgatcttgatgcctgctaatgttaacatgccaccgcagtctcaaataatgtgaagcttggattttgccaaggcttttttggatgtatgttcttgttgaatttgtgaagctcaaccaatattttgaattttccatgcaatttaaacttggtacaagttatgagatgactaaatttgcattgtaccaaataattgatgttaatgtttttgccataatcttctatgaaagcaagccataattgttgtggt

SEQ ID NO: 217788 - DNA, 423 bp, Gossypium hirsutum
  unsure (1)..(423): unsure at all n locations
cttttagcatatagacaatagcaaatacagcaatggcttccagtgggcagcttcatgtggatttcgagctcaagtctcctgcagaaaaagtgtggggaaccattagggactccaccacgattttccctcaagccttgtcccatgattacaagagcattcaagtgctagaaggcgatggcaaggcccctggatctgttcgtcttattaactatgccgaagggtctccaatcgttaaggtatcaaaagagagaatcgaatcagtggatgaagctgagaagaaatatgtttacagcatcattgatggggatctcctgaaatactacaagactntcattggcaagatcattgtggttcccaagggagagtcgagcttggttaaatggtcctgtgagnttgagaaggcaagtgaagagatccctgatc

SEQ ID NO: 217789 - DNA, 239 bp, Gossypium hirsutum
cccacgcgtccgcccacgcgtccgcccacgcgtccgtccacgcgtccggttctagatcgcgagccggcctttttttttttttttaaacaaatctcaaaaggccacctcccacattgctgtgaagttttctgaattgctgaccaagatcgacaggcgatctggaaaggagcttgagaaggagcccaagttcttgaagaatggtgatgcacggatgataaaaatggttccgccccacccta

SEQ ID NO: 217790 - DNA, 393 bp, Gossypium hirsutum
cggatcagtaatcaaagcagtggtagacgcctcggatgagctgaacctaacgtataagtgtatgatcagcagagcttaccatgactcactgtttatggcaaggatagctccaatgggcatgatatttattccatgttacaaaggatatagtcataagccagaagaatatgcgtcacctcaggatttagaaaatggggtgaaggtattagcgctaaccttggccaagttgtctttgcgttgatgtgttgttgtatattgtagtttttattaggctggttaatgccactctttgtcaatattttcaataataacaactttggcatttatgaaaactttgtatcatgtttgagaatccaatctcaaagataatggaactcctacaatttggctttc

SEQ ID NO: 217791 - DNA, 365 bp, Gossypium hirsutum
aaaaaaggcagttaggaaccagaaaccaaggcaatggcttctcttgcaaccttagctggtgttcaaccaacgaccatcaagggccttggtggcagctctctcaatggaaccaagctcttggtgaagtcaactcgccagagtttcaaacccaaaaactacagggctggtgctgtggtagcaaagtatggtgataagagtatatactttgatttggaggatattggcaacacaactgggcaatgggacttgtatggatccgatgcaccttcaccgtacaacccactccagagcaaatgcatagcatatggatcagtctccatatgaaagtacttgtagagtgggaaatgaaaagaagaaaaggaact

SEQ ID NO: 217792 - DNA, 383 bp, Gossypium hirsutum
  unsure (1)..(383): unsure at all n locations
cccacgcgtccgcccacgcgtccgctttgttgccttgtgtgtggtggcactcgcggtggtgctgttttcgggtgaaagtcgcacggcggaggcagtgacatgtaatcccgtggagcttgccccctgctcgccggcgcttacgtcgtcctcgcctccatcaagcgcttgttgcagcaagctgaaggcgcagcagccatgcctctgtggatacattaagaacccatctcttaaacagtatgtcaacagtcctaacgctaaaaaggttgcttcgacttgtggagtcccatatcctaagtgttaaatgttgcttaatggtgtatctactatctactggcagcanataagtgattctttttgctgtcaagtactgttctgaataaaag

SEQ ID NO: 217793 - DNA, 372 bp, Gossypium hirsutum
gaacaaaatcaacaatgacattgtcactgtgcaaaagaaggcaaggactatcaaggcacagctcgaagaaatggaccgtgccaatgcaactaacaagcgcctctcaaggtgcaaagaaggcacgttagcttacaggactaggattgcagtaaccaatgggttgcgcaataagttgaaggagctgatgatggatttccaaggtttgaggcagaagatgatgaccgagtataaggaaacagtagggagaaggtattttacagtgactggcgaaaacccagatgaggcaatcatcgagaagataatatcagatgggaatggaggggaggggttcttaacaagggcgatacaagaacatggtcgagggaaagtgct

SEQ ID NO: 217794 - DNA, 407 bp, Gossypium hirsutum
  unsure (1)..(407): unsure at all n locations
gtttatttaggaagggctaaaggaaaatattcgaccgtggtcttcgcacaaacatacttgtccaggacaatcgtccccgcaggatggaccgactggagctaccagggtggccctgatcatctgttccatgccgaatacaagtgtcacggaccgggtgccgatacattcgggagagttcattgggcgaaacaattgacggacgaggaagctaagtactggacttccattgagttcatcaatggcaacgtttggcttcctgcatggctttgaacagaagatatatactttgcaatgagcggaaaatttatggaattagtttatttaaaaaaaaatngatttgtattgtatgagaggagaactttggatgcattcaatgtagagtttcataagatctattgaaaatgaat

SEQ ID NO: 217795 - DNA, 413 bp, Gossypium hirsutum
gccttatcttccacgcccgccgtcacccatctcaaccaccaacgcatcgctctcggcagtttcatcgaagattacgctaacagagtccacataatctctttcgaccctgaatcacttaccctcacaacccacccatctttgtcgttcgaccacccttacccacccaccaaacttatgttccaaccccaccggaaatcccctttctcttcctcctccgacctcctcgcttcatccggtgactacctccgtctctgggaagttgggcactcttctatcgaacttatctccattctcgacaacagcaaaaccagcgagttttctgctcccttaacttccttcgattggaacgacgttgaacccaatagaatcggaacatccagcatcgacaccacctgcaccatttgggacatcga

SEQ ID NO: 217796 - DNA, 413 bp, Gossypium hirsutum
ggggttccgatagagaagatagacattgttactgctgccatgggacatgcattggcaacagaaggaggattctgcactggaagtgctcgtgtcattgatcatcaacggttgagcagttctggctacgtcttctctgcatctttacccccatatttggctagtgctgcaattactgctattgacatcttagagcaaaatcctgatctgacatcaaagctgaaggaaaacattgccattttatggaaaggactctctgatatccgggggctttcaatagcaagcaatccagaatcaccgattgttttccttgtgcttgaaaaatcaactggttcaatgaaaagtgacctccagctacttgaagacattgctgatcgtgccttgaaacaagaatccatttttgtaatggcttcaaa

SEQ ID NO: 217797 - DNA, 244 bp, Gossypium hirsutum
gcttcaaatccaaggaatacgttcgtgaaacttttgcttggatgcattattactggtaccttaccaacgatggcattgaatttttaaggacataccttaatctcccctctgagattgttcctgctactttgaagaagcaaactaggcccggtggtggtcgtcccatgggtccttctgatagccgcccacgtggtccgccacgctttggcgacggtgagaggcgattcggtgacagggatggata

SEQ ID NO: 217798 - DNA, 403 bp, Gossypium hirsutum
cccacgcgtccgagcaagctactttcccttacatatttgcggttagcaagtacttgcagcctggaacttttgatcttgtgggcaacattttctatgagattgaccagcacccataccaaagtacattctataatggtaccattgaagttgttgaagctggtggcttcctcagtgtcgagtctgttttccttgttaccctcgggattgcactgctggttctcttcggtttatggcttcaaggtcaatttcagcgtatctccaagaaaactaagagagctccaaaggtggaagtcggaaccaggactactgatacctcattggacgagtggcttcagggaactgcttacactcagtcagcttccaaatcgaagaaaaagaagtagatggggcagtgcttgcaggc

SEQ ID NO: 217799 - DNA, 399 bp, Gossypium hirsutum
ctcggattgtacaagggtattgttcctctttggggccgacagattccatataccatgatgaaatttgcttcttttgaaactattgttgagatgatctacaagtatggtattcccactcccaaggagcagtgcagcaaaaatctgcagcttggtgttagttttgctggtggttatgttgctggtgtcttctgtgctattgtttcgcatcctgctgacaaccttgtctccttccttaacaatgccaaaggagcaactgttggggatgctgtgaagaagcttggattatggggtctgtttacccgtggtcttcccctccgtattgtgatgattggaactctaactggagctcagtggggtatctatgatgctttcaaaagtgttgtggggctgccaactact

SEQ ID NO: 217800 - DNA, 390 bp, Gossypium hirsutum
  unsure (1)..(390): unsure at all n locations
ggttattcctgatgctctcaaggttttgaggcttcagaaaggacacaagtactgcttgttgggcaagctttcctctgaggttggatggaaccattatgacaccatcaaggagctcgagaggaagaggaaggaaagagctcaagtggcatatgagagaagaaagcaactcactaaacttagggttaaagccgagaaggttgctgaggagaagcttggtgcccagttggaagttattgctcctatcaaatattgattcaaagatgattgaaacatactggttacgtttcagtgcacttccataatgttgttttgagttgctcataattttattcccccaatcgttttaggtagatgctatgctatatatgttcgnatgttatcttggggttt

SEQ ID NO: 217801 - DNA, 412 bp, Gossypium hirsutum
cccacgcgtccgcccacgcgtccgcccacgcgtccgcggaatgtctctggccatggtttgcatggtgatcagtctagacacagatcttcagatgacgtgccatcatccaaggatgcgcaacctgattctgaaaggacacgctcctcttcgagaaatgatagtgcttcaaagcggcctgttgttgtatcaggcaacagccaacctggctcctctggtgagccaagtgagaatcgttctagcagattattctcaagcagtggtcgcatgtcaacgactcagagagttcaacccggctttgaatctaaatcatcatctttcactcgtactgcagtcacaagagctggccgtgatgacaccctccgaagctttgatcttttgacgatcgggagtgggaaaaggaaataaaccacac

SEQ ID NO: 217802 - DNA, 419 bp, Gossypium hirsutum
cccacgcgtccggtcggatgccaagagcgccaagctctccgtgaataagaaatcaaccacgaaagctggaaagaaatcggggaaggcagctaaggatccaaacaagccaaagaggcctgctagcgccttcttcgttttcatggaggagttccgcgagcaatacaagaaggagcaccctaaaaacaagtccgttgctgctgttggcaaagccggtggagataaatggaagagcctttctgaagctgaaaagcgaccttatgttgataaggccgagaaacgaaaggtcgagtatgaaaagaacatgaaagcctacaataagagacaggctgagggtccccaagaagatgaggaggaatctgagaagtctgtatctgaggtgaatgatgaagaagaagatgatgatgaaggcagtggagacg

SEQ ID NO: 217803 - DNA, 397 bp, Gossypium hirsutum
ttaatatcatcttagattctgcgcaaagggctcttcgatcatgggatataattagtgcaatgattaagtctcaagtgtttggtatgatcatatctattgtgagctgtgcttggggagttaccaccatgggaggagccaaaggtgttggcgaatcaacaacatcagctgtggttatttctcttgttggtattttcatggctgattttgcactctcatattgcttcttccaaggagccggagattcgttgaaaaactgtgtataaccaggttggcctctttgtcagcatctaactctttacacctatctcaatgttgttcaatggatggctcctagaggacagataacatagaggggaactatataggttctgtataaagtcttgcaatctttggctag

SEQ ID NO: 217804 - DNA, 391 bp, Gossypium hirsutum
attatctcccagttgttagggtttgtttctttgtctccctcttctctctctcgatgcctgcatttccatcccccaagtctcccttttctttttcaccatttaaaacatcaacgaaaatctcagtcttcctcacattttcattcacaaaccaaccctttcatggccaagaccaaacctggcaagaaggaccttgattcctacgctatcaaaggcaccaacaaagttgttcgtcctggtgattgcgtgctgatgagaccgtcggactccgataagccaccgtacgtggctcgtgtagagaagatcgaggccgaccatcggaacaatgtgaaggttcgagttcgatggtactatcggccggaggagtctattggggggagaagacagttccatg

SEQ ID NO: 217805 - DNA, 416 bp, Gossypium hirsutum
gctgcccaaggtcttgcatatttgcatcattattgcaagcctagaatttttcaccgtgatattaagtccaataacatattgcttgatgaaaagtttgaagctcatgttggtgactttggactagcaaaagtcattgacatgccacaatccaagtcaatgtctgcaattgcaggttcttatggttatattgcaccagaatatgcatataccatgaaagtgaccgaaaaatgtgacatctatagctacggtgttgtcctacttgaattgctgacaggcaaaacaccggtacagcctctagaccaaggcggcgatctcgtaacatgggtgaggaattacattagagatcaatcgttgtcacctggaatactcgatactcgcttgaatcaacaagatgagactaccatctcgcatatgat

SEQ ID NO: 217806 - DNA, 417 bp, Gossypium hirsutum
cgcctcctatcgtgaagccaccttcaccgggaacaccgtgtcctccaccaccacctccggcgcaacaaacatgccccatagacactctcaagctaggtgcatgtgtggacgtgttgggtggcttagtacacatcggcataggtagcagcgccaaagacacttgctgccctgtactacaagggctgttggatttagacgctgccatttgtctctgtactacgatcaaagccaaccttttgaatatcaatattataatccccatagctcttcaggtcctcatcgactgtggcaaaactccacctccagggttccaatgtccagcacaatgatgaaaaacataaaaaccccatgtttttttttctttcgaagtaacaaatattttcatgtcttattatatgtttcttttaataatttatg

SEQ ID NO: 217807 - DNA, 396 bp, Gossypium hirsutum
cccacgcgtccgggcggaacgtggaggttcgtaccacccaaaacgttaatgggtcaaagaagaatataatgataggaagtgttggaaaaatcaatggtgggaaagtgactaaatcggtttcgtgtcaccagagtttgtacccgtatttactttactattgccactcggttcccaaggtccgggtctatgaagctgatattctggatccgaattcaatggagaagattaaccatggtgttgccatctgtcatttggacatctagttggagttcgggtcatggagctttcttggctttaggttcgggtccgggtcgaatagaagtttgtcattggatatttgagaatgatatgacatggacaatagccgattcctgattagcaagaagggggttttat

SEQ ID NO: 217808 - DNA, 412 bp, Gossypium hirsutum
caacttctggggaatgaattttacaacttacaaactgaggtctttggttcgtaaatggcagacccttattgaagctcatgttgacgtgaaaacaactgacaattacactttgagaatgttctgcattggaattactaaaagacgcccaaaccaagttaaaaagacttgttacgctcagtccagccagattagacagatacgccgaaagatgagggaaataatgactgcccaggcaacatcttgtgatttgaaggaactggttcaaaagttcatccctgagatgattggaaaagaaatcgagaaggcaacatctagcatctatcctttgcagaatgtgtttattcgtaaggtcaaaatcttgaaggctcccaagtttgatctcgggaagttgatggaggttcatggtgactac

SEQ ID NO: 217809 - DNA, 410 bp, Gossypium hirsutum
  unsure (1)..(410): unsure at all n locations
atcccggggcggaccaaggcgtccgcccacgcgtccgacgaaagcctaatcgaacaagagttagaaacaaattgtacggagcacccagaccctgatttgttaattagaaccagtggtgaacttagggtcagcaacttcttgttgtggcaattggcttacactgagctcttctttgctcaagaactctggcctgatttcaggaaagacgagttcgtcgatgctttgagttcgtatcagcagcggcagcgccgctacggcggaagacattgatcagctcatcagaaagtaaataaatatggtgttagcaattgaagatatatagtcttactatacatatatagaaatgttatacaaatatgtaaaaactttcgtgtaggatagtcaactgaatcacagaaagttgatattna

SEQ ID NO: 217810 - DNA, 431 bp, Gossypium hirsutum
agccgtcgcccaaggcgtccggttcccttgtactaaaacatgttcctcctcagagtatggtagcaggtacaccggcacaagtaattggatccatagatgagcaagatccatctttgacaatgaatcatgatgctaccaaagagttcttcaaacatttagctgttagttttagagatggaagatccaaataagccaaagaatgatgaggaaaacaaggatggtggacattgatgtcaatgtccactgccagttgcagctgtatgtaaagaaaaataagactagaatggtaaaagtaccatgaaagcctgcattttgtcccctctactaaaaaaatggcaaattaatccctctgagttagattaaagagcaaactagtcattccgttaaaaatttcatccatttttgttgttaaaaattggttcttgtacgtc

SEQ ID NO: 217811 - DNA, 418 bp, Gossypium hirsutum
aaaatatctgctttttcttagttttcctttttgtcccttgtttatttgatatttccccctcatggccgccgctgatgtcgagttccggtgcttcgtcggagggctcgcatgggccaccgacgaccgggccctcgaagaagccttcagtgcgtttggtgaaatcgtcgaatcgaagatcattaatgatcgtgagactggaagatcccgaggctttggattcgttactttccgtgacgagaaagctatgagggacgcgatcgaaggaatgaacggtcaaaatcttgatggaaggaacatcaccgtcaacgaagcccaatcgcgcagaagtggaggcggtggcggaggatttggaggaggaaacggtggttacagccgcggtggaggcggcggcggatatggtggtcgccaaggaggatat

SEQ ID NO: 217812 - DNA, 422 bp, Gossypium hirsutum
  unsure (1)..(422): unsure at all n locations
ccgtccggggaagttgaactgcaaaacgataacatgtacctgcgagcaaaaatagctgaaaatgagggagcgcaacaacaatcaaaccagctgatacaagcagcctcctcctacaatcgcaactttctgccagtaaacctgctggaacccagtaataatgattactccaaccaagaccaaactcctcttcaacttgtataagcttctctcttccacctccatctattcaagctgacatgcaagcagcagcctctaattttctaccaactttatctctggttaagcatatatatatatcttataagccatgcaagtatatatatatatttatatatggnttataaacagttgaaagcgtagttgttgattgtgatgaatgtaaagaacttaagtttcagtactggactcctttttaactgtta

SEQ ID NO: 217813 - DNA, 421 bp, Gossypium hirsutum
cccacgcgtccgcccacgcgtccgcccacgcgtccgcaaaatcagaccacgaccaagatgggcttccttttcctatcatttcagggatcttccccagctatttttcactctgatacagaattatataatttgttttgaagtattttgaatttcctacaagcaacgagagatgcaggcatcaagggcaaggttgtttaaggaatacaaagaggtgcagcgagaaaagacggcggatcccgatattcagcttgtttgtgatgattccaacatatttaaatggactgctctaatcaagggaccatctgagacaccttatgaaggtggagtgtttcagcttgcattcgctgttcctgagcagtaccctttgcaaccccctcaagtgcggttcttgacaaaaatatttcaccccaatgtgcatttt

SEQ ID NO: 217814 - DNA, 421 bp, Gossypium hirsutum
  unsure (1)..(421): unsure at all n locations
tgaaccactaatgagagccctctcaaagcttatatacctcaacaatccagatctagtctgatttgtgggagaggcactagttggaaatgatgctgttgaccagttatcaaaattcaatcagaaattggctgacctctctacttctcctactcctagattgatagatgggattctgctcaccaaatttgacactattgatgataaggttggagcggcgttgtcaatggtgtacatatcgggagcaccggtgatgtttgtcgggtgtggccagtcatatacagacctgaagaaccttaacgtcaaatcaatagtcaagacactgctgaaatgagtgaatgcacggtgtgggataaaagaacgaaaaagaaaaactcataaatgcattttcaatgctccactcttttatgactntgttttcttt

SEQ ID NO: 217815 - DNA, 413 bp, Gossypium hirsutum
ggaaagaaaaaaagaacaagcttgtctaataggagattaaggcatactgggccatatctgctcgctgcaatgccgatgtctcaagaagcatctaattacgatgaggtttccatgcagcagagcttgttattctctgatagtctcaaggatttgaaaaatctgagaacacaactctactcagcagccgagtactttgagctgtcctacgccaacgatgatcaaaagcaaatagtgatagaaacattaaaggattatgctgtaaaagctattgtgaacaccgtagatcatttgggttctgtgacatacaaggttaacgaatttttggatgaaaaggttgatgacgtttctggaaccgagcttcaggtttcttgtgttgaagagaaagtacgcaaatgtcaagagtatattgatct

SEQ ID NO: 217816 - DNA, 295 bp, Gossypium hirsutum
cccacgcgtccgagagccgtgaactgccgcatgaagaagtgtggtcacagcaatcagttgaggccgaagaagaagatcaagtagataccgactggtgttatcctgtctgctttaaaagaaattgaatgtcagactaggaaaatatttccattgagttcttttgctattattctattttgttgagattttgtttgtgggttctggatttgatgttccaatgtatgtttggacaatcttatgtcttttgtcttggaattttgataaggaggtggaaattttaagtaacgctagtttt

SEQ ID NO: 217817 - DNA, 422 bp, Gossypium hirsutum
cccacgcgtccgcccacgcgtccgttctactttgctttcctgtaacgctgaaaaaaagagaagagaagttctcaagagaaaaggagaagagatggcctcaaagcttcttcgtcaaaccctaaccaaaacctacacaaccgccgttatacgccgcttctccaccatggctgctgtcgcttccccttccgagtatgaggacccaacaggaatcaccatgaaaggtgtgaaaatttcgggccgtccactttacctcgacatggggtgttcctgatgactatgaatgtgaggttatcgaaaatgatgctcctattcccaagcatgttcctcagcaccgacctggtcctcttccagaggagttttacaagacgctagaagctctttcaaagaaagacgagcctaaagtcacctccggagatccaaag

SEQ ID NO: 217818 - DNA, 249 bp, Gossypium hirsutum
cccacgcgtccggaataaacttctgacagattatgcataccatatttccgctgccaaaggaagtggagagctgtgcttaaaacatatattctcttttggagcattacctcgggtgcctcttctaaaaaggcttggttacactgcttgatatttattgggtccattgcattggctaatacatgcgtatttatattgatttctgtatagacctttgaaaatactatttctgcaatatcctcacattgactt

SEQ ID NO: 217819 - DNA, 394 bp, Gossypium hirsutum
gaacttccctgacactaaggctcgtattcttggtgccaaatctgattatctcccacctgtgcgcgaccacctaataaatggaactatgtatcgaataaaaacccgaatcacacatgggtgatcaatctactacgttgaaccgataaaaatttggtttaactattaaaggccttaaaaaatcaaggttttttttttttttttcaaaatttcatttgtaattaatgaaattttcacttttaatcccttagttttatattacaagaaaaaaaaaaaaaaaaaaaaaaaaaaaaaaaaaaaaaaaaaaaaaaaaaaaaaaaaaaaaaaaaaaaaaaaaaaaaaaaaaaaaaaaaaaaaaaaaaaaaaaaaaaaaaaaaaaaaggggggccgttttaaa

SEQ ID NO: 217820 - DNA, 407 bp, Gossypium hirsutum
accgaaggcccaagttgtaggcgtgccacaatcaatcggaaagaacgccgataggaaggaaacgaggcagatggattttatggaggaatcagaaaactttgcaatgaggaggagatttccacatggaagcgcctttggccatctgaaatcctggagtaggcagcctgcatgcgaaaaagtcaccatcctttctctgcaaaaattatcaagtttttgctctacaaattgatgctcttggaaactgagatcaagttaaaagttgcatgaatgtggagtgcgtagtgaatgtaaaattcccatatttacatgccaatatagtatatcccactaccaaggttttgttgaaaaccatttggaattggaaaccccattgattatggaagaaatatgtataccttctagagctc

SEQ ID NO: 217821 - DNA, 367 bp, Gossypium hirsutum
aaaagggagtcttcaagatggagtcttcaaggcatgactgcacttgttactggtggaacgaaagggctcgggcatgcaattgtggaggaattagctggattcggagcgattgtgcatacatgctctcgaactgaaaccgagctcaacaattgcttactcgaatggaaagcaaagggttttcgggttacaggttcggtgtgtgatgtttcagatcaaactcaaagggagaatctgttaaacactgtttcctcagaattcaacgggaagcttaacatcctgataaataatgtcggaacgaatacaacgaaattggtgacggattacacggcggaagatgtttcgtttttgacgagcaccaacttcgaat

SEQ ID NO: 217822 - DNA, 371 bp, Gossypium hirsutum
ctagccgatccgttctcttcacctcgacttttctgcatctccttgacccccgaccgagcagtccagcttgaaaatggcagcaaaatatattattggttctgttgcggcatcatttgctgttgcttatgtagctgataaacttgttgctgattagaagatttttggagggactacacccaacactgtttccaacaaggaatggtgggaagaaactgacaagaaatttcaggcatggccacgcactgccggtccacctgtggtgatgaatcccatcagccgccagaatttcattgttaagtcgggttctgaatgacacgtaatatttgcttgtattttagtcaaagtttcagtttgattctacattcgctgtg

SEQ ID NO: 217823 - DNA, 413 bp, Gossypium hirsutum
  unsure (1)..(413): unsure at all n locations
ttccaaccctccagcataagccatccaacatgagtttttttgttgaccagatactcctcgaggtgagtgaaggtaagttacccaaagaagcatttaagaaattcgttctaggaaaatatttagcttttaaaacttgggctaacaaagaattcggataattaaaaaggcgccaaccctgcttggctaatagcgcaacattgaacttgtttaaacttctaaatcctaaaccacccaaatcttttggtaagcaaacatctttccacgcacaccaatggatcccctttttacttttatttttttgccaccaaaattttgcaataattccctccaaccctatacataaagttttaggaagaaaaaaacaagacattgcacaggttggtatagattgtaaaatggctntaatgaaaatt

SEQ ID NO: 217824 - DNA, 417 bp, Gossypium hirsutum
gtttttagttactatccatttccctccagattatcctttcaagcctcctaaggttgcgtggaggaccaaggtcttccatcccaacatcaacagcaatggaagcatttgtcttgatatcctcaaagaacaatggagccctgcactaaccatttccaaggttctgctctcaatctgctcgttgctgaccgatccaaaccctgatgaccctcttgttccggagattgctcacatgtataagaccgatcgggccaagtatgaagccactgctcgtagctggacccagaagtatgccatgggatgacagtggttggtgtgtaatacctatcagctttcttatgtgttttggggaaagaaggaggtgttttttcttaaagtaacttgccattgtgctttggatatgggaaagatatggaacat

SEQ ID NO: 217825 - DNA, 452 bp, Gossypium hirsutum
  unsure (1)..(452): unsure at all n locations
acccggaaanaccgggccggcccaccccgtccaaccaataaaagtgcttggataaagcttaatgtggatcagactggtttctatagggtgaggtgtgatgaggaacttgccgctagactccgctatgctatagaaaacaaatacttgactccaactgacagatttggcattcttgatgattcatttgcactttgtatggcacgccagctgcctttgacttccttgcttaccttgatgggtgcctacagagaggaacttgactataccgtgctgtccaacttgattagtataacatacaaggttgggaggattgcagctgatgcaagacctgagctaatggataacatcaatcaatttttcattaacattttccaatattctgctgagaagctcggttgggatgctacacaaggtgagagtcatctggattcaatggtgagaggagaaatttt

SEQ ID NO: 217826 - DNA, 418 bp, Gossypium hirsutum
tgatgcttgtgtatgttacaaagttcttttggtgggaagctggttactggaacacaatggacattgcacacgatcgagctggattctatatttgctggggttgcttggtttgggttccatccgtgtatacttcaccagggatgtaccttgtcaaccatccggtaaaccttggaatgcagcttgcactatatattcttgtcgttggcattctttgcatatatatcaactatgattgtgataggcaaagacaagaatttcgcagaacaaatggcaaatgcaaaatttggggaaaagctccatcaaagattgaagccacctacacaacaacatccggggaaaccaaaaccagccttcttttaacatcaggatggtggggtttggctcgtcatttccattacgtgccagaaatattagctgc

SEQ ID NO: 217827 - DNA, 408 bp, Gossypium hirsutum
cccacgcgtccgatttaagcaattggaaactaatgtgagcttgaaagaatccgatgcctggcctgctgagccacaagatgcttacggcttggagaagcttgcaacagaggagttgtgcaagcattacaccaaagactttggaattgaatgtcgcattggaaggttccacaacatttacggcccttttggaacttggaaaggtggaagggagaaggctccagctgccttttgcagaaaggctattacttccattgacaagtttgagatgtggggagatggtcttcagactcgatctttcactttcattgatgaatgtgttgaaggtgtacttagattgacaaagtccgatttccgtgagcctgtgaacatcggaagtgatgagatggttagcatgaacgagatggcgga

SEQ ID NO: 217828 - DNA, 427 bp, Gossypium hirsutum
gtcccatcactttgcctccccttgtgaaacctccaatcaagttgccaccggttgggcctccaatagttaagccacccattgacctccctccggttacagtccctccaattaacctccctccagggacggttcctccagtaactaagccaccaagtgggaaaccctgcccaacaccaccaaccaaggacacttgccccattgacacactgaaattgggtgcttgtgtggatctgctgggagggttggtgcacattggactaggtgacccggttttgaatcaatgttgtccggttctttcaagacttgccgagctcgaagctgcggtctgcttgtgcaccaccctcaaacttaaagttctcaaccttaaaatttatgtgccactggctcttcaacttcttgtcacatgtgggaaaacacccccttctgg

SEQ ID NO: 217829 - DNA, 322 bp, Gossypium hirsutum
  unsure (1)..(322): unsure at all n locations
ttaccccgttcttttccgcggagttaatggaacagttgctcatgaattcattatagacgtgagaggttttaagaatactgctggaatagagcctgaagatgttgccaaacgtcttatggactatggattccatgctcctacaatgtcgtggcctgttccgggaacgctcatgattgaacctactgaaagtgaaagcaaggcagagctggaccgattctgtgatactcttatctccattagggaagaaattgctgaaatcgagaatggaaaggctgatatccacaacagtatagtctgcttaattactagttattgcatcgna

SEQ ID NO: 217830 - DNA, 426 bp, Gossypium hirsutum
cggacgcgtccgcccacgcgtccgcccacgcgttcgcccacgcgtccggaaatagcggagtggaaaacggcgccacctctctctagcgacgtagaaatcggcagttacctctttgattttctcttcgccgctcaagacgcctccacttcgttgctcctctgggtggtgaccctcctcgactctcatctcgatgttctccggagagttcgagaggaagtgtcaaggatttggtcgccggagtcggatactttaataagcgcagagcaactgagggaaatgaagtacactcaaacagtggcgcgtgaggttataagatatcagcccccggcggcgctagtaccgcacattgcgatgaaggatttcccgttgaccgagtcgtacacgattcccaagggcacgattgtgttcccttcggtttacgaatca

SEQ ID NO: 217831 - DNA, 421 bp, Gossypium hirsutum
ctcaagttcctcgccgtctccgccgccccttgtggtcattgtcgccagttcctccaggagctacgcgccgcccccgatgtcaacatcctcataaccgccaccgagaaggaaaaagaaaacaaaacgatcaacaatcgtaacgataaagacatgcaatttgctcctttatcttattttttacctcacaggttcggccccgatgatttgctggaaaaagacgtccctcttctcctcgagcctcaccgaaacggcttgtcgttttgctccgatacccgcaacggcgaaatcaacggcgacggtgacgattcaaagtacgcggctctggaagcggcgaatgcatcccacgcgccgtacagcgggtgtccatcaggggtggcgttagtggacgtggaagggaagatatacaaagggtcttacatgg

SEQ ID NO: 217832 - DNA, 352 bp, Gossypium hirsutum
  unsure (1)..(352): unsure at all n locations
tccgccccctatgtcaacatcctcataaccgccacctanaaggaaaaagaaaacaaaacgatcaacaatcgtaacgataaagacatgcaatttgctcctttatcttattttttacctcacaggttcggccccgatgatttgctggaaaaagacgtccctcttctcctcgagcctcaccgaaacggcttgtcgttttgctccgatacccgcaacggcgaaatcaacggcgacggtgacgattcaaagtacgcggctctggaagcggcgaatgcatcccacgcgccggacagcgggtgtccatcatgggtggcgttaggggacgtggaagggaagatatacaaagggtcttaca

SEQ ID NO: 217833 - DNA, 404 bp, Gossypium hirsutum
gctcttcctcaagttcctgttaaaagtggaagtggtggatcctggctcggaggcataggctctaccatagctcagggcatggcatttggtactggaagtgctgtacctcacagggctgtggatgctgtgatgggtcctcgtactattcaacatgaaactgtggtttccgaggctgcagctgcccctgcaccagcaactacttccagtagtttagctggcactgattcatgcagcatccactacaaggcattccaggattgcctgaatagctatggaagcgaactcagcaagtgtcagttctacatggatatgttgactgagtgcaggaagaacacagggtccatgttgggtgcctaaaagtttattcaccattttccttgttatgctattgaaattgtcagctt

SEQ ID NO: 217834 - DNA, 321 bp, Gossypium hirsutum
gctcggaccggaatggaatggccggaccgacccgtccgaaatcggagtattggtcggaaaagggggattttatggaaatgtgttcagaatgaccccgccgcgctgctttactaaagaagatgcagatttcctagtagatgcaatggattacaccatgggcaagatgtaagtaaagcttccctcaagtcttaaatgtagataaaaatatgttatgtaattgtgattatatcacaagttgatccatttatgcactctgcttctataaggttaatagactgtgctgtttggatacccttttattttttaatgcttattttggtg

SEQ ID NO: 217835 - DNA, 421 bp, Gossypium hirsutum
ctactggtctgaccactgaagttaagtctgttgagatgcaccatgaatccctcccgggggctttccctggtgacaatgttgggttcaacgttaagaacgttgctgttaaggatcttaaacgtggttttgttgcttcaaactccaaggatgatccggccaaggaagctgccaacttcacctcacaggttatcatcatgaaccaccctggccaaatcggaaatggttatgccccagtcctcgactgccacacctctcacattgctgtcaaattttctgagctgttgaccaagattgacagacgatctggcaaggaactcgagaaggaacccaagttcttgaagaacggtgatgcaggtatggtaaagatgattcccaccaaacccatggtggttgagactttctccgaatacccaccactcgg

SEQ ID NO: 217836 - DNA, 319 bp, Gossypium hirsutum
cgatgaccggagtttcaggtcaatctaccaggaagaagatgaacaaggtttcaaaggtcttaaagtcagcaaagacctaatggaaatcggcggcgacgccctcaaaaccaacatcacaacattgggtccgctcgtcctcccattctccgaacaactcttcttcttcgccaccctaatttggcgccatttctttggcggcgataaatccaaaacctccctatcaccgtcgtcgaagccatacatccccgactacaagctcgccttcgaacacttctgcgtccacgccgcaagcaagacggtgctagacgagctgcaaaaa

SEQ ID NO: 217837 - DNA, 319 bp, Gossypium hirsutum
gaaggatttacggtggggctaagagaaatggaagccgtcctcgccatttctgtaagagcagtggatctgttgctcgccacattcttcaacaattgcagaacgttaacatcattgatattgatcctaaaggtggtaggagaatcacatcgaacggccaacgcgacctggaccaagtagccggaaggattgcggttgccatctgagtaacttttaatacccaaatttgcttgtttttgctgttaagcaattttcattttaggtaccgagagagtgaagacatggaatatttttattttagggtttggtgacttgttctctc

SEQ ID NO: 217838 - DNA, 290 bp, Gossypium hirsutum
cccacgcgtccgcccacgcgtccgcccacgcgtccgaaaaaaaaaaaaaaaaaaaaaaaaaaaaaaaaaaaaaaaaaaaaaaaaaaaaaaaaaaaaaaaaaaaaaaaaaaaaaaaaaaaaaaaaagggaaaaaaatataaaagaaaaaaaattaaaaaaaaagggcatacaaaaaggggggtcttttttagtgtgtccctttttttattcggttggttgcatttttaaaactttttttttgggaaaacaatggattttcatagctggttgttttagaaaaaaatttttgt

SEQ ID NO: 217839 - DNA, 333 bp, Gossypium hirsutum
ggctatgatgtcttccttgggaattttcgtggcttagtctctagagagcatgtggataaaaatatctccttaaggcaatattggcgattctccataaatgaacacgggacagaggatattccagctatgatagagaagattcacgaggttaaaactgctgaattgaaacttagccatcccaatcaactccagagcgccaatcagcttgcaactgcgtcaaagctttagctgccagcatttctggcatcaactatgaccttacgaacaaactcccaggcatgtgtggggtgcacagccctttcaagatcagccccagcactaactgcaaaagtg

SEQ ID NO: 217840 - DNA, 303 bp, Gossypium hirsutum
cgaagatctctctcctatatttctacagtctgtatatttcgcggccaccaacaaccaccgaagaaaatgacttcgaacgcggcggtgccgttctggcgtgcagcggggatgacatatatcacctactccaacatatgcgccaacctcgtcagaaactgcttgaaggaaccttataagactgaagccctttctcgtgagaaagtccatttctccatctccaagtggactgatggaaagcctgaaaagcccactatccgctcagattcacctgaagaatgagttgcgtggttggtcattgaagtc

SEQ ID NO: 217841 - DNA, 320 bp, Gossypium hirsutum
acataacgatcgggttttacactggagaccacggagacggcgagccattcgatggggttttagggacgttggcccacgctttttctccaacgagcggaaggctccatttggacggggatgagaactgggtagtttctggtgatgtgacgaaggcatcggtgtcgacggcggtggacttggagtcggtggccgttcatgagatcgggcatctgttgggtttggggcattcgtcggtagaggatgcgattatgtacccatcgataacttcgcggacgaagaaagtggaactggcggacgatgatatccaagggattcaattg

SEQ ID NO: 217842 - DNA, 297 bp, Gossypium hirsutum
attggtatacttcaaagctcatctgtcaacccagagccccttctctccgccgaatctcctttttctcccgtaaaaatgtctctggtggccaacgaagattttcagcacattttgcgtgtcctgaacaccaacgttgatggaaagcagaagattatgtttgctttgacctccatcaagggtatcggaaggcgtttcgccaacattgtttgcaagaaagccgatgtagacatgaacaagagggctggtgaactgactgcacaggaattggacaatctcatgacgattgtggcgaacccg

SEQ ID NO: 217843 - DNA, 293 bp, Gossypium hirsutum
ggtgactgcaccaacttcgagatcgatccatcattcggatacgaagcttctgagctctaccctgaagtgaaatacaccactgtggaagaaggcctcagtcattttgtttgagaaagctagaaatcaaatcagatcattgttattaaactgataccagtaataatgtaaaaactgtcactgagagatttgtgcagaggacttgaggattctgtgtgtacgtatgtgtgtgtgtcataaatttctcgttactatcattcaacataatgccaaacatgcttttcttcttgtgtcgt

SEQ ID NO: 217844 - DNA, 316 bp, Gossypium hirsutum
cccacgcgtccgcaaaaaaaatctttccagtttctattttctaaaaacaaaactgaaaatgtcttgctgcggaggaaactgtggctgcagctctggttgcaagtgtggcaatggctgtggaggatgcaagatgttccctgacataatagagaagactacaactgagactattgttcttggtgtgacaactcagaaaatgcactttgagggatctgagatgggagttggggttgagaatggatgcaagtgtggagacaactgcacttgcaacccttgcaattgtaaataagagggggggaaaatgaacaacaaagag

SEQ ID NO: 217845 - DNA, 326 bp, Gossypium hirsutum
cccacgcgtccgcccacgcgtccgatgatgttgcccctattcctggaacaaccaagataaaaaatctagatagcaacattgaatcagtgaaagtaaagctgacaaaagaagatttgaaagaaatttcagatgtgatcccaatccatgaggttgcaggtggtagttatcctgatgctttaaagaaattctcttggaaatatggcaatacaccaccaaagaagagcgcctaggttttaaaacaaagtttcatgagttactaaagctttggaaattgctgttgtaagttgatatgcttaggctttcatagcctttatataataaaaatt

SEQ ID NO: 217846 - DNA, 307 bp, Gossypium hirsutum
cccacgcgtccgtgttgataaaatttctgtggtgatgaagccctatacaaaggaggtagttaaagcttatgggaggtttttggaatcagcaacaacataccatcaacaggttcaagcctctgtgcaagaaactttgaagaagcatgagctgacaagacctcttgcaaccaaagagcttgagtggttttcggcatctgctctattggctctacctattattattttgttcagaatattttcagcaattttctgcaaaaagacaaagaagcgtgttcgacatactaatgcagtccaccatggtcgtcgt

SEQ ID NO: 217847 - DNA, 309 bp, Gossypium hirsutum
gagatgtgaagccccataatgtcatgattgatcacgagcagcgtaaacttcgtcttattgattggggccttgctgagttctatcatccagggaaagaatacaatgttcgtgttgcttcgagatattttaaaggtcctgagcttcttgttgatttgcaagactatgattactctttagacttgtggagtcttggttgtatgtttgctggaatgatattccggaaggagccattcttttacgggcatgataattatgatcaactagtcaagatagccaaggttcttgggacagatgaattaaatgcttatc

SEQ ID NO: 217848 - DNA, 313 bp, Gossypium hirsutum
cccacgcgtccgcaaaagaccaactaaactcaccaaaaataatggtggccagcaagaaaacgaagaagacccatgagagcatcaacaacaggttggctctcgttatgaagagtgggaaatacactcttggttataaaacagtgcttaagtccctcaggagctccaaagggaaattgattatcatttcgaacaattgtccaccgctgaggaaatctgagattgaatactatgcaatgctctgtaaagttggagttcaccattacaatggaaacaataatgatctaggaactgcttgtgggaaatacttccgtgc

SEQ ID NO: 217849 - DNA, 307 bp, Gossypium hirsutum
cgtgaatacacgataaagcttctgagtacatcattccccaacatgactgctgctgaggtttctcaatttgtgaatggattatttgactcgagaaatgatttgtccacttttaaaaatcacatacgggacttccttgtgcaatcaaaagaattttcagctcaggacaataaagatctctatgcagaagaagctgccctacagagggaaagagagcgacaacggatgctttctatcccagggcttattgccccaaatgagatacaagatgagatgttggattcgtagatgtggctaatttttgcatgga

SEQ ID NO: 217850 - DNA, 277 bp, Gossypium hirsutum
ggatctcaagcaaagctatgtggataatgaccagcttcattaacgacatatttgagaaactggctcaagaagctatcgaggctcgcgaggtacaacaagaagcccacgattactacaagggaaattcatacacgtcattaggctcgttctcaccacagaaacttgcgaaacacgccacctttgaacgtaccaaggcatatactaaatatactagctcttgaattgaatgaattacgccgattttaagcttagcatttcttatagaagatccttcttg

SEQ ID NO: 217851 - DNA, 324 bp, Gossypium hirsutum
cccacgcgtccgcccacgcgtccgcccacgcgtccgagattatggaaagaagtcaaagcttgggttcaccatctatccttcgcctcaggtctcaactgcagttgtggagccttacaatagcgttctgtccactcattcgcttcttgaacacacagatgtggctgtgctcttggacaatgaagcaatttatgacatatgtcggagatccctcgatatcgagagaccaacttacaccaatttgaaccggttgatttctcaaatcatatcgtccttgacaacttctttaaggtttgatggagccattaatgtggacattacagagtt

SEQ ID NO: 217852 - DNA, 312 bp, Gossypium hirsutum
atgacatggtccacgcagatggacttctatcccttgagactagtcaacatcggagatgcaccatgcttgatctattcactgagatagatcggttgcttcgtcctgagggttggatactaatccgtgacgccgctcctcttgttgaatcagccagagctctaacgacacggttgaagtgggatgccagaatcatagaaattgaaagtaacagcgatgagcggctccttatttgtcagaaacctttctttaagaagcaagcaatgtgagaacaatttctccattaaaccctagtttatgtcttggtattcaaac

SEQ ID NO: 217853 - DNA, 315 bp, Gossypium hirsutum
cccacgcgtccgagaaccgataaggttttcattacggttctattacctgattcaaagaatgcaaaagttaaccttgagccggaaggagtgtttaatttctctgctactgctggaactgacaataacacatatgagttgaagttggatctttttgataaggtcaacgtggaggaaagcaaaattaatattggagttaggagtatattctgcatcttggagaaggctgaaaaagtgtggtggaaaaaattattgcgcggggatggcaaagccccccattacgtcaaagtggactgggacaaatgggtggatgaagat

SEQ ID NO: 217854 - DNA, 278 bp, Gossypium hirsutum
cccacgcgtccgcccacgcgtccgcccacgcgtccgcacatacagttgaagtgatgccaaagtgtgtgcctaagaagtcatctcaataaagacgggtgaatgacacaccatcatggtaaaatcgttcgaggagagtgtctggtaaaaccgtttaaatacttattttacttctccatacggtaattaaaattcttttgcagcatcctagttactggatgcaagggtgagtttatttttctttatatatatgatatacatatacgtttgtctttgttttc

SEQ ID NO: 217855 - DNA, 324 bp, Gossypium hirsutum
cccacgcgtccgcccacgcgtccgcccacgcgtccgagattctgaagtttcccctcacgactgagtctgcaatgaagaagattgaagacaacaacactttggttttcattgttgacattcgtgctgataagaagaagattaaagatgctgtcaagaagatgtatgatattcaggccaagaaagttaacaccttgatcaggcctgatggaacaaagaaagcatatgttaggttgacacccgaatacgatgccttggacgttgcaaacaaaattggtattatctaggctagttggtagctaccttgttgagcatttatttttcttt

SEQ ID NO: 217856 - DNA, 324 bp, Gossypium hirsutum
gtcgaggagttggaaccttttaagaatcaccagaatatgttggctggtttagactacgttgttgcccttaagagtgatgtatttgtttatacatatgatggaaatatggcaaaggcagttcaaggacataggcgatttgagaacttcaagaagactatcaacccagacaggatgaattttgtaaaacttgtggatgattatgacgagggaaatatttcttggaagaaattcagttccaaagtgaaaaagcttcacaaagatcgagatggatctccctattatagagagtctggggagttcccaaaactggaggagagtttctac

SEQ ID NO: 217857 - DNA, 298 bp, Gossypium hirsutum
catctttatatctgatcacggaaatattcgtggtaggagatccagaaggagatccggaaatggcaataattacagcacatgcgcgagaaagttcatcggaggacacgggttattcgttcgtgcatggcagaattacaggaacagcgaaggacgtatttttgggcagggcctggaagagcagtccgagggttgtttattcttatactgaaatggacgaaatcgtccatcctggtggatggtctagtaatcgccaacctgaacgagccgacactgtgtactacggagaatacaaatgcac

SEQ ID NO: 217858 - DNA, 313 bp, Gossypium hirsutum
cccacgcgtccggtaaaaaattgcaccatgactaatacttccaatggtgttagaatcaaaacttggccaggtgctgaacctggcacttgttcgaacattcactttgaggatattaccgtgaccaatgtcagttctcctattataattgatcagaaatattgcccatggaacaaatgcaaaataaatgaagaatcgaaagttaaactaagcaacattagtttcaaaaacattcacggcacttctgcgcgtccagaagctgtcaagattatttgtagtgctactttgccttgtgaaaatgtagaacttgcagaca

SEQ ID NO: 217859 - DNA, 296 bp, Gossypium hirsutum
aaagaatgcaccatacgtgtgggttcacttccctggccgtaactcatgggatgtgttcagcgaaatactcgagaagacccacattgttactacgcctggaagtggtttcggacctggcggtgagggtttcatcagagtcagcgcatttggtcacagggagaatgtcttggaagcttgcagaagattcgagcagctttacaattgaatctaatagcatttgaccggttacctcggtttcagaccggagaccaaaggccgtatgcttctatgatttttgttctcaattctgtaatatt

SEQ ID NO: 217860 - DNA, 314 bp, Gossypium hirsutum
catgatgtttcacgggaaaatgcatggtgaccacttggtcgagctcctacgtccttttgttcagcaatggagtcaggctgactgttggatgcaattgtatgaccggtggtcttctgttgacgatctcggttccctagctgttgtacaccatatgttggctaatgacccaggaaagagccttctatggttcagacagtctctcctccttttaaggttaaattgccaaaaggctgcaatgcgtagtctacggttggctagaaaccattctacctcggatcatgaaaggctcgtctatgaaggatggatattgtacg

SEQ ID NO: 217861 - DNA, 312 bp, Gossypium hirsutum
cccacgcgtccgctcaaataagcttctagtttagggacatcctccctcctaaaaatatcccacagtgcaccacctgtctcctttctgctggtcaagggttccggaattgaagctcctctaagctcaccactggaaacatatattatattatcaccccaattggtggcttccgattcatcgacgccttctttaagtcgctctctttccaaacgttccttttcatcctgtgccttgtgtttcattttcaacttctccattgcggcaagctgctcatcgcttaaggctacctctgaagtatgtgtcaaaaatgtt

SEQ ID NO: 217862 - DNA, 296 bp, Gossypium hirsutum
cccacgcgtccgggtcaaagccattaatgagatatgtggccaagctaaattttcagatcttacaaagaactttttggttatactagctgagaatggaaggctaagacatatagaaagcattgcgaagagatttgtggagttgaccatggctcataagggagaagtgaaagctattgtcacaagtgttattccccttcctcctcaggaggagaaggaactaaaggagaccttgcaggaaataattggacaggggaagcaggttaagctggaacagaagatcgatcctagtattcttg

SEQ ID NO: 217863 - DNA, 145 bp, Gossypium hirsutum
catacatcaaatcttctctatgatcattctgtttattcgttgtgtaacgccattttgctgtggagtatggcgaactatcaagtgtctcacgatcccttctgacttgtacaatctattaaattcatcagaacagaactttaagccc

SEQ ID NO: 217864 - DNA, 307 bp, Gossypium hirsutum
cccacgcgtccgcaaggacatagtttattggatctacaataaactgaagaccaaagaaacattggttgaggcggtggaccctaaaatctcgatggcatcaaaggaagatgccatcaaggtgttgagaatcgcagtccactgcacggcaaagattccggcacttagacctagcatgagaaaggtagttcaaatgctggaggaggctgaaccttgtaaacttactgatattattgttcatgaaaaaggtgaaaagtagcctccactgaggaatggaacaagagtggcaagaaatgattccagattgatc

SEQ ID NO: 217865 - DNA, 288 bp, Gossypium hirsutum
acgatttaaagctgactcgacacgaaccaggataatgttctatagcacgttttacaccatgaaaaatgacaactcgggttctctctgtggaccggtggtggatgatgtgaagttggttagtattcgaaaattgcatcgtttgtaaaattcatgttttaaatttgttttgcattgattatgctacaaattaatgtgtttcatccatttaggggtttactttaggattatttaatgtaacaaattaatgagttcaccaccaatgtttacatttatgtatctactttcttc

SEQ ID NO: 217866 - DNA, 354 bp, Gossypium hirsutum
cccacgcgtccgcccacgcgtccgccctcgcgttcgcgggattacccgctgagtttaagcatatcaataagcggaggaaaagaaacttaccaggattcccctagtaacggcgagcgaaccgggaaaagcccagcttgagaatcggtcgccatcggcgtccgaattgtagtctggagaagcgtcctcagcgacggaccgggcccaagtcccctggaaaggggcgccggagagggtgagagccccgtcgtgcccggaccctgtcgcaccaagaggcgctgtctacgagtcgggttgtttgggaatgcagccctaatcgggcggtaaattccgtccaaggctaaatacgggcgagag

SEQ ID NO: 217867 - DNA, 405 bp, Gossypium hirsutum
agagagggagattgagttaggcccgaagtgcacccttaaagaacaactcgaaaaagataaggatgatgagagtttgaggaggtggaagcaacaacttcttgggactgtggatttcgagtccgttggagaaaagctagaacctgaagtgaagatattgagccttgcgatcaaatcacatggtagacctgatatggtacttccaattccggagaacggaaagcctaaaggcttgtggtttaccctaaaagaaggaagcaaatacagcctgcaattcactttccaagtgagcaacaacattgtatccggcctcaagtacactaatatggtttggaaaactggtgtcaaggttgatagcacgaaagagatgatcggaaccttcagtccccaggcagagccttacacaca

SEQ ID NO: 217868 - DNA, 399 bp, Gossypium hirsutum
cggacgcgtgggcggacgcgtgggcatgggtgttgtaatcattgacggatcgacggtgagagccttcgtgactgacgaccaacagttcacgaagagcgtggatgagcgtttcgcagctcttgacctcaacaacgacggtgtcctctccaggtccgagcttcgcaaggccttcgagtctctgcgtctcctggagtcccacttcggtgtcgacgtcgccactccccccgacgagctcactcagctttacaactccattttcgagaggtttgattgcgatggcagcggcaccgttgacctccaggagttcagatctgagatgaagaagattctgcttgctattgctgatggattgggatcttgccctatccagatggttcttgaggatgatgaccaaagttt

SEQ ID NO: 217869 - DNA, 409 bp, Gossypium hirsutum
cccacgcgtccggtataagagttaccaagagttatccgatgccttggctaagatgtttagctctttcactatgggtaattatggacctcaaggaatgatagatttcatgaatgaaagcaagttgatggatcttctcaacagttctgattatgtgccaagttatgaagataaagatggcgattggatgctagttggtgatgtcccatggcagatgtttgttgactcatgcaagcgcttacgcataatgaaaggatccgaagcaattggtctcgcaccaagagcaatggagaaatgcaagagcagagcctaaaaacaagatcctggaattgagcaaaaggctaggagagggagccttcttattgggatgtgttttatgtttttttaatggttatatatatatatttaatat

SEQ ID NO: 217870 - DNA, 411 bp, Gossypium hirsutum
atcggcatcaatcaaatctgatactatcttgtatattctaaaaaaaaaaaaaaaaacgggggggtctatttataataatggacctcaaagaatgatagatttcatgaatgaaagcaagttatatggaacttctcaacagttcttattatgtgccaagttatgaatataaagatggcgattggatgctagttggtgatgtcccatggcacatttttgttgactcatgcaagcgcttacgcataatgaaaggatccgaatcaattgttcattcaccatgatcaatggacaattgcatgaccttagcctaataacattatcctggaattgttcatactgctaggagagggagccttcttattgatatgtgatttatgttttttaaatgtttatatatatatatttatatttata

SEQ ID NO: 217871 - DNA, 408 bp, Gossypium hirsutum
cccacgcgtccgaaatcggcttttcaatttggttggttccacactggggatgtcgggttttgtgactccgatggatacttgcatcttgttggtcggatcaaggagctcatcaatcgtggaggtgagaaaatatcaccaattgaggtagacgcagtgttattggctcacccagctgtaacacaggcagttgccttcggtgttcccgatgagaaatatggcgaggagataaattgtgcggtgattttaaggggaggaagcttggatgaagcagaaatcacgaaatattgcaaaagaaatcttgcgagtttcaaagtacccaagaaagttttcatcacggattccgtgccgaaaacagctactggaaaaatccagaggaggatagtagcagagcatttcttggctcatacg

SEQ ID NO: 217872 - DNA, 357 bp, Gossypium hirsutum
gtccaatttggccagaagggtattccatacttgtttacctacgatggacgcacaatccgtggcgcgagaccctttgatcaaagccaacgacaccatcaagcttgacttagagagcaacaaaattgttgatttcatcaagtttgatgttgggaatgttgtcatggtcactggtggaaggaacaggggacgtgttggagtgattaagaacagggagaagcataagggttgcttcgagacaatccatgtacaagatgcttctggacacgagtttgcaactcgtctatgcattgtctttacaatctgttaaggaacaatgccatggatttcgttttccatgggcctgggttttcaagtttg

SEQ ID NO: 217873 - DNA, 418 bp, Gossypium hirsutum
cccacgcgtccgtggaagcaacctcacttctttcttcatcttcttccttcgccctctctttccttccttcacctctttcttctccagatctccaccacaagtctcttgtcttcaggggcatgtttccagttactgtaaacccgcagacatgttcaacagctgttgtccgcagaaagttgagcttctgtacaaaggcagttcttggaggaaatgtgcatgtaacaggagttcctacttctgtccctgtaagagtagcacacgagcttcatcaagctgggcatcgatatttggatgttaggactcctgaagagttcagtgcagggcatgtccctggggccattaacatcccttacatgtacaaagttggatcaggaatggcaaaaaaccccagttttgagctgaagtatcatcacattta

SEQ ID NO: 217874 - DNA, 328 bp, Gossypium hirsutum
gacgtcggctatggccgtcaacaggttcatcatcagcctcatggcgatgccttcttccatccattggattgtgagccgactttacaaatcggatatcagcatgatccaatgtcagtggtgactgcagggccaagtgtgaataattatatgacaggttggttaccatagtatatatatatctatatatctatatgaagaagaagaaaccatgggtatggatttcttcataagaaacttattttatgttattatatgaaacaaaagaaatgtgtaatgccatggatttattattattattattattattggaactttgtgtttttaatta

SEQ ID NO: 217875 - DNA, 371 bp, Gossypium hirsutum
gagttatggcatggttaaaaacccttggcccaatgttgatgcacacagtggagtgctgctgaaccattttggtttaactgaagctagatactataccgttctttttggtgtatcaaggagtattggaatttgctctcagctaatatgggaccgagcactatgattgcccctcgaaaggccaaaaagtgttacaatggattggcttgaaaattattgcaagaaagctaaagcagcttaaaatcggtggatgaattaattaagcataataatttctcacaaggattggtcttgtgatgagtgtagcagctacctacatggtcaacggcaagctgtttcgttttttttaataatttactggggaaattagatgt

SEQ ID NO: 217876 - DNA, 311 bp, Gossypium hirsutum
gtgcctccagcagactcatcagtgttcttcctaatatctgttagattttcagccactagtttatacagtgacctgaaggttgtgaacattattcccctgagaggtggagctactcccaagttctcgcagaggacaaatttgagtacagagaattaccaagttgtgtgaatgttaatatcaatattccaagtgtactaataataggttgcgacactttttggtgaactttgagagcaagttcaagtattcaaacaacggctattttttttcttgaaaaaaaaattaaaaaaatttaattttaaaaatataat

SEQ ID NO: 217877 - DNA, 420 bp, Gossypium hirsutum
cttgctcaaaggtatgaagaactatacaaagagtacggtgtcaaatttttaaagggtgcttctatcaaaaacttagaagctggtcctgatggacaggtagctgctgttaaacttggagatggatctactgtggaagctgacatggtagttattggtattggagcaaaacctgcagttagtccctttgaagtggtaggattaaataatactgttggtggcatacaggttgatggtctgttccggacaagcgtacctggaatatttgcagtgggagatgttgcagcattcccccttaagatgtatgaccgtgtagcacgagttgaacatgttgatcatgctcgtcgatctgcacagcattgtgttaagtcattacttagtgcacaaactcacacgtatgattatctgccctacttttactcg

SEQ ID NO: 217878 - DNA, 384 bp, Gossypium hirsutum
  unsure (1)..(384): unsure at all n locations
tccgggtcggcccaacccgtccgcccacgcgtccgtttacaacaacaaaaaaaatctttccagtttctattttctaaaaacaaaactgaaaatgtcttgctgcggaggaaactgtggctgcagctctggttgcaagtgtggcaatggctgtggaggatgcaagatgttccctgacataatagagaagactacaactgagactattgttcttggtgtgacaactcagaaaatgaacaacaaagagaagcagagaggcctttgtctttttaactaaataaattctattactttagtatgtatcagcaaatcttcatgaggatttggttcttaattatgtgtaatgtgggcttttctgctatgtcagaatgtattatgatatttnng

SEQ ID NO: 217879 - DNA, 403 bp, Gossypium hirsutum
acaacttcagtttaaagaaaccaaagaattgcttgccaaggaacgtgaggctgccaaaaaggcagtggaggtagtccctataattcaggaggttttggtggtggaccctgtgatgttggagaagcttacaaatgagaatgaaaaactgaagtgagttcgttggaaaagaaaattgatgaaacagagaaaaagtttgaagagacaaacaaaataagtgaagaaaggttgaaacaagctttggatgcagaatcaaaaatagttcaattgaagacttgtatgcacagtcttgaagaaaagatttcagacattgaatttgaaaaccaattttttgaggcagcataccctattaaatttctgaagaatgcttgagaaaggaaaggcagagatgtgtcttattacctac

SEQ ID NO: 217880 - DNA, 420 bp, Gossypium hirsutum
gcatcagagacgccgtatgctgccgatttcacctcttgtctgaagctcaagacggagcagaggttctcatgtctgagatacgtattagcgctgaaaagggtggggaattttttatcgacaccgatagattaatgcggcaagcaccaactcctataccaagtccacaaagcagtggagacttttcagcactaagtccgatctctggtggctttgtaatgagctgcagagtccaaggggaaggtaagaacagcaagccattagtgcaactggccatgcgacacgtgacatgcatagaagatgctgccatcttcatggcccttgcggcagccgttgacttaagcatcgaggcatgcaagcctttccgaagaaagtttaggagaggctcccgaggctctcgccattctttatgaaaaaaaagaa

SEQ ID NO: 217881 - DNA, 438 bp, Gossypium hirsutum
cacgcgtccggcggcttcttcatcaatcgtgacagaatcccgggttactggatatggttccattacttatcccttgtgaaatacccatatgaagcagtcttacaaaatgaatttgaaaacccagcaaagtgcttcgtgagagggattcaaatatttgacaattcaccacttggagcagtccctcccgccatgaaagtgaggttactgcagtcattaagcaacactttgggaatgagaattacaagctcaacctgtatgacaacggggttggatattctgaagcaagaagggattacagatttaagcaaatggaattgcttgttgattacagtggcttggggtttcttgtttcggattttgttttacttctctttgttattgggaagcaaaaacaaaagatcatgaaaaacccggatgattgtttttaacaagtttaag

SEQ ID NO: 217882 - DNA, 412 bp, Gossypium hirsutum
ccaagtcgaagatacaaggtgctggaggagtatcatgcaacctttgttgagacagttcccttcaaaactattgccactttcaccttgttccagacaatatacttgcttgtatgctttggcataacatggatccctctagctggagtcctttttccactgttgatcatgcttcttgtgccagtgaggcaatacttgctccccatgtttttcaaagctgtccatcttcaagaccttgatgctgcagaatttgaggaagcaccgcccattccgtacatggcatttgaagacctggaacttgagggaaggaccactactactatggatggtgcagaaattctggatcaaattatcacgacaagtcgtggagaaatccaccgtatgcagagtcccaatacatcttcagtcttggaaa

SEQ ID NO: 217883 - DNA, 419 bp, Gossypium hirsutum
cccacgcgtccgcatgaattgtttggttgtgatgattttataaaacaggagatggaaaaaaattgcagagcatcatcaggttccaagtcagatggatctggtagacggatgaaggaggttgcttgtcctatctgcaccgttcatttgcaggtccaagttcccagctcaggttctgagacaattgaatgtggggtttgccagcatcctttccttgttagtgcccattgatcttcggtcaccacccaaccttctttaattatgtcaattaatttctccttctattgatttcattattagtcataatttggattagtcttgtgtattccttttcattgttctaacttctaaataaaagactaaaccctgtcaaattttccagttctgtgtatattaagttttctgaatctcgagtcttgtct

SEQ ID NO: 217884 - DNA, 422 bp, Gossypium hirsutum
gacaacccgcttcaagaagaaccgcaagaagcgcggccatgtgagcgccggtcacggtcgtgtcgggaagcacaggaagcaccccgggggtcgcggtaacgctggaggcatgcaccaccacaggatcctcttcgacaagtaccatcctggttatttcggtaaggttggtatgaggtacttccacaggctccgtaacaagttccattgccccatcgtcaacatcgacaagctctggtctcttatcccggaggacgtgaaagccaaggccaccaaggatgccgctccgatgatcgacgtgacacagttcgggtactttaaagtcctcggcaaaggtgttttgccggagaatcaaccggtggtcgtcaaggctaagttggtgtcgaagaccgctgaaaagaaaattaaggagggctgtggtgctg

SEQ ID NO: 217885 - DNA, 331 bp, Gossypium hirsutum
cagaaacaagcacattattattgatcttttttctggcaataacaacaagattaactgttgactcattttcaaacagtagttcatagacatcattgagactgtataccgtggggcaaggaaaggtcgtggtctggtaattgctcctaaagattactcgacaaaataccgttactgagtattcttgcaacctgttgttgatcagaaagatttaatggtcatatttcgcgaattcaatacatactattttccttatgaactgtgtatgtcgttcgcaatgcttgcgtgtacgtgtaggataatccaaatgtgagtataaactttttatattttt

SEQ ID NO: 217886 - DNA, 351 bp, Gossypium hirsutum
gagctgctgaccaagattgacacacaatctgtcatggaactcgagaaggaacccaagatcgtgccgaactgctatgcaagcatggttacaatgattgccaccatacccacggcggttgagactgtgtccgagtacccaccactctgacgttctgttgtacgtgacattcgccataacatgcgcgtcagcgtcattaacagtgtcgtgaagaatgacccaactgatgctccagctaccgcttctgctgccaagaataattgcgagattattggagagattattgtatcaattttcatttcagctttggtcacttatcttgacaatggactttaaatttaccttttgagagac

SEQ ID NO: 217887 - DNA, 168 bp, Gossypium hirsutum
gacgaagaacttgataccttgatcaatggaaccatagctggaggtggtgttatcccgcacagtcacaagtcgcttatcaacaaatcctctaaagagtagtgtatgttaattgggttctcttgtggattttggttgtagccatattaaacttttgaaaatgtttttggg

SEQ ID NO: 217888 - DNA, 417 bp, Gossypium hirsutum
acccttcctacggtagtaaccaatcaggaggaagacaagttacccgctgttcaaacggctcacatcaatctgaaagttaaaggccaggatgggaatgaagtgttctttaggattaaaagaagtactcaactaaagaaacttatgaatgcttattgtgatcggcaatcggtggagttcaactctattgccttccttttcgacggtcgccgtctgcggtgcgagcagactccggatgagttggaaatggaggatggggatgagatagatgcaatgctgcatcaaactggtggtaccatggcctaactagcttctttataggtttacttacctagtaggattcaaatggtagtatttgtgagattaggacctatatgtattaaacctcttgaaactgtgaggtctgctagtgcaatgtcc

SEQ ID NO: 217889 - DNA, 380 bp, Gossypium hirsutum
ttgacgggccggacccacccgcccgggagaaaggatcgatctttatgaagaagctcgtggtaagtatatagtggatgagaatgtgttgaaggtaatgcagagtcatgctgtggtaatgcatcctctcccgaggcttgatgagattaccgtcgatgttgatgccgatccgagagctgcttattttagacaagcaaagaatggtctttatataaggatggctcttttaaaattgttgcttgttggatggtgaggagaagaaggggctatttttggatttattttgggaaatttggcatcttttaattcagcttgattagggtaatcattgtgcttttgagaaactgaagcaaataactaaaaaaaggatcaatttcttaata

SEQ ID NO: 217890 - DNA, 426 bp, Gossypium hirsutum
catggaccaatgctgcaagcggtggcctcatatgatcccgtagttcaggatgctgcggatcatgctgtgaagaccatacaacagagatccaattcccttctgccctacgaacttaaagaaatagttcatgccaacgctgaggtattggaagattttgcaaaactcaacatggttcttaaagtgaagagaggagacaaggaagagaagttcaaggtggaggtacaccataagaacgaagggacttaccatgtgaaccacatggagcaagaccagtcttgaaagctaacggtatggtaaaactgttaaaaagagtttgaatcttaatatgatgatatgactataaaaaagtgtgaaccttgtatcatgtgttcatctttactcctgttgtaaaacctatgtttgtaagaatgttcggagaacatacac

SEQ ID NO: 217891 - DNA, 397 bp, Gossypium hirsutum
tggactcgggtgtgtcagtgttggataaggatatatatcttacacaggtatttttagttgtgtaagttattccttatatttggagggtcttagagagttatatccccacacccatgtacgaatatacattatacatggacacttaaagaaaaaaaaggaagagtcagagatcaacatagcttttacaaacattgcgtttggatcaaaatgctatcgagttttcgattttgttcaggttacatccacgaccagaaagtgacgtggagtacttgcatggcattttggaatcaatcgcccgtatagaggcaaaggcatacatgttgttgaaggatctaggcgcgacccaagtcgatgaagtgttcaccgccggaggcggtgcaaagaacgacaaatggac

SEQ ID NO: 217892 - DNA, 400 bp, Gossypium hirsutum
acgcccacgcgtccgaattgcaaaattcttggcatgtgattgggcaagagataatatgggggttaatattgtcaccccgggggtgatcaaaactccccacactttaccttattttgaaggtaataaagaattattagagacaaccatgagccgaacaccattagctcggttcggaaagccagaggaagtgtcggcgatggtggctttcctgtgcctaccggcagcttcctatgtaacagggcaacttatttgtgttgatggtgggatgacagtgaatggcatctactttccaaagcaaattaggaaacaccatgagccatgttatcggatcaaataatgttatattataatagagttaatatttattgtttaacaaataatacaacgtttaccattcaat

SEQ ID NO: 217893 - DNA, 412 bp, Gossypium hirsutum
caaattactaagagctgtgatcaagtgcttgaccaccccagagcaatatttcgagaaggttctacgtcaagccatcaataagttgggatccgatgaatgggctcttacccgagtcgtcacaactcgtgcagaggtcgacatggtacgtattaaggaggcatatcaacgaagaaacagcatccctctcgaacaagcaattgctaaagatacttcgggtgactatgagaagtttcttcttgccttgatcggagctggagatgcatgaaccgtcttcggtattaagttcctctgtatgaatgtctagtttgccttatccgctatgacttaataatttatgcttggtttttcatcgttttcattatctaaagcattgcttgcttccatgatagaacattcaaaataaaatgattga

SEQ ID NO: 217894 - DNA, 338 bp, Gossypium hirsutum
tatggctaaaccagttctattacatcttcggcttccttttcatagtgttcgttattctaggaatcagttgtgcggagataacaatcgtgctatgctacttccagttgtgcagtgaagactaccattggtggtggagatcttatttgactgctggctcctctgctctttaccttttcctttactcgattttctacttctttaccaagttggagatcacgaagctggtttcaggcatcctttactttgggtacatggtaatttgttcatatgccttctttgtcctaacagggacaatcggattctatgcttgcttctggtttggtcgaaagatctactct

SEQ ID NO: 217895 - DNA, 402 bp, Gossypium hirsutum
gttgataattgggcctttgaggagggccctcattctgactttcctggacctacttccggtagcacagcctgtgttgcagttattagaaataaccaacttatcgttgctaatgccggcgactcacgttgtgtgatatctagaaagggtcaggcatacaatctctctaaagatcacaaacctgatcttgaggtcgagaaagaaaggatcttaaaagctggggggtttatacatgcaggacgtgtcaatggcagtttgaatcttgcaagagcgataggtgacatggaattcaagcagaataaatttttgtctgctgaaaagcaaattgtaactgcaaatccagatataatacaccgtgagctttgtgatgatgatgagttcatggttcctgcatgtgacggaatc

SEQ ID NO: 217896 - DNA, 293 bp, Gossypium hirsutum
tccaaagaagatgatgtccggaagtatgtctacacttaccggaggactttcacagcaaagtgctggcaagaaggtcagtaaagctccaaaaatccagaggctggttactccattgacactccagaggaagcgtggtagaatcgcagaaaagaagaagagaattgccaaggccaagtctgaggcagccgagtaccataagcttctcgccacaaggttgaaggagcagctggagcgccgtattgagaagttagcaaagaggaggtcgaagctctcttctgctgctgctaagcctt

SEQ ID NO: 217897 - DNA, 308 bp, Gossypium hirsutum
gcgtccttctatccttctcacaaccctattttcattttcccaaaaatcaactttatctgcgggccagttcacatgcacatgtaactcctatgactgacctctgctgtcaagaaatacatgggtcttcttgtctaggtgcactttcaccacatagctcgaccttcaaagagggcaacctggaatagaaacaacacactttcccttcgcctctaccgttgatcccctgtaccgtactttgtgattttgttccttctatcttggctttattactattgtaaggtttataataaattttatacgttatattt

SEQ ID NO: 217898 - DNA, 376 bp, Gossypium hirsutum
acagttgctgattactccaatggatctgaaggatacacatataattactatgaagatatgacccgagaaagagttattgagatagttgagatgctaagaaggggagagaagctaccgcctggcactcaaaatccaaaacgaatcaagagcggaccagaaggtggaaataccactttgctaaccgatcccaaacctcctccatgccgtgatcttgatgcctgctaatgttaacatgccaccgcagtctcaaataatgtgaagcttgggtttgccatggcttttttggatgtatgttcttgttgaatttgtgaagctcaaccaatcatatattttgaattttccatgcaatttcaacttggtataagttatgagatga

SEQ ID NO: 217899 - DNA, 371 bp, Gossypium hirsutum
atccaatggctgaaggataagggcttgaatgcctacagcatatcttacggaagttgcttgctgtataatagtatgttccctcggcacagggagcgaatggacaagaaggtggtagatctagcccgggaagtggcaaaggcagaactgcctccgaatagaaagcatcttgatgtggtcgtggcttgtgaggacgacgacgacaatgatgtcgacattcctcaggtttccatctacttcagctaaggcctaaggttgtttttctcatctctcattccctgctgcttggggttgtgatctaaaagcacaaaacttttacagtgttattaaaatggatatttcttttttaaagtaaattcatcgtaacttttaag

SEQ ID NO: 217900 - DNA, 397 bp, Gossypium hirsutum
gtctttagctcctagcagcatgaagattaatgttgttgctccacctgagaggaagtatagggtctggattggcggttctatcttgtcttcccttatcacattccaacaaatgtggatcgccaaggcagagtacgatgaatctggtccatcaattgtccacatgaaatgcttctaaatgttaatcgacatgatcttttttctatcatcatatgtttattttttttgtcggatagtactatcattccttttttagaaagagtttttttatttttgttttaactcttatttttttattattttttttaatagaagttttctttttttttttacttttcatattattattatattctttttttttatctatttatttcatattttttatatttgttatttt

SEQ ID NO: 217901 - DNA, 253 bp, Gossypium hirsutum
aactcaacaaggctcttgctgttgaccccaggattgagatttgcatgctccctgttggtgatggagtgaccctttgccgccgtgtcaaatgaaccaccaccgccgccgccgccgccacagccgcttctaccacccaagattgacaaacttataagtacttcaaaatttcataaatttttttttgtgcaatttcaaatatggtgtaaatttaatttggtatttataaaagcaaagcaatgcccatctaccattt

SEQ ID NO: 217902 - DNA, 374 bp, Gossypium hirsutum
acaaggtcgaagagtactgtttatgcttggtggaattcaaatgcttgcaacacaagtaacaattggagggtttatgacagctttattaggtgatcatggtggattgagcaaggcgagtgcttatgtggttctagttttgatatgtatatacatttctgggtttgggttatcttggggtcccttgggatggttagtccctagtgagatttatccattagagattcgatcagctggccaaagtattacagtagcagtcagttttttcttctgttttcttattggacaaacttttctagctatgctttgccacatgaaggcagggattttcttctttttcggaggatgggtggctctgatgaccctatttatatact

SEQ ID NO: 217903 - DNA, 430 bp, Gossypium hirsutum
gaattccgggtccgccccacccttccgcaggcggcgggttccttttttttttttaccaaagttcatggttttggtcctccttgggctggcctggtccttaaagtctggctttgggggctaataatctgtttccattgttctcatcttcctgctcttataaatgcttaaacatcagaccttatttttttcaggacatggttttgaaggtttcatgagctctgcaaccttcttaggctggagaacgatcgcgttcattcacaattgcatacatttatagctgaaaatggctgatggaatatcaagcttttggggtccagtcacatctacaagcgagtgttgtgagaagaattatgcctactcttcttatgttgcagagttctacaatactatatcgaatatcctcgccattcttttagccttcatcggtctc

SEQ ID NO: 217904 - DNA, 384 bp, Gossypium hirsutum
gcttggagatacagcaagtttggagttcatgaggggaaggaggatcctggagattaatccagatcatccgattattaaagacttgaatgctgcttgcaagaatgcgcctgaaagcagtgaagccaagagagcagttgacttgttgtatgatacagcattgatctccagtggtttttctcccgacagccccgctgagttaggtaacaagatatatgagatgatggcaatggcacttggaggaagatggggtagatatgaggacgatgatgaagtggaagcatcagaagttagtgctgctgaaactgatacgagtgccagtgaagcttcagagaaccaagtgatcgaaccatcggaagtaaggacagagagtgatccttggcaaga

SEQ ID NO: 217905 - DNA, 349 bp, Gossypium hirsutum
cggacgcgtgggggagtccaccctccacttggttctccgtctccgtggcgggatgcaaatgttcgtgaagaccctgactggaaagaccatcaccctggaagttgagagctcagacacgattgataatgttaaggccaagatccaggataaggaaggaattcctccagaccagcagaggctgatttttgctgggaagcaacttgaagatgggaggacccttgcagattacaacatccagaaggagtccaccctccacctggtccttcgcctccgcggcgggatgcaaattttcgtgaagaccctgactggaaagaccatcaccctggaagttgatagctcagacacgatt

SEQ ID NO: 217906 - DNA, 349 bp, Gossypium hirsutum
caaagttctcctttccgaccctgttttccgtccattggttgacaaatatgcagctgatgaggatgcgttctttgctgattacactgaagctcacctgaagctctctgagctaggatttgctgatgcataagctgatgatgattgcaaaaataggaagaagccaacgacacagatgttttaggttttgttttctctctaaagttggcttaaggaatgaatttggggaggtttccgagacaagcttttttcgataattttattctaaactcacattccccatcttcttgttcgtagctggtgcattttcttcttagtggatgctccatagatatgtttggtgaatgcattc

SEQ ID NO: 217907 - DNA, 366 bp, Gossypium hirsutum
gtagaactagagactgtgaatcgcaagaatagggaactggttgacgggataaagcaggtgactatggaagcccagaattgggaccatagagcaaaatacaatgagtcagtcgtcaatgtgttgaagagaaacctggagcaagtaatgtcacagtcacagggtggtgagcagcagggaaaggaaggttttggagaaagtgaagtcgatgatgctgcctcgtatattgaccccaacaacttactcagcattcctgatgttggtggtgccaaatgtgtttccaggaatcgccatggcatgatttgcagagcttgcaacgcaaaagaggtgtccgttttgttgatgccgtgtaagcacctttgcatatgt

SEQ ID NO: 217908 - DNA, 372 bp, Gossypium hirsutum
  unsure (1)..(372): unsure at all n locations
cctgactctaactccaccttccaagttgctagtgtgaacttcacagccaaggcggagaggacacgtatcgcgttctacagtgtgtattacaatacaagaaccgatgacatgagctcactatgtggtccggtggtggacgatgttcgggtgtggtattcatgggcaagtagaaatgaggtccaagtattgttagggcttggactttctttttgggcttaccttttggttttggtttagagttgggtgccttaagtgaagggtagattaatacttgctttagttatgtacggttttaaggctaaaatatccncaagtgcttgtaatgtcatctttccacgttttcgtttgagaaatgaaaatgangttagttgc

SEQ ID NO: 217909 - DNA, 358 bp, Gossypium hirsutum
cttcaccgtgacataaagcctgacaacttcttgatgggcctaggacgcaaggcaaatcaggtgtatgtcattgactacggccttgcaaagaagtatagggatcttcaaactcataagcatatcccatacagagaaaacaagaacctcacaggtacagctcgttatgcgagtgtgaacactcaccttggtattgagcaagccgaagagatgatttggaatcccttggctatgtgcttatgtatttcctaagaggaagccttccctggcaggggctaagagctggcacgaaaaagcaaaaatatgataagattagtgaaaagaaggtatcaactcctatagaggtgctctgcaagtcata

SEQ ID NO: 217910 - DNA, 332 bp, Gossypium hirsutum
gggttttatgtgccttcaaggtggtatctgcttatcaagcatggggaggccggtctcgtgtgagagagccgttgcatggaaagtggtaaatgatgaagaaaatgctcattgtatctgtttcactttcatcaactggtcttttgtatgaaaattctaagagaaaataggatttagatatcaacctagattagaagatgctccctttccatttttttcccaagacttttgtagtttggagaaacctttgatgtgatatgatatcgaatcaaaatggtatggggggcctagatttcggttttaaaaaaaaaaaaaaaaaaaaaatataattaatt

SEQ ID NO: 217911 - DNA, 398 bp, Gossypium hirsutum
agtgatgtagtttttgaaactcttggcagggaacttacaagtgtccaaggtgtatcagactggttggattctgcatatagttatttggcaatggttaattacccgtatccttcaaactttttaatgcctttgccgggacatcccataagagaggtctgcaaaaagattgatgggtctcctgccgggtctagcattctggagcatatattcaatggagtaagcgtatattacaattatactggagaggttgactgttttcaacttgatgacgatcctcatggcatggatgggtggaactggcaagcatgcactgagatggttatgccgatgtctagtgatcgaaacactaacatgtttccagcatatgattgggattactctgctttccgagaagggtg

SEQ ID NO: 217912 - DNA, 407 bp, Gossypium hirsutum
cccacgcgtccgaaaagagcctggtagaagcatttcaaccattgggcatatccgattggaactcccttttttggattgctcatcctggtggtccagcaatattagatcaagtagaagccaaattagcactgaagccagagaagctacgagccacaaggcacgttctttcagagtatggtaacatgtcaagtgcttgtgttctatttattttggatgagatgaggaagaaatcaagggaagatgggcttcagaccacaggagaaggattggagtggggagtgctctttgggtttggacctggcctcactgttgagactgttgtgctccatagtgttgctgcttaaagttaaacaaacatgccttttaaagtaatggtcgtgctccacttggcttgcagttttatcttc

SEQ ID NO: 217913 - DNA, 337 bp, Gossypium hirsutum
gttcatgcgagtgttttatgagaacaaacttcgagaagtgtgtagtgcattctactttcgtaataaaattcaggcaactgctctaatttatttcaagaggttttacctgcaatggtcggtcatggaacatcatccaaaacatataatgttaacctgtgtgtatgccgcctataagatagaagaaaatcatgtgtcagcagaggagcttggtaaggggatttcacaggatcatcaaatgattctcaattacgagatgatagtgtctcatagtctggaatttgatctgattgtttatgcaccctatcgctcatttgaaagttctgtcaatgacatggag

SEQ ID NO: 217914 - DNA, 417 bp, Gossypium hirsutum
  unsure (1)..(417): unsure at all n locations
attcgacggtacgccccacgcgtccgcccacgcgtncgggaagatgacttaaagccaataggcagaatgtcacagggggggtatggtgcatacaatgcttacatttctgctgccactatgtatgctgcagttggtgctcctaccttgtatgaccatcctggccccatgtatggaagaggggagtccagccgagggatgggcaaaaagatatttgttggcagacttcctcaggaggccactgctgatgatctgcgtctgtattttggtagatttggccgtataataaacgtttatgttccttatttcatgtgagagatttgaaattttctttttcttttaatttctttggtggtttgtgagcaaaaagagcaataagtgatgagtcccacttgcatggggtcatttctttattctttt

SEQ ID NO: 217915 - DNA, 308 bp, Gossypium hirsutum
gccacgcgttcgactgaagcttccttgatcaaatacaaaaaccattgaaaacaatttctagtgatattgttagcattgagcttttgttgtaatgagaatggacatggaatcaccgctgcctccttcaccaataggcttcgagggctttgaaaaacgcttggaaatcactttcttcgatccacccgccttcaatgacccaaatggatacggtcttcgagccctatctagagcccaaatcgactcaatcctcgagccagcttgctgcaccattgtttctcagatctcaaattccaacttcgactcgtacg

SEQ ID NO: 217916 - DNA, 387 bp, Gossypium hirsutum
  unsure (1)..(387): unsure at all n locations
ggaatgctgagcaccatagctactggattggctattgatgcttatggtcccatcagtgataatgctggaggcattgctgagatggctggcatgagccacagaattcgagagagaactgatgctcttgatgctgcaggaaacaccactgctgctattggaaagggtttcgccattggttcagcagcccttgtgtcccttgccctctttggtgcctttgtgagccgtgctgctatttcaacagttgatgtattgacccctaaagtttttattgggttgcttgtcggggcaatgcttccttactggttctctgctatgaccatgaagagtgtgggaagtgctgctttgaagatggttgaggaagtgcgtcngcaatttaacacgatccca

SEQ ID NO: 217917 - DNA, 423 bp, Gossypium hirsutum
ggaaatagcaattattgcattgattttggctgtcttgcttggagcttttattttggtaccccgagatggtaaatcagctcataagaacaaggttaaatcgactgttgccaattctaaggcatccaagtcctatagtaaaacagaagttatgctacataataagaggacagattgttggattatcattaaggacaaggtttatgatgttacctcatatgtagaggaacaccctggtggtgatgccatcttggcacatgccggagatgattcaaccgaagggttttatgggccacaacacgcaactcggacgtttgacatgatcgatgacttctacatcggagatcttcagaagtaatctccaagcaactatccactattgggttttgtaaggttagggtgaaaacacttctgagaatatctttc

SEQ ID NO: 217918 - DNA, 434 bp, Gossypium hirsutum
aaaagatcgagaaaaaagacgaggccaaaagagaaaaatacaaaagagaagagaaaatgaggatagaaatagcagaagcttgggatagtcttttacttgctcaagtaataaggggctccgtgttaataacccaatcaattcttagaaaatatattatattaccttcactgataatagttaaaaacattgcccgtatgttattatttcaatttcctgagtggtctgaggatttaacggattggaatcgagaaatgcatgttaaatgcacttataatggtgttcaattatccgaaaccgaatttccaaaaaactggttaacagacggtattcagataaagatcctatttcctttttgcctgaaaccttggcacagatttaaactacaaccctctcataaagatccaatgaaaaaaaagaaaggtcaaaagaatgat

SEQ ID NO: 217919 - DNA, 436 bp, Gossypium hirsutum
cgtttaaatacaggcctggaacttctaaacatgagcattgaggttgaacaaaggcttaggggggtttcattaccatttataattcttcaaggagaagatgataaagtaacagataaaactgtaagccaacaactgtacgatgtggcatcgaattcagacaagacattgaagctatatcctggaatgtggcatggcttgttatatggtgaaacaccagagaacactgaaattgtgttttcagacattatcgactggttaaaccagaagtttgaattaagaaattcaaggttagagagggaattgaagcatcaaaatgatgagatttttatttccaaagacattttctaagcacactcaaaacctatcgtatatctaaatcaatgtaataatggcatccaatttatcacaaattataatataataaatgcaattgcaa

SEQ ID NO: 217920 - DNA, 425 bp, Gossypium hirsutum
aagaaaaataaccacaagatgaagctttttggagagaaaactggacgcaagggtcatttggctgttacaacagaggtttttcaggtcgctccttccctttgcatggttgaacttcgaaaatctggaggggataccctggaatttcacaagttctataataatctctccactggactaaaagatattatttgggatacgacctctgaaggaaaatcgggcgaaaacagtgctgcggcaggctcctcgtaaccgacccgacgacaggtgtttcccaaaatgcgcatttgttgctattcaaaggggaattctttttatttatttatatttttgtgttggtttgaatgcttgtaataaagctgtgtatacttacatacattaatgttttgaaaattgtataatataatttgtttttctttttctttttt

SEQ ID NO: 217921 - DNA, 437 bp, Gossypium hirsutum
ggcaatgtgggagctgaatatgccgtgttcgagcaaggtgcttcagccggaaatgttggaaaagaaaagatagtagagcaaaagacggcaaatcccgtggcattgcttctctcctctgccatgatgttgagacatctccagtttccttcatttgccgatcgactcgaaagtgcagtgaaacgtgtaatctcagagggccagtatcgaactaaagatctcggtgggcaaagcagtacacaggaagttgttgatgccgttattgctaaactagattgattactcgtcttcttcttcactatgggttttccacagtaagattttcttaagttggtatatctcattcttacattttcagaataatatttttttttcgaaatactcgaaaatcaaacttataacaaacaacaaacaactgttgagttgtgaaccattttaca

SEQ ID NO: 217922 - DNA, 426 bp, Gossypium hirsutum
caaaaaccaaattccctttgatacaactttgggaataatattacttggtaagttgtttgatgacccaaatgttaaagttccaaaattacttatgatccggttttcaagacaaaaaaaaaacccacgcgtccgaagatgacaagattattgctgtctgtgccgatgatcctgagtatcgtcactacaatgatatcaaggaactcccacctcaccgcctggctgaaatccgtcgcttctttgaagactataagaagaatgagaacaaagaagttgctgttaatgactttctgcctgcctctactgcatacgaggcaatccaacactccttgaatctctacgcggactacatagtggagagcttgaggcggtaattgtcggttcaccgtgccccgtctatatacaaatatatatattaatatgaatatg

SEQ ID NO: 217923 - DNA, 344 bp, Gossypium hirsutum
cccacgcgtccgcacatatcaagagagccattattgacaagaatgctcgaattggagacaatgtgaagatcataaacagtgaaaacgtgcaagaagcggcaagggaaaccgatggatatttcataaagagtgggattgtgacagtagtcaaggatgccttgattcctagtggaactgtaatctgagaagattgcattatgatacagcaaaccaccattagtgtttctagatagagaaagtaatgcaatagcaaatcacttccactttatcccttatcatgtatattttgagctactgcggtataattatattaataaaatgaaatggagccgataatggccggc

SEQ ID NO: 217924 - DNA, 449 bp, Gossypium hirsutum
ccacccgtccgaaacactgaaaacaatgtgttggagccacccaacaagagtgcacctcagacttcaatgaagaggcctgcgcatcaacaacactcgagcttttcatctccatgggctgttgatgatctgttagaactttcagatattcaatctctaaacaagaaagagcactctgagcttggagagcttgaatggctagcagacatcggtctttttggtgatcaattgccacaggaggctttagcagcagctgaagttcctcaacttccgatatcgcaatcaagcagtacaaacttataccgacctaccaaatattccatggctcttaaaaagcctagaatcgaaaccccggatgaagatgacgagttcttcacagtccctgatctaggttgagttggataacgagactcgtgtgtcagtagttcgaccaaactatagtgtttcatatg

SEQ ID NO: 217925 - DNA, 427 bp, Gossypium hirsutum
ggggattgtcatcaggtaatctatctcaaggttatccggatccgagatttagctatgatggggttcagtcaccgattccttggttagatatgtcaatgtcttgtaatggacaatccgaacatgctgcaaatggtgggttttcatattcaagcaacctttcatctggcaggaatcagaaccttcatcccttccctcatgtcatgaatttgcacaatgtaagaccatcatcgggtgtaggccaaggatatggatacatgtaccctaacaacatggcctacagtcattacagaggtggttcgggttttggatcatatggctatggtgctcgaaagaaaggactaggttggtataatgttggcagcaacaacaagtataggttccaaggttatggaaaagagaatatggatggtttgaatgagctaaacag

SEQ ID NO: 217926 - DNA, 383 bp, Gossypium hirsutum
gctgaggaggaggaggcaccaaaggccaaaccaaagaatcctcttgatttgctgcctgggggtaagatggtactggatgactggaaaaggctttactctaacacaaagaccaatttccgagaggttgcaattaaaggattctgggacatgtatgatcccgagggatactcactgtggttttgtgactacaagtacaatgaggagaatacagtttcatttgtcacaatgaacaaggttggaggattcctgcagagaatggatttggcccgcaagtatgcatttgggaagatgttggtgatcggtgctaaccccccattcaaggtgaaaggactatggcttttccgtgggcaagagattccttaatttgtgattgacgagtgcta

SEQ ID NO: 217927 - DNA, 438 bp, Gossypium hirsutum
ccaactggaagtccggagtaccgccggaaaatcgttctgggatttcaaattgacctaaaagctggttaaaagaagaatggataggctatcgaatgcgttttcgttgctggatattgatgtggacgatcatcatcccccaccggcttcatcatctgcttccaaaccttcaggtaagagcaaaaacaatgggaagggcccaactgaactgaaaccggcattgctttcggaaaactacaagttaccccttgtttggattgacttggaaatgactggtttgaatattgagactgatagaatattggagatagcttgtataattacagatggctatctcaccaaatcattggagggtcctgatctggttatccatcaatctaaagagtgtttagatagaatgggggaatggtgtcaaaatcatcatgcagctagtggattgac

SEQ ID NO: 217928 - DNA, 432 bp, Gossypium hirsutum
  unsure (1)..(432): unsure at all n locations
ccgttgtcaaatcgatccatcctaaatttaagacggttgccggagttgttcggaattcgtttggcagcagttctagtgacagggttcattttagcgacagtattttggcaacttgataattcaccaaaaggggtgcaagaaagactagggtttttcgcattcgcaatgtcgacaacatattacacttgtgccgatgctcttccagtttttctccaagaaaggtacattttcatgagagaaactgcttacaacgcttacaggagattatcatacgtcatatcaaatgctttagtgacgttaccgggcttgattttgctctcgtttgctttctccatgacaacattttgggcagtagggctagacggtggattatcaggattcttattctatttcctaattatgtntgcttcgttttggtccggaagttcattc

SEQ ID NO: 217929 - DNA, 306 bp, Gossypium hirsutum
cccacgcgtccgcaggattcccctagtaacggcgagcgaaccgggaaaagcccagcttgagaatcggtcgccatcggcgtccgaattgtagtctggagaagcgtcctcagcgacggaccgggcccaagtcccctggaaaggggcgccggagagggtgagagccccgtcgtgcccggaccctgtcgcaccaagaggcgctgtctacgagtcgggttgtttggttttgggtcgggcaaatttgggcctgtacagtcatatggaatgggtttgaaaacaaagctaactcgataaaaaccttaagcttat

SEQ ID NO: 217930 - DNA, 451 bp, Gossypium hirsutum
gaaaaaaaagaggcagaaataagtatcaaatgcaattgagattcatacctgtgtttttcttccatcttttcacttaaattttgcttttagaagagaaaaaaagagagccaatttaggctctgagatgtatatgaaattcattgttcttcctctgatgcttgttgctgaaaatcaagttaaattccaagaaagggagtgggaaaaagagagataaacaaagttcctcatctaggtggactccaatggcggcatcggttatgaaagaaggtaaaaaaacggagcccgttgttattgtgaagcttgcggagtgcgattgttgcggtttaacggaagagtgtacgcaagcttacattgctagcgtaagagaaaaattcgaaaggcggtggctttgcgggctttgttcggaggccgttaacgacgagacggttagatcggaggaagatatcacgac

SEQ ID NO: 217931 - DNA, 353 bp, Gossypium hirsutum
ccttccaaaaagggtttgcttcattcaaatcaagagatcttcaatggaagttctttaactgatggttgggttaaaaagtatgcagccgatacttcattattgttcaaggaatttgccaagtctatgatcaagatgggaaacattaaacctctcacaggaaatgctggggaaatcagaatcaactgccggaaagcaaattgaaacatgtttccatacttgcaagaaattttatttaaaaaaaaaaaaaagttatctgtctgttgtttgaagtgagtgattgagatgttcatataatttaaatttgtactatcctttttttttctctcctttttctaataaaatgtttatgcaat

SEQ ID NO: 217932 - DNA, 284 bp, Gossypium hirsutum
cccacgcgtccggatcgatactgggaactatctgcaccatggtggaaaagccagatcaaggtacctgtaaagtttgcaatgggggaccttgatcttgtgtatacaatgcctggtatgaaggattatattcacaacggtgggttcaaaagggatgtgcccttccttgaagaagctcttgtcatcaatggagtttctcattggatccaccaagaaatacctgatcaaatcaatcaattattgttcgacttcttctccaagttccattaaattttaataataataac

SEQ ID NO: 217933 - DNA, 321 bp, Gossypium hirsutum
ccggaactgactgccccgacccacccatccgtccgggtttacccgctgagtttaagcatatcaataagcggcgaaaaaaaaaaaaccaaagcgaggaacttataaaaaatgaaaaagacaaaaaataaaaaaaaaaaaacaataaaaaaaaataaaaaaatatataaaaccgcctgcgattcaaaaagattattcctttccttcaaaaatctctttgcatcaacggagtttctcattccctccaacttaaaaaaccttgttgtaatccaacaatatttcttttagtcattttccaattttcccaaattgctttttttttta

SEQ ID NO: 217934 - DNA, 425 bp, Gossypium hirsutum
cccacgcgtccgattttcggttaaaccgagcgaggctacttatgttaacgcactctcttgttgtgctaatttagaaaagcaaggtgggttttaccaagggaggcagatacatgggtatattttcagaaacgagggcgttatgaatgttttcatgggcacagcattgattgatttttatggaaaaagaggtcatttagagtttgcctttagagtttttaatcaaatgttggatagagaggtttgtacttggaatgcaatgatctcttctcttacatgtaatggtagagaaaaggaggctttggacttgtttgagaagatgaaagaggacggaatgtgtccgaatgaggttacatttgttgctgttctaacagcatgtgctcgcaccaagagagtggaagtgggtttacaattctttcaatcaatgt

SEQ ID NO: 217935 - DNA, 434 bp, Gossypium hirsutum
cccacgcgtccggtgtgccgcaatcaattgagtctgccttggaaaaagctggtctcactgcatctaatattgactggttattgctccatcaggcaaaccagaggattattgatgcagtcgcaacacgtttagaattcccaccagaaaaggtcatatcgaatctggcaaattacggcaacacaagcgcagcatccattcctttggcattggatgaagctgttcgaagtggaaaggtgaagccaggccatacaatcgcggctgcaggtttcggtgcaagtctaacttggggttctgctgttattagatggggctgaaaaaaactgccaaattaaccaagtagaacgaaagacagattccttgcagagagcagcacttgaatccccaactaccttatcggaaaagctcacagataatccggattagcgcctgcataa

SEQ ID NO: 217936 - DNA, 218 bp, Gossypium hirsutum
aaatgtggatctccaaggcagagtacgatgaatcgggtccatcaattgtccacaggaaatgcttctaaatggttttcgacatgagctttgttctatcaacatatgtttattctcttgtcggataaaacgataaagcatcagagaaagagaaatgtttcatcgtgtgtggaccaattctttcaattctttttaatgagaagttggtttttttaccatct

SEQ ID NO: 217937 - DNA, 436 bp, Gossypium hirsutum
taatactctaatactaatagaatagtattctattagtattagattagtattagttagattagagtagtattagttagtgatcccggctcaatgagtcctttcttccgtgattaactgttggcgccagtcctagtcctactaatactaatctaatactaatagaatactaatctaatactctaatactaatagaatagaaaaaatagaatagaaaatactaatataatagaaagaactgtcttttctgtatactttccccggttccgttgctaccgcaggctttacgcaatcgatcggatcatatagatatcccttcaacacaacatatgtcgtcgaaaggatctcggagactcaccaaagcacgaaagccaggatctttcagaaaatggattcctattcgaagagtgcataaccgcatggataagctcacactaac

SEQ ID NO: 217938 - DNA, 306 bp, Gossypium hirsutum
ggattttaagcttaaaaccctaaccctagaattttctttggaactcatcgctggtgctatttgacctcattcacaatgcctcgccgtagctctggaaggtctgcttctcgtcctgcttctgctcgcagccctccacctcaaccagctcatcatgctcctcctccagctcctgctcagagtggaagtggtggatccttgctcggaggcataggctctaccatagctcaaggcatggcttttggtactggaagtgctgtagctcacagggctgtggatgctgtgatgggtcctcgtactattcaacat

SEQ ID NO: 217939 - DNA, 431 bp, Gossypium hirsutum
cccacgcgtacgaccatgtcatatcttaaaggagctgctgaaatgtttgaaaacggagttctagctgttgtggatgtgaagtttttagctgacgttcatattcgagctttcgaagattcatctaccatcggacgatacttttgcttcaatcaaatagtgcatactgaggaagaagctgttaaacttgtagaaaccctgagccctttgttatcttcacagcccaaatatgaatgccaagggagcgaggcctatgctgagaggttgagaaccaagaaattgaacaaactggttgaaggcactgcataattgtgaaacttgattttaccttttttcctatcgattatagcttcttaactttatcagatgatgtatatatatatatatatgtgttctcattgagaaagacgtgctgattttctcatcagcatttt

SEQ ID NO: 217940 - DNA, 314 bp, Gossypium hirsutum
accacgcgttcgatacagggtttggctggcaatttgggtgagagctttaaacacaactgcttaaatcttcctttagtatcttgataagatgtacacttattagtttgtatttagataaaaaaggaattgtatgctgacacgagaaaagttcgagtgacgcgtttgagtatgatatcattaactctgcctaaacgaagcggtcgttatatgacgaaaccaagatctatgcggtgaacttcaagagtcgagcaagaaaactgttgcacgtttaatagctgcacaggattcactggtggagaccgcgagggcgcccg

SEQ ID NO: 217941 - DNA, 254 bp, Gossypium hirsutum
  unsure (1)..(254): unsure at all n locations
cgggtactttaaagtcctcggaaaaggtgttttgccggagaaccaaccggtggtcgtcaaggctaagttggtgtcgaagaccgctgagaagaaaattaaggaggctggtggtgctgttgtgctcaccgcataggttagggttcttggttttattggatctgaatgacatttctgttagattattgttatgtttcgttttttttttgagttaaacttgaaatgagatttttaatatcgtttaattttggatcana

SEQ ID NO: 217942 - DNA, 387 bp, Gossypium hirsutum
tgctgaagaaaccacaaccgggacacttgttcttggcgtggcaccccggaaagtgcactttgatggagctgaaatggaaactggggctgaaaatggctgcaaatgtggagataactgcacttgcaacccttgcaattgtaaatgagaaaaaaaagctcagcatattatggaagctgatctaaataatatatgatgtatttgggtctttactattagaataaagcacctatggttcattaggtgttttgcttcttgtatccatggttgcttggtttgtgtatgtgtgtgtgtatatagtgaaatgaaattattttaactagctttgttgtgttactgccatgttatataactgatgaatgaatgaaggaaagctctatttgccttttg

SEQ ID NO: 217943 - DNA, 307 bp, Gossypium hirsutum
  unsure (1)..(307): unsure at all n locations
gggctataaacgaggggattgagagagagatggtttcagctttggatttagaagaagaatgctacgaacagactttgaatacaaaggatcgcttggaaggcttagcagcatttgctgaaaggcgaaagccaatatataccggggaataagaaagacccagactgttactaaaaaaatggcttcttcataagtttgtttactaataacagttcttactttgttctaaatttggacctttgagaagtctttatgttggatgaactctttaatatcaattaaaatgtcagaaataataatttatatcana

SEQ ID NO: 217944 - DNA, 430 bp, Gossypium hirsutum
ccggaaccttggacttgatcgagaaaaaaattgcaaaggttacaagcattccacagagtcatggagaggcatttaatgttttgcggtatgagatcggacaaaagtatgattctcattacgatgcattcaatccatccgaatatggtccacaatcgagccaaagggttgcgtcattcttgctatatttatccgatgtagaagaaggcggagaaacaatgttcccattcgagaatggcatgagtgtcaaaggctatgactacagacaatgcgtcggtttaaaagtaaagcctcaaagaggggacggacttttgttctattcgctgtttttgaaccgcaccatcgatccgacatcacttcatggaagctgtccagtgatcaaaggtgagaaatgggttgctacaaagtggattagagaccaacaacaatttga

SEQ ID NO: 217945 - DNA, 425 bp, Gossypium hirsutum
  unsure (1)..(425): unsure at all n locations
cggacgcgtggggagtaagggaaacatcggtaaatcctgagatcgtcatgaaattggaatctgcagagacaaaactgcaagatctaaagtcaaacatggcaatattgggaaaagaagctgttgcagcaatgaccgcagttgaagctcaacaacagaggttgacacttgagagacttattagtatggttgaagctgaacgtacatatcatcaacgagtccttcagatacttgatcagcttgatgccgagatgagatccgaacgacaacgaattgaagcacctgctncgccaaatcccaactgcaattccctctattactttcttttctccaccactttctcattctactcctttgaagtacccactcttgttttatctgcggcatactggatctggcttaataaggttttagtcgacttgtgtctt

SEQ ID NO: 217946 - DNA, 356 bp, Gossypium hirsutum
gggaaacaggcactctcggttacatggctccagaggtccttgatgggaagccttataatcggaaatgcgacgtctacagtttcagtatatgcttatgggaaatatactgctgtgacatgccttatgctgatcttagtttcgctgaagtttcatcggcagtagtatgccagaatttacgaccagaaatccctagatgttgcccgagttcattggcaagcatcatgcgaaaatgttgggatgcacaccctgaacgacgccccgacatggacgaggtggtgagattgttagaagcagtggatacaagtaagggaggtggcatgatacctgatgaccaggctcgtggatgtttctggttc

SEQ ID NO: 217947 - DNA, 374 bp, Gossypium hirsutum
ggaaaaagaaaggttctagggtcacaacaattacagaacaagctgatagtagcgccgccgcccaagaagttggtcctgaattggtggctgaaccactcaatgctaagtccaagtccttcgttggtacccacgaatacttagccccagaagtgatatcagggcaaggccatggcagcgctgtagattggtggacacttggggtgtttttgtatgaaatgctgtacgggaggacgcctttcaaaggcgaaaacaatgagaaaacactgattaacatccttaaacagccattaagcttcccgagaatcagtgttaaaagcggcaaagagtttgaagatatggtcaaagttcaagatctcatcaacaagcttgtagtg

SEQ ID NO: 217948 - DNA, 279 bp, Gossypium hirsutum
cccacgcgtccggaaaacttggttcaatcagcctgcaaggaaggctagaagaagaattgcaaggcaaaagaaggccgggaggatcttcccaaggccaactgctggacctctacgccctattgtccatggacagactttgaagtataacatgaaattgaaagctggcaagggtttcacccttgaagagcttaaagctgcgggtatttcaaagaaacttgcacccaccatcggtatatcagttgatcaccgtcgtaagaaccgatctcttgaaagtcttca

SEQ ID NO: 217949 - DNA, 432 bp, Gossypium hirsutum
agagtactttgatccaaagatagcagacgaggagcgtgagaaagggaacgaatgtttcaagcagcagaagtatcccgaggctgtgaagcattatacggaatcattgagaagaaatccgaaagatccaaacgcatacagcaacagagctgcatgctacacaaaattgggtgcattgcccgaggggctgaaagatgctgaaaagtgcattgagcttgacccaaccttttccaaaggttacacaagaaaaggtgctgttcaaatcttcatgaaagagtatgacaaagctttagaaacataccaggaagggttgaaacacgatgccaattaccaggagctgctccatggtgttcgaagatgcgtagaacagatcaacaaagccaatcgaggtgatttgagccccgaagaactgtaggaaaaacaggcttatgcaat

SEQ ID NO: 217950 - DNA, 436 bp, Gossypium hirsutum
  unsure (1)..(436): unsure at all n locations
gaagatttcatacttccttcgaccactctgggaatcgccaccgaaatctttccatgatatcccacattattatcatgagaatgtatcgatggaaaagctctgtaaacttcatggttggggaattcgtgaatttccgagacgggtttatgatgcagttttgtttagcaatgaggtggatatcctaacaatacggtggcaagagttgtacccttacattacacagtttgttcttctcgagtctaattcaacattttcgggaattccaaagcctatggtttttgctagccatcgagatcaattcanatttgttgagccccggttaacttatggcacaattggaggaaggtttaagaaaggagaaaaccctnttattgaggaggctatgcaacgagtagcattagaccagcttctcaaaatagctggaattactgatgac

SEQ ID NO: 217951 - DNA, 384 bp, Gossypium hirsutum
cccacgcgtccgcccacgcgtccgcccacgcgttcggttccgataattaattgaacaaaaaaaaaaaaaaaaaaaaaaaaaaaaaaaaaaaaaaaaaaaaaaaaaaaaaaaaaaaaaaaaaaaaaaaaaaaaaaaaaaaaaaaaaaaaaaaaaaaaaaaaaaaaaaaaaaaaaaaaaaaaaaaaaaaaaaaaaaggggggggccgtttaaaaaaaaaaaagtttacttacgcgtgtttgcaaagaaaaaatttttttatgggggcaccaaaataaaattaatgggcgggggtttaaaaacgggggaattggaaaaacctgggggttaccaaattaaatggctttgaaaaaaatccccttttcgaaagttggggtaaaacaaaaa

SEQ ID NO: 217952 - DNA, 427 bp, Gossypium hirsutum
ggagctggggctggatatggacaagttcatcacacactctgagccttttgccgatataaacaaggcattcgactacatgctccagggtataggtctgagatgcatgattcatttggatgcttaagagagtgttgctgctgtatatttgcccaaccaaggatcaaaactctaatgttttgtcctactatgtgttatatttatgtgcctacttaagctacctttcccggttatcaagagtgcccatatagaactctctctctctaaaaaaaaaaaagagagttctttatatggagttttatattatgtgatgagagaataaatgatcttgtaaaagcttgctttgttaatgaaataaattcctatgactatgattttccaaatacgaaaaaaacccaagcaaatggcggcccactttgatcaataaaat

SEQ ID NO: 217953 - DNA, 413 bp, Gossypium hirsutum
accaaaacaaaatccaaaaataagccaatgtgtaatttttttaactatggcttcaaatcccaaggttttcttcgacatgacgatcggaggtcaaccggccggccggatcgtgatggagcttttcgcagacgtcactcctcgtaccgccgagaacttccgggcactctgtaccggcgagaaaggcgtcggtcgttccggtaaaccactccactacaaacgctctaagttccaccgcgtgatccctgatttcatgtgccaaggaggtgatttcacagccggaaacggaaccggaggtgaatcgatatacgggtctaagttcgccgactagaacttgatcaagaagcacaccggacccggcatactatccatggcgaacgccggtcccggaacgaatggatctcagtgcttatttg

SEQ ID NO: 217954 - DNA, 426 bp, Gossypium hirsutum
gccgctgttgctaccatcaaaactaagcgggcagttcagtttgtagactggtgccctactggttggaagtgcggcatcaactatcagccaccaacggtggtaccagggggtgatcttgctaaagtacaacgtgcagtgtgtatgatcagcaataacaccgctgtggccgaggtttttgctcgaatcgaccacaaatttgatctcatgtatgccaagagagcattcgttcactggtatgtaggtgaaggaatggaggaaggtgaattctcggaagcccgtgaagatcttgctgctctagagaaagactacgaggaagttggggctgaaggtgttgaagacgaaaaagaaccggaagattactagatctgtatttttgaaaagcacaggctaatgattccccacgttcctcatctgattttacttcat

SEQ ID NO: 217955 - DNA, 397 bp, Gossypium hirsutum
tccggcagttgtcgactcaagcgtccggccacgcgtccgcttacatcacacccacggctgaaagttttctttaggacaatctctccaaggcactaccgcaatggagattggaacaccggaggtacttgcaataataccattcccttgactaatggtagtgaggtcttgcaagatggatctaatgacaaagttgtggagagtgctgttaggggcacaaaagtaaagcttttggatataactgcgatttctgaactccgagatgaagctcacatgtctggttacagtattaggccgacacagagtgtcaatgattgcttgcattggtgcctacctggcataccagacacatggaacgaaatccttattgcacagatataggaccttccatgcatatggt

SEQ ID NO: 217956 - DNA, 427 bp, Gossypium hirsutum
cccacgcgtccgacttaatggcggagctcctcttccctccgatgaattaatagatcgccggcgattcttatccaaaaccgtccgttctgttcccgttaatatcccgcttcatcaacgtagtactatcgttttcgattacggtggtgatttagatgaagatcgggaaattgtgccgccgcatgtgatattagaacggagaatcgctgcgaaaacggcgttttcggtttgtacaggtaatggaagaacgcttaaaggaagggatttgagtcaagttcggaattcgattctgaggttgactggatttttggaagtataatatatatatgtttaatttttttcatttctttttttttcatcatttcaaaattcagaaatggattgggagaaaagaatttgattttatatgttatatatataaattattgat

SEQ ID NO: 217957 - DNA, 364 bp, Gossypium hirsutum
  unsure (1)..(364): unsure at all n locations
tattgctagctttcgttacccatttgcttgtttatgttaagaacgcgaaagccaagcgtgtggccatggtttttgcgatttgcgtttctttttgggcggtgcagaaagtgattttcttggacaattggaagactggatatgggattcatggattctggccttccagttggaactgaaggcatcatcttttttgtttttttttttaggctgctataattcgaactatggtttcgattcagttgggaatttgatatcaattttagatgttttaatgtactttgggcaaaatactgagcttatagaacgttaatctgttataagttgacatccatgaaaaatccatttcctaannnanaaannnnaa

SEQ ID NO: 217958 - DNA, 349 bp, Gossypium hirsutum
acgaaatgcttcaaattccttggagcaatatgctcctccacattaagtgcgaagagcttgaatggttttaccgatttcattctcaacaaatgccttgaagctagtaaatgcactaaatgcttctaatttctgctgtaagaactaaactaatgtttttcggcaataatcatgaatgaaaggaatgaaatattttgttacctcctttaagctgatataattcgaactatggtttcgattcaaatgggaatttgatatcaattttagatgttttaatgtactttgggcaaaatactgagcttatagaacgttaatctgttataagttgacatacatgaaaaatccatttcct

SEQ ID NO: 217959 - DNA, 297 bp, Gossypium hirsutum
aaaaaaaatccgtagtttctttaaggcacctctgctatcttcgttgattttgactttctcgggcgattgctttatcgattggaacctgggttttggaagtcttaagtaatggcaagtgagtttggggaatcagcgagccattcgccccaaaatccatcttgctctagtaacaatggtaatggtgatgctggtaactttgagtgcaatatctgctttgaattagctcaagatcccatcgttactttatgcgggcatcttttctgcttgcccttgttgtacaaattgcttcatattcat

SEQ ID NO: 217960 - DNA, 427 bp, Gossypium hirsutum
cgattactctaaacagaactcggggccgttgagatccaccgttgacgccgtcgagcatgccgttaccactgccgtcggtcccgcctacgggaaatttaaggatgttcctgatcattttcttggatttcttgataacaaggtagatgaggtttcacacaaatttgacgagcatgctccagcaccagccaagcaagtggttaacctggcccacgatttggtccaaaaggcaacccaaaaggctcagaaactagtagaggaggctcgaaccaatggagcacgaggggctttgcactacgctgcagctgagtacaagaacttggtgttggtaagctcgaccaagttgtgggttaaactgaacagcaacttgactttcaactcagtgacagaaaaggttgttcccaaagcagctaatttgtgtgagaaatac

SEQ ID NO: 217961 - DNA, 422 bp, Gossypium hirsutum
cccacgcgtccgcccacgcgtccgcccacgcgtccggccaagtcatgaagtttagaaatgggtatctcaagggttgaagtttgtttgtagaacattatgtacacttactagcctgccaacttttttttttcctataaaaaaaacccttatctgtgcaacaataggtgcattaagtcataaaaagtaatgaaaccataatactctaatcactattttgaatgtaggggggaagttgcatataaaagatgtgtgttgaagtgatggatgcatgcatttttcccaaatgtggaccagaggatgtggaaatgcatgagccttgggagggaaaggccaccgaccaatgtccacgtcccaatatatatttatatgatattaaaatagtcgtacgtcggaatacatgtatgttggtctaatttaattta

SEQ ID NO: 217962 - DNA, 352 bp, Gossypium hirsutum
gtggaatcgagtttgatccaattgaatctactacagcttgtaaaggcatttttggtcccggagccgcccctaaaaatcctggcaaggtctttactgatcgaaaaactgtcgagaatttcagtgctcatggaaataacgggcgcaagttcttacttcccgcaatttggaaccctacaacttctacctggtggactattacttcacgctatttttctacttgaaacatctttcatcttgtttaaaaaaactcctttttcaacttatgccaaaattaactttttataaaccaaacctaatttgtatataatattgtcttctataaaatcatcacattataaagattagatgtgat

SEQ ID NO: 217963 - DNA, 404 bp, Gossypium hirsutum
  unsure (1)..(404): unsure at all n locations
gttctgaggttgagaggtggaattattgagccttctttgatggctttggctcgcaaatacaaccaagacaagatgatttgccgcaagtgttatgctcgtctgcatccaagagccgtgaactgccgcaagaagaagtgtggtcacagcaatcagttgaggccgaagaagaagatcaagtagacactggctggtgttatcctgtctgctttaaaagaaattgaatgtcagaccaggaaaatatttccattgagttcttttgctattatattattttgctgagattttgtttgtgggttctggatctgatgttccaatgtatttttggacaatcttatgtgtnttgtcttggaattttgataacgaggtggaaattntaagtaatgctagttttagaaatattattt

SEQ ID NO: 217964 - DNA, 311 bp, Gossypium hirsutum
cccacgcgtccgcccacgcgtccgcccacgcgtccgcaagcccaatggctaaacctgaatttggttcaatagtatggggcaatgctcaaaaccaagttaaaagcccagtttccttctcatggtcattgatgtgagagtgtcccacagtttatatataattctgggtattctttccctcaatgaacctcacacaggacaagaaatctggtgcaaaaagggaccctcatccatggccgaaacctttttcattttgtggtttgtaatatttgtttacatttggatttaagttaatgatggtataaaaatgatca

SEQ ID NO: 217965 - DNA, 394 bp, Gossypium hirsutum
  unsure (1)..(394): unsure at all n locations
ggattttaagcttaaaaccctaaccctagaattttctttggaactcatcgctggtgctatttgacctcattcacaatgcctcgccgtagctctggaaggtctgcttctcgtcctgcttctgctcgcagccctccacctcaaccagctcatcatgctcctcctccagctcctgctcagagtggaagtggtggatccttgctcggaggcataggctctaccatagctcaaggcatggcttttggtactggaagtgctgtanctcacagggctgtggatgctgtgatgggtcctcgtactattcaacatgaaaccgtggtttccgaggctgcatctgcccctgcaccagcaactactttccataagttagctggcactgattcatgcaacatncact

SEQ ID NO: 217966 - DNA, 298 bp, Gossypium hirsutum
gggaaacaggcactctcggttacatggctccagaggtccttgatgggaagccttataatcggagaggcgacgtctacagtttcagtatatgcttatgggaaatatactgctgtgacatgccttatgctgatcttagtttcgctgaagtttcatcggcagtagtatgccagaatttacgaccagaaatccctagatgttgcccgagttcattggcaagcatcatgcgaaaatgttgggatgcacaccctgaactacgccccgacatggacgaggtggtgagattgttagaagcagtgga

SEQ ID NO: 217967 - DNA, 402 bp, Gossypium hirsutum
gttttcgatttttgtattaagagtcgccctttggtgtttttctaattcaatcagtgaggtgaagaaaaatgtcttgctgtggtggaaactgcggttgcggctccggttgcaagtgcggcggcggcggcggctgcggttgcggcggttgcaagatgtaccctgagatgaactttgctgagcaaaccacaactgagacacttgttcttggcgtggcaccccggaaagtgaactttgatggagctgaaatggaaactggggctgaaaatggctgcaaatgtggagataactgcacttgcaacccttgcaattgtaaatgaggggaaaaaaaaaaccgaagcatattatggaagctgatctaaataatatatgatgtatttgggtttttattattagaataaagca

SEQ ID NO: 217968 - DNA, 373 bp, Gossypium hirsutum
  unsure (1)..(373): unsure at all n locations
gcccgatgtcatattcttgaaggtggatgcggatgacttgaagaccgtgactcgagattttgccgaggaggcattgcctacttttatctttatgaaacatggcaaaatagttgacaaagttttgggggcaaggaaagatgaattgcagcagataataaccttacatatgttgaaagcatgaatcaacttcaattactcttcgaattctgcaagttgtttctgaaactagaacttaacttatagatcttatacatatctgtctctcagntgcgncaaattagaaaggcttttaacaagaacaaaaacgagcggctggtatgcgtgaagtttttgactactgaagatatcctactttatggaacaaggcttatat

SEQ ID NO: 217969 - DNA, 382 bp, Gossypium hirsutum
  unsure (1)..(382): unsure at all n locations
ttatgatgtttcatcttaatttcaaaggtggaggtaaagttggaaagcgagctgttgaacatggttactcttcagttcttgctgcacttgtactgcaacttggcagttgtcatggtctggctacctctggtcgacatgaaccactacgtgcacttttaactgcatttaaggcattttgtgaatgtgttggagatcttggaatgggcaagattttggctagagacagtgagcataatgaanagtggattaatcttattggagatttagctgattgcatttccatgaagagaccaaaagagccatgcttccaataatgtgttagatgggctgaacatgtttgatggaactgatggtcattacttccacacggggtcaaggggtc

SEQ ID NO: 217970 - DNA, 420 bp, Gossypium hirsutum
gcttgagatggctcgtcaagcacagatgaattcccagcacacacaatctcttaccgagataagttggggcaaccagatacgtacttatgtccttaatccttatcgcttggtgaaggatctgaggaccaattatgaggtctctgatcccgattctgtgctagagggagatctagacagcttcatcttgagctatttatctgcttcattggacaaaggtgaaggtgaacaataagattagctgcaatgcaaaagatcttgtcggaatattacatctacgcatggcttgcaagctactaggcagctgtggcaacacagtcatgcacgagctttgcattgtcacatctaagatatgatgtaatagctgattctacagagccattggacctttgtgtattgtatattcattacaaggactaaagg

SEQ ID NO: 217971 - DNA, 368 bp, Gossypium hirsutum
cccacgcgtccgtttctatttagttttctcttcctccaattaagatgcagatcttcgttaagaccctgaccggcaagaccatcaccctcgaagtcgagagttccgacacgatcgacaacgttaaggcgaaaatccaagacaaggaagggatcccaccagaccaacaacgtctcatcttcgccggaaaacagctcgaagatggccggaccttggccgattacaacatccagaaggagtccaccctccatctcgtcctccgtctacgtggtggcatgcagatcttcgtcaaaaccctgaccggcaagaccataactttggaagtcgaaagctctgacaccattgacaacgtcaaggccaagatccaagac

SEQ ID NO: 217972 - DNA, 358 bp, Gossypium hirsutum
acgcaattgctcaagctaaggaaaatccactgcctgaatcttctgagctcttcacaaatgtgtacgcaaaaggtttgggtgttgagtcatttggagcagataggaaagaagtaagagctatacttacataaattgggactttgctggaacgtcttcattctgttgtttagctttaccaccctcaaccttggaagaaagaagaataatgaactaacagagggtaacgagctcttccaagattcaaatatgactcatcatgggtatttgtacagagtacttattatttttcatacaaatgacgggcagaattgctccatagaaattgtcggttaacccgaccatggttttacactattat

SEQ ID NO: 217973 - DNA, 411 bp, Gossypium hirsutum
tcggatttggggacattctctttcctggtttgcttattacatttacatacagatttgatagagaaagcaaaaagagtatgggcagaagttcctgaactggttgtggacacggaaagagaaggagatagccattgttacccatagtgggttcttgtttcatacattaagtgcacttggaaatgattgtcatccattggtgaagaaagagatctgcaaacactttgcaaattgcgagcttcgttccatggtcattgttgatagaagtatgataggatttgacccttcgatgaccaattaccctggaaagactccatcaggattggatctcccaagtgatgttgtcgatgagaaggctgactaaaggacgtgatacaaattgtcctctgagcattatgtttcatgcttgtgatg

SEQ ID NO: 217974 - DNA, 423 bp, Gossypium hirsutum
gcgaccagcactctctgtacatggctattgtggtgcttgctgggcagcctcataatcggtaatgcgacgtctacagcttcagtatatgcttattggaaagatactgctgtgtcatgccttatgctgatcttagtttcgctgaaggttcatcggcagtagtatgccagaatttacgaccagaaatccctagatgttgcccgagttcattggcaagcatcatgcgaaaatgttgggatgcacaccctgaacgacgccccgacatggacgaggtggtgagattgttagaagcagtggatacaagtaagggaggtggcatgatacctgatgaccaggctcgcggatgtttctgtttcacttgccttggtccgtgacacttaatgttgtcctacatgcttttagtttgagagagacagacagtatttg

SEQ ID NO: 217975 - DNA, 407 bp, Gossypium hirsutum
atcagggtgactttcttcgcttgatcaatgaacctgctgaaggtggagagggaaacattttggggcaattagctgaggcgatgccacaagctgtgcaagtcacacctgaggaacgtgaagccatagaacggcttgaagcaatggggtttgaccgtgcaactgtgctccaagtgttctttgcttgcaacaagaatgaggaacttgcagccaactaccttttagatcatatgcatgattttcaggattgagttggtaaaagaaatggcttggggaagtacaatatcattttctctttcgttctttgggggtccattgtcattcatgttccccctcccctccccccaaaactttaccgactttattcttaatcaagtgatgtaagtgtttggtgtagagacaagggatgt

SEQ ID NO: 217976 - DNA, 415 bp, Gossypium hirsutum
cccacgcgttcgcccacgcgtccgcggacgcgtgggtgagaaatcaagttggaaacctgcccgaccccaaaccccagaggaggatcacccgcctttctaaggcgctcccccaaccaagcatttggagtatcatcattgttgtagtctaaatattgccaagttttgggagacagaaaaagagatgcagaaacagataaatgtgttgaaagttagtctggtctcattcctaacagagtcagaaaccagaaatgaagtgtattcatatttggatatgggatgaggttgtattgacactaactattcagaagaaaaatgtctgaaatctgacataaacccttacttgtgtacccataggtccaaaaattttgactgtgttttgcctttctccaatacaaataggggggaaaaggagaaa

SEQ ID NO: 217977 - DNA, 354 bp, Gossypium hirsutum
gcgaatcataattaaatttatgtatcattgctataaatgtaaattgtttgacatgcagagatgctcttgatgctttgggattggttcggtactgctgtaagagaatgcttatgactcatgttgacctcattgagaagcttctgaactacaacacattggagaagtcggagaccagttgaggaaacatgttaaattttagggtttggtgcaatttggttgagatgcctgtcaatgattctcaattttgtttaagtggggccgtgtttgaatccagaagaagggaaggaaaggacttaaatagtactagtctagtttgttttctttagctctatgatggatcgctgtatgtacgaa

SEQ ID NO: 217978 - DNA, 414 bp, Gossypium hirsutum
ctgaaattgggtgcttgtgtggatctgctgggagggttggtgcacattggactaggtgacccggttgtgaaccaatgttgtccggttctttcaggactcgccgagctcgaagctgcggtctgcttgtgcaccaccctcaaacttaaggttctcaaccttaaaatttatgtgccactggctcttcaactccttgtcacatgtgggaaaacaccccctcctggttacacttgctctctctaaaaccaagttgctaggttgatggactctatatgatggaatggacatgagaggatgtcgagcttttctctttgtttcttagttggattggaaatctgatgcagtttttattgtaaaaccaattattttttttcttttaaaagattgttgcaacttgcaagtgtgtttctgtatctt

SEQ ID NO: 217979 - DNA, 418 bp, Gossypium hirsutum
ccaaaaggaaggcttgagaagaagaagaatgatgaagagactgaagaatgggtgtgtagaatgcttgcattttgtgcaattatcttcaaatgatcatccctagaagttgcattttcatttttctgtcttcataaaattgtgcagtgggttcaatgtgacaaatgtgaggcttggcagcatcaaatttgtgctttatttaatggtcgaaggaatgacggtgggcaagctgaatatacttgccccaattgctatataactgaggtcgaaagaggagagcgaaagcccttacctcagagtgctgtccttggggccaaagatttgccaagaacaatccttagtgaccacatagagcagcgattatttaggagactgaaacaggaaagacaagagagggcaagggttcaaggaaaaagttatg

SEQ ID NO: 217980 - DNA, 396 bp, Gossypium hirsutum
cccacgcgtccgcgacgatgtcaaggaattgttttctgaggtcggtgatctaaaacgatttacaatccattacgataggagtggaagatcgaagggaacagcagaagttgtcttctctcgccgaacagatgctctggctgcagtcaagagatacaacaatgttcagctcgatgggaagccaatgaaaattgagattgttggagcaaacgtttctactactgctgcaccttcagctgctaatggcacctttggaaattcaaatggagcccctagaggtggccaaggcaggtgtgttgggttcggcaggcaacgtggtggtgttggaaagccgtgctctggaagaggccatggacgaggaaagggccgcggagaaaaggtttctacagaagatcttga

SEQ ID NO: 217981 - DNA, 411 bp, Gossypium hirsutum
gtcagatactaagagtgccaagctatccgtgaaatccaaagctggaaagaaatcggggaaggctgccaaggatccaaacaagccaaagaggcctgctagtgccttcttcgttttcatggaggagttccgtgagcaatacaagaaggatcaccctaaaaacaaatccgttgccgctgtcggcaaagctggtggagataaatggaagagcttgtctgaagctgaaaaagcaccttatgtagccaaggcagaaaagcgaaaggtcgagtatgaaaagaacatgaaggcctacaataagagacaggctgagggtcctaaagacgaagatgttgagtctgacaaatcagtgtctgaggtgaatgatgaggatgatgatgaagaaggcagcggagacgaagaagatgatgagtagga

SEQ ID NO: 217982 - DNA, 415 bp, Gossypium hirsutum
cgagtttagctgcaaaatatgcaaaggtagttttcttaaaagtggatatagacgagggtagggatgtggcagcgcgatggaacattagcagtgttcctaccttcttctttataagaaatggaaaggaagttgataaggtagttggggctgataaaaatacacttgaaagtaagattgcccaatatgcaagctgattttgagcctatgcctatgaatgaaaggaagttagtctccagctacttgtaatgcccctttccttgcatatgcatgtgaaacatatcaataatgaaaagacttggcaatatcttaggaaaactgtaccatatgttttattaaactgacctgctgggggatggggttttttttaattagaaaaaaaagaagaagaaattctggtgctatatccagtcttcta

SEQ ID NO: 217983 - DNA, 402 bp, Gossypium hirsutum
gatttgaacaaggacattttgacgaggaatgaatatgatctggaaaagtcttgttattatctttgtggggtggcttaatgggatccgatacttgaggagttgcaagaaatgggtttctgtgatgcttaaaccaacaagaagcttcttaaaaagaaccaccggagccttaaaggaggtggcaatgaacctgttaacaggagaaggtgttaaattattaattatggatgatggctcttggtttctaagcattttattatattaattaattagtgtgcgcattttaaccgtgtctttattaaatagctgccttttaatttctagtcttctgaagtatgcaggggctaaaaaaaagagctgtaaacgtttcttgttaattgactttgagcctaaaggctataacta

SEQ ID NO: 217984 - DNA, 417 bp, Gossypium hirsutum
cggacgcgtgggttcaagtccatccaaactcctatgcattggttatcagcatggagaacattaccctgaactggtacttcgggaatgatcgttcgaaacttgtatcaaactgcttattcaggatgggaggggctgcaatactgctctctaacaaatggtccgacaaaagaagatccaaatatcaattggttcatactgttcgcactcacaagggttaagatgataaatgcttttcctgtgttacacaggaagaagactccatagggaagattggtgttacattgtcgaaggatctcatggcagttgctggtgatgccttaaagaccaacattaccacattggggcctctggttcttccaatgtctgagcagcttcttttctttggtacattggttggtaagaagctgttcaaaatga

SEQ ID NO: 217985 - DNA, 412 bp, Gossypium hirsutum
gctagtagtttttccggcagcggtaccatctccgagaggccgcctaaggtgttagcagcacccgaatccgaggcaattctaaccgtatggaaaaaatccttgctcttcaactgcaatggcttcacagtgtttggtagtaaaggtgatttggtgttcagggtagataattacatggacggtaacaagggtgagatccttctcatggatgccactggcaaccctatccttaccatccgccgcaagaaaatgagcctgggagatagctggttggtatacaaaggcgaaagtacctcaacgaatcccctactttgtgtgaggaaatcgatgaacatcttaaacaacaagtgcttggcttacgttatccgcggcgacaacactagcaaccgaagcaataacgtcgtatacgagatcg

SEQ ID NO: 217986 - DNA, 366 bp, Gossypium hirsutum
ggaccaaggagtctgacatgtgtgcgagtcaacgggctagaaagtaaaggctccagcaaagaagacagtcgctgtcaagaagccgaagagtgttaaatctccggctaagaaagcggcgccaaagaaggcaaagaagtgaatcgaaaggagtgtttgtttgtaggaggttgttcttttttatttttgttccttcctttttttcctttgcagatggtgtaaatttgatggcgaggtaggggtagtcgtggaatttagatccatatatgtagtatgtattgattatataaagcagtgtacgggttttattaaaaatattattttattttttttttttattttattatttttaatatatttctttttttt

SEQ ID NO: 217987 - DNA, 385 bp, Gossypium hirsutum
gccacgcgttcgcccacacgtccgggccatccatttactggaatctgtatatccaatgccaccattgaactaacaaaaaagccaaagaagattcaatggaattgcactgaaattgctggggtttcaagcgatgttactcctaaaccctgcaatctgcttaaggatctaagatcccaaaatacctgtaatgttcccgaggacgacttaccaattgtgaaattttaaatgtaaatgtgctctcttatagaatttgacaaaatgaagaaagatatcgatacttctctgtatgaaataatatctataatctatatataatataaatatataggttaaattatactatgcttaagctgtaatataagtgacatttgaaatttgaaaattt

SEQ ID NO: 217988 - DNA, 422 bp, Gossypium hirsutum
aaaatgtccaagcaagctggatggggtgtgatggccagccaccgcagtggtgaaacggaggatacttttattgctgatctttcagtcggtttggccacgggccaaattaagaccggagctccatgcaggtctgagcgtttagccaagtacaatcagcttctgcgaattgaggaggagcttggtgcggaagctgtctatgctggagccagcttccgtgctccagttgcaccctattaagatgcttgtttagatgataatttgctgagactggatgcgtgcggcagagcttcagtggtttattgtgaccctaaaacatgtttcaataattttgatagcaattttgtacttgttcagaattatatcaatctccgtgttatttttgttggactttgcctgcatatatgctcgctattttcataaat

SEQ ID NO: 217989 - DNA, 413 bp, Gossypium hirsutum
  unsure (1)..(413): unsure at all n locations
aacttttacaagatttcttcaatgggaaggagctttgcaagagcatcaaccctgatgaggccgttgcatgtggtgctgcagtccaagctgctatattgagtggtgaaagtaatgagaaagtgcaagatctcttgctcttggatgtcactccattgtcttccggtttggaaaccgctggtggtgttatgaccgttttgattccaaagaacaccaccattccaaccaaaaaagaacaagtcttnttaacctactccgacaaccaacctggtgtgttgatccaagtttacgaaagtgaaagaacaaggaccagagacaacaacttgctcggtaaatttgagctctctggcatccctcctgctcctagaagtgtcccacagatcactgtctgctttgatatcgatgctaatggtatc

SEQ ID NO: 217990 - DNA, 417 bp, Gossypium hirsutum
cccacgcgtccgcccacgcgtccgcccacgcgtccgcccacgcgtccgtgatggatcagtagttgtttcagataacttgaagcttataaaagaaagctgtgctaaatcatttgcaccatttccacctgggtgtatgttccacagtgagcaaggattgacgagttttgagcatccgaggagcaaaatgaaggcaatgccaagaattgacagtgaaggggtgatgtgtggtgccaatttcatggccgatgctcagtcgagaacaagtaggatgccccgagttggtagcgaagccaattgggcactgcgaggctccaaagcttgaataattcaatactaaatgacccacattttattatgttttttttttttttttgttgggggggggggttatttccctcgttatgaaatcgtaaaatg

SEQ ID NO: 217991 - DNA, 410 bp, Gossypium hirsutum
cccacgcgtccgcccacgcgtccggattttcaatggtggcaagctcttgtctttgtctttagacagggtttcagggtctggttttcaatctaagaaagagtatttgtttggaaggatcgatatgcaactcaagcttgttgctggcaactcagctggcactgtcactgcttattatctgtcatctcaagggccaacccatgagatagactttgaattcttagggaatctgagcggtgacccttacattttacacaccaatgtctttacacaaggcaaaggcaacagagaacaacagttctatctttggtttgaccctacaagaaacttccacacctattccatcatttggaaaccccaacacatcattttcttggtggataacacccccattagagtcttcaaaaatgctg

SEQ ID NO: 217992 - DNA, 139 bp, Gossypium hirsutum
gtggagcgaggccttaaacaagcggcttggaactaagggtcttgatctttctgatatactggtggaaatcgaaaagcgtggttcctcgtttgatcaactgctgaccgttcctgaacaagatgattggatatatagtgat

SEQ ID NO: 217993 - DNA, 419 bp, Gossypium hirsutum
gtcaagcgtggccttaaacaagcggtttataactaaagagcaacctctttctaattatctgaggggaatcgaaaagcgttgttccttcatacctcaacctcatacccaatctaaacaagattgctggttgtataatgatgggaagtcaacctcatgccttgcgtttgtcctcgaaatgtacaaggaggcaagactttttgatcccattgctgactctattcaagtcaccgaagttacgataaaaaatgcgtatactctaaggtttttcgagaataattctagccggctgccaaagtggtgcaatgatgcagacaatgtaaagcttccttactgtcagattctggggaagtaccgaatggaactgcctggatttaattccatggacccatacccccatatgaatgaacggtgtccgtcta

SEQ ID NO: 217994 - DNA, 424 bp, Gossypium hirsutum
cccacgcgtccgcagaaatcgaagcttgccaatggccaacagtaatctccctcgaagaatcatcaaggaaactcagcgtctcctcagtgaacctgctccgggaattagtgcttcaccatcagaggataatatgcgatatttcaatgtgatgatccttggtcccacacagtctccatatgaaggaggggttttcaagttggaactttttttgcctgaagaatatcccatggccgctcccaaggttcgatttcttacaaagatatatcatcctaacattgataagcttgggagaatatgccttgatattctcaaggacaaatggagtccagctctgcagatccgaactgtacttttaagcatccaggcactcttgagtgctccaaatccagatgatccactctccgagaatattgctaagcactgg

SEQ ID NO: 217995 - DNA, 299 bp, Gossypium hirsutum
cggacgcgtggggttttcataccatgggtgacagtcagtattcattttctctcacaactttcagtccttcgggaaagctagttcagatcgagcatgccttgacggcggtcggttcgggtcaaacatctcttggaatcaaagctgctaatggggttgtaattgctaccgagaagaagttgccttcaatcttggttgatgaaacttctgttcagaaaatacagtgtctgactccaaatattggagttgtttacagtggcatgggtcctgattttcgagttttggttcggaaagtaggaagc

SEQ ID NO: 217996 - DNA, 392 bp, Gossypium hirsutum
  unsure (1)..(392): unsure at all n locations
aaaggaaccaagaattcgaggtttacagcatcgaaacaacttgcagcatcgatgtttcggattggttgatgatgaatgtaagagaagaagattacgttgtaatgaaagcagaagctgaagtggtggagaatatgaaccttctgaaagacccgaccctgatacagattatgccagagctcaggaggcccgtcgtttcatgatctatgttcatgctaaaatgatgattgttgatgatgaatacataataattgggtctgccaacatcaaccagcgatccatggatggtgctagagactctgaaatagccatgggagcctatcaaccatatcatntatcattaagggaaccagcacgaggtgaggtccatggtttccgtttgtcactgtggtatg

SEQ ID NO: 217997 - DNA, 360 bp, Gossypium hirsutum
gcaacctatgcgccacacactgctgggaggtgcgtcagataagcgtactagaaaggctcattgccccattgcagacaggcttacaaactcattgatgacgcatggacacaacaatggagagaaactgatggcagacatgattgtgaagcatgctatggaaattatttatctactgactgatcagaacccaattcaaggcatcggtgatgccattatcaacagtggacctagtgaagatgctactcgtattggatctgcttgcgtagtgaggcgtcgacgctggagatatttctgctcttcgtcgagagaatcacgccatctatctactcaccactggtgctcgtgagtctgcattgaaaa

SEQ ID NO: 217998 - DNA, 282 bp, Gossypium hirsutum
aaatctaaggatttgcgggtggggaaaacgagagcccatctctctgcttcaaagctcctgtccaggtagaattctcttcttcccttgcgttgtgttctttcctgttcaatcgccatggcttcaaagcggattttgaaagaactcaaggatttgcagaaagatccacccacttcttgcagtgctggtccagtagctgaagacatgtttcattggcaagcaacaatcatgggaccctcagatagcccttatgctggaggtgtgtgtttagttactatccatttc

SEQ ID NO: 217999 - DNA, 224 bp, Gossypium hirsutum
catggatctgggagatattccgagcatatgatgcctgaagttgaaaaagaccattttcgaaaaggctcacacgtgggtcttcatgaaacggcagcatgctataatagttatggctgacagcctatattacactaaatttaagtgttactgcaagccaaatatggaagggcgcaattgctatgcagatgagcattacttgccacacttttttcaatatgattgat

SEQ ID NO: 218000 - DNA, 428 bp, Gossypium hirsutum
ggagatattccgagcatgtgatgcctgaagatgaaaaggaccatggcctaaaaggctcacagtggttctacatgacgcggcagcatgctataatagttatggctgacagcctatattacactaagtttaggtattactgcaagccaaatatgggagggcgcaattgctatgcagatgagcattacttgccaacttttttcaatatgattgatcctggtggaatagcaaaccggtcagtaacatatgtggattggtctgaacggaagtggcatcctaaatcatttaaggccgaagatattacattgaagttcctcgagaaccttacaaccattgacgacatagtccatttcacaagtgatgaaaagagaatgcttacaggaccatgcatgtggaatggaataaagagaccttgttatttattcgcaaga

SEQ ID NO: 218001 - DNA, 299 bp, Gossypium hirsutum
gataaatttgccaagtactatcgtgccctatgttcgggagaatggatagatcgatggaacgagcaaagggagaacggtacttttccaggtcctctgtaagacggtacttttcgggaaatccagtgaagttgtcaaatgagaaacggcattttcaggaaataagaaattttggcatgtacccgttttgactggatcatgattgataaaatggagttatatatagcctacgttacataggttcaagtgttggatattgatatctgtccgacaccaataaatttaatttctttttgttttaa

SEQ ID NO: 218002 - DNA, 179 bp, Gossypium hirsutum
cagggatggagggtcctcgagcttctgagcatggtcaactggttgtagttgatcatcactgtccacagggaccagcctcacatgaatggggatggcttgctcgaatcgctgccttgcttgtgggtgaagatccaacacaatcttatgctctcatatgtggcaactgccatatgcacaat

SEQ ID NO: 218003 - DNA, 389 bp, Gossypium hirsutum
gagctcttgaacatatgggactcaagcactgaaagaaatgatccagaattgtgtggcacaagatttttcatggaagggaccatcaaggttgtgggagaagatgttgttgagcctcggggtggctggcagtgaacctggcattgaaagagaggaggttgctcctcttgccaaggaaaatgttgccacaccctgagcataatcagaaggcaactatggataaagcttagtaacctgttttcttagacaaccaagtccaagtacctgtctactctcgatagccattggcttgaccggcggaaaacaaactgacctgccatacgtgaagtcagtagtgctatttttgagggtgaaaagtcaggagatagtatgatatatatccatagttatag

SEQ ID NO: 218004 - DNA, 436 bp, Gossypium hirsutum
gtattcagaacaggtgcaagttggttgcggtaattgcagaagttgatcgaatcctgaggccagaagggaagctgattgtacgagacaaagccgaaacgataagcgcagtggagagcatggctaaatctctacaatgggagatccgaatgatttattcgaaagacggtgaaggattgctttgtgttcgcaagaaattctggcgtcccaccgtggaagaacctataaagtctgccattgtttgaacacgatgctaaacattactcgtgtgttttccacaattaggcataatattttacagattctttttcgattcacaagcatgttatagtctgtaatccattttcgcaagtgtaaaattatgtagtcgactacgttagaatgaatcataatttttgtatcaattttccttgatggaattaaaatagctactttcatt

SEQ ID NO: 218005 - DNA, 369 bp, Gossypium hirsutum
ctttacatccccagaaaatgttcggccactaataggctggtcaccttggagggtcatgcttctggtcaaattaatggtgggcatttggatgagcttggcagatacactggaactttctccacttttgctctttgtggttttgtccgtgcccagggtgatgctgacagtgcacttgacaggctttggcagaagaagaaagctgaagtccgacagcagtagtgggagttggattgctttttactacttgcttggtctctgaattttggagggaaaatgtgttttttttttttaaatcagtgacctttaagttctatcttggtttttttaaaatggattatgttgaatttgatctgatgatgtttcgtacct

SEQ ID NO: 218006 - DNA, 295 bp, Gossypium hirsutum
cggtttttgggctctttgacggacacaatggatctgcagctgctatttacacgaaagagaatcttcttaacaatgttctaagtgccattccggcagatcttaatagagatgaatgggttgctgcccttccgagagctttggttgcaggttttgttaaaacagataaagattttcaacagagagcaaaaacgtcaggaactactgtaacctttgtgatattagaaggatgggttgtaacagtggcatctgttggtgattcccgctgtatatttgaatcagctgaaggtggaatata

SEQ ID NO: 218007 - DNA, 377 bp, Gossypium hirsutum
cccacgcgtccgcccacgcgttcgaaacctttcacttctcaactctctcaaattcaccatgtctgacaagtgcggcaactgcgactgctctgacaagagccagtgcgtgaagaaaggaaacagcatggtcattgagactgaaaagagctacatcagcactgtagtggtcgaggctgtggcagaaaacgatggcaagtgcaagtgtggagatagctgcagctgcacaaactgcacatgtggaactcattaagcagacatagaaccatgatgttttagtccatagaactattaggacctaaaactaatgaaatttgatttgataaaatggtggtttggtggtggtggttgagacaattgatggggtttcaaggctggct

SEQ ID NO: 218008 - DNA, 433 bp, Gossypium hirsutum
ccttcttcatcatttccaaattttgatgattttcctctttttttattttatttttatttaaaatttgaaactgctaacattattacattttcattagccttaagagaagaaaaaaaaaatgtcatcgatttcaatgtctggttcatggacagccaagcaaaacaaagatttcgaaagggctttagctgtttacgacaaggacacaccagatcgttggtacaatgttgctaaagctgtgggagagaaaactgttgaggaagtgaagaagcactatgagcttcttcttgaagatgttagacgcatcgagtcgggtcgggttcctttccccgactattggaccgttaccgggaatcgtcaagcatgaaaaattacgaaggtcaaatgaagaagaaaaaatggtggacttgcatggatctcacccttatatatgtct

SEQ ID NO: 218009 - DNA, 431 bp, Gossypium hirsutum
gccagccgtttcacacactcaagaagagcgagagctcgtaaatcatggcggaacagaccgaaaaagcttttttgaagcaacccaaagtgtttttgagctcgaagaaaggtgggaaagggaagaggccaggaaagggtgggaatcgcttctggaaaagcattggattgggcttcaagactccccgtgaagctattgaaggaacctacatcgataagaaatgccccttcactggcactgtttcaatccggggtcgtatcttagccggtacttgccacagtgccaagatggtcaggacaatcattgttcgacggaactaccttcatcatatcaagaaataccaaaggtatgagaagcgccattcaaacatccccgcacatatttcaccatgcttccgtgtgaaggaaggggatcatgtcattattgggcaatgc

SEQ ID NO: 218010 - DNA, 346 bp, Gossypium hirsutum
  unsure (1)..(346): unsure at all n locations
ggttttgctccagaaatccctgaggatctgtaccacctgattagaaagcggtagccatcagaaagcacctcgagcggaacaggaaagacaaggattccaagtttaggttaatcttggttgagagcagaattcaccgtcttgcccgttattacaaaaagacaaagaagctaccaccagtgtggaaatatgaatctaccactgccagcactcttgtggcttagaagtggcacagtttgaaccatcttccaagcgcttgcagtgacattctcctggatgcanggctaaacttttggtatttatgcttttaaaatttaaaagactagttcatttgtggtttgaaaatgag

SEQ ID NO: 218011 - DNA, 440 bp, Gossypium hirsutum
ccctgttcagctaaatctcaaccagaattacaattacttgagccagcctgagcaggaatacttcgataccatgggtttcgtagaagagaagccactggtcaatcagtttgcatatgtggaccctgttcctacgtctatagatgctggatttaatcaatcagataatgcccccttgtacttcaattcggaccagggaagtaactccatcaattgttccgactatggctggggagaacagggtgccagaactcctgaaatatcatccattcttgaagcttctgtagtgggtgaagagtttcttgaggatgctaaccctagcaagaagctgaaaccaagttctgacaatcttatgcatgctgaagagaactccgcaaagaccttgtcggacgagctgttggctttggacaaccagatgaaatacttccaaatgccaccattta

SEQ ID NO: 218012 - DNA, 400 bp, Gossypium hirsutum
aaggcacacacataaagagaaacatgtttgagaatggccaccactaagacaacccttttgcttgctgttttgtgtcttttcctagtttgcgagattgggatgctaatggttgaagcccaagtccaaaggccagaatgcgaggggaagtgtgcatcaaggtgcagcaagtcatggaagccgaagatgtgccttaaaacatgcaacgcttgctgcaacacctgcgatgggtgtgtgccccctggccctactgctaacaaggaagtatgcccttgctatgccaagtacaagaatggcaagtgcccttgaatcacttctttctattttctaaacacgcatccgctcatggattcattctaaattatcacttgtatttatgagagggtctcttgtgtacttcaat

SEQ ID NO: 218013 - DNA, 336 bp, Gossypium hirsutum
gatcgtgatccacactttcagtggtattttgtttaagatcgatctggccaaggggtgtgaagtgaatttgatcgaggttgttggaggctcattagccttcggtgatggtctagatctaatatctccgacaaagctcgtcgtcgcctggaacccttcggggagattggtggagagctctgacggatgggagacggtttccgtggtggcaaaatttaaggggcccatccatcggttgtcaacggcggcgactgagaatgatgggaaggtttatcttaaccatttggttgggatggtgtacccgcagaaaacacatgcccttgttgaggcagctttttg

SEQ ID NO: 218014 - DNA, 306 bp, Gossypium hirsutum
  unsure (1)..(306): unsure at all n locations
ggtaaggtagccgtttttgctttcagaaaatctaccgcagtttgcaatttaaaagatggtgagaggtaacgttttgaataatccctcaaaacatgtacaatgccgagaaaaaggggcaacgacangtcatgatcaggcctttcctncaaagtgatcatttaagttctttttggtcatgcagaagcatggttatatnggagagnttgagtatgtcgatgatcacagatctggaaaaattgtggttgaattgaaccgaaggctgaacaagtgtggggtgattagccctcgtttcgatgtcggagttaa

SEQ ID NO: 218015 - DNA, 120 bp, Gossypium hirsutum
ctcaccccgatgctctcaaggcagctttggctgagttcatctcaaccttgatcttcgttttcgctggatcgggctcaagaatggcttttaacaagttgaccgacaacggagcaacaaccc

SEQ ID NO: 218016 - DNA, 330 bp, Gossypium hirsutum
  unsure (1)..(330): unsure at all n locations
tacttggctgagttaagactggcgatgacaggaaatctgctgccgagaataccctcactgcctataaatctgctcaggacattgcagtagctgagctagccccaactcatcctatccgtttaggattggctctgaacttttctgtcttctactatgagatcttgaactctcctgatcgtgcttgcagtcttgcgaaacaggcttttgatgaagccattgcagagctggatactcttggagaggattcatacaaggatagcactttgataatgcaacttctccgtgataacctcactttgtggacctcanacatgcaggatgatgggactg

SEQ ID NO: 218017 - DNA, 315 bp, Gossypium hirsutum
  unsure (1)..(315): unsure at all n locations
nnnaatttgtggattatattcaattgatgaatttccagcctgaaaatttttgccagcaggattgttttggtgggtcacaggattaggtgaactaaggatcaaactgtattcatttgtattaatttatgaacagatagctataaactatgcttccaaagtttaatgatgattgaattaatcttattttttgttttaaggtttgcatattcaaaanncaaacaaacttgcaaaacaagctttttataaaaaccattgcaaaactggatactcttggaaaggattcatacaaggatagcacttttataatgcaacttt

SEQ ID NO: 218018 - DNA, 237 bp, Gossypium hirsutum
tctttatctccatcttttgtactcttcgctcttttgccattatagtaaaattgtctttgcccttcgttttttaaacccaacaaaactataaaaataaataagacataataaatatatgaactggtccctactaatcctgtccccaacggatggggtcgggacgaacacagtctacctctatggggaactgcaactctcctcatcgtgcttgcagtcttgctaaacaagcttttgatg

SEQ ID NO: 218019 - DNA, 438 bp, Gossypium hirsutum
gttgctctccagaaagagctagaaagtgttgtcggaaggaatagaatggtagaagagtcggacctaccgaaacttgcctatttggatatggtcataaaagagagtttcaggttgcatcccgtggcgccgttattagtcccgcacgagtcaaccgaagatgtcaccgttaatgggtatttcatacctaagaagtcgcggcttttggtgaacacttggtccatggggcgaaatcccaagatatggtcgagcaatgccgaagagttctttccagaaagattcaaggataggaagatagaccttcgagggcatgatttcgaactcattccgttcggaaccggtcgtagaggatgtcccggaatgcagttagctctaatcagcatgcgtcttattttagctcaattagcccattgctttgattgggagttgcctgatgggatg

SEQ ID NO: 218020 - DNA, 443 bp, Gossypium hirsutum
ccgttctaagatggagatatccgacttaaatgacttcgggtccgaaatcattcctgctgctgtcatggagcatgatgtccaggcatatattttcaaagactactgggaagatatcggaacgatcagatcattttacgaagccaatttggccctcactgaagagtttccgagatttgagttttatgatccaaagacacctttctatacatctccccgttacttaccaccaaccaaaatcgacaaatgcaggattaaagatgcaataatctcccatggatgcttcttacgagaatgcagtgtccaacactcgatagttggtgaacgctcgcgtttggactatggtgttgagcttcaggacacggtaatgttgggagcagactattaccaaactgaatccgaaattgcttctctattggcagagggtaaagtcccgatcggaattg

SEQ ID NO: 218021 - DNA, 443 bp, Gossypium hirsutum
  unsure (1)..(443): unsure at all n locations
nnaaaaaaggtgaagatatcttacagctttgcgataatggcgagaagtgtttgcgtttggtttgccttggctgcaattgtatgctctttatcggccatttctgctgaagaaagcagtgagtcgaaagaattcgttttgactttggatcactctaattttactgacactgttagcaagcacgatttcattgtcgtcgaattttacgctccttggtgcgggcactgtaagcatcttgctcccgagtatgagaaagcaatcattatgcatgaactagtagttactatataatattagcttcaagtaaataatcctgagagaactgattgttaagattgccttgtttgaagcagcatatatatatatatatatgcttgcttacaaggtttgtctctcagagtccttctctttgtactcttttcagcttaatgtatgaactgtctact

SEQ ID NO: 218022 - DNA, 418 bp, Gossypium hirsutum
cccacgcgtccgcccacgcgtccgtggaaaggggcgccggagagggtgagagccccgtcgtgcccggaccctgtcgcaccaagaggcgctgtctacgagtcgggttgtttgggaatgcagccctaatcgggcggtaaattccgtccaaggctaaatacgggcgagagaccgatagcgaacaagtaccgcgagggaaagatgaaaaggactttgaaaagagagtcaaagagtgcttgaaattgtcgggaggaagcgtaaaatggcatagtggaccgcgatgatgtttagaaagcaacatagacccaaattttctttaaagatgcagcaaaagctgctaaaaataattaaaacaatgaaaattataattaaagccacatccatagtttttggtaattatgtcttgcagtaatttactttt

SEQ ID NO: 218023 - DNA, 329 bp, Gossypium hirsutum
gcgcgatccatgccaagcgtgtcacaattatgcccaaggacatccagttggctcgtaagatcaggggagagcgtgcttaatttccagaagtgtggatcagtcgcttagaagaaactattgtttatttttaggcaaatgtattggttttttggtttttctaatcatcttttaagccattatggtagtggtaggttcaatgtgatgtggataataaatggggcgtcttgtattgtaatggacaataaactatgtctggtataagcctggttaaaatgggttttgcttaaatcgaaagtgcttttgcccaacagagtggcttttggtggttt

SEQ ID NO: 218024 - DNA, 257 bp, Gossypium hirsutum
ggcattctctgatcgaatattcaagtctccattgcttgaacttttggctaaagacggaagaaatgggaaaaacaacgggaaaggatactatatttatgagaagggaagcaaaccaaagcctgatccttctgtattgtctattatcgaggaatctagacggcttaccaatattatgcccggtggaaagcctaattccgttactgatagaaaagttctggagatgatactcttcccagtagttaatgaggcatgccgag

SEQ ID NO: 218025 - DNA, 425 bp, Gossypium hirsutum
ccaagaatacacttcatgctttcttcatacgctccagtcatctctgctgagaaggcttaccatgagcagctatcagttgctgaaatcaccaatagtgcctttgagccctcatctatgatggccaagtgtgatcctcgccatggcaagtatatggcttgctgtttgatgtaccgtggtgatgttgtgcccaaggatgtcaatgctgctgttgccaccatcaagaccaagagaactattcagttcgttgactggtgcccaactggattcaagtgtggtatcaactaccagccacccactgtcgttcctggtggtgatcttgctaaggtccagagagccgtttgcatgatttccaactcaaccagcgttgctgaggtgttctcccgcattgaccacaagtttgatctcatgtatgccaagcgtgcctt

SEQ ID NO: 218026 - DNA, 436 bp, Gossypium hirsutum
  unsure (1)..(436): unsure at all n locations
gatcatcaaaacctaaacacgatcctttgatttccgaaatatgtggagaaggctacttacttcacagttcaaatatctggcaacacttccatgccgatccgcctctaaaacggcgccgcttccattcaaatctcacatttctccttccccttctgcttccctcctcgttcgccatttctccgccgagtcagcggatactgctgtgaagaagagagttgaggatgtaatgcctatcgctacaggtcatgaacgagaggagcttgagtctgagcttcanggaaagaaaatccttgaagatgtaaacaaccctgttggtccttttggcacaaaggaagctcctgctgttgtcaagtcctactatgacaagagaatagttggatgcccaggatgtgaaggcgaggatgagcatgatgttgtctggttttggctggagaaa

SEQ ID NO: 218027 - DNA, 387 bp, Gossypium hirsutum
ctctcaaattcaccatggctgacaagtgcggcaactgcgactgctctgacaagagccagtgtgtgaagaaaggaaacgccttggtcattgagactgagaaaagctacatcagcactgtagtggtcgaggctgtggcagagaacgatggcaagtgcaagtgtggaactagctgcagctgcacaaactgcacatgtggcaatcattaagcagacatatatagaactgcacgatgttttagtccataattaaattaagttgaataattggtggcgtgttgcatgtttgtctccgcctcattgtataccatgatagaatggccatgtctatggactttgtctgattaatgaatgattattagcacaaaaaaaaaaaaaaaaaaaaaaattg

SEQ ID NO: 218028 - DNA, 262 bp, Gossypium hirsutum
cggacgcgtgggcggacgcgtgggcggacgcgtgggctgttccaggagaagccattgagaagcctgaagcaagagatttgcaacctgaaaaagctgaggttgataatggagaagagaaaacagataattcaggtgttgaaataaaattggaacctgcatccacaggtaggggtaatttatcattttccgatctactccaacaatctacagaaaagaaagtggagatggctgaacgtgtgattgaagagagggaacttacagt

SEQ ID NO: 218029 - DNA, 400 bp, Gossypium hirsutum
gcgtgaggaggactacccttacaccggcactgatcgagggacctgcaaatttgacaacaccaacgttgctgccaaggtggccaacttcagtgttgtttctttagatgaagatcaaatcgctgctaatcttttcaagaatggtcctcttgcagtggctatcaatgcggtgttcatgcagacctacattgggggagtttctcgcccatatatctgctctaaacgccttgaccatggagtattgttggtggggtatggttcagctggttatgctccagttcgcatgaaagataaaccgtcctggattatcaagaattcatggggtgaaaactggggagagaatgggttctataagatctgcacgggtcgtaatattcgtcgagtatattccatggtttcaact

SEQ ID NO: 218030 - DNA, 406 bp, Gossypium hirsutum
cccacgcgtccgtagagattaagcaatggctggagaaagggccttgttcaagttccttaagcctgggcaacgtctacagcccgccgacgttcaagctgccgccatgtggggcgtcgctgccactaccggcgctctttggctcattcagccttttgattggttgaagaagacctttctggagaaaccagagtcggattagaagcaaatgggacatcttgcaactcattgcggttttgtttatcgggtttgctgatgaacaaatcatggaaagaataaaaataataatgtagtaagtgtaattttttgtggtttattgttaagagaacaagcctctttgcttttggtatcaattactgggaagttttgaacctttcaccttcagtttgaactggtggctcatttctac

SEQ ID NO: 218031 - DNA, 315 bp, Gossypium hirsutum
gccgccgctgatgtcgagttccggtgcttcgtcggagggctcgcatgggccaccgacgaccgggccctcgaagaagccttcagtgcgtttggtgaaatcgtcgaatcgaagatcattaatgatcgtgagactggaagatcccgaggctttggattcgttactttccgtgacgagaaagctatgagggacgcgatcgaaggaatgaacgggcaaaatcttgatggaaggaacattaccgtcaacgaagcccaatcgcgcaaaaatggaagcggtggccgaggattttgaagaagaaacggtggttacagcccccgt

SEQ ID NO: 218032 - DNA, 313 bp, Gossypium hirsutum
cccaactccacaacgccaaattcaagtttaccaaccttattgtttatttgttcgagaattagagagtttttttgaatacccatggcttcgaagcggattaataaggggttgaaagatctgcagaaggacccttctgcatcttgcaatgctggccctgttggtgatgatatgttccactggcaagcaacaattatgggcccagcagacagtccttttgctggaagactatttcttggttccattcactttcccccaaactatccattcaagccctgcaagggttctttccgaacaaaggtttttcattccaaca

SEQ ID NO: 218033 - DNA, 417 bp, Gossypium hirsutum
cccacgcgtccggggaaacatggaaagccttcgtggactaaacggctcttacttgatgaaaacttcttgtgctcaaaaatccgggaagaagcagatgagttgtgccgaatgctggaggagaaaaaggacagttcatgcattgcctcaaaaatggcagatgtgatctaccatgctatggttttgctaaggcgcaaagatgtaaagatagaaaatgttctagaagttcttcggcgaagattctctcaatcgggtatagaggagaagcaaagccgtgcatcaaccgagagttaaatgtaagctgtacttttgctaaggtctagatttgcagcttttatcccatgcttaggttgttttcaataaattcgaaataacctatatctgtcataattactagttttttgcttttattttcgaagt

SEQ ID NO: 218034 - DNA, 402 bp, Gossypium hirsutum
cccacgcgtccgcccacgcgtccggtttgctgcagctaataccaaacctagtttattacgaaaactggacagtgattgatggggatcacatcgagcttgcagatgagacaaagattttcctgagagagaaggggcatgagctgcgggccaagtcaagtggggctatcgtccagtttgttgttcaagccctccagaaagacatagaaaggggccgaaaatttggaaaagattcatatatatttcatggaacattaactgctgttagtgaccctagaaaagatggaaagccagcagccgtctgaataagttgagaagcattcaagcaataagccgttaaagaaaattaaaatgcaaagctttgtattcccttttcttttgtttaaagtgcaatgtatagaaatg

SEQ ID NO: 218035 - DNA, 339 bp, Gossypium hirsutum
gcgaatcataattaaatttatgtatcattgctataaatgtaaattgtttgacatgcagagatgctcttgatgctttgggattggttcggtactgctgtaggagaatgcttatgactcatgttgacctcattgagaagcttctgaactacaacacattggagaagtcggagaccagttgaggaaacatgtagaatctaagggtttgttgcagtttgtttgagtgcctgtcaatgattctcagttttgtttaagtggggccgtgtttgaatccagaagaagggaaggaaaagacttaaatagtactagtctagattgttttctttagctctatgatggatc

SEQ ID NO: 218036 - DNA, 405 bp, Gossypium hirsutum
ctcaatgcagagccgcgtcttaaatacatcgccgtctccgccgctccttgcggccattgccgccagtttttccaagagctccgcggtgctcccgatgtcaagatgctcataacttcctccgatgatgaaaaggaaaacaaaataagcaacacttgtaatgataaagaccaagaatttacccctttgtctcattttttacctcacaggttcggccccgatgatttgctaggaaaagatgctcctctcctcctcgagcctcgccggaacggcttgtcgtttacctccgacggctgcgagaacgacgagttaaaacacgcggctctcgatgccgcgaacatgtcgtacgcaccttacagcgggtgtccatccggagtggcgttgatagacgttgaaaggaagatatac

SEQ ID NO: 218037 - DNA, 416 bp, Gossypium hirsutum
aagaaaaagagaaacctaagcctgaagcgaagatagaaaagccggcgccgatcacggtggtgctaaaagttcacatgcattgtgaagcttgtgctcaggaaataaaaaaacgtattcaaagaatgaaaggggtggaatcagccgaaccagatctgaagagttcagaggtgacggtgaaaggagtgttcgaaccaccgaagctggtggcgtacgtttataagagaaccgggaagcacgcgctgataatgaaggaagaggcgacggagaccgacaagaaagaaggagaagaaaaagaaaaggccaaagatggcaacaaggaagagaaaaaaggtgaggaaaaagaaggcggtgaggaagtaaagaaagaagccggtggtgaagaagacaacaaagacaaaaaagatgaaggtgatcaa

SEQ ID NO: 218038 - DNA, 249 bp, Gossypium hirsutum
ggaaatccataggaaacaagtaggtttcatctctttttaattttcataatggcagggactggagtgttttcagacatattggatggagatgtttacaagtactatgctgatggtgaatggaagaagtcttcttctggaaaaactgttgcaattatcaaccccagcaccagaaaaactcagtataaggttcaagcttgtacacaagaagaggtgaacaaggttatggaatcagcaaaaactgcacaaaaa

SEQ ID NO: 218039 - DNA, 371 bp, Gossypium hirsutum
cccacgcgtccgcccacgcgtccgcccacgcgtccggaccgactggacctgcagtatcacaatgttcgaatgtgaagcctaaagttagtggcaaacaaaatccagctgcatgttcttcccctatcccagcaaaacctaccccgaccgcttaatcaatagcagaggtataatgttttttgaagacgttgtaactcttataattatatttatttcgcaaaataaatttggtttttttatattctatgttataaagaatatttttcataaacttaattattttttaaaaaaaaaaaggaaggaaaaccttgttgaaaaaactggaaccctttttgaatttggttgaagaaaaacaaaaaaaaaaaatcccgccg

SEQ ID NO: 218040 - DNA, 268 bp, Gossypium hirsutum
gaattctttgggatgtaataatggatgctgttcagtggtctggaaagaaccagcagcagaatgccaattcagctttacgacaggtcaaaacatgggcaaagctgttaaattcgttctgcagcagtggaaaacttgaactggagcttatgtataaggttcagatgcaatgctatgaggatgcaaaattgatgaagctattcccggagattgtgaagtctctctatgaccaggatgtccttgcggaaacacgatctttactggttccgaa

SEQ ID NO: 218041 - DNA, 408 bp, Gossypium hirsutum
cccacgcgtccgagaagatgctgctgcactaataaaggaaagtgggactgaaaagcccattgttgccttcattgctggacttactgctcctccaggacggcgtatgggtcatgcaggagctatagtatcagggggcaagggtactgcacaggacaaaatcaagactctaagggaagctggagtgacagttgctgaatctcctgcaaagattggtgtagcaatgcatgatgttttcaagcaaagaggcctcctgaattaacacccttttttttttcctagaaaaaggaaaactttttttcctgaataagtttcaggtggacatttttcatataattccattgtttttcttttgtccaaaattatttttatactaaaaaatgagggaaaaatcttatacctcagtcaatg

SEQ ID NO: 218042 - DNA, 411 bp, Gossypium hirsutum
cccacgcgtccggtgaaccgaattcgatctataaagttacaattcgaccaccgagcggcacggtggttacggttgaaccggaacagcttgtatttagaagagttggccaaaaactcaacttccttgtaagggttcaaaccatggcagtgaagctctcccctggtggcactagcatgcaagctggttcaatagtttggagtgatgggaagcatgaagttactagtcccttaactgtgaccatgcagcaacctatataactctgtctgtatgttaaattgttagtgtttttgagatttaggattttcggtcaccttgttttttatatagggctttattaagaattttctgtgtaacgaaattatgctggcgtttttctatatcaaaaaaactggtggagttggcttgtaatgc

SEQ ID NO: 218043 - DNA, 369 bp, Gossypium hirsutum
catgaagaaagctaaagagattaccgttctttgtgatgctaaagtttctcttatcatctttgctagttctgggaagatgcatgaatattgcagcccttctactaagttgattgatattttggaccaatatcagaaaacttctgggaaaaagttatgggatgctaaacatgagaatctcagcaatgaaatagatagaatcaagaaagagaatgatagcatgcagattgagctcaggcatttgaaaagggaggatatcacatctttgccttacaaggagcttattgctttagaagatgccctcgagaattgccttacctgtgtccctgccaaacagattgatgttcttgatattgcaaagaaaaataccaa

SEQ ID NO: 218044 - DNA, 370 bp, Gossypium hirsutum
tcctgtcccgagagcaatacctgctgctgcatatacgagtactataactactgctttgctgggggatgctgaccactcgaggctgccacttgctgcgaagatcgctacagctgctgccctcatgactaccctgtgtgcaacatacatgaaggcacctgcttgatgagcaagggcaatcctttggcaatgaaggcactgaagcgcactccggctaaaccgttctgggcacattgaaagcctgggatagtaatgcagtagatgatgggttacaagggagaagatgaaagcttgacagtgcttaacaatcttcttgggtttaatatcggtagatggatggggacaattatgtatatagaatcctatttattac

SEQ ID NO: 218045 - DNA, 410 bp, Gossypium hirsutum
gttggggttttggttggttcctgcaagacatgtgaatgctgcgagcaggatctggagaactactgccctcgtataatatttacctacaactcttacaatccagacgggacaaaaaattatggtggttattcggatatgattgtggttgaccagcgctatgtgctacggtttcctgataacttgccactggatgcgggtgcaccattgttatgtgcagggatcacagtgtacagccctatgaagtattatggaatgaccgaggcaggcaagcatctaggtgtttctggacttggtgggcttggtcatgttgctgtgaagatcggtaaggcctttggattgaaagtcactgccattagtagctccccacagaaggagtctgaagcaatcaatagacttggtgctgactcatt

SEQ ID NO: 218046 - DNA, 358 bp, Gossypium hirsutum
gccacgcgtccgttgattctaagaataaatttaccttgcgtgatcaatagtaatggagagagccaccctcgcgaatgatgcactcataaccatgttctatgcctctacttaaggcatgctataggtcgtcttcaggccgtgcttcaaagtgatcagtgagttgcctttggtgaatcataaccgtggttatattggagagcttgacaatgtcgatgatcacagatctgtaaaaattgtggttgaattgaactgaaggatgaacaactgtggggtgattatgcctcgatgcgatgtctgagtttaacagagtgaatggtggactgctaagctactttctttcagacagttcgggatacat

SEQ ID NO: 218047 - DNA, 420 bp, Gossypium hirsutum
cccacgcgtccgcaatttgggcacaatctatgtggattgtggtaaactggatcaagctgcaacctgctatatgaatgcccttgaaatcaagcacacgagagctcaccaagggttagcacgcgtatactttttaagaaatcagcggaaagctgcatacgacgagatgtccaaactaatagagaaggcacataataatgcctcagcatatgaaaagcgatctgaatattgcgatcgtgagacagcaaagaatgatctcaacatggcaacgaaactggatccacttagaacttatccatacagatacagggctgctgtgttaatggatgaccaaaaggaaaccgaagcagttgaagagctttcaaaagccatagctttcaagcctgacttgcaaatgctgcatcttcgagcggcattttacga

SEQ ID NO: 218048 - DNA, 392 bp, Gossypium hirsutum
cttcttcttcatcatcaatatcatcatgttgagctactttgcttttccattggccccttgaaagcgtcataagacagaaagcgatatcttcttcagttgtagtgtcagagagggaactcgccggttcaagttcatcccaagtccgtctggatcgtttctgagttgggtacttggacgactcggtctcactttctttgctttgaacaacaactgagtctgcatcaaacaaatttatgatctacataccgaatgcttctctttgggtgctctctaagaccataaaactgccctttttcttccgaggaagacgatgaatatgaatgtgaagcagattcttgttcaacgttgggaggaattggaagattcaacatgttagacctcaattgagtttc

SEQ ID NO: 218049 - DNA, 379 bp, Gossypium hirsutum
cccacgcgtccgcccacgcgtccggtctggagttacatgctgcttgcggttccctggtcagctcaactccgatctcaggaaacttgccgtgaatctcatcccctttcctcgtcttcactttttcatggtgggttttgctccactcacttctaggggatctcaacagtaccgagctctaacagtacctgagctcacccagcaaatgtgggacgcaaagaacatgatgtgtgctgctgatcctcgtcacggtcgatacttgactgcatctgctatgttccgtggtaaaatgagcaccaaggaagtggatgagcagatgttgaatgtccagaacaagaactcctcatactttgttgagtggatcccgaacaatgtgaaatcg

SEQ ID NO: 218050 - DNA, 413 bp, Gossypium hirsutum
gccaagacgttgtccaagacatgcagtgccggcgacaacgcggagcaaccgttcgatgccacgcaaaacactttcgacaacttctacttcaacgcattgataaggaaaagtggggttcttttctccgatcaagtactgtatacgacgccgagaacaagaaacattgtgtatggttacgccatgaaccaagctatgtttttctttgatttccagcaggcaatggtgaaaatggggaaggttgatgttaaggaaggatctaatggggaagttcgacagaattgccgcaaaattaattgaagtttattatactagtttgagttctacagcttgattttctgtaatctaaattgtatcaaccacaaattctgccatttctatgtttatggttacataaaaattaaataatccataaa

SEQ ID NO: 218051 - DNA, 141 bp, Gossypium hirsutum
acggccacgcgtccgggtagtttaggatgaaatttatctataatttgggaggatgtggatgtaacttttgactctattttaacctaaatttggttatcattatttggtcttatatttaggttttgaatcaatgaagtgttt

SEQ ID NO: 218052 - DNA, 420 bp, Gossypium hirsutum
agcagcagctccagctcttcaagcgacgaggaagaaggtgaaggagaagagaagaagaagaagaaaaagaaggagaagaaggggctgaaagaaaagattgaagagaagttagaaggagaaaagaaagaagaggacacctcagttccagtagagaagtgcgatgagccagtagtccagccagagacgccagagaagaaaggtttcctcgagaagatcaaggagaaactccctggacaacacaagaaagctgaagaggccagtagcccagctccagccccagcagctgagccccatcacgaaagggagtcaaaggaaaagaaaggaattctggagaagatcaaggagaagcttcctggtaaacactccaaatcagatgaagaaaaaaaaaaagcttgagattcaagttcacataaaaatact

SEQ ID NO: 218053 - DNA, 412 bp, Gossypium hirsutum
gtcgtgctgcaacgctagatacgtctgttatggcaacatctctccatgatttcatcgaagttgtctttcagaacaatgaaaacaccatgcaagcttggcatcttgatggttacgatttttgggtcgttgggtttggctcggggcaatggacacctgacaagagaaagagctacaatctagtcgatgctcttactagacacactactcaggtgtatccgaattcttggaccgccatattggtctccttggacaaccaaagtatgtggaatgtgcgatctacgttatgggacaggcaatatctcggacaacaattctacctcagagtctggaatccggttcgcagccttgctaacgaatacgacattccctctaatgtcctactctgcggccaagccgtcgggcgtcacccgta

SEQ ID NO: 218054 - DNA, 408 bp, Gossypium hirsutum
cccacgcgtccgaacctggagttttcttctactatgacttttctccgatcaagggcacttttaaggaggagcatagttcatttttgcacttcatcaccaatatctgtgctgtaatcggaggtatcttcacagtcgcagggataattgacacgttcgtataccatggtcaaagaaggatgaagaaaaagatggaaatcggaaaattcagataattttgtctgcacatttattccgacacaaccttggttttcgacacgatagtttttcttggctttcaacacgatagttttcttttccaatggttcggatgctaaatagttggtgctttcatagggatccatccatgctgctgttttattccgaagagtgtatgacattgggcctttaaatcattgctgaaattgtctg

SEQ ID NO: 218055 - DNA, 405 bp, Gossypium hirsutum
  unsure (1)..(405): unsure at all n locations
ctggtttaggcgatggcttcaaagcggatcttgaaggagctcaaggatctacagaaagatcctcctacctcttgcagtgcaggccctgttgctgaagacatgtttcattggcaagcgactattatgggtccacctgacagtccatatgccggtggagtgtttctagtcaccattcatttccctccggactatccatttaagccacccaaggttgcattcaggacaaaggtctttcaccctaatattaacagcaatggcagcatttgcctcgatattttgaaggagcagtggagccctgccctcaccatatccaaggtattgctctcaatctgctcactnntgacggacccaaatcccgatgatcccttggtgccaaagattgcccacatgtacaagaccgacagg

SEQ ID NO: 218056 - DNA, 372 bp, Gossypium hirsutum
cggtgtggcatctatgggtgtgatgaggtctgaattggtgatgaaatcgattgtacccgttgttatggctggtgtcttgggtatttacgggttgattattgctgtcattattagtaccgggatcaatcctaacgcaaaatcgtattaccttttcgatggttacgcccatctttcatctggtcttgcttgtggccttgccggtctttctgctggaatggctattggaattgttggtgatgctggtgtcagaactaatgcacaacaaccaaaactttttgttggaatgatacttatcctcatctctgtcgaaactgtggctctttacagccttattgtcggcatcatattgaattcccaggctggccaatctac

SEQ ID NO: 218057 - DNA, 368 bp, Gossypium hirsutum
gattttgcttggcaaacagtgctgattcgtatttgggcaacccgaccaacacgtctggggtgttcccaaacatgtagaaattcgcagatacatgcgaaatacctgtcgatcgcattacaaagaaggaagatctgtgagaagcgatttgcaaaatgttcgaaacatccgtacctaacttcttagacgtgatcatcccgcatcaagaacatgtcttgcctataatccccacaggagggactttcaaagatgtgattactgagggtgatggaagaacaaaatattaattttaataaacatcaaacattttttagtaataatggatttacccgccctagttaataagcattgcttattttttgaacaaatta

SEQ ID NO: 218058 - DNA, 239 bp, Gossypium hirsutum
atcaaatcgagatccccgcgaaaatgaacgacggagatgtttccaggcagattcagcagatggggagattcatccgccaagaagcagaggacaaggctaacgagatctgtgttttagcggaagaggaattcaacatcgagaagctccagttggtggaggcagagaagaataagatcaggcaagagtacgacaaaaaggacaagtaagtcgacgctcgtaggatgattgactattggctg

SEQ ID NO: 218059 - DNA, 414 bp, Gossypium hirsutum
  unsure (1)..(414): unsure at all n locations
cccacgcgtccgacgatactgagagtgttcctccaatagcaattttggctggtcttcactatgcagccataactgacattgcatggtcatatgatgcacgatatttagcattgtcatctcaagatggttactgtacattggtagaatttgagaaggaagaacagggagtacccattcctctagcagaacctaaaataatgaacgttgagggtacgagctctattgtccagaaacctgatgacgtggtgattgaagttaatgatccagtcacggtagataacaggacggtagaatgtgcagaaaagagagaagggaaacaggcatcgccaagtttggcaaatactcccatcgtaaataagccagccaagaggcgtatcactccgatggcaattgatccatgatatngtcatgtta

SEQ ID NO: 218060 - DNA, 401 bp, Gossypium hirsutum
gtgtttttttttcccttttctcagagaaaaaaattattacaacaatgggtatttgttcatcttctcaatacacgacaaaggccgacaatcgccttacctggccgccgcccaccaccaccaaaataatatacccagatggaaaccttcaacaactaattcaacccatcaaagccagcgttgttctgtcccagaacccgagttgtttcctttgcaactcggagctcatgtatgtgaactcgtgcctgtctcaagtacccggtgacgaacaacttcagctggaccaaatctattttctaatgccactgtctatgtctcaagcaccactttcacttgaagaattatgttcgctcgccattaaagctggtgctgcattatctcgtttgaatgacgcttattctcac

SEQ ID NO: 218061 - DNA, 399 bp, Gossypium hirsutum
gcggatcttcctccttcctcagtgttatgctgagaaacaagctcttggggaagtgagtgtagagcttttggacacccaagtgaacccggctgtgtgggaaattagtggtcatatggtgttgaaaaggaggaaggactatgatgaggcgtccgacgaaaatgcttggaggttacttgcagaggtatctctctctgacgagaggtttgatgaagtgaatgcacttatctttgaagccattggcggtggcaaagatgcaattgaaaatgttgaggagcctgataccaaagctcaatctattgaaaaagagaatggcatcaccgaaacttcccaccatgctatggtggctgggacacaacaatgccttgttctgcagtagcatttcattaatagaaccctgta

SEQ ID NO: 218062 - DNA, 386 bp, Gossypium hirsutum
gctgttcataatgctgggttccatgagcaccaacctgtttggcgacctcaacgaggccttgctgagcgtgctgtaactgtacttcgagcatggctatttgaacactttctacacccttatccaactgacacagacaagcttatgttggctaaacaaactggtctatcacggagccaggtgtcgaattggtttataaatgcgagagtgagactttggaagccaatggtagaggaaatacacatgctcgaacaagctcaaaaaaattcgcaaaaggaggctagaaatccgaacaagtcaagtgaccatttgtcttccgcaaactctatcgcacccgaaaacccatctacctctttttaaagggctcaagataccccatcaaagcgcac

SEQ ID NO: 218063 - DNA, 338 bp, Gossypium hirsutum
cccacgcgtccgtaaggtgaaaggtccaatggactacatacctgagctgtttgatgagcagaaggatcaagttgcaatagaacaaatactacgggttgttttcctagatcctgagcgtccttgtcctgctctggaaaaattgaagtgtcaattagatgaggctgatgctgcgctggaggcacgcaaaaagcctccagaggattcaggtccaaggatcattggggaaggactcgtcatagatgaatggaaagaacgaagggagagatacctagctcgacagcaggttgaaggagtagactcagcttaaagtgggcattctcatcattggcttatatcat

SEQ ID NO: 218064 - DNA, 241 bp, Gossypium hirsutum
gcgaattcgcgttttgttagttcgtgagtgaatcaggtaataaaaggaaaaaaaacgatgggtgtgttcacatttgtttgcaggagcaaaggcggtgagtggtctgccaagcagttggagggagagattgagagctctgctgcttccacttacgagctccagcggaaacttgtccaggccgccaccgcctgcgactcctctggtggtgtcaccttctctttctctgtcgttacccctaatt

SEQ ID NO: 218065 - DNA, 402 bp, Gossypium hirsutum
cccacgcgtccgcagttgaaattgttctgtggcatggattatcccgataacccaccgagcgtgaggtttcaaacccggataaatatgacctgtgtcaatcccgaaaccaaagtggttgaaccaagccttttccccatgcttgctaattggcgaagggagtatacaatggaggatatattgactcagctgaagaaagaaatgatatctccacaaaaccggaaacttactcagcctcctgaaggcaatgatgaggcgaggattgatcaaaagggtttagtggtgaagtgttgcatcttttaaatcttaattgtatggaacataatgtacataatatatatatacacagataattcctacaactgccttagctcaatcatatatataatataatgcttgtgtatg

SEQ ID NO: 218066 - DNA, 188 bp, Gossypium hirsutum
taagcaagtatggctaaggacgttgaggttggtggtgagttccaagccaaggactaccatgatcctccaccagctccattagtggacggggaggagttgacaaagtggtcattttatagggctgtaatagccgagtttattgccacgctcttatttttatacatcactgtgttgacagtgatcggata

SEQ ID NO: 218067 - DNA, 331 bp, Gossypium hirsutum
tcaaactgaggaagataaagaatgatcagctcatggcagaggccaaggcaaagggtgaggtgattagcacaaagaggcagcctgagggcccaaaacctggtttcatggtcgagggtgcgatgttggaaacggttactcccattccatatgatgttgttaatgatctcaagggtggctactagatctactctgttttttggtttattcttggcataacttaagtaagctttgttagttattttggatgtgttgtttacgttttgtagtttattttgaagagttactgcttctgcaaagattttaatcttatcaatcattttattttagagat

SEQ ID NO: 218068 - DNA, 278 bp, Gossypium hirsutum
attacccctcttggctggcaacaggtggataatttgcgtaagcatgtccatgaatgtggccttgctaagaggattgatttagtgattacatcccctttgctaaggacattgcaaacagctgttggggtatttggtggtgatggttatacggataggatggatgtagtgccacttatggtggcaaatgcaggaaatagtggtcgtgctgcaatttcaagtttaaactgccaaccgatcgttgcagtaaaactttgtcaaaaccattgggaagtccatcc

SEQ ID NO: 218069 - DNA, 412 bp, Gossypium hirsutum
cggacgcgtgggttcaagtccatccaaactcctatgcattggttatcagcatggagaacatgaccctgaactggtacttcgggaatgatcgttcgaaacttgtatcaaactgcttattcaggatgggaggggctgcaatactgctctctaacaaatggtccgacaaaagaagatccaaatatcaattggttcatactgttcgcactcacaagggttcagatgataaatgcttttcctgtgttacacaggaagaagactccatagggaagattggtgttacattgtcgaaggatctcatggcagttgctggtgatgccttaaagaccaacattaccacattggggcctctggttcttccaatgtctgagcagcttcttttctttggtacattggttggtaagaagctgttcaa

SEQ ID NO: 218070 - DNA, 426 bp, Gossypium hirsutum
gtgaatattcagaggtttatatggaaagtgtagtgaagaatttgataatggatgaaagcgaggagaagcctaaggttgggctcatggtcatgcctggcttttggattggtggcagtgtcatccagagccgagtttatctttccggaatgaaggttaacgagtaaattaccaccactatgcaaatctaagagtttgatgagtaatacacgtatggactaatatagtgtgctgtttgtctttgtgatttgttgttattgctgtagtcatgcaactgtagtaattgtattacgacataggagctcactgtttgttgacaaagttcctttgtctttgtgtgcttcaactgttcttctgggtttgattgcctgcaagaatgcagcagacagtccatgatttgagcatcatctgtctctacgctgcattggg

SEQ ID NO: 218071 - DNA, 379 bp, Gossypium hirsutum
  unsure (1)..(379): unsure at all n locations
ggaaagttcaagagcattctccacaggggtctggttaataaggagaaggttaggatctcatgggcagttttctgtgagccaccgaaggataagatcatccttaagccactcccggagactgtctctgagaccgaacctccactgttccctcctcgtacctttgctcagcatatcgagcataagctgttcaggaagacccaggataatctgtccaactgaaactagtatttttatttgtcgcgataacctatttctttctgtactctgatgaatgctatatttcgttggggggttaaacccttggttgtggcgtctgtctccactccttggctcctctntacctgttttatttgaataatgagagctgatttggttcttt

SEQ ID NO: 218072 - DNA, 405 bp, Gossypium hirsutum
cccacgcgtccgcttttcttcaaggaaacatctgcaaagacagcatccaatgtcaatgagattttctacgaaatagccaaaagattacctcgagtgcagccagcacaaaatcctgctggaatggttctcatggatagacctgcagaacggagtgctagtgccacttgttgctcttaggtattggacggtttccttcctgtatcttctaagtagcttacgcaatactctttgcgactgaagttttatcttccaaactttgccatgtttatgtgctattcattatgggttgtgcatgcatgcttgttatctagacctgatgatatctaccagtcaattgtgttaaagattgattattcttgtatattaaagttcgataatggtattatgtttcacttccatggttac

SEQ ID NO: 218073 - DNA, 441 bp, Gossypium hirsutum
cccacgcgtccggagctaccaaggacaatgaatattctgatcttttctatgctatcccatggtctgaaggaactcttggatttcttgttgctgccgaaatcaagcttatacctgttaaagaatacatgagactgacatacacgcctgtagtggggaatttgcaggaccttgctcaaggttatatggactcttttgcacccagagatggtgatcaggataatccagagaaagttcccgattttgtagaaggcatggtctactcacccactgaaggtgtgttcatgactgggagatatgcctctaaagaagaggccaagaagaaggggaataaaattaacaatgtaggttggtggtttaaaccctggttctaccaacatgcgcaaacggccttaaagaagggagagtttgtagagtacattcctacaagagaatattaccaca

SEQ ID NO: 218074 - DNA, 438 bp, Gossypium hirsutum
cccacgcgtccgcccacgcgtccgctctttctgaatgttttcttctgttcgatttctcggggaacgaagtttaacttaaaaccacaacttctgtagaaatataaatatgatagactcaactcaaatattgagctgctttagctggtttcctcgactgtagacgatttaagttgcgatttatcaactgctgtgcttcggttggaatggctaccaagcagccaaatactggcctctttgtgggactgaacaagggacatgttgtaaccaagaaggagttggctcaacgtccctctaatcggaaaggaaaaactagcaaaagagtccattttgtgaggaacttgattagggaaggtgctggttttgcaccatatgagaagaggattactgagcttctgaaagttggtaaggacaaacgagcgctcaaggttgctaaaagaa

SEQ ID NO: 218075 - DNA, 441 bp, Gossypium hirsutum
gcaagtttggttgctctaagaaacaacagttttcggatgttcagtaatgaggatgtgaccattggtgcatggatgcttgcaatgaatgtcaaccatgaggataatcgagcattatgtgagccagagtgtacgcaatcatctgttgctgtctgggatatccccaaatgttcagggctatgcaatccggagaaaaaaatgttggaacttcatcagatagatgcctgctctaaaagtccaactttgccatcggacgatgattagcttaattggcaaaacacagattttattaacatggaaaggtgtcagaattgtttgttctggtaagttgatcttattgccctcagacatatctcaattaccccgttcgatcatcgcaagccatttttgtcttccgccatcgttttagtctgtaatatattaagcttttttttcactgacgat

SEQ ID NO: 218076 - DNA, 428 bp, Gossypium hirsutum
cccacgcgtccggaaattaggatcgagaatagcaattctcagccagagagcagcggctcaatgtcggagttacagatcagtggcagaaaatataacagcaatagagccgaggaacgcttgagcttcagcatttgccaaaagctagtgcagttaatgcatgggaacatctgggtagtacaaaatcctcagggttcagctcaaagcatggcgcttgttattcggtttcaactccgaccgtccatcagtataacaatcaacgagttgggagaatcatcagaccagccatgctccaactcccttttcaagggtttgcaagttttacttgccgatgacgatgatctgaaccgtgccgtgactcgaaagcttctcgagaagttgggatgcagtgtttctgccgtaacatctggattcgaatgcctcacttctat

SEQ ID NO: 218077 - DNA, 414 bp, Gossypium hirsutum
cccacgcgtccgctccaaagtaaagctcgcattcagatttggcttttcgaacagaaagatttgaggattgaaggccgaatcattggttttgacgagtacatgaatttggttctggatgatgctgaagaagttaacgtcaagaagaaaagccgaaagtcattaggaaggattcttcttaaaggagacaacattactcttatgatgaatagtggaaaatgattgtagatccagcagttatttggactcgtgaatgcaaaatcttcttgtcatcgtataggtcaatctactatgactatatcgtactatctttaaaaacatgccttcgtgttaggacattcaccttctaagaggtgcttctagtatttcagacagtttactgatgcttttgcttagattatctaatgatttgacatg

SEQ ID NO: 218078 - DNA, 442 bp, Gossypium hirsutum
gttccgtcacgcccacttcttgagacgtgggcagtagaagctggcataaagtaccaagatttcccagaactgtgtggcaaagctgaaactgttagtgaagtccaaaaatcactttcaaaggtggggaaagatgcaaaactagacaaatttgaaatacctgcaaagattaaactgatggcagaaccatggacacctgaatcaggattggtcacagcagcactcaaaataaagagggaacaaataaagtcaaagttcaaagatgatctccaaaagttgtaccagtaatatacccataataaatgcattgatttaaccttggtattttcactgtcatatgctctctttcatcttctttgtaagttttcatgtatgtggagacaaaaaatcaaacagtgttgctccatagatgagttgtattagataattcggaagtttgtctaaa

SEQ ID NO: 218079 - DNA, 217 bp, Gossypium hirsutum
gagaattctcagaggctcgtgaggatcttgctgcattggagaaggattatgaagaagttggtgctgagtcagctgagggtgatgagggtgaagatgatgagtactaagaagtacgtgtgattgagtgtgcttacgatgtcttttattacctgttgcttccgtgttatgcaagcttctattctttgaagcttgttaaagacttgaaatggtttactgt

SEQ ID NO: 218080 - DNA, 436 bp, Gossypium hirsutum
  unsure (1)..(436): unsure at all n locations
aggaaatgtcactgttggtgctgatggctctgcgagtttctctattgtcgacaaacagattcctctctccgggccacactccattattggaagagcggtcgttgtccatgctgatccggatgaccttggcaagggggggcacgagcttagcaaaagcaccggaaatgctggtggtagagtagcttgcggtattattggtctgcaagggtgaaattttggtcctggtgagcggaataatacattgagtggagatgcaatggcctaggagcaaactctgtatgtgaactaggaagtttgtgaataaaagtaaaagaacccttgttttgttttggttttcagacttaaaggagtgtggtctcttaacggatgctctagccatttatagtaagctgtcttttgctgcnaaagacaataanaacatattttctggcaaaaa

SEQ ID NO: 218081 - DNA, 433 bp, Gossypium hirsutum
cccacgcgtccgcccacgcgtccgcccacgcgttcgcaggctctgtggaaccaccctgccggacccaaaaccattcacttttgggcaccaacttttaaatggggcattagcatagcgaatgtggctgactttgctaaaccaccggaaaaactttcctaccctcagcaaatagcggttactgcaactggaattatctggtcacgctacagcactgtaatcactccgaaaaattggaatctcttcagtgtaaacattgctatggctggaacaggcatataccaactaacacgaaaaataaaacatgattacttttcggaggcagagccagccgttgcatctgaatgatgacgaaatcttctgaaatcctttgtttttaatggaacaaattatcagttatcttgccttggttttctggtaattaaaagttacactt

SEQ ID NO: 218082 - DNA, 388 bp, Gossypium hirsutum
  unsure (1)..(388): unsure at all n locations
tttctctccaaacacactctcagtatgtctgctttaagatccaccatttcttctgggataatcagatcaacttctcccacccattccttgctgcctgcagcttcatctttcaagcccatcagaaacccttgtttacctcaaacccacaagcttttcacatcaaactccaacactttctcagctcccaagcgaggtttcacttgcaaaagccaggctattccatctgataactcagctccggaaaaagttcaagaactacatgtgtatgagttgaatgagagagatcgtgggagtccagcttaccttcgtttgatgtcagagttctatgtcgtgttgtgttgaaatcatgaaatgcagatgttaccgtagtatttcttgtnaanaaaaa

SEQ ID NO: 218083 - DNA, 219 bp, Gossypium hirsutum
cccacgcgtccggtttttcttggagaataatattctgttttgtaatttcaattggagaagctcttttgtatttcatcttgtcttttgcttttccttttttcgccggcattgtttgaacatggggttgtgcgcccgtcaattccagttaaatatggtgacttttgtttttcaaaaaaaaaaaaaaaaaaaaaaaaaaaaatacaaactgaaaaaacaaaa

SEQ ID NO: 218084 - DNA, 422 bp, Gossypium hirsutum
atgggtcctttgaatcttaatgcatttgacttgatcattctctctcaaggcttgaatcttgcaacactttttgaccgcgggaaggacaccatgaagcaccagacaagatttgtttcacggaagccagcaagggttgttctgtctagcatggaagttgttgctcaatcaatgggctataagacacacattcgcaattataagatgagagttgaaggcctttcagctaataagacttctcatttttcagttatcctcgaagttttcgaggttgctcccacgtttttgatggtggatattcaaaaggcagctggtgatgccggggactacctaaagttctacaagacattttgtagcaacctggatgacatcatatggaaaccacctaacgaatcaagcaaatcaaggatcacaaagtccaagag

SEQ ID NO: 218085 - DNA, 342 bp, Gossypium hirsutum
  unsure (1)..(342): unsure at all n locations
tttccttctgccaagcctccacttggcgtcttttttgcatccattgccccacggttgcagcctagatactattctatctcatcctcaccaaggatggcaccatctaggattcatgtaacttgtgcattggtttatgagaaaacaccaacaggtcgtattcacaaaggagttttctaatttatcggtactagaagacaacgttttggtttttggttaatttagtatgaacttgaactaaaaatactttctcctttctcaatcaagtaatcatattgttcaaaaaaaaaagaggatatncaaaaggcagctggagatgacacgggactacctaaagctctacaa

SEQ ID NO: 218086 - DNA, 430 bp, Gossypium hirsutum
cccacgcgtccggcaacactggtttttggatatgaagcaactaaattatacaaagaacataagaagagaatgagcactgggaatgctgaaacagtttgtggagcttcaattcaatggagtccattgaacattgcattttgtgcactttgtggcatcttgggaggcactgttggtggattgcttggttctggtggtggattcattttgggtcctctcctccttgaaattggtgtgattccacaggtggctagtgcaacagcaacattcgtgatgatgttctcttcatccttgtccgttgttgaattctatttgcttaagaggttcccaatgccctatgctttgtacttgatgggagtatctattttggctggtttctggggacagtatttcgtgagaaaactaataacaatccttaggagagcttcactta

SEQ ID NO: 218087 - DNA, 439 bp, Gossypium hirsutum
  unsure (1)..(439): unsure at all n locations
gtttacttgttttttgaatttcatccctctcgttgttttgtgaaggacatcaagacagggaaggttttgctagtaggtcacattcataaagggttatatcgatttaacacatcaccacaacaaagaagttttgctggctttgatgagggctttcaatatgcacatactactaagattcaagcttgagacaccttctgttctgagttcgacttatggcacaaaaggcttggccatccctgcacaaaaattctttttcaagttcttcgaagttgtaatatttcactgaataaattcacaccacctagagtgtgtgttcctcgtcagctaggaaagtctcataagctggtgtttgataattctaagactgtatatacttccccttttcaacttgttgtgtctgatttgtggngacaatcacctatttcttctaaaggctatc

SEQ ID NO: 218088 - DNA, 271 bp, Gossypium hirsutum
gtttagagaaaggtctaaacgtgtgacagtgatgggatgggtttgtgctgttaacagtgtggcaggcgtctgcttctcctttaggcataatgagacgtgtgataaggacaaaaagtgtaaaatacatgccatttcttctctccttttttcttacattatgttccacaatgtggttcttctatggacttttcttacaagatttatacgtggcttttccaaatgtgttgggatttctgcttggaacagctcaaattatcatctatgtgatata

SEQ ID NO: 218089 - DNA, 405 bp, Gossypium hirsutum
  unsure (1)..(405): unsure at all n locations
atcaacttttagttcctcacttcaattctatcactcacctatgccattgttaatcttctttgggtgaaatagatgagaagattgaaaggaagccatttcttttgaggggaatgttgtctggctcgaggccatcaactagatctatggattttttttcatatatcaaagtttgagagatgatgatgatttaatcattaatcataggttaatgacgtcggaccaggcttcattccccccaattatttgcttccaattttgattatgttctctcggtcttttgttggtaaaacaagaagtggtgggtggtggatgataaggatgctggagctgtgtaatctccgccatttatgttttgtttttatgctngcttttatctctggttaactntggtacttactatacatg

SEQ ID NO: 218090 - DNA, 344 bp, Gossypium hirsutum
  unsure (1)..(344): unsure at all n locations
ggcctggtcagtgcggccgtgctgacgggtatatcttggaaggcaaagaactggagttctacatgaagaagatccagagaaggaagggaaagggagctgcctaaagttttgttacttgagatttcatatttcagatcaaatgtgcctttttttaacctttctttcaccattttcaggagattttgagattgtgatagtggttacacttttagtatgaattttcaagtagtgaagttgtgtcttaattcaacagtattatcatataccttgagctgcatgttttttttgaacttggaatttagatgatatttaacttaatataaatggcagcctgttttgggnaa

SEQ ID NO: 218091 - DNA, 409 bp, Gossypium hirsutum
cccacgcgtccgcggacgcgtgggattgaattggaaggcaaaatacggcatcgaggagatgtgcagggatcaatggaactgggccagcaagaacccgtatggatacgcatctccgaacttgaattaactcggtgccaatacttttgtcaggtcacacaatacctatgagattagattttcttaactttatacagatttaattgagtttgatttatcattttagatgatttataaagaataaggtgggaatttgttttgatcaaagctttgtgtagtcttttaaacaagttgctgccgttggtgattgttgtcaaaagggagtcaaaaatgaaaaaaccttagaactatttttagtaacactatccttgttgtcttgtgtctttattttgttcatcttttgtattgctat

SEQ ID NO: 218092 - DNA, 246 bp, Gossypium hirsutum
gaactattcagttcgttgactggtgcccaactggattcaagtgtggtatcaactaccagccacccactgtcgttcctggtggtgatcttgctaaggtccagagagccgtttgcatgatttccaactcaaccagcgttgctgaggtgttctcccgcattgaccacaagtttgatctcatgtatgccaagcgtgcctttgttcactggtacgtgggtgagggtatggaagaaggagaattctcggaag

SEQ ID NO: 218093 - DNA, 402 bp, Gossypium hirsutum
  unsure (1)..(402): unsure at all n locations
cctggaagtggtttcggacctggcggtgaatgtttcatcagagtcagcgcatttggtcacagggagaatgtcttggaagcttgcanaaaattcaagcagctttacaattgaatctaatagcatttgactggttacctcggtttcagacccgagacgaaaggccgtatgcttctatgatttttgttctcaattccgtaatattgcttgtaatatctcgtcagattctatgcttagaaaagactagtaatgcttcttatttatcctgtaacattcactgaaaactacctttttatttatataaataaccgcttgtattcgccaagcaaataaagcaagaaaaatctcgatttttccaaaanaaaaaaaaaataaaaaaaaaaaaaaaaaaataaataaaataaa

SEQ ID NO: 218094 - DNA, 387 bp, Gossypium hirsutum
gtttttgcagccacaacacagccaaagaaagaagaaaatggcgtcgaatgcggcggttccagtctggcgtgcagccggcatgacttatataacctactcaaacatatgcgccaacctcgttaggaactgcttaaaggaaccttacaagactgaagcccttagtcgtgagaaagttcatttctccatctccaagtggacggatggaaagcctgaaaagcctactctccgctcagactcacctgaagaatgagatgcaagtttggtcatggaaacttcgaaactggaaagattttattttatttttaagaatttctgttatgtctgaaacataagaacaaatttcaagctgggatgatgttgcacattctaataataaattactttgtg

SEQ ID NO: 218095 - DNA, 387 bp, Gossypium hirsutum
caggggagcgaggagttcagatgtcaggaggacagaagcagcgcatagccatcgcacgtgccatcggtaaaagtccgcagatactgctattagacgaggcaacgagtgcattggatgctgaatcggagagggtggtacaggctgcactagatagagtagtggtgaaccgaacaacggtggtggtggctcataggctatccacaatcaagaacgcggacgttatagccgtgttaaaaatggggtgtgtaaaaaaagaaaacatgaatccttgatcaacaataaaaaatgggttctatgctttcttaagtgcactttatattaatgctttcacttgataaaaactctttaaatatatatataaattttttttggtttttaagttttggt

SEQ ID NO: 218096 - DNA, 410 bp, Gossypium hirsutum
cccacgcgtccgcccacgcgtccgggcaagaccgttagggttgtctcctttgtttcttgggagctctttgatgagcaatcagatgcctacaaggaaagcgttttaccatctgctgtatcagctagggtgagtattgaggctggatcaacatttgggtgggcgaagattgttggatccaaggggaaggctattggaattgaccggttcggggcaagtgcaccagcaggcaaaatatacaaggagtttggcttgactcccgaggctgttgttgcagcagcaaaagaactttgctaagcttgcttagaagtgtcgggagaaatttgtggttctgggttggaggttacactgaagagagaccattccatttgtgacagtctcgtttgtttttaataagaatcagaatccactta

SEQ ID NO: 218097 - DNA, 305 bp, Gossypium hirsutum
cccacgcgtccggatgaagggagctttgatgcccctattgctggttgtgaccttgtcttcgatgtggcgacacccgttaactttgcttctgaagatccagagaatgacatgatcaaaccagcgacccaaggagtggtgaacgttttgaaagcttgtgccaaagcaaaaacagttaaacgtgtcgtcttgacatcatctgccgcagctgtgtctatcaacacactgaatgggacagatctggtcatgacaagaaaagactggaccgatatcgaattcttatcatcaagcaaacccccaacttgggg

SEQ ID NO: 218098 - DNA, 405 bp, Gossypium hirsutum
cccacgcgtccgcccactcgtccgtggagtagaaaaacgataggatgctagacctgctgcgaggtgtgtttcaacgaaggtctaatcactatcaaccagatgaccaaaggcttcaccagggtcaaagatggactcgacgacctagctctcgactttccaaatgcaaaggataagttcagtttctatacggagtatgcccagaagaagggttggcttctgccatcctttggttcatctgcaacagaagctctgcccactgcagcagcctcttgaaaaggaaaacatattcatgtctctagtttctcatgtatgatgttgacgttccagtacctgtgttcttagcagtcatccatggcagatcagattgataggattagatgtgggatgttcggattcctgatgttg

SEQ ID NO: 218099 - DNA, 389 bp, Gossypium hirsutum
gctttcttaccttatcaaactgcccaaaaaataccgttttcatctgacaagttgccagaaggtttcaacaagttttcagtgaaacctggatcactgaaggcagagatgatgaagaacacaattaaggagtgcgaacagccagcgattgaaggagaggaaaaatattgtgcaacctcactggagtcaatgattgactatagcatttccaaactagggaaagttgatcaggcagtctcaacagaagtggaaaaacaaaccccaatgcaaaagtatacaatagcagctggagtgcagaagatgacagatgacaaagctgtagtgtgccacaagcagaattatgcatatgctgtcttctattgccataaatcagaaacaacaagggcttacat

SEQ ID NO: 218100 - DNA, 415 bp, Gossypium hirsutum
gccaccattgctcctgcaccacagctggtggaaaaaacaaaccaacaagtggaacaaacttatcccaagtttgtttttggggattatatgtctgtttatgttcagcagaagttccttcccaaggaaccaaggttccaagctgtaaaggcagtgtaatatcaagaagaagctcaaaaccatgaatgatgtttttgattgaaagagtagagccctttctttcctggaaaataaaattgcagggaaggatatgaagagctcaagtcagtatacaatgttactagggtgtttgtttgtttgtttgtttgttgtgtttttttttttttttgttcttttccttttttggttgggagtttgtggtgatgaacatgatgagatgctcgatcaaattgctaaagttgggtgtgtaaatttgaat

SEQ ID NO: 218101 - DNA, 295 bp, Gossypium hirsutum
gctaaagctgccgatgaactaaggaaggatgtcaagaccgttagggttgtctcctttgttgcttgggagctctttgatgagcaatcagatgcctacaaggaaagcgttttaccatctgctgtatcagctagggtgagtattgaggctggatcaacatttgggtgggcgaagattgttggatccaaggggaaggctattggaattgaccggttcggggcaagtgcaccagcaagcaaaatatacaaggagtttggcttgactcccgaggctgttgttgcagcaacaaaagaacttt

SEQ ID NO: 218102 - DNA, 343 bp, Gossypium hirsutum
ggaaaaacggaacgacccacgcgtacgcccacgcgttcaacagtattgttcataccatttagatgaacaacttgatagataccgatggacatgtacagaatgattgtgatgagttggaatgtcttaggaagaatcatagaatctataccttgttggctcgagcgtttaaccctttcgtaagaaaagattgtatatcagaggccgttattgcatcgagcacagataattacccagaggaaagcatccataatactttggagccgtttgatagaatagacaccagagcatcgtattggtcgagtgaaaggcaaaacaatccttgccgtcccgaaactttacttta

SEQ ID NO: 218103 - DNA, 415 bp, Gossypium hirsutum
ctttcagatattcaatctctaaacaagaaagagcactctgagcttggagagcttgaatggctagcagacatcggtctttttggtgatcaattgccacaggaggctttagcagcagctgaagttcctcaacttccgatatcgcaatcaagcagtacaaacttataccgacctaccaaatattccatggctcttaaaaagcctagaatcgaaaccccggatgaagatgacgagttcttcacagtccctgatctaggttgagttggataacgagactcgtgtgtcagtagttcgaccaaactatagtgtttcatatgttgagtacacttatgcacgtactcatcttatcacgctttactatgttgcctttgtttttaaatatccgacatatgttcaaacattgatatgttgatataat

SEQ ID NO: 218104 - DNA, 287 bp, Gossypium hirsutum
  unsure (1)..(287): unsure at all n locations
atcgtattggaagaacaggacgtgcagggaagactgtgtgtggctacaacatttttgactctgtcatggcgccgatgtcttcttcgatctcaagcanatgcttgttcaaagtggcagccctgtgcctcatgagctggcaaagcatgaagcttctaaattcaaaccaggaacaattcctgatagacctcctagacgcaatgacactgtatttgcacactgagaagctctgtactatggtattttagtttgccaaatttctttcattgctgcttacaagtgattgcttt

SEQ ID NO: 218105 - DNA, 409 bp, Gossypium hirsutum
tgatatttcgcttcaatggccggatcataaagcgggttcaattataatcgatggaattgaatatggggtcctacaagttcattggcactcaccttctgaacataccattaatggcaaaaggtatgccttggaggcacatatggtgcataaagccgcggaccctaatgtgaagaccactttaactgtttctgcactactttacgaagatggtttacctaatgatttcctacacaagctcataagcaacattacagatatgattgatgtggtccaacaaaaatcaatgggggtgactgatccaaaccttatagaaattgatgacgtggaatattatagatacattggatctttgactcgccctacttgcactgaaaatgtcatttggattattaacaagaagatagcaact

SEQ ID NO: 218106 - DNA, 412 bp, Gossypium hirsutum
caagcatgtttgagaaaagtggtgctgaaaaagattctcgaactgaattagttgcgaaaaccccttcaatgagcaagactagtattgcttataagttttcttctgattatatacttagggagcagtataagaatccttgggacgagatgaggatggggaaattgcttgaggatcttgatgctcttgctggaaccatctcctataagcactgtcgtaatggtgatggtgctacaaggcctatattattggttactgcttctgttgacaagatggttctgaagaaaccgatccgagttgattttgatttgaaaatatccggggctgttacatgggttgggaggtcatcaatggagattcagctggaagtaactcaatctacgccagattctccagatccctctgattcagtagc

SEQ ID NO: 218107 - DNA, 403 bp, Gossypium hirsutum
ggaagggccgggccgagcgacccgtaccatgtatgagaaaagcgtatctgatttagattgtggatctgaatttgctgcgaaagcccgtgcaatgagcaggactagtattgcttataagttttcttctgattatatacttagggagcagtataagaatccttgggacgagatgaggatggggaaattgcttgaggatcttgatgctcttgctggtaccatctcctataagcactgtcgtaatgttgatggtgctacaaagcctatattattagctactgcttctgttgacacgatggttctgaagaaaccgatccgagttgatttgatttgaaaatatccggggcttgtacatgggttgggatgtcatcaatggagtttcagctggaagtaactcaatctacgc

SEQ ID NO: 218108 - DNA, 402 bp, Gossypium hirsutum
cccacgcgtccgattagaactttaagctaatagaggatggcgatggataagaatgattagaggaggagttggaggattcgagtaagtaaatgtttttatatctttgttaccgtagccaatctcaaatctattgagattaaggtttgttggttgatttggtttaattgtgttgtttgttgatttggcatttgcctttatatatatatatatagagagagagagggagagggagagtaaattaagaagaatgtttaattagcttgatctcaaagttaatcttacagtaattaggattgagaatttctagtgttttttactttaatttttccaggatgattcttacctggatagctacatcagtacgatcggtgttgatttcaaaatcagaactgtggagctgga

SEQ ID NO: 218109 - DNA, 207 bp, Gossypium hirsutum
cccacgcgtccgcccacgcgtccgcccacgcgtccgcccacgcgtccgaaaaagaactgttgggttgtgagaaatggcagtaactttctgtttaggtagctttatgttaaaactagcttttattcctgtttcgtcctttgtacatcataatgtcagcttcaacttctagtctaataaaagcttgtttgagggtcccaaatttcatct

SEQ ID NO: 218110 - DNA, 366 bp, Gossypium hirsutum
cccacgcgtccgcattggagcagttcttactgctatagcacagaatgtccagactatgataattggccgcttactggctggtataggtattggtataacatctgctattgtgccactttacatatctgagatctcaccaactgatatccgtggtgcacttggatctgtaaaccaactttatatgtattgggattcttgcagcattggtggctggattacctttatcacggagcccagtatggtggaggggaatgtttggtcttgctgttatcccttcaattttattggctctaggaatgacatattccccagaaagtcctcggtggctgttccagcaagggaaaatttctgaagcagaaaaatcta

SEQ ID NO: 218111 - DNA, 397 bp, Gossypium hirsutum
  unsure (1)..(397): unsure at all n locations
ggcttctctgttacatgttgaaaatggcatctccgaaccccgcaaaacctgctgtgtgaaggaacactccctaaaaagatggtccacggactcttcctcagatctgcataccgggcataaaggattgacagccaattgacgagcttttagattatgcaaagtgggtaaatagttgttagcaattctccacataaaaatacgaattttgcatggcacttggagctcccataattttgtaaaaaaattagtaggaagttcattatgtattctagtacccccctctgtaattagccatctgtatccgctcttagctgtatatgtcccagtattatcccctcgccataccaatgcatcttgtggtctactatttgccaatggattngtgagaatgcgcttc

SEQ ID NO: 218112 - DNA, 397 bp, Gossypium hirsutum
cccacgcgtccgggactcatcttgttcaatctttctctgttgtttttctttactggttttatgttttctcataaataaattgtcctattttaccatatatacatatatatatataataagtagttatttagcttacaatttagtctctctttttttcttttttaatggcttcttctagtggaaactccatgtccaattcaagatccgaagaggatttgcacaatcaaaggaaacggaaaaggatggaatccaaccgagaatcagcgaggcggtctaggatgaggaaacaaaagcacttggacgagttaatggcacaagtgactcagttggttaaagataataatcaaatcttaaccaccatcaacttcaccactcaacactacatcaacatggaagc

SEQ ID NO: 218113 - DNA, 406 bp, Gossypium hirsutum
ggaagaaaagcttgacgacggttcatggcctgaggcatgacctgagctacgagaaaatcgtcaagagtctcaagaaggacttttgttgcaacggcaacgttgttaaagacaaagagctcggcaagatcattcaactccaaggcgatcaacgcaagaacgtgtcgcagttcctcgttaatgccggcatcgtcaagaaagaccaaatcaagattcatggtttttaaggataacccaagttgctatttatgaaaaaaaaaatcagcactgttccttttttagcttaaaataaaacactagtgctgctggctctttaatttatacacccttggggggttttaactggcatgggatatgggatttcctttataaaaaatggggtttttaaaaaaaaaaaaaataataaaaa

SEQ ID NO: 218114 - DNA, 391 bp, Gossypium hirsutum
  unsure (1)..(391): unsure at all n locations
gggtcttgttactctgttgccttgcgaggtaatcatacttgtgtggagaattcgatgcagcatcactgccccatatgttacgagtacctcttcgattcgttgaaagatacgactgtgatgaaatgcggtcacacgatgcactatgaatgttaccatgagatgctaaagcgtgacaaatattgctgtcccatatgctcaaagtcggtgatcgatatgtcccgagtctggaagaggatggacgaagagattgaagcgaccctaatgccggaggattaccgatataagaaggtttggattctatgcaatgactgcgacgacactaccgaggtttacttccacataatcggacagaaatgcagtcactgtagatcttacaacnacccgacgatcg

SEQ ID NO: 218115 - DNA, 390 bp, Gossypium hirsutum
  unsure (1)..(390): unsure at all n locations
nccacgcgttcggagtttggaaaaagaattttttgaagaatggtggaaaatggaagaacagggatgttttagatatgaacactccaccatggtggtaccgcaaaggattcaagcaacaatggaattacgtgaacgatgaaaggaggatgacgaaagacaatgatcgcatgacagcatataggacagctcaaacaacatgggccaaataggtagattcacatgtggatactaacagaactaaagttatatgtcacggaatcactgcatcacactacaatggctaagaatggaatgagccaagggagagaaagtgctgcaaggagatggaaccattcaatgagtcatcagcttatacagttgggctgcctgaggcagcatatgtggataaag

SEQ ID NO: 218116 - DNA, 434 bp, Gossypium hirsutum
gttcgggccacgcgccacgcgtgccgatttgagatttggatccaaccttttattgatttcagagatttttaatggcaggcggaggaggcaaaacagcagatgcacagtttttccacctcctttccaatctactccatcaggtagaagcattgactaaccaggaagaagttgaactgcgttcgaaaatcgaagcccttggattggaggttacaaaagttccttccatgtctacacacagacttgatgagctggaaattgcgagagagttggacaagttatcggctaagttagacggtgtggatgagatgatatcctcagccatggcagcagacccgcaagtgcgatcccttttgagtggcactgctgatttatggatgccggttattactgccaatgctgatgagcgacacaatttggctgcatcaatcagtact

SEQ ID NO: 218117 - DNA, 342 bp, Gossypium hirsutum
cccacgcgtccgaggagctggggctggatatggacaagttcatcacacactctgtgcctggggccgatattaacaaggcattcgactacatgctccagggtataggtctgagatgcatgattcatttggatgcttaaggaaatgttgctgctgtatatttgcccatccaaggatcaaaactctaatgttttgtcctactatgtgttatattatgtgcctacttaagctacctttcccggttatcaagagtgcctatatagaactctctctctctaaaaaaaaaaaaaagagaaaagagttctttatatggaagtttatattatatgctgagagaataaatta

SEQ ID NO: 218118 - DNA, 407 bp, Gossypium hirsutum
gatcttttcagctcccctgatgtggtcaagcagatcacctctatcaccattgaacctggtgttgaggtggaggttaccatcgcagattcttaaatatgcctcacttatgctttttggcaaccactagttttagtcaattagaagacttccatctgatatagccctcgatgtcctaaataatcttaagcttgagtggttggttacagggcttttgtagtttgtgattttcccatgctagtattaaagttaaagttctattttgtcctgtggctctggattctctttcctttttgttacctaaaaagatcatgtctggatgattttgtttattgcattatttgacattaaatatcacgaagctagctgcttcattttcattttgcttaatggagggtcgattatgggaa

SEQ ID NO: 218119 - DNA, 287 bp, Gossypium hirsutum
cccacgcgtacgcggacgcgtgggcaaaactttctggtggtgtggctgttttgaagatcgggggagctagtgaagctgaagttggtgagaagaaggatagagttacagatgcactgaatgcaacaaaagcagctgtagaagagggtattgtgccaggtggtggtgtcgctctgttgtatgcattgaaagagttggacaagctacctacagctaactttgaccagaagattggtgttcaaataatacagaatgctctaaagacacctgtgcacacaattgcttcaaat

SEQ ID NO: 218120 - DNA, 405 bp, Gossypium hirsutum
tcggcccaacattattgaactggccggcccgggagtctttacgccgcaacgaaaaaagccggtggggaaatcgctcacacttataaccatatataccggctttccctcaccggacttagatttttcacacgtttatggtgcatggggaagacccgatatggcttacttctttttcactaaagatattcttcaagggaaacccattgatatctacaaacaccaaaatcaaaagcgggggcccgtgctttaacttaatctaccaccttttgaaaaggtggtttagaaccgttaaaaacgcgggaaaaaacacccgttggcgcgggaaaaaaaaaaggcccgcttcattaaagggtttcaacttggggaaaaatttcccttgttcccgcgggcgattaatcttcattt

SEQ ID NO: 218121 - DNA, 398 bp, Gossypium hirsutum
cccacgcgtccggccaataatcttctctttgtctccggtgttctcggtcttattccagagactggaaagttcatctcagacagtgtagaggatcaaaccgagcaggtactgaaaaatatgggagaaatactgaaagctagtggtgctgactattcctctgtggttaagacgacaattatgctagctgacttgaaagacttcaagaaaggtaatgagatctatgctaaatactttccttcaccagcaccggctcggtcgacttatcaagtagctgcattgccattggatgccaagattgaaattgaatgcattgcggcactcaaggcatgatgacaggggagtttgaagttataaagtaggaaactaagctcttaaagaggttatgtctcatttgcagg

SEQ ID NO: 218122 - DNA, 397 bp, Gossypium hirsutum
cccacgcgtccgagaagtagaaagagaaaaatcaaaaatggggagaggcaagattgagatcaagaggattgagaactcaagtaacaggcaggtcacttactcaaagagaaggaatggaatcatgaagaaagctaaagagattactgttctttgtgatgctaaagtttctcttatcatctttgctagttctgggaagatgcatgaatattgcaacccttctactaagttgattgatattttggaccaatatcaaaaaacttctgggaaaaagttatgggatgctaaacatgaaaatctcaacaatgaaatagatagaatcaagaaagagaatgattgcatgcaaattgagctcaagcatttgaaaggggaggatattacatttttgccttacaaggag

SEQ ID NO: 218123 - DNA, 235 bp, Gossypium hirsutum
cccacgcgtccgcccacgcgtccgcccacgcgtccgcccacgcgtccgggtctgacgagtggtgatttaagcaatgagcaaagccaaccttgtgcttagctcatcttcaggttgtcatgcctcatttctcacccaaaaaaaaaaaaataaaaaaataaaaaaaccaacaaaaaaaggagggggggtatatgctatttccaaaaaaaaaacgcaggccgtatataacgcgggtaaa

SEQ ID NO: 218124 - DNA, 392 bp, Gossypium hirsutum
atgcaatggttgaaagataaggtttattccattcgtgatgctgctgctaataacgtgaagcgcctggctgaagaattgggaccagattgggcaatgcagcatatagttccacaggttttagacatgattaacaatcctcattatctgtatcggatgaccattctacatgcaatttctctacttgcccccgttatgggctcaaatataactggctcaaaactactccctgtggttatcaatgcttaaaaagatagggtcccaaacataaagttaattgtggccaaggggctgaagtaattatttctaatggtggataaatttgggttggaaaaaacattccgtcattccttagttgattgaagtaaggatcttaatggggttgtaaggttttt

SEQ ID NO: 218125 - DNA, 403 bp, Gossypium hirsutum
ggaaaagttccgtgctggtcagatctgggcactgtatggtgatgaggatggcttgccaaagtattatggtgagatcaagaaagtcgagtcctcccctgttttcaaagtacatgtgagatggcttttttcttgcccattagaaaccacgactcagtggcaagattcagacatgccaacttgttgcgggagattcgggattagaaggggttcccagacctacacctccaccgattccttttctcatttgttaaaagccgagcctacagatacgaagggcaaatacaatatcatacctagaaaaggtgaggtatggggattgtaccggaactggacgcccaatatcaaatgttcggacttggagaactgggaatatgacatagtgcaagttttggaggaaacttat

SEQ ID NO: 218126 - DNA, 418 bp, Gossypium hirsutum
  unsure (1)..(418): unsure at all n locations
cccacgcgtccgcccacgcgtccgcccacgcgtccgcccacgcgtccgggcaaaggtgagcgcatatgtcactcatggtgttttcccgaagcgttcctgggagcggtttactcagaagaacaacaggtcggagaagggatttgcctacttttggatcacagattcatccncccagactgtgaaagccattgaaaacacagctccttttgaaagtcttagtcttggaggatcaattgctgatgctcttcaaatttaaattcaatctccaaaaagcttcatatgaactttttttaaaccgaaagtttaaaaagtatgtgccaatttcatcttaatatgaaatgacgaaataaatgtattatgttttgaggataaaagtattatttagtatgaaaaggtgcatactaatttatataattta

SEQ ID NO: 218127 - DNA, 315 bp, Gossypium hirsutum
acgggcatccctcctgctcctagaggtgtcccacagatcactgtctgctttgatatcggggctggtggtatcttaaacgtctctgccgaagacaaaaccactggacaaaagaacaaaatcaccatcacaaacgacaagggccgactctacaaagaagaaattgaaaagatggttcaagatgcagagaaatacacatccgaagatgaagaacataaaaagaatgtcgaggcaaacaatgcattggaaaactatgcatacaatatgaggaacacagttaaggacgaaaaagatggtgcccaacttccaacaactgat

SEQ ID NO: 218128 - DNA, 401 bp, Gossypium hirsutum
tttaagagatgcggtttcacgatccaccacacaggtatatcctaaatcatggactgctatttacatggctcttgataatgttggaatgtggaatgtgagaagtgagttttgggcaaggcaatatcttgggcagcaattttacttgagagtttatacacctgtgaactcactcaaggatgaatatctcattccaaagaatgctttgctttgtggcagagcccaaggaagaagcacaaggcctctttgaaacatttccagtagccgaaattgttgagaatcaaccattagtcaattataaaatatgcctcaattcttttcattttttggttcaccaaaatctgtatttggttttgtatctaaagaaatgaaaataattgtattaaattagaacattctttttg

SEQ ID NO: 218129 - DNA, 410 bp, Gossypium hirsutum
  unsure (1)..(410): unsure at all n locations
gcccctcacaattctagggtttttgccgcaccaccaacagaagaaatgggtaaaggaactggaagctttggaaagagaaggaacaagactcatactctctgcgttcgatgtggacgtcgaagcttccatctccaaaagagccgttgcggtgcttgtggctatcctgccagccgcatccgaaaatataactggagtatgaaggctattagaaaaaaaccaccgggactggccgcatgagatatcttcgtcatgtgcccaagaaattcaaaactggctttagagaaagtactgaagcagcttcaaagaagaaggcaacttgagctgcttcataagtttaattgtggtgttttcttttcaaattcctataaacacaagttttgtgtttggattaactggngtacttttatttt

SEQ ID NO: 218130 - DNA, 302 bp, Gossypium hirsutum
aactgcttgaaggaaccttataagactgaagccctttctcgtgagaaagtccatttctccatctccaagtggactgatggaaagcctgaaaagcccaccatccgctcagattcgcctgaagaatgagttgtgtggttggtcatcaaagtcgccaattgggaaggactcgaggagtttaatttttgttatttttgtaattcttgtacaatgcctgtgaacagatttcagggtttgagatgctgctgcattttcataataatctctactttgcaaataatagactgaggtttcattggactgct

SEQ ID NO: 218131 - DNA, 410 bp, Gossypium hirsutum
gggagcttcccaaggttttgggtcataattcagtcggtagagtgttgttggattctgcttgtggtggtactggggttataactaaagatccatcggttaagacctctaaaagtttggatgatatacaaaaatgtgcccatttgcagaagcaactgatacttgctgcaatcgatatggttgatgcaaattccaaatccggcggatacattgtttactcaacatgctcaataatggttccagagaatgaagcggtcatcgactatgcactcaagaagagagatgtcaaagtagtaccgtgtggacttgactttggatgtcctggatatatccggtttaaggaacatcagtttcacaccttcttagaaaaccaaagcggttttatcctcatgtccacaatatggatggatttt

SEQ ID NO: 218132 - DNA, 416 bp, Gossypium hirsutum
cccacgcgtccgcccacgcgtccgcccacgcgtccgcttgcacctgataggagcaaattgtcaaaacgccatggtgcggcttcagttggtcagtacagagatatgggttatctgcctcaggcgacggtgaattacttggcacttctaggttggggtgatggaactgaaaatgaatttttcaccattgatcaacttgttgaaaaattctcaattggtcgcgttaacaaaagtggcgctgtttttgactctaccaagttaaggtggatgaatggtcagcacttaagagcgattccctttgaggagttgtcccagcttattggtgagcactggaagagtactgggcttctcacagagtcagaagggccatttgtagatgatgcagttcagctgcttaaggatgggatcgacttggtaac

SEQ ID NO: 218133 - DNA, 404 bp, Gossypium hirsutum
gacaagtgcaaggcttgcgacatgactgtctatgtggtatatatgatgacactcgaaggggtgccataccataaaacttgttttaaatgcatccattgcaagggtaacctacagatgaccacttattctgggatggatggaatactgtattgcaagcctcattttgagcaactgtttaaggaatctgggaatttcagcaagaattttcaaacagggaccaggccgactgaactgaataggactcccagcaaactttcatccctgttttctggaaccctagacaagtgtgcagcttgcgagaaaacagtgtacccgttggaaaaggttactatggaaagtgaatgtttccacaagacatgttttaagtgcgcccacggtggctgtccactgacacactcatctta

SEQ ID NO: 218134 - DNA, 305 bp, Gossypium hirsutum
cccacgcgtccggagttttgaagttgaattcaatgaggaatggcgatcattggaagaacagtgatgttttagttttcaacacttggctatggtggtaccgcagaggattaaagcaacaatgggattatgtgaatgatgaagggaggattacgaaagatattgatcgtatgactgcatttcggacagctttaacaacatgggccaaatgggttgattcagatgtggatactaacagaactaaagttatatttcaaggaatctgtccatcacactacaatggctcggaatggaatgagccaagggtg

SEQ ID NO: 218135 - DNA, 368 bp, Gossypium hirsutum
gccttgcaatgggttatgctaaggggaaattgactttcttcctcggtgatgtggactcagttgttgacctgataccagctgacatggtggtgaatgccatcatcgtagccatggtagcccatgcatcgaaccaaccatcggagacgatctaccaagtgggttcgtcgatgaggaacccggtcaagtaccatagcctccaagactttggctaccgatacttctccaagaaaccttggatcaacaaaaatgggaaagctgttattgttggtaaaattcgtgtcatggatagcatggccagcttccatagatacatggctcttcgatacttgcttcctttgaagggactggaatttgcaaatacagcattt

SEQ ID NO: 218136 - DNA, 411 bp, Gossypium hirsutum
cagactctaccaagggtagccccatcaaggtcccataccttaaccagccatggaaaaggatattgtccccgttggaatccaggcggatgcaggtgagagctgcacctgatcgcttatcggagaaggtggagcagagcatcaaggaagcacaagaggcgtgctcggatgacccggccagcggagagtgcgtggctgcttgggacgaggtggaagaactgagtgcagcagccagccacgccagggataggctgaaagataacgatcctctcgagaattactgccaagacaaccccgagacagatgaatgcaaaacttatgataattgaaactatgggtttttttttttaagtttatgaagatccttctgttttagatgatgaatatgggtgtaagactactcttatgtgaaac

SEQ ID NO: 218137 - DNA, 364 bp, Gossypium hirsutum
gtgtggtctgatcgaacccagtgacgtgaatgtctctctaatggaacacgagctagaaacaaattgcacagaattcccccatcccgacctgcttataaggacaagtggagagtacagaattagcaatttcatgttatggcagctggcatatactgaattgtactttgcacagtcactatggccggatttcggaaaagccgaatttttgaacgcattgcttgcctttcaacaaaagcagaaacgttacggtgtatgaagttatttgtgtacgactgttgacacttaattattgtggaatgggaaagaattgatggtgacacgcgaaggggcttaacaagaagctggatttggccattggagtatt

SEQ ID NO: 218138 - DNA, 405 bp, Gossypium hirsutum
caattcaagattcaagcgtgtatgcgtcttctgtggtagcagtcctggcaagaatcctagcgtccagcttgctgctattcaacttggccaacaactggttgaaagggacattgacttggtttatggtggaggaagcattggcttgatggggctcgtctctcaagcagtctttgatggcggccgtcacgtgttgggggtaattcccaagacactgatgccaaaagagctaacaagcgaaaccgtgggaaaagtaaaaactttatcaagaatgcaccaacgtaaaacttaaattgctcgtcaagcttatgcctttattgccttaccaagtggttattgaaccttggaagaactgctggaagtgatcacttgggctcaacttggaattcatgacaaacctgtgggatt

SEQ ID NO: 218139 - DNA, 284 bp, Gossypium hirsutum
gagagtccagataccaaaaacaatgtgcaggctaaaatccatgacacggagggtctacccccagaccaacagaggttgatctttgccggtaagcaactggcagatggtctaactgtccctgattacaacatgcaaacggaatacaccctacacttggtgtcttgtctctaaagtgaatgcatatccttgtgaagacaattaccgggcaaaccatcaccttggaagtcgacagctactacactattgacaatgtcaacgtcaaaatcctggacaaagaaagtata

SEQ ID NO: 218140 - DNA, 418 bp, Gossypium hirsutum
cccacgcgtccggttaagccacccattgacctccctccggttacggtccctccaattaaccttcccccagggacggtgcctccagtaactaagccaccaagtgggaaaccctgcccaacaccaccaaccaaggacacttgccccattgacacactgaaattgggtgcttgtgtggatctgctgggagggttggtgcacattggactaggtgacccggttgggaaccaatggtgtccggttctttcaagactcgccgagctcgaaactgcggtctgcttgtgcaccaccctcaaacttaagggtctcaaccttaaaatttatgtgccactggctcttcaacttcttgtcacatgtgggaaaacacccccttctgggtacacttgctctctctaaaaccaaattgctagggtgatggact

SEQ ID NO: 218141 - DNA, 230 bp, Gossypium hirsutum
  unsure (1)..(230): unsure at all n locations
aattttgaagaaaaaaaaatccatcaccgatctaagttccccaaattctgttcaaatcgccggcgaaattttgatctgaaaatctaaaaatgtcgtccacattcagcggcgatgaaactgctcctttttttggcttcctcggtgccgctgctgccctcgttttctcctgtatgggagctgcgtatgggacggctaanagcggtgttggtgtggcgtcgatgggagtgatg

SEQ ID NO: 218142 - DNA, 381 bp, Gossypium hirsutum
acgacccacgcgtccgaaaatcctctcatagcgccgctgtcgatctttaacctttcataccgcaaacaatggttctccaaaacgacatcgattggttgaaccctccggccgagctcgagaagaagaagcacaagctcaagcgtcttgttcaatctcccaattccttcttcatggatgtcaaatgtcaaggctgcttcaacataacaaccgtatttagccactctcaaactgtggtggtgtgtggaaactggcagacggttctgggccaggccaccggcgggagggcttgaattaaccaaggctggtttttcaagaaaaagggggacttaattctattcagcggcaaccattcgaggaagagggtttttttggatgaaccca

SEQ ID NO: 218143 - DNA, 383 bp, Gossypium hirsutum
gcagcaggcgttagattcaggaatgatgttccggatggcggacttgcgaatgtggctgcaactgtcatgaacctccatggttatgtagctccaaatgactatgagccaacactcattgaagtagtgaacaattaggcatatgttgcagtcgctgaatgggctaaacgagtttataataaggatatatttggttccaaaaataggttggatttgggaaaacatatgtggttttaagttttttccccaaatgggtgggaaaaattttgggccttaatggccccattttaaaaaaacccgatccaattgtgaaaatatttggaattataaggctttttattaatggtccaaaattttaattgccaaaagttggaataattttggtc

SEQ ID NO: 218144 - DNA, 393 bp, Gossypium hirsutum
cccacgcgtccgcccacgcgtccgcaaactgggatctgaaaaggacaagcgcaaggatgctgataaagaagaaaaagtcaaaaagtctgtgagcatcaatgagttcctgaagccagctgaaggggagaggtactatggacctgggcgtggacgaggccgtggccgaggtcccagaggtgggtatggaggcaacacagccagcaatgtgcaagctccctcaattgcagatcctggacacttcccctcattgggtggcaagtgatgtccggcaccacaatctacgcaatgggtttcacttggaatccggtgtgaattattctatagtcaggagtccccccaccttccctcaaaaaaactcttaagacaaatcaccattatccttggtagaaacca

SEQ ID NO: 218145 - DNA, 404 bp, Gossypium hirsutum
cccacgcgtccgcccacgcgtccgcttgttgcttccctttttttaaaaaaataaaaaataaaaatcgccattaaggcttgaactgttcttcagccaaaatgggtatttctcgtgattcaatgcacaagaggcgtgccactggtggcaaaaagaacgcttggaggaagaagagaaagtatgagcttggaaggcaacctgctaacacaaagctgtcaagcaacaacagtcacgaggattagggttcgtggcgggaatgtgaagtggcgtgctctgaggctcgacaccggaaactactcatggggaagtgaggctgtgactcgtaagaccagcattttggatgtggtgtacaatgcatccaacaatgagctggttgcgactcaaactctggtgaagagtgctattgt

SEQ ID NO: 218146 - DNA, 409 bp, Gossypium hirsutum
ttcgtcgagcactactactccacattcgatgccaaccgggccggtttagccaatctctaccaggaaggttccatgttgaccttcgaaggtcaaaagatccagggctctcagagcatcgtggctaagctcaccagccttccttttcagcagtgcaagcacaacatcaccaccgtcgattgccagccttccggctccggcggcatgctcgtattcgtcagcggtaacctccaactcgctggcgagcagcatgctctcaagtttagccagatgtttcatttgatgccaacgccacagggaagcttttatgtgttgaatgacatattcaagttgaactacgcgtgaagacgatgattaatcaagggatgggagtacaatgcctgaggatttaaaacacgtttttgcctatttt

SEQ ID NO: 218147 - DNA, 386 bp, Gossypium hirsutum
ggctacttggacctctatttaaggttactttagaaggctgccctaccacaaccttctcgaatgtgttgcctaacaaatgttgggaaatggtgctacagcagttaaatcaagaaatcttgaggaggaaaaacctaggagaaagtgggctcctacctttgcaatctctgcagagcatcaacgggctcgaaatgtttggatttctctcaccacccataattcaggcaattgaagctctcgatcccaatcatcaatgttcggagtactggaatcacaagactgcttgtgttaacaatgaagttaaaaagtatgcgcttggattgagttgctcggtaggcgaatcaaaagcaaaaatttttggtgttgatttgacaaagcaagatcatgaa

SEQ ID NO: 218148 - DNA, 400 bp, Gossypium hirsutum
tgatgatgttttggctgatgtaaagcccttttcttttaacgctagaacgaaacctgcttctgctgtatctcatggttcgaactctgaaaagtccatgcagttcgatggtcaagctgagaaatgtgcgaaaagaaagaggaagaaccagtatcgtggaatccggcagcgcccatggggtaaatgggctgctgagatccgtgacccaaggaaaggggttagggtctggttaggaactttcaatactgctgaagaagctgcgagagcttatgatgctgaggcacggagaattcgtggtaagaaagctaaggtgaacttccctaacgagactccgcgtacctctccaaagcatgcagtcaagacaaattctcagaaaccactttccaagtcaaatttgagccct

SEQ ID NO: 218149 - DNA, 354 bp, Gossypium hirsutum
  unsure (1)..(354): unsure at all n locations
gtttgattagacaaccaaagtatggtcatctaaaggagctccatanggctattaagatgtgtgagcgagctttagtttcagcagatcccattgttacttcacttggagacctccaacaggcttatatgtatacatcggaatctggagattgtgcagctttcctatcgaattatgataccaaattcgctgcaagagtgctatttaacaacatgcattataacttgcctccttggtctatcagcatccttcctgattgcaagaatgcagtattcaatactgctaaggttggagttcagacatcacaaatgcagatgttaccgacaaattctgagacattctcatgggaaagtcatg

SEQ ID NO: 218150 - DNA, 446 bp, Gossypium hirsutum
atttacaacaacaaaaaaaatctttccagtttctattttctaaaaacaaaactgaaaatgtcttgctgcggaggaaactgtggctgcagctctggttgcaagtgtggcaatggctgtggaggatgcaagatgttccctgacataatagagaagactacaactgagactattgttcttggtgtgacaactcagaaaatgcactttgagggatctgagatgggagttggggttgagaatggatgcaagtgtggagacaactgcacttgcaacccttgcaattgtaaataagagggggggaaaatgaacaacaaagagaagcagagaggcctttgtctttttaactaaataaattctattactttagtatgtatcagcaaatcttcatgaggatttggttcttaattatgtgtaatgtgggcttttctgctatgtcagaatgtattatg

SEQ ID NO: 218151 - DNA, 376 bp, Gossypium hirsutum
gtattcggcgtggtcataaggggttatgtgttatagctggaaatatatctcccattgatgtcataactcatgttccaatcctgtgtgaagaggctgacattccctatgtttatgttccctcaaaagaggatcttgcaactgccgggtctaccaagagaccgacatgctgtgttctggtgctaaccaagcccacaaaaggggaactaagtcccgaggaacaacaaaagttaaaagcagattatagccacattgtagaggatgtatctgagctcacatcctctatgttttaagttaacaaaaaagttgtcattataacatttgatattgacatcctcttattttacttccagggggggaatatgctttactacttgtt

SEQ ID NO: 218152 - DNA, 436 bp, Gossypium hirsutum
caagattctagtgggtaataaggctgacatggatgaaagtaaaagggctgtccctacctcaaagggccaagctcttgctgacgaatatggcatcaagttctttgagactagtgcaaaaacaaacttaaatgtcgaggaggttttcttttcaatagccagggacatcaagcaaagacttgctgacactgactcaaaggctgagccacaggcaatcaaaattaaccaacaagaccagggagctggggctgcggcagctgctcaaaaatcatcttgctgtggagcttgaacaaactacattgcggatgagatctgaagggtacattttcttctctatggtgccattttgatcctgggaaaactaatttgttacaactattttgtttatattctcctgcatatcattattttacagctgctactgtctggtgtgaaatgt

SEQ ID NO: 218153 - DNA, 298 bp, Gossypium hirsutum
cggacgcgtgggtgttgaaggcatggatgtggtgaaagccattgagaaagttgggtctagcagtggaagaacttccaagcccgttgttgttgctgactgcggacagctctcttagagaagaaaaagagaactatgtgttaagttgggatgttgtctaatgtctagaatatttaatgtctgtcatttagactcttttatggtgctgtttttatcgtcactgggtttggtggttttcaagaacttgctttatgtagtttttacgattaactaccattaaataagatactctttttcgtca

SEQ ID NO: 218154 - DNA, 435 bp, Gossypium hirsutum
cttttggtcaccaacccaaagagggttgcgaaggctattgctgaaaaaacttgcaatgcccttcttctcaaggtcaatcaaattggatctgttactgaaagtattgaagctgtgaaaatgtccaagcaagctggatggggtgtgatggccagccaccgcagtggtgaaacggaggatacttttattgctgatctttcagtcggtttggccacgggccaaattaagaccggagctccatgcaggtctgagcgtttagccaagtacaatcagcttctgcgaattgaggaggagcttggtgcggaagctgtctatgccggagctagcttccgtgctccagttgcaccctattaagatgcttgtttagatgataatgtgctgagactggatgcgtgcggcagagcttcagtggtttgttgagaccctaaaacatatttc

SEQ ID NO: 218155 - DNA, 443 bp, Gossypium hirsutum
  unsure (1)..(443): unsure at all n locations
cccacgcgtccgcaagatccgaccattgtggagacactatttccaaaacacgcaaggacttattttcgtggttgatagcaatgatcgtgaccgtgtggttgaagctagagatgagttgcacaggatgttgaatgaggatgagttgagggatgctgtgctgctagtatttgcaaacaagcaagatcttccaaatgctatgaatgctgctgagattaccgacaagcttggccttcattctctccgccagcgtcactggtatatccagagtacatgcgccacatctggtgaaggactgtacgagggactggactggctctcaaacaacattgcaaacaaggcatagatggcgtaattgacttgtctgtctcagaaaatgccagcccctttcggaattattgatgtttctacgtccgntaaaatgttttggtttttcatgttctttt

SEQ ID NO: 218156 - DNA, 441 bp, Gossypium hirsutum
cccacgcgtccggaaaaatggagtccaacaccaaaatgtcagctcttcttttgctttgcatgcttttcatttcttcagtgacaccaattcttgggtgtggttcatgtgggaaagcaccacacaagcatcgaaagcctaagggaaagtcccctaaaggtcccatcactttgcctccccttgtgaaacctccaatcaagttgccaccggttgttcctccaatagttaagccacccattgacctccctccggttacagtccctccaattaacctccctccagggacggttcctccagtaactaagccaccaagtgggaaaccctgcccaacaccaccaaccaaggacacttgccccattgacacactgaaattgggtgcttgtgtggatctgctgggagggttggtgcacattggactaggtgacccggttttgaatcaatgtt

SEQ ID NO: 218157 - DNA, 441 bp, Gossypium hirsutum
  unsure (1)..(441): unsure at all n locations
cccacgcgtccgatttcctcgaacccgacattccttggcgcgaatacgcccctgaaacccaccacgcttccgccgcccccgtctctgctctcctcatccgggaactcctacccgtcgtcaagttctccgacctcgtcgacccgccggagagctgcgccgtgtgcttgtacgacttcgaagggcaggatgagatcaggcggctgactaactgccgccatattttccatcggagctgtttggaccgttggatggggtatgatcagaaaacatgtccgctttgtagaacaagtattgttcctgatgatatgcaacaaacgtttaatgagaggctgtgggctgcctctgggatccctgaagtctttggtgattattctcaaattactgctttgtagttatacctgtgcttcccaacaaaaaaaaagaggctnttttgtttatcat

SEQ ID NO: 218158 - DNA, 352 bp, Gossypium hirsutum
aacaacctgtcaagcagatattttacaagctgttttggtagcaaaagcgctttgcgagccgcttggactcatctgaacagaattcacttgtgacggtgatacatcttctacaccaagtcactatgtcatattctgggagattaagccaaaagaaggcaacatcaacaacaagaacggcaaagaacttagacacaaaggtaatgggacaatgttgctctaaaatggaagattcatcgcattgtacatatagaatgtgtatgaaggaaaacatgattgcagctttggagattatggttgttatacaaagatctattgaatcattaatgaaatactgtgtgactcaaaggagctt

SEQ ID NO: 218159 - DNA, 438 bp, Gossypium hirsutum
aaagaatataatcgcattggaggccaaacgagaccgattccttttctctgccagggagagagatttgagacgatgactgaaatttcaagaaatagatcgctccgtttcttactgtttttcgcttccgtttctctacactttatctcaggtttttctgatgactctaaaggttcaaacaacagctcaaagacaaaatctaatgcgattaataatactgggaccaaggtaatcttcatagtgcttggacttgttgcagttgggttgttttcatttttccttttcaagttgtggcaaaagaagaaacgagacgaacaatatgcccgtcttttgaagttgtttgaagaagatgatgagctcgaggtcgagcttggcctgcgggactagcagcacattgagaactgagctcgtcctaattgaggcttaaatggcaacaatggc

SEQ ID NO: 218160 - DNA, 438 bp, Gossypium hirsutum
aaagaagggctcagctgttcagaggccacgcagccgtacactgactgccgtacacgaggcaatgctcgaagatgttgttttacctgctgagattgtcgggaagcgtactagatatagaatcgatggatcgaagataatgaaggtctttttggaccccaaagaacgaaacaacacagaatacaagctcgaaaccttttcagcagtttaccggaagctcgcagggaaggatgttgtgtttgagttcccagttacagaggcataaagaaggcctttttaaaagatatgacaccttctgtctggtccttttacccttgaaacttctttttgtgagggtatttaaaattttgacatcgacatttattttctttgtgtcatggggaatttattttctttgttatgaacgtatatttcactattgggtaatggcatttaattatg

SEQ ID NO: 218161 - DNA, 445 bp, Gossypium hirsutum
  unsure (1)..(445): unsure at all n locations
cagattcgcaaccaaatcgatcgaaagagagatcaattctgtcaacgacaaccctttgatcgacgtttcgaggaacaaagcattacatggtggcaatttccaaggtacacctattggtgtttcaatggacaatactcgtttagctatcgcagctattgggaaacttatgtttgctcagttttcggaactcgttaacgatttctacaacaacggtctcccatcaaacctctccgctagtaggaacccgagtcttgattatggtttcaaaggtgctgaaatcgcaatggcctcctattgttccgagctccaatacttagctaatccggtcactaaccatgttcaaagtgccgaacaacacaatcaagatgtgaactcattaagactaatatcatcacgaaaaacagccgaagcagtcgatatcttaaaactcatgtnctctacatac

SEQ ID NO: 218162 - DNA, 354 bp, Gossypium hirsutum
tcaccgtgcatataatcccaacctctgtccctgtatccgtaaggaacatcatcgcggacagaaaggattccttcccgaatttctttacaacaactaagacagagttcatatgaacattttgggcagctacgatgaaggtcgaagattgaagttgcacagtggtcactgttccaattttagaaagacggtcaatgataacttatgaataacagatacaatcacatgaaaaattgtatgcctatgtagagaggaaatgcttaccaatagatacgttcatcggcataacaaagtgtttgttgtatttcaacttcagaaggcagtaatcctatataaagaaccatttgtcaggaaaaa

SEQ ID NO: 218163 - DNA, 437 bp, Gossypium hirsutum
cggacgcgtgggcggacgcgtgggcggcgatgtagataaagatggatatctggactacggagagtttgttgccatttcagttcacttgagaaagatgggcaatgacgagcaccttaaaaaggcctttgagtttttcgatagaaaccaaagtggttatattgagattgaggagctaagagatgccttaaccgacgaagttgaaacaaacagtgaagaagtcattagcgccatcatgcatgatgtggacacagacaaggatgggagaataagttatgacgagtttgcagtgatgatgaaggctggtacggattggagaaaagcttcaaggcaatattctcgagagaggttcaacaatctaagtctgaaattgatgaaggatggatcattgcaaatgaacaatgagcccagaagaccaaacaccattgacaaagttctac

SEQ ID NO: 218164 - DNA, 406 bp, Gossypium hirsutum
cccacgcgtccggcgcctcacagtgcaaggggctgcgttgcgaccaagaaatccagaaaacaaagcaatggttgttaatgaagtggagaagaatgtttggccagaaatcgtggcgggcaaggtgaagcctatcatctacaaatcatttcccttatctgaggctggggaggctcataagctaatggaaagtaatgagcatattgggaagatactgcttgttccatgatgctgctaatggttttatcttatattgtgacaatggtgtgtcttttgataatacaatggagccacttgttactgtgtagtgtgtaccaatttgaaatcatgcagaactgatgtgaaagatttctaatacttgccaatggcattgtctgataaatataataagaacaagttaatttccccc

SEQ ID NO: 218165 - DNA, 421 bp, Gossypium hirsutum
ggagatctcaaagtcggcgctttctactttcagagccaaagaagaggagattgaaaggaagaagatggaggttagagaaaaagttcagcttcagttaggccgtgttgaagaggaaacgaaacgtttggccacgattcgtgaggagcttgaagcactggcagatcctatgaggaagaatccttgtgcccattgctgtgccatcttttctgaggcgaaggttttgcagttgcgttttggttaagactctcctctgatttgatcagtctgtgattttttttaaaaggaaaagaaaaaaaagagtttacaatggttttgaggaggaaggtacgatgatggaacgaatttggatatgaatggtagggaagggttagatgtttacgtaaaagaagagcttgaaagataagcaaatgccctttttttg

SEQ ID NO: 218166 - DNA, 439 bp, Gossypium hirsutum
cagtagatgacgctgatgctcggctggctctttataggttgatagacataagcatgggtgtcattacacctttatcggaacagctaacaaagccattgccaaatgctatggctctagtaaaccttaaggaattatcaactggagcttacaagcttttgcccgaaggtacacgcttggttgtatctgtacgtggtgacgagccctatgaagagctggaaatcctgaaagacattgatgctacaatgcttcttcataatataccttttgatgaagaaaagattggtcgagtgcatgcagcaaggaggttatttgagtatctatcggagaacagtcttgatttccctgtaatccatcatattcagtttccaaatgggactcacagggatgacttagtcattaatgctggcaccaatgcttgagcccttcttgtggatggact

SEQ ID NO: 218167 - DNA, 428 bp, Gossypium hirsutum
  unsure (1)..(428): unsure at all n locations
cccacgcgtncgcccacgcgtccgcagctgcacaacttccaggtgattgggtgtctataggacacagtgagcaatggctttggtattctgtctacgcaagcaagcaagtcagttggcgcacaagggcattggtggtctcagactggataaggcgttttattttcgggagggataccagtggcatttaaaaggtccctgggcaacttacaaacattaagatgtctacagtttgggattgaatgctgtagaaaaattttggtttttcctttaccatttaccaattcattcatttgataataattgctgccttgctttggcggttttgaaatgaattttgttacaagtttatactggtttttgaactttatatctgagatccgtgaaaaatatacctatttgcatattggtatctcttctccaagttctta

SEQ ID NO: 218168 - DNA, 448 bp, Gossypium hirsutum
ccaaatccttcattgacctattgcttaaaccatccgaagaagatctcaaatgctggccccatagttttgagtttcgtctgagagtctcacttgcggctgatggaagtcttgcattaatatcacgaattaggaatgtcaacgggaagccatttagtttctcttttgcctatcatacatacttgtcagtttcggacatcagtgaagtgaggatagaagggctggagacgcttgattacctagacaacctttgccaaaaagaacgctttactgagcaaggagatgccataacattcgaatccgaggtggatcgagtctatctcagtactccaaacgtagttgctgtacttgatcatgaaaggaagcgaacatatgttattagaaaggatggactacctgatgttgtggtatggaatccatgggagaagaaatcgaaatcaatggtagattt

SEQ ID NO: 218169 - DNA, 356 bp, Gossypium hirsutum
cttctccagctgtaggcgtacagccatctcatccgatttttgtggtacttgccccagttgtatcatttctattgccaagataccaagtcagtatcaccaataagaagaacatgccagtttgtagggacccagaggcgctggtggccaagtattcggatccactggtgtatacaggacctctccgagtgagaactggttatgaaattcttagaactacatcctacttgcagcagaatatgaacagattgagggttcctttgcttgttctccatggcaccgatgacactgtaactgatccctaagcttctcagaaactgtatgaagcagcttggctaacagacaaaacgatcaaattg

SEQ ID NO: 218170 - DNA, 283 bp, Gossypium hirsutum
cacaaagataaggatgctgaaccaacagaatttgaggagtctgttgcgcaggcattctttgatttggagaataccaatcaagatctgaaaagtgaccttaaagatctctatattaattcagcagtccaaattgatgtttctgggagccggaaagctgttgttgtccatgtcccatatagattgaggaaagctttccgcaaggttcatgttaaaccttgtgagggaacttgaaaagaagttcagtggcaaggatgtgattcttattgccacccggaggatatta

SEQ ID NO: 218171 - DNA, 321 bp, Gossypium hirsutum
cccacgcgtccgtttcatccaatcgaccaaattcagagcttacaaaagaaaaatggccggaatcggacctttaactcaagactgggagcccgtcgttattcggaaaaagcccccaaacgctgccaccaagaaggatgagaaagtcgttaacgccgcccgtcgagccggtgccgagatcgaatccgtcaagaaatcgaatgctgggacgaacaaggcagcatcgagtagcactactttgaatacaaggaaacttgatgaggaaactgaaaatcttgctcatgaacgagtgccaactgaactgaagaaagccatcatgcatgc

SEQ ID NO: 218172 - DNA, 413 bp, Gossypium hirsutum
  unsure (1)..(413): unsure at all n locations
cgtncggccacgcgtacgtgaaacctccaatttatttgtcaccggttgctcctccaatagctaagccacggattgacctccctacggttacagtccctccaattaacctccctacagggacgggtcctacagtaactaagccaccaagtgggaaaccctgcctaacaccaccaaccaaggacacttgccccattgacacactgaaattgggtgcttgtgtggatctgctgggagggttggtgcacattgaactacgtgacccggatttgaatcaatcgttgccggttctttcaggacttgccgagctcgaagctgcagactgcttgtgcaccacccttaaacttaaggctctcaaccttaaaatttatgtgccactggctctttaactccttgacacatgtgggaaaacaccc

SEQ ID NO: 218173 - DNA, 431 bp, Gossypium hirsutum
ctttttcccgcgtgtatttggggtggcaactcttgagaaaacagctcatgatgacatcaaaaagcttgcctcagctgtatatttgcaagtgagcattataagtcaggccctaatatttgtaactcgatctagaagttggtcctttgttgagcgtccgggtttactactattggcggcctttgtcatagctcagttgattgctactcttattgctgtgtatgccaattggagctttgctgcaattgaagggatcggatggggttgggctggtgtgatctggctttataatattatcttctatatcccacttgatttcatcaagttcttcattcgctatgctttgagtggccgggcgtgggatcttgttattgagcaaaagattgctttcacaaggcaaaaagatttcggaaaagagcaacgtgagcttcaat

SEQ ID NO: 218174 - DNA, 430 bp, Gossypium hirsutum
cccacgcgtccgcccacgcgtccggttatgatggacgtgtgattatttggaaggaaggcaatcagaatgaatgggctcaggctcatgtatttgatgaccataagtcatctgttaattcaattgcttgggctcctcatgaactgggactttgtttggcatgtggttcttctgatggaaatatatcagttttcacagcaagggcagacgggggctgggatgtatcaaggattgatcaggctcacccagtgggggtaacatctgtttcatgggctccatcaacagcacccggtgctcttgttggttcgggtttgctggaccctgttcagaaactttgttctggtgggtgtgataacactgtaaaggtgtggaaactctacaatggaatctggaagatggactgctttccggctctccaaatgcatactgattg

SEQ ID NO: 218175 - DNA, 401 bp, Gossypium hirsutum
gcgctatatatccttaggagtctctatgacagttacagtgagagccaagaaaacaaagtgaggtgcattatctgctatttccaaaggatatgtttgcaaatgccgacaggatctgtcttatttgagctcaagcttctctctttagaatatcatccttggcaatcattcctctcttatccgtatgctgatttttggaccaaatcaaatatccccctctgcccttttcaggtccacagctcaggcttgatagaagatcacgctattgaggctcttgaagtggattttgctaataaatatcttggtggtggtgctctacataagggctgtgtgcaagtctgatttttccttttctgcttcattgactccattattgacattatggactactcttttcattttcc

SEQ ID NO: 218176 - DNA, 227 bp, Gossypium hirsutum
cccacgcgtccgcccacgcgtccgcccacgcgtccgtttattattaatgtcctctttcattggtgtataaagcgatgacatgattacaataattggttttaatctatgatgctcagacttgagatgcttggctgagtaattctatgaaaaaaaaaaaaaaaaaaaaaaaaaaaaaaaaaaaaaaaaaaaaaaaaaaaaaaaaaaaaaatttctgctttcctttttcc

SEQ ID NO: 218177 - DNA, 402 bp, Gossypium hirsutum
cccacgcgtccgaattttgaatggacattgggatttacaattaggtttggccttcaccatgttgatttcaccactctcaagagaacaccaagaggatcagcaacttggtacaaacagttcattgccaaccacactgctgagaagattttaatgcctcaacattatccagggaatcaactgggacaacatttcaataccatttgaaaaactttgttcaaactttatcttattagaattggtccataaccaatgatcatggctgctgatttctgaaccccgaaaattatttattggaaatctagagtcggctattagggctaaagaagacaaaaaagggttctaaattctgtacaaagcagattatttggagataatatgcatcttatcatcgagttttcgaat

SEQ ID NO: 218178 - DNA, 395 bp, Gossypium hirsutum
  unsure (1)..(395): unsure at all n locations
cccacgcgttcgcccacgcgtccgcgccgaattcatcgctactctccttttcctatacgtcaccatagccaccgtcatcggccacaagaaacaacacgatgcatgcatgattttcattcttgtttactgcaccgccggtatctcaggtggtcacattaacccggcggtgacatttgggttgtttttggctaggaaggtgtcgcttataagggcggtggcttacatggtagctcaatgtttgggtgctatttgtggtgttgggttagttaaggcattcatgaagagtgaatacaactcccttggcggcggtgctaacacggtggcgactgggtataacaaaaggactgctnntggagctgagattattggacattcgtgcttgttacactgttttt

SEQ ID NO: 218179 - DNA, 365 bp, Gossypium hirsutum
cggacgcgtgggtgctaagtgggattgatttagattctggaatgagggttattgatgatacattcagattgtcaaaatgtgtccaaattgcccgtctctatcttgaggatgatgattctgttaatgcagaagcttttattaataaagcttcattcttggttagcaacagtcagcatgaagttttgattttacaatacaaggtatgttatgcaaggattttggatttgaagaggaagttcttggaagcagcattgcgatactatgacatatctcaaattgagaagcgacaaataggagacgaaacaattgacgaggatgctctggagcaagctctatctgctgctgttacatgtacaatattaact

SEQ ID NO: 218180 - DNA, 327 bp, Gossypium hirsutum
cccacgcgtgcgatcacgcattcgtcccagctgctgcctctgagttgtttggcttgaaaaagtttggggctctgtacaatttcctcacgctggcaaatcctgcaggttcacttgtcttctcaggtgtaattgctagcagtatttacgaccatgaagcagagaagcaagctcatcaacatcatatccagctgcagatgtcaggcttacttttctcagggttgtatggtcaggatgaagtgctcaagtgtgaaggttctgtatgcttctttctgacttccatgatcatgtctcgattttgtgtcattgcagcttgtttaagcatgatac

SEQ ID NO: 218181 - DNA, 344 bp, Gossypium hirsutum
agcgaacatggcgataggagttaaggccttgcacttgtcgtttgtgcctcatgccctcgcgattgccggcgctgttatggtattggtttggtgcattcacttcaggggtggattagcttgggaatcttctaacaaaaatctcatctttaatctccatcctgtattgatgttgattggcttcattatcttaggaggtgaagccattatgagctacaagtctttgccactgaagaaggaagttaagaaagtcatacatcttgtgctccatgccactgctctgattctaggcattattggaatctatacggcattcaagaatcataatgagaattcaatacctaatc

SEQ ID NO: 218182 - DNA, 333 bp, Gossypium hirsutum
cggacgcgtgggcttttcttatttttcgttttaatttctcgagcttttacggttcaaaaatggcggacaaagctaaaaccgaaaacccatcttttctccatggaaaatacgagcttggccgtatgttgggtcatggaacgttcgccaaagtctaccatgcgaagaaccttcaaacagggaagaatgtcgccatgaaagtggtgggcaaagagaaagtgatccaagtcgggatgatggagcagatcaagcgagagatctccgtcatgaaaatggtgaaacaccccaacatcgtcgagctgcacgaagtgatggcgagcaagtccaagatttact

SEQ ID NO: 218183 - DNA, 331 bp, Gossypium hirsutum
ggcctcaaatcccaaggtcttctttgacatgacgatcggtggtcagcccgctggtcggattgtgatggagcttttcgcagattgcactcctcgcactgcggagaacttccgtgccctctgtactggcgagaaaggcgtcggccgcagcggtaagcccctccactacaaaagctcttctttccatcgtgtgatccctaactttatgtgccaaggaggtgacttcaccgccggaaagggtaccggaggtgaatccatctacggatcaaagttcgctgacgagaacttcatcaagaagcacactggtcccggtattctctcaatggctaacgct

SEQ ID NO: 218184 - DNA, 437 bp, Gossypium hirsutum
  unsure (1)..(437): unsure at all n locations
cggacgcgtgggcggacgcgtgggcggacgcgtgggcggacgcgtgggcgagatgattgttttcaggcaactcaccaagttagaagtgaaggaaattgccgatataatgctcaaagaagtgtttgacaggcttaaaagcaaagaaattgagctccaagtgaccgaaaggtttagagaaagggtggtggaagaagggtacaacccaagttacggagcaaggcctttaagaagagccataatgagacttctggaagacagcatggctgagaagatgcttgcaagggaaatcaaggaaggtgattcagtaattgtagatgttgactctgatggaaatgtcacggttctcaatggtagcagtggcacttccgagtcattgaccgatccgattccagttgtgtaagccacataagccactctagatatgtntgtttgtaccc

SEQ ID NO: 218185 - DNA, 425 bp, Gossypium hirsutum
  unsure (1)..(425): unsure at all n locations
ctttgaagtcacactggattggaaaggagtattacaagagagggcctaatggaaatgagatacagaggacaaatgtacctcatatccggctggaatttcgtgacaggatctggagagaggagatgcagctggtgtacctgggtaaggccattatccctgaagaagtggagaagtaatgtgcaaccatactgcacaaaattccattgtttaacactacacatcacatatactgaggaggaggcggcaaagaagagaagctggcctttggacctgaatcctgcatgaaagaagggatatgacgatcaacatgggaagctgatggatggtatttacaaagccactggttgggcaaagcaaaagcaaaagcaaagcttaacttgtangtggtggtggtgggaggaaacatcttgcaagatgacaaacac

SEQ ID NO: 218186 - DNA, 377 bp, Gossypium hirsutum
gccaaactgttgctgacatgatcaagggaaagtccccagaagagatcaggaagactttcaatatcaagaatgacttcaccccggaagaggaagaagaggttcgtcgggagaaccagtgggcattcgaatgaagggtcaatttcgagtgccggttcaattgtatcaaacttctctatatataaaaatgtagtttgttgctctgacttttcatctgtacttttggatattctgtgagctcttttgaaactcttcaaagtgtcatcttctatgttctttgcctgtcttcactaaaaaccagtctgttgtatccaagtaatgtcttttaatcgtggtctgtgatatgaatgaaaatggtgtctaaattatgcttgccattt

SEQ ID NO: 218187 - DNA, 429 bp, Gossypium hirsutum
ggaagagcttgatggatggatcacggcggctggcttgcctaaatcctctgatgtaagaggtgtaattgctccgcatgcaggttattcatattcaggtcgtgctgcggcctatgctttcggaaatatagacccaacaaacatttctcgggtattccttcttggtccatctcaccattattacactccaaaatgtgctctgtcaactgctacagtatacaagacaccaataggggacctacctattgatttggaagtcatcgaagagctgaaagctacaggaaaatttgaactgatgaatcttcgtgttgatgaagctgagcatagcatggaaatgcacttgccttatcttgtaaaagtatttgaagggcattcaatgaaagttgtaccaattttggttggtgctcttagtgcggaaaatgaagcaatgta

SEQ ID NO: 218188 - DNA, 416 bp, Gossypium hirsutum
  unsure (1)..(416): unsure at all n locations
cggacgcgtggggttgaatatgctttaagggatgatgatgagagggataacagattcgatagtcctaaaagaggaggttacgatagacgtagagatagtccatatgggaggtccccaagtcctgtataccataggcgacaaagtcctgattatggtagagctcgtagtcctgtttatgaacgttataatggtcctgcttatgacagacgcaaaagtcctgattacgggaggcataggagtcctgaatatggcagataccgcagccgatcacctgttcgaaggtcccgaacatagaagggcatcagattaacggtgaaaagtatttcgtagctctatgcctagctntctatgtantttggtatgtactttaaagaccctatngntcatngtaatatatgtacttggctttggtttna

SEQ ID NO: 218189 - DNA, 446 bp, Gossypium hirsutum
cggacgcgtgggattgggcaattgtcccagctgctgcctctgagttgtttggcttgaaaaagtttggggctctgtacaatttcctcacgctggcaaatcctgcaggttcacttgtcttctcaggtgtaattgctagcagtatttacgaccatgaagcagagaagcaagctcatcaacatcatatccagctgcagatgtcaggcttacttttctcagggttgtatggtcaggatgaagtgctcaagtgtgaaggttctgtatgcttctttctgacttccatgatcatgtctggattttgtgtcattgcagctgttttaagcatgatacttgtgtaccgtactaagactgtttatgccaacctttatggaaagtctcgcacttgatttcaagaatgcaatctaggaaggtctctcatggatgttttgtcccttttaagtggcattttt

SEQ ID NO: 218190 - DNA, 345 bp, Gossypium hirsutum
taaaatccgggtcaacgcaatatctgctggccctctaagaagtcgtgctgcgaaagcaattggatttattgacatgatgatcgaatactcgaaggccaatgcacctctccaaaaagaactatctgcagatgaagtggggaatactgctgctttcttggcatctccattggcttcggctatcacgggtgccgtcatatatgttgataacggtttgaatgcaatgggtatcggagttgacagtcgcatatttaaagacctcaacattccgagcgacaagcactagaatcgggtacagcaaggtcgagacccgaaattcaatgccgaatgtttagtatcgatgtttaa

SEQ ID NO: 218191 - DNA, 410 bp, Gossypium hirsutum
cccacgcgtccggccgatcagaaggtacccaaggaagagcgacgccacattcccaacgagaccaatgtgggtgtacggatcaatatgggatgcgtcatcttgggctaccgagaatggtaggtacaaggctgattataactaccaaccctttgtaggccggtacacgaatttcaaagtaagcgcctgcaccgccaacagtcccgccccttgccgcccgccttctgcctctccgtacgggtccagcagccttagcccacagcaagctttggccatgaattgggtcaaaaacaactatttggtgtatgactattgccatgatcctaagagggatcacactcagatacccgagtgctaattaaatgtgagtcatttaaaactttacaaaaaggaaaatgtaacaattgttgatc

SEQ ID NO: 218192 - DNA, 229 bp, Gossypium hirsutum
aggatttcgatcctattgtgttggccttcgggatcggagtaatgattaacagggaagatgatttcatggacttctaaatgttgtcattcttttttcttatcacaatattggagcttcgattttcagatgacattggtgtgctgtaaaactaacagacaaggggacaaacaccatttttaatgaataaacacagaaaatcaaatgaattatggctttcttttttcttctc

SEQ ID NO: 218193 - DNA, 343 bp, Gossypium hirsutum
gctctacagcacaacaaaaaaggcaactagacttgagaaagaaaaacagtctcaaaatgcagcagaagtcaggcttcctgatcctcttgctctccctcattttccttcctctcatcttctccgacgccagaaaggaggctcccctcggaggatggagtccgatcaaagacaccaaggacccacacgtgataaagatcgcggaattcgccgtcgaggagtataacaagcagtcaaatgggagtttaaagttggttaaggtggtgaaaggcgagacccaggtggtggccgggacaaactaccggttgattttgcaggcgaaagaaaggaccttcgataacacgta

SEQ ID NO: 218194 - DNA, 326 bp, Gossypium hirsutum
  unsure (1)..(326): unsure at all n locations
cccacgcgtccggngagtcagaaggaggcttcccttatgaagctcatatgtttcctgaaatggaatttgtgtgaatgcttcccagtatcacaaaatcatgaccatggacgtatctgatgcttttcctttcctgcaagctatcatctggtcccatacttgaggcactacatgttgaccctgcatctggtgtgtctcttgataaagaaaagagcaataaagtgtcaaaaccagcagtaagtggattaccaacattagccaagttgacaaaagcaagtgcctccggaggaccctcaaaacaggggcagattgagaagaaagaaacttct

SEQ ID NO: 218195 - DNA, 335 bp, Gossypium hirsutum
gccatgttgtaaccaagaaggaattggctccacgtccatctaacagaaaaggaaaaactagcaaaagagtccattttgtgaggaacttgataagggaagttgctggttttgcaccgtatgagaagaggattacggagcttttgaaggttggtaaggacaagcgagctctcaaggtagctaaaagaaaattgggaactcacaagagagccaagaagaagcgtgaagagatgtcgagtgttctccgcaagatgagggctcatcatcctggaggtggagacaagaagaagtgaagcttttatttttgttgatttatggacaagcttgaaaggttgatt

SEQ ID NO: 218196 - DNA, 367 bp, Gossypium hirsutum
cccacgcgtccgcaagccatccatcaatggttgaggaggaggaagaggaggatcttgggtgggatgaaattgaggatctcagcagcattgatgataagaaagaaactcatggtgggagcccgagctccaatagggatgagctgaggaagagactaagtacagctgaagaagaggaggatttaagctgggatattgaagacgatgacgaaccgattaaagcttgatgaaaagccttaagtttcatctgaaattgttgatgtttattgctcataatttgctgcattgtttccttttttttcccttgtgttcctcatatttgtcccctggattcatttctcgtttgaaatgcaaacatctattatcgtgt

SEQ ID NO: 218197 - DNA, 404 bp, Gossypium hirsutum
cccacgcgtccgcccacgcgtccgcccacgcgttcgcaaggtgtgggacaagccatggatggatttcaaggagttacaggatttcaaggttattggcgatgctcccgccggttgtacttccaccgcttaaggtgactggagattgtagaggaaaggatatcaggataccgaatgcgggttttaaataaatgtaactgtcttatgttaatttggatttagactactaaattcagtggtattgaacttaagcttatctagaacaatgaatgaataacgtctattgatgcaaagtacataatttacctgtgtcccttgtaccctatttcttctgtaattttagtatgataccattaatctgaagtaaatctacattttgggggatttattctcatgactgtctttct

SEQ ID NO: 218198 - DNA, 279 bp, Gossypium hirsutum
cccacgcgtccgcaaagctggaaagaaatcggggaaggctgccaaggatccaaacaagccaaagaggcctgctagtgccttcttcgttttcatggaggagttccgtgagcaatacaagaaggatcaccctaaaaacaaatccgttgccgctgtcggcaaagctggtggagataaatggaagagcttgtctgaagctgaaaaagcaccttatgtagccaaggcagaaaagcgaaaggtcgagtatgaaaagaacatgaaggcctacaataagagacaggc

SEQ ID NO: 218199 - DNA, 302 bp, Gossypium hirsutum
gccacgcgttcgggttttctattccgccaactctccctccaatttagatgcagatcttggttgggaccctgaccggcatgaccatcacccttgaagtcgcgagttacgacacgatcgacaacgttcaggcgaaggtccgggacacggcagggatcccaccagacctacaacgtgtcatattcgtcggaaaacagctcgcatatggccggaccttggtcgattacgacatccagaaggagttcaccctccatctacgtctccgtatacgtagcggcatgcaaatcttggtcagaaccatgatc

SEQ ID NO: 218200 - DNA, 444 bp, Gossypium hirsutum
  unsure (1)..(444): unsure at all n locations
cggacgcgtgggcttttcttatttttcgttttaatttctcgagcttttacggttcaaaaatggcggacaaagctaaaaccgaaaacccatcttttctccatggaaaatacgagcttggccgtatgttgggtcatggaacgttcgccaaagtctaccatgcgaagaaccttcaaacagggaagaatgtcgccatgaaagtggtgggcaaagagaaagtgatccaggtcgggatgatggagcagatcaagcgagagatctccgtcatgaaaatggtgaaacaccccaacatcgtcgagctgcacgaagtgatggcgagcaagtccaagatttacttcgccatggagctcgtccgcggcggcgagctcttctcgaaaatcgccaaaggtcgtatcaaggaagacgctgccagggtttacttncagcagctcgtttccgccgtcgatt

SEQ ID NO: 218201 - DNA, 409 bp, Gossypium hirsutum
gctaagggggatacggccaagcgcattgttctggatgcaaagatagactatcctgcagcatgtaacgctatggaaacgcttcttgtacacaaggatctgtctagtaatggtttgctcaatacacttaccaaggaactccaacatgaaggtgtgaccctttatggtggaccaagagcgagttccttgttaaatattcctgaggcacattcatttcatcatgagtacagttcaatggcctgcacagttgaaattgtggatgatgtgcaggctgctattgaccatatacatcaacatggaagttctcacactgattgcattgtcactgaaaatcatgaagttgctgaaattttcttacatggagttgacagtgctgcagtatttcataatgcaagcactcgattttgtgatg

SEQ ID NO: 218202 - DNA, 302 bp, Gossypium hirsutum
cggagaagcacattctctgaaagttgaaagcattttgtacaaagcaagttcagactatcaagaggttcttgtttttgagtcatcaagctacgggaaagtgcttgttcttgatggtatagttcagctgactgagaaggatgaatttgcatatcaggagatgataactcatcttcccctttgctcaattccatcccccaaaactgttctggttgtgggaagtggtgatggtggggttcttgcagagatttctcggcacagctctgttgagctcattgatatatgtgaaatagatacgatggtta

SEQ ID NO: 218203 - DNA, 283 bp, Gossypium hirsutum
cccacgcgtccgcggaatttcttttcttcaattacaaattaatcaaattttctttctttctttttttaattttaaaattaaataccttaaaatccatggcggtattcagattggcgccggaagagtcaccggatccaacccaacaacatccaccgccgcaacaacagctgcaggccggtcgagaagtggcgtccgacgacgagcggtcggtggctgcagattcctggtctataaagagcgattacgggagcacacttgacgatgagcagcgccacgctgatgc

SEQ ID NO: 218204 - DNA, 450 bp, Gossypium hirsutum
tgagattttagggttaaattagtgaggagagaatgaggaagccttgctgtgataagcaagacacaaataaaggggcatggtctaagcaagaagatgagaagctcatcaattacattcgaattcatggcgaaggttgctggcgtactctccctcaggctgcagggctccttcgatgcggtaaaagttgtaggctgagatggataaattatctaaggcctgaccttaaaagaggcaactttactgaagatgaagaggatcttattatcaagcttcatgcactcttaggcaaccggtggtcgttgatagccggaagactacctggaagaaccgacaacgaggtgaagaattattggaactctcatctaagaaggaagcttataaacatggggatcgatcccaataaccatcgtttgatcactcacaatcatcttcctcgcccacatgatccca

SEQ ID NO: 218205 - DNA, 454 bp, Gossypium hirsutum
ggatatatggctccggagtacctagcccatggccagttaaccgagaaagcagatgtctatagtttcggggtgcttttactcgaaatagttacagggaagcaaaacaacaagagcaaagcaacagaatattcagacagcatagtaacagttacttggagacactttcagttagggactgtggaggagatttatgacccaaatctaatgttacacaatgacaaccatggcagcaactttaggaatgaaattttcagagtggtacaaattggacttctttgcacccaagagatcccatcactaaggccatcaatgtcgaaggtactacacttgctaacaaagaaagatgaagacctctctgcacctactaatccaccttttttggatgaaaagatggaattcaatgagacaagtgacaacgaatgctatcccctcaaccgagctgataatgattcaa

SEQ ID NO: 218206 - DNA, 440 bp, Gossypium hirsutum
aggcacgcgtccggtttcatcatcgtcgcttgaagtaggaacagttccagatgggaattaccacgcaacacaagtgggtggttcaatcgatcgagaagctagggttttaaggtacaaagagaagagaaagaacaggaaattcgagaagacaatacgatacgcttcaagaaaggcttacgctgaatcaagaccaagaatcaaaggtcgattcgctaaaagaacagaaacccacaacgatgatgtcgatcacatgttcaataactcgtcttcttttgctgttggtcctgctggtttcatggcggaaacagactatggtgtcgttccatcgttttgaatgttgatgttttatgtttggtttaattctgtaatgtattaaattatttaatccaatttccagcaaagtagaaataaccttatggccattgaaaatcaaggaagat

SEQ ID NO: 218207 - DNA, 372 bp, Gossypium hirsutum
cccacgcgtccgcccacgcgtccgcccacgcgttcgcccacgcgtccggaacagagcaacaaaacgaaggaatattcaatgtttgttccctgcaatggcggtttcaagcatagacactcaaaacccacccagcaaagcgacagctccgatcgaaattcactgcgttaaatgtgagtcctgcggcttcacagaggagtgcacccttgcatatatactgcgtgtccgggaacgttaccaaggccgttggatttgtgggctgtgcatcgaggccgtcaaagatgaggctctgagatcggatacgcttatttccaccgaggaagcactggaccgacacatcaaattctgcaatcagttcaaggcgtcgagttcttt

SEQ ID NO: 218208 - DNA, 388 bp, Gossypium hirsutum
  unsure (1)..(388): unsure at all n locations
ttctactaaaccagatgaactaaaggctacaacagaaaagttgaagctgctcttcattacctcgatcaaaaacccagggtactgaataaaaatatgccagctattttcttcggcacaaccgcacctgggacaaagagtgttcatcactaccctctttattttaaggttgacaaaggaagggataaaatcccaagaaatcctccaaattgtcatctgaatctttgaagggatatgtaacttccataatttgttgtagaaattttttgtctcggtatgtaataataaatcattagggtccagattagaaccatgtaatagtttataggcactcctcaccgagaactcccctatcggttctcctctccatactngaagatcttcttgttct

SEQ ID NO: 218209 - DNA, 403 bp, Gossypium hirsutum
aggttcttagtattataccacaatcccttgttcttttttctggaactgtgcgattaaacttggatccatttaatgagcacaatgatgatgacctttggcaggctttagaaagggcacatttgaaggatgtgatcttgaggaacactttccgtctggatgcaaaggttttggagggtggggagaattttagtgttgggcagagacagttattgtgtcttgcccgagcattgttgcgaaggtcaaagattctggttcttgatgaagcaactgcggcagtggatgttaagactgatgcttttatccagaaaaccattcgtgaagaattcaaatcttgcaccatgctgattatcgctcacagactaaataccatcatagactgtgaccggattctcgtactagatgc

SEQ ID NO: 218210 - DNA, 405 bp, Gossypium hirsutum
  unsure (1)..(405): unsure at all n locations
cccacgcgtncgcgaatatgattatctgttcaagcttctgcttatcggcgattcctccgtcggaaaatcctgcttgcttctcagatttgctgatgattcttacgtggatagctacatcagtaccatcggtgttgatttcaaaatcagaacggtggagttggatggcaagacaatcaagctgcaaatttgggatactgctggacaggagcgttttcggactattactagcagctactaccgaggagctcatgggataatagtcgtctatgatgttaccgagatggagagcttcaacaatgtcaagcagtggttgaacgagattgacagatatgctaatgacagtgtatgtaagcttctggttgggaacaaatgtgatttagttgagaacaaagttgtcgacacgca

SEQ ID NO: 218211 - DNA, 309 bp, Gossypium hirsutum
cggacgcgtccgcccacgcgtccggtgtggaaaccctcatgccatcatcaggaagtacgggctcatgtgttgcagacagtgcttccgtagcaatgccaaggaaattggattcattaagtaccgctgaggaatgtttatatggctagaagttggaaacactttttggctagtatgaacctttgtttcgaaattgtagcaacttttaagataacattgctgttttttgttgaatttagtttaagagcttgaagttttggttctgcaaaggataatttgttgttttctcaatgaagtaatcatactgttttt

SEQ ID NO: 218212 - DNA, 422 bp, Gossypium hirsutum
gcaaaatcgaaaaatggggcagattcaatactccgagaaatacttcgatgatacttatgagtacaggcatgttgttctcccccctgaagtggccaaacttctccccaagaatcgcctactctctgaaaatgaatggcgtgcaatcggagtacagcagagtcgtggctgggtccattatgcaatccatcgccctgaaccacacatcatgctcttcaggaggcctctcaactatcagcagcagcaggagaatcaggcccaacaaagtatgcttgctaagtaattacatcagtatttagcatccaaaacaaaaagggtgaaaccaaagctactttgctagtgtttatcctcttcctaaacagtttgggtgttgtggattcctggattgttttgtattttagttctccactttggagaaatccatg

SEQ ID NO: 218213 - DNA, 421 bp, Gossypium hirsutum
cccacgcgtccgagctgtttgcttactctctctcgtttgtttcaaaacccctagccgcttccttaaatctctgtgtctctctcataattttccttgttattcttccccttcaagtgaaagcattataatggcattctctagcaaacttggaagcctttttaggcaaaatgggcaaaccccaatgatatcttcgatgcttaattcacttcgttgcatgtcgacatcaaccaagaagcttttcattggaggtctttcatatggaactgatgaccaaagtctcagggaagcattctctggattcggtgacgttactgaagctcgggttatcgccgatagagacactgggaggtccaggggcttcggttttgttaactttgctgacgatgaatctgccaacaatgccttgtcagccatggatgga

SEQ ID NO: 218214 - DNA, 418 bp, Gossypium hirsutum
  unsure (1)..(418): unsure at all n locations
cccacgcgtacggccatgggacgatgagacagacatgaaaaagcttgaagaagcagtaagaagtgttcaaatggaaggactactttggggagcttgtaagcttgtgcctgttggttacggaatcaagaaattgcaaattatgatgacaattgtggatgatttagtgtcggttgatactctgattgaggaacatcttacagtggaaccaattaatgaatacgttcagagctgtgatattgttgcatttaacaaaatataaactattttgggatgctgcaatagtagtttcttgaggagtccttcaaatttaagattttcatgttttcttgttctgctagaactttaatttattgcgttggttattgttttttgttttgctagaactcaaattatcgngctggcttttattatcttattt

SEQ ID NO: 218215 - DNA, 377 bp, Gossypium hirsutum
  unsure (1)..(377): unsure at all n locations
cccacgcgtccgaagaagactgagggagagtttttcgaggctgaaaaagaggataagaaaaaactgcctgaagacaagaaagaagaccagaaagcagtcgacgcctctttgataaagtccatcgagggagtcccagacttgaaggcctacctcgccgcaaggttttctctcaagtctggcatgaaaccgcatgagcttgtcttctagaggatattttgcattcccttatgttaaagggcttttacttttgaattcttttggtttagattatctatggttttattatggggtgctattgctatatgtccagaacctaaattttggatagtatcttctgttatgcaagaacttaaagtttccttcaaaaaaaaaangga

SEQ ID NO: 218216 - DNA, 414 bp, Gossypium hirsutum
ggaaaatcgaatcacgaagctatgggcaatgaatggctgcaaaacgggaactgtccgattgcaaagtcgtatagggcggtcagcggtgttttgccactagttgcgaaggttttgcagccgccaccggggatgaaatacaggtgcccacctgcagttgttgcagcccgggcagcactagcacaaaccgcatttgccaagaatctccgcccacaatccttacccacaaaagtactggtgatcggggtgttaggcatggcggcaaatgttccgttagggatatggcgggaacacactgaaaaattctcaccatcttggtttgtggctatccatgcagctgttccattcatagccatgctccggaaatcagtgttgatgccaaagacagctatggcatttaccattgcagcgtctgta

SEQ ID NO: 218217 - DNA, 396 bp, Gossypium hirsutum
cccacgcgtccgcccacgcgtccgcccacgcgtccgtggcttaagcttactcaaatgcatcctgaccttgcaggattgaaagggcagtcaaataggaggcttgtttcaatgagtgaagttaagcaaaatcaaaaagaaggttccatgtggactgttctgaaaggacgtgtctacaatatatctccatacatgaagtttcaccctggaggtgttgatatgctcatgaaggcagtggggaaagactctacatctttattcagtatcctttttctttttttaaaaaaataaaaaaaatctatttggggagagcaccgagccatactcaatggagatgcttgaaagctaggcttaagatatatgagggtcatgtttttcagtggtattggtgccttggac

SEQ ID NO: 218218 - DNA, 258 bp, Gossypium hirsutum
aggaccttcaatttttcatcggagagagcatgcacgatgatggatgtttggtatttgcttactacaaggatggtgctgttgacccgacatttttgtactttgcgtatgcattgaaggaggtcaagtgctgaggtttgaagcaaagaaaaaaaaagtggttgctgaagaatttagtcctttttattattgcttttgtctcttattttcagtactctgctaaagacataaattatttatggtttttgatgtttttgattt

SEQ ID NO: 218219 - DNA, 340 bp, Gossypium hirsutum
  unsure (1)..(340): unsure at all n locations
aatttttaaaggacagtcacacttcttcggatatgaaggtcggtgtggtttgcctactaactttgatgcgtcatactgctatgctttgggctatggtgctggtgctctcctccacagtggaaaaaccggattgatatcatcagtaggaaatctgtgtgccccagttgaagaatggactgttggagggactgcccttacatcaatgatggaagtggagaaacaaattttggtatcgaaattaaattttatacttttataattttaaaaaattaaattaaattattattattttataaattnnnnaanaaaaannaaaannaaaaaaaaaaaaaaaataaaa

SEQ ID NO: 218220 - DNA, 413 bp, Gossypium hirsutum
caagattcgacctttgtggaggcactatttccaaaacactcaggggctaatctttgttgttgatagcaatgaccgtgaccgtgtggttgaggccagggatgagcttcatcgtatgctaaatgaggacgagctgagggatgctgtgcttcttgtgtttgcaaacaagcaagatctgccgaatgctatgaatgctgctgagattactgataagcttggccttcactcccttcgtcagcgccactggtatatccagagtacttgtgccacctctggcgaagggctgtatgagggactggactggctttccaacaacattgctaacaagggttgagggttggttgaattccagtcatatcttcaggcagctatcctattattttctgggtccttttttaagttttacaggaaatgta

SEQ ID NO: 218221 - DNA, 399 bp, Gossypium hirsutum
cgttgaaaccatttctactgttggcaaaatttgtgctgaggcagagaaggtattcaaccaggacatgtatttcaagaagactgtcaaatatgttggagagccaatgacccacttggaatccattgcttcctctgcggtacgagcagcaattaaggtgaaggcatcagttattatatgtttcacatcctcaggaagagctgctagattgattgcaaagtacaggccaacgatgccagttctctcagttgtcatccctcgccttaagacgaatcaattaaagtggagcttcagtggggccttcgaggcaaggcaatcccttattgtcagaggtcttttccctatgctcgctgatccacgacatcctgcagagtctacaagcgcatcaaatgagtcggtttt

SEQ ID NO: 218222 - DNA, 406 bp, Gossypium hirsutum
gttaattgggtcatcaactatgatcttcctgtaaaacacgacaaccgtgtggagcctgattgtgaggtttacttgcatagaattggcagagcaggacgttttggccgcaagggagccgtgttcaacttactctgtggtgatatggaccaaatgataatatccaaaatcgaaaatcattttgacagcaaaatagcagaggttcctgactggaggaatgaggaagactttaaagctgctctccgatcagccggtttattatgaaaggaaacccttctgtcaaagctatcttggtgaaatgctagagaagaggaacaaacagattgtgcttatagtatgctgtatactcgactatttgtgcccgattctgttggtttgattttgatttttggtactttgcaccatgttt

SEQ ID NO: 218223 - DNA, 421 bp, Gossypium hirsutum
atccaatagttaaagttccggcattactgataatgggttgcaaagattatgtcttgaaatttcctgggatggaagaatacataaagtttgggaaggcaaaagaacttgtacctgatttggatataatatatttgcctgaaggaacccactttgttcaagagcaatcacccgagctcgtgaacgagctaattctggacttcctccggagccatatgtgatagtgtgccgtgtctaagatttgaatggtgtttgtatggatatgaaacacagttactgtaatgtaattaggggacaacaggctatgtgtatggttttattgactggaataaatcagagacccactggtagtggagaccctgaatgcaagaataccattaattttagatgaatttgattctccgcgttgggttgttatttttat

SEQ ID NO: 218224 - DNA, 417 bp, Gossypium hirsutum
  unsure (1)..(417): unsure at all n locations
ggaattattacaaagaatgcctagatgtcgatggggtttctttcatgttgttaacaatgactacacacattggaaaatgtatgctattggtggtagcatgcatcccaccattatcagccaaggtaacaggttcattgctccgcatgaccccaatgccaaagaggtaacttataggctctatgcatcagagtcagaatggaaaaattggatatggagatcagaaggagacgtactccttaatggagccatctttagaacttctgggccactctcgccaccccatttgaaattcaacagaaaggaaatgatcaaatccaagcctggagcatatgtcagaagactcactcgtttcgcagggactcttaattgtaaaaaaagaatcaaatgttagatgtgatgttcaatntaccaatcttt

SEQ ID NO: 218225 - DNA, 428 bp, Gossypium hirsutum
attcgatcctaatgaccgtccatccgctgaagaggcattagctgatccatatttccatggattggcaaatgtggacaatgaaccatccatgcaacccatttcaaaattggaattcgagtttgaaagaaggaaattatcagaagatgatgtccgagagctaatttatagagagatattagagtaccatccacagatgcttcagcagcaccttaaaggcaaagatcagattagcttcatgtatccaagtggagttgatcggtataggcaacaatttgcttgtcttgagggacaaggcaaaattgaaagaggcattctgctccaaaggaaacatacatccttgccaagggagcgagtctgcaatgatgatactgatcgcattgatgaatcaaaaaaacgtacagtggcttttgcttgtcgtgcaacccttc

SEQ ID NO: 218226 - DNA, 271 bp, Gossypium hirsutum
  unsure (1)..(271): unsure at all n locations
cgnatattcaatgacattactttgctttctcagttaagaaaagacggtcattcttcagtctactccggagccggccctaagctcattgattgcagacattggagacttgctggcatgcctgatacttggaatcaactattatatgcagccttcttctcaaagctaagctattctttttcttatagtgtggggcgaaaagttacctactctcttacaaccacattggttgtttcttatggtaagggaatcaaaggctagctacaataaaaag

SEQ ID NO: 218227 - DNA, 166 bp, Gossypium hirsutum
aagcaaatcgatggagggagggccattcaacttattctagaccaaaattcaggctgtggatttgctttcaaaagacagtatttgtttggacgtgtcagcatgaaaatcaagcttattcccggtgactcggccggaaccgtgaccgccttttacatgaattctgata

SEQ ID NO: 218228 - DNA, 405 bp, Gossypium hirsutum
  unsure (1)..(405): unsure at all n locations
gcgctttcacttctgactacatctttaggcaattacctgagttcttttattctaactcttgtaacttacttcacaacaaagggtggccagattggttggatatcggacaaccttaacgagggtcatctcgactatttcttctggctcttggctggtctcagcttcttaaacatgttggtgtataccctttgtgcttcgaggtacaagcagaagaaggcttcctaaagttccttctcatatggagagaaattaagctgaaatgttgttatagataaaaactgtatgcatctcaatacagggacatccttccactttggaaaccaactatcttgtatcttattgggttatattcattttctagctgattctcgcatattgtacattaatactgcatggntttcaatt

SEQ ID NO: 218229 - DNA, 366 bp, Gossypium hirsutum
aaaaaaaaaaaaaaaaaaacaaaaacaatgtaacagaatatgaaaaccaaaaaaaataagatatatgagggtgggcacatttaacacattcctaaactaccttgaatccactaaagatcctggatacttttcggggccaagccaacagcactgaccaaggcattacgattttcgcgccaaaagacagtgcctttgaagctcttaagaagccttcattgtctaatcttactcacgaccaacttagatgactcatccttttccatgccatgcccaaattgtactctctcgccgacttccacaagtttagtaccaaaggccctgttagtaccctcgcatgtcgccaatacagtttgaacttcacagaca

SEQ ID NO: 218230 - DNA, 412 bp, Gossypium hirsutum
cccacgcgtccgctttccacagctcctttcttcaccctttccacagctcctctcttcaccctatcgattgcagcatcatcatctctgcctcatcttctctgctagttcacctcttctctttgcttgcctcgttagcgtgctggttcacctctgctggtttatcgaagcatcttgtgaaaacatgataagtggaaagggtatgaggcctggagatattgtcacagcttcaaatggaaagacaattgaggttaataacactgatgcagaaggtaggcttacactagcagatgctttggtttatgcttgcaaccaagatagttgacctggcaacactaaccggggcttgtgttgttgctcttggcccctcaattgcaggtggttcgaaaggcgttttcacacccaatgatgatct

SEQ ID NO: 218231 - DNA, 332 bp, Gossypium hirsutum
ttctactcatttgattaaatgttattttttttcatgtcggtgccatcgcactcgcggatgatggccattgtatcacataatgaattatgatattactcctgtttttcatgcttgcctcgttagcgtgctggttcacctctgctggtttatcgaaacatcttgtgaaaacatgataagtggaaagggtatgaggcctggagatattgtcacagcttcaaatggaaagacaattgaggttaatggcactgatgcagaaggtacgcttacactagcagatgcttcggattatgcttgcaacccagatagccgacctggcaacactaaccggggct

SEQ ID NO: 218232 - DNA, 408 bp, Gossypium hirsutum
cccacgcgtccgtatacattcattctccgtccagatgctacctacagcatccttattgataatgttgagaaacaaactggtagcctatacactgattgggatctcctcccaccaaagaagatcaaggatcctgaggccaagaagcctgaagattgggatgacaaggaatacatccctgatcctgaagacaaaaagccagagggttatgatgacattccaaaagagattcctgatcccgatgctaagaagcctgaagattgggatgatgaagaagatggtgaatggacaccctcaacaattcccaacccggagtacaagggccaatggaagccaaagaaaatcaagaaccccaactacaagggcaagtggaaggcaccaatgattgacaacccagatttcaaggatgat

SEQ ID NO: 218233 - DNA, 397 bp, Gossypium hirsutum
cccgacaccgtcaccggcaccagcccctgcaccggaatatgtaaacctaacttatttgctctctgtggctggtccatttcacacattcctcaactaccttgaatccactaaagtcctggatactttccaaaaccaagccaacaacactgaccaaggcattacgattttcgtgccaaaagacagtgcctttaaagctcttaagaagccttcattatctaatctcactaacgaccaacttaaatcactcatccttttccatgccatgcccaaattctactctctcgccgacttcaacaagcttagtaccaaaggccctgttagtaccctcgcaggtagccaatacagtttgaacttcacagacaattccggcactgttcaccttgattcaggatggagc

SEQ ID NO: 218234 - DNA, 307 bp, Gossypium hirsutum
ggaaaaggttctctattgattcaaatgctgtacctatgggatagggatagagaaagaggaaaaaccgaagatttcacatagtgcttttgatcgaaaaatcaatctgatttatttcgtacccctcgctcaatgagaaaatgggtcagattctataggatcaaacctatgggacttagggaatgatggaagggaataaaataaaaaaaaaaaaagaaatcaaaaaaaaaaaaaaaaaaaaaaaaaaaaaaaaaaaaaaaaaataaaaaaaaaaaaaaaaaaaaaaaaaaaaaaaaaaaaagggggcggc

SEQ ID NO: 218235 - DNA, 399 bp, Gossypium hirsutum
gaaaatgtcttgctgcggaggaaactgtggctgcagctctggttgcaagtgtggcaatggctgtggaggatgcaagatgttccctgacataatagagaagactacaactgagactattgttcttggtgtgacaactcagaaaatgcactttgagggatctgagatgggagttggggttgagaatggatgcaagtgtggagacaactgcacttgcaacccttgcaattgtaaataagagggggggaaaatgaacaacaaagagaagcagagaggcctttgtctttttaactaaataaattctattactttagtatgtatcagcaaatcttcatgaggatttggttcttaattatgtgtaatgtgggcttttctgctatgtcagaatgtattatgatattt

SEQ ID NO: 218236 - DNA, 417 bp, Gossypium hirsutum
gcttcaaggtgaattcgctccttgggaaccaactagtgctctctacgagtttgtgagctcagcactgaaagaaccgtgcttggagttcgagctgttagatccggtaattgttaaactacgagtgatcccatcatttcctgcagcaggggagaaaggcaggacgctggaggaagaagatttggttccctcagcacttattaggttcaagcctgttgaaactgattctgtcgtcttcactggcctttctaatgaactcctggaaatcagtgagccccttgtaactaattgactaaaacccttcatctctatttgttggggaaatatacccaaccaattattatatgcttcgatttttaaagctgtgtggattcttagtgtgacatagcctgaattttctcccctttctaaatcatcaaa

SEQ ID NO: 218237 - DNA, 424 bp, Gossypium hirsutum
gcatgtggccaaggcatcgattgcagtcccatccaaccgggaggtgcttgtttcgaaccgaatacgatagcatctcacgctgcttatgccatgaacctttactaccagaattccgccaagaatccgtggaactgtgatttctcgcagacggcaacactaacatcccaaaatcctacttatagtaattgcatctaccctggcgggagcacttagaaaagtaagataaaatatgtgggtcttattttagaaatacaaagtagctttgactgtaaagttattctcctttgatatgggtttgctgtggtctgtgttcttttttgggtaaaatatttgatgtaataaagtaggggtggaatgttgatgaacttttgtgttaaaaaaatgggcatgctattatctcttaacatatatcaaatcagatgac

SEQ ID NO: 218238 - DNA, 450 bp, Gossypium hirsutum
  unsure (1)..(450): unsure at all n locations
cccacgcgtccggtttcatgtctgatcttgacattcaaattcctgcctttgatccgtttgctgatgcaaatgctgaggactctggtgctggtaccaaggagtacgtgtacattcgtatccaacaacggaatggtaggaaaagcttgactactgtccaagggttgaagaaagaatttagctataacaaaattctcaaggacctcaaggagttctgttgcaatggcactgttgtccaggaccctgagttagggcaggttattcaacttcaaggtgatcaaaggaagaacgtctncactttttcttgttcaggctggtattgtgaaggacaacatcaaaatccatggtttttaagttgcaggttcctagttttctgggaatctagcctctacgtttaatagctgaaaatcttacccactgatgaactngttttgctataagtatccccatgtt

SEQ ID NO: 218239 - DNA, 329 bp, Gossypium hirsutum
agacaaaattgtttcaagcaccgacagaaccagaagcgccccttgtttcaaagagaggaggacgggttattcacatttcatttgatggtcagaggcgaattgaaagctaagcagtggtaattctaaagattccccgggggaaaaatagagatgtctcctacgttacccataatatgtggaagtatcgacgtaatttcatagagtcattcggtctgaatgctacatgaagaacataagccagatgacggaacgggaagacctaggatgtagaagatcataacatgagtggttcgacagatttggattcctatatatccactcatgtggta

SEQ ID NO: 218240 - DNA, 166 bp, Gossypium hirsutum
atagaatccagtttccaaagatgaatgtggctggaaaacctctcccactcttctgttctatgctcatttgtttgtcttaatattttataatcaatcatcttcttgttttctattccgacaaacattcggtttcagatttaaataaatttcatagagttctgtctct

SEQ ID NO: 218241 - DNA, 308 bp, Gossypium hirsutum
cccacgcgtccggaaaacttggttcaatcagcctgcaaggaaggctagaagaagaattgcaaggcagaagaaggccgtgaggatcttcccaaggccaactgctggacctctacgccctattgtccatggacagactttgaagtataacatgaagttgagagctggcaagggtttcacccttgaagagcttaaagctgcgggtatttcaaagaaacttgcacccaccatcggtatatcagttgatcaccgtcgtaagaaccgatctcttgaaggtcttcaagccaatgttcagaggcttaagacttaca

SEQ ID NO: 218242 - DNA, 386 bp, Gossypium hirsutum
gaaaggatgaaggccacaaaagaaacaagggaaatatttgggaggtttttttataggttccctgaaggtgaatctgctgcagatgtttttgatcgagtttccagtatgttcttcttcatcaccagttttgctttctttttaatggaaacttggcattttttgcttaggagggtgctttgggaatcaagtttccattgagaaaattggttattttgaaatgggtctgtactgtttgttgcttttgtttaaaagaaatacttctcggaataatataatggcttgttttgaaaccttgaaagcaaagaacttccgagaaaaactgggttcttgttttgattatggtgaaacgaatgaaacattgaactgcatatacaagactctggtct

SEQ ID NO: 218243 - DNA, 319 bp, Gossypium hirsutum
cccacgcgtccgcccacgcgtccgcccacgcgttcgacttcagaacaagagtcgtgctttacagctgctaagagcaaaattgtatgaaataaaagtaagggagcagcaagagttaataaggaaccaacgaaaatcacaggttggtactggtgctcgtgctgaaaagattcgaacctacaattataaggacaatcgggttactgaccaccggctaaagatgaactttgagcttacatctttccttgaaggcgatattgagaatgcagttcaggcttgttcagctatcgaacagaaggaactccttgaagagcttgctgag

SEQ ID NO: 218244 - DNA, 397 bp, Gossypium hirsutum
  unsure (1)..(397): unsure at all n locations
gtgtgcctttcctgttcaccatcaagcaattggttgcatcaggcaaacctgatagctttggaggagacttccttgtaccatcctaccgtggctcatctttcttggacccaaagggaaggggtggctcaaccggttacgataatgcagtggccttgcctgctggaggaagaggggatgaggaagagctagccaaggagaacaacaagagtgctgcatcttcatcagggaaaatcaccttgagcgtcacaaagagcaagccggagaccggtgaagttatcggtgtgttcgagagccttcagccatctgacactgacttgngtgccaagactccaaaggatgtcaagatcactggtgtctggtatgctcagcttgattcataaacaagtcttgtatgaat

SEQ ID NO: 218245 - DNA, 281 bp, Gossypium hirsutum
cgaacaagtaccgcgagggaaagatgaaaaggactttgaaaagagagtcaaagagtgcttgaaattgtcgggagggaagcggatggggccttttcattgccaacaaaaactaattcctgcttcttctctaatgttactttctcatttctctaataaatgattcatggtaataagagtgtagttagcattagttgtttctacttgatgcttgttgcttctgatgttatgaacttaaacatccttttgccttgaataaattatccctttttcgtcagttgctt

SEQ ID NO: 218246 - DNA, 432 bp, Gossypium hirsutum
caagacctcataatagtggtcatcacactattgagtcctgctatacatcacagtttgaacagcatttgcgggctgttgttggtcttcctctcggtgatccatccatgaaaactccagctgctatcatgtacaatctactgggtgaggatgaaggggagccaggtttcagagtggctcatcaacttatagcaagggcactagagattccaggagctactgctcattggtatgataagccagaaatgcgaaggcaaaggaagatgggtcatataactctttgtggcccttcttgtggtattttagaagtacggctgaaatcaatgctgagggaagaagggtatgaaaatccaaatgaagttgcaccacgtgttgggattgtaatgggttcggattcagatcttccggttttgaaggatgcagctagaatcttaa

SEQ ID NO: 218247 - DNA, 375 bp, Gossypium hirsutum
cccacgcgtccgcccacgcgtccgcccacgcgttcgctccggtgatgttggcacttccttcaagatgcaagatgaaggacgatctagggttagagaaactctgacaccttcaacagcgcagtcagcattacgaaggattctgccttacccttgcaaaaaacagtacactgtggtgattcttatgccacaagcatctcggtttaagttgttaagatcactattcaagcaaaatgctcctagtagagatgcaaagattttagcagccattgctggtggaacagtcttggcagcctgcttgtggagatattcacggaagtcatagcacaactgtacgtataaaaagccttcaattgctccccgacctcaaaacttgaa

SEQ ID NO: 218248 - DNA, 410 bp, Gossypium hirsutum
  unsure (1)..(410): unsure at all n locations
gaccgacgcgtccgntggctgcgagttgacggagtgctaatgagattaagggacactcgcttgcattgtgtttttgacgagagtgcaagggctgtcattcttagagaaagatgttggagggaaggaacatttgaagctttgtctgctaaaggatatcctactgattctgcttcatatagtgatccaagcatcatcagccaaaggctacctgtcatcatgcatcagacccaaaagcttgtagtccctggtaatgtaaattgccacgcgcaacagattcattagttgaatatgtagacattgcgaatttgatccatttcggtggattcataagcaaaaaaaatcatgttcatgcacttgatgtaccattaacaagcaaaatttatgatgtgattttgagtgtaagcaagaat

SEQ ID NO: 218249 - DNA, 364 bp, Gossypium hirsutum
cttggaatgatgcttgtgatgcaaagtttcagcgctattgggcattggtgataggcactccaaaggagaatgaaggcttaattcgttctcctctttcaaagattcttcttcatgatggtaagactgagagggtcatcttggctcaaaatgtgggtttagaaccttctcaagaggctgtgactgaatatcgggtattaggtcctatgataaatggatgctcgtgggttgaactgcgcccacttactagcaagaagcaccagctccgtgtccactgtgcagaagctctagggactcctataagtggtgactataagtatggctggtttgttcaccggaagtggaagcagatgcctcgagttgatat

SEQ ID NO: 218250 - DNA, 440 bp, Gossypium hirsutum
attttccattcatataaccaacccttagagaacaacatcaccccatttctttttaattactgcttgttgttctcttccttctcacgtaccccaccaatatcaataatggcacgccaaagctttgttcttgctttggtctttatagctcttgtcgggttggtttccgccgccaatacagcttctaaagcaccatctgcagtcccagtacccgatgatgataccatcggcaacactgatgatggagcaggtgcatcctcccccggtgcttctaatgacgctgttgctgcccctcttggcagtgagcaggaagctaaaagcatggctcctgctccttctagtgatgcaaccaccacaggtgtctctgccgttggggcggctgctctcactggggcagctgccattgctacctacttcgtcttctaaatagcttcgtctcaatc

SEQ ID NO: 218251 - DNA, 300 bp, Gossypium hirsutum
ggcaaagatgttattggaatggatgttgctgcgtccgaattttatggatcagcagataaaacctatgatctgaacttcaaggaagagaaaaatgatggttctcaaaaaatatcaagggatgctctcaaagacttatacaaatcatttgtttctgagtatcctatcgagtcaattgaggatccctttgaccaagatgattgggagcattactcctaactaaccaatgaaatcggaacaaaaggtcagattgtcggagatgatctcttggtcaccaatccaaagagggttgagaaggctatc

SEQ ID NO: 218252 - DNA, 444 bp, Gossypium hirsutum
  unsure (1)..(444): unsure at all n locations
cccacgcgtccgcccacgcgttcgattgttagtcactgccattagtagctccccacagaaggagtgggaagcaatcaatagactgggtgctgactcattccttgtttctaacgatccggaaaaaatgaagtcagctattggtaccatggactatatcattgacacagtgtctgcggtccatcccctacttccactgcttagtctgctgaaggtgaatggaaaattggtcactgtgggattgcctaataagccactcgaattgcctgtttttcctttagtcatgggacggaagcttattggaggaagtgatgttggagggatgaaagaaactcangagatgctagacttctgtgccaagcacaatatcactgcagatatcgagctgattcggatagaggaaatcaatacggccatggaaaggcttgctaaatctgatgtcagata

SEQ ID NO: 218253 - DNA, 336 bp, Gossypium hirsutum
  unsure (1)..(336): unsure at all n locations
ccggnccggaanncccgggcaaaaatatggctgtgatttggtcagagaacacattgtatgactacttgcttaatcctaagaagtatattcctgggacaaagatggttttccccggattgaagaagccacaggatcgtgccgatctcattgcttatctcaaggaatcaactgcctgatgggtgtgctttttatcagctattttggaacaaatgaaagagtttttgatcaatgatttttttttctttttgttacatgatataaaaactaggcgattcgcataataaaaggaaaacagctccaatataaattgggttttggagttgaaccgagtagtga

SEQ ID NO: 218254 - DNA, 333 bp, Gossypium hirsutum
  unsure (1)..(333): unsure at all n locations
gcgtttctttctgaaaccagagctgagaaaataatacccaaagccttaaaaactatcaaaaatggttcaaaggctcacttaccgtactcgccatagctatgctaccaaatccaatcaacaccgtgtcgttaagacccccggtgggaaattagtctatcagactactaagaagagagcgagtgggcctaagtgtcctgttactggaaagcgaattcagggtattcctcacttgagacctgctgaatacaagcggtctcgattgcctaggaaccgtangacggtgaatcgtgcctatggtggtgtttgtctggagtgctgtagagaaaggatatc

SEQ ID NO: 218255 - DNA, 367 bp, Gossypium hirsutum
accaagcgtgctatcaattgcgctaacacgttttcgaaaacgctgcaaggactggcgcaggggggagcgaagctgggtgcgtaggtaactgaacatgaaattaaacaatcaatggcagccagcgacgcagctatcaactacactatgtatatcgcagagaccatgcctgtcaccatgcttattaaccgaaagcatcgggaccaacatttgcaccactcctatcaacacttcaataaatacatcaccatgtacaagatgatacaagatctacaacaatctatcctgcactatggcatgcacgatggcgaaaacatcaatgaaatcatctatgacgatgacggcgacattgactgtgagatatactatg

SEQ ID NO: 218256 - DNA, 430 bp, Gossypium hirsutum
  unsure (1)..(430): unsure at all n locations
cccacgcgtccgcgtgtgttgattaatagtggtttcattgtcacgggattggtttacagcattggcgcaatggtgcatggctgctggactctttgtttttttatagttcataattgttgtaattagaccatggatatattttctgacattcatctattgtttgtgtagctggtggtgaagttattctatttgtccctgaaattgattctacttgtcatgacgcctatcctattgaaagaagatgagtgcaataagggtctgcttgtctacccgctgatgaatgtcgatatgctgtgtacgaatttgattttctaacggccgagaacgtaccgaagagcagaatctttttcatagcatggtctcccgacacgtcaaggatcangagcaagatgatttaccccagctccaaaaatagattcaagcgagaact

SEQ ID NO: 218257 - DNA, 444 bp, Gossypium hirsutum
cccacgcgtccgggcctgggtgcatatctcggtataatgggatctcgacgagatgttgtgactgctgtgtggaagactggtcttgaaggtgtttggtacaagtgcatgagatgtttgcgacaaacttcagcttttgcttcggctgattcgacccaccaacctagtcaaaatgaacgggtgagttggtggatcagtcgttgggcctatggatgtccgatgtgcggcggaccttgggttcgagttgtatagaagccgccagggtgaatgtcgattatgtatttgttgtcaggggctcacttcggttcctcttttcgatgtacgggtatgtactttttggaagctttacaagttgctgcaggtttaaagcttaaacataggaaacaaatgattggcttttttaacactagaacctgtttctgtataaaatttgttgataaaataatt

SEQ ID NO: 218258 - DNA, 418 bp, Gossypium hirsutum
cccacgcgtccgtgtatgtgaaaaaattggctgtttttatagggtacccttttagctttgaagaagaacaaggtggggtagtgaagaaactaatagatttatgcagttttgagaacttgagtaatttagacgtgaacaagacgggaaaacgacatgaagacgacgatgaggcaacgaacaagacgttcttcagaaaaggcaaggttggggattggcaaaaccatcttacacccgagatggctaatcggctcgacaatatagtggagcaaaaactgagtggaaccggtttgagtttcgaactcaacaatggatcatcttgatggactaaaatcatttgtctttcgggtaataattgtgtgttcatttgcaactgtgtttggttgggatgctttgaatttcttgttcaaagatccaaaca

SEQ ID NO: 218259 - DNA, 432 bp, Gossypium hirsutum
cccacgcgtccgttttttttttctctccttttttaccgccgtcgatctcgatccttatgctcgttgtcaaacaagctcgagaaagatggccaacgctgcatcgggaatggctgtgcatgatgattgcaagttgaagttcttggagctcaaggcaaaaagaacccaccgcttcattgttttcaaaattgaggagaagcaaaagcaagttattgtggagaagcttggtgaaccaaccgaaagctatgaggattttactaaatgtctccccgctgatgaatgtcgatatgctgtgtacgattttgattttctaacggccgagaacgtaccgaagagcagaatctttttcatagcatggtctcccgacacgtcaaggatcaggagcaagatgatttacgccagctccaaagatagattcaagcgagaactggatgg

SEQ ID NO: 218260 - DNA, 372 bp, Gossypium hirsutum
ggaggacctattattttagcacagatagagaatgaatacaacactattcaaagagcattcagggaaaaaggggatagttatgttcaatgggccggtaaactggcccttagcttgaatgccaatgtcccatggatcatgtgcaagcagagggatgccccagatcccattatcaatacatgcaatggaaggcactgtggagatactttctatggtccaaataagcgcaacaagccggcattgtggactgagaactggactgcacagtatagagtattcggtgatccaccatcccaaaggtcagctgaagattggcatactcagttgctcgattcttcttcaaaatggaaagcatgtcaactactatatgtacta

SEQ ID NO: 218261 - DNA, 434 bp, Gossypium hirsutum
cccacgcgtccgcccacgcgttcgccctagtcagagccgcatcttcttcttagcctcagaaatggcgaagtcaaagaaccacactgcccacaaccaatcttacaaggctcacaagaatggcatcaagaaacccaagaggcaccgccacacttccaccaaagggatggatcccaagttcttgaggaaccagaggtatgcaaggaagcacaacaagaagagcggtgagtctgccactgaagaagagtaaatttttaatggcaaaagatctagctttgattagtgttttctaattgttgtttttcccccgatggaattgagtgttcgtttactataatcaccttagtttgaaattgtattttgggattgttgaatctcattttcaaaagagaattgaagctgtgagcttattaatattaagaacatgttttgagctt

SEQ ID NO: 218262 - DNA, 465 bp, Gossypium hirsutum
acccacgcgtccggttatcctatagatgctgtattcatgcctgttctaaatgcgaatcatagtattcattgttatgggaatgataatgaaaaacaggagatactttttctagaaatatggacaaatggaagtttaactccgaaagaagcacttcatgaagcttctcgcaatttgattgatttatttattccttttctacatacggaagaagaaaacttacatttagaaaacaatcaacacgatgttactttacctttttttccgtttcatgatagattagttaaactaacaaaaaagaaaaaagaaatagcattgaaatatatttttattgaccaattagaattgcctcccaggatctataattgtctcaaaaagtccaatatacatacattattggaccttttgaataacagtcgagaagaccttatgaaaattgaacactttcgcatagaagatgtaaaacaa

SEQ ID NO: 218263 - DNA, 334 bp, Gossypium hirsutum
ctcacgcgtacgctggagtccgcactaacgtctgcactaacggtgacaagaaaggccaagtccttgcgatggaacttgtgctgaatactatgcactataccattcaatacatgcatgatgaactgttttatttgcgtgagagacaagaactgatgcaggatctgacctacgctacgacctgcaagatgttctggttgctcgttgtctgactgtcactttgcctatcacaagccggattacaattatggcatttaaaaaccttcttcctgaagaagaagcttatgtacgtttgtaagaccataggtctgtttcctgaactgttgccaaatatttt

SEQ ID NO: 218264 - DNA, 393 bp, Gossypium hirsutum
cggacgcgtgggcggacgcgtgggcggactcgtgggaagacgcatggctaatgcgacgagcattgtttcaataatatctaatcttttggataacaaaacccttgatacatatgcaaggcattgcttagaagattgctctgagctttattcaggtgcagggtctagtatacaaagtggtgggaaagcttttgaaggtaaagattatggaactgctaatgctgaaataagttcagccatggatgcaccggatacttgtgaagaacagtttaaagagaagaaagggtatgtgtcaccattgacaaaggaaaacaacaatttctttcagctacttgcaatcatactttcattcatgaatctggtaccaaaatgatgaacaatatactaatacttaat

SEQ ID NO: 218265 - DNA, 406 bp, Gossypium hirsutum
ggaacttgaacttgataagttcatcactcactctgttcccttctctgagattaacaaggcatttgagtacatgcttgctggcgagggcctgaggtgcgtgattcgcatggatgcataaggattggctggccatggatgaagggctttttgttaagtatatgtgcattttaagggaataaataatgtaatataatgctacatcgttgtgctgtttttaatggtaaatttttatcttatcatgcatttctatgatcctctctagttgctttgctctgcatggttcttgttggagatagaattttcaaaaaatcattttaatttgttttagaaaatggaacatattgctgagcaaggtttgatgggataatccctaataacatgaaaatgtcatatgtgtaagatgtct

SEQ ID NO: 218266 - DNA, 174 bp, Gossypium hirsutum
cccacgcgtccgcccacgcgtccgcccactcgtccgcccacgcgtccgtgcctgccatggagttgggagaacactcactttgtccttgaaaatgatagacaatggtggccgaatttaataaaaatgtttaaaaaaaaaaaaaaaaaaaaaaaaaaaaaaaaaaaaaaaaaagga

SEQ ID NO: 218267 - DNA, 423 bp, Gossypium hirsutum
aaagttttaactgcaccatgcggaacctccattttgtacccgaaaactgggggcaatctgcattgttttacggcagtcaccccttgtgccgtgcttgatgtacttgctcctccttacagagaagatctaggtcggaaatgcacttactatgtcgactatccgtattctgcctttggaaatggagctcagataagcaacggaaaggaagaggagtatgcatggcttgcagagatagaaacaccagacgacctatatatgcgttcgggtgtgtatgttggcccatctattcgggtttagggtttggtatatataaatatcatgttggctgctcagttctttggcctgaatctagggaaagctttgagaagataagtcatggcctcaatcacatgcaaatctgaaatatgctctttcaatgagctt

SEQ ID NO: 218268 - DNA, 420 bp, Gossypium hirsutum
cccacgcgtccgtgcaaaaatgctcagtgaaaaatactctgaatataatgttcccaccaagttcaaagatgtggatgagaacctgaagagtgtggagttctcctcaaagaagctcttggacttgggatttgagtttaaatatagcttggaagacatgttcgtaggagctgtcgagacatgccgagaaaagggactgcttcctctttctaatgagaagaagatcaaaaacatagactgaaaaatatgaactttcaacaattgagtgcctacccatgtcttccatttctagtagtgaaaacaataaagatttaaatctattatctgtttcctggtattgtacaatttttaattgcaaacattggtaatgtaatttggagtctattctgggaactttgtgatttatctaatattttcagcatt

SEQ ID NO: 218269 - DNA, 360 bp, Gossypium hirsutum
  unsure (1)..(360): unsure at all n locations
cccacgcgtccgcccacgcgtccgcccacgcgtccgccagttcagtggttcgaccatttgcacagacgggcaatgcaagttgtcgaagaagggatgatatcccaagatcattatactgttgcatggcaggcctttaaagaatctctgaataaagttcgacttgttgcagataagcatgtatagttaaaacaaagaacatgtagataaatttctctgtagcatttataattatctcttgcgtccatatttgtacacagtcgagtttttccagcatagttcttgaatttggaataagtgttacatagctaattttaatgtcaaaatttgtttttagtccttgtattatggctnnnnnnaaaa

SEQ ID NO: 218270 - DNA, 418 bp, Gossypium hirsutum
cccacgcgtccgaaatcctgatattttcgttcatagcattgttaatgggtcctacaacgcccctttttttgtgacacggttccgggaggcactcttccatttctctgcactatttgacatgtccgagacaaatatctctcaagaagataacttgaggtccatgctcgagcaaaagttttacgggcaagaaataatgaatattgtagcatgcgaaggcacagaaagagtagaaagaccggaggcatacaaacaatggcaggttcgtagtgtgagggctggatttacacagcttccattagaccctgaactcatgaagaaagttagaggaaaagtgaaggagtgctaccacagtgattttatggtggacgtggatgggcggtggatgttgcaaggatggaagggtcggattatctacgcg

SEQ ID NO: 218271 - DNA, 412 bp, Gossypium hirsutum
cccacgcgtccgtaaaagggaagccatgcttcaatccctttggaaggtcaatgtggttgatattgaaacaactttgtctcgtgtctgcttagccgtacttcaagaccctgatgcatccaaggatgttctgattttacgagccaaagcattgaaaaaacttggatccatttttcaaggagtgaaagttcgttatagtagagaagacagccttcgccatgagattgattgttgatgtctttttcatagagatggaggttcacatggtgcctgacggcctctgaaggaagagacaggttgaaatgttggttggagaacaagttgagcagagtaacagtaggtacatcaccgaactaatgttgatcataaggccttagctatcattgtcatgagtgactctcgacatgtgcacatg

SEQ ID NO: 218272 - DNA, 410 bp, Gossypium hirsutum
cccacgcgtccgagaggtatgttatctacaatctcccgagaaactacctgaaagctcttcggatggtctgttactggtggcccctttattataaggttcttagtttgattttgctttgtatgcaaaatgcattatctcggatccgtttagcttaattctgtaaaatcaacattgactctaccttcctgcgtgatcgttatttgcttgctcttttctagtgctgttttttctgacactatgtagtttccttttccttggaatatagcttataggttcacccgatgattcaagtcttggtttccttcgaagcgagaacgctagaagatatgttagacagcttccgcaatatccaaagcaaaatttctctactagatttcctaacagctcgtctggtgcttgtgatttgctcg

SEQ ID NO: 218273 - DNA, 410 bp, Gossypium hirsutum
cccacgcgtccggtcgccaaccaactgctttaaaatattaaaagctatcatcacaaatatgatacatacggctcccagatctgctcttacctctcaattccagtataaaaggtaagggtttctaaaatatcaacgagaaaaaaaaccgtgaatactgtgatggcctctgagagggaagtttttggtctttcgggtccattacacctaaccaatatagattggaataatgcacatcatcgaaggtcagtagcagccagtttggttgagggtgtgtatatcttggagcgagaccgtcaggaaaaacgtgaaggttctcaagcattggctcctccctggtgggagttctttcattttaagttggttcgtaagctgattgatgatgttgatttttgcatctttggtgctattta

SEQ ID NO: 218274 - DNA, 333 bp, Gossypium hirsutum
ccaacccgtccggccagcttcggtaaaaaaacactacacgagtggttttgaactgcaaaaggagatcgatttcaaagccttttcaccatgagagctaagtggaagaagaagcgtatgaggaggttgaagaggaagagaagaaagatgaggcaaagatctaagtagtctaattttatcttaaagctagcaattcggtctatgtttctttagattttctggtgtttgatggatactttactttaaaaggatttaagttatctttatcgaaaccttttgaatattctggaaacatgttattgtgttttctattaaaagcttatggctttggatgtt

SEQ ID NO: 218275 - DNA, 400 bp, Gossypium hirsutum
gctattcgtaaggcatgtccctaattggagccaaattatcagcctcctgttacatttgttgtggtgcaaaaaaggcatcatacaaggttgtttgctaacaatcataatgatcgccgttctgtagacaggagtgggaatattttgcctggcactgtggtggactccaaaatttgtcacccaacggagtttgacttctacttatgcagccatgctgggattcagggtacaagccgtccagctcattaccatgtgctatgggatgagaacaagtttacagctgatgcattacagtcccttacaaataacctttgctatacatatgcaaggtgcacacgatcagtgtcgattgttccccctgcgtactacgcacatcttgctgcattccgagctcgcttttata

SEQ ID NO: 218276 - DNA, 399 bp, Gossypium hirsutum
gttggatgtcaacttgggaaacggcctttgttggcagccaccgaccttctagctgctggctttactgcagttactgacattgccggagggtacgcggcgtggactcagaatgggcttccaacggaatgatgatgatgatgttggaggcagggaataaagttggtgatacaataataaagcatggaagacagagaactagaaagatctcaagtgtaaagaaaaaaaaatgtcgcatattagtgtagttggcagccacagaatgaccaggaagtatgtgaatgtgaatgtgactgtttcgttgttgttctgtatggaaaaggaagcaaagaaacatacaaataatagatgaatggaaccagtgaattttgtacataaaaatctcttctttgctatcgagac

SEQ ID NO: 218277 - DNA, 388 bp, Gossypium hirsutum
cccacgcgtccggccaattctatttacaatggcaaggctggatcgtgttaagaatttaagtggacttgttgaatggtacgggaagaatgctaagttgcgtgaattggttaaccttgtagttgtcggtggagatcggagaaaagagtccaaggatttggaagagaaggctgagatgaagaagatgttcgagctcattgagaagtacaagctgaacggtcagttcagatggatatcatcccaaatgaacagagttaggaacggtgaactttaccgttacatttgtgacacaaagggtgccttcgtacaacccgcattatatgaagcctttgggttgactgtcgttgaagccatgacttgtggtttgccgacattcgcaacttgcaatggt

SEQ ID NO: 218278 - DNA, 404 bp, Gossypium hirsutum
cagagtggttcctgcgcaggagaagttcatcaagtttttagaagacagtcgatatgtgcgtgtgaagttggcaccatctggattcgttcttctcagagacctgtgccctaatgaaccggaggtgctctctctaacagatgcacccacatccacggcatccccggctggtggatcaacagcagctgcaggacaacagagttcatcagccatggccgttgatgatgaacctcagccgcctcagccattcgagtactcatcctgattttacccaatcctgaaactgaaacagggccaagaatacttttatacttgagcagtgccttttgacattacagctgttcaacctagagtgaaactagaactgatgctcgattcctatcctcaacttagggagattctgagtt

SEQ ID NO: 218279 - DNA, 416 bp, Gossypium hirsutum
gctcgaataccaccttctcacactagtgtgtcatttgttgatacttgctcttgcagtactgttcttgtggtcaaatgctgctaccttcattaacaagtctccaccacgcatccctgaagttcaaattcctaaggacccagttatggagtttgctcaggcacttcggtttgagatcaaccgggcttttgctgtcctacgggatattgcatcaggaagagaactcaagaagttcctatctgtgatcgccggcttatgggtcttgtctattgtcggaagttggtgcaacttcttaacactgttttacatagtcttcgtacttcttcacacggtacccgtgctatacgagaaatacgaggacaaggtggacccatttgctgagaaagcaatgcatgagattaagaagcagtatgcagtgt

SEQ ID NO: 218280 - DNA, 391 bp, Gossypium hirsutum
cccacgcgtccgagcagagacacatggcttcttttcttgctgctattgagaaaggcatcagcaagaagcttagggagaaagatatggaactagagactatgaataacaagaatagagaactggttgagagaataaagcaggtgactgcagaagcacataattggcattatagagcaaaatacaacgagtcagttgttaatgtgttgaagagcaaccttcagcaagtaatctcacaaggtgctcaacacgggaaagaaggttttggagatagtgaagttgatgatgcgacctcctatattgatccgaacaactttctcagtattcatcttggggctgcaaaatgtgtttccaagggcatgaaggaacacattatttgcagagcatgcaacgc

SEQ ID NO: 218281 - DNA, 415 bp, Gossypium hirsutum
cccacgcgtccgcggcgacgtgggcggttcgctgcccgctacgtcgcgagaagtccactgaaccttatgatttaatggaaggagatattgacatgctgagttctgatcattcaccaacagtcccggaacttaaactcctgaatgatggtaactttttgaaggcttggggcggtatatcatctatacagtttgttcttcctgtgacatggtcatacggacagaaatatggaataactttggaacagttagtttcatggtggagcgagaggcctgcgaagcttgctggacaacattcaaagggagccatagcaatcggaaaccacgcagatgtcgttgtctgggaacctgaagtggagtttgacctcaatgaagatcatcctatgtttgttaaaaatccgagtatatctgcctacat

SEQ ID NO: 218282 - DNA, 262 bp, Gossypium hirsutum
  unsure (1)..(262): unsure at all n locations
cggggnggaccaacccgtccgagaggacgttgttccaaaacccaacgacaccctaaaacctgttccaggaatgagcggagccgttgaactgccctgaccggagagtgttacagcatttctattccaaaaccagactcctactggctacatgagaaattttcacacatatcttactgtgattaccatgtcataagggttttggctacaagaagcaaggcacagatcaatgcaactttgaatcactacaaaaattaatatggaa

SEQ ID NO: 218283 - DNA, 403 bp, Gossypium hirsutum
ctttcatttgcccgcactagcagcagcagcgccacactcttcacagtgctgatcaaccatggcggagcagaccgagaaggcatttctaaagcaacccaaagtgtttttaagctccaagaaatctgggaaagggaagagaccaggaaagggaggaaaccgcttctggaagagcattggtttgggcttcaaaacccctcgtgaagctactgaaggaacctacatcgacaagaaatgcccattcaccggcactgtttccatcaggggtcgcattttagccggtacttgccatagtgccaagatgataaggacaatcattgttcgacggaattacctacattatatcaagaaataccaaaggtacgagaagagacattcaaatatccctgcacatatttctccatgc

SEQ ID NO: 218284 - DNA, 411 bp, Gossypium hirsutum
cagtattgcaaaggtggttggaactgcaatcacagtgggcggtgcaatggtgatgacatgggataaaggccccattattgacttcgtcaagtcaggaggagccacacaccatagcactaacactgaatctgcagatcaacactgggtttctgggaccattatgcttcttggaagtatcgctggctggtcaagcttctttattttgctatcctgcacatcgaagaagtacccagcacatctgccttttatagtttcaatatgggtcacattttcgcctctttttgccatactgcctttttgattatgactatcatttgtttacttaattacttactttatttcaagaaaatttaaattttcgagattagtcatttaaatatctcttttcatatttttttcttcttctctttt

SEQ ID NO: 218285 - DNA, 203 bp, Gossypium hirsutum
cccacgcgtccgcaagtttttctcaggacagtctaatttgcttaatttgatcttttaatccattgcttagtgtaataaaatggcacttcttgttgttctttcctcttttagctttgggtttggttttgttttgttattgtttgtaaagttattgtcgccaatcgttgctatcgtggaaatgaatgaggtggtttttttttatt

SEQ ID NO: 218286 - DNA, 261 bp, Gossypium hirsutum
aagaaatctagtaaagatatggatgctgccgcaaaagctgccggacaagaagcagctgcaaggagtgcaaggctagctgcagcaaagaagaaagagaagaaccattacaaccaacagccagtgcggtaaaaacaaatcccgttcttatatatatatatatttgagatatgaacatgtattttattgttgttcatatgacaatatgaaataaacagtgggctttggttcagtgaaaaaaaaataaaaaaaataaataataaa

SEQ ID NO: 218287 - DNA, 295 bp, Gossypium hirsutum
accataccaatggtctcttcctgatttcaagagcccatcaactcgtcatggaaggatacaattggtgtcaggagaagaatgtggtgactgtcttcagcgccccaaactattgttaccgatgtgggaacatggctgcaattttagagattggggagaatatggaccagaattttcttcagtttgatccggcacctcggcaagttgaacctgacaccgcacgcaagactcctgattattttttataattcttttttaattcatataatatatactacatataatatatattcctgct

SEQ ID NO: 218288 - DNA, 295 bp, Gossypium hirsutum
tcttgactggagagaatgtcggcctgttacagctgccaactgacaaagttctcctttccgaccctgttttccgtccattggtcgacaaatatgcggctgatgaggatgctttctttgctgattacactgaagctcacctgaagctctcggagctaggatttgctgatgcataagctgatgattgcataagaggaagaagccaacaacacaatcctacaaagacgttttaggttttgttttctctctaaagttggcttaaggaatgaatttgggtggttttatttggggagattca

SEQ ID NO: 218289 - DNA, 256 bp, Gossypium hirsutum
cccacgcgtccggttattttaagctgttaaataacattggggcggtttttcttggagaataatattctgttttgtaatttcaattggagaagctcttttgtatttcatcttgtcttttccttttccttttttcgccggcattgtttgaacatggggttgtgcgcccgtcaattccagttaaatatggtgacttttgtttttcaaaaaaaaaaataaaaaaaaaaattattatacaaaaatataaaaaaaaactaat

SEQ ID NO: 218290 - DNA, 292 bp, Gossypium hirsutum
attggaacctggttccctttcagccacccatgttgctgagatccgtaagaggaagggattgaaggagcagatgaccccgctctccgattacgaggacaagctgtaagctaagctacaaaataataattaattgaagaggttgggttacccattttatgcaatgctgctagttagttccttctatattttgttgtccatggttcggactttttagatggtttttacaatggacacaattgttatgtttttttgtattcaaatagacaattggctttgttaatgtttttgacct

SEQ ID NO: 218291 - DNA, 291 bp, Gossypium hirsutum
cccacgcgtccgtgaaattgttgtctccaaggcactggtggcaaagattgaccgaccaatgggaatagtctgcttccaggtagcaaaggatagcaatgaaattctcaattcgtgggcttcgaacttggaaaaacttcttgatcttgtcgagaagagttgccaccaaatacacaaagaaaccatggttcacaaagctgctctgaaagtatgaaaacgatgaacattcaccaaactacaggttgtggccaagttgaaatgtgctttttggagacaagtggtctaatagatggt

SEQ ID NO: 218292 - DNA, 230 bp, Gossypium hirsutum
acccttcctccaacccttccgaaattttgtccgaacccattgttgcaagccggtttttgttgcgtcaaagagtgtgtgactcgctctacaatttcaaaaccaatatccaagacaaggaatgcatccctccagatcaacaacaccttatcttcgccgggaagcatcttgaatacagccgcaccttatcccactacaatatccagaaggaatccactcttcacctcatcctc

SEQ ID NO: 218293 - DNA, 291 bp, Gossypium hirsutum
ctttacattttccctttatttcctttgccgcccctagggtttgattacattccccacatggcttctgcagatgtcgagtaccagtgcttcgtcggaggtctcgcatggaccatcaacgaccgtgctctcgaagaagccttcagtgcttacggcgagatcgtcgattcgaagatcattaacgatcgtgagactggaagatccagaggctttggcttcgttactttccgtgatgagaaatctatgaaagatgctattgaaggaatgaacggtcggagtctcgatggaaggaat

SEQ ID NO: 218294 - DNA, 250 bp, Gossypium hirsutum
cgtcaagatgcagattttcgtcaaaaccctaacggggaaaacggtaacccttgaggtcgagtcttccgacaccatctacaatgtcaaagccaagatccaagacaaggaaggcatccctccagatcaacaacgccttatcttcgccgggaagcagcttgaagactgccgcaccttatccgactacaatatccagaaggaatccactcttcaccttgttcttcgcctccgcggcgagtccaagtaaaggaag

SEQ ID NO: 218295 - DNA, 293 bp, Gossypium hirsutum
gtgaagaaaagaaggatgtaatggatgtggtgacgattagtggttacaaagatgtgccggaaaatgatgagaaaagtctattgaaagcattggctcatcaacccctaagtgtagccattgaggcttctggcagagatttccaattctatagtgggggagtattcaacgggccatgtggaactgatctagaccatggagtagcagcagttgggtatggaacatggaaaggttcagattacatcattgtaaagaattcgtggggaccaaaatggggagaaaaagggtacataagg

SEQ ID NO: 218296 - DNA, 293 bp, Gossypium hirsutum
caaggtcatcaaggatgttctgggtgacaaggttgaaaaggttgtggtttctgatcgtgtggttgactcaccttgttgtttagtgactggcgagtatgggtggactgcaaacatggagagaatcatgaaggcccaggctttgagggataacagcatggctggttacatgtcaagcaagaagacgatggagatcaacccggagaaccccatcatggaagagctgagaaagagagccgatgcagacaagaatgataaatctgtgaaggacctttgtctccttctcttcgagactg

SEQ ID NO: 218297 - DNA, 295 bp, Gossypium hirsutum
ttcagttacaacaagattcttaaagacctcaagaaggagttttgctgcaatggcactgtggttcaggacccagaattagggcaggttattcaacttcaaggtgaccagcgtaagaatgtctccaccttccttgttcaggctggcattgtgaagaaggaaaacatcaaaatccatggtttctaagttgcagcaagcttaaagttttctgctaatctgtgtgccttgtttcgaacctggatatactacccggtcaggatatactataataatatctatgccgttatatcatttcttt

SEQ ID NO: 218298 - DNA, 270 bp, Gossypium hirsutum
tgatcaaaaatattgcttttggagtaaatgcaagataaatgaagaatcgaaagttaaactaagcaacattagcttcaagaacatccgtggcacatctgcgcttccagaagctgtcaagtttatttgcagcggttcttcgccatgtcaaaatgtggaacttgcagacattgatattaagcacaccggacctgaacccgcaacatcccaatgtttgaatgtcaagcctaaaactagtggcaaattaaacccgactccatgttccagccctgt

SEQ ID NO: 218299 - DNA, 317 bp, Gossypium hirsutum
ccggggcggacccacccgtccgaaatctgtaaaaaaccttataaaagacttcacttttagcatctgtatataatctgccgcaaccccttcacagcaaatgtagggcggccaatccaaaaccctaattttgccataggtgagaagaaggtaaagaagaaatggcagtgccgcttctaagtaagaagatcgtgaagaagagggtcaagaagtttaagagaccccagagcgatcgcaaaatctccgtcaagacgaactggcgaagaccgaagggtattgattctcgtgtaagaagaaagttcaagggctgcactttgatg

SEQ ID NO: 218300 - DNA, 286 bp, Gossypium hirsutum
cccacgcgtccgttcttaccatttctggcattgtccaagaagctgctcaagataggaatagcattgtggcaaacttgacaacaaaaattgatttgacgaatgaaaatttagatgaattacagtacaaatacaatgagactactatgtccttaagcagaatgctcgaagagaaagacaggctgcaccttgcctttattgaagagacaaggaagatgcaaaggcttgctcgagacaatgttcgaaggattttggaagaacaggaaaagctgaatcatgaactggaaac

SEQ ID NO: 218301 - DNA, 292 bp, Gossypium hirsutum
gctaccttgaggcattttggaggatgaaaaagggagataggatttggcagattgcttttgggagtggattcaagtgtaacagtgcggtatggaagtgcaatcgaaccatcaaaaaaccaacagatgggccttgggaggattgcatccataggtatcccgttcatatccctgaagttgtcaagctctagacagcttcttcattcatggccttccttctttgcctttagtactttgctaaaatcaccatcatcatcatcattatcatcatcatctacttcttatcctactccat

SEQ ID NO: 218302 - DNA, 292 bp, Gossypium hirsutum
caatgatcccttggatgtcctgattattatgcaggaaccagttcttccagggtgctttcttcgggctaaagctataggtctgatgcctatgattgatcagggtgagaaagatgacaagattattgctgtatgtgctgatgatcctgagtatcgtcactacaatgacatcaaggaacttccacctcaccgtttggctgagattcgccgcttctttgaggactataagaagaatgagaacaaggaagttgctgtcaatgacttcctgcccgcctcaactgcttatgaggcaatc

SEQ ID NO: 218303 - DNA, 291 bp, Gossypium hirsutum
cccacgcgtccgaaaattgagaacgaaagaaatggcaaatattcccataatcgctcttttctgcttcaccatttttgtttcgtcctcactcaatttcgtctatggggctgaaaatatgagctacgtcgtcgtaggccatgtttactgtgacacttgccgtgttgagtttgagaccaaactcagcgaacccatcgctggagcagtagtgaaactggaatgcaggaatcgtacagacaatcaccttaccttccagagccaagaaatagtgactgacgaacgtggagactatca

SEQ ID NO: 218304 - DNA, 296 bp, Gossypium hirsutum
gataacccccaggataatatgtttggtgctaccaatgccattggccgagacagccatggaactcatacaagtaccactcgcagtgctatcagcaagcaccttgatgtagaagagttagaaatgctcttggaagcatactttgttcaaattgacggtacactgaacaagctatccacgctgagggaatatgttgatgacacagaggactacattaatataatgctcgatgacaaacagaaccatctccttcaaatgggagtcatgctaacaacggcaacccttgtcatcagtgcttt

SEQ ID NO: 218305 - DNA, 294 bp, Gossypium hirsutum
cccacgcgtccgatcatgttcatcgacgaaaagtgctttcctaccctttggctagctgcatggagcgccgagaatgagcgagaaaaagtgacgaatgaagcttgcgagtatctgaaaacgcttgaaagtgcgcttaatggaaagaaattctttggtggagaaaccattggaatggtagatattgttgctagctctgttgggtatttcattagggtcactcaagaaattatggggcaaaatctgctgtcagctgacaaatttccccaattattccaatggtctgaagatttcgca

SEQ ID NO: 218306 - DNA, 338 bp, Gossypium hirsutum
cccacgcgtccgttccaacctcccagcctataggacggcagtgaacccacttctgaggggaatcgaagtgggtctggctcacggcttcctcctggtgggtccattcgttaaggccggccctctaaggaacactgcggtggcgggtcaagctgggtccttagccgctgccggtctggttgtgatcctcagcatttgcttgacgatgtatggcgttgcatcgttcaaagaaggtgagccatcgatagcaccgagcctaaccctgactgggaggaagaaagagccagaccagttgcaaacggcggatggatgggctaagttcactggagggttcttctttg

SEQ ID NO: 218307 - DNA, 297 bp, Gossypium hirsutum
cccacgcgtccgggaggaaagagttgaagccgcttaagttttcaaatcaggagggttcggtgatgtcttgaccgacaaaaccgtggacaaggcgaaattaattgatgatgtaaggcaagcactttatgcatccaagatctgcagttatgcacagggcatgaatctcattcgtgcaaaaagcatcgagaagggttgggacttaaagttgggggaactggctagaatatggaagggaggctgcatcatcagagctattttccttgaccgaatcaagaaggcatacgacagaaaccctga

SEQ ID NO: 218308 - DNA, 400 bp, Gossypium hirsutum
cggacgcgtgggaaagaacagcgagtgggagatcggttacaatgcaatgacagacacgtatgagaacttgctggcagctggagttattgacccggcaaaggtgacaagatgtgcgttgcagaacgcagcttcggttgcgggaatggtgcttacgactcaagctattgtcgttgagaaagccaagccaaaggctcctgcagctgctgctcctgaaggtcttaccatttaatcactaggattttaagaaatttcagggattgaatgagcaatgatgtaggtttggtgccctatttttgtattggatttaataaaagaatggtttgtggatgcaatgtaaggttagggattgtgaacaatgtttgattagacattgcagtaaaaaaaaaaaaaattctttgcc

SEQ ID NO: 218309 - DNA, 321 bp, Gossypium hirsutum
cccacgcgtccgtttgaaactaaatgctcaactatcttatgcttttcagtggaagaagaagcgtatgaggaggctgaaaaggaagcgccgaaagatgagacagagatccaagtagatgcgccttggactgaaatagttttgccctgacaatcccttgtcttcataattatcctgcatatgttgcttgaagttgtgaagattgaagggtatttttaggaaaccttatctgttgtcttctaaatctaggttaaagttttaagactatttgagctgtttgtctagtactattagatattatgttgggggttttggggttgatct

SEQ ID NO: 218310 - DNA, 296 bp, Gossypium hirsutum
  unsure (1)..(296): unsure at all n locations
caacggcggagcctaaacgtggtagcgcagaggccaagaaggcgtatgctcctgtttgtgttactatgccaactgctaggatctgtcgcaactgaggcagtgccactgcacattgctcgagtgccatgagactatgcttgttatgggcaggggctgaaggatgtaatttaataatgcttgtaatttttcatttttataattgagaaacctaatttaaatttgtgtttttctttnnnaaaaannnnnnnnnnnnnnnnnnnannnnnnnannnnnnnnnnnnnnnnnnannacccct

SEQ ID NO: 218311 - DNA, 236 bp, Gossypium hirsutum
  unsure (1)..(236): unsure at all n locations
cccacgcgtccgcccacgcgtccgcccacgcgtncgcctatacattctatattcccgaagcaattgtttccccttggttgcagtttcagactgtattagcttttatgtagtacaatattaatatcaatgtccatcgtcttaggttttttatttgttcacttttgcacattgagttgaatgttgttgctatacatttcgactaaatgttagtgtattttgattgttggatttgttgt

SEQ ID NO: 218312 - DNA, 251 bp, Gossypium hirsutum
ttgagccatatccagaatctgcactaaatgaacaggctggcaagatgctgcttgaaaatgatgacgagtatgcccggcatgccaagctttattctggaattcatgccaaacccaaacccgaggttaaaataaggaccttttggcaagtaaactacagcattaaacgtggagcagcataacacctcggttctgaatatcgaccagaaaaatgcagcaggtggggccgggtaatccttgccatcccaactcgt

SEQ ID NO: 218313 - DNA, 319 bp, Gossypium hirsutum
attggctgggaacgctgcacgtgacaacattaaaaacaggatcatcccaaggcacgttctactcgccgtgaggaacgacgaagaattagggaagcttctcgccggcgtaaccatcgctcacggtggtgtgttgccgaacatcaacccagttcttttgccgaagaagactgaaaaggccgccggcaaagaacccaaatctccatcaaaggccaccaagtctcctaagaaagcttaatttggtttaacaaaactagattcacagggctttatttttcttagttgaatgtccttttgggtgattgttttcacagggtttggg

SEQ ID NO: 218314 - DNA, 263 bp, Gossypium hirsutum
cccacgcgtccgcccacgcgtccgcccacgcgtccggccaatcatggggggtatctgtagctcaaaatattggtaactttgggataatatttatctcttgcatagagagtaacttatggagctgcttctttgtttgttggtcgcttatatgcgttataggtcgctattaagcatattttgttatgtttggaattgcttaatccttttattttattttctttggctctaatttgtttcattttattgtattttatggttttatt

SEQ ID NO: 218315 - DNA, 364 bp, Gossypium hirsutum
  unsure (1)..(364): unsure at all n locations
cccacgcgtccgccgaaggttgccccagatgttattgctgagtatactgttcgtgccttgcagcgaaccgtccctgctgcagtcccagctattgtattcttgtctggtgggcaaagtgaggaggaggctactcttaaccttaatgccatgaacaagctccagaccaagaaaccatggtcactctcattctcatttggacgtgcccttcagcagagcactctcaagacctgggcaggaaaagaggagaatgtgaagaaggcgcaagatgctttgctcgttaggtgcaaggctaactcagaggccactttgggtacatacaanggtgatgctgagctttgtgagggtgctgcagagagccttcatg

SEQ ID NO: 218316 - DNA, 239 bp, Gossypium hirsutum
  unsure (1)..(239): unsure at all n locations
gaaaagaaagaccaaaatgaacccccatactcttttttctaatatactgnacatgcctaggagggatccattcctgctccattcccatctattgtattcttgtctggtgggcaaagtgaggaggaggctactcttaaccttaatgccatgaacaagctccagaccaagaaaccatggtcactctcattctcatttgtacgtgcccttcagcaaagcactctcaagacctttacaatgaa

SEQ ID NO: 218317 - DNA, 316 bp, Gossypium hirsutum
cccacgcgtccgcccacgcgtccggccgcacatgtgaaggcaaagttcataatagaggctgcagaccatcccagtgacccggaagcagatgagattctatcaaagaaaggagtaataatattgcctgacatatatgcaaatgcaggaggggtgactgtcagctactttgagtgggttcagaacattcaaggtttcatgtgggatgaagacaaagtgaacaaggagctgaagaggtatatgactcaagctttccacaacatcaaaaccatgtgccagactcaccattgcaatctccggatgggtgcctttacactcg

SEQ ID NO: 218318 - DNA, 309 bp, Gossypium hirsutum
ctcgttcatcggatcagtcatggcagacgcgattgaactgaaaacagccccagctgactgtcgtttccctacaacaaatcaaactagacattgtttcacccgctacattgagtttcataggtgcttggctgcaaagggtgaagagtctaatcaatgtgagaaatttgccaaatactaccgttctctttgtcctggtgaatggattgacaagtggaatgaacagagggagaatggtactttcccgggtcctctgtgactgtgatcacatattggaaaagaggtgaagcattgctttttggcatgggaaac

SEQ ID NO: 218319 - DNA, 264 bp, Gossypium hirsutum
cccacgcgtccgtaatcagcatgcgtcttattttagctcaattagcccattgctttgattgggagttgcctgatgggatgttgcctaatgaactcgacatgagcgagaagtttggcctttcgttgccgagggctaatcatttacttgcaaagtcgacttatcgtttaattgcttaaagttaaggttgtaaatgaacatttgggttgttgtttatgttgatttctcaaaataaataaatgagcataaacaaataaaacttatttt

SEQ ID NO: 218320 - DNA, 416 bp, Gossypium hirsutum
gtcgattaggtttttttcatgtcgtcaacaatgactacactcattggttcatgtatgccattggcggtagtagccaccctacaattatcagccagggcaataggtatattgcgtcaagcatctatgtaactaagcaagcgaccagtaggggctacttatcaccggaacagtggaagaattggaactgggtatcacagggtgaccacttcatgaacggtgcctattttactacatccggtgatcctaatgccagcaagctattcgatgctgacaaaataatgtctttccaacccggtcgattggtccccagactcacaaggtatgccggaacactccactgcagaattggtcgcccttgttaaaaacattattttgatatgcatacatcctctctttttggtatgtacaacatttga

SEQ ID NO: 218321 - DNA, 312 bp, Gossypium hirsutum
gattgtctcatcagcgggacagtagatttcatctttggggatgcggcaagcgtgttccaaaattgtcagatcatcgcaaggaagccaggtgaaaaccagaacaacatgattacagcccacggaaggaaattcccatacactcactcagccattgtgcttcaaaattgtaccatctcgggtgcccctgactacctcccggtgaaggacaagagtaagacgtacctaggtcgtccttggaaagctttggcgaggaccatcataatgcaaagcaatattgatgacatcattacaccagagggttacttgcccatg

SEQ ID NO: 218322 - DNA, 418 bp, Gossypium hirsutum
tacaggctcagttttctcaaatgagaccaattatcccctcagttgctcctcgtatgccaatgtttcctcctggtgctccaggtcttggccagcaatttttatatgggcaagcacctccagctatgcttcctccacaagctagttttggttatcagcagcaactgcttcctggaatgaggcctggtggcccccctgtaccaaacttctttgttcccatggtccagcagggtcagcagggccagcgtccagggggacgaggaggagctggtgctgtccaacagactcagcaaccaatgccgatgatgcagcagcagatgatgcccagggggcatgcctatcgttacccccctggtcgtaacatgcctgaagttccactgtctaaatgtggtggaggcatgctttctgttccatacgacat

SEQ ID NO: 218323 - DNA, 347 bp, Gossypium hirsutum
  unsure (1)..(347): unsure at all n locations
gcgagtggccgccctgttttctttgcgtcatttaaccctttaacaatggttatagttgccattatgagctcctttatcttttctgagataatgtatttaggaagggtaattggagcaatggtgatagttgtagggctttacatggtcttgtggggaaaaagcaaagatcagatttcgtcagattcatcgaacaacactaaggatgaaattcccattagtggtgatgaacttcaaatggccactcaaacaacaacacccatttncaatcaagattttgtagttttggatttaaacaaaggggatgtttctaatcagtcttccaaaaacaaccccaaataaaatatcat

SEQ ID NO: 218324 - DNA, 339 bp, Gossypium hirsutum
cccacgcgtccgccacggtctaaattaggacccgcagcaagtggcggtgaacgtgcggcggcttctgcaccaccgagaaaagtggggtcaggtataaggtaccgggagtgtcaaaaaaaccatgccgtgagtatcggaggccacgcgttggatggctgtggggagttcatggcggcaggtgatgaagggacacttgacgccttgaaatgtgctgcttgtaactgccacaggaactttcaccgtaaagaaactgacggtgaaggtagtagtatctacaaccctcaccatcatcatcaccactaccagcagcagcaacacccccaattctcgccctactat

SEQ ID NO: 218325 - DNA, 363 bp, Gossypium hirsutum
cgccatttctccaaaatagtagacggtcgccgccctgcccctcagggcttccttgcagagtgttatttgtatcgagcctatgcttacaaggcctcaggtcgcatagctgagtcaatctcggattgcaacaaaacgcttgctcttgatccaactagcatccaggcccttgacaccagggcatcgcttttggaaaccatccgctgtttacccgactgtttgcacgactttgaacacttgaaactgctttacaattccatcttgcgagacaggaagctcccaggtccagcctggaagcgtcacaatgtgagatacagggagattccaaggaaactctgtgcattaaccactaaaattcgacaattg

SEQ ID NO: 218326 - DNA, 307 bp, Gossypium hirsutum
cttcctttcaaaccctagcttccttcttctttgttattttgcttcagcactctaaagccgcgggaagccaaaatgggtatttctcgtcattccatgcacaagaggcgtgccactggtggcaaaaagaaggcttggaggaagaagagaaagtatgagcttggaaggcaacctgcaaacacaaagctatccatcaacaagacagtcaggaggattagggtttctaagtggcaatgttaagtggcgtgccttgaggcttgacacatgagtggagctattgaaacctggaaacttttgtgacaatactctt

SEQ ID NO: 218327 - DNA, 322 bp, Gossypium hirsutum
cccacgcgtccgaaaagaggtagatgacgcaattgctcaagctaaggaaaatccactgcctgaatcttctgagctcttcacaaatgtgtacgcaaaaggtttgggtgttgagtcatttggagcagataggaaagaagtaagagctgtacttccataaactgggactttgttggaacgtcttcattcttttttttagttttaccaccctcaaccttggaagaaagaagaataaagaaccaaaagaggctaaccagctcttccaagttacaaatatgacttagcacttgttttggtccggaatattaattattttccctaaaaa

SEQ ID NO: 218328 - DNA, 275 bp, Gossypium hirsutum
cccacgcgtccgcccacgcgtccgcccacgcgtccgcgtaattcggccctgaaatgaaaaaaaagggaatatagatggaaaaaggggggagaggttggacgtaaagtaaaaaaaaatcgatatgctaaaataaaatatgaaatgaaattgaaacaaggctaatgagatagaaataaggaatcataaatagagttcgggttcgaattccatagataatatggatggtgttgcctataatgatggactgtttaatttttgtgtttgattttggtttt

SEQ ID NO: 218329 - DNA, 380 bp, Gossypium hirsutum
atggcacctgcccctggctaaggcctgatggtaaaacccaggttactgttgagtactacaatgacaagggtgccatggttcccgttcgtgttcacactgtcctcatttccacccaacatgacgaaactgttacaaatgatgaaattgctgctgacctcaaagagcatgttatcaagcctgtcatccctgaaaagtacctagatgagaaaacaatcttgcaccttaacccatctggccgctttgtcattggtggtcctcacggtgatgcaggtctcactggtcgtaatatcattattgacacctatggtggctggggagcccattgtggtggtgctttctcttgaaaagaccctaccaaagtggacaggagtggtgcttac

SEQ ID NO: 218330 - DNA, 297 bp, Gossypium hirsutum
ggcgacctggctgtaccagcttttggattgtcatcaggtgtgggcgtgtctaacgcatgggttttcgaaatcgtgataaccttcgattggtgttcaccaggtaccccacaacccgtgattccaaaaagggaagcttgggaacaatcccaccattggcaattggtttcatcgtgggggccaacattttggcaggaggtgccttcgatggagcctcaatgaacccagctgtttcattcggaccagccttggttagctggacatgggacaaccactggatctactgggtcggacccctta

SEQ ID NO: 218331 - DNA, 306 bp, Gossypium hirsutum
gggacaggcataactccaatgcttcaggttattgaggctatactaaagaaccctgatgacaagactcaggtgtcactgctttatgccaatgtctcccctgatgatatattgctcaagcagaagcttgatatacttgctgctagtcatccgaatcttaaggtactctacactgtagacaatccaactaaaacttggaaaggaggtgctggattcatttcaaaggatatggtcacaaaatgcttacctggtcctgctgaagatactcttatccttgtatgcggtccacctggtatgatggaacacata

SEQ ID NO: 218332 - DNA, 360 bp, Gossypium hirsutum
ggcgacctggctgtaccagcttttggattgtcatcaggtgtgggcgtgtctaacgcattggttttcgaaatcgtgatgaccttcggattggtgtacacagtgtacgccacagccgttgatcccaaaaagggaagcttgggaacaatcgcaccattggcaattggtttcatcgtgggggccaacattttggcaggaggtgccttcgatggagcctcaatgaacccagctgtttcattcggaccagccttggttagctggacatgggacaaccactggatctactgggtcggaccccttatcggtggtgggctcgctggtctcatctacgagttcatctttcatcagcaacacccacgagca

SEQ ID NO: 218333 - DNA, 307 bp, Gossypium hirsutum
cccacgcgttcatccacgcgtccgcaagttgccaatgatcagtgcccaacaacagggtgagaggtgaggttccaaagaatcaagtggcaatgaaggaacaagagctgctatgctgtatttggcagctacccttttcaccacagcggatgcttcttgtgcaaatgctggggtcattgatgatcaccttgaaaagagcaaagcttacaaggagttgaatgacaagaagaggttggccacaagtggagcaaactttgcaagagcatacactgttcaatttggcacctgcaagttccctgagaactttaca

SEQ ID NO: 218334 - DNA, 412 bp, Gossypium hirsutum
gcagattattatgagactgatgcagacaggaggtttttgtctgcaaagggcagtgttccgattggtataggaaagaattcacatatcaagagagccattattgacaagaatgctcgaattggagacaatgtgaagatcataaacagtgaaaacgtgcaagaagcggcaagggaaaccgatggatatttcataaagagtgggattgtgacagtagtcaaggatgccttgattcctagtggaactgtaatctgagaagattgcattatgatacagcaaacccaccattagtgtttctagatagagaaagtaatgcattaccaaatcacttccacttaatccctatcatggataatttgagcctccggcggattattatttttattaaatggaatggaacccattattgcccgcc

SEQ ID NO: 218335 - DNA, 389 bp, Gossypium hirsutum
gatcacatagcagcagtagaacagcaattagtttcagaaagaatgaggaggaaacttaatgaagtaaatattgcagcccaagctcaacttgctccggtccaagaccacatcaatttcactcttcagcaagcgtatttcaaatgtgcatatgaatgctttgatagaacaaggaaacaagaggagataagcaattgtgtagaacattgcagtgttcccgttgttaatgctcaacagcattttgagaacgaaatggccaagtttcaagaaaggttaaatcgatccttgatggtctgccaagacaagtttgaatcagctaaacttcaacaaaataaagccgatgcaatcaaatgagtggagtcatgcgtcaaccagtcaatcgaggataacat

SEQ ID NO: 218336 - DNA, 417 bp, Gossypium hirsutum
  unsure (1)..(417): unsure at all n locations
cttcagtgatactggctgctttggattcggcatccaggagcacatagatcttggaatcaagtatgacccttcaaccggtatctacggtatggatttctatgttgttcttgaacgagctgggtaccgtgttggccgtcgtcgcagatgcaagtcacgtgttggtattcagcacagagttacaaaggaggatgccatgaagtggttccaggtcaaatatgaaggtgtcatccttaacaagtcccaaaatattggagcttagaagtagcagtatgagtttatttttagttttgagtacctgattttggctagtttatatttatcagatcttattttcctgaancaaattatnttatttgtttagggtggatcctaangtttttcttttggtggcctagtttataatatatttacaatctg

SEQ ID NO: 218337 - DNA, 300 bp, Gossypium hirsutum
  unsure (1)..(300): unsure at all n locations
aaggtccacctatgggtattgtatcttccttggaggttatccggtctcgtggagctcgaagaaataacatgttgtgtctcgttccacagcagaggcggaatacaggagtgttgcacatgtcactgctgaaatgacgtggattcagtccctgttaactgaattgtgtgttccaaacttaccaaaggcgctgatttgatatgatagctcagcagcgatagcagttgtaggaaatccagtcatgcactccaaatttaagcatgtggtagtggatatattcntttgttttaattggaatcaaaa

SEQ ID NO: 218338 - DNA, 410 bp, Gossypium hirsutum
gttgaacttgttcttaggagacttcaaggaatagtggaaaccattcgcggtaacctaatctatctcagagacagagaagcagatatgagagaagtaagtgaagcaacaaatgctagagtggcatggttcagtatcatgtcccttggtgtctgcatcgcggtttcggttttgcagatatggtatttgaagcgttactttgtaaagaagaagctcatctagattatatacacaagtagtttgtgaagcaaagttaaaaatgtctttgaagaactagaaaaaggaaagatagaagaattcacttaattcttgctgtaccattggcttcctttcatttcctgctgatttgggaatgaagattggtgatggtttattgttcaatggtcatatgaaagtcttcttttttaaatcta

SEQ ID NO: 218339 - DNA, 409 bp, Gossypium hirsutum
accagacatgcccaatgggcctctatgacctttttcgcatcactcagctataccctaaggttgatatatttgctcagctccaaaatgctagtgaggcatttcggacttatattagagacggcttagctcagatggagaagaatgctgcagcaggaaggactccttcaagtgtgccaatgtcaacccctccccctgcttctctttcttcttcgtcacctgaatttgggcctctgtcccctgttcagaccaactctttaaatgattctaaattatcaagtacaaaacctgaaccaacaagctttaatttgccaccatcatacactgaagacaatcgggggggtggtaatgctgtaaatacagcaagagttcgtgcccctgaaaatgcattggcagaccaaagaaatgagag

SEQ ID NO: 218340 - DNA, 399 bp, Gossypium hirsutum
gaaaatggtcaacttcatttcataggctctacaattgcttcattaaatggaagtagtctattggaatcctgtagggtgagtagtgaactaaaccccgatgactatttctttgaatggtcaactgaaatgaatggcttcacaggcaataattcgaacaagtcttggtctaaaaagcttaaacagatgaagcaatcctctataacccaaaagctcaaggcatccagggagtatcttaagtcattgttcagtaaatctgcttgttcagatgaatcttgtgccaaagcagatgtttcaaagaccaaagaatgtgcaaacaagtacatgaaaatgggaaagaagaacccatttggaaaggttgataaaggtagatacaaaatattcatgaagactattgatagg

SEQ ID NO: 218341 - DNA, 390 bp, Gossypium hirsutum
cccactcgtccgcccacgcgtccggcgaaagatgcagattcagaggctaccaggttatggcataggcgattgggacatgctggtgaaaaagctttgcagactttggcgaagcaaggcttgttgaaaggtgcaaattcttgcaaattggaattctgtgaacattgtgttctgggcaagcagacgagggtaaaatttggttcagcaattcacaatacgaaaggaattctggactatgttcacagtgatgtgtggggacctaccaaagtggcttctttgggaggtatgcactattttgtcacttttcttgatgattattcaagaaaagtatgggtgtatctaatgaaaagaaaaaatgaagttttggatgcatttctgaagtggagcttgaaa

SEQ ID NO: 218342 - DNA, 229 bp, Gossypium hirsutum
cccacgcgtccggccaaatctgacattcccatccttgctcaaaaatatctacacaaggaaattaatctggatggattcataacgcacgaagtgaattttcaagatatcaacaaagcttttgatttactgcttgaaggaaagagtcttcgttgcatcatatggatggattaattaattcttattttttttatcattttaaattttcatcaataaaagaaatattgatgtc

SEQ ID NO: 218343 - DNA, 404 bp, Gossypium hirsutum
ctcaaggtggtcaaggggattcaggtcaggcacctacgtctacccaaccgtctgcaacaggccaacaagggtataatactagtcagcagcctaacccaaaccctggaagttatccacctccaggaagtactcaacctggttatggaatgccgccttcccaaactggctatgggaatcagccaccagcacagcctggttatggagctggatatggacaaccacaaacgcagaaacctttggccaatccccagatgtatgggcaggctcaacagtcgcctagcaccccaggaagttatggccagccaggatatcattcacagccgccatcttctggttatggtcaaccagagacaggttcacaacttgctcaaccaccaagttatggtgcggcatctgcccagcct

SEQ ID NO: 218344 - DNA, 409 bp, Gossypium hirsutum
catagttgcagttaagattaaaggctcaagaacagggtggttaccgatgggtcggaattggggacaaaattggcatataaattctgatctaaggaatcaaccactttcatttgaggtcactaatagtgatggtcttacacttacatcttacaatgttgctcctaaaaattggaactttggccaaacttttgaaggaaagcaattcgaggtctaagatgaaagaaaagcatcatcatcaacacaatgtaatgttgggtattatttattttatatatatagaccagactgtcctattcttttctttctttttgtttatctgttgttttgtactgattggggatggaaatggaagggtagaattggcgacttttttattgtgtgtaaggacttaaaatagcaggatatatca

SEQ ID NO: 218345 - DNA, 403 bp, Gossypium hirsutum
caagcttatcaagttgctgtaatcgataagaccaaatggctaagttcatctgattattgctgaaacggagctccttgttaatgtaaaagaacattctcttgttccggagcatcaggtgcttactaccgaggagaaaaagactttgctgcagagatatactgtaaaggaaacacagctgccgcgtatccaggtgagtgatccgatcgcaagatactacgggctgaagcgtggacaagtggtgaagataattaggcctagcgagactgctggtcgttatattacctatcggtatgtggtgtgaacatgtttcatgttaaataggattttcctagtttagttagaactagacagcctaatagattttgtagtcggggtatgaagaagacagctatgatgatagttt

SEQ ID NO: 218346 - DNA, 405 bp, Gossypium hirsutum
attcaacatctatttgtcaattcccattcaacattctctttcggccgcgctctcatttatgttaatataaaactgttgctgttgaaaatatagctgaaaatccccattaaactatgtcccagaaggccaggagatgctacagctgtttatgtttccactgaaaaagctcaaaaagaacttggttggaaagcaaaatatggtatagcagagatgtgcagagatcagtggaagtgggcaagcaacaatccatggggataccagtcaaagccttaggctgcaactaaatactaattttcttccctagtcttttaaaaatgtctcatagggagaattaagtgtacaaatacttgtttaatttaaacaaaactgatctttgatgaccaaaagtttggatttatcaaatgt

SEQ ID NO: 218347 - DNA, 405 bp, Gossypium hirsutum
cccacgcgtccggggatggtcttatcaggcagactaacaccccagagaggatgcagaactggagaaagatctgtagaggtatctgttctactgaacaaaattaagaaggaagatattatgaggttcctggaattacatcatgtgaagaagtttgatgttccatttattgccatgtatcggaaggagcaatgtctgagtctgctggatgattttgagaaaaatgaggctgagaatgaagataatgatgatgttgaacaagcagggcaattgaagtggcataaggtactttggattataaaagaattagacatgtggttgctcctttagaagcgtaagagtctgcttcagatgcaccaaaggaaaatttacgatgaggaatgtctgaagattgataacagtgaaaag

SEQ ID NO: 218348 - DNA, 275 bp, Gossypium hirsutum
cccgtcggtcgaattggccggtacttgaagaaagggcgatactctcaacgtgtgggaacgggtgctccagtttaccttgctgctgttcttgaatacctagctgctgaggttcttgagttagctggcaatgctgcaagagacaacaagaagaataggatcattccaaggcatgttctattggcagtgaggaacgatgaagaacttgggaagcttttagctggtgtgaccattgctcatggtggtgttttgcccaatattaacccagttcttttacc

SEQ ID NO: 218349 - DNA, 378 bp, Gossypium hirsutum
tctagtaaacaatcaaattctcagccacttcgtcatcaaatccctgaatttcattggagaaagtaagaaaaatggcaatgatcccaagattctttggcaatcgaaggagcagcatcttcgatgatcccttctcctttgacatattggatcctttcaggggcttccctctgtcttcttcgtcactcaccaccacgcctgtcccagaaagcgctgcttttgctaacaccagaatcgactggaaggaaactccggaagctcatgtcttcaaagccgacctccctgggcttaaaaaagaggaagtgaaagtggagattgaagatgacaggatgcttcaaatcagcggagaaaggaaatttgagaaggaagacaagaacgaca

SEQ ID NO: 218350 - DNA, 405 bp, Gossypium hirsutum
cccacgcgtccgggaagataacccttgtgcagggtctagccttggtcatggtaactttgctatggactggaaccatggctcaatcagactgcaccagtgtgataatcacgatggctccatgcgttgattatgtgactggaacctcctcaaccccatctgttccatgctgctcacagcttgctaacgttgttcaattacagccacattgcctttgcatggccctcagtggtggaggttcatcactgggtgtggaagtaaaccagacacttgcccttgcactccctcaactttgccatgtcaaaaccccacctgagagcaactgcaaagctgctgatggacctgctgtaatttcaatatctccatctggttcacctcaaggtttaccaccccattcaaatgataccc

SEQ ID NO: 218351 - DNA, 402 bp, Gossypium hirsutum
ggtgatgttgtgcccaaggatgtcaatgctgctgttgccaccatcaagaccaagagaactattcagttcgttgactggtgcccaactggattcaagtgtggtatcaactaccagccacccactgtcgttcctggtggtgatcttgctaaggtccagagagccgtttgcatgatttccaactcaaccagcgttgctgaggtgttctcccgcattgaccacaagtttgatctcatgtatgccaagcgtgcctttgttcactggtacgtgggtgagggtatggaagaaggagaattctcggaagctcgtgaggaccttgctgcacttgagaaggattatgaagaagtcggtgctgagtcaggcgagggtgatgaggaagatgaagatgagtactaaataagtaat

SEQ ID NO: 218352 - DNA, 391 bp, Gossypium hirsutum
  unsure (1)..(391): unsure at all n locations
gtggaaatcatcttcgagaatcccgagaccgccattcagtcttaccacttgtctggctactcattctttgccgtgggcatggacattgggaaatggagtcctgagaagaggatgaactacaatcttctcgacgccgtgagcagacacaccatacaggtattccccaactcctggtcagcaatcctattgacattcgacaactgcgggatgtggaacctgaggtcggagatatgggacaggcattaccttggggcaacagctttatgctagtgttatttcccctaaccgatccctcaaggatgaatacaacttgccggaggtgtatngacttgggcatcgtgcaagcatgccagggcctcaccttcagcagttaattaataagctataatct

SEQ ID NO: 218353 - DNA, 401 bp, Gossypium hirsutum
cccacgcgtccgcaatcctgagaaccccatcatggaagagctgagaaagagggctgatgctgataagaatgacaagtctgtgaaagaccttgttctgttgctctttgagactgccctcctcacctctgggtttagcctcgatgacccaaatacttttggcaacagaatccataggatgttgaaacttgggttgagcattgacgaggatgcaggagatgctgatgccgactctgagatgccaccattggaggatgctgatgccgagggcagcaagatggaggaagttgactaagctttttaacatgtttgtgaagagtttatttggtagtttcatttttagcttttaatataatattctggaaaattggtcaatgctgtgtttactttggaatgggaaatga

SEQ ID NO: 218354 - DNA, 234 bp, Gossypium hirsutum
ccaatgttcaggatgacatgttgatagctaaagatgagatatttggtccagtacaatccatctcaaagttcaaggatcttgaaaaggtggtccaaagggcaaatgcatcttcttatggttgggctgccgaagtttcaactcaaattttcgaacccgccaccacttgacttgggcattgcgagtcgggacaatattgattaacttgttccacatatttgatgcttcaatcccatt

SEQ ID NO: 218355 - DNA, 228 bp, Gossypium hirsutum
cccacgcgtccgcaggacaaggagggtattcccccagaccaacagaggttgatctttgccggtaagcaacttgaagatggccgcactctcgctgattacaacatccaaaaggaatccaccctccacttggtgcttcgtcttcgtggtggtatgcagatttttgtgaagactcttaccgggaaaaccatcaccttggaagttgagagctccgacactattgacaatgtc

SEQ ID NO: 218356 - DNA, 406 bp, Gossypium hirsutum
cgatgccacagtgtatccattgaagatcagagagggagataaaccaatccttgaggagcccatcacatttgctgagatgtataggaggaagatgagcaaggatcttgagcttgccaggctgaagaagctggccaaagagcagcaacagttgaaggagaaagaggctgagaatgagaagcccaagcttgaagccaagccattggaggaaatccttgcctaaaacttttaccctactgctggttattgtgttagcactgtttcgtcttccactatgttgtgttaattttatttcatttctacttttttttttgtggtgatacccgtttctatttattttctagcgagtaatgtatgtcatgtttcccacatttgatgcttgtggtctattatatactcgggtatcagt

SEQ ID NO: 218357 - DNA, 371 bp, Gossypium hirsutum
cccacgcgtacggttttacaactctgagattcattcggctgctttctgtttaccatcctttgcaaagaaggtgatcgaatcgaaaccttaagggtggaaattttgaagttttagaacaaattctaattattggtgagcattagttatcatcctttgctgtgatggcccaatgtagcaacgaaccttggatttggaactttagataatgcactttcttttttgtctcgcttaagaagagaatttgaggtaatggttgtggaaagatatatgtccacaagggataatatggtcatttagctgagacataaatggctgtttcttgcaatcgttttatcagattcacatgttgtgtgtattatatcatttttgca

SEQ ID NO: 218358 - DNA, 361 bp, Gossypium hirsutum
  unsure (1)..(361): unsure at all n locations
ggagaggagaacctgatgttacccgtagaacgcctgattacttcctctgaagctgctacattccataactgattcaagatactccgcttttcggcctctcctctccccctttacattgtcaggtagttgccgatcctttacagaaatcttttgcatctactgttcttttggtgatttggggggggggtaccaaaagcatacatgggaatgggttgggttatgaacttatgatctataatcctatcatcgagttgatcaatttatcttacacttggatattctgttgaagagattgtcatagctggtgaaactctgacactatcagaatgtaaatttttgtgtttgtttttggttnanaaaa

SEQ ID NO: 218359 - DNA, 403 bp, Gossypium hirsutum
ctggaagatcccgaggctttggattcgttactttccgtgacgagaaagctatgagggacgcgatcgaaggaatgaacggtcaaaatcttgatggaaggaacatcaccgtcaacgaagcccaatcgcgcagaagtggaggcggtggcggaggatttggaggaggaaacggtggttacagccgcggtggaggcggcggcggatatggtggtcgccaaggaggatatggtggcggacgccgtgaaggtggatacggaaatggtggagggtatggtggtggtgggtaccgaggtggacgccgtgaaggaggatatggtgacggctgatctcgttactcaaaaggcggcggtgcatctgaaggcagctggaggtcttaagtttaggtttcaaagtgggcttgggccta

SEQ ID NO: 218360 - DNA, 405 bp, Gossypium hirsutum
caaaacatggacattggtggttagaattcggaccaggattattggtgggatactggcctgcctttctttttagtcacttgagaagccatgccaacatggtacaatttggaggagaaattgtgaacactagatcctcaggattccacacatcaacacaaatgggcagtggtcattttgcagaagaaggctttagaaaagcagcttatttcaggaacttacagacagttgattgggacaataatttggtcccattgacaaacattcatttaaaggctgatcgtgccaattgttacgacatcagacaaggaagaaaccgtgtttggggaacttacttttattatggaggccctggaaggaatgtaagatgtccttaactatttcatcttttaaccctttaattttttt

SEQ ID NO: 218361 - DNA, 374 bp, Gossypium hirsutum
gcaaggtcgaagagtactgtttatgcttggtggtattcaaatgcttgcaacacaagtaacaattggagggtttatgacagctttattaggtgatcatggtggattgagcaaggcgagtgcttatgtggttctagttttgatatgtatatacatttctgggtttgggttatcttggggtcccttgggatggttagtccctagtgagatttatccattagagattcgatcagctggccaaagtattacagtagcagtcagttttttcttctgttttcttattggacaaacttttctagctatgctttgccacatgaaggcagggattttcttctttttcggaagatgggtggctctgatgaccctatttatatact

SEQ ID NO: 218362 - DNA, 408 bp, Gossypium hirsutum
aaacaatcaggagagaaaacatataaatatgggaaagtgttgactttgcaagggcatatcgccggagcttatcgagcatgtcactaagggcgatactgaactctttccggtcatcgttgctgcaagggatgtcagtattcaaggaatttgcaacgggaagtgtgccgatcatttacttactgaggatccccatccgcgaccatacattatagtcggtaacccagaaacggagtgccccggagaatgcggatggcctttcttcccggctgacatgggtccaaagggaccagtccttaaaccaccaagcggaaacatggcagcagatgctatggttgttgccttcgcgggtgcattggttgatgcaatcaccaacccaatgaacgatgcactctaccattcaaacaaagc

SEQ ID NO: 218363 - DNA, 382 bp, Gossypium hirsutum
accggaccggaaggcccggcgccagagcgtccggtcacgtaacattgtctaactaccgggactatcgattttaaacgtgatataaacatgactagggtgatgtgatttggtcagaattctgtagaggttaacatgggctttcttgaaccccaacaacatatctggaggccccagagaggcctaccagaacgttcggtggctattcttagagcttcggtctttgagcattttctttatccgtacccgacagacacagataagcacatgttggccactcaaactggtctctcttgaaatatgtgtctaactggttcataaatgcacgtgttcgggttctgaaaccgatggtggaagaaatacatatgcttgaaagcaaatgctt

SEQ ID NO: 218364 - DNA, 288 bp, Gossypium hirsutum
cgggccgacccacgcggtccgcccacgccgtccgtttattggttccaattttttttttgttactggcttaaactctaattttcccgttaaccattgctaaaggtccaccttcccttgaatcctccccaagctccaaagtgagcactgtggcttttgataaagggtttcgaaacctctggggtcctcagcaccaaaaactagaccagggctcattaccagtttggctcgataaaagctcagggagtggtttcaagtcactttgttcggacacatcaggttactttggtg

SEQ ID NO: 218365 - DNA, 408 bp, Gossypium hirsutum
cccacgcgtccgcccacgcttccgaaacaagcatttgctaagggctccaaaaaaggtgcgcaacagacatcattgaagtctaaggtcggtatatttgtggcattagctatggtattgcagcgtaaacctgatgctttaattagtgtattgccaaagttgagagaaaattccaaatatcaaggacaagataagccccccatttttgtatggacgatagttcaggcatccaaaggagatcttgctgtgggactgtacttgtgggcacatctcctcttgcctgtacttagtagaaaaaactgtaatccacaatccagagatctaattttacaactggtggaatggatcttatctgtctcaaaagctcggtcaattttagtaaataatgctgttagaaaaggggaacgtttg

SEQ ID NO: 218366 - DNA, 411 bp, Gossypium hirsutum
  unsure (1)..(411): unsure at all n locations
agaaaatggctggaagcccaatcacttgttcaatttgnaggaacaatttctatttgggtgcgaccaggctgccatcaacaacagcgatctgcccaatctctcccccgacgacgccgtcgagcgcgactgtcttgtttatcgctcttacatcgccttcggcagctaccaactggtgatcaatgagatcgattcctctgctgccactcctctacaagccgttaaattgctcgctctctatctctccaaccctcatgataaggaatcgacgatttctagcttgaaggaatggttggcagatccagctattgggaacaatcccatcttaaggttgattgctggaattattttcacgcacgaagaagattataacgaggctcttaaacacaccaatgctggtggcaccatggaact

SEQ ID NO: 218367 - DNA, 405 bp, Gossypium hirsutum
caagaagctttggtggtcaagtcatggactgtaatgaagaagaatgcagctgaatgggggcttaaattcttcttgaagatatttgagattgcaccatcagccaagaaactattctcattcttgagagactcaaatgttccattggagcaaaacacaaagctgaagccccatgccatgtctgtctttgtcatgacatgtgaatctgcagttcaactgcgtaaagcaggcaaagttacagtgagggaatcaaatttgaagaaattaggagctacccattttaagtatggggtagttgatgaacattttgaggtaacaaaatttgctcttttggagaccataaaagaagcagtaccagatatgtggtcagatgagatgaagaatgcaatgggtgaagcctatgatcgt

SEQ ID NO: 218368 - DNA, 416 bp, Gossypium hirsutum
  unsure (1)..(416): unsure at all n locations
gtgaatgcattggcgcaactaatgacatggaagacagcagttgcaaacatcccatatggtggggctaaaggtggtataggatgtaaccctggagagttgagcaaatccgaactagaacgcctcactcgagttttcacccagaaaatacatgatcttataggaattcataccgatgttccagcacctgatatgggtactggtccgcagacaatggcatggatactagatgagtactcaaaattccatggtcattcacctgctgtggtgactggaaaaccgattgatcttggaggatcacttgggagagatgcggccactggccgaggggtgctgtttgcaactgaagcccttcttaatgaacatggcaagtccatctcttgacaaaaatttgtaattcaaggtttntgggaatgttg

SEQ ID NO: 218369 - DNA, 398 bp, Gossypium hirsutum
cgatgaatcccctgcgaatgttgaagctgtaaaagaatggagagagacaagagatgaatgcaagaggaaggttagccgctgcgtgagacggtcccaagaaatgttatgatccattgccgctgcttcttcttgacaatatttgagtacccagggaatgccttcaattgattgtgtggggagctttggtcgataacactgcgagtgtccttgtagaatgccatatgaaaaaatctcaacactttacttaaaaactctccctttttttgttttggttttgactggagtaatgtaattactctgaaaacagtttcccggtattcaaaagcgttttttggtaagtgtttgttggcaaacgttctttgtgagtcccgcttttttatcatgaaatggtcatttgt

SEQ ID NO: 218370 - DNA, 415 bp, Gossypium hirsutum
cttgtggtcatatatgcacttacatcaggaattttaggatatactgcaacttctttctattgggagcttgaaggaaacaactgggttaggaatctcttattgactggctgtcttttctgtggtccgttgtttctcacattctgcttccttaacacggttgctattgtatacagtgcaactgctgcactgccttttggaactattgtagtaatagtccttatatggacactagtgacatctccattgcttgttctgggtggaattgctggcaaaaatagcaaggctgagttccaagctccttgccgcaccacaaagtatcctcgagagattccaccattgccatggtacaggagtgctgttcctcagatggcaatggctggatttcttcctttcagtgccatctacattgagcttt

SEQ ID NO: 218371 - DNA, 420 bp, Gossypium hirsutum
cccacgcgtccgcccacgcgtccgccccctttcactttctcccaatagcacccccctctggcctcatttgacaccaaaatggcgaactcagcatccggaatggcagttaacgatgaatgcaagatgcgattcttggaactaaaggccaaaagaagctacaggttcatcgttttcaaaatagaagagaacattcaacaggtcatggttgaaaaactcggtggacctaaagaaaaatacgacgacttcagtgcttgtttgcctcataacgagtgtcgttacgctgtctttgatttcgacttcactaccgacgaaaatgtccagaaaagcaaaatcttcttcattgcatggtctcctgatacatcaagggtgaggagcaaaatgttatatgcgagctctaaagatagattcagaagagagttg

SEQ ID NO: 218372 - DNA, 359 bp, Gossypium hirsutum
gccgatcgatctcctgtgttcacgtttgtattgttcgagatgggataatcacccaggtgggggattatttcaacacttctctcaccgttactcgccttaaagactctccaccgtcagcttgcagttcttcgacggcggagattgcgccagtgtattgcccttacgtttgggagagtactctttccaaccggctggggaaatcggatccaggtcttgttcttgcaatttagtttcctcctcccacgtgtggctaacataacagatgttaattccatgagttgagtttggtctggtgttaaaaattattgtgtctggactgtcaatttggtaacttattagaattgttgtgtttcaagtgt

SEQ ID NO: 218373 - DNA, 416 bp, Gossypium hirsutum
ccaagaacatgatattaaaacgcctttgttttcagcctttggtcttcactcgcctggaggggagagaagaagagatggtaaccataatggtacggccgttctcacttgcactcaaaccctagatcatgttcatcgtctccagaggcagcaatcactcggtcaagggagatccccacatccggatcgagtcgctgccgccactggtgctgcagctgttgcacccatttcagttggttcaaacgcaaagccgtccagcttcgtcagataccgagagtgtcttaagaaccacgccgccagcatcggcgggaatgtgtacgatggctgcggcgagttcatgcctagtggggaagaaggaacactcgaggccttgaaatgtgctgcctgtgactgccatcgcaactttcatcgcaaggagg

SEQ ID NO: 218374 - DNA, 415 bp, Gossypium hirsutum
cccacgcgtccgcggacgcgtggggtcctttacaagcaacggatagccatagctgagcggagagagcaaggagagagaagattaatgcacgtatgaagctcctacaggagttggtaccaggatgcaataagatttcgggcacagcgttagttttggatgaaatcatcaaccatgtgcagtccctacaacgtcaagtggagttcttatcaatgagactcgctgcagtgaacccaagagttgatttcaactttgatagtgtattcacggcagaaagtggattttttatggacagtaacttttctggcatggttatgcctatgatgtggcccgagattcaactttcagcaacctgtttgggggagagaagaagtctgcaataattacttaactccggagaacttgcttttaagctatg

SEQ ID NO: 218375 - DNA, 414 bp, Gossypium hirsutum
  unsure (1)..(414): unsure at all n locations
gcggcaagcattttccagaactgtatgcctcttttgagggaacccgggcccagaccaaaccggcttggttcctgcacagggaaggattgatcttggaccaaactcaccatttgtccttcaaaactgcaccatctcggccgcccctgattacatccaagtgaaggatacaaacaaggcatacttggggcgtccttggaaacaattcgctaggtccatcataatccaatctaggatcgacgacatcattcaaccagagggttatgcccccatgacaggcaccatangaatagacacttctttcattgccgagtttggaaacaggngacccggtgccgataccagccgtagggtagcatggaaaggtatcaaaaagatagatataaatgaagccaacaaatggactcctcgcgtctt

SEQ ID NO: 218376 - DNA, 413 bp, Gossypium hirsutum
ctttggagtggcaaagatgtttagacatttagtcagggcagatacacttttacaatacaaggacccatacgagaacatcaaaggatccaaggagaagccctgaacccccaagccccgttcacatgagcttagaccttgagctaaacctaccatgcgattcatcagtaaggaaagttgatgcaacagatcaccaattattcaacaagcacaactccatcggccccacgagggccggttcagttgataagaagatcaactcatcgggaggattaactcgcaacctttcgtggttggcagtggaggagaatgatcagcaagagcaagagatggtagcaacagtgtgcatgagatgccacatgttggtgatgctttgcaagtcatcacctgcatgccctaactgcaaattcatgcac

SEQ ID NO: 218377 - DNA, 417 bp, Gossypium hirsutum
cccacgcgtccgcccacgcgtccggccacttttttcatgctcgctactggaactggaatcgcggcctttcgatcatttctgtggaaaatgttcttcgagaagcatgacgactacaagttcaacggtttggcatggctcttccttggtgtccccacgagtagttcattgctatacaaggaggaattcgagaaaatgaaggagaagaacccagaaaacttcaggctggactttgcagtgagcagggaacaaacaaacgagaaaggagaaaagatgtacattcagacacgaatggctgaatacgcgaaagagctatgggaattgctgaagaaagacaacaccttcgtctacatgtgtgggttgaggggaatggagaaaggaattgatgacataatggtctcactcgctgcagctgatggt

SEQ ID NO: 218378 - DNA, 413 bp, Gossypium hirsutum
gagccccatgcatacttgagtggagagtgcattgaatgcatggcaacgtcagacaatgtggtccgggcgggtcttactcccaagcaccgtgatatcataactctttgctccatgctaacatataagcaggtacaattatttgatcaagggtttgataattttctatttgagagtaaaaataatttgttaagagtgataccacatataggcttttctttttctgttttagctgaacttttgctctatgaactttaattacacgatgacacaggctactgctttatttatttgtcaagcactaatactttatttctatgtgacttgatttggtatatttctttgtcttttcccaacggggcagtttccttgataacataaggcgaaatattatgcacatttttgcttggatatag

SEQ ID NO: 218379 - DNA, 398 bp, Gossypium hirsutum
tgaagctcccattttcgaaccagatttaattagagccattttcaagcacatttggataaggagagctcaagagcgtgaaaggaacggattcccaaacactgaggccggagattccgaggttggagctggaacatcaaagaagaatcgacccacttccgctaatacaaatgccttgaagctgagttgtgaacttcttcggatttttatcacagaggctattcagcgagctggtacaattgctgaagctgagggtagtaccatgattgaaccaactcatttagaaaggattcttcctcaattacttctggatttttaaggggttcagctcgctaactaattcgttggaactgatagacatcaatgcagtatctctacatcagcttgtaggtagtattatc

SEQ ID NO: 218380 - DNA, 413 bp, Gossypium hirsutum
tacagagattgctggagtggtgctttcctttgatcctaagccaattcagggagacgggggtggtgccggcgctcacacaaattacagtacgaagtccatgagaagtgatggaggctacgaggttatcaagaaagcaattgcaaagcttgggctaaggcacaaagaacacattgctgcctatggagaaggcaacgagcgccgtctcaccggccggcatgagactgccgacatcaacactttcttatggggtgttgcaaatcgtggggcatcaattcgtgttgggcgagacacagagaaagccggaaaagggtatttcgaagacaagaggccagcatcgaacatggatccatacgttgtcacatccatgattgcagaaaccaccatcctgtggaaaccatgaggggaagcccatg

SEQ ID NO: 218381 - DNA, 204 bp, Gossypium hirsutum
gttcctttggatgatgggatcgatgacgagtgttcccatttttggttaaacccaattttgggggaagttatggaagtttttaagcctggtgcatttgtccttcaatgtggtgctgactccttatctggagatcggttggggtgtttcaatctttcgatcaagggtcatgctgaatgtgttaaatttatgagatctttcaatgtt

SEQ ID NO: 218382 - DNA, 408 bp, Gossypium hirsutum
  unsure (1)..(408): unsure at all n locations
ggagatttgcagaaaaagccatgggaaccatggttttaaaagtggttgtaaaactgaacgaggcgatttggagccgagggatccgaagtgtccccagacggattagggttcgcattgctcggaagagaaacgatgatgaagatgcaaaggaggagctttactctctggtatcggttgccgaaatcccagccgaaggactcaaaggtttgggcactaaggtaatcgatgatgatgatgagtaatctccgatctctagtttaagaaaagcattgcattttgtttactgaaaagtttaaacccaggttttggctagtttaacgattttgttcatcaactgtttttcctttgatactnncgtttatcgtgtttagacttttaagcttggtgcaatatatgtttcaatggcgg

SEQ ID NO: 218383 - DNA, 337 bp, Gossypium hirsutum
ggatgaggtggtagaggaagccgttgagtttgcagacgaaagccctgttccttctaaaagccagctgctcaaaaatgtatttgcagatccaaaaggttttggaatcggacctgatgtccgatatagatgtgaggacccaaagttcactgaaggcactgctcaggtctaagctttcaaaattggaggttgatcaaaactctctatgtcaacttatttattatttcatggtcacatatgtttagtttgtggtagcaatcacgcgttcacttgattttagtgtttattgcgtaccaagtattgtgttccttaggttgcctatccatatgaaaatttgggg

SEQ ID NO: 218384 - DNA, 407 bp, Gossypium hirsutum
cccacgcgtccgggcgtgcatattattgttttactaagggagtaccatatgcttctgtggggaggaaaaacaaacccaggcgtgtcgatttatactattccagttggttaatccgtgcagttgaatcaaggagaggagacggtcagctaactgcatgcgaggtgttacttttccatcacgaagatatgggtataccatggaaaattgcaaaggttggcgtccggcaaggcatgtggggaaccgtcaagaagatcgaccccggcctacgtgcatatcaaaaggaaagaacatccggaaatacgctatcccattgcgctttcatggctcagataaacagtaaaaataagtgcagactatctgagatcctttgaaagcaaaagtaatgattcaatagagctcgaaacaca

SEQ ID NO: 218385 - DNA, 375 bp, Gossypium hirsutum
ccaaaataagggaggccgaagaaaatgtccctgagaatgaaaagaatgttggcattgagaagcagtctggagaggaagatgccatggatgctggcaaggagaatgctgcaaatgaagctgaggagaaagagccagaaaacaaggagatgactctggaagaatatgagaagattgttgaggagaagaggaaagctttgcttgcccttaagactgaagaaagaaaagttgataccaaagagtttgagtccatgcaacaactttcaagtaagaagagcaacgatgacatttttatcaaactgggttctgaaaaggacaagcgcaaggatgctgataaagaagaaagagtcaaaaagtctgttagcatcaatgagtttc

SEQ ID NO: 218386 - DNA, 355 bp, Gossypium hirsutum
cgccaaccgtccgccttcatattcctcacagggcacctgatctgccttcaaagttcaagggcatgcctggtcctggcaagattcaacacatcatttgcactggcaatctctgtatcaaagaaattcatgattactccaagactctgtgtgctgatctgcatatttctcgcggtgaatatgatgaagattcccgctgtccagagaacaaaacactgacaactggtcaattcaagcttgggatatgccatgggcatcatgtcattccatggggggatttggattcactagcaatggtacaaaggcaattggacgtggatatccttgtaactggtcacactcatcaattcaaagcata

SEQ ID NO: 218387 - DNA, 431 bp, Gossypium hirsutum
ggaacatcgaaaaagctttctctttcacgaaacgtaatatgctccaagtgcaagggcaaagggtctaaatcaggtgcatcaatgaaatgtaccggttgtcaaggttcaggaatgaaagtctccattcggcacctcggtccttccatgatccaacaaatgcagcatccttgcaatgagtgcaagggtactggtgaaaccatcaacgataaggatcgttgcccacaatgcaaaggtgataaggttgtgcaagagaagaaagtcttggaggttattgttgagaagggtatgcagaatggacaaaggattactttcccaggagaagctgatgaagcgcccgatacggttactggggacattgtattcgtcctgcaacagaaagatcatcctaaatttaaacgaaagggtgatgacttatttgtagagcatacatt

SEQ ID NO: 218388 - DNA, 380 bp, Gossypium hirsutum
gattgattagtgtttctatcaaagacccctccccccctcttcttcctctccgatcggtgctgtcgtttgctgtatttatatattttttgcttcaactcattcaatcaccacaatttctcttatttctttctttttataaatacccttttatttttacttgctttttctatttctcctttgactggttcatattagccgttgatagtttagtgattaatatatacaactttttaaagctttggaaagatcgttttttttacttggtatcaagcatggaagatcgcaaggagaaaaatgcaccatggctatcagtaccacaatttggtgattgggatcaaaagggacaggtgccagattactctcttgacttctcaaagatc

SEQ ID NO: 218389 - DNA, 391 bp, Gossypium hirsutum
attgaatttgagcttggtagtggtcaagtaatcaaaggatgggaccaaggactactaggggtgtgtgtcggtgagaagcggaagttgaaaatacccgcaaagcttggttatggtgaccatggttcaccacccaaaatcccaggtggagcaacactagtatttgacacggagcttgttgcagtcaatgggaagccatccagcggaggggataatacaagtgaagatgagctataataactgatgataggcactcgtctgagcagctttatccttttactacgtttgttttcctttaaaaatgctagcaatggtaaacctcaccagcctttctggctgggatttagaaaacaaattctggtggcattttttcataagcaaaaaactatttatt

SEQ ID NO: 218390 - DNA, 416 bp, Gossypium hirsutum
aggggctgtttagcttctctgccatgggagtgcaaggagaatccttcgatttcagtttggagctttttgggaaaatagttcctgagggttgcaaaactaatgttgggttaaggaatataatatgctcaatcatgaaagaagaaacagggtggtggaaaagattgttaaagtcagaagagaaacccgcgccttacatcaaggttgattggaacaaatggtgcgatgaagacgatgaagatccaaattctgatttggcctctgatgatgatgatgccacgtatgttggtcaagaagaagaaagcagtgatgatgaaagattgctgtatcttccagatttggaaaaagcaagaggaaactaagtaagaaatcctaactaaccattcaaaagttgaaagtactaagcttttcttggtagc

SEQ ID NO: 218391 - DNA, 343 bp, Gossypium hirsutum
gattactttagaagtggagagctcggatactattgataacgtgaaagcgaagattcagggcaaagaaggaattccaccagatcagcaaaggttgatttttgctgggaaacaactggaagacggaaggactttggctgattacaatattcaaaaggagtccactcttcaccttgttcttcgtcttcgtggtgggttctaagccttaaggtctcccttaatgtgggttttctggttttacgtgaaggactgtgccctgtaatggccttttaaataatttctagtctttgtttaccggttgcatctatgtatggtttctctttgaatggaatttgcatatttacct

SEQ ID NO: 218392 - DNA, 418 bp, Gossypium hirsutum
cccacgcgtccgggtctccactcttccacctcgctccaaaggggttgaagatctggaacggcctttcatggctccaaagctggtacaccaggcttcccacaccatgccacctgagaagattgaaatctttaaatctttggatgattgggctagggataacattctgattcatcttaaacaagttgataaatgttggcaacccaaggattttcttcccgatccttcgtccgatggatttgaagatcaagttagagaacttagagaacgggcaaaggagattccggatgagtactttgtcgtgttggttggtgatatgatcacggaggaagcccttccaacttaccaaactatgcttaataccttggatggaactcgtgatgaaactggtgctagccctacttcttgggcaacttggacc

SEQ ID NO: 218393 - DNA, 409 bp, Gossypium hirsutum
gaaaaaaacgcaaagaaaagagaaatggctactttgggtggaattagccaggtcgatgggggcgccaatagtttggagattgaaaacctcgctcgttttgctgttgatgaacacaacaagaaagggaatacgatgctgcagtttaagaaggtgacgaatgtaaaacaacaagtggtttctgggactatgtattacataacattggaggcgatggatggtgacaagacgaaagtttatgaagccaaggtgtgggacaagccatggatgaatttcaaggagttacaggatttcaaggttattggcgatgctcccgccggttgtacttccaccgcttaaagtgactggagattgtagaggaaaggatattcggatatcgaaggcggttttaaaataatgtaactgtcttatg

SEQ ID NO: 218394 - DNA, 405 bp, Gossypium hirsutum
gtttcagaccaatttagtcccataccctagaatccatttcatgttgtcttcatatgcacgagtgatttcagcggaaaaggcttaccatgagcaactatcagtggcagaaatcacaagcagtgcatttgaaccagcttcaatgatggccaaatgtgatccacgccatgggaaatacatggcttgttgcttgatgtacagaggagatgtggtgcctaaagatgtgaatgctgcagtggcaacaatcaagaccaaaaggaccatccagtttgttgattggtgtcccacagggttcaagtgtggcatcaactaccagcctccaactgtggtacctggtggggatttggctaaggttcaaagggcagtttgcatgatttcaaattctacaagtgttgctgaagtattctc

SEQ ID NO: 218395 - DNA, 303 bp, Gossypium hirsutum
  unsure (1)..(303): unsure at all n locations
ggctttaccatgtcggtattccggggaatctgcttcttgaaggagataacaccatatttgtaactcaaccgaaaagcaccagccctttccaaggaattatgtatgactatattcgattagaaggccctgcatcttctaatggaaacaagaaagcttaaattttttccagatatccacaaaattgaagctagaaacaggtttgaacaagtttctgtcaaagaagtatatcctgtttcatattgattaaaccgtatttctgtagttgatttatgtacaacatcaaaatcccatggattcaacana

SEQ ID NO: 218396 - DNA, 398 bp, Gossypium hirsutum
  unsure (1)..(398): unsure at all n locations
caatggatggattggcatcggcaaaaacatgcatgagggcggaaaaccaggagctgaaggtcatttgagagtacaactcgatcctgatccaagatacgtgtttcagtttgaagatgtgaccatgctgagtcctcagatagtacagcttcgaggttccatcaagcaaccaatttttagttgcgaatttagtcgagacaggttatgtaaaactatataatttcatcgtccatcttccatttgttgagttcaattttaaaagagctgcaattactcagtttttaaaaaactatatttggacacctttaaacaactcttacaacccnnnnntaaatataatttttattttttatttttaaaaatggattataattttngtttttttggttttttttttttta

SEQ ID NO: 218397 - DNA, 428 bp, Gossypium hirsutum
gctcgcattgcctgcaacaagtacatggccaaatttgctggaaaggatgcgttccatttgagggtaagggttcatcccttccatgttctgcggatcaacaagatgctttcatgtgctggtgctgataggcttcagactggaatgaggggtgcttttgggaagcctcagggaacatgtgcaagagttgacattggtcaggtcctgctttcagttcgttgcaaggacagcaacagccaccatgcacaggaggccctccgccgtgcaaagtttaagtttcccggtcgtcaaaagattattgttagcaagaagtggggattcaccaagtacaaccgcgctgattatctgaagtggaagtctgagaacaggattatgccagatggtgtgaatgcaaagcttcttggatgccatggacctttggcaaatcgtca

SEQ ID NO: 218398 - DNA, 317 bp, Gossypium hirsutum
cttatatctacaaggccaaagtgaagaagaatggctcacactatcgctgcatttgggggagaagttactagacctcatggtaacagtggggttgttcgtgctaagttcaagtctaaccttcccccaaagtctatgggagatagagtcagagtcttcatgtaccccagcaatatatgagtagtgtagatcgacgactcgaatgacgctctaccatttcacttttgtttttatgaacttagtcaagattttgtgtgctttgaatcagtcattttgtttctttgggattgtgaaatataagacttatttatctttacatt

SEQ ID NO: 218399 - DNA, 304 bp, Gossypium hirsutum
aaatgtggtctctggatttggtcctacagctggtgcagcactttcaagtcacatggatgtcaacaagttatcatttacaggttccactgctacaggcaagattgtactcgcactcgctgcaaaaagcaaccttaaaccagtaacattggaactcggaggaaaatctccgttcattgggtgcaaagatgctgacgttgacaaggctgttgagcttgcacattcagccttgttctttaaccagggtcagtgttgttgtgctggttctcgcactttggtacacgaaagcgtgtatgatgagttcgta

SEQ ID NO: 218400 - DNA, 360 bp, Gossypium hirsutum; identical to SEQ ID NO: 197530
  unsure (1)..(360): unsure at all n locations

SEQ ID NO: 218401 - DNA, 420 bp, Gossypium hirsutum
cccacgcgtccggccacgaggcacgtgctttcagaatatgggaacatgtcaagtgcttgggtgctgttcatattggatgagatgaggaagaaatcaaaggaagatggacttggaaccacgggtgaagggctcgagtggggtgtcctgtttggtttcggaccagggctcactgttgagaccgtggtgcttcatagtatctctgcttaaacaaggttctaatgttcatgttggctagcccaggctgcactaccatttgctttgcatttttatttattttattttcctttttattactgaaatttgtgatttgtatggttatttgaaagagagtaaagctctcacatatggtgtttaacgcctgtagaatttatgtaccaccttatattttatggttataataaaattgcctttttttaggtg

SEQ ID NO: 218402 - DNA, 227 bp, Gossypium hirsutum
aatcgcggtgcatggaacaaatggttctgctctgcgtagaaaaaatgaacactgcagctcgacttttcaatgagaggcttgtaccgcttgttgatgaactgaatagcaacttcaccgacgctaaatttacgtatctaaatcctacgggagcaagcgcagcaaattcccttggttttacagtggcaaatgctagctgctgtgagatagggagtggtggagattcttgt

SEQ ID NO: 218403 - DNA, 417 bp, Gossypium hirsutum
gccacgcgtccgccacgcgtccgccactcgttcgccacgcgtccgccacgcgtccggccacgcgtccgtaagttatttcgtgaaattaaaggggttgtgggagatggagaggaaatcaaagaagatgatttacaaaagatgccttatctgaaagcagtgatattggaagggctaagaaggcacccaccagggcattttgtgcttcctcattgtgtgacagaagacactgtgctgggagactatttggttcccaagaatggaactatcaatttcatggtggcagagatgggatgggatccaaaggtgtgggaggatcccatggcatttaagccagagaggttcatgagaaatgaacaagtgtttgatataacagggagtagggaaatcaagatgatgcctttcggtgttgggagaaag

SEQ ID NO: 218404 - DNA, 407 bp, Gossypium hirsutum
accggatgccggacgaaagcgtctccatcgagaatccaagagacgagctcttgcgccgcgtgaaaggattagcaccgcgcgtgctgacattagtggaacaagaaatgaacacgaatacggcgccgttcgcgtcaagggtgggagaagcatgcggatattacggagctttattcgactcggttgagtcgaccgtgttgagggataacccggaccgagcgaagctagaggaagggctgttacgcaaaatcgccaactcagttgcttgtgaaggtagggaccgcgttgaaagatgcgaggttttcgggaagtggcgggcccggatgagcatggcggggttcgagttaaagccactgatccaaaccgttgccgaaacgatgcgcgccaaactcaactcatgcaaccgagtc

SEQ ID NO: 218405 - DNA, 417 bp, Gossypium hirsutum
  unsure (1)..(417): unsure at all n locations
cccacgcgtccgcccacgcgtccgtggaagttgagagctcagacacgattgataatgttgaggccaagatccaggataaggaaggaatcccaccagaccagcagaggctgatttttgctgggaagcaacttgaagatgggaggacccttgcagattacaacatccagaaggaatccactttgcacctggtccttcgcctccgcggtggttttaagtgttgtgccgaacacctgtccagttattgttgatgtgttaagtttgttatgtttgtgggtcgtatgctgatgtgagctggccactatgcaggggaagcttacaagtaaaaataattgctttttataaacgcttttagttgttttttaggtttgaataagttcgtttttgcattcaagtttctctcttgttcgaatntacatg

SEQ ID NO: 218406 - DNA, 422 bp, Gossypium hirsutum
gggaatcgggcatagttagcccggtcaaaaatcagggatcctgtggatcttgctgggcattcagtactactggagctcttgaagctgcttaccatcaggcatttgggaaaggaatctctctttcggagcagcagcttgtggactgtgctggagcatttaacaactttgggtgcaatggtggtttgccatcccaagcctttgagtatatcaattacaacggtggccttgatacggaggaggcatacccttatacagaaaaagatggtcaatgcatattctcatccgaaaatgttggtgtccaagtcattgactctgtcaacattaccttgggttctgaagatgaattaaagcatgcagttgccatggttcgaccagttagcgtggcatttgaaagtgtcccaagtttcaatttttacaaaagc

SEQ ID NO: 218407 - DNA, 402 bp, Gossypium hirsutum
cccacgcgtccgaagagaagaaaaaaaaatgtcatcgaattcaatgtctgcttcatggacagccaagcaaaacaaagatttcgaaagggctttagctgtttacgacatggacacaccagatcgttggtacaatgttgctaaagctgtgggagggaaaactgttgaggaagtgaagaagcactatgagcttcttctggaagatgttagacacatcgagtcgggtcgggttcctttccccgactattggaccgttaccgggaatcgtcaagcatgtaagattccgaagctcaaatgaagaaaaaaaaatggtggacttgcatggatctcacccttatatgtgtgtgtgtgtgtgcggcagtaattgttgtacttatagatagccatatatgtatttaggaagag

SEQ ID NO: 218408 - DNA, 403 bp, Gossypium hirsutum
cggacgcgtgggagaaaacaacggtaaaccctgtggaaacaagccgactgcaaaacgctggagctgaagccctaacttttccgctcacctctctgcaccagccgctcctctattcgcatcttccatggctacgataccagttaacccaaaacccttcttgaacaatttgactggaaagactgttatagtgaagctcaaatgggggatggaatacaaaggttttcttgcatctgttgattcatacatgaacttgcagcttggcaatgctgaagagtatgttgatgggcaattcactggaaatttaggggagattttgatcagatgcaataatgttctctatcttcgtggggttccggaagatgaagatatagaagatgctgacaaggactagatggttcacatg

SEQ ID NO: 218409 - DNA, 435 bp, Gossypium hirsutum
gaaatcgatcgctaactcggagctccgaacctaaccctaatcggaccttacactatatccaagaagtagaagaacaagatgtcaggcgtaaccaaccaagaggaagacaagaaacccgctgatcaaacggctcacattaatcttaaagtgaaaggccaggatgggaatgaagtgttttttaggattaagagaagtactcaactgaagaagctgatgaatgcgtactgtgatcggcaatcagtggatttcaactctattgctttcctgtttgatggccgccgtctgcgagtggaggaaactccagatgagttggaaatggaagaaggggatgaaatagatgcaatgctacatcaaactggtggtgctatggcctaagtagctagtttttaggttacgtaatgcagtaggatttaaacggtagtacttacgaaatca

SEQ ID NO: 218410 - DNA, 431 bp, Gossypium hirsutum
gctaactactttagaaactcaaacaaactttttagttctcaactctctcaaattcaccatggctgacaagtgtggcaactgcgattgcgctgacaagagccagtgtgtgaagaaaggaaacagcttggtcattgagactgaggagagctacatcagcaccgtagtggtcgagcctctggcagagaacgatggcaagtgcaagtgcggaactagctgcagctgcacaaactgcacatgtggcagtcactaagcagacatatagaatgatgaagtttgggacctaaaaagaataaaagttgggttgaataatttgcgtcttttgttgtagcttgagtgagttttcttgtctatctagccgatgattgtctatgtctctcattttatacaatgatggaatgaccatgtcaatggcctttgtctgattaatgaac

SEQ ID NO: 218411 - DNA, 276 bp, Gossypium hirsutum
tccaaatcctatctgttcaccgtcagttttcccctatggctcgtaccaagcaaacggcagggaaatcaaccggtggtaaagctccacgtaagcaactggctacgaaagcagctcggaagtctgctcctgcaaccggaggagtgaagaagcctcatcgttttaggcccggaactggtgctctgagagaaatcaggaagtaccagaagagcaccgagcttttgatcaggaaactttcattccaaaggttggtgagagatatcactcataatttcaaga

SEQ ID NO: 218412 - DNA, 418 bp, Gossypium hirsutum
cccacgcgtccgcccacgcgtccgcccactcgtccgtaatgatacatgggctagcatgagtacaatagctgatataaatgacaaatgggcttcccatgctggacctggaggatggaatgatcctgatatgctggaagttggtaatggaggcatgacttatcaggaataccgtgctcattttagcatttgggctttgatgaaagcccctcttttaattggttgtgatgtaagaaacatgactgctgaaacccttgaaattttaagcaataaggaggtcatttctgtaaaccaagactcactaagtgtccagggaaggaaagtttatgtttctggagaagctaactgccttcaggttagggcaggacctttgtctggcaatcgcttagtcgtagctttctggaatagatgttccgaagct

SEQ ID NO: 218413 - DNA, 424 bp, Gossypium hirsutum
cctgaaagcaaccttcaatatgtaacatttatatcatttctacttaccacatatggcaagtacatgaaagctaaaaagcagacatttaactgtggcagcctcttcgtcactccaaattcactaatcggacttgcaaaaagacaggtggattacatactaggagagaatccaataaaaatgtcgtacatggttgggtttggtcggaatttccccaagagaattcaccacaggggttcttcattgccgtcgttggcaaaacaccctcaaagcattggatgcgacggtggtttccagccatacttctactcatcgaaccccaatcccaacgttttggttggagctattgttggaggtccaaatcagaatgatggattcccagatgatcgatctgattattcacattctgagctctctacttacatca

SEQ ID NO: 218414 - DNA, 424 bp, Gossypium hirsutum
ctctcctgaggttttgggatatccaagcaaaccaattggtctcttcataaggcgttccagtatcttccgatctgattctaatggtgaagatctagaaggttatgcaggtgctggcctttatgacagtgtgccaatggataaagaagagaaagtggtggttgattactcatcggacccgttgataaacgatggcaagtttcaacaagcaatcctttctagcattgctggtgcaggaaatgccatagaggaactgtatggatctccacaagacatagaaggtgtgatcagagatgggaaggtgtatgttgtccagacaagaccccagatgtgatcctctcatttgtttcattttagcataattatattctttgggcagtgtttttttgcctatgccgaggttgtaaaatgagtaaaacatacaaca

SEQ ID NO: 218415 - DNA, 420 bp, Gossypium hirsutum
cccacgcgtccggaagttgcttaacaaagtggatgttccatatatgaaaatgacattgggtatgatgggatatgaggatgtttcatcagcaccaagtgacccagttgagaaaactatttggacatttggaagaccagctactatggaactaacacacttttggggtaccgaaaacgatcctgaattcaaaggataccacgatgggaattcagaacctattggctttgggcacattggcatcactgtggatgacatgtacaaggcctgcgagagatttgaaagtcttggagtagaatttgtcaaaaaaccaagcgatggttttgcattcatcaaggatcctgatggttattggattgaaatctttgatttgaaaggaattagacaaatagttaacagtttagcttgagttaatgcttcacc

SEQ ID NO: 218416 - DNA, 441 bp, Gossypium hirsutum
caagcttgccgtaggggtgaggccaaatgcacttatggaactggtgcctttatcctgctcaacacgggtactgcacccattaagtcaacccacggcctcctaaccacgcttgcattcaagcttggtccaaaagcacagacaaactatgctttagagggctctattgctattgctggagctgcagttcagtggctaagagacagtcttgggataatttcctctgcaagtgagatagaaagcctggcatcaaaggttgattgcacaggtggggtttactttgttcctgcctttaatggtttgttcgctccatggtggcgagatgatgctcgtggaatttgcattggaatcacaaggtttacaagcaagtctcacattgctcgtgcggttcttgaaagcatgtgttttcaagttaaagatgtattggattcaatgcacaaagat

SEQ ID NO: 218417 - DNA, 431 bp, Gossypium hirsutum
cggacgcgtgggcggacgcgtggggtttgatttcttctaattagtgaatcatatggccagcactgtggccctcaagcttgcatgtggtgtggtcttgtgcttggttgtgggtgcacccctggctgaaggggccataagttgtggccaagtcatatcagccttggcaccctgcattccttacgtgagaaacaacggtgctggtggcgtgcctgcatcttgctgcaatgggatcagatctctcaacgaggctgcccaatcaactccagagcgccaatcagcttgcaactgcgtcaaagctttagctgccagcatttctggcatcaactatgaccttacgaacaaactcccaggcatgtgtggggtgcacagccctttcaagatcagccccagcactaactgcaaaagtgtcaagtgaagtatgccatggaagc

SEQ ID NO: 218418 - DNA, 326 bp, Gossypium hirsutum
gtgaaattgcccaggacttcaagactgatttgcgtttccagagccatgctgttctagctctccaggaagctgcagaggcataccttgtgggtctttttgaagacaccaacctttgtgcgatccacgccaagcgtgtcacaattatgcccaaggacatccagttggctcgtaggatcagaggagagcgtgcttaatttccatgtgtgtggatcagtcgcttagaaagaagaaactattgtttatttttaggcaaatgtattgggtttttggtttttctaatcatcttttaggcccatgatgtagtggtaggttcaatgtgatgtgat

SEQ ID NO: 218419 - DNA, 341 bp, Gossypium hirsutum
cacacgcgacacaactcttaacactgtcgtcaactcctgcaactcggtgtctggtaaggatctctgattttgttttgcttgcttgcttgtcttccaatggcgaatcaactcaagtatcccattccagcattaactggtctgattttccaaatgattttctttttggagcatcaactgctgctgcccagactgcaggatctgctaaatcacgaagcaaaggacccagtgtttgggaccaatatattcgagaatacccggacataataatatacacaagccacttgtatgcaactgctgattcatataaccgctacaaggacgatgtatcgattttgaaagac

SEQ ID NO: 218420 - DNA, 363 bp, Gossypium hirsutum
ggccattgaagggcgtattggatgtgtgtgatgttcctcttgtctcggtggactttaggtgctctgatgtgtcctccaccattgactcttcattgaccatggtcatgggagatgacatggtcaaggtggtggcctggtatgacaatgaatggggttacagccaaagggttgttgatttggcacacttggtggcaagcaagtggccaggcatgcctgcaggaggaagcagtgaccccttggaggatttctgcaagacaaacccagctgatgaagaatgcaaagtttacgaggcttaaatgattgcaattttcattttttttttaaattgttttccatgctggtggtatagttagtggtcaagat

SEQ ID NO: 218421 - DNA, 332 bp, Gossypium hirsutum
gacgtagtagttctattatggtgtcaactaaaaataaactactggccgttgtacaacaacgtgactactggaaaaaccctgtcgctaaacaaattaatcgtgttgcagaacatccttttttcagcaggtgtcgtaataaagaagagggcagcaatgatcgttcttaacaacagttgagcatgcttaatggataatgggacgcgcgctgtagcggatcattaaccgcggctgttgtggtgactaccagcatgatgactgctatagttggcagcgtactagcggccgctccttttgctttctttcctttctttgtcaccacgttcggctgtttt

SEQ ID NO: 218422 - DNA, 431 bp, Gossypium hirsutum
  unsure (1)..(431): unsure at all n locations
atgtcctaggggggaggagcaacgatgttgagatagtgccttcaagtggacttcgaaaaagaaagcacagtagatccaatagtacgggaagcactccattggtgcattctaatgaaggatcaccacctcatcctgtagggaatgagggtcctcaagcttctgagcatgatcgactggttgttgatcattaccatccacagggaccttccgtacaggatgggggatggcttgctcgaattgctgccttgcttgtaggggaagatccaacacaatcatatgcacttatatgtggcaattgccacaggcacaacggacttgctaggaaggaggatttcccatatataacttattactgcccgcactgccaagccctgaataagccanaacaaccngaagagcatgtttctagatctagccccatcatggacccc

SEQ ID NO: 218423 - DNA, 431 bp, Gossypium hirsutum
cgaaagaattcaacgatatcggacatagcaagtctgctcagaatttgctcctcaagtatcagattggtgttctccagggtcacactttaaagaataatgaacaggttggttcaaccgaggagcccaaaaagaaagagatgagtgcattcgttatcaaggatgacctgacgcctaaatatgctgcagtcgtcgagttcgccgccccactcctggttgctggttcctatttctgttacagatacctcacaccaagctcataagtgctgtaatcaatttggttttcaagttcaacctcaacatgccccttcttccctttaaataattgttggcatagaatgtttacaatgatggtgtgttggtccttttcttttatcttcacttgtccttttggttattgctgttgatgattatataagaatgagagttatcat

SEQ ID NO: 218424 - DNA, 410 bp, Gossypium hirsutum
  unsure (1)..(410): unsure at all n locations
gcgcccacgcgntccgcccacgccgtccgcccacgccgttcgctttctcaatggnggttcggatcctcagcttgctttgcttatgctcccacagagaatcgtttccccaatcatcaaaggttgttctgtggagtggatgaaatatactgcatattcttgggggatttgaataatttgagcagcctgctaaagcagtatgggctgtcaaagggcaccaatgaagccatgtttatcatcgaagcatatcggaccctccgcgaccgtggtccgtacccggctgaccaggtccttaaggatcttgaaggcagctatggatttgtggtgtatgatagcaaagctggaagtgtatttgctgcactgggtgcaaatgaaagggttaaactctattggggtgtagcagctgatggatc

SEQ ID NO: 218425 - DNA, 242 bp, Gossypium hirsutum
cgggaccaccacgcgtccgcccacgcgtccgcccacgcgttcgcccacgcgttcttcctctcgtccgaaaaaaaaaaaaaacaaagagctggtttaattgtgaaaggtggatcggaataaaaaaccacaataaaatactaacattcaccaatcaaaaataaaactcaaacttaaaattaattaccatctaacacaataaaaaaaacatgcccccccctttaaaaaacccaattttacttccc

SEQ ID NO: 218426 - DNA, 409 bp, Gossypium hirsutum
cggacgcgtgggcccagtttgggtttagggttcttggagtcctcggagccgcagctgccacctccgtcctggctctgtcgaagtgctctcctcagaggtttcttcttctgtgaaatacactgtggagcctgtctacttggatggccttactttactcaagggaagggtgagtactaaagaggttcttgggttgcctaactcggatttagtccctggaatatatgaagggggacttaagctatgggaaggttcattagaccttgttaaagctctgcgctctgagattcaaaatggttgtctatcatttgagggaaaacgagtgttagagcttggatgtggtcacggacttcctgggatatttgcatgtctcgagagtgcagctgaggtgcattttcaggacttcaatgct

SEQ ID NO: 218427 - DNA, 407 bp, Gossypium hirsutum
  unsure (1)..(407): unsure at all n locations
gtgcattgctcgaggttgttgagagtgggggaaagaacatcgaagttgctgtgatgacaaaggaacatgggcttcggcagcttgaagaaactgaaatcgatgccattgcagccgagatcgaggcagagaaggaagcagccgaggctgcaaagaaggcccctccaaaggaaaaatgatgaagcatcaactgtttaagctatcatttcctttttctttttttttcttttctggtctgactgcttaatttctgcaattgaagtttcatttgccattgttggcattttatttgctttttagttgtttcagtttaagcaagtatcaatcacattcagataatatgcaaaaaanaaaaaataaaanttattaaatttaatatttttattttttttttattattttttnttttt

SEQ ID NO: 218428 - DNA, 437 bp, Gossypium hirsutum
cctggccatatcagtttctcagggagaaattgaagaggaaaagctagattgttatgatgtccattgttatgcagcatcaagaaatgaaatagaagaagaagtgagaagagaaggttccttcgaattggaaagggtagagatgtttgagattgagcgagaagttcagaggggagagagctacggcacagcagtggccatgacagtgagggcaatccaagaatccatgctttacaaccattttggaaatgggatcaacttagatgccttgtttaacaattatgggaaaatgatagatcaagaaatggctaaacaagaaattaaacccatcacttttcttcttgttcttaagaaattatgatatggtatcatattagatatattacattaaacttgattttaaaccccatcagttttggtataagtattaaagttcaaac

SEQ ID NO: 218429 - DNA, 382 bp, Gossypium hirsutum
  unsure (1)..(382): unsure at all n locations
cggacgcgtgggttctgatcgtgtggttgactcatcttgctgtttagtgactggcgagtatggttggactgcaaacatggagagaatcatgaaggcccangctttgagggataacagcatggctggttacatgtcaagcaagaagacaatggagatcaacccggagaaccccatcatggaagagctgagaaagagagccgatgcagagaagaatgataaatctgtgaaggaccttgttctccttctcttcgagactgctctcctcacctctggcttcagccttgatgagcctaacacctttggcaacagaatccacaggatgctgaaactcggcttgagcattgatgaggatgcangtgaaggtgaaggtgatgctgatatg

SEQ ID NO: 218430 - DNA, 439 bp, Gossypium hirsutum
ctgctatagctgatgcatacaaccacacagattctgaatttttaaaatcagaaaacaaccagaatagggatgctggatcgaccgcttctacagctattctttttggcaaccgtttgctagttgcaaatgttggggattcccgagctgttatctgcagaggaggcaatgctattgctgtgtctcgtgatcacaagcctgatcaaagtgatgagcgacaacggattgagaacgcaggaggattcgtcatgtgggctggaacttggagagtgggaggtgttcttgctgtttctcgtgcatttggtgacagacacttgaagcagtatgttgttgctgatccagaaattcaagaggaaaagattgacaactctcttgagtttcttatacttgcaagtgatggactatgggatgttggtttaaatgaagaggcagtggcaatgat

SEQ ID NO: 218431 - DNA, 393 bp, Gossypium hirsutum
cccacgcgtccgcccacgcgtccgcccacgcgtccgcccacgcgtccgtacaatttagccaactcttgtgtatttcatccacgatgaatcccttcaaaaccttgccaaccctttctttcctcttcttaacccttttaggcttagcccatgcagccacatttgatataaggaacaactgcccttacaccgtttgggctgccgcatctccgggtggtggcaagagacttgaccaaggtcaaacatggcaaatcagtgcagcctctggaaccacacaagcccgaatttgggctcgaaccaaatgcaatttcgatgcctccgggaaagtctcatgcgagacaggcgactgcggtggagtcctcgaatgcaagggatacggtaaagctcccaacacac

SEQ ID NO: 218432 - DNA, 424 bp, Gossypium hirsutum
cccacgcgtccgcggacgcgtgggaacgaagggttcatcgaccaacgccggttatatccgatgggcgatttgcatgaccccgaagtgaatccacagagacccacgaggagtagcatgagtagcacggtggaatcgtttagtggacccagaccggtccaaccaccgcaaaaatcggcggacttcgcggtggtttcgactaggaagtactatccgaggccgccgccagtagagccagaggattgtcatagtgactgtgattcatcatcgtcggtggttgatgatggggatatcgcgttgtcttcgtgtcggaaaactttgcctttcgatctcaattttccacccttggatgaagatgaagatcttcaatgtacccgctttatgtcttttgatcacgatgtcccgtgatgaaatgatgattgatcga

SEQ ID NO: 218433 - DNA, 435 bp, Gossypium hirsutum
tccttcttcatcatttccaaattttgatgattttcctctttttttattttatttttatttaaaatttgaaactgctaacattattacattttcattagccttaagagaagaaaaaaaaaaatgtcatcgatttcaatgtctggttcatggacagccaagcaaaacaaagatttcgaaagggctttagctgtttacgacaaggacacaccagatcgttggtacaatgttgctaaagctgtgggagagaaaactgttgaggaagtgaagaagcactatgagcttcttcttgaagatgttagacgcatcgagtcgggtcgggttcctttccccgactattggaccgttaccgggaatcgtcaagcatgaaaaattccgaaggtcaaatgaagaagaaaaaatggtggacttgcatggatctcacccttatatatgtct

SEQ ID NO: 218434 - DNA, 212 bp, Gossypium hirsutum
  unsure (1)..(212): unsure at all n locations
taattaagtaagaaagtttttttttctctgcncggatggatgttaaaccagcgggttattatacggatgtgaggaaggtccaaaaaactgttctatccttttagatgcctgtacttttttggggagcatcaaagcttgttgctgttggttatggcatcaagaatcttcatatcatgctttccataatttatgattctttattctgttgatac

SEQ ID NO: 218435 - DNA, 445 bp, Gossypium hirsutum
cagcaatggaaagttcaagagcattctccacaggtggtctggttaataaggagaaggttaggagctgatgggcagttttctgtgagccaccgaaggataagatcatccttaagccactcccggagactgtctctgagaccgaacctccactgttccctcctcgtacctttgctcagcatatcgagcataagctgttcaggaagacccaggataatctgtccaactgaaactagtatttttatttgtcgcgataacctatttctttctgtactctgatgaatgctatatttcgttggggggttaaacccttggttgtggcgtctgtctccactccttggctcctctttacctgttttatttgaataatgagagctgatttggttctttaaaaaaataatattttttttttttttttattattttttttttttattttagtttattt

SEQ ID NO: 218436 - DNA, 451 bp, Gossypium hirsutum
cccacgcgtccgtcatgatgtctcccctatcatctctccaaaaacaacccacaaactttctcgtgtacccatttccagtgttttcaggaactggttccatttttgccactggttcccctttcttgataagggaatcatttaaccaaaggaaacctgtatgtaaagcaacaacatttaccattacatgtgagcaaagcaccaaggggggtagcaccaacagtttggatgtatggcttggcaggcttgctatggttggttttgcagtagccattactgttgaaatatccactggcaaaggactcttggagaattttggccttacaacacctttgcctacagtggccttagcagtgactgcgttggttggtgttttgacagctattttcatctttcaatcaacctctaaaagttcttaagatttatatgtttaatgctgggttctttttttggg

SEQ ID NO: 218437 - DNA, 422 bp, Gossypium hirsutum
gcattttcactcttgattccctgaaactatgtgttcttcatcatggaaaaccatggcggtcgctttgttattgatagagctgtggtttaccattgaatcttctgtagctcaccctgataaaattgttaagcttccagggcaaccccctcgcttgagctttcaacagttttcagggtacgttacggtggattacaagaagcataaagccctgttttactactttgttgaagctgaaactgatcctgcatctaagcctttagtcctttggttaaatggagggcctggctgttcttcacttggagttggggcattctctgaaaatggaccattcagaccaaatggagagtttctagttaaaaatgattacagctggaacagagaagccaatatgttatatttagagacaccaattggagtagggt

SEQ ID NO: 218438 - DNA, 326 bp, Gossypium hirsutum
  unsure (1)..(326): unsure at all n locations
gacgtaaaggtagtcaatctttttactgcttttcaacaaagagagaattggatgaccgattgcttcacagatggagttcatctatctgctgaggggagcaaaatagtggtggcagagatactaaaagtactgaaagaagctgaatggaagccatctctgcattggaaatccatgccaactgaattcgccgaggactcgccttatgatattgttggcgctgatgggaaaaccacgttgaatccgtccgaatggacntttcaccgagagaatcaatgggattagagttcagagttcttgttaagatcatgatctncaaaatcccatgg

SEQ ID NO: 218439 - DNA, 440 bp, Gossypium hirsutum
ggtgatgttgtgcccaaggatgtcaatgctgctgttgccaccatcaagaccaagagaactattcagttcgttgactggtgcccaactggattcaagtgtggtatcaactaccagccacccactgtcgttcctggtggtgatcttgctaaggtccagagagccgtttgcatgatttccaactcaaccagcgttgctgaggtgttctcccgcattgaccacaagtttgatctcatgtatgccaagcgtgcctttgttcactggtacgtgggtgagggtatggaagaaggagaattctcggaagctcgtgaggaccttgctgcacttgagaaggattatgaagaagtcggtgctgagtcaggcgagggtgatgaggaagatgaagatgagtactaaataagtaatgtttgagtggagggcttgcattttgctacccaatgatt

SEQ ID NO: 218440 - DNA, 297 bp, Gossypium hirsutum
  unsure (1)..(297): unsure at all n locations
caattctccagccctagcccttttgaagaagtcctttagcagcccaaatgctctgccagggaagagaaggtaaatttcctaacctggaattcaggaaatctgaatctttaaaatatttagctttcaatgtacgcgctagtaaagagttaggattacataataatcgccaaccctgtttggcaagtaaagcaatattaaaaagattcaaattacgaaatcccattnaaaaaaaaaaaaaaaaaaaaaaaaaaaaataaaaaaaaaaaaaaaaaaaaaaaaaaaataaaataataaaaa

SEQ ID NO: 218441 - DNA, 434 bp, Gossypium hirsutum
cccacgcgtccgcggactcgtgggcgtacttttgggcttacgctcgattacctcacgaggagagaaaatggccagagtgttggccaactgtgagcgaggaataccagaagtcagttgaaaaggctaagaggaagctcagaggtctcatcgctgagaagaactgtgctccactcatgctccgtctagcgtggcactcagctggaacttttgatgttaagaccaagacaggaggtccattcggaaccatgaagcatcctgctgagctcgcacatgctgctaacaacggccttgatatcgccgtcagacttctcgagccgatcaaggagcagttccctaacctcacctacgctgacttctatcagctcgctggtgtcgtcgccgttgagattactggtggacctgaaattcccttccatcccggaagaaagacaagc

SEQ ID NO: 218442 - DNA, 426 bp, Gossypium hirsutum
ctcagtttctccggactcccccaaaggcatttcttttcaagatacactcacaaaatgcggactcggagcatctgaaggggagaccaaaatctgtgctacctcttttgaatctttacacggttttctaagcaatgcatttggaccccatgttgatttcaagttcataagcacaaggcatcccaccataacaaccccactctttcaaagttacacaattttagaatcccctcaggagattgaatcttcaaagaaagtagcttgtcatccaatgccatatctttatgcagtttatttctgtcactttgatgccactgagactaaagctttcaaactccgtttagttggtgatgttacaagagataaggtggatgctgttgttctttccatatggataacttaagtttgagcttttatcatgtcgctttt

SEQ ID NO: 218443 - DNA, 460 bp, Gossypium hirsutum
tcctgaaaacccggggcggcccaacgcgtccggccgctcctctattcgcatcttccatggctactataccagttaacccaaaacccttcttgaacaatttgactggaaagactgttatagtgaacctcaaatgggggatggaatacaaaggttttcttgcatctgttgattcatacatgaacttgcagcttggcaatgctgaagagtatgttgatgggcaattcactggaaatttaggggagattttgatcagatgcaataatgttctctatcttcgtggggttccggaagatgaagatatagaagatgctgacaaggactagatggttcacatgtggttgaaatagaacctttggtatttgattagaagtgctgtaacttttgtttatcatggttgaatgtcattatgtcatttagtcgcccggacagacaaaccgcgatgtagttaattgtgcttttg

SEQ ID NO: 218444 - DNA, 277 bp, Gossypium hirsutum
gaaaatagaaaaagagatgtcttctccaagcaaacgccgagagatggacttgatgaaactgatgatgagtgactacaaggtggagatgatcaatgatggcatgcaagaattttatgttgaattcaatggaccaaaagacagtaaaaaaaaatcccttctttaaaccctcttttaattttcatttattttcatgatctatctctttacttttgctcaaaacttgattttattgggtttttctcattcatctcaaaagttatcttctttttttcgcgtg

SEQ ID NO: 218445 - DNA, 419 bp, Gossypium hirsutum
  unsure (1)..(419): unsure at all n locations
cccacgcgtccgcccacgcgtccgggaggcatcatacgacaggatatattcgattgaaatgtttgagcatatgaagaactatcacgatcttctcaagaagatatcaaagtggatgaaagaggatagtcttctttttgttcattatttctgccataaagcatttgcttaccactttgaggacataaatgaagatgactggataaccaggtacttctttacaggaggtacaatgccttcagctaatctgcttctatatttccaggatgatgtttctgttgtcaaccattggcttgtgaatgggaaacattatgcaaaaactagtgaagagtggctgaagaggatggaccgaagcttggcttccattaagccaataatggagtccacctatggcanggatcangctgtgaaatggacagtgt

SEQ ID NO: 218446 - DNA, 355 bp, Gossypium hirsutum
agcagctcaattcagacatccggggttcccttattataaccaacttattgccatctacgcaaaagatcgagccactagaaaagatgctcaaagagctgctgatattattgaagaaataaatgctgaggatgtagctgctacaaatactcatgaagaaagaaacgatttccatggatccgaagctgatgtttctttggatgacatggatctttcagctacacaaccgcaaccagaaccacaaccagctaaaaaccaaggtgattctgcattttcaaagaagaaaaaaaagatttctgatgcaagtgatttttctacttcatttaatgatgctgccgctttattggtggaaagtata

SEQ ID NO: 218447 - DNA, 363 bp, Gossypium hirsutum
actggcaccaccagtaatgaagttcctcagaagcagattgaggttgtgaaggaaactgtgcaaaaaccgaccactgcttcaccatcatcgggtgatgccaaggagatccctgcaggtgttccagggagcaaaacgaacaactatttccgagctgatggccagaattgtggcaactttcttacggagcgcaggacaactaaggttcacgcagcgcctggcggtgggtcttccttggattacctgtttggtggcagcgagaagtgatatgtgagatattaaatgttggaaccactgcttatggttgtcctaaaaggtttgggacagaaaatatttaagtataaacaatatgttggtttcccttcc

SEQ ID NO: 218448 - DNA, 391 bp, Gossypium hirsutum
catggttatggtgtttggtgagatcacgactaaggccaaagttaactacgagaaaatcatgcgggatacttgtagaggtatcgggttcacatccgcagatgttggccttgatgctgataaatgcaatgttctagttaatatcgagcaacagagccccgatattgctcaaggagttcacggtcacctcacgaagaaacccgaggaaattggggccggtgaccaaggtcacatgttcggttatgccactgatgaaactcctgagttgatgcctctaacacatgtgcttgcaactaagcttggtgctaagctcactgaagtaagaaagaacaagacgtgtccgtggttgaggcccgacggtaagacccaagtgactgtcgagtataaaaatgat

SEQ ID NO: 218449 - DNA, 335 bp, Gossypium hirsutum
  unsure (1)..(335): unsure at all n locations
aaaacccggccgacccacgcgtccgcccacgcgtccgcccacgcgtccggangttgaggattttgtttgaagccaatttttgagtgttttagttattggaaacattgaactctggtgttattgccgggtaccttctttgttatacaaattttccattgttttcaaaaaaaaaaaaaaaaaaaaaaaaaataaaaaaaaaaaaaaaaaaaaaaaaaaaaaaaacaaaattaaataaaataaaaataaaaaaaaaaaaataaaaaaattatacgtctatctaaacataataattataatctggggccgccttttaaaagaatccaaaacttttttcc

SEQ ID NO: 218450 - DNA, 374 bp, Gossypium hirsutum
cccacgcgtccgggaaaatttaggtgatacaccggcgttatacataacatttgcaaacaacaagttcaccggtcggatcccgccaagtattggcaaagctaaaaacctcctcgaagtactattcctcaacaacgaactcactggttgtttaccgtacgagatcggctacttacaaaacgccaccgtttttgacgtcggaatgaataaactaaccgggccgataccacattcgttcggttgtttgaaaaagatggagcaactcaatttagccggcaatgaattttacggcgaagtaccggaaatcgtttgccggttatcgaatcttcaaaacttgtctttgtcgagtaattatttcacccaagtcggaccggcat

SEQ ID NO: 218451 - DNA, 413 bp, Gossypium hirsutum
gtgaaaagcttagaagattcgctttgtatctccgagctggtggtttgaccgatgtaggcctcagttatatcgggaaatatagccctaacgttagatggatgcttttaggatatgtcggggagtcagatgccgggcttttggcattctcccgtggatgtcctagcttagtgaaactcgaaatgaggggttgctgctttagcgagcaagcaatagcacaagccgtgatgcggttaccctctttgaggtacttatgggtgcaaggatatcgagcatcaccagccggtcgcgatctattagccatggcacgtccattttggaacatcgaactgatccctgcaagacgagtcaatatgactaatcaagtcggagaaccagtcgtggtcgaacatccggctcatatacttgcctattac

SEQ ID NO: 218452 - DNA, 437 bp, Gossypium hirsutum
  unsure (1)..(437): unsure at all n locations
cccacgcgtccgtgaatttagacacattttgtgaactacattatcagatacatgactcgggttttggtttcttgttcatatcattgttgtcctttgctcgggttcctctgataacataactggtttatgatggtgcctgaaaacagtgcaaggtgtgtatgcaaacattcatgtgcaccacaacggaagtgaaatgtcgggagcacgctgaggcgaagcatccaaagtccgacgtgtacacgtgttttcctcatcttaaaaaataaacatcaaaactctacagaaagaacggggatgtcaagacagcttgtaatgcatatcatctatctatgttgnatcttggtactctacaatttatctttaattctctttcacaagcctgtaaaaaactcactagctgattttactcgtgcaaactaaatgtttgtgttcaatca

SEQ ID NO: 218453 - DNA, 424 bp, Gossypium hirsutum
cagaaagctcttttgtggcctagctgccaccattttctccatcattatgtatgcttctccgctttcaatcatgaggctggtgatcaagaccaagagtgttgagttcatgccatttttcttgtcactatttgtgttcctctgtggtacttcatggtttatctatggtctccttggtcgtgatgcttttgttgctgtccccaatgggtttgggtgtgggctagggaccatgcaactcatcctttacttcatctaccgcaacaacaaggggtctcaggaaattaagaagccaagtggtaatggaacaagcattgagataggtgagaagaaaccccgccaagacaagcagcaacccaatggcaaagtccctcaagatgaacaagtttaaaatctttgtttcaaatttcagttttctgcatcttaattt

SEQ ID NO: 218454 - DNA, 401 bp, Gossypium hirsutum
cccacgcgtccggtgaagctggcagtgattcttggaaacaatacatgcgacggtcaacctgcacaataaactacgggagtgagttaccgctggcccaaggaatcaatttcggctaggaatgcagacatgggtgaggcgtaaggaaacaaatttgcattcctgcaaaatcaactcccagaccttttatgctctacatatagggtgggatttggttcacataattgtcgctgaaaaccatgaatagtaacataataatgaaaagaggcataatgaagaaatcaatgattcctgaaacacactttgttacgaaaatcaagtgtagtgtgtgtgctgtaataattcttataatagaagcacattattgatcttgtgtcatgggttctagccccgtgacacttgca

SEQ ID NO: 218455 - DNA, 364 bp, Gossypium hirsutum
gcttcatagcgtcaccgaatatcaacattaacgctctacaatgtccaacaagctagaaggcaaggtagccataatcaccggcggagcaagtggcatcggagaagccaccgtccatcgtttcgccctcaatggtgcccgtatgatcgtgatcgctgatatccaagatgaattaggccaaaaagtagtcgaatccatcggttcaaataagtgttcatacatgcactgtgatgttaccgatgaagaacaagtaaaaaatttagtccagtcgacggtccaaaactacggcagcctcgacatcatgttcagtaacgctgggacagttagcaactcaattcaaaccgtccttgaactagactttgcagcg

SEQ ID NO: 218456 - DNA, 331 bp, Gossypium hirsutum
  unsure (1)..(331): unsure at all n locations
cccacgcgtccgcccacgcgtccgcccacgcgtccgcccacgcgtccgattatattgaaatataaaaattaaaaatttgtaattagatatggacacgattgtattattataaaaattatttttttatttttaattaattaaacacttatcaatttctgtcaatgtattgtaatattataatgtttttgttctaatatatgataatgcacattatttgtcatatttttgttccgatttaatgcacactactattttagtgcaatgtttgtcaataattgtttcaaaatggtatgaactttggaccaaatgaaaaaaaaaaagtttttttnna

SEQ ID NO: 218457 - DNA, 386 bp, Gossypium hirsutum
  unsure (1)..(386): unsure at all n locations
cccacgcgtccgttcttcttgtatggtgcacttggcaaaggcctcgacgcctttgaacccgaatttgctaaaggcggaccacctccgattggtggcagacgggccaatctcgactaccttacccgtcggatcatcgaggaattcggttatcaagaaatcggtcataatagggaaattgtgagaagaaccggtgggattccaaggcctttgattgatattagctctgaaaactttgcaaaattatttgataaagcagcagggtacaatttggatcctncatttgatccttatgaagatcccatcaagtatatgttagcagtatatgctatcccctatgtgggactcaatggctatgttggtacaacccctttgcctcaaaaattcgc

SEQ ID NO: 218458 - DNA, 303 bp, Gossypium hirsutum
  unsure (1)..(303): unsure at all n locations
aaaaccgggccgaccgacgcgtccggggctagcttgtatgtactcatgcttctttctctcnaagatgaggaatcaatacatggttggcagatacaccgtagccagatgggtgccttcatctttgctgcgaggtctgcgccttgtgtcaagaataccgcgagctcaaaagccgtggcttcgatatgtacattggatggcatgcgaacatggagaatatgcgaaatcgtgctatgcaaatgtcaatgcctccggtggtggaagatgggatgaaacgataaacaacgatgattctcttttctaaat

SEQ ID NO: 218459 - DNA, 378 bp, Gossypium hirsutum
gtgattatgctttgcagattgttaggcctgaacctgatacatctgcaaaacaaggagacaccatgcctagtggaacaattattaggttgcaacacatgagaactagaaaatggctgcatagccatttgcatgcatctccaatatcaggaaacctagaggttagctgctttggaggagaatcagaatcagataccggtgattactggaggctcattattgagggaagtgggaagacttggaagcaagatcaaaagatccggcttcaacatgtggacactggtggttacctccatagtcatgataagaaatatgccagaatagctggtggacaacaggaggtttgtggtgttcgagaaaaacgtgttgacaatgtatggt

SEQ ID NO: 218460 - DNA, 216 bp, Gossypium hirsutum
  unsure (1)..(216): unsure at all n locations
cccacgcgtccgcccacgcgtccggatcacttgaggcaggtgtttagtaatcaaatgggtcttagcgaccaggacattgttgctctttctggtggccacaccctgngaaggtgccacaaggagaggtctggatttgagggaccatggactaccaaccctcttatcttcgacaactcttacttcaaggagctcttgactggagagaaggacggcctg

SEQ ID NO: 218461 - DNA, 450 bp, Gossypium hirsutum
  unsure (1)..(450): unsure at all n locations
cgtccgnccacgcgtccggaggcataccttgttggttttgttcgaagataccaacctgtgcgccatgcatgctaatcttgtgagagtcatgcccaaggacattcaacttgctaggaggattcgtggtgaaagggcttaataaattcacctctctgatttgcttgtttgttgttaggatatttgctttctttgatgtttaatgaattcagaatggtctgatgctgtaaaaaccttaacctataaatatagtttgtgctttttattacgaatcacgaagagatgttattgaagctaagaacgagaagaattacgactcacgactttgaggcacatgaaaagcaaccgccttgtacctttgttaactacttgcaagaatcaaccaacttacgaatttgaaggtttgttgaaaaaaaaataatattttatttatatttatttttttattaattt

SEQ ID NO: 218462 - DNA, 314 bp, Gossypium hirsutum
  unsure (1)..(314): unsure at all n locations
gtaaactttgtcggttacacatacaagaactttgaaattgtagatgacaatcaattacctggcattgcggagttgaagaagaagagctcaaagcccaagagaccctccatcaaatccctttttgaggacgagtccgccgcagctgccagtcaacctgttcaagggagtttcataaacctcttgccgccgcaacatgaagccccagagaatcattatagaaaatgacctgactcactttagtggtatccatgggataatagctatcgccctggaaatccaaagataacaaagctntaatattatctggtaagtag

SEQ ID NO: 218463 - DNA, 398 bp, Gossypium hirsutum
gggttctactgcgaggcatggaaagatattcttgaaagctgctaaaagctgtttagagaaaggtgcttactaccccaagaaggaaattgagcggctgcagcgcatgcttgacaagtcaataagcccagcaaaagctgatgaattcacgctcaagaagaacatcctatcaacatttgcatcttcttagatcaatgtatttcacctcgtctagtgctgcggcaggttcaagtttcatcgaccttttcaaggactgggatcatcttagcgttttatgttttgggtatctttcagcagcaaatcgctaggccttgattaggacttgggcaccatttgcgcgcagcagcaccagttactagtaaaagttcttatgatggaaattttcttctattactagtttt

SEQ ID NO: 218464 - DNA, 344 bp, Gossypium hirsutum
cacgcgtccgtctaacctgaagaatgattagagtttatgagaattccccaaatggatgggtttcaatggcacaagattgctgctgtttctggaatagcagcccttggattgggcacttatggcttccacatctttaaacctgaaaatcccgtttacaaggaggtatggcaaatcgcttctacttaccacttgtttcacacagctgctcttctttctgctcctattaccaaacgcccccacatttttggaggccttttgactgctggcattctttctttctctgggtcgtgttacacggcagcatatctggaggacagaaaatattcggcccttgctccatttgg

SEQ ID NO: 218465 - DNA, 393 bp, Gossypium hirsutum
gaaccctgggtagggagctgctgagcgaaagcaagctgaacgatcttctgcatggatcagaatatgttctcacttatgaggataaagatggtgattggatgcttgtgggtgatgtcccatgggagatgtttactgatacctgcaaaaggctgaggatcatgaaaagctctgatgctattggactcgctccaagggccgtggaaaaatgccggaaccggaactagctagtttaatacatgatttttgctatccgaagcagttctttctgaagaaataagaggatgttggagcgggcaggagatcacagggtatctgttttcacatggtgctactttttatcttctatttgcattggaatttatatcatgtacgcttgtttttatctactaaaat

SEQ ID NO: 218466 - DNA, 396 bp, Gossypium hirsutum
  unsure (1)..(396): unsure at all n locations
ccacccttgtcaaataatggcagatgcactcactattattgaacatatcggtcagttggaaggaacgaaggttgtctatgtcggggatggaaacaacattgttcactcttggttgttgctggcttctgttgttcctttccactttgtctgtgcctgccctaaaggttttgagcctgataaggagactgttgagaaggcacaaaaagctgggatcagcaagatcgagatcacaaatgatccaaaggaagctgttaaaggtgctgatattgtgtattcagatgtctgggctagtatggggcagaaggaagaagctgcccatcgtcgccaagtgtttcaaggatttcaagttgatgaaactcttatgaagatagcangcccaaaagcttatttcatgca

SEQ ID NO: 218467 - DNA, 363 bp, Gossypium hirsutum
gggatctgcagcttatgcacctgaaaatgatgcattaatgtggaaaataagatcttttcctggtggaaaggagtatatgttgagggccgagtttactcttcctagcataacagatgaagaggcaactccagagagaaaagctcctattcgtgtgaagtttgaaattccatattttaccgtttctgggatacaggttcgatatctgaagatcattgaaaaaagtggctaccaggctcttccatgggtacgatatattacaatggcaggcgagtatgaactaagacttatttagtgccagttcctttaatattgagagatccagttcaccgcatttttcgagagttagaatggacataaggatac

SEQ ID NO: 218468 - DNA, 311 bp, Gossypium hirsutum
  unsure (1)..(311): unsure at all n locations
gctaatatggatttcacggtcaacattcctaaaggtgtgcaggttgattgggaagccattgtgaacttcgatgctaactccttcatggattcagttaagagttggctgtatccatccctaaagatttcgtcatcgtggaaagattttcccgatgtaacctcaacttttgcaacgacgggatcggttgtcgccgctctgagctcatatgatgattgaattattcttcttaacgtaaacagaattactgccagcgcaaatgtaatatctgcagttgctattttattggagtggatntttttcctgcatgtcgt

SEQ ID NO: 218469 - DNA, 402 bp, Gossypium hirsutum
acgaagtcgaactgtttcacacagcagccatggtgaagtattcaagagaaccggacaaccctactaaatcttgcaaagctaggggttctgatcttcgtgttcattttaagaatacacgagaaactgcattcgcaatccgaaagctacctttgacaaaggcaaaaaggtacttggaggatgttattgcccataagcaagcaattccattccgccgcttctgtggaggagttgggcgaaccgcacaggctaagaatcgacattctaatggacaaggccgctggcccgtgaaatctgcaaaattcattctcgatttgctcaagaatgccgagagcaatgctgaggtaaaaggtttggatgtagactcacttatcatatctcacatccaagttgaccaagcacaga

SEQ ID NO: 218470 - DNA, 385 bp, Gossypium hirsutum
attattacattttcattagcctcaagagaagaaaaaaaaatgtcatcgaattcaatgtctgcttcatggacagccaagcaaaacaaagatttcgaaagggctttagctgtttacgacaaggacacaccagatcgttggtacaatgttgctaaagctgtgggagggaaaactgttgaggaagtgaagaagcactatgagcttcttctggaagatgttagacacatcgagtcgggtcgggttcctttccccgactattggaccgttaccgggaatcgtcaagcatgaaagattccgaagctcaaatgaagaagaaaaaatggtggacttgcatggatctcacccttatatgtgtgtgtgtgtgtgtggcagtaattgtagtacttaa

SEQ ID NO: 218471 - DNA, 321 bp, Gossypium hirsutum
gtggaaagcggatctttctccttccacagtgttatgctgagaaacaagctctcggggaagtgaggccggatctgctggacacccaggtgaacccagctgtgtgggaaattagtgggcatatggtgttaaaaaggaggaaggactatgatgaggcgtctgatgaaaatgcttggaggctcctggctgaggtttctctctctgatgagaggttccgggaagtgaatgcactcatctttgaagtcattgccagtggcgaagatggcattgaacatgatgctaagagtctgcctaaagagcccgatcctaaagctgaatccactg

SEQ ID NO: 218472 - DNA, 369 bp, Gossypium hirsutum
aattttaacaaaacaggaatgagacctgttgtaactacagcttgggttgtaacagttggggctataaagaaaacactttctcgacttctcatactttcagtttctatgggctatggtgtcgtacgcccaactttaggtggtcttacctcgaaggtgcttcttattggagctacgtattttgtggcatctgaattgcttgacattactgagcacgtagggaccatcaatgacgtatcaggaagagcaagactcttcctaggccttcccgatgcattccttgatgcatttttgatattgtggattcttacatctctttccaaaacactagagcagttacaggcaaagagaatatcagtgaagttggacatc

SEQ ID NO: 218473 - DNA, 409 bp, Gossypium hirsutum
ggatattccatcatatgtatgggatatgactgacaaaggagccggtgggatgattgtggactcaggtactaccgtaacgcatctggtggaacaggcgttcgataaagtcattgctgctttcgaaccttctttaagcatgtataacaagacgaaaggtaatttggattattgcttcaatgctccaccagctgaaatttttgatgagagtatcattccccgagtggccatccatttcgaggggggagctaagctcgagccggcggtcgacggttatatcttcgacgattctaaaggagtgaaatgccttgggtttgttagggtagcttggcctgaaatgaacataatgggcaacctcttaatgcaaaatcatttgtgggaatttgatctcgcaaacaaaaaggtgggtttc

SEQ ID NO: 218474 - DNA, 385 bp, Gossypium hirsutum
  unsure (1)..(385): unsure at all n locations
cccacgcgtccgcaaaatctaccctgtttcaaaagaactctttgctttgagttacgatgtggtccaaaagcctgacttgaggtatttcaagttctcaccggacggtaaaaaatcacccgacgtcgaaattcccttgcccgtacctaccgcatcaataatttagttaattaaataacatacatagtgcagtcaaaaggtaattaactgggggaattctattccctctttacatcattccattctgacggttgctacgtcacctgcttccacttccaccttttatattttctgaattgattttgntccangagaaaagaaaggaaactcggactgaaatgaacataatgggcaaacttttaaatgtaaaaatcatttgtggcaattt

SEQ ID NO: 218475 - DNA, 432 bp, Gossypium hirsutum
cccggcgtgcggacaaagaagctcagagcaaagtaaaaatcctttagaacccagaaattttttctcaatgttacccaaagttgagttcaaatgcccttcctttgaccaacaatcggaaaaaccagatgcttcggttgaaaaagaggagcaaattgaaattgcgaaaccaccatctgttttcatgggaaaccgccggaaaaatcctccgccgttggaattcgaggcggaggagtgccttgggagaacttctaatcctatagttctctggcaggtatatgccattggtggtttctttttactgaaatggatttgggcaagatggaacgagaggaaagagatgggatccaagaaggaagcgtcggacgatgacgaacagccacctgctgtggatgactcccaatatgtgtgattctctttcgatttttggtttac

SEQ ID NO: 218476 - DNA, 411 bp, Gossypium hirsutum
  unsure (1)..(411): unsure at all n locations
gtctgccaggcctacacactcaaacgtatccgtgacccaaattacaatgtgaagttgcgggcacatatctctaaagagatcatggaatcaagcaaacctgctgatgaacttgtgaaactgaacccaacaagcgagtatgcccctggtttggaggacaccctcatcttgaccatgaagggtattgctgccggcatgcaaaacaccggttaaaccaccgacatgctacacaaggtgtgcttaaagttttttaaatccagagaagatgaattattcatcaaagacagatgtcatttcggcgaaaacctttcttatgggtaaacaaaagaggcggatatatatataaatgctctntaaagctgtatgattatgctgttatgnctttaagactcngtttattatatatatatatgt

SEQ ID NO: 218477 - DNA, 416 bp, Gossypium hirsutum
aggaaatgttcaggcgagttagcgaacaatttaccgctatgttcaggaggaaagcttttgtgcgttggtacaccggtgaaggtatggacgagatggagttcaccgaggctgagagcaacatgaacgatctcgtgtccgagtatcaacaataccaggacgctaccgctgacgaggaaggcgaatatgaggatgaggaagatttggatgaagaacacatgtgatgaaagcgaaaaccaaacgaagttgtcggtaatgcagcatatacaggtatgtgattcgagtggatttgtatgtaatgagtaatgaaagtgtcttttccctatttttccctttcacgaagttgctttttttggtttctatttgagagagtaatgtataatatatccgaaaatagtatgtaatacctatatctatgt

SEQ ID NO: 218478 - DNA, 420 bp, Gossypium hirsutum
cccacgcgtccgactaaacgaacagtcatgtaatcccggtttcgtgccaaagcgcatttgctgtaacatgtcatcgaatggaagaaaggctaacatactctaacacagaacaggatatggttttgttgcaccatgaagtggaagtagatttccctgatagcaaacagaccgagcgccataccgcgactttactggaattcgggaaggctaagaatggaaaaatgatatctgctatggcccttactgttggcgttccagtagcaattggagctctgcttttaattgtaaacaagatcaaaacaagaggtgtattgaggcctattgttcctgaagtttatctaccagctttggaaattgctcaagcctatggtatcaaactgatggagaaaaccgagtgaccaccatttctcaagatatcta

SEQ ID NO: 218479 - DNA, 329 bp, Gossypium hirsutum
caaaaaaacactggaaattggggttttcacaggctattcccttcttactactgcccttacattgcctgaggatggcaaggttatagcaattgaccctgataaagaagcatatgagggtgaagaagggagcttcgatttcgtatttgtagatgcatacaaaagcgactacctaaaatttcacgagctgacgctaaaattagtaaaggtcggaggaattgtagcttacgacaacacgttatggtatggatcagttgcgcaatcggagaaagaagtggtggaggatctcattaagaggtaccgaaattttgtgatcgaattcaatagcttta

SEQ ID NO: 218480 - DNA, 353 bp, Gossypium hirsutum
agccactcttttcttcattctggtgagagtgaagaagaaaatcctaagaggccaaatatgcgagctggtcacggtttacgtgctctaacaagggatttgttcgccagaccctttagaaagaagggttacattcccttgtctacttacctcaggacctacaagatcggcgactacgtcgacgtcaaggtaaacggtgccgttcacaagggtatgccccacaagttctaccatggtcgtactggtcgagtttggaatgtcacaaaacgtgccatcggtgtctaagtcaacaagcatgtgggaaacaggattatcaggaagaggattcatgtacgtgttgagcatgtccagtcttc

SEQ ID NO: 218481 - DNA, 420 bp, Gossypium hirsutum
gacggcgcaaagtttgtggatcctgaggatcaaaatggactatgctctcctttgaaggtggaaatgcttcacccattgcgtgtcatcatcgcaaaccgtgggcctgatacagaacttctggttgctaatccagttgagttatctggaaaggggagaccaagagttttctatgatgttacactagctctaaaggctcttggaatttgcatattctcggctgaaatcggaagatattcgagttcagatcgagaatgggaagtctacagattccttttggacgagaactgcggattccaattatcgagtacgttagctagaaatcagattgtagatagagttagaagaatgctgatgggttggtgagtccagtcaatcttctttgtacatgtcttatgagtccctccataaaaaatgatattt

SEQ ID NO: 218482 - DNA, 357 bp, Gossypium hirsutum
  unsure (1)..(357): unsure at all n locations
catcatttccaaattttgatgattttcctctttttttattttatttttatttaaaatttggaactgctaacattattacattgtcattagccttaagagaagaaaaaaaaaatgtcatcgatttcaatgtctggttcatggacagccaagcaaaacaaagatttcgaaagggctttagctgtttacgacaaggacacaccagatcgttggtacaatgttgctaaagctgtgggagagaaaactgttgaggaagtgaagaagcactatgagcttcttcttgaagatgttagacgcatcgagtcgggtcgggttcctttccccgactattggacnncgtaccgggaatcgtcaagcatg

SEQ ID NO: 218483 - DNA, 322 bp, Gossypium hirsutum
cccacgcgtccgcccacgcgtccgccaagtactggctcttcatgcactttttctcaatggataaatacgctcttgatgcgcttcttatcaatgagtattcttgcctggtgtcaaggtgttttctttggtacaatgaaaccagcacttgcatggtaacaggagctgatgtattacaaaagaaaggcctccatgagagacaaagatggacaaacatctacatcttagttgggttctttgtgttctatcgtctcctttgtttgctagttttgattagaagggtttcaagatcaaagaaatgaagaaattaagtttcaattgtcac

SEQ ID NO: 218484 - DNA, 424 bp, Gossypium hirsutum
cccacgcgtccgcgtaaatcatggtcttcttctctggaatcgaactaggcagcagtgggggggaaacaagaagtctgaaaatcggcctcaaaaggttcgggaacccaaactgagttggaatgcgagttacgaaagtttacttggaaacaacaaaccattccctcaacctattcctctccctgaaatgatcgattttctggtcgacatctgggaacaggaaggattatatgactgagcaaacagtacagcaaagcacattcgggaaaaaaaaaaaagggggttagatattaatacccttattgttgtaacattttactagcttcattatgaaaaaggcattagagcataataaactggcatgtatgtcgaccggaacggtcttggtcttgtctgtccgtggcttgctcatttttcactttttttt

SEQ ID NO: 218485 - DNA, 417 bp, Gossypium hirsutum
cacaaatgtcacaaagctggttggctattgttcagagcatggacagcacctacttgtctacgagttccacaaagatggctcactccatgagtttctgcatctatcagatgagtacagcaagccattgatttggaactcccgtgtcaaaattgctttggggactgcacgtgcattagagtacctgcatgaaggttgctcgccatctattgttcataagaatatcaagtcagaaaacatcttacttgacgctgaactcaatcctcacctttcagactcaggcttggcaacctttttttccaaatgcagatcaggtactaaatcatgatgatgttaccatgtctggatacggtgcacccgaagttaccatgtctggtcagtattctcttaagagtgatgtttacagttttggagtggtta

SEQ ID NO: 218486 - DNA, 413 bp, Gossypium hirsutum
ggcaagcgtaagctcaggcttgaggcttggttcggctccaggaagactagcgccgccatgcgcaccgctctcagccacgtcgagaacctcatcaccggcgtcaccaagggataccgttacaaaatgaggttcgtctatgctcactttcccatcaacgcctccatcactaatgccaacaagtccatcgagatccgtaatttccttggcgagaagaaggtgcgtaaggtggatatgttggaaggggtttccatagttcgatctgagaaggtgaaggatgagattgttttggatggtaatgatattgaacttgtgtcacgatcagcagctttaataaatcagaaatgccatgtgaagaacaaggatattagaaagttccttgatggtatctatgttagtgagaagggaagaatcgc

SEQ ID NO: 218487 - DNA, 279 bp, Gossypium hirsutum
  unsure (1)..(279): unsure at all n locations
cggggcggcccacgcgtccgaaattaatcagttgcagtggtctgctgctcagcctgattggattgccattgccttctccaacaaaatgcagcttctcaaagtgtgaggttccctgcttgaaatgtattcaactctcatttttgttgcatatactgctcacgcttgtaattaggtgggagttaaaaactgtagaatcagttttattggctgataattttgttagtactttgtaagaccagctttaatctacaattatttgttaggtctcaccccccanna

SEQ ID NO: 218488 - DNA, 383 bp, Gossypium hirsutum
cggggcggaccaagccgtccgatttctttctgcaaccagcggcacccaaagatgcaaatcttcgtcaaaaccctaacggggaagaccataaccctagaggttgagtcttccgacaccatcgacaatgtcaaagccaagatccaagacaaggaaggcatcccacccgaccaacagcgcctcatctttgccggcaagcagctcgaggacggccgcaccttagccgactacaacatccagaaggaatccaccctccatctcgtgctccgtcttaggggaggtgctaagaagagaaagaagaagacctacaccaagcccaagaagatcaagcacaagaagaagaaggtcaagctcgctgtgctacagttctacaaggtggatgaatc

SEQ ID NO: 218489 - DNA, 337 bp, Gossypium hirsutum
  unsure (1)..(337): unsure at all n locations
gggagacccacgcgnngcggccacgcgtccgnccacgcgtccgttctcatacttatgacttcatagatgactggntgaagattggtttggctgcaaagaagaggggtcctggaataaaataatggcctgccttgcgaagaactattgaagctttgcgaaaaggaatcagtgaataactcactgggaaatctactgacatatccatatgtgagagatgctatgacgagtggacatttggcactgagaggaggttattatgacttcgttaatggacattttgagcaatggagggccttcacaccacctccaccagtaatgccacccatgccccagcctt

SEQ ID NO: 218490 - DNA, 365 bp, Gossypium hirsutum
ggaagacccaggcggccgcaataggccggaaatatgtaatcccaagccatcaccacatagttacctgccaaatgagcatatctgtggcaggcctttgggtctccggttggataagaacactggtgatttgtacattgctgatgcatatttggggttgttcaaggtgggtccggaaggcggattagcaacaccacttgtaactgaggtagatggggtgcccctgaggtttaccaatgaccttgacattgatgatgaaggaaacatatattttactgatagcagcagcaaattccagagaaggaacttcatgcagctagtttttttttcgagaatagtgggaggcttctgaagtataatctttacac

SEQ ID NO: 218491 - DNA, 396 bp, Gossypium hirsutum
cggacgcgtgggctccggtgggatacagggtggaatatccaatggggaaattatcaacatgagagtagctttcaagccaacacctgctattagtaggaagcagcacacagtgactcgtgagaaaaaagagatagaactactagtccacggtcgtcatgatccttgtgttgcccctcgagcggtgcctgttgttgaggccatggtagccttggtgcttgtggaccaattaatggcacaatatgcacaatgtaacctttttcctatcaatgcggagttacaagaaccgttgagcttaggtttccccaacttcgaaccagcaatgatttgaatggttgcagaatgttctggttttaaggttttatcaaccctaagtcgaagggctttattagcattctg

SEQ ID NO: 218492 - DNA, 130 bp, Gossypium hirsutum
attcaaaaaaaaaaaactttcatcaaaaatttcactcatccgggcgaaatctacaaaaataggatcggatatacatgttgaggatatggtccaaaataatgtctcttcccctatcctaattgatcaaaaa

SEQ ID NO: 218493 - DNA, 384 bp, Gossypium hirsutum
  unsure (1)..(384): unsure at all n locations
tgccgctccgttgggtcaagagcttgaggatgctgtaaaagtcaagtttcctggtgccaagtttggacagggtgatggaatgacagaagctggaccagttctagcaatgtgtttgggatttgccaaggaaccctttgaaatgaaatccggaacttgtgggactgttgtaaggaacgcggagatgaaaatcgtcgaccccgaaaccggtttgtccttgccgcggaaccaggccggcgagatttgcattcgaggagatcagatcatgaaaggataccttaatgaccctgaggccactgctaggaccattgacanaagatgctggttacataccggagacattggttacattgacgacgatgatgaactcttcatcgtcgatcgatt

SEQ ID NO: 218494 - DNA, 385 bp, Gossypium hirsutum
cccacgcgtacggcgaaggttttctctacattcgttgtcgatggaatatctaacgcaatcgtcaagacggggatgcgctgcagcatcacaaggagtagcgtcaaacggagtaaaggaagcagcaagaaacgctgcggtgttgaagaaaacaggggaagacatggcaacagcaactaaagacaaggttaactgggttccggaccctgttaccggattctatagacccgaaaacactgtgaatgagatctgccccgctgaactcagagccacgctcttgaagaagaactaaatatacatgcatgcatatgttacgagatgagattggtttcaaatgttatgtggtgcaagcacagggaagattttggtttttggtttttttgttcaa

SEQ ID NO: 218495 - DNA, 342 bp, Gossypium hirsutum
cggacgcgtgggcggacgcgtgggcggacgcgtgggaacatttcatgcatccagccagaacataaaacatcaaaattgatacaagactcagtatctcctactcgacatgggacacaaaggaaagtactatcgttggacaaccaccatcgatctgagcctgtctcaacggcacgtaagtctcaagcagcctcttttgctcctttattctatatgagtattagctggttgtgaaaatgccttatttgttatatgtacatgtaaacatggtttgatagtaaaagataaaagacttttaaggtgaaaaagacagtaaaaaggtgcttgtgaggaaaaaagtaccat

SEQ ID NO: 218496 - DNA, 427 bp, Gossypium hirsutum
cccacgcgtccgcccacgcgtccggtcccattaaaaatccagttacggaaggtcaaaatcttcttcagccgaaaacccaacagcaacaggacgagttcttccgtggtcaaagcctttccttcttcaatgagtccaacatacccgctaataaccagattttaccacaaggggaagctcaattcgaccagttgaagacctcgaattctccattcgagaccacctacaacaacaacaacaacggtttcaaactgatgttcggctctccattcgatttgtcttcattcgattacaatgatgatctccaagctgatggaatggacgccatgccaaaacaagatgtctcaatctggttctagtaacaatctcaaggctgaaactgaaaccgtacccgactcaaccctgctgagccccgtgtcgtgtgtttcat

SEQ ID NO: 218497 - DNA, 419 bp, Gossypium hirsutum
aacggagcaaccaccccggctggtctcgtagccgccgctctagctcatggcttcggtcttttcgtcgctgtctccgttggcgccaacatctcaggtggccacgtcaaccctgccgtcaccttcggtgcttttgttggcgggaacatcactctcttgcgcggcattctttactggatcgcccaactcctaggctcaaccgtcgcttgcctgttgcttaagttcgctaccggcgacctggctgtacccgcttttgggttgtcatcaggtgtgggcgcgtctaacgcattggttttcgaaatcgtgatgaccttcggattggtgtacacagtgtacgccacagccgttgatcccaataagggaagctagtgaacaatcgcaccattggcaattggtttcatcgtggtggccaacattttgca

SEQ ID NO: 218498 - DNA, 427 bp, Gossypium hirsutum
ggattttgaagagggttaaagaggaatttggggttggggaagaagtgggatttgtttgtttaggtgggtttgagaataaacgagaggtttttaattggaaaaatctgaagctggaagtggatgagactaagtatggttttgggatatgttatgagctggaatgtgaaagtgaggatcctgatggcgttaagaaattgcttgaggagttcttgaaggaaaatgggattggttattcctactctaagatgacaaagtttgctgtttttaggtctgggaaattgccttagcgaagtgagtttgaggatgtcctgcggtatgattatcccattgttccttacatacaagcaatggtagagaagcaaggtttatcatcttcctcgcaaaaataaatgtttactttcacgcaacgcaattccgagatcttgca

SEQ ID NO: 218499 - DNA, 406 bp, Gossypium hirsutum
aaaagggaattttcagttgaaaaagatgggtcgcggagttagcagtggtggcgggcagagctcattaggttatttgtttggtagcggagaagctcctaaagcagggacaaacaactcccaagctgctcccgctgaagcaccagctgtctccaaacctgcccctgctcctgaaccagtagatatttccaagcaaattccggctggtattaacagtatttccgcaaacaattacatgcgtgctgatggtcagaatactggcaatttccttacggatcgaccttccaccaaggttcattctgcccctggaggcggatcttctctggactacctatttggtggacctggaggtagtaaatgagattgtgccttaataacatctttgataagggagagtattgtttgtgga

SEQ ID NO: 218500 - DNA, 432 bp, Gossypium hirsutum
gtcagcatatctggaacttggcaccttggaaagctgcaggtggggctgtctcgtgctcgaagacttgcacagggacggtcgattaagatacaactctttgctgcattgcctgttcaaattgatggagaaccttggtctcagcagccttgtacattgtccatttcgcatcatggacaggccttcatgttgaagaggacagccgaggaatcgctaggtcatgcagctgccataataactgatgtgctcgagagtgctgaaacaaatcatgtaattaacgcatctcagaagcgagctcttcttcaagaaatggcattaaggctgacttaatggctttcttctatcacggtacttgctggtcagttagtcggtggttctcgttgcaccgaatttttctcaaaaatgtgttattttatatcaatatatgatctttct

SEQ ID NO: 218501 - DNA, 426 bp, Gossypium hirsutum; identical to SEQ ID NO: 197636

SEQ ID NO: 218502 - DNA, 430 bp, Gossypium hirsutum
cccacgcgtccgcccacgcgtccgcccacgcgtccgcgaatacggtctctcggacgagaacaaagacttccagctatcccaaagagagcagctttatagaaccattcaggacatcatttataaatctgcaaagaagaaagggtcgggggcaggtgctttagtctggcagttctttgtagaaggaatgcaggaatatagtgatgatttcgggatggtaccatggcagtccccgccaatttacaaactcaccatagaacactcgtgcaaattggctagaatccaaggacttattcaagaaaacggaaacctcaaacaactgtgttccaagagaaagtaaagctagcgcttgctatcagaaaattcaattctttctggtgaggtaatttgtgcgagatatatattggtattgtatcaatttttttcttctaat

SEQ ID NO: 218503 - DNA, 426 bp, Gossypium hirsutum
gagccctgaatgtggatgtgactgagttccagactaacctggtcccatatcccaggatccactttatgctttcttcttatgcccctgtcatttcagctgagaaggcttaccatgagcagctatcggtggctgagataaccaacagtgcttttgaaccctcttcaatgatggccaaatgtgacccacgccatgggaagtacatggcttgctgccttatgtaccgaggagatgttgtgcccaaagatgtgaatgcggctgtggccaccatcaagaccaaacgcacaatccaatttgtggattggtgccctactggattcaagtgcggtatcaactaccagccaccaactgttgttccaggaggggaccttgccaaggttcagagagctgtctgcatgatctccaactcaaccagcgttgcggaagtgt

SEQ ID NO: 218504 - DNA, 410 bp, Gossypium hirsutum
cccacgcgtacgcccacgcgtccgattttcattagccttaagagaagaaaaaaaaaatgtcatcgatttcaatgtctggttcatggacagccaagcaaaacaaagatttcgaaagggctttagctgtttacgacaaggacacaccagatcgttggtacaatgttgctaaagctgtgggagagaaaactgttgaggaagtgaagaagcactatgagcttcttcttgaagatgttagacgcatcgagtcgggtcgggttcctttccccgactattggaccgttaccgggaatcgtcaagcatgaaaaattccgaaggtcaaatgaagaagaaaaaatggtggacttgcatggatctcacccttatatatgtctgtgtgtgtggcagtaattgtagtacttaagaatagccat

SEQ ID NO: 218505 - DNA, 435 bp, Gossypium hirsutum
agcagatcccagcaagagccactctctctaccttaagaatcgccatggactacgcttctcgaagaagtcaaggaggcctattcgaaggtctctacagagtcatcatgcgccgtaactctgtctacgtcacatttgtcatcgccggcgctttcctcggagaacgggctgtggattatggagttcataagctctgggaatacaacaatgttgggaaacgatacaaagacatttctgtgctaggacagaggcaatcagaggaatgaactcatccttttctttctctttgaggatgttttgaagttttttatttgaggaatgggtatgagcatatatctatgatgtagcaatgctcattgttgcaataaaatgtcacttttttttttttgggggggggaggggaacgtacatctttattaacaatgagtcgattgattg

SEQ ID NO: 218506 - DNA, 427 bp, Gossypium hirsutum
cccacgcgtgcgggaggatattcacatgaggttcatgaaaaattatggtagagtggctcgttatgcaccggcatacgcgatgaatgatgagttctcacgggtatcgcatcaacaaatggagtttttctccagtagtccaagtgcagatactctcaatcgtgttagaggtgaagtgggtgagatacgttcaatcatggtggaaaacattgagaagatactcgagagaggtgacaggattgagcttcttgttgacaaaactgctacaatgcaggatggtgcttttcacttcaagaaacagtctaaacgccttcgtcaagcactttggatgaaaaatgccaaactcttggccatgctaacatgcttgatcgtgcttatactctacctaataattgctgcttgctgtggtggtatcactctaccatcatgc

SEQ ID NO: 218507 - DNA, 296 bp, Gossypium hirsutum
cggacgcgtgggccaacacatcgcaacattgacaacaaattcagtgggaagaactactcgagtctcgcgctggtagacgaggagggtctacgctatttcaaacagcagcaaatcactgtctacaggctgcccttgcacgatacctgattatttcaaaccctcacatttcatcaactaatataagccgagaaggtctgatcattactttttctttcatcatatgaaaaatacattgattgtcactattgaaatctgcaagctcccttcacaaaccggatctaacttgcattgaataa

SEQ ID NO: 218508 - DNA, 435 bp, Gossypium hirsutum
ccacggacttcattgggttaaaccagtatacgtcgaggttggtttcacatgccaaagatagtgtcgaagaaggtcattttgagaaagctcaacaggttgccaaaattgtggaatgggaagatggtgaaataatcggtgaaaaggctgcatcggaatggctctatattgttccttgggggatgcggaaggttctcaattacatatctcatacatacaacaacccaccaatatatatcatggagaatggtatggatgatgaaatgaatgaaaatgtcccaatccctgaaatgcttgaggacaaaaaaaggattgagttttacaaaggataccttgcttctgttgctcaagcaatcaaggatggagtagatgtgaggggatattgtgcatggtcattattggacaaacttgaatggtctcatggctacaccaagcgct

SEQ ID NO: 218509 - DNA, 411 bp, Gossypium hirsutum
caatctcatctctctcctttgttttcccttttgtctctctctctctttttccaaccctaaccctacctcaccaaccaggattcaacatgaagggaggaaaatccaagtcagatactaagagtgccaagctatccgtgaaatccaaagctggaaagaaatcggggaaggctgccaaggatccaaacaagccaaagaggcctgctagtgccttctttgttttcatggaggagttccgtgagcaatacaagaaggatcaccctaaaaacaaatccgttgcggctgtcggcaaagctggtggagataaatggaagagcttgtctgaagctgaaaaggcaccttatgtagctaaggcaaaaaaagcggaagttgagtatgaaaagaacatgaaggcctacaataagagacaggctg

SEQ ID NO: 218510 - DNA, 417 bp, Gossypium hirsutum
ctattttgaggggaaaccatgagagccgccagataactcaagtgtatggcttttatgatgaatgcttgagaaaatatggaaatgctaatgtgtggaagtatttcactgacctctttgactatttacctctgactgccctgattgaaagtcagattttctgcttgcatggtggactctccccatctttggatacattagataacatccgttctcttgaccgtattcaagaggttcctcatgagggtccaatgtgtgatctcttatggtctgatcctgatgatagatgtggatggggaatatctcctcgaggagctgggtatacctttgggcaggatatttctgggcagttcaaccacacatatgggctgaccctgatttctagagctcaccagcttgttatggaaggatataattggt

SEQ ID NO: 218511 - DNA, 304 bp, Gossypium hirsutum
cggacgcgtgggcggacgcgtgggcggacgcgtggggtttgggtacatccctggtattatttatgctatctatgccatcaccaagtagtcctctaatcccgtccttctcatctgtggagatttggagtaggattctggttttgtttgaatatgtgtcggttatagtattttatttcaattaatattttgtctgttaatttgatggtgatgtaaagcttgttgttatgttatgatgatgatttatattgtggggaggggggggggtgtcccagggtcatgttacgtttgtgtcgatctactgatc

SEQ ID NO: 218512 - DNA, 420 bp, Gossypium hirsutum
cccacgcgtccgatcctccttcatggggacacgcttccccgacgtctacacaagttcagggagattcgtcgccaggtttggttttggcggcaaaaaagcagctcccaagaaagcctcgaaacaaacctccgaccgccctctatggtacccaggagcggtggctcctgattggctcgatggaagcttggtgggtgattacgggttcgacccgttcgggttagggaaaccagcggagtacttgcaatatgatttggattctttggaccagaacctggctaagaatatggctggtgagatcattggaactaggaccgaagttgccgacgtgaaggcgacgccgtttcatccttacagcgaggtttttggtctacagagggttagggagtgtgaattgatccatggacggtgggccatgttggc

SEQ ID NO: 218513 - DNA, 417 bp, Gossypium hirsutum
gaacatcgttatatttttcatgttgtgcatactcttgtcgtttgtccttacaagtaaagggagattcatcgccaggaatgacttatggcggaaaaaaatcaactcccaagaaagccttattatcatacctccgaccgccctttatggtaccctttagcggtggcttctgattggctcgatagatgcttgttgggtgattacaggttcgacccgttccggttagggaaacgttccgaatacgggccatatgattagaattctttggaccagaacctgtctaagattatggctgggagagatcattgtaactaggaccgaagtcgccgacgggaaagctactccgtttcagcctcacaacaaagtttttggcctactgaggtatagggagtgagaattgatccatgggctgttttccat

SEQ ID NO: 218514 - DNA, 418 bp, Gossypium hirsutum
cccacgcgtccgcgtctttataacagattgttgtataggagcaaacaaagaggatttctggagctggatttggttttgggaaaatgggttgaagaacatatccattccatggatgaaaatggaattaaagctcttgttaatgtcctcgatttggaaaaccccgacctttggaaatggctaaccggtcaagaacaaccacccgaagcagtgactcttaatcctgtcttctctgctgtgcaacagaaggtcttgaagaacctcaacaaccattcctctctcgagacccgagcaacccctggccggccatgggtgagagggtgggatgatataaaaaaaggtcgcgacagcccaatcaccggaaatcagtagcttttcttttgcctttgaggtaacaggttctgaaggcttgtttatttcg

SEQ ID NO: 218515 - DNA, 409 bp, Gossypium hirsutum
cccacgcgtccgcttgtgaaccttctagcctcccaaaatatccccccagtaaagagatggatgcaaaacggcgagatgatgaagcacggagactcaaagcagctagtaaagccccaggtgacggtgcaaggaagacacgaacacgtgatcgtacaagggcagtgcctgccccagaagccaatgccgagcttcagtctaatcttgatagaaggcggttaataacccatgcaaacgcatagagcaaaagcgaaaagttccccccaccacaccaagatggagcacttggctttcctttaggagcatcacaacacattgatccttcatgtgttcctcctgatgtccccttcagcactacattcacatattcgaaagaaccaattcaaacttggtctggtccgctggtcgagtc

SEQ ID NO: 218516 - DNA, 367 bp, Gossypium hirsutum
cccacgcgtgcggttggatttgctgatgaacgtgtagaggaacgtatcgctgatgatgacgtgggtacgattaaagggaccacgagcacaagtgcggtttccatgatcctcaagggtgcacatgactatatgcttgatgaaatggatagagctctacatgatgctttatgtactgtgaaatggactcttgtatccaacacggtagttgcaggtggaggtgcagtttaagctgctttatcagtgtatttggagtatctagccacgactttacgatcacgtgagcgggaggctactgcagagcttgcaaaaactcctttaattattccgaacgtgcctgcaatcgatgctgccaaggatgccactgaat

SEQ ID NO: 218517 - DNA, 379 bp, Gossypium hirsutum
cccacgcgtgcggtgaggaacatcgtggagcaagctgctgtcagggatgtccaggaagcgtgcgtctatgactcgtacactctgcccaagctgtatgtgaagatgcaatactgtgtttcatgtgcgatccattcccatgttgtgagggtccggtcccgcaccgacaggaggaaacgtgacccacctcatcgctgcattagacgcagggatgatatgccaaaacctggtctgcctggtcaggctcctcgtgctggtagtgccgctcctgctcgtgcataaggctctagaagtttaagatgaatttgtgttgcgtgctttgctttgagatatcattgctttgatttagagaactaggatcatgtacggagtttttttttat

SEQ ID NO: 218518 - DNA, 417 bp, Gossypium hirsutum
ggcaattcaagaacagggacgaggacagatactaaatacagtggaggaaatccaagaaagacatgatgctgtagttgagattgagaaaaagcttctcgatttgcaacagatttaccttgatattgcagtacttgttgaatcccaaggagaaattttagacaacatagaaagtcagattcgtttgcattctcaaatctcttagaatgggcatttaagtgcatattaggttgaatgacgtgttctggtcggtcttgtgcgttaatggaatcttgttcaggtttcgactgccgtcagtaacgtccaatccgggacggttgcccttcaaaatgcaaagaagcgacagaagagtacaagaaagtggacgtgcattgccattataatcctcctaatcatagttgctgttatagttgttggagt

SEQ ID NO: 218519 - DNA, 419 bp, Gossypium hirsutum
cgagaaatgccaaaattggagacatgcaggatgaacatgctaccgaattgccaaataattcccgggaatccttaacagatcggtacaatactctacgccaagaagctattaagtacgttgaagaaggggcgaaatctattcatgtttacaatgtggcaatggatgctttacaagaggcactgaaaaaggttagctctgcaaaaaaccaaagccctatatctgctgaagatggagcactgagcaatggacgtaatcaagagttgcatgcagctggagatatcgagacagtggcatgtcaatctgcggacgagaaggaaaagaaaatccgggaattgacaacagagttggagagcataaaccgccgatgcgaagtgtacagagcgaatctgctggctgtgttgagggacatggaagaacag

SEQ ID NO: 218520 - DNA, 430 bp, Gossypium hirsutum
cccacgcgtccgaaagaggagccaccgaggaagaccacaaccaattcatctttgacaataacgactgtgagatatggggagtgtcaaaggaatcacgctgccagcagcggcggttatgtcgtcgacgggtgtagggaattcatggcaagtggagaggaaggaacgagtggtgcccttgcttgtgctgcttgtggttgccataggaattttcatagaagtgaagttgaaactgaggtagtctctgagtgttcttcacctaataattcttccagtagagcataaataaataatatataggctttcatttattaattatatgatgttttggtaattggcttttagtttttgtgccaaaaacctcttccttatcaataatttgcgttgtgtttctttgatggtttttttttcttaaacttgttctgtatgtaat

SEQ ID NO: 218521 - DNA, 355 bp, Gossypium hirsutum
gttggggatcattgtaagatggtgtacttgatattgacgtattattattttagcttttcaccgtatcaccaccattaagatgatgggtcctatggagatggcggtgggcggacaattggtgcttaattccttccttacaatccatctttgaaccatgttgctgcttaaaaggatgtttggagctggagagtggattgtggtgcttttttattttattttattttattatttaatattcaagggttttgagaacattaatgttaatagctattattgtacgagatttttttttgaaaaattagtgtcagtttgcggtcaaacttctatggaacttatatttaatacctggttttgg

SEQ ID NO: 218522 - DNA, 406 bp, Gossypium hirsutum
ccaagctgcagtttcttcaatagctcaaactactatcataaccatgcaggatgttcttgggttggacagttctgccaggatgaacattcctgcaacacagcatggaaactggagttggaggatacctaattccacgagttttgatagcttggaaaaagaagcgttaagattaacagagatgctttccatgtacggtcgaaagtagtccaggaaagcttcatatctttcttttcctcggtcattacacatgaatttagtgccacccccaccattatgtgtctagtctagctttgaataagttcttttgctgatgactgagggtttagagttgaattttatttataaactaataaaaagcttgataccctttcaaaaaaaaaaaaaaaataaaaaaatatattttaat

SEQ ID NO: 218523 - DNA, 332 bp, Gossypium hirsutum
actgtacctaatgcttcaggggatcccacgttcttaacattattagatactcataacactaatttgggtgcaactgaaaaagatcctcaaaaatcaaaccatgaattgacagtcaaggattccaaataccaaaaggctgtccttagtttgtacaacggaaaagcttatcttgttgtcaatgttgcttataaatgtgcactcactgataaaaattatgcccacttgactgatctttacaacaaattcaacggcccaggactggagatttattcattcccatgcaatcaggatttgagccaagaacctgttaccagacaagatgcacaggaatt

SEQ ID NO: 218524 - DNA, 401 bp, Gossypium hirsutum
caaaaaccagccctaacagagcagctgaacctaacatcatcatcatccatggcggcaccgatctggctatgggctttctctgtagccctaactctggttccgtctgtttttggaaactctgaaggagatgctcttaacacgttgagaaaaagtttgaccgatccagataacatactccagagctgggatccgaaccttgttaatccttgtacttggtttcacatcacttgtaaccaaaataatcgagtcactcgagtagatttaggtaattctaacctgtctggacatttggtacctgagcttgggaagcttgagcatttgcagtatctggagctttacaaaaataagatccagggaaccatcccaactgaacttgggaacttgaagagcctcattagttt

SEQ ID NO: 218525 - DNA, 414 bp, Gossypium hirsutum
gccctagaatttttgttagaatctcttggatttgctaactgtaccgatgtctttcccgtgggtatcggagatgatcggaccgatgaagatgcattcaagatattgagggacagaggccaagagttttggtattcttgtatccaagttccccaaggacactaatgcatcctattcattacaagaaccagatgaggtcatggactttttacgacgtctggttgaatggaaagaattatctctaagaactcagtcgagaatgtagaagaaaataagatagtggaagtatatatctgtgcaccctagcaaagaaattgtgcaggggggtgtgagattaaagtagcaaaattattgttttaagatgagagaaatgattattaaagctttgtacatctttgtaactagttggggtacaaa

SEQ ID NO: 218526 - DNA, 431 bp, Gossypium hirsutum
ttcctttgttccagcagacactcctttgaaacttgcagactttttcaaaatcgatggagtttatcgtattggaagcatatcagataaccctactggtggagggatataccttgacacttcggttatgaattcggactataggtctttcattgagattgtgtttcagaatgatgaggatattgtccagagctggcatctcgacggctactctttcttcgttgttggtatggacggagggcaatggacggctgctagtcggaacggatacaacctccgtgatgccgtttcacggtgtaccactcaagtgtaccccaagtcatggactgccatttatgtggcgcttgacaatgttggaatgtggaacttaaagtccgagtattgggcgagacagtacctgggacaacaagtttatttgcgtgtcttcacaacgt

SEQ ID NO: 218527 - DNA, 457 bp, Gossypium hirsutum
cccacgcgtccggccaacatcttggccgctggtccattctctggtggatccatgaacccagctcgcgtccttcggaccagcagtggctagtggcgacttcaacggcatatggatctactgggtgggaccactgatcggtggcggattgtctggtctcatctatggaaatgttttcatgaactctgaccatgcaccattgtccaatgacttttaatcaagttattctcaggacagtctaatttgcttaattcgatctcttaatccattgcttactgtaataaaattggcaccttctagttggtgcttttcctttttttaagctttgggtttgggttttggttttgatatttgtttggtaaaagatatttggtcctcaaatcgtttgcttattgggggaaatttgaatgaagggtgggttttttttttttttttactaaatatattttactgtgtatta

SEQ ID NO: 218528 - DNA, 353 bp, Gossypium hirsutum
cccacgcgtccgcccgggcctattattttgttgcattggagtggtaaagggaagccggggttgaggctggactcgaggaaaccctgcgttgttgatcatctttgggcaccctatgatctttatggctcatcagatcactctttggaggaataagggaaactgagtacaccaatccagtctgcttttaaccatggccacaacaagccctttaacttttcattctacatatattcccagaaccataactttgaagtctcagtatgaaagggataagattatgtttcgatttataaattaataaaaattatagggggaaagagtgagtgaggatttgtatattatttacttatttg

SEQ ID NO: 218529 - DNA, 427 bp, Gossypium hirsutum
cccacgcgtccgggcaaggccacggtggaactgaaaccaatctccaacgtcatatcttcctttctcaatatcatgaaatatcgaggatacataaagaacttcgaagttcatgatccacatagagtgggcaggataacagttgacctgcaaggaagggtaaacgattgccgggcactcacttacaggcaggacatcaaagcaaaggaaatcgaaaaatacaaaacacttaaacttccaactcatcagtggggttatgttgtgatttcaactccggatggttttttggatcatgaagaagccattcgaaagaatgtaggtgggcaggttctgggttattttcattagacttggttatctttctgataagtggttgagctctgctttatctgtgaactttcaatcaaatatctatctgaaatttgtatcg

SEQ ID NO: 218530 - DNA, 412 bp, Gossypium hirsutum
cccacgcgtccgaccactacaaacagtctttccaactcgacgttcaatgcgcaaatctccaaaacaagaggactctgcaaggttcaatgcaaaattaaacaccggcaataaaagtgtaaaggaaccaataagaaagaaagtaattgaagctcaaccatcttcgtacaagaagattgaaactgttgctcgtcagacaccagacaggattaaccaatcagtcagttcaactaggggagacgcgaagtcaaatgccagaagattccactttaaaagtggagaacgagcagaaaggagaaaagagttctatatgaaattggaagagaaaatgcatgcgaaagaggcagagatgaaccagattcaagcaagaacacaagaaaagacagaagctgagattaaacagttgcggaaaaag

SEQ ID NO: 218531 - DNA, 422 bp, Gossypium hirsutum
cccacgcgtccgggcggatatggcaccgtattatatggcaccagatgctaaggcggatgcggagccagcatcaaaggccagaactaaattataaaacacatttgaccgactatgctttcaatagcgaacaccggaccagaaaccaacatacctcatgagtgtatttgcacgactaatactaagtgtctagaacagaagcacataatgtttgaacaattagttgaaagccttgatgtggttcgagacattgagaaagttgggtctagtggtggaagaacttctaaaccagttgttattgccgtttgcggacaactctaaaattaaaaagacagccacagtggttcatgtctgaaagtttaagcttcattttatgctgctttgttttgttttaaatggttagtggttttggtggttcttgaaaa

SEQ ID NO: 218532 - DNA, 333 bp, Gossypium hirsutum
ttctcttcctcctatctcatagcagccatgatcattccagagaagaaccgccgcgggatgtgcatgtacctctttcaagagggtgtttgctttgcaaagaaagattacaacttggctgaagcacccataaattgatgttcccaatcttcaagttataaagctgatgcaaagcttcaagtcaaaagaatacgtgcgtgaaacttttgcatggatgcattattactggtaccttactcaatgatggcattgagttccttaggacatatttgaatctttcttctgagaatgttcccgctactttgaaaaaacaagctaagcccgctggtcgttcca

SEQ ID NO: 218533 - DNA, 347 bp, Gossypium hirsutum
catcgattcatttttggtacagttttcgtagtatcgatcaaacatgagtttcctgggtgggaagagaaaaactcccgcagagcttctgcgggagaataagaggatgctggacaaatctattagagagatagagagggagaggcaaggtcttcagaaccaagagaagaaactgattgcagagataaagaaaactgcaaagcaagggcagatgggagctgtaaaggtgatggcgaaagaccttatccgaactcgacatcaaattgaaaagttctataagctgaaatcacagctccaaggcgtatctcttcgaattcaaacattgaatcaacacaagcaatggagaagca

SEQ ID NO: 218534 - DNA, 372 bp, Gossypium hirsutum
cagacacgattgataatgttaaggccaagatccaggataaggaaggaattcctccagaccagcagaggctgatttttgctgggaagcaacttgaagatgggaggacccttgcagattacaacatccagaaggagtccaccctccacctggtccttcgcctccgcggcgggatgcaaattttcgtgaagaccctgactggaaagaccatcaccctggaagttgagagctcagacacgattgataatgttaaggccaagatccaggataaggaaggaatcccaccagaccagcagaggctgatttttgctgggaagcaacttgaagatgggaggacccttgcagattacaacatccagaaggaatccactttgc

SEQ ID NO: 218535 - DNA, 432 bp, Gossypium hirsutum
cccacgcgtccgcactaaccagcaggctcaatctatggggttgtttcagccattggaatgcaatccaactttgcagatagggtactgcaatcctgttgcttcagaccagatggctgcaacaactcatgctccgcaagtcaatgggtttatccctggatggatgctctaaattttttggtttcagcaatgtggtcaatggccacaaactagtagctaaaaatgcttcttgatgttggaaaatgtgtaaaaatagtttcaagagcatatgcataatatactgcattgacataaacactactgcagtgactgaatttgctggtaagactattgagaccttgagccaaagacaaaaggcatgttattgattaagtttatatatatgacaatggaatacttgacaaaaagctttatatattaaaattatggtcaaaa

SEQ ID NO: 218536 - DNA, 434 bp, Gossypium hirsutum
ttcatctgtctcattgtacgaggttcttggtgtaccagtgagtgcaaacggtagtgaaatcaaggcagcttatagaagacttgcgagaacgtggcaccctgatgttgtgtctgtaaaccagaaagaaatgtctgctgatcggttcatgagaatccatgcagcgtattccacgttgtcggatcctaatcaacgtgcggattatgataggaatcttagacggtggaaccgtccctttacgactatggaagcaactgcgacgtcggtggcttcgtatgggttttctagttatggtgctaataggaattgggagaccgatcagtgctggtagttaattatatgtattttttttatgttcgttttatatccatgaaatttaatctttttagaaattatagttatctctaacttttattcttaaaaatgtaatatatttt

SEQ ID NO: 218537 - DNA, 132 bp, Gossypium hirsutum
cccacgcgtccgattcaactccaaggcgatcaacgcaagaacgtgtcgcagttcctcgttaatgccggcatcgtcaagaaagaccaaatcaagattcatggtttttaaggataacccaagttgctatttatg

SEQ ID NO: 218538 - DNA, 431 bp, Gossypium hirsutum
caaaggtggcaagatcaaggatggcgagaaccaccttgggttgaggacaaggagcgatggtgatggcatctcccttttcggagcaaccaacgtttggcttgaccacctttccgtttacaagtgctccgatggtatcatcgatgctattcagggttctaccgccattaccatttccaactgccacttcactgaccacaacgatgtgatgctgtttggagcaagcgacagctacagtgctgatgagaagatgcaaatcaccgttgctttcacccacttcggtaaaaatttggtacaaaggatgcctagggtccggtttggtttcgtccatgttgtgaacaacgattaccgtcattggatcatgtccgctattggaggcagcagtcaccctacaattatcagccatggcaaccgatttagagcctcacgtaaca

SEQ ID NO: 218539 - DNA, 349 bp, Gossypium hirsutum
agaatgtctgttagatacgtttctcgtaggttctcgagtgggagtgggaagatactcagtgaggaagaaaaggctgctgaaaatatttacatccagaaaactgagcgagagaaattggagaaacttgcacgcaagggacccaagccagaggagaaaccggatgctggttcagggggtgctgcgaccgatggtagcactacctctacatcgggaacatctgctgagaaagtatcaaccgataagtaccgaaactacggggttcttgctggtgttgcaacccttggtgctgctgtgggatggtatctcaactctaaagacaagaagccagaagcctgaaatgggggttaat

SEQ ID NO: 218540 - DNA, 369 bp, Gossypium hirsutum
cccacgcgtccggaacaacaacaataaattaatcaatcatgagggctttcccagcgctttgtcttgcatctcttgctttagtgttgggcgcctctcgtgctgatcctgacttgcttcaggatgtatgtgttgccgatctttcttctggaataaaattgaatgggttcccctgcaagcacccctcaactataggagcaaatgacttcttctttgccggtctggccaatccaaacttccctaacaacactttgggatcgcttgttacggcagctaatgtggaaaaaatcccaggtttgaacacccttggagtctccatgtctcgtattgactacgccggcggtggggttaacctctcccacacccacccac

SEQ ID NO: 218541 - DNA, 379 bp, Gossypium hirsutum
accatatccaaggtgttgctgtcaatctgctcactcctgacggatccaaatcctgatgaccctttggtgccggagattgcccacatgtacaagacggataggaacaagtatgagacaaccgctcggagctggacccaaaaatatgctatgggttaaagtgctactacgtatgtaataggagggcttcattccctgtgactttggtctttaaattaattgtgtgattgtctcctctttacatactggacctagccctccttaaaaacacaattttcttgttagttgtttgtatgaaaattatgtttcaaaacttaaatccccttttcttaaaaaaaaaaaaaaaatataaaatatttaaataataataaaaatgggcggt

SEQ ID NO: 218542 - DNA, 408 bp, Gossypium hirsutum
cccacgcgtccgtttcttccagtacattcctgggtgttgcggttatcttaggtctggttgttgctagtatgtcaccctatgttgaggcacagtctgcgtctccagctccttctcccactagtgatggaacttcaatagaccaagggattgcttacgtgcttatggcggtggcacttgtgctcacatacctaattcaccctttagactcatcttcctacaccttcttctaaatcattgtttacaacaatagaatgatttatttatgtcaggctactttttaaccaaattgctttgttgattatatctattaaaatctgttttcttttttttaaattattatattaatatttattatattaattttaatacttattaaatattttgtaatatttcttttatattttttat

SEQ ID NO: 218543 - DNA, 371 bp, Gossypium hirsutum
cccacgcgtccggttgggaacctccgtcacaagaggttggtcaatttgatcggctgttgcgccgagggggacgagcgcttgttggtcgctgagtatatgcctaatgataccctctctaagcatcttttccattgggaaaaacagcctttaccatgggaaatgcgccttagagttgcttaccatattgctcaagcccttgagcactgcaacgctcaaggccttaaaatttatcacgatttaaatgcttacagagttctttttgatgaggaaggtgatcctcggttatctagttttggactaatgaaaaatagccgagatgggaaaagctacagtacaaattttgcatatactccttctgatttttgaggaca

SEQ ID NO: 218544 - DNA, 256 bp, Gossypium hirsutum
cccacgcgttcgcctacactttcgtccacgctttcgttcacacgttcgctcacgcgtacgggaggcttgttcttggcgttgcaccccttatagagcactttgattgatcttaaatggaaactggggctgaaaatggttgcaaatgtggagataactgcacttgcatcctttgtaattgtaaatgataaaaaaaagcttatcatattatggaagctgatctaaataatatatgatgtatttggggtattactattta

SEQ ID NO: 218545 - DNA, 406 bp, Gossypium hirsutum
cccacgcgtccgagcacaacaaataagaattttaatggggtttccagtaggtttctcagcggttctcttcccaaagccacttctccctacattaactctcctcctttaccttcgcgatttcatttccgctctcttcctttttctgggtttccctgatttcctcgaaccccacgttcccccgactcacacggcggacaccggcgttcccgccgcgcgccaccgagatacctcgatcaccgctctcctgttacgggaattactacccgtcgtcaagttctctgacctcgtggacccgccggacagttgcgccgtctgtttttacgacttcgaaagggaggatgagatcagatggctaacgaattgtcggcatgtattccaccggagctgtttggatcgttggatgggg

SEQ ID NO: 218546 - DNA, 408 bp, Gossypium hirsutum
cccacgcgtccgcccacgcgtccgcaaagatatcactataatgtggcagatgtgaggcttgctcaacatatcgagaaaggaagtgaagacgggttatttataagtagtgtggcttcttgttctaacctatgggctcttattatggatgctggcactggcttcactgctcaagtatatgaactctctccatactttcttcataaggaatggattatggagcagtgggagaagaattactacatcagtgcaattgcaggagctaataatgggagctctttagttgtaatgtctaaagggacccagtatttgcagcaatcctacaaagttagtgattcatttcccttcaaatggatcaacaaaaaatggaaggagggttttttatgtgactggcatggccactgctggaag

SEQ ID NO: 218547 - DNA, 432 bp, Gossypium hirsutum
gtttttcgtctgcagttcaaacgtgagcttatcttcaaagaagatggccaagaatacgcccaaggctcacgcatgttgggtaacggccgctgcgaagctatgtgcatcgacggcaccaagcgcctctgccacatccgggggaagatgcacaagaaggtctggatcgccgccggcgacatcatcctcgtcggccttagggattatcaagatgacaaggctgacgtcatcttgaaatacatgcccgatgaagctaggcttctcaaagcttatggtgagctacccgagaataccaggttgaatgaagggattgctggcggcattgatgaggaagatgatggtgcaggcgatgactacatcgagttcgaggatgaggacatcgataagattaaaattctcttcttctttttgtcatatttgaattattttaagaat

SEQ ID NO: 218548 - DNA, 435 bp, Gossypium hirsutum
ggtgaacctactgatagctatgaggctttcactgctagccttccagccgatgagtgtcgatacgctgtgtatgactttgattttgtgaccgatgagaactgccagaagagcagaatttttttcattgcctggtctcctgatacatcaaaagtaagaagcaagatgatctatgcgagctcaaaggacaggttcaaaagggaattggatggcatccaggtagagttgcaagctaccgatccttccgagatggatctcgatgtcataaggagccgtgccaattgaaatgtatgtaccatttcttcattgaaatggaactttatactatgtggttcacataaatgtaatgtctatatcaactttggatcttggaacttgctttgatattgggttatatctgtggattcttatggggtatgtgtgtgttccccctttggg

SEQ ID NO: 218549 - DNA, 414 bp, Gossypium hirsutum
cccacgcgtccgtgtgaacgatggaagaatcagggttaagaaggtttgtgagatgcaatagtggattagggaggaaaaggattgaaatatcaaacgagattgaggaattttcgcctattgattcaccaacaaaagttccgttattgaaaaggcattgcagtgagagaataaagaagatgatgatgattgatgattgtgatgaaaaatctgttcttgaatcacttcctcaagatgttcttgttaagataatttgtggtgtggatcatgaagatttgaagcaactctttaaggtttctaaatcaattagagaaattactgtaattgcaaagaagatgcattttgcttatagtacaccaaggaaggtcaaggcttttagaacctccattgatttggaggaacggagtgagttaaaag

SEQ ID NO: 218550 - DNA, 420 bp, Gossypium hirsutum
caaaatttcaacctatgggggtatattcgactctatgggaagctgatgattgggcaacaaggggaggacttgagaaaattgattggagcaaagcaccatttttggcttattacaaggattttgacattgaagggtgtccagttccagggccagcaaattgtgctagtaaccctaggaactggtgggaaggtactgcttatcaagctcttaatgccatggaagctaggagatacaggtgggttcggatgaaccacatgatctacgattactgcaccgacaagtctcggtacccggtcaccccaccggagtgcatggcaagtatatgaagtactatcaagagttcccattattccatatccaactgaactgtccagaatatttgatataccaatatgtttcttgtcatatatactttgatgt

SEQ ID NO: 218551 - DNA, 373 bp, Gossypium hirsutum
cccacgcgtccgcccacgcgtccggggctttgctgggatcccaaaacttgtgcatgtgcaaggcttaatggttctgattttccttatgtgcaccgtgatggtggcaggttaattgaagccaaacatgttgtttttgaatgtggtccaaaatgtggctgtgatccaagttgtgtaaatcgtacatctcagagaggattgaaatatcgacttgaggtcttccgtactccgaagaaaggatgggccgttagatcttgggattttatacctgctggtgcccctgtttgtgaatatattggagtgctcacgaggacagaagagctggataatgtctctgagaataattacatttttgacattgattgcttgcaaacta

SEQ ID NO: 218552 - DNA, 420 bp, Gossypium hirsutum
ctcgaatcaaaacttggccaggcgaatctcctgggatagtatcagatgtacattttgaggatattatcgtgaataatgtctcttcccctatcctaattgatcaaaaatattgcccatggagtaaatgcaagataaatgaagaatcgaaagttaaactaagcaacattagcttcaagaacatccgtggcacatctgcgcttccagaagctgtcaagtttatttgcagcggttcttcgccatgtcaaaatgtggaacttgcagacattgatattaagcacaccggacctgaacccgcaacatcccaatgtttgaatgtcaagcctaaaactagtggcaaattaaacccgactccatgttccagccctgtcccaaaaaccctaagtgccaccgcttaaaccataccaacagattcagtgcaat

SEQ ID NO: 218553 - DNA, 430 bp, Gossypium hirsutum
gtgaagtacggcaaaaaattcacagtacaaatccgtggaaatggcgaaattgaccaacaaaagcttcaagtgacgatttactcacctccgtttgtgacccatgggatctccatgaatcagagattgattcaattgggaattgtggaatttaacaaaaatgttacctcaaatacaaacaacattattcttcaagctcccatgaatggcaacattgcgccacctggttattacatgctcttcgtaaactacaatggggtgccttgccgccaatcgatgtgggttcaatttttgccatagatatttcactggaagcattgaatcgcaaagtcgttatatgaaattattatattctcttataaagaaaaattaatgaatcactttgttcacgttttgttgcacacattattcttttaaagatcatatacaatac

SEQ ID NO: 218554 - DNA, 418 bp, Gossypium hirsutum
ggaatcgactcttcatctggttctacgtcttcgaggtgggatgcagatcttcgtcaagactttgaccggtaagaccattactttagaagtggagagctcggatacgattgataacgtgaaagcgaagattcaggacaaagaaggaattccaccagatcagcaaaggttgatttttgctgggaaacagctggaagatggaaggactttggctgattacaatattcaaaaggagtccactcttcaccttgttcttcgtcttcgtggtgggttctaagccttaaggtcttccttaatgtgggttttctggttttacgtgaaggattgtgccctttgatggccttttaaataatttctagtctttgtttaccggttgcatctatgtatggtttctctttgaatggaaattgcatatttacct

SEQ ID NO: 218555 - DNA, 390 bp, Gossypium hirsutum
gtcgacttcttcgagaaatgcaagacagactcatcttactggaccaaaatctctgagggaggtgtgaaacgtatcgaagagaagtacacatggaaaatttactctgagagactattaaccttgaccggtgtctacgggttctggaagcatgtgtccaacctcgaccgcctcgagagccgtcgataccttgagatgttttacgctcttaagtaccgtaagctggccgaatcggtacctttggcagttgaagagtaaattgaagttgccggggaaagaattgggagggatttccgagttcttgagaataatctttgttgatttggcattttgatccaactcttttagtttctctgatcttttatgtgaatttgtctttgttcatgttttggg

SEQ ID NO: 218556 - DNA, 421 bp, Gossypium hirsutum
ctgtaatagacctaaaattgaagtggcgaaagcaagggatttccttgatgaaaacggatttgtttttgctgttcagaaaacaagtgggatggttaaagctttaacggagagatgggttcttgaaggaatggaaaagatgctctcatattgtttcgatgttcttaaagaagcatctgagtcaaagcttcaaattatatctgttgcagggtcgcctcgatttggtgtttatggaatagattttggatggggcaaaccccagaaggtggtagttgtttccattgataagagtggagctatttccatggcagaaagtagagatgggagcgggggggttgaaattggtttggctttaaataagcacgagatgaacaatttttcttggttgtttcctagatacgttaaacgggagggtttattttaa

SEQ ID NO: 218557 - DNA, 387 bp, Gossypium hirsutum
atgttgaatgaggatgagttgagggatgctgtgcttctagtatttgcaaacaagcaagatcttccaaatgctatgaatgctgctgagattaccgacaagcttggccttcattctctccgccagcgtcactggtatatccagagtacatgcgccacatctggtgaaggactgtacgagggactggactggctctcaaacaacattgcaaacaaggcatagatggcgtaattgacttgtcagtctcagaaaatgccagccccttttggaattattgatgtttctacgtccgttaaaatgttttggtttttcatgttcttttgtttcttgcaaactttgtcatttgttcttgtagtttaagaataattgataaaattttcgggttcaaaa

SEQ ID NO: 218558 - DNA, 342 bp, Gossypium hirsutum
  unsure (1)..(342): unsure at all n locations
tacttgaggacggccattcttggtcaatttaagaaacttgataagcaattttgtgtattgatggacactttccaagaactcgagcctgaaatcgttgaatacatgtccaagttttgccttataaagactgttggtccattgttcaagtaccccgaagtaccaaacaacacgatccgttgtgacatcatgaaacctgatgactgcatcgagtggctcgactcgaaaccggccgcgtcagtgatatatatctcgtttggtactggtctttacttgaaacaagaacaagtggatgaaatagctgaagcgctgntagccactggtatctcatacttgtgggtgatg

SEQ ID NO: 218559 - DNA, 406 bp, Gossypium hirsutum
gaagctgtgaaaatgtccaagcaagctggatggggtgtgatggccagccaccgcagtggtgaaacggaggatacttttattgctgatctttcagtcggtttggccacgggccaaattaagaccggagctccatgcaggtctgagcgtttagccaagtacaatcagcttctgcgaattgaggaggagcttggtgcggaagctgtctatgctggagccagcttccgtgctccagttgcaccctattaagatgcttgtttagatgataatttgctgagactggatgcgtgcggcagagcttcagtggtttattgtgaccctaaaacatgtttcaataattttgatagcaattttgtacttgttcagaattatatcaatctccgtgttatttttgttggactttgcctgc

SEQ ID NO: 218560 - DNA, 417 bp, Gossypium hirsutum
gatctgctaaggcctctgcgtgacctcaatgatggacctaacctttgcatatatcttgaatcgttttacaccttgcgcaagcctgtggcatccaccatcaatacattggctggcgccctgtacaaggtgttcagtgcttcacctgatcaagcaaggaaggaaatgcgccaagcttgcttcgattatctaagccttggtggtgtattctcaacaggaccaatctccttgctctctggtttgaatcctcgtcctttgagtttggtgatgcatttctttgcggtggcaatatatggtattggtcgtttactggttccattcccttcacccaaaagaatctggattggagctagattgatcacgggggcatcaggaatcatcttccctattatcaagtcagaaggagttaggcaaatgttt

SEQ ID NO: 218561 - DNA, 423 bp, Gossypium hirsutum
gacagatttgtggtggaaagcgatatcccgaagttggcataccttcaggcagttgtgaaagaagttttcagactgcaccccggcgttccgctcatcatccctcgtcgcaccaacgaggcatgcgaggtagctggctaccatatccccaagcactgcatcgtttacgtgaacgtttggggaatggcaagggatcctaatgtgtgggaagatccactggagttcaagccggagaggttcatagggtcaagcgtggatgtgaagggccaagactttaacctcttgccgtttgggacggggagaaggtcgtgcgtgggatggccactggctcatcgcatggtgcactattacttggctgctctgctccatgctttccagtgggagtcacctccagatgtcctgaatgatctgggggagagagtgggg

SEQ ID NO: 218562 - DNA, 410 bp, Gossypium hirsutum
tgttattgctcagctggttgccactttgatagctgtctatgcaaattggggttttgcaaggattaaaggaatggggtggggatgggccggtgtaatctggctttacagtgtggtgacatatatccctcttgatcttatcaaatttgcaatccgatacgttcttagcggcaaggcttgggataaccttttggacaacaagactgccttcactacaaagaaagattatgggaaagaggaaagagaagcacaatgggcagcggcgcagagaactctgcatggccttcaaccacctgaaacctcaaatcttttcaatgaaaagagtagttacagagaactttcagagattgcaaagcatgcgaagcgcagggctgaggttgcaaggcttgaggagctgaatacactgaaagggc

SEQ ID NO: 218563 - DNA, 418 bp, Gossypium hirsutum
cccacgcgtccggttgatgcatagggtctggtttttaatagtagaaatgaatgaagggttgacaggataactagtttgctcattgatttaacatccagtgattcatttgcctacttttcttagagggtgcaaaatgcaaacggactcctagtacaagggcctccatgaagctgggggtgtggtcacagatgctgcatggcagccattggatttttcaaagggaaagtatcttgatctggacacaggcatcattgtcaccaaccagaagttgatgccattactgtttaatgcagttagaaaatctatccaggagaaagcttcatctttgttgattcattttagaggcaggcttcatcctttcctcataacttgctctgttaagctggttgaaacttgattatttttgccttcaatgctt

SEQ ID NO: 218564 - DNA, 412 bp, Gossypium hirsutum
atggaacatgatctgaaagggctgatggagacaatgaaacaaccgtttagccaaagggaagttaaatgcctgatgcttcagctgctggagggtgtcacgtatcttcatgataactgggttctccatcgggacttgaagacatctaatcttcttttaaataaccaaggtgaactgaagatttgtgattttgggttggctcgtcaatatggaagcccattaaaaccatatactcatttggttgttactctttggtacagggcccctgagcttcttttgggagcaagacaatattccactgcaattgacatgtggtctttgggttgtattatggctgaactactatcaaacgaaccactttgcaatgggaaaactgaatttgatcaacttgacaagattttcagaactcttggca

SEQ ID NO: 218565 - DNA, 426 bp, Gossypium hirsutum
cgaacgccaattcggagttgccagtccggaaatgtttacattgtgcggcggaaaagacgccgcaatggaggactgggccgttgggtccgaaaacattgtgtaatgcatgtggggtgaggtacaagtcgggccgattggtgccggaataccgtcccgcagcgagtccgacatttgtttcggcgaagcattcgaattctcataggaaagttttggagcttaggagacaaaaggagttccaaagagcacagcatcaacagctgatgagtcaaacttcggttttcggcatatccaacggtggttgtcctgatgatttcttgatccaccatcatggtgggcccaattttagccacatgatttagcaatatataatctttttttttttaaaggtagttcttttcctaaaatttgatcttaaaagaaaagaaa

SEQ ID NO: 218566 - DNA, 388 bp, Gossypium hirsutum
cttagattgcaagcggagcggctagacgatacgagctaacctacccgtccctgccatgcgatagcttttctattgtgtcacgtaacctaaattcaatggactggccgttacaacacaacgactggactgacaaaaccgtgacccaacttaattgaattgcattacatcacattttcgtctggtggggtgatatcatagaggacaggaccgaacggattgcccaacagaagagcagcccaaacggaatatggaacgcgacccgcactgtagcattacattcagcgcgtgtggtggggacgctccgcgcaacctgtacacttgactgggcagtagcgtacggtccgttcgctttgtttccttcctttcttgtcacgttacgtgggtttgc

SEQ ID NO: 218567 - DNA, 364 bp, Gossypium hirsutum
cccacgcgtccgcttattccgtgaatcggaggcggggcacggcccctctttttggacccaaggccggcttcggccggccgatccgggcggaagacattgtcaggtggggagtttggccgggtgctggctcaagtatgtagtttttatattattcagtaatagttcaaagtggttaaattttgggtatttagaacttgcagaaaatatggtatcaccatgattctcttttactatcatttgagggaatcatgaattttggacattcactttattaaggttgcagcaatttatatatgtatttatatatacactgaagccggcaggatgaactgctcaataataaatatgatctgtgtcttatttt

SEQ ID NO: 218568 - DNA, 395 bp, Gossypium hirsutum
  unsure (1)..(395): unsure at all n locations
aaagaagcaagttactggatcgagttgtgtcagttgaatatgctttaagggatgatgatgagagggatggtagatacgatagtcccagaagaggaggtaatggcagacatggggatagtccatatcggaggtctccaagccctgcatatcgaaggcgaccaattcctgattatggtagggctcggagtcctgtttatgatcgctataacggtcctgcttatgacaggcacaagagtcccgaatatgggagatatcgcagcagccgatcccctgttcgaaggtcccagacatgaatggcggtcggaatgattgagaagaatatgttaaaaacatgcacttattagagtttgcagtttgagtagaaagntgagtagcatttttcttgattgaactct

SEQ ID NO: 218569 - DNA, 330 bp, Gossypium hirsutum
cggcccggattccggttcgaccaacccttccggtggaaggcctttaacaccactatttaaaggacaggttgaaaaggaaaagggtggaataaagactgatgccttttttcaaaccaaggggttctaaatgtatatgctgtgggtgatctaaccccttttcctctgaagttatacaatgaactgaaaaaggtggaacacgttgaccatgcccggaaatcagctgaacaagcagttaaagctatcaaagcaagtgaagaagggaaatcagttgacgaatatgactacctaccgtacttctattcacgttccttcgatctatcatggcaattc

SEQ ID NO: 218570 - DNA, 422 bp, Gossypium hirsutum
gactactggtttctggccaagttacaagtcttttgatctcaaccttcctgctgagatgattaagtgtgttgaagttttcagggacttctatcagacaaaaacgaaacacaggaaacttacttggatatattctttgggtacttgtaaccttattgggaagtttgaaccaaaaacagtggagttgattgtcacgacatatcaggcttctgccttactgctattcaattcctccgatagactgagctattcggagatcatgatacagttgaacttaactgatgatgacgttgttagacttttgcactcgttgtcatgtgctaaatataaaattctgaacaaggaaccaagcacaaaaaccatctcctccactgatcagttcgagttcaactccaagtttaccgataaaatgaggaggatcaaga

SEQ ID NO: 218571 - DNA, 411 bp, Gossypium hirsutum
gccaagttacaagtcttatagatctcaaccttactgctgaagatgattaagtgtgttgaagtggtcagggacttctatcagccaataaacgaaacacaggaaacttacttggatatattctttgggtacttgtaaccttattgggaagtttgaaccaaaaacagtggagttgattgtcacgacatatcaggcttctgccttactgctattcaattcctccgatagactgagctattcggagatcatgatacagctgaacttaactgatgatgacgttgttagacttttgcactcgttgtcatgtgctaaatataaaattctgaacaaggaaccaagcacaaaaaccatctcctccactgatcagttcgagttcaactccaagtttaccgataaaatgaggaggatcaagat

SEQ ID NO: 218572 - DNA, 419 bp, Gossypium hirsutum
aaaagacagtatttgtttggacgtgtcagcatgaagatcaagcttatccccggtgactcggccggaaccgtcaccgccttttacatgaattctgatacggacactgtaagagacgagctagatttcgagttcttgggaaaccgaactgggcaaccatacacggtccaaaccaacatatatgctcatggtaaaggtgatagagaacaaagggttaacctctggtttgatccagctgctgatttccatacatacacaattatgtggaaccatcatcatattgtgttttatgtagatgaagtgccaataagagtatacaagaacaatgaagcaaaaaacatcccatacccaaaatttcaacctatgggggtatattcgactctatgggaagctgatgattgggcaacaaggggaggacttga

SEQ ID NO: 218573 - DNA, 417 bp, Gossypium hirsutum
ctttcattgtctttgacaaatccacctccactttgtttgtggcttctgatcaatttggtaaggttgctctctattggggaatcaccgccgacggatatgtggcctttgctgataatgctgaattgctgaaaggtgcctgtggcaaatctcttgcttcttttcctcaaggctgtttctactccacagcagtaggaggattaagaagctatgagaatcctaagaacaagatcactgcagtgcctgctgaagaagaggagatatggggtgctaaattcaaggtggaagggccaacagttgttgctgccacagagtagtcctttgctttctccttctaaatctatggatccatgggaatataggagctgcaaatgcatagcatatggatcagtctccatgtgaataactgagttccagtac

SEQ ID NO: 218574 - DNA, 421 bp, Gossypium hirsutum
gatagatgcaagttccatcaccccattgatcggttaacaaccaacgaagcttctcaggaagctattaagctcactcttgctggattacctagaagagagggatctgttcattgtccgtactacatgaaaactggaacatgcaagtatggtgcaacatgcaaatttgatcacccgccccctggggaggtcatgtctgtgactggagtacaaggaacatccacaacaatgtcgggatgaggaacatgatatgaaaactcagctatgggaagctactttgtgatgacgatttatacgggtttatagggctttctgtatcaaggtctgttagcatgatgcctagagtggatgggcaatatgaatgtacctagagtggaccatgtgaatttaatgtatttgtcaattaatttttgagaacacaatg

SEQ ID NO: 218575 - DNA, 412 bp, Gossypium hirsutum
aacgaagagagtcagaagccatataaacacaagggaaaaaaaacttggtttgttctgattatattttaagtttaaacatcagttttattgttaatattttctattatctaattaagtatttatgtttttaggagcttgacaatagaagtgttcaatatgatgaggaatatatcttgaattctcgaggtttaaagctatttacatgcaaatggattccagtgaatgaagaacccaaaggtttaatcttcatctgccatggttatgccctggagtgcagcatcaccatgagctctacagcaaatcggttggtgaaagcaggatttgcagtttatggaatagattatgaagggcatgggaagtcatctggtttgcaaggctatatctcaagttttaacaatgttgttgatgattg

SEQ ID NO: 218576 - DNA, 409 bp, Gossypium hirsutum
ccaaactttgctctcctaaacaatgccggaggctggtgcaaccctccactccagcactttgatatggctcaacctgcctgggaaaagatcggtatctacagaggcggaattgtgcccgttttgttccagagggttccatgcaataagcctggtggagtaaggttcactatcaatgggagagactatttcgagcttgttttgattagcaatgtgggtggagcaggatcgatccagtctgtgtccatcaagggctctaaaactgggtggatggcaatgtcgaggaactggggagctaactggcaatccaatgcctatctcaatggtcaatcattgtctttcaaagtcaccactactgatggagttactcgacagttccttgacgttgtgccatcagactggggtttcggca

SEQ ID NO: 218577 - DNA, 420 bp, Gossypium hirsutum
caagaccttgagttgggaaaatcaccaaatgcagatgtctgtacacgattggggtatgaagaaaccagcatttctgagatcggaaagtgttttcttcaatatacaatcagagtggcagataagacagagtgtaatgaagtcgaagagatgcttaagagccaaatggttctatgtctaagcagcctaggctactgtcttaatgatttgaagagagaagccacagaaacagagaaagaaatagccgaactactgaaatgggagaatccaacaaggcatgtaaattttcctgaactgttatccaagcttcatgccacatgataaaaatacaaactcacacgaaacctgtcaaattgcaagctatacgaagaagcctcaacggtgacccagctattggcaacctctggttcaatttcatttttc

SEQ ID NO: 218578 - DNA, 271 bp, Gossypium hirsutum
accaaacttttatggaatgtttttatttattttgccgcatgttcaagccttatttgcaagccgtttataagcgaattgattacctcattactctatactatcttgagagggacaaagataaccccaatacattccggtatttggcatgataacctattcataatcccgcaatgaatcggtgactggttccgctgcaaataactcgtatctgcttgatatgatctgttctttactaaagtttcatacacataaaaatatgctacttatattc

SEQ ID NO: 218579 - DNA, 381 bp, Gossypium hirsutum
  unsure (1)..(381): unsure at all n locations
cccacgcgtccgggaaaagcttgttgatacaaatggtgcaggtgatgcctttgttggaggctttctttcacaattggttcaagggaagtccattgaggattgcgtaagggctggttgctatgcatccaacgttatcatccaaaggtctggatgcacatacccagaaaagcctgaatttaaataaagctattccactttcctgatctcctctccactgttgttttcaagtttctgattgttaagaaccctcttgctaattgaattttgtttttatttttcctatttgccggtgtcatttcgatgcctgcatcttgaaatggcatatgagaataacattttatgtttattcnaaanaaaaaaaaacctaaaaagaaccaaaaa

SEQ ID NO: 218580 - DNA, 419 bp, Gossypium hirsutum
  unsure (1)..(419): unsure at all n locations
cccacgcgtccgcaggcctgtcatccctgagaagtaccttgatgagaagacaatcttccaccttaacccatctggccgctttgtaatcggtggtcctcatggtgatgcaggtctcaccggacgtaagatcattattgacacttatggtggctggggagcccatggtggtggtgctttctccggaaaggacccaaccaaggtggacaggagtggtgcttacattgttaggcaggctgccaagagcattgtagcaaacggacttgcccgcagatgcatcgtacaagtctcctatgctattggtgtgcctgagcccttatctgtctttgtggacagttacggaaccggaaagattcctgacanggaaatactccaaattgtgaaggagaacttcgactttaggcctggtatgatcaccatca

SEQ ID NO: 218581 - DNA, 414 bp, Gossypium hirsutum
ggttatgaagatctcgacagaagatcacatgccaggatggataccgggcaacctgaacaagggtcacctagactggttttacttcctcttagctggactaacgacaattgacttgattgtctacatagcatgcgcccgatggtacaagagtatcaagctggaaggaaaaactgcagaaaatattgatgaccaagttagctttaagctataatatatacatatcggtgctaaaacatataaataacggtatagattaatagaataatgaggaaactgggttagagggttggtacccaacatgatgatgttgagaaattaaagatttaagtcgaaagaaaagtggggtatcgtgagagagaagtcaattttcctctcaactctcttgaattcccatcacttgaattgtcctatctg

SEQ ID NO: 218582 - DNA, 317 bp, Gossypium hirsutum
caattcgcttattctcaccataaagagtctcctttacggcccagatcatttgctgtgaaagatgaaatcttctgcttgtttgagggagcccttgataacttggggagtttaaagcagcaatatggtctggcaaagtcggcaaatgaagtgattttggtcattgaagcttacaaggcccttcgtgaccgagcaccttatcctccaaaccatgtggttggccatctaattgggagctttgctttcattgtctttgacaaatccacctccactttgtttgtggcttctgatcaatttggtaaggttcctctctattgggg

SEQ ID NO: 218583 - DNA, 420 bp, Gossypium hirsutum
ggcccattcaatcccaacaaaagcttgtcaatcacaatttttcctccttcactttcactctcaagtcccacaactttcttaacccaaaaacacccactttttcacatccatataaattacttcatttccctacccataactcatggattgcttggtattgcctgtttgcttattgggaaagcgcagcatgggatcacggctaggctaccggcgtctaacgcgcgagttggagccacaagtgagggtggtggtagggaaagagaaacgagaattttgggtggaccctttggtgttagaagagagtccgttccgggttttgatggaaacattgaagaaagggaatggcagccatgcaacaagggagaagaaaaagaaagtgatattcgtggacgtggatgctatcttgtttgagcacatgct

SEQ ID NO: 218584 - DNA, 242 bp, Gossypium hirsutum
aggcaagaggttttgcatgcctaattcgagagtgatgattcatcaaccacttggaactgctggaggcaaagcaacagagatgagcatacggataagggaaatggtgtaccataaggttaagttgaacaagattttatcaagagttacaggaaagcccgaagaacagatcgaagtagatacagaccgggataatttcatgaatccttgggaagccaaggaatatggtctaatcgacggagtta

SEQ ID NO: 218585 - DNA, 343 bp, Gossypium hirsutum
gattgaagggaggggctttcataccaatttatatgctgtacgtggcacttattttggaggaaaagaaggaaaaagtaaaattcagtggcttagatcaatggttggtagtcctgatcttatctccataccaggtgaaacagggaggatgtatgaagcaaatgttgatgatgtggggtacaggttggttgctatttatactccggtcagggaggatggcattgagggacaacctgtttctgcatcaactgagccaattgcagtcgagcatgatgtttataaagaagtaaaacagaagcttgatattggatctgtaaaagttgaggtattatgtgacaaggatcgc

SEQ ID NO: 218586 - DNA, 362 bp, Gossypium hirsutum
ctactcctagctttggtgatttgaaccatctaatctctgcaaccatgagcggtgtgacatgctgccttaggttccctggccagctcaactctgacctccggaaacttgctgtcaacctcattcctttccctcggctccacttttttatggttggatttgctcctctcacctcacggggatcacagcagtatcgttctttaaccgtcccagaactcactcagcagatgtgggatgctaagaacatgatgtgtgctgcagaccctcgacatggttgttacctcacagcctcagccatgttcaggggtaagatgagcaccaaagaggttgatgagcaaatgattaacgttcaaaacaagaactca

SEQ ID NO: 218587 - DNA, 363 bp, Gossypium hirsutum
gcaaatcatcggctaaagtctgaaatgagggctgagatggatcgctttgctcgggaaaagaaggaactttctgaacaaatacaggaggttgagagtcaacttgagtggcttcgtttagagagagatgatgaaattgcaaaactagctaatgagaaaaaagcacttcaggatcgtcttcatgatgcagaagctcagctctctcagttaaagtctcggaaacgagatgagttgaagagggtagtaaaggagaagaatgctcttgctgaaagattggagagtgctgaagctgagcggaaaagatttgatgaagaactgaaacggtatgccacagaaaatgtgactcgagaagaaattcgtagtcac

SEQ ID NO: 218588 - DNA, 378 bp, Gossypium hirsutum
ataccgtggtgtacgaatgcggagttggggcaaatgggtgtccgaagtccgacaaccaaaaaagaaattgagaatatggctcgggacttaccccactgcagaaatggcagctcgagcccacgatgtagccgcactagccatcaaaggctgctcggctcaccttaacttccccgaacttgcaaaaacacttccacgccccgctagtacatctcctaaggaaatccaagccgctgcttcccaagcagctgcttcaacatatctcgacacatcgcggtggagcaacaacattgaacccgaagacaaagtcagtcgtcgaccgaggcaagaacaagttccggtttcacgttcggacaatatgtgtagtacttcaccctttga

SEQ ID NO: 218589 - DNA, 328 bp, Gossypium hirsutum
  unsure (1)..(328): unsure at all n locations
agttttcactggtgcccctggcaagtatgtggagttgaaggagagcatcaccagcttccagggagtgttggatggaacgtatgatgacctgccagagcagtcattttacatggttggaggtattgaggaagtgattgccaaggcagataagattgccaaggagtctgcagcttaattaatttcaatgttgatgcctttgtttactccccgataatgttgaaaataattaggcggtgttggcgttgccaataacaacaggactgttcattttttgggatatttttcctattcaagttttaatgattntattcaggagtgagaaagaggg

SEQ ID NO: 218590 - DNA, 350 bp, Gossypium hirsutum
aaacccctagccagccacttccccgccgccgctccgaaccatgggccgagtccgcaccaagacggtaaagaaatcctctcgccaagtgattgagaggtactactctcgcatgacccttgatttccacaccaacaagaagatcatcgaagaagtggctatcatcccttccaagcgtctccgcaacaagatcgccggcttttccacccatctcatgaagcggatccagaagggtcccgttcgtggcatctctttgaagctccaagaagaagagcgtgagcgtcgcatggatttcgttcccgacgaatccgccatcaaagttgatcaaatcgaagtcgataaaggaaactctc

SEQ ID NO: 218591 - DNA, 425 bp, Gossypium hirsutum
  unsure (1)..(425): unsure at all n locations
ctttttcggccccataaactccgcagtcggtgctcttttggtcagcttcaccgtctacatcatcccagctttagcccatatgctcacctacagaaaagcctctgctcgacagaatgcagcagaaaagcctccgttcttcatgccaagctggactgcaatgtatgccttcaatgccttcatagtggtgtgggttttggtggttggatttgggttcggtggatgggctagcatgaccaatttcatcaggcaaatcgacactttcggcttgttcgctaagtgctatcaatgcaagccacctccaccaaccggagcagcagcagctgctgcaaaccaccactgagtngactcgacccaaaaacttatatagcaagaaacaaaaaccaaagaaagaaacantntgaattccctggtttccttccatatct

SEQ ID NO: 218592 - DNA, 421 bp, Gossypium hirsutum
ccgggccggtttagccaatctctaccaggaacgttccatgttgacctttgaaggtcaaaagatccaaggctctcagagcattgtcgctaagctaaccagccttcctttccagcagtgcaagcacaatattaccaccgtcgattgccagccatctggcgctggcggcgtcctcgtattcgtctctggaacactacaacttgccggcgaacaacatgctctcaagtttagccagatgtttcatttgatgccaacaccacaaggaagcttttatgtgttgaatgacatattcaggttaaactacgcgtgaagaaacagaaatcactacaattaatcaagtgatgggaatacaaatctcaaggatttataaatctggttatcttttagacattttaaatgaaaaatggaaatattttttggttta

SEQ ID NO: 218593 - DNA, 375 bp, Gossypium hirsutum
gggatatgatgcccttgcaagcacaccacgaggtgaaatttgtctcaagggaacaacattgttctcagggtacttcaaacgtgaagacctcaccaaggaggtcatgattgatgggtggtttcacacaggggatattggtgagtggcaaccaaatggaagtatgaaagttattgatcgaaagaagaacatctttaagctttcacaaggtgaatatgttgctgtcgagaacctggagaatgtttatggttgtgtttctgatattgaatcgatatgggtttatgggaacagctttgagtcctaccttgttgcggttgttaacccaaataagcaagcacttgaacgctgggctgctgacaatggtgtaagtggtgactt

SEQ ID NO: 218594 - DNA, 427 bp, Gossypium hirsutum
cccacgcgtccggtgatcctaacacccgcctacctaacggtcgatttcttcccccactgttcaactttaagcctcacgaactgaagggagttcctacggatatgttaccgaagctgatcccggaacatgcaaaaaagcaatgttccttcattggattataatggaataatataattcctttctgcttaaatctttgatgtctgctccttgcagaaatcatgggctattgttgaaaaaaagtagttagtaagcctgtttcagttatatgataaagaagccttgttaatgtttatttgttccctttattaatatttttttctatcaatatttatgttctttttctttctctttttttcttctcccttttgtagaaaaaacaaaacttgagtatctgcccttaaagaccttaatgagtaatgttgaccct

SEQ ID NO: 218595 - DNA, 242 bp, Gossypium hirsutum
gacggatctagcaccaacgcacccgatcaggctgggacttgcgctaaattactcggtgttctactatgagattctgaatcagtccgataaggcttgtagcatggctaaacaggcgtttgaggaagccattgctgagcttgacacgctgggagaagagtcttacaaggacagcactcttattatgcaactcctaagggataaccttactctctggacttcggatgttcaggaccagttacacg

SEQ ID NO: 218596 - DNA, 298 bp, Gossypium hirsutum
atcgaacgtcgcaagtaagagcaggcgatccattagaggaagttcaaaaaacttaattaatggcgaacagagttcaaacccccactagcaactcagctcttattgcaatgattgccgacgaggacacggtggttggttttctaatggctggtgtgggtaatgttgacttgcgaaggaagacaaattatcttattgtagattcaaaaaccactgttaaacaaattgaagatacgtttaaagagttcactacacgggaggatattgctgtcgttctgattagccaatatgttgcaaatat

SEQ ID NO: 218597 - DNA, 417 bp, Gossypium hirsutum
gcagaagcggcttgccgctagcgtcctcaagtgcggtcgcggcaaggtctggctcgatcctaatgaaatcaacgaaatctccatggccaactccaggcagaacgttaggaaacttgtgaaggatgggttcatcatcaggaagcctactaagattcactcccgctctcgcgcacgtaggatgaaggaggccaagagaaagggaagacactctggatatggtaagaggaagggtaccagggaggcaaggttgccaacaaagattctttggatgaagagaatgcgggtactgaggcgattgcttcgtaagtacaaggagtccaagaagattgacaagcacatttaccatgacatgtatatgaaggtccagggtaatgtgtttaagaacaagcgtgtcttgatggagagtatccacaaatc

SEQ ID NO: 218598 - DNA, 426 bp, Gossypium hirsutum
cccacgcgtccgcccacgcgtccgagtagacgcttagaaggtttcttgttgcctaaaacaccttcgcttcctcttataaattatattaaacctataaatttctttgcttgaaatcgacccttttctcttgatctatcaatcaattaaggtttttgtttttagttgaaaccctaatttgtcaaagcctcctccttgtttcttgtcggcggataatcagggatcgagtcttgcaatggcgaaaagttcctttaagcttgagcatccattggaaaggaggcaagatgaagctgctcgcatcagggctaaatatccagacagagttcctgttattgttgagaaagctgaaaggagtgacattccggatatcgataaaaagaagtatcttgttcctgctgatttgactgtgggtcaatttgtttatgttgt

SEQ ID NO: 218599 - DNA, 312 bp, Gossypium hirsutum
ggcttatagagcttataatcctcatatgactacttactattatgttcaaagcatggaagagaaccctaatgcttgtgttatttgttgatggaaattggtgatggggaattgagaatgtcatcaatggagaatatataggaggttctaaaaaaaaggaaaaagaaacacaaagaagattataaaaatcctttgtatatatagatggtgaaatgcctctttttactcctttttggttttttgattatgtataagtaatgttgtttgtgtaggggagtagattgaataaaaatcaaattttgggaatttgttttg

SEQ ID NO: 218600 - DNA, 294 bp, Gossypium hirsutum
gatcagtatttttaacgaatggaaggcaacattcttgcctatgttgacagccggatggaaactttggccatttgctcatcttatcacttacggttttattccggtagaacaaaggcttctttgggtggactgcgtagaacttatttgggtgacgattctctcaacttattcgaatgaaaaatcggaagcaagaatcttcgaggcagcaccagcagaagcaagttcaattttgccacccgttggtccacccgaggagtaaataatgagatttaggatatctgggatttgagacat

SEQ ID NO: 218601 - DNA, 422 bp, Gossypium hirsutum
  unsure (1)..(422): unsure at all n locations
ggccaggtaagtggatgctgaatcaaaagccttgggtctattcactcgttttgctgcaatgtgttcgatataacttctcagagcactctgcgcggtttttattgaaatgtagataagggagatagactggaaatatgtagttgcagtgtttgatggcaaaagcttggcatttttttataatatattttctgtcgtgcatggcgtaatgtccaaagcaagttcagtgtgtgacacttatttatcccctttgttacctttatcagcctggtcttcgctcaatttgggagaaatactatgaagaggcacatgctgtggtattcgtaattgatgctgcttgcccttcacgttntgaagattcaaaatctgcacttgagaaagttcttagacatgaggatctttanggggcccctctcttgatatta

SEQ ID NO: 218602 - DNA, 354 bp, Gossypium hirsutum
  unsure (1)..(354): unsure at all n locations
gcagaagcggcttgccgctagcgtcctcaagtgcggtcgcggcaaggtctggctcgatcctaatgaaatcaacgaaatctccatggccaactccaggcagaacgttaggaaacttgtgaaggatgggttcatcatcaggaagcctactaagattcactcccgctctcgcgcacgtaggatgaaggaggccaagagaaagggaagacactctggatatggtaagaggaagggtaccagggaggcaaggttgccaacaaagattctttggatgaggagaatgcgggtactgaggcgattgcttcgtangtacagggagtccaagaagatngacangcacatttaccatgacatgta

SEQ ID NO: 218603 - DNA, 247 bp, Gossypium hirsutum
attataatcactatgcaaatggtagtgggtggtgggactgtgtcatggaaggcgtggacagcgaggaagttggctatggcgaagtatgggaaggggtgggctccacaacctttggtggaatagtagactggcattgatactagtccctgttgcagtaagtctaactaactatgctactgcttgaatatgtcatcaaaggttctaattttggttattatgaatagaatctaaatccttgttttctgtc

SEQ ID NO: 218604 - DNA, 413 bp, Gossypium hirsutum
tcggaactaggaaagaccgaggattcacatttacggggccggtgaacctacatgctggagcaaatcatatcgcacttgtcagcgtagctgttggattaccgaatgttggactgcatttcgagacatggaaaacgggaatcgtaggtgtttactcgaatggccttgacaaaggaaagaaagatttgtcgtcacataaatggtcgtaccaggttggtttaaaaggagaagcaatgtatttggcctcaccagaaggagtctcatccgttgaatggatccaaggttcactggccacacagagtcgccagtcaatgacctggtacaaggcatatttcgatgcaccaacaagtaacgaaccggtggctttggatatgcggagtatgggaaaaggccaagtttggatcaacgggcaaagc

SEQ ID NO: 218605 - DNA, 430 bp, Gossypium hirsutum
ccatttgcacaatttcttatgcagcctcagtacacctggtctcagatccctaacaaatatacatcaaaaactaaggcatcaatagccgatattgaggtgacattgattgaaactcatgctaatcttcgaattcttttgcgaaaaggtcccactcagctttccaagcttgttgctggttttcaatcacttttcctttccatcctccacctcaatgtcacaaccctggatccatttgttctctactctatcagtgccaaggttgacgaaggatgccagctcagttccgtagatgacatagcaagggcagttcaccacatgatcagaataattgagcaagatgccactgccttatgttgatctattcatatcaccaatatgccacccacttttttttctttttttttggggttctggatttcttcctttttac

SEQ ID NO: 218606 - DNA, 404 bp, Gossypium hirsutum
  unsure (1)..(404): unsure at all n locations
gtttccggattggagatgttcatcgggcaggcctacgaacagtttgagcgattcactggtttgccagcaccgaaggagcagttccggagaactatgtcaaagtactaacaacgttgacacaacgactcgtttgtctgcagcaaattgctggtttgtttttactattcatttgatgagaagggcaatgaaacaacaatttgtttaggaagtacttgaagtgtttttgaataattccaggttttgtttcatatgaactntattttctttatttcctatgatctgtgagtatgtacgatagaccggaaaattcatatattcctattcgtgtaaattgctttgtagtaatcgtgtttatgacataaatttttacatattaataatattcgtgttatattaattttgag

SEQ ID NO: 218607 - DNA, 424 bp, Gossypium hirsutum
acggccacgcgttcggatggatcctcgtggttatcatctgtctattcgcctaaacttatggaaggtcttgaggtcctctgaggtggctagttcctagtgagctgttcccgttcgacactaggtcagctggccaaagcatggaggtctgtgtcaaccttctcttcacagctttgatagcacaatgcttcttggtctcactttgtcatctcaagtatggaattttcttgctttttgctggctcgatattcataatgagcagctttattttcttcctcttgccggaaacaaagagagttccgatcgaggaagtctatcttctctggaaggatcattggttctggaagaaatatgttgaagatgatgacgagaaggatatcaaaaagccaaccacgtcatattatctaaaatacgaaaaacctttggt

SEQ ID NO: 218608 - DNA, 442 bp, Gossypium hirsutum
gcgtccaccccgtcacgagacttattcttattatggtcctcttaatcttttgacatggagtgttggctatcacaatgaacatcatgatttccctaggatccctgggtataagttacataaggtgaaagaaatcgcacccgagtattacaaaggcttggaatcgtataaatcatggagccaagttatttacatgtatatcatggatcaaaccgtcggaccatttagccgaatgaagaggaagatctcgaaaaaatccgaataggtgatgagttttttccccctacccatttgggatctttctgttttctggtttgcctttctgtgtttcagtatggggtttacttgcattttaaggctcaaatatgttattcgtttcccaacattgttgaagtattaagattctattatgtagtttttaaaaaaaaaaaaaaaaaaggcggtc

SEQ ID NO: 218609 - DNA, 260 bp, Gossypium hirsutum
cccacgcgtccggttggttccttgtggttatcatctgtttattcgtcttcgcttatggaaggtcttggggtcctctggggtggctagttcctagtgagctgctcccgttggagactaggtcagctggccaaagcatggtggtctgtgtcaaccttctcttacagctctgatagcacaatgcttcttgggctcactttgtcatctcaagtatggacttttctcgctttttgctggctcgatattcataatgagcagcttta

SEQ ID NO: 218610 - DNA, 417 bp, Gossypium hirsutum
cgagacagtgctggcatcttctggtgatgataggagattgatgatttgggaccttaacaggattggagaagagcaattagaaattgaattagatgccgatgatggccctcccgaacttctcttttctcatggaggccataaagctaagatttcagatttctcgtggaacaaaaatgagccatgggttatttctagtgtagctgaagacaacacacttcaggtgtggcaattggcagagagtatatatcgagacgaggatgacactcaaactgccgaagaccatccataggccatagaagttggatttagagttttaaagatatgacctttttaaagtagatcattgtgagtttataataatgttttgtatgtgaacagctttaagagtcttttaacatgtaacttaatatttaaacc

SEQ ID NO: 218611 - DNA, 276 bp, Gossypium hirsutum
gacccaccagctcattctaacggatcagttatcaaagcagtggtagacgccgtggatgagctgaacctaacgtataagtatatgatcagcagagcttaccatgactcactgtttatggcaaggatagctccaatgggcatgatatttattccatgttacaaaggatatagtcataagccagaagaatatgcgtcacctcaggatttagaaaatggggtgaaggtattagcgctaaccttggccaagttgtctttgcgttgatgtgttggtggatat

SEQ ID NO: 218612 - DNA, 75 bp, Gossypium hirsutum
  unsure (1)..(75): unsure at all n locations
cccacgcgtccgcccacgcgtccgcccacgcgtccgtgttgaggtatttatgcattaatagaatatttttatntt

SEQ ID NO: 218613 - DNA, 394 bp, Gossypium hirsutum
cgatttgcatctaattgtatcagtaattatattatagatcttcattgttgatgtgcgggttttactatgcagtgaacaaaattggattcaatttaaaaaataataataataaaaattgatcttcgagttaattgaatcaagttattcgatttttcaagacaacttgcattctcgaataagtaattcgagtttcgagtttcgtgtttaagtcgagttaaattttacaatataaataacttaaataattcgaataacatattggtgtaaataaccttttagtccttgtcaattttgaaaatgagcaaattggtctctttcaacaaaaattaaaaaaaatcaaaataatttttaaaatttcaaaatatttataaaaattccaaaatttatatttttc

SEQ ID NO: 218614 - DNA, 434 bp, Gossypium hirsutum
aacaatcgcaccattggcaattggtttcatcgtgggggccaacattttggcaggaggtgccttcgatggagcctcaatgaacccagctgtttcattcggaccagccttggttagctggacatgggacaaccactggatctactgggtcggaccccttatcggtggtgggctcgctggtctcatctacgagttcatcttcatcagcaacacccacgagcagctcccaaccaccgattattaagcctaatcagggtttaattgatttgtctgtcactttgaaaccggattttctccgatcacatttgagtctcctatctctttccttgtattttgtgtttaatttgtggccgtcgatcttgtttacttttttgttttttttcattcccatcctctatcatgatcatcatgaatggcagatgtttacaattgcatgc

SEQ ID NO: 218615 - DNA, 424 bp, Gossypium hirsutum
cggctacctaagaaccggacacgtctttggttaggcactttcgatacagccgaggaagcagccttggcttatgataaagcagcctataaacttaggggtgattttgcgagactcaacttccctaaccttcgtcaccaaggttcccatatcggtggcgacttcggtgaatacaagcctttgcattcctctgttgatgctaagcttcaagctatctgtgaaagtttggaactcaaccaaaagcaagggaataacaacaagaagaagaaatcatcgaaggagaacaaagtccaattggctgagcctgaggaaaagacagtgaaggtggagaactccccctcatctttatctccggttctgtcggagaatgaggggtcgacagaatcttcacctttgtcggatcttaccttctcggacttcaacgagc

SEQ ID NO: 218616 - DNA, 412 bp, Gossypium hirsutum
accaagcaattccacaactccaaaatcaagttcccattggtgttcaagaaggtaaggccgcctaccaggaagctgaagaccacttacaaggcatcaaagcctaacttgtttatgtaagttctctcattgcaatgaaaagagagttgatgtggtttatagttctaaaatttttggtagtgaacatctggcagtttgttgattgggtattgcttttcatttgagaagccgaggccacatctgactggttgaagttgaattttctttaatttactatcacattttgtttacttcgaaaaaaaaaaataaaaaaaaaaaaataaaagaagagaaattcaactaaaatttatattcggaacttccataaaaatgaagagaattcagaaactttaccctttgaaggaaaatacctttt

SEQ ID NO: 218617 - DNA, 406 bp, Gossypium hirsutum
aaatccccctctatattctctctctctctccttctctgcctaaacccaaattattaaaacagtggtcgtctgcaaccgacagggatgtccaccgcagttccacccgttatccctgtctcctccgtgcaatccgtcgaatcccaaccgcccgctgccagccccgcctttctctctttcgtttcccgtctcaatgaatcccttcgcaacggcctctcccagcgccgtccttgggctgagctcgttgaccgttccgccttctccaagcccgagtcattctctgatgctctcgttcgcgttcgcaagaactactcgtatttccgagtcaattacctgtctgtgatcggtctcatccttgccttttcccttctttcccatacgttttcccttctccttctgctcggactcc

SEQ ID NO: 218618 - DNA, 371 bp, Gossypium hirsutum
cccacgcgtccgcaaacatgttgaaattcgcagaagcatgcgaaatacctgccgctcgcatgacaaagaaggaagatctgagagaagcgatttgtaaaatgctggaaacacctggaccttatttcttagatgtaatcatcccgcatcaagaacatgtcttgcctataatccccagagaaggggctttcaaagatgtgattactgagggtgatggaagaacaaaatattaattttaatgaacatcaaacatgtgttagtcataatgtatttatgagcagtagtcaataagcattgctaattttctgaacagataatgcatgcatgcatgtatgtacacatacatatgaatgtacgttgaatgaagtcttctc

SEQ ID NO: 218619 - DNA, 432 bp, Gossypium hirsutum
cccacgcgtccgattcctcaagaattaggcctattagcacggttgtcagcttttgatgtttcaagcaacaagctgtcaggtccaataccagcatcattaggtaataggagtgggaatttaccaaggtttaatgccacatcttttggtggaaataaggatctttatggataccctttaccacctatgaaaagtaaagggctatcagttttggccattgttgggattggattaggaagtggactcgcgagtttggttattagtttcactggggtttgtatttggttgaaaattacagaagaaaaaatggctgctgctgaagaaggaaagattggtcagttcatgcctgattattaaaaaaaaaaagaagaagaacaaatatcattgaagatcattgagcttaaattcaaaaaagaaagaaaatcccaggtatgt

SEQ ID NO: 218620 - DNA, 420 bp, Gossypium hirsutum
aaaatatttttatttatttttaatatttttattatgacattatcatgatgtaatttattccacgtgtcacgatcttattccgtcacttgtcctgaatttaacgccgttagtctcaagtaccagacccgggttcactgaaggcaagcgactcgacgatgttggacgttgcagtgaaggtaccgcatagcgtattggtaagcttgataaaggacatcggtgcagactgggatattgactatgaattggaagtgggactcaccgtggatcttcctctctttggagacctgaccatccctctctctcagaaaggagagatcaagctgcctactttcaaagacctcttcttttgacttctattcatccctcatgtattctttcttttctgaaacttgaattgtatgttaaaaatacgatatgtgc

SEQ ID NO: 218621 - DNA, 304 bp, Gossypium hirsutum
tttttttttttttttttttttttttttttttttcttggttttttttttttttaccggaagaggcttcgaagtactcggtttacatggacgaacaaagcgaggaaagcaaaagaatagaagaggtgttgatgaaaataccgaaagaagaggtggacacaatgcgtgctacggggattgatatgatcccaaggctcacttacgcacaccctaatgcgagccatagcgatgttggcttcaaaaatgccgtcgacgttgcgcttcaagcattggcacagcatgttagggacaaaatttaataaggaat

SEQ ID NO: 218622 - DNA, 421 bp, Gossypium hirsutum
ggtttcagggggtttggattttgtcctaaggaaggatggggctaacgtcaaggtggccgaggtggtggggaagaccatgctcttgtacttctcagcccattggtgcccaccatgccgtgctttcacaccgagccttgttgaagtatataagaagatcaaagaaaaggatgatgcatttgaagtgatttttatttcgagcgacagggaccaatcctcctttgatgactattattcaggaatgccttggttggctcttacattcaatgatgctcggaaatcatcattgagtcgcaaattcaatgtccaaggcatccctatgcttatagcactcggaccaactggaaaaactattacaaaagaggcaaggagtctggtcatggctcatggggcggatgcttattctttcactgaggagaggttg

SEQ ID NO: 218623 - DNA, 433 bp, Gossypium hirsutum
taccaacttcatcaatttctccatccagaacaaattggatctggagaagggaatgatggactgcttatatgcaaaatgcactccttgcatcacagattgtgtgatggctgagcttgaaaaattgggccaaaagtaccgtgtagctttgaggattgctaaggatcctcgttttgaaagattgccatgtgtccatcaaggaacctatgctgatgactgtattgttgagagagttacacagcacaaatgcttcattgttgctacatgtgatcgggacttgaagagaaggattcgtaaagttcctggtgtgccaattatgtatatcactcagcacaagtactcaattgaacgacttcctgaagcaaccattggtggagctccaagattttgacatgcaagtattgatatttcagtagcagtgatctctgggttcaat

SEQ ID NO: 218624 - DNA, 375 bp, Gossypium hirsutum
aaccattgtagctcagtcaaaggagaaacagcgcaaatttactgagaccattgaactccagatgggtctgaaaaactatgatccccaaaaagacaagcgtttcagtgggtctgtgaagcttccacatattcctcgccccaaaatgaagatttgcatgcttggagatgctcaacacgttgaagaggcagagaagataggtttggattatatggatgtggaagcattgaagaaactaaacaagaataagaagttagttaagaagcttgccaagaagtatcatgcctttctggcttctgaatctgtcatcaagcaaatccctcgtcttttgggtcctggtctcaacaaagcagggtaattcccaacccttgtcactca

SEQ ID NO: 218625 - DNA, 227 bp, Gossypium hirsutum
gaagattaagatgggttcaaaaatatttcatgatttataactattgtactgatttgaaacgttgccctcaaggtgttccaccagagtgtaaacgcccaaggttctaaaatcaaacctctcctcctttccatgtaatatattctttttttcactactttcttactatgtattcaagttgcactcaacttgatgcttggggatggatggaataagttgctattattatt

SEQ ID NO: 218626 - DNA, 440 bp, Gossypium hirsutum
aatactctaatactaatagaatagaaaaaatagaatagaaaatactaatataatagaaagaactgtcttttctgtatactttccccggttccgttgctaccgcaggctttacgcaatcgatcggatcatatagatatcccttcaacacaacataggtcgtcgaaaggatctcggagactcaccaaagcacgaaagccaggatctttcagaaaatggattcctattcgaagagtgcataaccgcatggataagctcacactaacccgtcaattttggatccaattcgggattttccttggggggtatcagtaaggaattggaatgtaataatattgattcatataggaggaaaaggttctctattgattcaaatgctgtacctatgggatagggatagagaaagaagaaaaaccgaagatttcacatagtgcttttgatcg

SEQ ID NO: 218627 - DNA, 431 bp, Gossypium hirsutum
gtaactgttcttattataatttttgtcgctctcaatgaaatcttcataattctttggtgggggttgcagacattgacagcaggatttgcaatgataggtcggatgggaaggggaaattcctacaccccatcaaaattgcctcccaagccactcgagatatggtcatacgagggttctccattctgtaagattgtacgagaagtgctggtagaattagagttaccgcacactcagcgcagttgtgctcgaggcagcccaaaacggcagatcctctatgagaaagccggacattttcaggtaccttatttggaagatccaaatactggagttcaaatgtttgaaagtgcagaaatagtgtagtatttaagagcaacctatgctcaataatcatcgggtcttttgaatatgttctttcaaagtcggttcattta

SEQ ID NO: 218628 - DNA, 383 bp, Gossypium hirsutum
  unsure (1)..(383): unsure at all n locations
gctgactgccaccaggttttaggctggaaatacgagcgagcttacgaggtgtctcagaagtgcaaggaagggaaatttatactctanaaggcgaaaattgttaaggaggattggtaacaagcaagcctcatcgttttttaaggttttctcattccatttattccccatgtttgatgtaattgttatcggtgcccgatgttcgtcttgtacagaaaaagacgtcgcccccatttcggaaaaaaattgtcattgtttggaaccttgcattcttaacgatgatgcgcgacggtttggcaattctctgtgttaataaattatggtattcttaaccatcgttcntgagaaaaaaaaaaatatatataaaaaaggtggtccttttttaa

SEQ ID NO: 218629 - DNA, 418 bp, Gossypium hirsutum
gttgaagatgagcttgcaaagatctgtgatgatatactatccgtcattgataagcatctcattgcatcttcctcgacaggggaatcaactgttttctattacaagatgaaaggagattattttcgttatttggcagaatttaaagccggagaggatcgtaaagaagctgctgatcagtcacttaaggcttacgaggctgccaccactactgcaaattcagatttgccgccaactcacccaattagacttggcctggctttgaacttctctgttttctactatgagatattaaattctgctgagagggcttgccatctggctaaacaagcttttgatgaggctattgctgagcttgatagccttaatgaagaatcttacaaggatagcaccctaattacgcagcttctcagggataatc

SEQ ID NO: 218630 - DNA, 435 bp, Gossypium hirsutum
cccacgcgtccgcttaaataccagaaaacaatttctctctttcctttttctttttttttaatttcgatttttctggggatttttgaatctgggtatttctgaaaatggggaaaaaccaagcctacaaggctatgcaaagagccaggcttggctcttcctctgctggccctgaagagatcgaggatggcatgagtggcatgctgctcgtttggccagtcttaaaacttctcatacagttacatgggaagagttcagaaagaaacaaaaagaagatgcattgagaaaaggggaactagaagcagatacggatcgaatgatgcgagaatatagagctcagttagatgctgaaagggcaagcaagcttgcacatggtagaaaccactccagtagtaaatctagccataaaaaggatcgaaaagacaaagattcaaagaa

SEQ ID NO: 218631 - DNA, 409 bp, Gossypium hirsutum
ggcggctctcgtcctactgctcctcccacgcgtggcttcgcttcctcttctcatcacgatgatgcttatgaaaccgcaaaatgggaaaagataacatatttaggtgttgctacctgcactgttttagcgatttataacctatcaaaaggtcatccccaccatgaagagcctcctgcatacccatatttgcacattcgcaacaaggagttcccatggggtccggatggtctgtttgagaaaaaggagcatcactagggatggccggatggatgcatatctttccgagttcggcgcatttttatcatttctctgagaaatcaatcagataattctgtggatcttttgtaattttagcactcgatttccagtttatggacttttaattgcaagttcatcaggttttctatat

SEQ ID NO: 218632 - DNA, 411 bp, Gossypium hirsutum
gagaaatttatatgaagaaactcgcaaactttgttgagaagcgactgaaatctgaaaggactggttctatatggaccagcacccttcagagaacgattctgacagcaagtccaattgttggatttccaaagaggtataattcttcacacttttgatagatacaatggcgtgcactagatgagataaatgctggagtatgtgatggaatgacttatgaataaataaagaagaatatgccagaggaatatgaatctcgcaagaaagacaagcttagatatcggtatcctcgtggagaatcttacctggatgttattcaaaggcttgaacctgtaattattgagcttgaacgacaaagagcacccgttgtagtgatatcttaccaagccgtgttgagagcattatatgcttatt

SEQ ID NO: 218633 - DNA, 426 bp, Gossypium hirsutum
cccacgcgtccgattctctttggcttatctatcgctttgatttcgcgtccttactgtgcactggatggcaaatcgatggttgaggcctgaggtgtatccgctgttcgcggccgtaggtgttgctgtcggaatctgcgggtttcagttggtgcgaaatatctgcatcaaccctgaagtcagggtaaccaaggagaacagggctgctggggttttggacaactttgctgagggagaaaaatattctgaacatttcttgagaaaatatgtccgcaacaagacgccagaaatcatgcccagtatcaacagcttcttcactgacccaaagtgaggcttcactcttgctttatgctgaaactaaaataaaaaaatagaagaactaagtcttattcaatcaataccaagttttgccctttctttctgctgact

SEQ ID NO: 218634 - DNA, 386 bp, Gossypium hirsutum
  unsure (1)..(386): unsure at all n locations
agcccctcttgttccaccaggcacaccggtggtgaacgcactgtccaagcagcgtgcaatgctggagaacatactaagggccagcattggcttggctcctgaaaacaacatgattttggaatacaagtgaagaagttgaggagagaaaagtggaacaaagctttggttcttagaactttaggaccattttccctttctctgtcgtattcataaaagctgtggttactgtagtcacagattgtaacggttgtatgatggtttatgctttggtatattatgcttctttttttctcatttattttccgatggcgctcatgtttgtagctcactcttgaaccaagcaccccttttgtggaaatagatatgataatatgaattttggtnna

SEQ ID NO: 218635 - DNA, 438 bp, Gossypium hirsutum
  unsure (1)..(438): unsure at all n locations
cccacgcgtccgggaaaagaaggtggtgaaccggtgttctggatgtagaaaacgtgtcggtgtgaccgggtttaggtgtcgatgcggtgaactgttttgtgccgatcatcggtactcggatcgtcacgattgtagttatgattacaagacggtcggtcgtgaggccatcgctagggaaaatccggttgttaaagcggccaagataattaaagtctgatatatatattttttatgaaaccctattaaaatcatattattcggaaacatttttcgacccggaattcggaacagctatggaaattcaacttcgatctcatcagcaatccatggaggaagatgacgacatatctcacangatcgtttcaagttgaagaagattatagtatttttaattttacttaattntctttttttccaaaaaaagaaaaatgaaaatta

SEQ ID NO: 218636 - DNA, 436 bp, Gossypium hirsutum
gcaaagttctgcaatcgtttccccaacatcgatttatcatacgaggtgattgatagtgacaatgtaagggctggggaatatgtcaccttgcaggttaccctcgagagggatctagaggggaagacagaggttggaccggttgatgctcccaggtacccgaaagcaaaagatgaagggtggtggctggttgtcggtgacaccattagtaaccagctgcttgctatcaaaagggtgtctcttcagaggaaagcgaaggtgaaacttgaatttgctgctcccactgaagctacagagaaggcatacactttgtatttcatgtgtgattcttacctaggttgtgatcaggagtatagcttcactgttgatgtcaaagaagctgctcgccctggtgaagacagtggctcagagtaggcttatgttctgcgttttcttaaat

SEQ ID NO: 218637 - DNA, 438 bp, Gossypium hirsutum
cgaaaacatcagtcaaccgtgttttgaggagtttaaacattgaattccatcccctgcttacagtatctgttttattcaatgctacatctatttgttttgcacaataaccacacgtacttacaccactgggcagggtcttgctatgccattgcgttgcgagataatcatttgtgcgtggagaactcgatgcggcatcattgccccatatgttatgagtacctattcgattcgttgaaagatacgactgtgatgaaatgcggtcacacgatgcactgcgaatgttacgatgagatgataaagcgaaacaaatattgttgtcctatatgctcgaagtcagtgatcgatatgtctagaacctggaagaggatagacgaagagatcgaagcaactgtaatgccagaggactaccggcacatgaaggtgcgtgcatactatgat

SEQ ID NO: 218638 - DNA, 403 bp, Gossypium hirsutum
cccgggtccattgttgtagacatcgatggtgacggaagtttcatgatgaacgtccaagaatgagcaacgatccgtgtagagaatcttcccatcaagatactattgttaaataatcaacatttaggcatggttgttcaatgggaggatcgattttacaaggcaaaccgagctcatacgtttttaggcaacccatcggacgagtctgatatattcccaaacatgttgaaattcgccgaagcatgcggaatacccgctgctcgtgtgacgaagaaggaagatctccgacaagcgattcagaaaatgttggaaactcctggaccgtacttgttagacgtaatcgtaccgcatcaaagacacgtcttgcctatgatccctgggtgaggggcattcaaagatgtgatca

SEQ ID NO: 218639 - DNA, 271 bp, Gossypium hirsutum
catttttgagctcatccaaagagcttctactcctgatccgatctgtcaaggaatgcttcacgtcggggatctaaaccggtctgttaagttctataaaaaggcgtgcgggaatgaaactagtaaagaaggtcgataggcctgaatataagtactccatagccatgatggcgtatgcagaagaacatgagactactgttcttgagttgacttacaattatggagtgactgaatataccaagggaaatgcatatgcacaggttgctattagcac

SEQ ID NO: 218640 - DNA, 378 bp, Gossypium hirsutum
tcggcactaacaacagagaaatgcaggtgtgaatattggcatgtggcgttgagggtttgacaccaatgtaaagaaaccagcttggtcttcggacattgatgtttgcttttcctacacattagttacttgcaatgggttgtgagtgttttagaagtatcttattgaatgcagatatttggctataaaaccaactagttctagattataatgaatagaaaagaggttctggtataccaagggaaatgcatatgcacaggttgctattagcactgatgatgtatacaaaagcggcgaggttgtggaacatgttatacaagagcttgggggaaaggttactcgtaaaccggggccaatggctgggatcaacactaaaaatac

SEQ ID NO: 218641 - DNA, 385 bp, Gossypium hirsutum
gtttagatcacgagcggcaccctttacaaatttatatataaattgatagaagcttcctgaggcgagaggctatatggacatgaatgccggtctaaaaagatttgcaacatctctcaaatcacccaacccttgggtgattaatgttgtgcccacaattggcaaggacaccttacgtgtgatctatgatagaggtctaattggaatatatcatgactggtgccaaggtttctctacctatccaagaacatatgaccttattcatgctaatggtgtctttaacttgcatcaagattagtgtagctttgaagacatccttcttgaaatggatcccattttactgcctgaaagggcttagatattcccgcatgatggcgatgtcctaaac

SEQ ID NO: 218642 - DNA, 384 bp, Gossypium hirsutum
  unsure (1)..(384): unsure at all n locations
cgccacattacttggacccgaacttgggtatgttccaacaagagatcattgttgaaaattccaataaccaggtgaaatacggtcagaaatttacagtgcaaatccgtggaaatgtcgaaattgaccaacaaaagcttcaagtgacgatttactcaccgccatttgtgacgcacggggttgctatgaatcaaagattgattcaattgggaattgtggaatttaacaaaaatgttgccataaatacaaacaacattgttcttcaagctcccgttaatagcaacattgcaccacctggttattacatgctctttgtgaactacaatggagtaccttgccgtcgatcaatgtgggttcgaattntaccttagatctttcacaacaagc

SEQ ID NO: 218643 - DNA, 409 bp, Gossypium hirsutum
ggccgactatgacaatctcgtcaaggagactgacaaactaaaagaagagctcacggacaagttacttttggaagggaaagagaagggaaagtcggagcttcctgatgcgaaaacatcctcgcaagagctaccatcagaggctgccgagggggaagagtctaaggttgtgccagtgatgaaaagcgattacactgaaggggttcattcttcagtactcttggagggtgctggttcatcttatccatttgaaccagaccagtctgatttatcacaagatgaggaagacaacttgagtaagggcctcttacatcttccttcatgcgtcttccctaaactccaagacatcgattactccgacccgcctgcaggttcctgtaattttggattccctcttgatgatcatgccttt

SEQ ID NO: 218644 - DNA, 417 bp, Gossypium hirsutum
ctttggaagaagcatgtaaatgcttacaaaaggataaatagattgattggtactgcaagatacagaaacgtgatggacatgaatgccggtcttggaggatttgcagcagctctcgaatcacccaagtcttgggtgatgaatgttgtgcccacaattggcaaggacaccttaggtgtgatctatgagagaggtctaattggaatatatcatgactggtgcgaaggtttctctacgtatccaagaacatatgaccttattcatgctaatggtgtctttagcttgtatcaagataagtgtagctttgaagacatccttctggaaatggatcgcattttacggcctgaaggggctgtgatattccgggatgatgtcgatgtcctaaacaaggttaggaaaattgctggaggcatgagatgg

SEQ ID NO: 218645 - DNA, 323 bp, Gossypium hirsutum
gcttaagtgcgcttacacctttgcttgatgcttcttcaaacagtaagcaatcatcagcaagcaatagatgagacaccctagggccacttctgctggttttgacaccttttataaccccttccccagtagccattcgcattagacccgataggccctccccacatatcaagaataaaaaagggcttaatgggtcttcttgcctaagtccccttgttggatagaaattgtctcctttaatgccattaaacactattgaataggagacactagagatgcatttcataattgaatcaatccatttttgagcgaaacccattttattc

SEQ ID NO: 218646 - DNA, 413 bp, Gossypium hirsutum
cccacgcgtccggctggacacacagtttacaccctctcagaagtgtctcgatacaaatccaagaacgactgttggcttgtcatcgatggccgagttctgaacgtaacaaagttcctggaagaacatccaggaggagaagaggtgttgttggaatcagcagggaaggatgcgacgaaagaattcaacgatatcggacatagcaagtcggctcagaatttgctcctcaagtatcagattggtgttctccagggtcacactttaaagaataatgaacaggttggttcaaccgaggagcccaaaaagaaagagatgagtgcattcgttatcaaggatgacctgacgcctaaatatgctgcagtcgtcgagttcgccgccccactcctggttgctggttcctatttctgttacagata

SEQ ID NO: 218647 - DNA, 413 bp, Gossypium hirsutum
cccacgcgtccgcggacgcgtggggggtgatgcaagcaataagggtgcattgaaaagctccaatgtaacgcatatcttaaccgtggctaacctatctcttcctttgtatccaaatgagtttgctcataaaattatcgaagcttcatcgatgaagctaaaagactaggtggtggtgtgttggttcactgctttatgggaatatctagaagtgtgacagtggttattgcttatctaatgaaaaagcatggtatgaggctttctcaagctttggaacatgtaaagcgtagacgacctcaagcttctccgaattctggtttcattttacagctgcaacaatttgaaaaaacccttcgaggttgatcattgttcggtcacttccctaggcccttgaagttccatctgtaaggaatatg

SEQ ID NO: 218648 - DNA, 398 bp, Gossypium hirsutum
gataaataagcgttcgtctcagatttttgaagatggcccgcaccaatcagacagcccgtaagtcgactggtgggaaggctccaaggaagcaacttgctaccaaggctgcccgtaaatctgccccaaccaccggtggtgtgaagaagcctcatcgttaccgccctggaactgttgctcttcgtgaaattccaaagtaccaaaagagtactgagcttcttatcaggaaattgcctttccagaggcttgttcgtgaaattgcccactacttcaagactgatttgcgtttccagagccatgctgctctagctctccacgaagctgcagaggcataccttgtgggtctttttgaagacaccaacctttgtgcgatccacgccaagcgtgtcacaattatgccc

SEQ ID NO: 218649 - DNA, 415 bp, Gossypium hirsutum
cccagcacaaggacatgctccggccaccgtctaccacgcgcctccacaagttccagctccagcttctgcaccagcaacgcaacaaatggttcgaccggtaaccggacaagccggtcaaggctactacaccaacgtacagagaattccatccgaagtctaccgggagcaacccgtttacaacatggtggcacaaccttcaccatcgactgtgcgaagccggttgaggataagatcatggacatcgcttctttggagaagtttcttcaggaaaggatcaaggttggtggcaaagccggtgctctaggtgactccgtcactgtcacccgcgacaagacccgtatcaccgttacctctgactccaacttctctaagcggtaccttaaatacttgactaagaagtacttgaagaagcaca

SEQ ID NO: 218650 - DNA, 398 bp, Gossypium hirsutum
acaacaacaatttctggacacacagtttacaccctctcagaagtgtctggacacaaatccaagaacgactgttggcttgtcatcgatggccgagtaacccggctctctttactcacccaattatctttacttatttatgttgacaaataatcagagacttgactgattctttcaggttctgaacgtgacaaagttcatggaagaacatccaggaggagaagaggtgttgttggaatcagcagggaaggatgcgacgaaagaattcaacgatatcggacatagcaagtcagctcagaatttgctcctcaagtatcagattggtgttctccagggtcacacttcaaagaataatgaacaggttggttcaaccgaggagcccaaaaagaaagagatgagtg

SEQ ID NO: 218651 - DNA, 421 bp, Gossypium hirsutum
cccacgcgtccgaccgagctctaacagtacctgagctcacccagcaaatgtgggacgcaaagaacatgatgtgtgctgctgatcctcgtcacggtcgatacttgactgcatctgctatgttccgtggtaaaatgagcaccaaggaagtggatgagcagatgttgaatgtccagaacaagaactcctcatactttgttgagtggatcccgaacaatgtgaaatcgaccgtttgtgacatcccacccactgggctgaagatggcatcaacatttattggcaattcaacatccatacaggagatgttcaggcgtgtgagtgagcagttcacagctatgtttaggaggaaggccttcttgcattggtacacaggggaaagcatggatgagatggagttcacttgaactgagagcaacatgaatga

SEQ ID NO: 218652 - DNA, 333 bp, Gossypium hirsutum
cccacgcgtccgcccacgcgtccgcccacgcgtccggatataacacccttcccttctttctttggaattatatatacagccttcaagctatatgcaaaggaagtgatggatatacatgcctttcaccatgctattgacaagatcaccagcatcgagatcggattcattatttgaatatgtcacaacactctttattttatgtattctgtaatccatactattactatgtaagagattggttgagtacttcaattgggattcagctcgtttctaaatttgtctaaaaaaaaaaaaaaaaaaaaaaaaaagcaaacaatataaaaaaaaacaaaa

SEQ ID NO: 218653 - DNA, 376 bp, Gossypium hirsutum
cccacgcgtccgcccacgcgtccgcccacgcgtccggccctattcttttttgtttttgctgaagggttcgatttcaaattgcattgcctattaccatggtattttcctgggaaggatttagtaccattagttacatacacaagtactattcctaattagttttttgttttttttttttaaacatttcaagagattggacgtcaactgtgatcgctctattttgcttgctgaattgactttgtggacttattatgttgcttgcaaagttacaaaatttgtctaaaaaaaaagaaaactcaaatagtacgtaagaatttctaacatccgtttcttagttaaaaattaatggtaagcattttatttattataagaaaaa

SEQ ID NO: 218654 - DNA, 414 bp, Gossypium hirsutum
  unsure (1)..(414): unsure at all n locations
cccacgcgtccgcccacgcgtccgcgagcatgtgaagaagcatgcaggagtggtgctctgatagctgtcaccgcatcagatgtctcctgcattgagaggcactatgatgattactgggaaattgtagggaattatgcggatatcttgtttgcaaacagtgacgaagcgagagctctatgccatttttcttcaaaggaaagcccaatttcggcaacaaggtatcttagccactttgttcccttagtgtcggttacggatggacctaaaggatcttacataggtgtaaaaggagaagctgtatatattcctccttctccatgtgtaccagtggacacatgtggtgctggtgatgcatatgcatctggtattttgtacggcatactacgaggtgtgtcggatntgaaaggtatgggt

SEQ ID NO: 218655 - DNA, 345 bp, Gossypium hirsutum
gtgacatgcataatctgcggacagagactttgcactagcaatatgaacttgtgaaaaagaggactatcaatggtaattctgcgtatggctctcatgtcatgcaatatggtgatgtagggcttagcaaggacagtctctttgcatacttgggtacaaaccctgcaaatgataacttcacctttgttgacgagaactccttggtgccacctacaaaagctgttaaccagcgtgatgctgatcttgtccatttttggtataagtatcgcaaggcacccgaatgctctgttaggaagactgaatcccaaaagcagtttgttgaagccatgtctcatagaatgcatatat

SEQ ID NO: 218656 - DNA, 337 bp, Gossypium hirsutum
cccacgcgtccggtcagcactttacagaatggttgaaggtcttgctataatgagcaaattgggaaggagcaggcttcatcaatctgattatggtttcgaagacagatcaatcgactgggatcaaactgaaatgtagagttcaatctctcccgtctggattttggattcataactgaatgcgttttggagtgtagcatctgaaaattgtccaaagtttacatcaaggattgttagccatgaatctgtctgataaccttctcttttttttttttgcaattttgaaccccaaaattgccggacaatttagttgaattgttaaaagagctgcattattatt

SEQ ID NO: 218657 - DNA, 419 bp, Gossypium hirsutum
cccacgcgtccgggcttctctttctttggcagctgctagaagaattgttgaagcagatgagttcatgagggctggcttatatgatggatggctccctcatctgtttgtgggaaacttgcttaaaggacaaacagttggtgtaattggagctggtcgtattggatctgcatacgccagaatgatggttgaagggttcaaaatgaacttaatttactatgatctttaccaatcaacacggctagagaagtttgtcacagcttatggtgagttcttgaaaagcaatggagagcaacctgttcactggaaaagagcatcaagtatggatgaggtgctccgggaggcagatgtgataagtcttcacccggtcttggataaaaccacctatcatctgatcaacaaagaaagccttgcaacaatga

SEQ ID NO: 218658 - DNA, 417 bp, Gossypium hirsutum
cgaatccttcagatccactcaaggaagatgaacgttcatccggatgtcaatttcgaagaacttgctcgttcgaccgatgattttaatggagcacaactgaaagctgtttgcgtagaggcaggcatgctagcacttcgccgagatgcaactgaggtgaaccatgaagatttcaatgaaggtataattcaggttcaagctaagaagaaggcaagcttaaattactacgcatgatctggagagcatttcgccattagagaaggcatgacaaagaagataggggtagcaaaatgacatttttcgaatagattgatttaattcggtttattcggtttcggttttaatgtgttgcttcggttaatttgtggttttcttatttttatttttgaacccaattgataaaaaaaaaatctacactta

SEQ ID NO: 218659 - DNA, 419 bp, Gossypium hirsutum
tttgttgttggccttggtgacaaagtctcaccaactgatatagaagaaggcatgcgggtgggggttgatcgcaacaaatatcagatacagattcctttgcctccaaaaattgacccaagtgtcaccatgatgaccgtggaggagaaaccagacgtgacatataatgatgttggtggatgcaaggagcagattgaaaagatgcgtgaagttgttgagctaccgatgcttcatcctgagaaatttgtcaagctcgggattgatcctcctaagggtgttctttgctatggtcctcctggaactggtaagacacttcttgcgagggctgttgcaaacagaactgatgcttgcttcattcgtgttattggaagtgagcttgttcaaaaatacgtgggcgaaggagctagaatggttcgagaact

SEQ ID NO: 218660 - DNA, 419 bp, Gossypium hirsutum
gaaggagggccattggatcggaagcgcattattgatgtgctggataagcatctagagaagtcgcgctcgtcgacttcgaggggattgaatagcaaagacaaagaaaggtcctccctcccttcaacttccactggtaaatcccagcttgatcatcgctctgcatcgctctccaaagccaaatattctgatgaggaatctgaaacagacagtgaagaatctgatgttagtggttctgatggagacgacacgtcttggatctcgtggttttgcaatttacgaggcaatgagtttttctgtgaagttgatgatgcatacattcaagatgatttcaatctttgtggcttgaccagtcaagttccttattacgactatgcgctggatttaatattggacgttgaatcttctcatggtgatatgtt

SEQ ID NO: 218661 - DNA, 149 bp, Gossypium hirsutum
cccacgcgtccgcccacgcgtccgcccacgcgtccggcgttgtcagcatccctgcttacctgtcaattttctttctgtttttaccttttttggctttgtcttggtatctgtatgtcgttgaaaattttatagaatctatcttttacatt

SEQ ID NO: 218662 - DNA, 403 bp, Gossypium hirsutum
cttactacttggctgtgccctttcccatcgagaaagctccaacgaagaagataaccactttgaatgatgaagtgataatctcagagcttttgaactatccggtcaggggtcttgtctttgagggtggtaacactcttcaggccttgtctgacacagtctctgatgcctgcatttgccttcaagagaacaacataccatataatgtcctcatctccgattgtggaaagcggatctttctccttccacagtgttatgctgagaaacaagctctcggggaagtgagtccggagcttctggacacccaggtgaacccagctgtgtgggaaattagtgggcatatggtgttaaaaaggaggaaggactatgatgaggcgtctgatgaaaatgcttggaggctcctggc

SEQ ID NO: 218663 - DNA, 407 bp, Gossypium hirsutum
tttcaagagctgaccggtaatggtatcttcaagggagatgtcccaccaggttctgtggaaagaccacttagccgagctaaactgcgagaaatgagcggcaatgacatcttttctgatgggaaggcagaatctcgcgactctttgggtggtgtacgtaagcctcccggtggtgagagcagcattgccttggtttaacttgatattaagctgcctgtataactatagtgtcatttgctgtacatcccagtttggggtgctatgttttgactatgaagtgttctcagtgttggatgacaatcgaatataggtattcgagtggtgtatgttagttgtggcttgtgattatgctgttttggtggtaccattagatcgagactctaggcaattaatatcggctaattgagtga

SEQ ID NO: 218664 - DNA, 413 bp, Gossypium hirsutum
  unsure (1)..(413): unsure at all n locations
catcgctgctggcctcaatcccggcgccatccccttcggcgggcccacccatctagaagttcctgcattcacggcagctatcgaggcgcatcagaagagaatcactgatgcgatcttgaaccatgctcttcagatttgcgctgaaaagaaggcaaacgtgaaaactcaagttgtgattggggatccaaaggaaaaaatttgtgaagtaattgaaaatgtgcatgctgatttgcttgtgatgggttcccgagcttttggccctattaaaagaatgtttttgggaagtgtaagcacctattgcgccaaccatgcacaatgcgctgttatgattgtaaagaacaaggaagcttcctccaaatcttaagagacttgtcaccaagacaancttgttaggagctatgttacgctgcgct

SEQ ID NO: 218665 - DNA, 396 bp, Gossypium hirsutum
gcacaatcatcctggaatgacagtgctgagcaggcttatctatggctcattacacgttaagtcatatgattggcttgacccaacagagcctgaagatccactacaagcaagagctgcaaaacttgtcaaggatactgagatgacagccccttgtgcaacaacagtactttatcccacaagtggaggcaacatccattgtttcagggcacggactccctgtgctatttttgatattttatcaccaccttactcctcagagcatggacgacactgcacttacttccggaggtcccctagaagggatttacctggtgagattgaaatgaatggagaaatgttctcggaagtgacttggttagaagagtttcagccccctgatgactttgtgattcggag

SEQ ID NO: 218666 - DNA, 373 bp, Gossypium hirsutum
cccacgcgtccgctgggatctttgttgttagaacgcttgtcggtggattatggtaaaaaggcaaagcttggtttcaccatctacccttcaccacaggtctcaacagctgttgtggagccttacaacagtgttctgtctactcattcccttcttgagcacactgatgtggctgtgctcttggataatgaagcaatttatgacatatgccgtcgttcccttgatattgagaggccaacttacactaacttgaaccgtttgatatctcaaatcatatcatccttgacaacttctttaaggtttgatggagctatcaatgtggatgttactgagttccaaacccaattggttccatatccccgtatccatttcatgc

SEQ ID NO: 218667 - DNA, 404 bp, Gossypium hirsutum
gccggaggaaccgaagcttttcctgatttgggtaaacattgtcaattttcaggttgtcatgaattagattttcttcctttcaaatgccaagcttgtcataaggtgttttgtgtggaacatagatcgtgtaagtctcatgaatgtccggaaccggaacataacagtaggaaggtgattatttgtgaaatctgttctacgtcgatcgaaataacgggcaaagaagatcaagagaagatgatattggagaaacatgagaagtctgggaattgtgatccaaggaagaagaagaaaccaacttgccccgttaaaagatgtaaagaaacgttgacattctctaatagaaccatttgcaagacatgtcgattggaggtttgtttgaaacaccggtttccagctgatcatgc

SEQ ID NO: 218668 - DNA, 408 bp, Gossypium hirsutum
ctcatatttgcctcgcatcagtgaaatggaagagaattctcttcgtgttgaacttcacagccagaatgacagacctcttactgatccagagttggatttccttgtggcaatactgggtctgcttgtaaacctagtagagaaggatgaacataacagatcacggcttgcagcagcttctgtttctttaccggattcagaagggttaaatgagggaagtcacatggctgtaattccgctgctatgtgccatcttccttgcgaaccaaggagaagacgatggtactggggttctttcttggaacgatgaggctgctatgctacaggaagagaaagaagcagagaagatgattttagaagcctacgcagccctactacttgcttttctttccactgaaagtaagagcacacg

SEQ ID NO: 218669 - DNA, 388 bp, Gossypium hirsutum
  unsure (1)..(388): unsure at all n locations
tgccaaagctaggcaaagaagcagccaccaaggccattaaggagtggggccagcccaagtgcaagatcacccaccttgtctttggcaccactagtggtgtggacatgcctggggctgactaccagctcaccaagcttttgggcctccgcccctccgttaagcgcctcatgatgtaccaacaaggttgcttcgcaggggggacggtgctccgagtggctaaggacttagctgagaacaacaaaggtgctcgtgtacttgttgtgtgctcggagattactgctgttaccttccgtggacctagtgacactcacctagacagtctagtgggccaagcattgtttggtgatggtgccgcagctgttataatcggngcagaccccatgcccga

SEQ ID NO: 218670 - DNA, 392 bp, Gossypium hirsutum
  unsure (1)..(392): unsure at all n locations
catcaggtccaaagtttaccgatgcagcctccgccgtgaaagttgctttacaaaaatatttggccgatgagctagctgatggtgacttaaagatcattgcggaacctggtcgcttctttgctaattcgccatttacattaacaacaagcgtaatagggaaacgagaaagggcggaggttaaggagtactggattagcgatgggatttcggggtcgatgaattttttgaagtacgatcacgatgaagtgatttgcactcctctcatcatgacaaagcctacatgcaaagaatgaaaacatggggttcactgttttggaccgcatgcgatganctgtacggttttgaagggtttgaattgccaaatggacgtgatgatggctgtctttacacat

SEQ ID NO: 218671 - DNA, 413 bp, Gossypium hirsutum
cgcgaacgggcactgttacgaaggatcatggcacgaaggtcgtaaacaagggtatggaatgtatactttccggagtggtgacaccagatgcggcgagtgggattccggcacccttaaaacacctttaccccaactaaccgatgcagtccttcgagcagttgaggctgctagaaaaacagctgtgaatgctgttcatcttcgccgggtcgatgatcaagtaaaaaaggccgttttggctgcaaatagagctgcaatggccgctagggttgccgcagtaagagcggttcagaaccagatggatgccaaattttgtgatatagacgtataagacaatagatttgctggaaattgtagatgttttctatgtagtttgaagaggtaaccctggtgagcaaaaaaaaaagctcattgga

SEQ ID NO: 218672 - DNA, 409 bp, Gossypium hirsutum
cccacgcgtccgcccacgcgtccgaagctcgagttgtctttacatcaatttccatgtcaaaacctcacatattgctggtggatgagcccacaaaccatttggacatgcaaagcatagatgcactagctgatgcgcttgatgagtttactggtggagtagtcctggtaagtcatgactcaaggctcatatcacgtgtctgcgaggatgaagagaagagtcaaatttgggtagtagataatgggactgtgaacactttccctggtagttttgaagactacaaagaagagctgcaaagagagattagagcagaggttgatgattgatgtggtattgagttttcccaacaaaaaatgaaaaattatatgtttaaccatataaatgcattaagacctgcatatggtatgatggg

SEQ ID NO: 218673 - DNA, 264 bp, Gossypium hirsutum
gcgcaatatctgcattaaccctgaattcatgggaaccaaggacaacagcgctgctggggtgttggacaactgtgctgagggagaaaaatattctgaacatttcttgagaaaatatgtccgcgacatgacgccagaaatcatgcccagtatcgacacctttttcactgacccaaggtgaggcttgactcttgctttatgctgaggctaggagctaacaagaaccgtggacctaagacttcttcgatcgctaccaaaacatgccca

SEQ ID NO: 218674 - DNA, 292 bp, Gossypium hirsutum
gatccacgtgtgactcatgaaattcgcagcatatggatctcatactggtctcaggctgataaatcactgggtcagaagttagcatctcgcctcaatgtgagacccagcatttagacatggagttgcggaggatgagtaaaggagtgaaatgtagaaaggccatcatctagttgtttcggaagcataaacttattgttgatccttttgatctgtgtgccataactgaaataaagtctcatatactataagttttacgcttatggtcctaattaataaatgccgttttatgtgt

SEQ ID NO: 218675 - DNA, 361 bp, Gossypium hirsutum
cgccggtgaatcagacccagttcgccatggcttattacggcattaactattccaagctccggctttgggagttcgtcgagtacagtaaaatgctatacctggacggcgacatacaattatatgacaacatcgatcacttatttaatttgccaaacgggcatttctacgcagtaatggactgtttttgtgagaacaaacaaggagccacaccccacaatacaacctcgattactgtcaacaatgtcccgacaatatcaaatgacctgacgagatgggtcaacaactccccttcctatacttcaacgccggcatgttcatcttcgaacccacctcacacctataaaaaccagtatagtgaagg

SEQ ID NO: 218676 - DNA, 373 bp, Gossypium hirsutum
cttgaaatacgaagatgtgaaaaaggagcctttggggtgtgtgaggaaacttgcagggttgttgggggtaccctttacaccagaggaagaaaacaacgagactgtggcagaaatagtgaagttgtgcagtttcgagagcttgagcaatcaaaatgttaataaaagtcaaaccagcagtggagaacgacctgttggtaactctgatttctttagaaaaggagaagtaggagattgggtcaaccatttgtcacctaaaatggttgaaaaattgaatcaaattacagaacaaaagcttaattcaaggtactggattcaactttgattgactcctactactttatgatgttataatgatattagagtctataaatta

SEQ ID NO: 218677 - DNA, 371 bp, Gossypium hirsutum
  unsure (1)..(371): unsure at all n locations
cccacgcgtccggctttagctgccagcatttctggcatcaactatgaccttacgaacaaactcccaggcatgtgtggggtgcacagccctttcaagatcagccccagcactaactgcaaaagtgtcaagtgaagtaggccatggaagctcgtcagcaaatgggaaaggaaataatgatatatagctacataataaaaatggatggcagcgctctttatctttgtcgtagttgtccctagaaatataataaaacctcaagctattgcatgagttttgagttaattgaatgacaacgtataacgaanaaaaaaaaaataatttaaaaaataaattaaatttaaaataaaaataatatttataaaataaaaatt

SEQ ID NO: 218678 - DNA, 218 bp, Gossypium hirsutum
gtggttaccgtcgatgctctccagtccaatgacaagaaagtggccgcttgtaaggcaactagggagaggtttgaagagagggtcaagactgggaaaaacaggtggttctttactaagctcaggttttaagtgttttattggaacatgttttatgcttatgtagatttatcgaacaattatgaatttaatgacgcttttttaatctgtttggatgaaaa

SEQ ID NO: 218679 - DNA, 413 bp, Gossypium hirsutum
cccacgcgtccgggtagttgttgcagaagagtaaaatagtaaagagtcacagctgaggcacggaagaagatgccttgcctaaacctttcaaccaacgtcaatctcgacggcgtcgacacctccgccatcctttccgaagccacctcttccgtcgctaaactcatcggcaaacctgaggcctatgtgatgattgtgttgaagggttcagtacccatgtcatttggtggtaccgagcagccagctgcctatggagaactggtatcaattgggggccttaatccagatgtgaacaagaaactgagtgctgcaattgctgcaattcttgaaaccaagctacaagtgcctaagtcacggttcttcctcaaattctacgacaccaagggttccaactttggatggaacggatccacctt

SEQ ID NO: 218680 - DNA, 335 bp, Gossypium hirsutum
cccacgcgtccgcccacgcgtccgtgcttatggtggagttctatctggaagtgctgttcgagaaaggatcataagggccttcttggtggaagagcaaaagattgtgaagaaggtactgaagattcagaagacaaaggaaaagcaatcatccaagtgagagctaggatttgctaatggattgatagtgaatcttggaatagtagtttgaggggatttaagatttggatttatgtttttacatctgttatgaatcatgttctactttatcatcttgtcgacaaatcaactttcatgtcaaaattttggttttggaacactcactttgtttgctcttc

SEQ ID NO: 218681 - DNA, 412 bp, Gossypium hirsutum
cccacgcgttcgataaaaaaatcctgttagatcgtgattcagacctgaataatcggagtagagaaacatgtcatcaggcctggaaccggctccaaacccactccccgtcaaaccggcaccgatcactgtactggatacgggaaaaaaggagatgtgtctgaaaaactctggagcacaaaggatccagggctggaaccattctatttacaaataggccagggctctgctataaaaggatgggatgaatgcgttatgggaatgcaagtggccgaagttgctcttcttctgtgctccccatactatgcttatggagctggtgggttacctgcatggagaatacagccaaactcggatctcgtattcgtgattgaagtcctaagcttgaagtgagtagcaagcagttggtgactgt

SEQ ID NO: 218682 - DNA, 379 bp, Gossypium hirsutum
agggtatgcagaatggacaaaggattactttcccaggagaagctgatgaagcgcccgatgcggttactggggacattgtattcgtcctgcaacagaaagatcatcctaaatttaaacgaaagggtgatgacttatttgtagagcatacattggcacttactgaggccctttgtggctttcagttcatactgactcacttagatggcagacaacttctcattaaaacccaacctggggaagtcgttaagcctgatcaattcaaagcaataaacgatgaaggaatgccgatttatcagaggccatttatgagaggtaaacttttcattcacttcactgttgacttccctgactcgttgaccccagaccaatgcaaggcact

SEQ ID NO: 218683 - DNA, 334 bp, Gossypium hirsutum
ggcgaacatggataagttgcaacagttgatgcattccagacccaagaaacctaggcctgtgattcctggtccccgtcttcccaagggaccaactatcgaataccaggagaagattggtctcagggctttaaagttaccctcagcagacgctgtagttgttcgaaggactcttgttactctgatggagaacccccatggtctccctgggatcaatgagagtcctgaacatattggaaagagggaggcctactggtcatcagtgaagccagctcattttggagtgaacatagcatctaaatacctattaggcatctaccgaatactcggagttggg

SEQ ID NO: 218684 - DNA, 352 bp, Gossypium hirsutum
ccctataaaaatgccaccatatttcgtcatttaactctgggggattttgaactacaggatgggccggtcggggtcaatgatgctgagctcaaggagcgcataattcaacacttggctgctgctgctgcaatggggcagagcacaccatattttgagaagggaagctctgaggaatacgccatcagctcaaggacgtcgtccacagtacttggtcttttatcattcaaatgatgaaccctactcgtgtggccccatatcttcattatcttcaactcaaagtgaaggagaaccggtccctacgatcaccgttggatcttcctcttttcctgaaagaacagccggggaagaattt

SEQ ID NO: 218685 - DNA, 355 bp, Gossypium hirsutum
cccacgcgtccgcccacgcgtccgcccacgcgtccgcgttaccatcctcaactgggcctgggtcagaaatgatcaggcccgggttgagacttgctaccagattgccttggccatcaaggacgaagtggaggatcttgagaaggccggtatcaatgttatgcaaattgacgaggctgctttgagagaggggttgcctcttagaaagtcggagcacgccttctacttgaaatgggctgggcactccttcagaatcaccaactgcggtgtacaggacactacccagatgcacactcatatgtgctagttccactttaatgacatcatgcactcaataatttacatggatcctgatctg

SEQ ID NO: 218686 - DNA, 406 bp, Gossypium hirsutum
ataatttaagaggaaaatgactttcagtggaacaacagagaaatgcaaggcttgtgataagactgttcatgttattgatttattaacagctgatggcatttcttatcataagacttgcttcaaatgtagtcattgccatggtgtgttggtgatgggaaactattgctcaatggatagtgtcctgtattgcaagccacactttgagcaacttttcaaggaaactggcacttaccaaaataagaatgcaaaaccctcctctgaaaattcgaatggaacgggaaaggctcctagcaaatttgcatcattcttctctggtacacaagacaaatgtggtgcctgtaagaaaactgcataccccttagagaaggtgactattgaaggagaaaactaccataaatcatgcttt

SEQ ID NO: 218687 - DNA, 343 bp, Gossypium hirsutum
gtggagcggattcgccattcgacttgcccttgaaggatgatgacagccttactagctgcccaccattttcagttccaaattacatgacaccaacagtttcagcgaaggccaaatcatgagccaacagcaatctgaaggagatgttcatggggactccaggaagcgagtcatcgaagaggcgggtttcattccctttgacacaagggataggatcattcaagtggagcaaagggtctttgttttcaggcaaggattcaagctctcaaaagggtttagataagaaccaatcgcttcaatctataggtaatttgagtgtggattcaaccgtttcaatgcctgctac

SEQ ID NO: 218688 - DNA, 394 bp, Gossypium hirsutum
gagaatagcagtgttaatcttcctccagggttcaggttttatccaactgatgaagagcttgtggttcatttccttcaacgcaaggctgccctgttgccttgccaccctgatgtcatccctgatcttgaactgtatccccatgatccttgggaacttgatggcaaagctttgggtgaggggaaccaatggtacttttacagtagggggacgcaaaacaggattaccggcaatgggtactggaagccaatgggaatagaagaagatgttattaatagcagaagcaagaaagttggcatgaaaaagtatttggttttctacattggagaaggccgggctgccatcaaaaccaattggataatgcaggagtatcgtctttccaagtctgattctagct

SEQ ID NO: 218689 - DNA, 368 bp, Gossypium hirsutum
  unsure (1)..(368): unsure at all n locations
cccacgcgtccgcccacgcgtccgctttgattaaccagacatctcgcgtagctctagaggaaatcaagctgaagnncatggacacctcatcaaaattcgggcacggacgtttccagactacacaggaaaaacagaaattctatggtcgggtcaaggcataaatctgcaaattggtcaggaatttccggctatcgtatgtttaggttttgctattctctgagcttagtttatgctgattctctattatgttttgaaatgcattggttggattaattttgttttatcaactctttttgaatgtgtgcacaactggggttctggaccagttagaattcttgcatcaaaaccaatagaatcatgtatgagaa

SEQ ID NO: 218690 - DNA, 320 bp, Gossypium hirsutum
cccacgcgtccggagctaccaaggacaatgaatattctgatcttttctatgctatcccatggtctgaaggaactcttggatttcttgttgctgccgaaatcaagcttatacctgttaaagaatacatgagactgacatacacgcctgtagtggggaatttgcaggaccttgctcaaggatatatggactcttttgcacccagagatggtgatcaggataatccacagaaagttcccgattttgtagaaggcatggtctactcacccactgaaggtgtgttgatgactgtgagatatgcctttaatgaagaagccactaag

SEQ ID NO: 218691 - DNA, 348 bp, Gossypium hirsutum
ctttacattgttgagaatatcaatgttgctgctattgaaacaaccttatggtcaattgaagggggcattgctgagcttgtggaccatcccgagatccagcagaaactccgcaacgaaatcgacaccgtactaggacccggcgtgcaggttaccgaacccgacacccataagcttccatatctgcaggcagtgatcaaggagactctcaggctccgaatggccatgcctctactagtcccacacatgaacctccatgatgcaaagcttggtgggtatgacatccttgcagagagtaagatccttgtgaatgcatggtggttagacaataacccagctcactgtaagaac

SEQ ID NO: 218692 - DNA, 406 bp, Gossypium hirsutum
ggaagatcacccttaagagctcagacggcgaatcattcgaggttgatgaagcggtggcgggggagtcgcagacgattaagcatatgatcgaggacgattgcgctgataacgggataccgttgcctaatgttacgagcaagatcttagcgaaggtgatcgagtactgcaagaaacacgtcgaggctcctaagacagacgatcgatccgccgatgacgagctcaagagttgggacgctgactttgtcaaggtcgatcaagctactctctttgatctcattctggcagcgaactatttgaacatcaagggcttgctggatctcacttgccaaactgttgctgacatgatcaagggaaagaccccagaagagatcaggaagactttcaatatcaagaatgacttcacccc

SEQ ID NO: 218693 - DNA, 397 bp, Gossypium hirsutum
cccacgcgtccgcccacgcgtccgatcccaaaccagatccagtcgagaaagaaacgaatgggtcggcactagcagggtcaggggaattacctaggcagtcattgagtaaaaccaaaagtaccctatggaggatggatcttcaagctcttggaggttcctacaagatcaaaaggctgaagcaacaacttctcttgctctagaggttaaccggaaagcaagaaactgtggaggacacggagggaagccaccgcaacctgatgaaaggctttctactgactctatctttactaaacaaacaagacagccgctatcattgcctttaagggaagaccgacgatctattgtaactgatgcacttcgatgtcatatacatgaaccaaggagattgtagtactac

SEQ ID NO: 218694 - DNA, 302 bp, Gossypium hirsutum
cgtgatcttgtcgacgacgtaataacagtttacgatactgaaataatcaaagcaatgagactctgctatgagatccttaaagttgcagttgaaccaagtggagccataggcctagcagctgtcttatctgatagcttcaggaccaaccctgcctggaaggactgcaaccaaataggaattatactttcaggaggtaatgtagatcttgaagtgctgtggaattcatttagcaaatgaaatttaccattgtgattgctactcctatttaaaccttttttccttttaaacttcgctttgatctc

SEQ ID NO: 218695 - DNA, 415 bp, Gossypium hirsutum
caatgattttggaagtgaaataattccatgttctacttccattgggatgagggtgcaagcggacctgtatgatggctactgggaggacattggtacgattgaggcattttataacgcaaatctgggaatcaccaaaaagccagtgccggatttcagcttctatgaccgttcgtctccaatctacacacagcctcgatatttgccaccatccaaaatgcttgatgctgatgttacagatagtgttatcggtgagggttgcgttattaagaactgtaaaattcaccattctgtggttggtcttcgatcttgcatctccgagggtgcaatcatagaagataccttactaatgggagcagattattatgagactgatgcagacaggaggtttttgtctgcaaagggcagtgttccaatt

SEQ ID NO: 218696 - DNA, 388 bp, Gossypium hirsutum
cccacgcgttcgggcaagactgttgcattggttggagaaagtgggagcgggaaatccacagtaatgtcattactgcagagattttatgatcccaattcaggacgtatcagtctcgatggtgtcgacatccaaaagctccaattgaaatggctgaggcaacaaatgggacttgtgagccaagaacctgttttattcaatgatacaatccgtgccaacattgcatatggaaaaggaggaaatgcaaccgaggcagaaattttagctgcatcagagttggccaatgctcacaagttcattagttcactacaacagggttacgatacggtggcaggggagcgaggagttcagatgtcaggaggacagaagcagcgcataaccatcgcacgtg

SEQ ID NO: 218697 - DNA, 425 bp, Gossypium hirsutum
tccaggcagtgtggactcaaaagtgctcatctccgacgttgaattctcaaacatcagaggaacaacaataggcagaattgctgtagtcctagcttgcagccaatcatttccatgcaaaggcattaccctcaaggacattcacttagagtataccggtgatcccgatcataatgaagacactcccttcagttctaactgcaccaacgtcaaagttaactacatcggcgagcagctgccaccgccctgcgcttaactcttatctcttcatggcggtccaacaactcccgtttattattttttattgtgtctgagccaaatgtaattgaaggagctacttcaatggaataatatagcgggcgttgggtgttctaaaaaaagtcggattagtgcttaaattgatggtattttttttaatatcggatgta

SEQ ID NO: 218698 - DNA, 411 bp, Gossypium hirsutum
agccgctctgcttctcggaccacacaccttctcaacctaactacaatgactaagagaacgaggaaggccggaattgtcgggaaatacggtacccgatatggtgccagtttgaggaagcaaattaagaagatggaggtcagtcaacacagcaagtacttctgcgagttctgtggaaagtatgcagtgaagagaaaggctgttggaatctggggctgcaaggattgcgggaaagtcaaagccgggggtgcttatactttgaacactgctagcgctgtgacggtgaggagtaccattagaaggttgagggagcaaactgagagctgagccaataacattagcatacccaactttcgtaggatgtttttgcatgttttatctaaacgtattgaaatttttttttttgacaatgat

SEQ ID NO: 218699 - DNA, 402 bp, Gossypium hirsutum
cccacgcgtccgggattttcaaggaaacaacagaccacttgtataatgcagccactcaggagcgagaaactactttgaatcagctactaatagagcttgatgggtttgatactgacaaaggtgcatactttggctttctgttccggtgttttggattctctggcggttgaattgaaagcatcaaagggattctctaagttatatgcaggcattgcaatactttggcttcatctaagcttgaaccagccctctgttgtatattgtttcttcttcttttttgatctttttcctttgattaatgagaggtaatgatgatttggcattcttttctcactaggatgaattttgttttagaaattgtaatactttgtgtgtgtgtgtgtgtgtttatgtattaaatta

SEQ ID NO: 218700 - DNA, 409 bp, Gossypium hirsutum
tacaaacactcggcttctcccagatcttcaccaacctcccaaaatgacaacccgcttcaagaagaaccgcaagaagcgcggccatgtgagcgccggtcacggtcgtatcgggaagcacaggaagcaccccgggggtcgcggtaacgctggaggcatgcaccaccacaggatcctcttcgacaagtaccatcctggttatttcggtaaggttggtatgaggtacttccacaggctccgtaacaagttccattgccccatcgtcaacatcgacaagctctggtctcttatcccggaggacgtgaaagccaaagccaccaaggatgccgctccgatgatcgacgtgacacaattcgggtactttaaagtcctcggcaaaagtgttttgccggagaatcaaccggtggtcgtc

SEQ ID NO: 218701 - DNA, 377 bp, Gossypium hirsutum
gaacttctagtggacaaaactgagaacttacaattccaggctgatagcttccagaggcaagggcggcaactgcggcggaggatgtggctgcagaatctgcaaatgaaactgatggtggggggagctattcttgtgttgatcatccttttgtgggtttttgcgtgtggaggtttcaaatgttaacgttgataaccattgcattgcctatgttttcttttatatatacaaaaaataataattctacatttgtttagatgtacaaaatatagttatgctcttgactttgtacatggattgctgttgttatgtagcactaccttgccgtttaagatatgtaatcaaagctttgaattttatacttttttgaagttttctaa

SEQ ID NO: 218702 - DNA, 414 bp, Gossypium hirsutum
aagggatataggtgaattcggttacatagctccagagagttcaagcacaacggttgcttcgatgaaatccgatgtgtacggattcggtgtcgtgcttctcgaattggtaaccagacaaaaacccctagaagttaatgcaggtgaagaaggattcaaaggtggtttggtggattgggtaaaccatctctcaaacacagggagaatcaaagatgccattgacaaagatctgtatgggaaggggcatgatgaacaaattgtgcaggtcctcaaaattggatgcaactgtgtggttgctcatccaaagaagagatggtccatgttcaaggtttctcagtcattgcgaaccatggctgaggaaaatggtttatcagaagagtttgatgatttccctctgattttcacagaccaagatga

SEQ ID NO: 218703 - DNA, 411 bp, Gossypium hirsutum
tccaagataaggagggtatcccacctgaccagcagaggttgatttttgctggaaagcagctcgaggatgggaggacacttgcggattataacatccaaaaggaatcgaccctgcatttggttttgcgacttcgaggagggatgcagatattcgtgaagaccttgaccggtaaaaccatcaccctggaggtcgagagctcggacaccgttgacaatgtgaaagcgaaaattcaggacaaggaggggattcctccagaccagcagaggttgatttttgctggaaagcagcttgaggatgggaggacacttgcagactataacatccaaaaggaatcgaccctgcatctagttttacgacttcgaggagggatgcagatattcgtgaagaccttgaccgggaaaacaatcaccc

SEQ ID NO: 218704 - DNA, 234 bp, Gossypium hirsutum
cccacgcgtccgcccacgcgtccgcccacgcgtccgctgaattcgctttgtttgttgcatgtgggattcaattagacttccatacattgtttgttgtatagattctttggtccttttgctcaaatttgcaaactactagagcgtgaaaatgaacaaaaggttccaaagtaatgtagaaagacaacatgcatgtagcatatgtttcaatgtagagaataataattttcaatcatt

SEQ ID NO: 218705 - DNA, 408 bp, Gossypium hirsutum
gtcgagaaaaaatctaccgccaagctccaggactccagatcggttaagaagattgtgaacttggataatcacattgcactggcatgtgctggcctcaaagccgatgctcgagtcctcataaatagggctcggattgaatgtcaaagccacaggctgactgttgaagatccagttactgttgagtatattactcgatacgttgcaggtcttcagcagaagtacactcaaagcggaggtgttaggccgtttggtctctcaactctgattgtgggctttgatccatactctggtgtaccgtcactatatcagacggatccatcagggacattttcagcctggaaagctaatgccactggtagaaactctaactcaatcagagagttcctagagaagaactataaggaaacc

SEQ ID NO: 218706 - DNA, 406 bp, Gossypium hirsutum
  unsure (1)..(406): unsure at all n locations
cgaagtgtaccttctttagatcaaacagcaataaccttcaatgcacgtggggatgtaatttatgctatcctgaggagaaatcttgaagatgtgatgtcagcagttaatacccgtcgcgtgaaacatcctttatttgctgctttccgcacattagatgccattaactactctgatattgcaactattccagtggatcgatgtgttcttgactttgcaactgaaccaacagattcctttgttgggttgattacaatggatgaccaagaagagatgttttcatcaagccaggtttatgaaaatggtcgccgaangccgactgatgatgattctgatcctgatgatgcagaaagtgacgaggacgaggatgatgatgacgatgatgctgatgtagacccaatacttgggc

SEQ ID NO: 218707 - DNA, 389 bp, Gossypium hirsutum
cccacgcgtccgaaaaggataaatcctgtaattcatacctcaattctcgttttgcaggtgagtagctcgatcttctcctatggacaagcatactctggtggctaaggagagtgctgatgtcatcattcttgatgacaatttctcaacaattctgacagtggccaaatggggccgttcagtgtacataaatattcagaaatttgtacagtttcaactgactgtcaacattgttgccttaattgttaacttctcctcaacatgtttgacagggagtgctcctctgacagctgttcagctattgtgggtgaatatgatcatggatactttatgagcacttgcacttgcaaccgagccgccaaccgatcgggttcttcagcatgccgatcgct

SEQ ID NO: 218708 - DNA, 406 bp, Gossypium hirsutum
ctgagaccaacctcgattgaaaaagaggtcttcccgaagattgcagccgagaagaagctgtatgcaatggtcctaccagggttttggatggacatcggtcaaccaagggactatattaccggactaagactctatctagactcccttcgaaagaaagcttcacctaagttggccagtggtccaaacattgtaggaaacgttttggttcatgagactgccaaaatcggagaaggatgtttgatcggaccagacgtggcaattggtccaggctgcgttgtcgagtccggagtcagactttctcgttgcacggtgatgcgtggagtgcgcatcaagaaacacgcatgcatatccagcagtatcatcggatggcattccaccattggtcaatgggctagagtagaaaaca

SEQ ID NO: 218709 - DNA, 400 bp, Gossypium hirsutum
cagaatagctcttcgtaacgtccaccgcatcgttaatacctccgccgtttccggccgtacaacaaccgttttcaggccacagtatggttgggtttcaacatatttttcaactaatattagtaacactcagccattaaacatcgatctttctaacgaagaaagcaaaaggcgtctttataacagattgttgtataggagcaaacaaagaggatttctggagctggatttggttttgggaaaatgggttgaagaacatatccattccatggatgaaaatggaattaaagctcttgttaatgtcctcgatttggaaaaccccgacctttggaaatggctaaccggtcaagaacaaccacccgaagcagtgactcttaatcctgtcttctctgctgtgcaacag

SEQ ID NO: 218710 - DNA, 413 bp, Gossypium hirsutum
cagagattgatcttcgctggaaagcagctcgaagatggccgtactcttgctgactacaatattcagaaagaatcaaccttgcatctggttctgagacttcgtggtggcattatcgagccttctttgatggcattggctaggaaatacaaccaggacaagatgatctgccgcaagtgttatgctcgtctgcacccccgtgccgtgaactgcaggaaaaagaagtgtggacacagcaatcagttgaggccaaagaagaagatcaagtagattacatatctcgacggaggattatacttttattatcagatttctggttggaaactattgttctaataacagacatctttaatttcgtttagcttgaaactctcttgtagtttatgttcttccatttgtacttgaatgcaagttct

SEQ ID NO: 218711 - DNA, 417 bp, Gossypium hirsutum
cccacgcgtccggtcctccgggttcgcctacgccgcagcacaggagagcattgctgaggtgaatagcccggaagaatatgagtcgtgcgatgtgagcaaccccataagaatgtacacggacggcatagatggcatcccgctggatggggaagggatccgttatttcgtaagcggcaaggaagagagctgcaagaacggtctaaagctacatgtggaggtgatgccttttgggaaccccgagcccgaaaagcccagagttgcagtggctgctgcagcgcccaccactccttctggatcagcccggctttacggaagctccgtgttattattggttgggttatggctttgccatatggctatttaattgtaccagttatgacctctctgcactctttttcctctttagactttaccttc

SEQ ID NO: 218712 - DNA, 413 bp, Gossypium hirsutum
aatttgccagatgctccaaacagagaaaagattttaagagttatattggccaaagaggatttgtcacccaatgttgatttggaaactattgcaaatatgactgatggatattctggaagtgacctgaagaacctttgcgtgactgctgcacattgtcccataagagaaattctggagaaggaaaagaaggagagagcttcagcagcagctgagaatagacctgcacccaccttgtatagcagtgctgacgttcgacctctgaagatggatgattttaaatatgcacatgagcaggtgtgtgcaagcgtgtcatcagagtctacaaatatgaatgagttgcttcaatggaacgagttatatggagaaggtggatcgagaaagaaaaaacctctgagctacttcatgtagaggag

SEQ ID NO: 218713 - DNA, 420 bp, Gossypium hirsutum
gcgtacgcggacgcttgtgctgacactttgggcaaagtgatattaaatagtggccattcaatgtcatagcggtgcctgttgacaaaccaatgattgtcttcaattacaagggcgaggagaagcaatttgctgctgaggaaatctcttctatggtccttattaagatgcgcgaaatcgctgaggcttaccttgtttttacagttaagaatgccgttgttaccgtccctgcatacttcaatgactctcagcgtcaagcaacaaaagatgctggtgtcattgccggactcaacgtcatgcgaatcatcaatgaaccaacggctgcagccattgcttactgtcttgacaagaaggcaaccagtgttggtgaaaagaatgtcttgatctttgatctcggaggcggtacttttgatgtctcccttc

SEQ ID NO: 218714 - DNA, 406 bp, Gossypium hirsutum
ccgaccccgtgtctctgtctctgattaatccctaacctaacgccttcccttcccttttttcccccaaatcggaaacccacctcgcccgatccaccattccacctctggtgaccggccttccacgactccacctccgctctaacggtgcttccagcgaatctagccttcaacatcttctacctttgaatttcaaaggtcttctccgttataaactagatgctgatgaacggtgtaaaatattacatagaaatttttgggacctacctgatgatgcatgcaatattcttccagcattcaaattgagttattatcatctttcatcctatttaaagcgttgctttgcttattggtcatattttcctaaacattatgaatttcaaatagaaaaactcattcatttgtggat

SEQ ID NO: 218715 - DNA, 405 bp, Gossypium hirsutum
gattgattttcttggtttgaacaattccttcttttttttttcttttttgttacggggttttcagcatacatgcaaaagaaatcgaagggcacaaaacgtaaaacccgacaggcaaaagcacttgaaaatgctaggaaggctcccagatcatttcttgagctcttacatgaggcaaacttaaagtccttgcctcctcatgttccatcttatttgagggcagcagtgggacctccaagttctaccttccgccggcatttttgcagcgtttgcggctttagtgcaaagtatacatgtgtgacatgtgggatgcgcttttgtttgtgccgatgccaaaatattcataacgatactcgtgcatgaaatttgttgcatgagtggtgatattaagaacccaaaaagattttt

SEQ ID NO: 218716 - DNA, 365 bp, Gossypium hirsutum
  unsure (1)..(365): unsure at all n locations
cccacgcgtccggaaagctcatagatggggaagtgccttcccagcagcaagcatagccaaggaagagaaatgtgtgtggagtgaaaagaagaaactggcaatctgtggggatttctgtttgagtccaaatgttgaaggtgcaattcttagtggcttggctgctgcttctaagcttaaaggcttaatcagtaccctatactataacctttgatttgctttcccttgatgttggctgcatgacatgtttaaacatgatgtaggaagggcaagattttaatattaccagcaagggctttgggatttattccnnacaaaaaaaaaaaaaaggaaaaaagaataaaaaaaagaagcttggtaaaaggggg

SEQ ID NO: 218717 - DNA, 347 bp, Gossypium hirsutum
  unsure (1)..(347): unsure at all n locations
aacggaatgaacgaggatcttgcttacaaaaacaccgttgaatgcattacaggaattatatcaaagaccatctcaacaaagggcatcttggctgtgtacaattccttgtcagaagagggaaaaggggaattcgagcttgcctatagtgcatcttattacccatgcatggatatactgtatgagtgttacgaagatgtagctagtggaagtgaaatccgcagtgttgttttggctgggcaacgattttatgagaaggatggtctccctgctttcccaatgggaaaaattgatcaaacacgcatgtggaaagtcggtgagcgagtccgaaaggcacgtncatctggtga

SEQ ID NO: 218718 - DNA, 415 bp, Gossypium hirsutum
  unsure (1)..(415): unsure at all n locations
actcgacccatctggggttatgaagagtgaaacatgggataactttgtaagcttgtgtattaaaggatacctggcttcccgtcgatatatgaacgggattatcaacacggtgttgctgatgctcgacagcggattgccatgcttcagtaggggagaccccattggaaatcttcgcaagagatttcatccagaaatgtctgagcgtgaagcagccaatttcatgaaaagtgtatgcgtagatgcatacaataagtggaccactgccggctatgatctcatacagtatctgcaacaaggcattgaaaagtaaaatggaaaagggaaaatcatgtttntgcatttgcgtaaatatttccaattttctaattatactgtttttttctttaaatcttctatggtttcgattattcttgag

SEQ ID NO: 218719 - DNA, 412 bp, Gossypium hirsutum
atttacaagaaaatgaagttgaggatcatagaggccattggcttagttgctttcctgaaagctgcacatctcttgtctccctcaatttcgcatgcctcaaaggagaaataaacttagcatctctcgaaagacttgtggcaaggtcgcctaacctcaagagtttgaggttaaaccgcatggtgccgcttgatacgctccaaaaactgttgatgcgagcaccccaactggtggacttgggtattgggtcttatgtggatgatccatcttctgaggtcttcagcaaactgaaaactgtcattcaattgtgcaattcaatcaggagtttatctgggtttttggaggttgctccttgttgcatgtcagctatttatcctatttgcgaaaacctgacattcttgaacttgagctatgc

SEQ ID NO: 218720 - DNA, 398 bp, Gossypium hirsutum
gcggaatatgtttgggtgttttagtggttcaagttcttctcctaggttggattcaaggataaggagaagtagtagatcattttccctttttagtcctccttcaaggagaagaggttgggctcttgaacttgataatgcaagatctagaagtaggagaagaagaaggtaatggcttatgattttgaacataattcacacaatgtaccaagagccatagaaagtggttccattgaatgggatgttttttcttatcattgtaaattattgttagcaggaagtggggattcaccaagtacaaccgcgctgattatctgaagtggaagtctgagaacaggattatgccagatggtgtgaatgcaaagcttcttggatgccatggacctttggcaaatcgtcag

SEQ ID NO: 218721 - DNA, 345 bp, Gossypium hirsutum
cccacgcgtccggcagcagtggggtatggaacaaccttggatggaaccaagtactggatagtgaagaactcatggggagcggaatggggtgagaaaggttacataaggatggaacgtgggatcagagacaaacaaggactgtgtggtatagcaatggaggcttcatatcccatcaagaactcatcttctaatcctactggaccttcatattctcccaaggatgaactctaaacataaattatagctttcctttcaaatgtgttgttttttctgtgtttccaaaagttgtatcacgcaacatatgatcatgattgaataatcaataatatacttcaatttggtttc

SEQ ID NO: 218722 - DNA, 349 bp, Gossypium hirsutum
tgataagcttggtcttcattctctccgtcagcgccactggtatatccagagtacgtgtgcaacttctggggaaggcctctatgagggccttgattggctttccagcaacattgctagtaaggcatgagaaaggatcagtgtattggttgttagttagacttgttgaaactctggcaactcttgaagaggatatagcttcctgtttatccagcaacgtttgtaatgacagaatatttagctttgtttaatctttttacttggaattttcattttctttaatgtatttgtgttaaatattcggacttgttatggtttatatcggaaaaaaaaaatagtaacattgcatgtc

SEQ ID NO: 218723 - DNA, 413 bp, Gossypium hirsutum
cttggtaaagacgggtcttgtatgcaagtaccatttttagcagaatgggtgcgagataaaggacaccgtataaaatcacaagtaaaggctgctaaaggtgctgttagtttaattcaaatacaagacgagctgaggagactgaaccaaggagcagacagagaagagaacatactgaaagcccttgaagaaaagaaggatgccatgcttcaatccctttggcagatcaacgtggtcgacatcgagtcaactttatctaatgtctgtttagaagtacttagagacgctagtgtttcggaagaagttctagtcttgcgagcgaaaggaatgaagaaactcggagccatttttcaaggagcaaaatctgcttatagtagagaaaacagtctgcgccgtgtaaatgtcgaaacggaaac

SEQ ID NO: 218724 - DNA, 407 bp, Gossypium hirsutum
cccacgcgtccgcccacgcgtccgctcatattgatcagaatccagaaacagctaaacagaagcatgttgcagcagaggcctcgtccaaggagatgcaggctaagcagggtgcatccaccacttcaaccagaagtcgtactaaggtacaaatgcaagggattgcggttggtcgtgctgtggacttaactgttgaaaggatatgatgatctcattaatgaagtggagaaaatgtttgatatcaagggagagcttcgccccagtggtaaatggtccgttgttttcactgatgatgagggtgatatgatgcttgttggcgatgatccatggatggatttttgcaagatggtgagaaagatcttcatatattcaagcgaagaggtgaagaagattagtccaagatgcaaatt

SEQ ID NO: 218725 - DNA, 375 bp, Gossypium hirsutum
acgcacacgggttctggaagatctaaattatctttccaaaatgacaactcgctttaagaggaagcgcaagaagcgcggccatgtgagccccggtcacggtcttatctgtaagcacatgaagcactccgggggttgcgtgaacgtcttaagcatgcaccaccacaggatcctattcgacaagtaccatcctggttatttcagtaaggttggtatgaggtactttcacaggctccgtaacaagttatcattgccccatcgtatacatcgacatgctctggtctcttatcccggaggacgttgaagccaaggccaccaaagatgctcctccgatgatcgacgtgacacaattcgggtactttaaagttctctgcaaaa

SEQ ID NO: 218726 - DNA, 322 bp, Gossypium hirsutum
gtgagagtcgtcgttaccttgagatgttttatgctcttaagtaccgtaagctggctgaatcagttccattggcagaggagtaaattgaagctgttaaataacattgggccggtttttcttggagaataatattctgttttgtaatttcaattggagaagctcctttgtatttcatcttgtcttttccttttccttttttcgccggcattgtttgaacatggggttgtgcgcccgtcaattccagttaaatatggtgacttttgtttttcaaaaaaaaaaaaaaaaaaaaaaaaaaaaaaaaaaaaaaaaaaaaaaaaaaaaa

SEQ ID NO: 218727 - DNA, 395 bp, Gossypium hirsutum
gcttaagtcaaagaacacacgccttattaacctgcttttagcactgatggttggtgggtgtggcgcgggtgttcctcttatgaagaaggtccccgctgctgttctttggggttattttgctttcatggccattgaaagcttgcccggaaatcaattttgggagagaatattactgctgttcactgctccaagtcgaagatacaacgtgctggaggagtatcatgcaacctttgttgagacaattcccttcaaaactattgtcactttcaccttgttccagacaatatacttgcttgtatgctttggcataacatggatccctctatctggagtcctttttccactagtgatcatgcttcttgtgccaccgaggcaatacttgctccccatgtttt

SEQ ID NO: 218728 - DNA, 135 bp, Gossypium hirsutum
cccacgcgtccgggtaggttcaatgtgatgtgatgatgaagtggggcgtctgatatgttaatggacaataactcatgtctggtatagtcttgtttaaatgtgtttttgcttaatcgaaagttgctttgccgcccc

SEQ ID NO: 218729 - DNA, 410 bp, Gossypium hirsutum
gaacgtaagctcctgtctaacgatggacctgagtggataggccacactgaaaggagactagttcaagcaaaaccaacagatgtgaagcctaacgttgtggttgctaaggatggtagtggaaaatatgataccatcaccaaagccttggctgaagtccctctgaaaagcccgaatcgatttattattcacattaaggctggtacttacaaggaacaagtccttttacccaaggagatgactaatgttatgttcatcggtgatggcccaactaagaccatcatcaccaatgaccttaactgcattagggatcatccgcttaaaacattcggcactgcaacagttggtgtggatggggctggtttcatggccagggacattggattcgagaacacagcaggaccccctggtca

SEQ ID NO: 218730 - DNA, 396 bp, Gossypium hirsutum
ctcaccgccatttgtgacgcacggtgttgctatgaatcaaagattgattcaattgggaagtgtggaatttaacaaaaatgtggccatatatacaaacaacattgttcttcaagctcccgttaatagcaacattgcaccacctggttattacatgctctttgtgaactacaatggagtaccttgccgtcgatcaatgtaggttcgaattttaccttaaatctttcacaacaagcattgaattgtcaaaaccactatatgtaatacgaatcattggtcacgttttggttcacaagttgctatttgaagatcttatataaaatgtggataattagatttattttaatttctctttataaattcttaagtttataatattttataacaaatatttggttt

SEQ ID NO: 218731 - DNA, 324 bp, Gossypium hirsutum
cccacgcgtccgcccacgcgtccgactaagtatatttttaaattttgttatttcttataattgcaggatcccatgcttagtagaaatattagacctgacggtgatgagcaatcaaatttacaggataagcctaatggccaaagtgatgaatgttgctcatatacaagctcaaacagggaaagttggggaagatgctcttcactggggggcagtgatgaagaatcttcagcagactgtacggctgctaataacggaaatcaggtgactcttgatgtgcttgcaacacctctgaaaagcacgcagcaaaaatcaagtgatccaccc

SEQ ID NO: 218732 - DNA, 362 bp, Gossypium hirsutum
aggagaaggcctaaacgacctaaatccctctgcaatgcatgcggagtgtcgggtaaatctggcgggcgctttcccgattaccgaccgagggcaagtccgacgcttatcccatcagtgcactcgaattctcatctgaaagtgctgcaaatgatgaccaaatgtcagaaacctgatgcaccacaaatgatcccacaataaatgcacccaccactagataacatatcagagacacggctctggagatactctcgaaccctatagtgattagatgcaatactcacacaaagtatcccccctcccaatcttacaatataatcttaaaatgcataaaatattgggagtgacaccaatatgattgattc

SEQ ID NO: 218733 - DNA, 392 bp, Gossypium hirsutum
cccacgcgtccggagaaaaaaaggataggattctttgaaagagaaatttgaaagtcggtgcggggtcatcaaagatgtgttaggtgacaaggtggagaaagttgtggtctctgatcgtgtcactgattccccctgctgtttggtgaccggcgagtatggctggactgccaacatggagagaatcatgaaggcacaagctttgagagataacagcatggctggatacatgtcgagcaagaagacaatggagatcaatcctgagaaccccatcatggaagagctgagaaagagggctgatgctgataagaatgacaagtctgtgaaagaccttgctctgttgctctttgagactgccctcctcacctctgggtttagcctcgatgacccaaata

SEQ ID NO: 218734 - DNA, 416 bp, Gossypium hirsutum
ccaatttggggctaccgtaatctaccattgttagcgcttcccacgatgggaaagtaattatatggacagtggccaaggaaggggatcagtgggaaggtaaagtattgcatgattttggtacccctgtgtggagggtgtcgtggtcattgactggaaacatattggctgtggctgatgggaacaacaatgtgacgttgtggaaagaagctgtagatggggaatggcaacaggtgactgttgttgagccataatcttctaattttttttttattgtaatatttgcaatgttttatacagctgcatggttgaatcgtttatgcctggaaattctagaaccgaaattttcaacttgaactttttattggatgtagtttgcagacccatcatgttgttgttaaagaaaattatgagctact

SEQ ID NO: 218735 - DNA, 408 bp, Gossypium hirsutum
gggagaaaggatgaacggtgtggatttgcctcaatggggtgcttctatagtgaaagaagagtggacgtatgaagtattcgagcttgaggtaatgaatgatgcatcttccattagtgatgagttgttaaacactttgaagctagctttacattgtgtcgatccatcaccgtcggcaaggccggaagttcaacaagttcttcatcaactagaagaaattagtgcagatacaccagctagttctacaccgccatgatatatggtttatatgctatacgcaatagagtataaattctttcattcttacaatataatcttaaagttcataataaattttgtgttacaccaacttgattgattcagtatgtttcaattctttcattcttaccatataatcttaaagttcataat

SEQ ID NO: 218736 - DNA, 376 bp, Gossypium hirsutum
tgcaccatttgttgcctcctacaaaggcttcgaaatcgacgcatgcgagtgcccggtttgcgtgacagtagatgagatcgccaagaaatgcagcagcagtgctgagaagaggttctggtgggacgagccgacaatgtcggagttaagtttgcaccagagccaccaactggtgtgggttagggcaaaccacttggtctatgactattgtactgatactgctaggttccctgtcaagcctgtagagtgtgagcaccaccgtcactagtagaccagctaaagcaaaaggggttcttttgggtacattgtaaaaacatgttgtatggggcggtggaagaaccttagtcataaaaaaaacatgtactccatgtttcgtttt

SEQ ID NO: 218737 - DNA, 414 bp, Gossypium hirsutum
gggagctttcaatgttgaatgtgatgaagtggatccaagtgatgtgattaaggtggtaaaaactgtcaagagagctcttgcaacatatgggactcaagcactgaaagaaatgatccagaattgtatggcacaagatttttcatggaagggaccatcaaggttgtgggagaagatgttgttgagcctcggggtggctggcagtgaacctggcattgaaggagaggaggttgctcctcttgccaaggaaaatgttgccacaccctgagcataatcagaaggcaactatggataaagcttagtaacctgttttcttagacaaccaagtccaagtacctgtctactctcgatagccattggcttgaccggcggaaaacaaactgacctgccatacgtgaagtcagtagtgctattttt

SEQ ID NO: 218738 - DNA, 409 bp, Gossypium hirsutum
cccacgcgtccgaaagtcagaaagattctcatcctgtgagccagacttcggcccctgtaattcaggatgatgctccgaagaagtcatatctatcagttgtacatgcattgacaaagaattctgctccatttattgtgagagctccggctccgaaacctaaacctgtgcagcagtctcgcaaagctgcaatacctgaagaatctgctcctaaaagctacaatacctcagaaaagagcaatgaatcttcaggtaagaatacttcgatatttgttgcgaacttgcctatgagcgcaactgaggaaatgctgaaagaggttttccaaaaatttggaccaattaaacccaatggcatccaagtcagaagctttaaggacaacaaaaactgctttgggtttgtagagttcgagtc

SEQ ID NO: 218739 - DNA, 399 bp, Gossypium hirsutum
ggtagccatgcctgggaaactgctcgtgctagtccgtccctttggcgctgctgtaacgtagtccagagtcttcaatgtttgggctctgtgcacctgctttgaaaacggacggctatgagcgatgaccatttctgcggcgctaatcatcacactagggtttgggctaacgttacccttaggttgaataattgggccacgactgggtctaatgtactgggctaatggtttcatgactgtcttggactcaatggatatctatggttttttcatttccgtttaagaactgagaaagaaggctgatgctgataagaatgacaagtctgtgaaaaaccttgttctgttgctctttgagactgcccttctcacctctgggtttaacctcgatgacccaaatacttt

SEQ ID NO: 218740 - DNA, 338 bp, Gossypium hirsutum
cttctccttctgaggattctgagcaacttttgaaagcttttgaaggctggggtacgaacgagcaagggattatcgacatatgggctgacaggaatgcagcacagcgcaattcaattcggaaagtttatggtgaagcttatggggaagatcttctcaagtgtttggagaaggaacttacaagtgatttcgagcgggctgtgctgctttttacgttggaccctgcagagcgagatgctcatctggctaatgaagctacaaagaagttcacatcaagcaattggattctcatggagatagcttgcagtaggtcttcgcatgaactactcaatgtgaaaaag

SEQ ID NO: 218741 - DNA, 356 bp, Gossypium hirsutum
cccacgcgtccggacaaactctttaattcttagaatcctgctgaacttgataattggctcggtgaggtcaacccgaattccagagtgggggtacctactgcatatgcagtgccatcacttggtaaggctgctgtaggggatacatttcaattcgaaaggctaagctatttcacaattgacaaggactccactgccgagaagctcgtctttaatcgtacggttactctcaaggatacctacaagtagggtgggaaataagtaagggccccatgaaccacgcacatcaagaatgcagttatgaacacacactcgttatacagtttgctgttttaatgaaattcgacatggttttgata

SEQ ID NO: 218742 - DNA, 411 bp, Gossypium hirsutum
cccacgcgtccgcccacgcgtccgcccacgcgtccgcccacgcgtccgagccaaggagggcggtcgaagcagaatctgaaaccagagttttcccaggatttaaccgtgtccaaccctgaaatgattcaacttccttcatgttctgcaggagcaataaacctgggttacttctggggttactaaaattgaatattcaaaactgaaaaaaggaaaaatcaatggatgtaaatggattgaaagagttggaagaatattattgtcatgtgtgcatagataacattagtaggggaagtcaagaaaatgattgtgttgtaaaagtagttaaaactctgttaaggttttcattgccatattaggatttcactcgattatctcatcccatgcctttgtttgatacacaactattgtaat

SEQ ID NO: 218743 - DNA, 386 bp, Gossypium hirsutum
caaccatggcagtctatgatatcaggtttccttgcgggaacagctggtccagtatgtactggtccctttgatgtcgtcaaaactaggttgatggctcaaagtcgagatggaggggaggtgaagtataagggcctggtccatgctatccgaacaatatatgctgaggaaggacttcgcgctttgtggaaaggactgctgcctcggctcatgaggataccacctggccaggccataatgtgggctgttgctgaccaaataattggtctctatgagaggagatactttcatagtgcagctctataaacttgtactttttttgcttgttctggttttgattaccatagcaaacgcaaatctttgaaatcttggacaccatttttttcagt

SEQ ID NO: 218744 - DNA, 407 bp, Gossypium hirsutum
agcacaagcattaaagctgaaaagatttatttgtatcaaggttttgatcctgcttccgtagactttggctccaaatgaattaagccatgacacgcaaatggaagctattaaccaaagagatgcagatattctctttttatggcatatgtacaaaaattcggaagatggatcgaagaagaaagaaatactgaaacagatttctgagactatgaggcatagaatccacttggatggcagcattgacttgattggaacagtgttgtatggaccagcaaaaggctctgtcatcctcaataccatcagggaacctggtttgccccttgttgatgactggcagtgcttgaaatccatggttcgcttgttcgaaacacactgcggttcactaactcattacggaatgaaacaca

SEQ ID NO: 218745 - DNA, 417 bp, Gossypium hirsutum
  unsure (1)..(417): unsure at all n locations
acgacgtacgagcacaagcattaaagctgaaaagatttatttgtatctaagttttgatcctgcttccctaagctttggtcctaatgaattaaggcatgacacgcaaatggaagctattaaccaaagagatgcagatattctctttttatggcatatgtacaaaaattcggaagatggatcgaagaagaaagaaatactgaaacagatttctgagactatgaagcatagaatccacttggatggcagcattgacttgattgggacagtgttgtatggaccagcaaaaagctctgtcatcctcaataccatcagggaacctggtttgccccttgttgatgactggcagtgcttgaaatccatggttcgctttgtcgaaacacactgcgggtcactaactcattacngaatgaaacacat

SEQ ID NO: 218746 - DNA, 290 bp, Gossypium hirsutum
gtgggattgggagaaacagagggcaaatcacatgtcttccattccaaacaccatgtgaaaatagagatgaatatgtgttttgggatgcattccatccaactgagaaagtgaatatcataatggcaaggaaggccttcaatggtgatccttccattgtttatcccatcaacattcagcagcttgccaatctttgatctttgtattagtaccataaataagccattatctggcttattttctttgtgtacttcattttctggttgattgtaaaggaagagcactttggttca

SEQ ID NO: 218747 - DNA, 396 bp, Gossypium hirsutum
  unsure (1)..(396): unsure at all n locations
cttattgcaagagcaaggagtgcaggaagcacactttgcacaaggttacacagtataagaagggtaaggatagtttggctgctcaagggaagcgacgttacgatcgcaaacaatcaggttatggtggtcagaccaaaccagtcttccacaagaaggcaaagaccaccaagaagattgtgctacggctgcaatgccagggttgcaagcatgtctcacagcatccgatcaagaggtgcaagcactttgaaattggtggagacaagaaggggaaaggaacatctcttttctagatgtgatgatattcatgtcaaattttatgttatgggtttttacttggaacttcangcagaatggagttttgttaagtttgatattagtattctaatgttgttttta

SEQ ID NO: 218748 - DNA, 376 bp, Gossypium hirsutum
gataatccggagttcaatcatctaaaagaagccctaaaatccttgaatcaggtctgagcttgtggtttgttaggcctctttgatcaaactaagtttcatgtctgatcttgacgttcaaattcctactgcctttgatccctttgctgatgcaaatgctgaggactcaggtgcgggtgcaaaggagtatgtgcatattcgtattcagcaaaggaatggtcgcaaaagcctgacaactgtccaggggttgaagaaagaattcagctataacaagatacttaaagacctgaagaaggagttttgctgcaatgggaccgtggtccaagaccctgaattaagacaggtgattcaacttcaaggtgaccagcgtaagaatgta

SEQ ID NO: 218749 - DNA, 406 bp, Gossypium hirsutum
gcatctcccatctagtgtagattctgacactggctctgatgatcccaagaacccgaagtggtatgtggtatggtcaaatattgcaaacatgaatattcttcccgagtctgttgtgagtttcagacctagtaacatgcaaggtcaagctccactgaaggcagttgctggtgtcaagtattccctcgaaaaattattttcgaagattaagagctctctacctcctggcaaagtccaagaaatattgatgatatacagcacatatagggtaagtaggtgtgcctgtcaattagattaagttgaacgaaactagatctttgggaatcatattgaatatttgactatacaccgcactttgctaaaaaatcgatccctgtttaccaaatttaaaaaatatttaaaggaattt

SEQ ID NO: 218750 - DNA, 362 bp, Gossypium hirsutum
atacggtcagaaatttacaacgcagatccgtggaaacgtcgaaattgaccaacaaaagctggaagtgacgatttactcgccggcatttgtgacccacggggttgctatgaatcagagattgattcaattgggaattgtggaatttaacaaatatgttgccctaaatacaaacaacattgttcttcaaactcccattaatagcaacattgcaccacctggttattacatgctctttgtgaactacaatggagtaccttgccgtcgatcaatgtgggttcgaattttaccttagatctttcacaacaagcattgaattgtcaaagccactatatgtaatacgaatcattgttcacgttttggtt

SEQ ID NO: 218751 - DNA, 328 bp, Gossypium hirsutum
ccggcttgttggcttgctgcgtttggcttctgaatgcacaggtcacatgtccaaggttcgagggctggtgccagagagaagaagataatgggattgaatgacaaggaaatagttgcattatctggtgcacacacgcttgggaggtccagaccagaacgtagtggttggggtaaaccataaaccaagtatacgaaagatggaccaggagcaccaggaagacaatcctggacagtgcaatggttgaagtttgacaattcatacttcaaggatatcaaagctaaaagagatgaaaatctgcttgtgttgccaactgatgcttgtctttttg

SEQ ID NO: 218752 - DNA, 411 bp, Gossypium hirsutum
tcaaccatctttgccctttcattgcttccttgcctgccttaaacctccttcaagcatagggatgactactgaaatggtaatggttgatgaagtcccttttcctccacaaatcacaactaccaagccactatctcttttgggtcatggaattaccgacattgagattcactttttgcaaatcaagttcacagcaattggggtttaccttgaaccagaagttgtaggacatttgcaacaatggaaggggaagcctgggaacgtgctagctgaagatgatgacttcttcgaggctcttattaatgctccagtggagaagtttctgagagttgtggtgattaaggagatcaaaggttcccaatatggagtgcagctagagagtgctgtgagggaccgattggcagctgacgacaa

SEQ ID NO: 218753 - DNA, 404 bp, Gossypium hirsutum
gaaggttttatcgataacgtaaggaaacatcgggaacgcaacaaatattttttggttttaaccctacgacatagacggaatggaaaaggaccacatagaactattttaaatttacgacggatcagtcgaccaggtctacgaatctattctaactatcaacaaattcctaggattttaggcgggatggggattgtaattctttctacttctcggggtataatgacagaccgggaggctcgactagaaggaatcggtggagaaattttgtgttctatatggtaatctgtccggtatacgaattgtatccgaaactctccatttgtgcaaaaaaaaaagaaaaaagcacgggttgtctaataaaactcctcctgccctacggtagttgatacgtcaaagaagtttta

SEQ ID NO: 218754 - DNA, 412 bp, Gossypium hirsutum
  unsure (1)..(412): unsure at all n locations
gaagcggtcgtcttcacatgttggagctgccgaaaagaactcccagtaccagtatcagtagcagtacccttggtccatcaaactcgatagatcatcggtttcgcttatagacagtgagtgcggttccaccagtacggtattgacaaacaccaactactgcagatcccatttcgggtacgatgtaagagtatgaaataacaccaaatggaatctcgaaaatgaattcgctctattcaactgagggaaagtaatcaggagccaaaaaaaagtttgacttctatgactaatgtagaagttttactgtgaacaatgacctgcgaaaattgcagggactagtgatgtagtaacattgtgtcaatagaaattctctggttgatttattctgatgactaggntttttattttatgtatt

SEQ ID NO: 218755 - DNA, 412 bp, Gossypium hirsutum
cccacgcgtccggagacttgttaaaacagtactcaaggaagcagcacagaaaagagaaatgagatactcagacctgaacaagattgatagaggggtgaggagacattttcatgatgatataacagtcatagttgtctttctagatccccatttgatcaatggaagctcatgctacaactctcccatgtcgataaaaggcggaggaagacttgccagcctctgctagtaccgttgctggtgactcatcgctaggaaattaagatgaagagctaaatgtctaaaaaacttatcctcaaatttccttacaaataggggactaaccttgttgagattgcaagacaatgtgtagatatggtttcatgcaatttagttggtaaattgtctgctctcctgctaccacaattgataacgt

SEQ ID NO: 218756 - DNA, 416 bp, Gossypium hirsutum
gagagatttgcggtatatatcgttattcctttgtggcccgagggtgatacaaaatctcttgctgtgcaggaaattctatactggcagtctcaaacaatgcaaatgatgtatgatatcgtcgcacgagaactcaagagcatgcagattacggactcgcatcctcaagattacctcaatttctattgtcttggtaagagggaagaggtcaccccggaaatgcttggtggaaaaagaacttcggtctctgactctgcaaagttcggtcggttcatgatatacgtgcatgcaaagggaatggtcatagatgatgagtatgtgattgtagggtcagccaatattaaccaaagatccatggctggtacaaaagacagtgagatagctatggctgcatatcaaccacattatacatgggctga

SEQ ID NO: 218757 - DNA, 388 bp, Gossypium hirsutum
tgagaatagtatcctcaagaaaacgagagatgctgtgataactcttcagggagttctggaggggaagcatgataaaacaatcgaagagtccctagatcagcgtcagatgtctaaagatggatggtggtcagcactttacagaatggttgaaggtcttgctataatgagcaaattgggaaggagcaggcttcatcaatctgattatggtttcgaagacagatcaatcgactgggatcaaactgaaatgtagagttcaatctctcccgtctggattttggattcataactgaatgcgttttggagtgtagcatctgaaaattgtccaaagtttacatcaaggattgttagccatgaatctgtctgataaccttctctttttttttttttt

SEQ ID NO: 218758 - DNA, 400 bp, Gossypium hirsutum
caagaataagaatactgcacttcattatgcagctggttatggaaggaaagactgtgtggcgcttttacttgagaacggtgctgctgtcacactccaaaacatggatggcaagactgctatagatgtagccaagctcaacaaccagcatgaggtgcttaagttactggagaaggatgctttcctgtgagttggagtgtcggcagcagccatgtgtattgtgtgggtcctagcatgtgataggccatttcactgtgctattagacaaaaacaaatttgctttcatttcgtatgcgggttatgatcacacagtcacggctcgactagttgtccatgctgtctggttgctacatgtaacatttttttttccctctctaaatattaattttacaattgattttct

SEQ ID NO: 218759 - DNA, 407 bp, Gossypium hirsutum
ttccttagaggcactgaattggtttcggatgctcgaggaatggcagctttggtatacatgctgttctacgaattgtatatgctaatctgtgactggtgtgctacctccctttgttccatttgctcaggcatttgcagcagtaataactgctgctcttaccggttctctatattatgtggctgcctctccgaaagatcctacttacgtagttgcaccagttcaacgatccggttctgctcgtgaagatctgaaaaagctattcgcaggtgctcattctacccataaaacatcattcattcaatggtatttttccattgtaaaatttcaggaggctcatctttatccatggccttgaggcaaacctaatataattgcatcactgggaactaaatgttgtgatccgacag

SEQ ID NO: 218760 - DNA, 410 bp, Gossypium hirsutum
ggcaatcaaacgtggaggcttatcacttgcatctggctgcacgctggtgttattcatcttgttgcaaacatgttgagcttgatcttcattggaattcgccttgaacaacaatttggattcagtacgttatctgttcccttttgcagtggtagcgtactatcgtctcttttcattcaacgtagcatttctgttggtgcctctggtgctttatttggccttcttggagcaatgttgtcagagctgctgactaattggactatctatacaaataaggctgcagctctgatcacactcacggtcatcattgtcattaacttagcagtgaggattcttcctcacgtcgacaactttgcgcatattggaggtttcttaaccggttttctcctcgggttcgttttgctgcttcgtcc

SEQ ID NO: 218761 - DNA, 383 bp, Gossypium hirsutum
  unsure (1)..(383): unsure at all n locations
gatactttcccaacttctcgaccttccgatatcggacggntnaggggcgatcgttttagaagtataactgggagagttcaaactgtgatcggggacctcncaactcaaggggaacgatttcagtccttgctaagctggagagacccgagagcaaccacattatttgtgacattctgtttgatcgctgccttggttctttacgttacgccattccaagtcgntgctcttcttgcaggaatttacattttacgacacccgaggttccgtcacaagcttccatcgacacctcttaacttctttaggaagttgcctgcaagatcagacagcatgttatgagcaccccaagcagccattatatgttttccgatgttcgcggcaatcgg

SEQ ID NO: 218762 - DNA, 390 bp, Gossypium hirsutum
cggacgcgtgggcggacgcgtgggttcagaaagagattcattcgaagattatggagataggaaagaagcacaatgagaccggttctaaagacttgttgcaagtgatgattgaaggttcaaaaggtggtattgggccatctataacagctgatcagttcatagtcgacaactgcaaggatatctgcatccctgcctccgagattactgcagtttccgcaatatggggtctaatgttattggcttcacatcccgaatggcaaacccgtattcgtggtgaggtttcagaaccatgtaagggtggggtgctgagtttcgatgtgcttcacaagatgaaagcgttaaaaatggtggttcttgaagtgctacggctttatccagcaacagcatttg

SEQ ID NO: 218763 - DNA, 406 bp, Gossypium hirsutum
gctttctctccgattaccaccgctgcttctgccccttattcttcggtttccgatcggagagtatccgttagattaccgggagttcgtggtctcaagagtaaatcgacgtcggcgtcggtggttccgttgttccgatcggtgatccgggagccgcttatacgcggtcgaggtggccgtgtagtatgtgaagcccaggagaccgctgttgatgtgtcagcagtgaatgaagatgcatggcaatcacttgttcttgattgtgaattgcctgtgctggttgagttttgggctccatggtgtggaccttgccgtatgatacaccccgtagttgacgagctgtcgaaggattacgccgggaagctcaagtgttacaaagttaacaccgacgagtgccccaacattgcaactc

SEQ ID NO: 218764 - DNA, 412 bp, Gossypium hirsutum
tagatgagctagaaaagaaccttgagctctcagattggcacatggaaccatcgaggatgacactttacaggttcggtaacacgtcgagcagctctttatggtacgaactagcttactcggaagccaaaggaaggatccgaaaaggtgatcggacatggcagattgcattcgggtcagggtttaaatgcaacagtgctgtatggaaagcattgaagaccattaatccagcaaaggagaagagtccatggattgatgaaattgatgaatatcctgtttatgtgcctaaggtggccactgtttcttcttcttcttcttcccaaaaaaccatataattttcatcattcaaaggaagagaatagagagaaagagaggacttaatcagtaattattagaactatgatttattttttat

SEQ ID NO: 218765 - DNA, 405 bp, Gossypium hirsutum
gcttcttcctctttcgtttattttttggtaagtggggggagtcttatagcagtttggattagtgatagttctctttggcttttccagcaaacattgtccttggatctgtatcatttattgcacgcattttacctctaccttctaacacccaaagtggatcaaactggaaacttcttgagcctgcacttaatcctttacaggaagctaggctgagaagtcttcagcaaagattgggaatcccctatgatggatctcgcctggagcatcaagaagctcttaagcaattatggaaattggcttaccctcacagggagcttccatctcttaaatcagaactttggaaggaacatggatggcaaggtccagatccctcaacagattttcggggtggagggatcatatcat

SEQ ID NO: 218766 - DNA, 215 bp, Gossypium hirsutum
ggtcgaccacgcgtccggaacattcttcgataatgaatattcatattaaaagaatatagacgaacaaatgtatgtggagcgttatatatgccaaatggatcagcatcctgaacaatccatggatgctcaagaagcttatgtagcgggaggcgctgggaggaatcttcgacaagcatttgtaaatgacgtggaaatgtgaacagcatatgccagat

SEQ ID NO: 218767 - DNA, 394 bp, Gossypium hirsutum
  unsure (1)..(394): unsure at all n locations
cttagccttgtttgtgagctaatgcaacttgaggttttggatgagaaagatcgtgagaggtttttgggtccatacaagaaagttcagcagtggattaagcatacaaggaatgctacgagtcctcactttgacaacgtgcataatatcctcatgaaagtcaaagaaaaactaaaaaataagccgttaatggaagcaaatcatggaggtgcgcttgacatccaaaagcgattgcgttcaagaatatgacatgtgaaagaaaactgaataaatcatggagtccccagcttttgtgttgtcttggtatgaataaattggaaatgaaaggaagtatggatgtaagccatcntgcttggatgaaaggtttttgaaacattattgaaagttcaacgaaaat

SEQ ID NO: 218768 - DNA, 133 bp, Gossypium hirsutum
cacagccgtattaccacgcagtggaagcaactaaagccgtaaagccaatattgagcgagtattactcatctgaaggtgcaccagtttataaagcgatatttaaagaggcaatggattgtatttacgttgaacc

SEQ ID NO: 218769 - DNA, 301 bp, Gossypium hirsutum
cccacgcgtccggtcgcggtggatattttgatgaatacggaattatccgtgatattatccaaaaccagctattacaggttctttgtcttgttgctatggagaagcctgtctctctcaaacccgagcacattcgtgacgagaaagtgaaggttcttcaatctgtacttccgattaaagatgaagaggttgtactcggacaatatgaacgttacagggacgacccaacagttcccaaccactcaaacacttccacatttgcaactgttattctccgtatacataatgaaagatgggaaggtgt

SEQ ID NO: 218770 - DNA, 409 bp, Gossypium hirsutum
cccacgcgtccgctggaatgaggcctgttggacctcctatgccaaattgttttgttcccatggtacagcagggccaatgccctcgtggacgacgaggaacagttccagtgcaacaggctcagcaaccagtttcattaatgcagcagccgatgctccccaggggagaagtttatcgttacccccctggtcataaaatgcctgaagttgcaccgtctaatgttcctggaggcatgctttccattccatatgatatgggtagcatgcctgtgcgagatgctggcagtggacagcctatgccggttactgctttggctacatcacttgcaaatgcagcacctgaacagcagaggacgatgcttggtgaaagcttgtatccccttgtggagcgactggagcgtgatgcagcagc

SEQ ID NO: 218771 - DNA, 364 bp, Gossypium hirsutum
  unsure (1)..(364): unsure at all n locations
ttctccttctcttcgagactgctctcctcacctctggcttcagccttgatgagcctaacacctttggcaacagaatccacaggatgctgaaactcggcttgagcattgatgaggatgcaggtgaaggtgaaggtgatgctgatatgcccccattggaggatgctgatgccgaaggcagcaagatggaggaagttgattaagcctaacatgtttttataagatcagtagatttatcttacttttgaagcatctgttagcttgttttacattttgtttggtgcttttgcttttgttatgttgatggtagttattgtcgagtactcttaaatgataagtgctgtttttttctgggttnaaaaacaaa

SEQ ID NO: 218772 - DNA, 397 bp, Gossypium hirsutum
cttttaaagctgtttacccatctgttaagagtgccaaagtggttactgataggactacaggccggtctaaaggttatggctttgtaaagtttggtgatgaaactgaacaaattcgtgcaatgactgaaatgaatgggatttattgttcaactagggcaatgcggattggaccagctgctaataagaagcctgtcactgatcagcagtatcagaaagctgcttaccagaatactcaaggaaattctggagagaacgatccgaataataccacaatttttgttggtggtttggatcctagtgtttctgaagaccaactaaaacaaatatttagccagcttggtgaggtagttcatgtaaaaattccggctaacaagcacttggggtttgttcaatatgc

SEQ ID NO: 218773 - DNA, 381 bp, Gossypium hirsutum
atcgcgatcttcaacttaaagaacaacaatcttcctctgccaaacaagcctttaatcacactttcgttccttcgtcgtcttcattgccatcgtcatcatcggcccgatcttcgttttcggcatccttgccggtggaggatgaaccatcggcgggaacgaaggaaacgaaggtggtggagggggaggaagttcaggttacgccaaacagatgcttgagttgcaagaaacgcgtggggctcacggggttcaagtgcaggtgcgggatggttttttgtgggatccataggtaccctgaacaacatgcttgtacttttgatttcaaagggatgggaaaacaacaaatcgccaaagctaatcctcttgttaagggtgagaagcttc

SEQ ID NO: 218774 - DNA, 360 bp, Gossypium hirsutum
agaagaactcatgtttcattgttcaaaacggggtgcgtgaaatatataaaactattgcagacaattttgttgcaattcaattgttttttgtctgcgattctttcttatcataataattccgacaaactccctgaccatgtttttccttgggtgcattgatgattgttagcaagctcggccacggatacatataagtgttccagaatcttttgtaagtaagtccaccttataagcaggcttagcagaaaccttagtgtcgcctttgaatttcgagctggcttttggatcaccggattgagagaaaaaagccccattcagcagcaggtccccttctgatctccaattccacgtcttccatac

SEQ ID NO: 218775 - DNA, 348 bp, Gossypium hirsutum
  unsure (1)..(348): unsure at all n locations
gaggatctgaagaagaagctcgtgagcacataaagaaattgattgatgcggcatggaaaaacatgaacaaagatcaaatggccgccaagtctctttcgtctcgaatgttttttgagactgctatgaaccttgcgagagtatccatgttggtataccagaacgatgacggtcatggtattgaagatggtgagcctaaagagagagcattacgattatttattcaatcagttccattgccaaaatgattgagtacatgtttggtacttttcatgtaaaagacgtgttgtcttaaataacataagtttcaaaacataatgtattaaagtatttggttgttgaaacttanna

SEQ ID NO: 218776 - DNA, 408 bp, Gossypium hirsutum
  unsure (1)..(408): unsure at all n locations
cccacgcgtccgcccacgcgtncgcggacgcgtgggcggacgcgtgggcgaacgcccattacttcgggggttgagagttcagataccatcgaccatgtcaaggctaagatccaggacaaggagggtattcccccagaccaacagaggttgatctttgccggtaagcaacttgaagatggccgcactctcgctgattacaacatccaaaaggaatccaccctccacttggtacttcgtcttcgtggtggtatgcagatttttgtgaagactcttaccgggaaaaccatcaccttggaagttgagagctccgacactattgacaatgtcaaggccaaaatccaggacaaggaaggtatccctccagaccaacagaggttgattttcgcggctaagcagcttgaagatggc

SEQ ID NO: 218777 - DNA, 419 bp, Gossypium hirsutum
aaaatagccgatatgatcgatggagaaattgcttccttagtacctggttggagacgagggccgggaattgatgaatcaccgcgcttttcgaatcagaacttttgtcacaattgtgcttcgaaccgtacatctaccggctccctcttagattttttgacacataatggaggtgtcaaagactcgcgagttcttcagtgttgtagaactggatgtgcttcaatgcatggccggtttgaagagattacttttcaagttgaggaatccgagcattgtgtgacagatggtgcaccgaacgagtcaagccagtcggacaatttgcattaccaggaaatatgggatcagcacgaaaatcatgaacttagacagagaaattcagacgaagagtttgataaatcagatcaatcattcttggcaaatgg

SEQ ID NO: 218778 - DNA, 407 bp, Gossypium hirsutum
caaagaaccagggaacaccgaaggaagaatcttgagaaccatggacagagactggggctccaaacccgtttctggaggtgctgcctccgcccaaactgaagccatggaccgtcgcgagcggctccgtcagcttgctcttgaaaccatcgatctcgccaaagatccctatttcatgcgcaaccacctcggcagttatgagtgtaagctttgtctgacgctacacaacaatgaatggaactatatggcacatacgcaagggaagcggcaccagaccaacttagctaagacagcggcgcgtgaggctaaggaggctcctgctcatcctcagcctcacaagcgtaaagtttctgttcgtaaaacattcaaaattggtaggccaggatatcgtgtgacaaagcaatatgatc

SEQ ID NO: 218779 - DNA, 309 bp, Gossypium hirsutum
aggtttgatgaccgagaagctgcagatcgtgttgccactcccggagtatctgttgggcttgtttggaccaatttcggaggagaggttcagtttgtggaagctacagcaatgattggaaatggtgaattacatcttactggccaactgggtgatgttattaaagaatctgctaaaataccattaacatgggtgaaagccaggccaccaaattttaagtggccccttgcaaagaaaaaaatggtcctgcaggttaaaaatatcctattcctttttcaacttgggcctgaccaaaagaatggcccttaagcc

SEQ ID NO: 218780 - DNA, 413 bp, Gossypium hirsutum
cggacgcgtgggcggacgcgtggggcaaagtgatatcaaattgtggccattcaaggtcatagcaggacctggtgacaaaccaatgattgtcgtcaattacaagggcgaggagaagcaatttgctgctgaggaaatctcttctatggtccttattaagatgcgtgaaatcgctgaggcttaccttggttttacagttaagaatgccgttgttaccgtccctgcatacttcaatgactctcagcgtcaagcaacaaaagatgctggtgtcattgccggactcaacgtcatgcgaatcatcaatgaaccaacggctgcagccattgcttacggtcttgacaagaaggcaaccagtgttggtgaaaagaatgtcttgatctttgatctcggtggcggtacttttgatgtctcccttc

SEQ ID NO: 218781 - DNA, 412 bp, Gossypium hirsutum
acggacctctacttccaccacccccaccaccaaccaccgcaattcactccttactttagacccccaacggggttcctccacatggctggacagcaaaggccgttagccctaccatcgatatcaggaggcggcggaggacacagcagggaagaccaagatgatgtttcgaatcaagggagttcgaggaagaggtttcgaacaaagttcacgcaggaacaaaaggagaagatgttggctttggctgagaggttagggtggcggattcaaaaacaagatgaagcgattgttcaacagttctgcaatgaaactggggtcaaaaggcatgttttcaaagtttggatgcacaataacaagaatactcttgataatggtgcattgaggcaaagtggagacatgcaatgcaatacaatgc

SEQ ID NO: 218782 - DNA, 402 bp, Gossypium hirsutum
agaagaacaacttggtcaggtcctaacggagccaaaaaatgcactaggcacgcaatacaaaaagatgttccaaattaatggcgtcaaactgcatatcactgaaaatgctttgaaattaattgccagaaaagcaatcaataaaaatacaggcgctcgcggcttaagagccatcttggagaatatcttgatggatgccatgtatgagataccagatgttaggaccggtgatgatgtaatagatgctgtagtagttgatgaggaagccattgtatctgaagaccatagacagggagctaagattctttatggtaaaggtgcattagaccgttacctttcacaacaaaaattgagggacttggagacaactgtggacggattggacggtgagcttgaagtggaagc

SEQ ID NO: 218783 - DNA, 409 bp, Gossypium hirsutum
cccacgcgtccgctgaagagaaaaaactgggtcagaagttcttggtggatgtagatgcttggatggatcttcggaaagccggtgaatctgacaacttatcggacacccttagttacaccgatatttaccggatagtgaaggaagttgtggaagggccatctcatgatcttttggaatcagtggctcaaatgattgcatcaaaaaccttcacaaatcactctcaaatatctgcagttcgagtaaaggttgggaagcctcatgttgctgttcatggctgtctcgactaccttggagttgagattatcagatatagaaccatcgatgcgcctaactgacctgaatatatatcatcctttgagcagtccgtcacgtggatgtggtaacagatcatctttcatccatgcttggt

SEQ ID NO: 218784 - DNA, 412 bp, Gossypium hirsutum
ctttttactcatcttttcctctcaattctcactacctttacctccgttcttttgcccgcgtattgggtatccagagacttggtcttttcgcttctttcgctatggggaagatcaagatcggaatcaacgggtttggaaggatcgggcgtttggttgccagagttgctctccaaagtgaagatgttgagctcgttgctgttaacgatcctttcatcaccaccgattacatgacctacatgtttaagtatgacagtgttcacggtcaatggaagcaccatgagcttaaggtgaaggactcaaaaacccttctctttggtgaaaagcctgtcactgttttcggcatcagaaaccctgaagaaatcccttggggtgagactggagctgattatggtcgtgagtctactggtgtttt

SEQ ID NO: 218785 - DNA, 414 bp, Gossypium hirsutum
gtcaacacttccgtctacatcaagaagcagctccttgacggtaagattttggaacctacaacggagcagaacttcgaagattgctcggaaaattacgaggatgcaatgcaggagcttgacgatgggctggcagtcacactgtcgagggatttcaaacaagtgaaaatcgagttggaaagcgccatagacgatgccgacacctgcatctccgtgctgaatcaaaaagcaggaaaagacaaggaactgtatgagaagactaatcactttcgccaactaatcagcaatgcctacgacattgccaatattttggctccaaaataatcatgtgccccgcttagcttcattgcctactataatttaattattcctaattatagaacaagctgttgtgctatgtaattgttggaaatgaga

SEQ ID NO: 218786 - DNA, 380 bp, Gossypium hirsutum
cccacgcgtccgcccacgcgtccggacctacactgagcacgccaggagaaagacggtgaccgccatggatgtcgtttatgccctcaagaggcagggtaggactttgtacggtttcggtggttagattggtgtttactgttcaggattgctgaagttggctgcgatggcggcggcggcgatggtggtggggggatttgaagtcttgcggtcaagaatgtttgagcgtagtatcagcgttagggctttgtaattagtgactattagaaattagacattgggtactgtatgctttcgtttacgatttgtgattcttgtactggattacagattttaatgaagttttgagttcatttctaagattagaagtgtacttgtttgtt

SEQ ID NO: 218787 - DNA, 315 bp, Gossypium hirsutum
ctttttactcattttttcctctcaattctcacttcctttaccttcggtcttttgccggcggattttttttccagagatttggtcttttcgcttctttcgttatggggaagatcaagatcggaatcaacggatttggaaggatcgggcgtttggttgccagagttgctctccaaagtgaagatgttgagctcgttgctgttaacgatcctttcatcaccaccgattacatgacctacatgtttaagtatgacagtgttcacggtcaatggaagcaccatgagcttaaggtgaaggactcaaaaacccttctctttg

SEQ ID NO: 218788 - DNA, 418 bp, Gossypium hirsutum
cccacgcgtccgcttgcttttcttgttttgaacttttccttcttttttttttctttttttttaactttattttcagcatacatgcaaaagagatcgaagggcacaaaacgtaaaacccgacaggcaaaagcacttgaaaatgctaggaaggctcccagatcatttcttgagctcttacatgaggcaaacttagagtccttgcctcctcatgttccatcttatttgagggcagcagtgggacctccaagttctacctcccgccggcatttttgcagcgtttgcggctttagtgcaaagtatacatgtgtgacatgtgggatgcgcttttgttcgtgccgatgccaaaatatacataacgatactcgtgcatgaaatttgttgcatgagtggtaatattaggaacccaaaaggattttgt

SEQ ID NO: 218789 - DNA, 409 bp, Gossypium hirsutum
tggaaacattcaaaggaaatatgaaattgagccatgttttacccaaaagtgtttttgtttcatttttttcttattacaggtagcaaaagcacttggtggtctaattcccttacccgaacccggtccgagtgacccgagaagaaaagaattaatcgagttggagcaacaaaaagccgtgatcgatacgaaagctgattccttggtccgtcgtgaactctggctcggtttagcttacttggtggttcaaaccgccgggttcatgagactaaccttttgggaactctcatgggatgtgatggaacctatttgcttctacgtcacttccatgtacttcatggccggatatgcatttttccttagaacgtccaaagaaccttctttcgaaggattctatcaaagcaggttcaac

SEQ ID NO: 218790 - DNA, 410 bp, Gossypium hirsutum
  unsure (1)..(410): unsure at all n locations
cttgatcgttgataagagacggcatggcagaacagcaattctttcccttaagaaatccggccctgaacttcctcagctcttgtcccaattctccgctggcattgctgggaccggtcttgctgttcttttatctgttatttggaaggtagcttgttggagagttccattttgtacacctaaactctttagcgccagcatcggttttgggctagtttggatctcatgggcagttaaccaattgagagacacggttgtacaaatcagcaaaaatactagcaagtctggtctgaaggaagaggagatggttgagagagtggagaaaagtgttaatcagatatatntcagagccgcgacattgatggctatagcagtgctgagatttgcatgaactctgaagatctagacagtcg

SEQ ID NO: 218791 - DNA, 417 bp, Gossypium hirsutum
cccacgcgtccgcccacgcgtccggaggagacacattttacctaaggatgatgatcgaagatggctacaaagacctcaaacgcaaagaatttgtaattatccgcataaaccgatcatggccttccctccatataaccatgtcccggttggtccagtctatcccatgtggcgagcaccttctcatccacccaccatccagatgtggggcacccaaggttaccccccatggcaaccaaccgaaagttggcattggaagccctatcccggggtgcaagctgatgcatggggttgcccagttatgccgccacctcaaggatatttctctacattccctcaaaatgcgtccgggtttcaaccgtgcaacgtggacaaaagaaatggcatgccgcaaaccttagttgaacatcatccggaaga

SEQ ID NO: 218792 - DNA, 412 bp, Gossypium hirsutum
  unsure (1)..(412): unsure at all n locations
cccacgcgtccgctccctatgtcttcatgttgaggtttataaaggctgctcagtcagacaccaagcttgaacatctagccttctacctcattgagctgtgcttggttgaatatgaagctttgaagttcaagccttccttgctatgtgcatcagctatctatgttgctcgatgtaccctgcaaatgtctccttcttggaccccattgctttgcagacacacacgctatgatgcatcagaaatcagggagtgtgcggaaatgatattaagattccaaagagctgccagttcagggcaattgaaggtgacatttgagaagtacgcgagccatgaactcagtcaagttgcaatgattacacccttgggtaggcttncttgaacttgattttagttgaatgagttcaattttagcat

SEQ ID NO: 218793 - DNA, 418 bp, Gossypium hirsutum
ggattgtttaaaaatgaagaaccagttgatggagttacagtaaaaaattgcaccatgactaatacttccaatggtgttagaatcaaaacttggccaggtgctgaacctggcacttgttcgaacattcactttgaggatattaccgtgaccaatgtcagttctcctattataattgatcagaaatattgcccatggaacaaatgcaaaataaatgaagaatcgaaagttaaactaagcaacattagtttcaaaaacattcacggcacttctgcgcgtccagaagctgtcaagattatttgtagtgctactttgccttgtgaaaatgtagaacttgcagacattgaaattacgcatagtggaccgactggacctgcagtatcacaatgttcgaatgtgaagcctaaagttagtggcaaac

SEQ ID NO: 218794 - DNA, 359 bp, Gossypium hirsutum
  unsure (1)..(359): unsure at all n locations
atttcatatgcttgttgccaaaccgttgttcaatttacttggttgagttactagtatgatgttcttatatataccctatgtatggcggatttgccctccttttcaactaaagaattttattggctagcatcatgcttttgtggcatcatcacctgcaaactggtctatgatataacaggttttatcagccctttttgtttcaaaggatatggaaaactaagtgataaagaaaaaatggaatggaacaatcggtgcaattttgtcctatgttcttttcttctttttcctttttcttgtataaaaatttgttcaaaatataatctactttcctaaatttctttgcnnnnnanaaaannnna

SEQ ID NO: 218795 - DNA, 418 bp, Gossypium hirsutum
cccacgcgtccgcgaaagataatggaggcatggttaccaaagttagctcaattctgggacctgaatcacctgaaactgagccaagcaatgtggaaaaatgggattctcctgcaaagtatcaagctgatattaaaagagagaaaaggaaaatgaagggtaggccactctggacacagtttgtatgctgttcatctgcaaattaggataggatcataaatgcctctagacattattgagtgggggattgcttctcaatggcattgtttaatagcaactcttttattttttttctttttagccttgaatttttcttattcatgggaatttgtagcttgtaaattatttggacaattgcattgtttttttttggtgttgctgtagtactagtatattcatcttatttagtatactataattc

SEQ ID NO: 218796 - DNA, 255 bp, Gossypium hirsutum
cccacgcgtccggagaaattgctgctggtacttgctcgacatggagggacatgaatctgatatcttgagacaatctcctggtgaataaatgtttatgaccgatctatagtggcctcgtgcgggtactaggttgtcctgcttttctatgtactcacgccagggagttgctatacaagatatgcctacgtatttataaccaactatactatctatggtgatcgtttccccatctactactgatgggcatgactgtgc

SEQ ID NO: 218797 - DNA, 377 bp, Gossypium hirsutum; identical to SEQ ID NO: 196841

SEQ ID NO: 218798 - DNA, 400 bp, Gossypium hirsutum
gccggatcaaaccgctaaacaaggtttttttttccaggaagaggggaaggaggattgtttggtttcgccatggatgatgatgaagaaggtgaaggtttgagtgatggtggtgatggtgagagttgttgagggtttaaaggcttgtgcgttcgaggatcgatcccttgacttatcaatttcttactcagaaaaaaagagaggaaaaagttaccgattccctaaaaggcggtgaaggcggaggatgagatcttcttcatcgggagcaatctggccacgtttaacagaaggtcggagataattcatccatcggagacgacagctttttccgcatcggagaagaccagcccgtttaggtaaagtccgccaccgtccttcgccttctttggtgatgtaattagat

SEQ ID NO: 218799 - DNA, 323 bp, Gossypium hirsutum
cagcatcaagtggaatttttccaagttcttggtcgataaggagggccatgtcgtcgatcgttatgctcccactacttctcctcttagcattgagaaggatataaagaaactgctggcttgaatttgatgggtggaagagattagctgatcacctcatggagttaataaattagatatgcctacgaataaaaaaaaaactattctatctctggttatgtttcccccatctcctaatgatgggttagactgtactacaatttagaagttgtaccttttataatattttattcaccatggaaaagcacacatctttgtttgtctta

SEQ ID NO: 218800 - DNA, 401 bp, Gossypium hirsutum
cccacgcgtccgggttttttgactccgatggatacttgcatcttgttggtcggatcaaggagctcatcaatcgtggaggtgagaaaatatcaccaattgaggtagacgcagtgttattggctcacccagctgtaacacaggcagttgccttcggtgttcccgatgagaaatatggcgaggagataaattgtgcggtgattttaaggggaggaagcttggatgaagcagaaatcacgaaatattgcaaaagaaatcttgcgagtttcaaagtacccaagaaagttttcatcacggattccgtgccgaaaacagctactggaaaaatccagaggaagatagtagcagagcatttcttggctcaaacgtctgccgcttaagtacccaaatttggagcttaaatt

SEQ ID NO: 218801 - DNA, 394 bp, Gossypium hirsutum
aaaaaccctaaaactcccctaaaaccaccacggtcaatacttcggagtctctttctagttcgttctcactgtcaaagcaagcggtggtaccggcaccggcgcctcattcacctcagttctcaccgctcagattccttgtagtctccccgttcattctcatttcggtctcaccgttctgccttcctctttcagattcactaagtggacagtttttgcagatagtgattttgaccttttataagcagtcaaagtgaatacagaaaagaaacaagatgaaatcggttgtgggcattgttgtatcaaataagatgcagaaatcagtggtagtagcggtggacaggctcttccacaacaagatttacaaccgctatgtcaagcgcacctccaagttcat

SEQ ID NO: 218802 - DNA, 387 bp, Gossypium hirsutum
ggttgaaatccataacatggatgaggaagaagcttttaccattcttttggagctgtctgataagaacctactcactctggtgaaagatgcacgggctggagaggcatattgcagttaccatgaaatctgtgtaactcaacatgacgtgttgagagaccttgctcttcatttaagcaatcaaggagaagtgaatgagcggaagcggttacttatgcctagaagagatactgaacttccgagagactgggagaaaaatgcagatcaaccgttcaatgctcagattgtttcagttcatacaggagaaatgggggaaatggactggttccacatggagttccctaagacagaagtacttatcctaaatttttgctcggacaaatacttctt

SEQ ID NO: 218803 - DNA, 388 bp, Gossypium hirsutum
atcaaaatcactccagttttctttatcactgaaaaatgtcttgctgtggtggaaactgtggctgcggtactggctgcaagtgtggcagtggctgtggaggatgcaagatgtatccagacctgaacgctgccgagatgaccacaactgagactctggttcttggtgtagcaccccagaaagcacactttgagggagctgagatggaattcggggctgagaacggctgcaagtgtggagacaactgcacctgcaacccttgcaattgtaaatgattagagaccaaagccaaagctccctggaagcagaggcgcctttgtctttaagaaataatatgttttggtgtttatgtgtttttagaataaagtagccatggcttgtcgtaggtttt

SEQ ID NO: 218804 - DNA, 394 bp, Gossypium hirsutum
aaagctgcagcaatggattccgaggtacttaacagcgatgtcttgaagctttctagaggcattgaaaacatcagcgacgttctaagattaaatgaaaaaatggcattggatgagagcctggagaagttttccgaatcaatgaacaagttcatgaaaatggccgaggaagagattataaggattcaagcccatgaaagtgtggccttatctctggtaaaggagattactgaatacttccatgggaactcaacaaaagaagaggcccacccatttagaatctttatggtggtgagggatttccttacggttctcgaacgggtctgcaaggaagttgggatgataaatgaacgaactgttgttagttctgcccataaattcccagtcccagtgaatc

SEQ ID NO: 218805 - DNA, 402 bp, Gossypium hirsutum
cccacgcgtccgactactttagaaactcaaacaaaccttttacttctcaactctttcaaattcatcatgtctgacaagtgcggcaactgcgactgctctgacaagagccagtgcgtgaagaaaggaaatagcttggtcattgagactgaaaagagctacatcagcactgtagtggtcgaggctgtggcagagaacgatggcaagtgcaagtgtggagatagctgcagctgcacagactgcacatgtggcactcattaagcagacatagaaccatgatgttttagtccatagcaatattaggacctaaaaataatgaaattgagttgaataaattggtgttttgttgttgtagtttgagacattgaatgcgttttcatgcctgtctgtcttatgtctgagtct

SEQ ID NO: 218806 - DNA, 306 bp, Gossypium hirsutum
acagatttaagcaaatggaattgcttgttgattacagtggcttggggtttcttgtttcggattttgttttacttctctttgttattgggaagcaaaaacaaaagatcatgaaaaacccggatgattgtttttaacaagtttaaggttgggatttagcagaaaaatgttgctgtaatttgtgtgcatctttattgtatttgatttttactgttggtaaagcttagattgaagtgcaaaaccttttcatatctggaaaataattcatgttccatttcttaaatcgttatttttttgattaattgttac

SEQ ID NO: 218807 - DNA, 398 bp, Gossypium hirsutum
cccacgcgtccgcccacgcgtccgctttgcttaagaagttcaatgctccagactctccttattttatgtttctattaagcactcgtgctggaggtcttgggctgaacttgcagacagcagacactgtaattatttttgatagtgactggaacccccaaatggatcagcaggcggaggatagagcccatcgtataggacagaagaaggaagtcagggtttttgtgctgtttagtgttggatcaattgaagaggttattttagagcgtgcaaagcagaagatgggtattgatgctaaggtcatccaggctggattgtttaatacaacttccacagctcatgacagaaaagaaatgctggaagaaatcatgcggagaggaacaagctcacttggaacagat

SEQ ID NO: 218808 - DNA, 400 bp, Gossypium hirsutum
gaaaaagtttgaaacccggaaatgtcggacgaggaacaccattttgaatccaaggccgacgccggtgcctccaaaacctacccacaacaggccggaaccattcgtaagaatggttacatcgtcataaaaaaccgtccctgcaaggttgttgaagtttcgacctccaagactgggaagcatggtcatgctaagtgtcactttgttggaattgacatcttcaccgccaagaagctggaagatattgttccctcttcccacaactgtgatgttccacatgttaatcgtactgactaccagttgatcgacatttctgaagatggatttgtgagtttgctgaccgaaagtggagacactaaggatgatctgaggctcccaactgatgagaacctgttgaaacaga

SEQ ID NO: 218809 - DNA, 396 bp, Gossypium hirsutum
cccacgcgtccgcccacgcgtccgcccacgcgtccgccccaccctctcattcagttggaccccaaggatatctgccaggaaggctatatgatcttgatgcatcgaagtatggatctcaggctgaattgaagtcactaatagaagctttccatcagaagggaataaaatgtttagctgacatagtaataaaccatagaacagcagagaggaaagatgggagaggaatatactgcattttcgaaggaggaactccagacgatcgattagattggggaccatcttttatttgtgggaacgataaggagtattcagatgggacaggcaatcccgacactggactggattatccaccagctcccgacattgaccatctcaacccaagggttcaaaaagagt

SEQ ID NO: 218810 - DNA, 396 bp, Gossypium hirsutum
aaccccaagtttgatttaagttagtgagtttcttagtttccctagaagttaagcatggctcaaattaagaggatggagtgccaactcgagatcaagtcctcagctgataagttctttgatgcctacaagaccaaagcccagcttatgccaaaaatggccaatcaagtcgttagagatgtaaaacttgttgagggtagtggttgggattccgagggttcggttagacaatggtattttgttgccggaggtaagcttgagacttgtaaggaaatgatggaaaaggcgaatgataaagacaggactattggttacaaattggtggaaggtgaaatcatgaaagctttcaaaagctggaactccatcctcaacgtgatgcctataggggagggaagtttg

SEQ ID NO: 218811 - DNA, 293 bp, Gossypium hirsutum
catgaccatccagtgcaaggtttgcatgcagacattcatatgcaccacatcagaggtgaagtgcaaggaacatgctgaagcaaagcacccaaagtctgatatctttgcttgcttccctcaccttaagaaatgaaatcaagtttgtgtatttgtgtgattaaatttgaagtttgtgttaaaagttgttgccaaggtattggattcccacacaattcatacttgttttgtgctattatatatggtatacttgttatataaaaaaaaaaaaaaaaaaaaaaaaaaaaaaaaatttt

SEQ ID NO: 218812 - DNA, 397 bp, Gossypium hirsutum
atgaaagttacattagtttttaaccatttcggtgagggtcttatcgagaggatgccgagggtcaggataggctatgcacatgttgctaacaacaaatacgacgaatggaagatgtacgccatcggtggtagtgcgaatccgaccattttcagcgaagggaacaacttcgtagcgcccgataatcgtagttccaagcaagttacgaaaagagaagcaacaaattggcaaaactggaaatggcaatcttcaaaggatgtgtttataaatggtgcatattttgtaccatctggttatggtagctctgctcctctctatactcgagttcaatcgttcaccgttgctccgggatacatggtccctgttttaacatcaaatgccggtcctttacgttgtcttg

SEQ ID NO: 218813 - DNA, 395 bp, Gossypium hirsutum
cggacgcgtgcatttggctgaagccagtgttacttccacttgatctaaaattgctgtggggtgcaaccatcttaaagacactaatgccacagcgattgataaggcatacccttgtgatatcatgcaaagagggcgagtgcgggtccatttaaaaaaggaaaatggtactttatggaatccgttcattacttcaaggaaacatctgatacaccaagtacctgtattggtacctacacaccgggaaaggactaagaagcaggaatctacatcgacatcaattgctgctgccggatcttacaaaccctggatgggtggaagaaaaaagcgattgttctcgtactgcctaattaacagaatgttagtgattataccttttaacatttccaattttgcca

SEQ ID NO: 218814 - DNA, 348 bp, Gossypium hirsutum
cccacgcgtccgcaagaacggtaggttggctatgttctcaatgttcgggttcttcgttcaggccatcgtgaccggaaagggaccattggagaacttggctgaccaccttgctgacccagtcaacaacaatgcttgggcctatgccaccaactttgtccccggaaaatgatgggaacgtgaaccaggagacatctcaatttctactattggcatttacatggcaatggctgctgctggcgccacagttcctaccctttttgtatttgtcttgttcatgtttttatttgttggtgtgaatgtaaatttgttgcacaatcaatgaaagcagaatgtgaattttgtgtgctc

SEQ ID NO: 218815 - DNA, 394 bp, Gossypium hirsutum
tgggataagaccgtgaaagtttggaacttgactaactgcaagattcgtaacacattggccggacacactggttatgtgaacacggtggcggtttcgcctgatggttctttatgtgctagtggaggcaaagatggggtgattctgttgtgggatttagctgaaggaaagaagctttacagcctcgaagctggtgccgtaattcactcgctttgctttagtcctaataggtactggctttgtgctgcaacggagcagagtataaagaatctggatttggaaagcaagagcgtagtcgaagacttgaaggttgacctcaaaggccgaggcttaaaacatttgccagccaccgccaacgcaaacaaaaagaaagtgatatattgcacatgcttgaact

SEQ ID NO: 218816 - DNA, 335 bp, Gossypium hirsutum
cccacgcgtccgattcgctggtgtgtgcgctcttgctgtcttgtacatagctggtaacgttgtggaaacaaaggggcgatcattggaagaaatagagcttgctctgaatccgacgacttaatttgtacaatatccaaaggtatgcagaaataatctctgaagctggttaatgctcatctcatgagcattccattattttgcatcttttggttaaggccagagagaggcaactagttctagtgacgtgtacgtatacctatgttgcttgaaatatggaaagaagagatttttggtagtttgaactctgttggtttatgaaatgcaagatgttgcgt

SEQ ID NO: 218817 - DNA, 398 bp, Gossypium hirsutum
aaaggaactcagacaagctaccaaccaagcccttaacttgcttcaagataactatcccgaatttgtggccaaacaagtgttcatcaacgttccatggtggtacttggctttcaataggatgatcagtcctttcctgactcagagaaccaagagcaagttcgtatttgcaagtccagccaaatctgctgagaccctcttcaaatatattgctccggagcaagtaccagttcaatatggtggactgagcagagagggtgaacaggaatttagcgtggccgatgccgtcacagaggttacaatcaagccagcagcgaagcatagtgttgaattccctataactgagaattgtaatctggtttgggaactccgagtagtgggatgggaagtcaattatggag

SEQ ID NO: 218818 - DNA, 394 bp, Gossypium hirsutum
atgagttgcctgatggacaagtaattactattggagctgagagattccgttgtccagaagtcctcttccagccatctctcattggaatggaagctgctggaatccatgaaactacctacaactctatcatgaagtgtgatgtggatatcaggaaggatctctatggtaacattgtgctcagtggtggttcaactatgttccctggtattgcagaccgtatgagcaaggagatcactgctcttgctccaagcagcatgaagatcaaggttgttgcacccccagagagaaagtacagtgtctggattggaggatctatcttggcatcactcagcaccttccagcagatgtggatttccaagggtgagtatgatgagtcgggtccatccattgtcca

SEQ ID NO: 218819 - DNA, 385 bp, Gossypium hirsutum
gagccacaagatgcttacggcttggagaatcttgcaacagacgagttgtgcaagcattacaccgaagactttggaattgaatgtcgcattggaaggttccacaacatttacggcccttttggaacttggaaaggtggaagggagaaggctccagctgccttttgcagaaaggctattacttccattgacaagtttgagatgtggggagatggtcttcagactcgatctttcactttcattgatgaatgtgttgaaggtgtacttacattgacaaagtccgatttccgtgagcctgtgaacatcgtaagtgatgagatggttagcatgaacgagatggcggagattgtgcttagcttttaagataaaaagcttccgatccaccata

SEQ ID NO: 218820 - DNA, 392 bp, Gossypium hirsutum
caagaagaaggtgaagaaaacaaatgtcccggtggcagagttggtctacggtgcaatgttgtctggtgaccttcaaaaagcagtcgagaaggagtttgaaatggctttgcaagatcgggtgatggaagaaacaaaggataaaaagaatgctgtagaggcctatgtctatgacatgaggaataagctttgtgataaataccatgattttgtcactgcttcggataaggaagagttaatggctaagcttcaggagacagaggattggttatacgaagatggagaggatgaaactaaaggtgtttatattgccaagcttgaagagcttaagaagcaaggtgatcctattgaagaacgttacaaagagtattctgagaggggaactatcattgatc

SEQ ID NO: 218821 - DNA, 424 bp, Gossypium hirsutum
ccggtgcggtattcgggggtccgccacgacgtccgcccacgcgtccgctcatgccaaaggcattgtccttgataagatagggattgaagctaagcaacctaactctgctatcagaaagtgtgctcgagttcaattgatcaagaatggaaaaaagattgccgcattcgttccaaacgacggttgtttaaattacatcgaagaaaatgatgaggtgttgattgccggatttggacgaaagggtcatgccgtcggtgatattcccggtgttagattcaaggttgtgaaagtgtctggtgtttcattattggcactttttcaagagaagaaggagaagcctagatcctaatgttgcaacaatgaggatatcttttatgatgttttcatagattgtgttttgcggattgaatgtaaaagcaattgtgtt

SEQ ID NO: 218822 - DNA, 397 bp, Gossypium hirsutum
gtgtcatggatcctcatctatatctgcacacgttatgcattcgcgcgggccattactctactatctgagaacaatcctataactaggtagcaagggtgagatcaggaagcattgcaatcttgcaaacaagcttcactaaaatgcctcgccaaagagaaagccgagtgtggccgaataaaatgtttgtttactcagtttcttttccaagagacgagtttgttaatgtgcaagtgagtaatggtgcaatggtactggtttgtaacgatcgatccattgcatttttcttttagcataagccaggttgccttctcttgatgttggtcatgggcttggtggatgtagggatggatgtaatatatgtatgtaaggatggtgttgactgtgtatgatgcatgaa

SEQ ID NO: 218823 - DNA, 392 bp, Gossypium hirsutum
ctgattttaaagctgcacccgaagccaaaagaggaaaggaaaaaggaggattgtttgttttgcgatggcggacaaggcggtgacgatcaggacaaggaagttcatgaccaacaggctcctttccaggaaacaatttgtcattgatgttttgcatccagggaggcccaatgttgccaaggcggagctgaaggagaagctttctaggatgtatgaggtgaaggacccaaattcgatctttgtgttcaagttcaggactcattttggaggtggcaaatctactggatttggtttgatttatgattctgttgagagcgcaaagaagtacgagcccaaatacaggctgatcaggaacggactcgataagaaggtggagaaatcaaggaagcaaatga

SEQ ID NO: 218824 - DNA, 399 bp, Gossypium hirsutum
agtggggagcgactaaagagatatatataccacaagatatgcagtgagttgcctgaaggtccattctgcatagtttatatgcacagtacagtgcagaaggaggataactcccctggtgttactatcttgaggtggatttacgaagaacttccccctgagatcaaggataggctgcaagtcatctacttcatacaccctgggcttcgttcaaggcttgtctttgccactcttggccgattcttcttaagtgggggtttatactggaagatcaagtacataagccgcctacaatacctatgggaggacataaagaagggagaggttgagatccctgaatttgtgcaaaaccatgacgatgttcttgagcaccggcccttaacagattatggtattgagcca

SEQ ID NO: 218825 - DNA, 403 bp, Gossypium hirsutum
  unsure (1)..(403): unsure at all n locations
gccacgcttacagagacccgtgagctgtgatcgttgagcggatcaccccaaaacacaaaaatgggtgcttatgaatcagttcctcaaaaatcaatccatgaatttacagtcaaggattacaaaaaccaagatgatgaccttagtatgtacaaaggaaaagctcttcttgttgttaatgttgcctctaaatgtggactcactgattcaaattatacccagttgactgatctttacaacaaatacaaggaccaaggactggagattttggcattcccatgcaatcagtttttgagccaagaacctggtaccagtcaagatgcacaagaatttgctcgtatcaagatacatggctgaataccctantttccaaaaggttcatgtcaatgggccaaagacagagcct

SEQ ID NO: 218826 - DNA, 395 bp, Gossypium hirsutum
cccacgcgtccgcccacgcgtccgcccacgcgtacgcccacgcgtccgggctctgctacgaacgaggaataaacattggtgcgaaccaccgtcttaagcaccaacaaatcccctttttggtcccatgctaccagtcctgttgctgacttggagcttcttctgtcatacgctgcgtctaactgaatcgttgcttttgggcactctcaaaatacatggaggctttcttcaaaccaggaccggctacgtgggcattcatcatttgtaatgactttcctgcacctgagattaacaaaattgggaatatagtctcatgagattctacaaatagtcattgtaatttttggggcgaactgtaagccccataagttgctataaaattctttatatttggtctg

SEQ ID NO: 218827 - DNA, 418 bp, Gossypium hirsutum
aaacatttgcaagtttgcaaagaagggcttgaccccatctcagattggtgtcattctccgtgattctcatggtattgctcaagttaggagcgttactggcagcaagatcttgcgtatcctcaaggctcacggtctggcccctgaaattccggaggatttgtatcaccttatcaagaaggcggttgccatccgaaagcatttggagagaaacaggaaggataaggattccaagttcaggttgatccttgttgagagccggattcacaggcttgctcgctactacaagaaaacaaagaagcttccccctgtctggaaatacgaatctacaacagccagcactctcgttgcttaagctaggcatgtggcgtggtgcaattttgggggaatccgggttcgatgtggatgctacgatggaagc

SEQ ID NO: 218828 - DNA, 491 bp, Gossypium hirsutum
agggcgaatgggtacgtcccacgcgtccgcgagcgtttgacaaaccgcattcagaatggtgttacagaagtcgttgaggcaaaggctggtgctgggtctgcaacattatcgatggcatatgctgcggttcaatttgccgatgcatgtcttcggggcttaagaggtgatgctgacattgttcgatgtgcatttgtggcttctcatgtgactgaattgcccttcttcgcatccaaggtaagactcggtcgttgcggagttgaggaaatataccctcttggcccactaaatgagtatgagagggttggcttggagaaggcaaagaaagaactagaaactagcattgagaagggggttgcctttgtcaagaaatgaataggtactccaatacccccaaatctaccttttctctgataaccaaagtttgtaagaataaggggtaactctcctcttttgttctacataaacccttagccatcgggttcctagatgtg

SEQ ID NO: 218829 - DNA, 423 bp, Gossypium hirsutum
aggtgacccatagcttctctaccaatgaaaacaccatcaccatcggtacacaacatgcattggatccattgacgatggttaaggcacgggtgaacaacgctgggaaggcaagcgcactaatccagcacgagtggcgccccagatccctctttaccatttctggggaggtggataccaagtccattgacaagagtgccaaggttggacttgctttggcactcaagccttgagctttataagagctccatcttggaagagtacggcaaggtaagcttagaattttgaaatgtaatctggtgacactttttcatggcgttgccatagacacttatgtcagtggtccttttttttctttttggcttaaaataagaagaaaacggaacaaaaagaaaaagaaatggcatgttggcttctttttgaaca

SEQ ID NO: 218830 - DNA, 423 bp, Gossypium hirsutum
  unsure (1)..(423): unsure at all n locations
gcttatcagaaatcccaacacttattcaagcttaataggactcacttggtctctaatcgcattcaggtggaatgtacaaatgcctgccataatagccaagtccatttccatactgtcagatgcagggcttggcatggccatgttcagtcttggtctgttcatggcattgcaaccgaggatcatagcatgtggaaattccgttgcagcttttgccatgggtgtgagattccttgcaggtccagctgtgatggcagccgcttccatagctgtcggactccgtggcgttctcttacacgttgccattgtgcaggcagctctcccacaaggcattgtcccctttgtctttgccaaggaatacaacctacaccctgatattctcagcactgctgntatttttggaatgctaatagccttgcccataac

SEQ ID NO: 218831 - DNA, 420 bp, Gossypium hirsutum
tataggaaaagacctaatggtgctaagggccatgatcatgaaaggaaaaaaggtgtccgatggactgaagatgaacacaggaggtttctaatgggacttgtaaagtatggtaaaggggattggagaaatatttcaaggaactttgtggcttcaaagacacctacacaagttgctagccatgcccaaaaatattaccaaaggcaactttcagggggaaaagataagaggagaccgagcattcacgatattacagttcttaatctcactagcaccactacgttttccgaccatcgtaaggctctgtctgtaaaccagtctaatgtccttgcattgcagcataagatagcgagtatgtcaaaagctgtaagccttaatgggtcggatactagtttcgattcggagaatggaaacaggtttaca

SEQ ID NO: 218832 - DNA, 422 bp, Gossypium hirsutum
gttttcaggacacaaaaagtatataactccaaataaaagacatatgcttccttattttctgaactcctcaatgcccgaagcagagttcaacaggatcataaaagaattacaccatgaatctttgggacaaccagaactcaggaccagcaaagctggaagggatgtaaccaagtatccggttccagaatgtatgtgcaatgatgcacattcccacttcatttgatacagaaagcttccaacccgatagctaacattgcaagagtcttcatcgagaatccaaatttctctgtgcttccccgaattcgagccctttgaaaatggagaataatgatttttcagacactgatgattgttgggagcgccatttcaagaaggaccacagccctcacaagcttttctgcaagcgtatcgtattccggtct

SEQ ID NO: 218833 - DNA, 304 bp, Gossypium hirsutum
acggacactttggaagggacgacccggacttcacctgggaagttgtgaagcccctcaagtgggagaagcctcagtcttaaaatccagctttggctgttctcgagtgtctctaatctcatacatatgatgcccctcattcattttcattttcctttttcttatttgttctctttcacctttaattgtgtccttctgtcaatgttgtgttccaaaaatgtatgagaattttgcttatattgatggcactggaagtaaacaatcttcctcttataattgcttaatggaattcttggctaccttaatc

SEQ ID NO: 218834 - DNA, 408 bp, Gossypium hirsutum
cccacgcgtccgagaggccaaactatttattgcacctttctctttctccgatggctaagccctcactcttgttctgcaggctcctactattatccgccaccgtagccgccggcgaacggatcgacgatgaagacgaccttctgatccgtcaagtggtgccagatgcggaggaccaccacctgctcaacgcggagcaccacctctccgccttcaagaaaaaagttcggcaagacctacgccacgcatgaggagcacgaccaccgcttccgtatcttcaagaacaacttgctccgcgccaagtcacaccataaattgcatccctccgccgtccacggcgtcaccagtgtctccgatctcactccggcggagtttcgccgtcagttcctcggcctgaagccgctccgactt

SEQ ID NO: 218835 - DNA, 386 bp, Gossypium hirsutum
ggttattgtaacaccattgaacatttcccatgttcaagcaacgatttattgctccaaaaagcatggcctagaaattagaactcgaagtggtggtcatgacttcgaaggtctttcctatgtctcccatgtcccatttgttgttatcgatttggttaatttgcgatcagtcgatgttgatgtcgaaaacgaagaggcgtgggttcaatcaggtgcaaccgtgggtgaagtatactacagaatcaatgaacgaagcacgaacctttccttcccagcacctgttttccgcactggatgaattggtgggtccattagcggtggatgcgtttgttcattggttcgaaattattgcctttccgctggttaacgtcattgatgctcatttggtc

SEQ ID NO: 218836 - DNA, 442 bp, Gossypium hirsutum
ctctggtattgaagataaactgcaacaaggagtgccagaagccattgaatctcttagaacagcggggataaaagtatgggtgttgactggggacaagcaggaaactgccatatcaattgggtattcctcaaagctcttgactagtaaaatgacacaaatcataattaacagcaaatctatggagtcatgtagaaagagtttagaagatgccatcattatgtctaagaaacccacaactacatcggctatatcaggcactacaaataacacaggaggaacgtcaggagctggttcaactcctatagccttgattatggatggcactagtcttgtatatattcttgacagtgaactggaagaaaggctcttccagttatcctgtaactgttctgtggtattgtgttgtcgggttgccccactacagaaagccggaattggttcc

SEQ ID NO: 218837 - DNA, 425 bp, Gossypium hirsutum
ggagccaagggttgcgaggttattgttagtggaaagctaagggcacaacgtgccaaatgcatgaagttcaaagacggatacatgatttcttctggtcacccagtgaacgagtacattgactctgctgttcgacatgttcttctgagacagggagtactgggcatcaaggtgaagatcatgcttgactgggatccaaagggtaagcaaggcccaacaactccacttccggatcttgtcaccatccaccctcccaaggatgatgaagttatcaaggtggaagcacccgtgccgaccgagattgaactttcgccagtggcttaaagccgatgatgactgttatgatagtcatctatttgatatttggagcatgtcaagtgtcttagattatgaaggccttaagtttggcacctaaaatgaacttatgc

SEQ ID NO: 218838 - DNA, 308 bp, Gossypium hirsutum
ctgaatactcgaagagacaatttcttgctttcgtttctttaatgaagtggataaatcactatactaaagggttctatattctatctgtttccccctattttggctacgtttctttttggcccgaacctaacaatccatcccttctatcgcagaaaaccttgcatctggctcagggttttgaatgcctgattaaataatttgaagatgagtccattttcaatcacgcgtaagaaaacgcctttccagaagcacagagaagaggaagaagccaagaagaagagggcagaggacgaaactgctcgattata

SEQ ID NO: 218839 - DNA, 422 bp, Gossypium hirsutum
gaataaactccaagatgtccttcctcctgagatcggtgagctgaaaagactaacccatctgtcgttgagctttaacaattttaagggtgagattccaagggagcttgcaaatctacccgagcttcgctatctctaccttcaagaaaaccgtttcactggtcgagttccagcagagttgggcactttacaaaatcttcggcacttggatgtcggtaataatcatttggtcggtaccattagggagcttattcgtattgaaggaggctttccagttctacgtaacttgtatttgaataacaattatttgactggaggaattcctgctcagctggcaaatttgacaaatttggagatattgtacctttcatacaacaagatgtctggagcaataccaacagcacttgcccatattcctaaattga

SEQ ID NO: 218840 - DNA, 411 bp, Gossypium hirsutum
cccacgcgtccgggacactaacttgtgtgccattcacgccaagcgtgtgactattatggccaaggatattcagctggcaagaaggattcgtggtgagcgtgcttgagttggtgcgttctgtgtttgtgaagatggattgttggtggctgcggatggtgttttgttactaagttttctttttgttgaagcctataggttattagggaaaaataggtgtttacttggtagtcatattaattgtcattggcaaatactgcctaagacactgtgaaggtctggttgttagaaatttggcatgtatttgatctttttggatcctttatttctcgttgtatttctggttgtgcagccactttgggaattgtattggacaactttctgttgccatctaatctagttgaagctagctta

SEQ ID NO: 218841 - DNA, 459 bp, Gossypium hirsutum
aaattacttggtcacctttttattaattcagggggctaaataatagaagagacaatttctttctttcttttctttaatgaagtaaataaatcactatactaaagggttctatattctatctgtttccccctattttggctacgtttctttttggcccgaacctaacaatccatcccttctatcgcagaaaaccttggatctggctcagggttttgaatgcctgattaaataatttgaagatgagtccattttcaatcacgcgtaagaaaacgcctttccagaagcacagagaagaggaagaagccaagaagaagagggcagaggacgaaactgctcgattatacgaggagtttgtggcatcgtttcaaggagataatacccctggatcgaaggcatttgttcgaggtggaacaatcaatcccaacgagaggttgaaatccgattcttgaggtgaaaagt

SEQ ID NO: 218842 - DNA, 404 bp, Gossypium hirsutum
cctacacgtacgatcatgctttctatctttgttctcttcaacgcactccacatgacagggtggagccttcaaggactatgcatgaccaatcaacttataagaacgttcaagagcacttctctcacctcaaacgatcccacaactatgagactcaccatatgggactgatatcgtgaacactgctagactcaacgactcgactaactatgatcctaactggtactatgctagatcttgttccattgcaagaaagatctactcgagacgacgacttggcagtacccccttagacatgactaatcgtgcagcaaaagtagtagcatgcctacttctcatacttgcaacaacagtcgtactattgctggaaacatacttcagccgatgccgaatatgcacttcattta

SEQ ID NO: 218843 - DNA, 457 bp, Gossypium hirsutum
  unsure (1)..(457): unsure at all n locations
gttggatggtattctaccgggctaggagtcacaggcggcagtgcattgatccatgatttttattctagggaagtatctaaccctattcatttgacggtggatacggggtttaggaatggagagggtaccgtaaaggcttttgtttctgtcaatttagctcttggagacagacaacttgcagctcaatttcaagaaattcctcttgatctatgtatggttgaagctgagcgagttggatttgacatcctcaagaaaacagcagtcgacaaatttccaaatgatttggaaggaatggaagtcacaatgggaaggctatcggctttgatagacgatgtctacaaatacgttgacgatgttgtggaaagccgtgttccagccgataacaacataggtagatttatagcagaaacagtagcttccttacctaaactatctnccccagctttcgataaactca

SEQ ID NO: 218844 - DNA, 422 bp, Gossypium hirsutum
aaaatatacgcaattcctcttggtggaactctgattgagcagccttttgctattggaggatctggctccagttacctatatggattttttgatcaagcatggaaggaaggaatgacaaaggatgaagctgagcaattagtggttaaggcggtttcccttgccattgctcgtgatggtgctagcggtggtgtcgttcgcactgtgattatcaactctgaaggagtcacgaggaacttctatcccggtgacaaactgcagctatggcatgaggaattggagcctcagaactcgttgctggatttactgaattcttctaatcctgaacccatgaatatttaatcaaatcaaaggctaaggggaaattttttattatttttatgtggaaatttttgggtagatccaagaaatcgcttgaaattgat

SEQ ID NO: 218845 - DNA, 418 bp, Gossypium hirsutum
gcctctcttaaaacacctccgtcgccgtcagacaagcctctcggcaccacttccgacagtccgttttttggattttttgatttctgggtgaagtgcggaaagagttgctttcctaaagggtacagaaatcttaacacacaggtgccagaactacctacaatatgtcaggcaggaaggaaacagtgttggatttggctaagtttgttgacaaaggtgttcaggtcaaactcaccggtggtagacaagtcacggggaccctaaaaggatacgaccagctactgaatcttgtcctggatgaagctgtagagtttcttcgagaccaggatgatccgttgaagactactgatcagactaggcgtcttggcttgatagtttgtaggggcacagcagtcatgctggtgtcacctaccgatggcac

SEQ ID NO: 218846 - DNA, 415 bp, Gossypium hirsutum
gttttccttgttctcttctacattcagctaaggggtgctctgagatcacataccaaaatggtgaaggccgttgccgtccttggcagcaatgaaggtgttagcggaactgttttcttctcccaagaaggagatggtccaactaccgtgactgggaacctttctggtcttaagccgggactccatggcttccatgttcatgcccttggggacacaactaacgggtgcatgtcaactggaccccattttaatcctgctggcaaagagcatggtgctccagaagatgagaaccgccatgctggtgatctagggaatgtcactgttggtgatgatggctgtgcaagcttctccatcaccgacaaacagattcctctcacaggcccaaactccattatcggagagctgtagttgtccatgc

SEQ ID NO: 218847 - DNA, 413 bp, Gossypium hirsutum
gttaatttaagtgtaggtcagccttaacaaaaaaatgtctcggagatatgatagccgcacaacaatcttttcccctgaaggccgtctctaccaagtagagtatgcaatggaagccattgggaatgctggctctgcgattggaatattatcaaaggatggtgttgtcttggttggtgaaaagaaagttacttccaagcttcttcaaacctccacatctactgaaaagatgtacaagattgatgatcatgttgcttgtgctgtggcgggaataatgtccgatgcaaacatcctaatcaacactgctagggtgcaagctcaacgatacacatatgcttaccaagagccaatgcctgttgaacagttggttcaatctctctgtgatacaaagcagggttatacccagtttggtggtc

SEQ ID NO: 218848 - DNA, 401 bp, Gossypium hirsutum
cgtattctccgtccaagtggattcgttatcatccgggacaaacaaccagtgatagattgcgtaaagaaatatttatcagctttgcactgggaagcagtagcaacagctgattcagataatgaaggggatgacattgtttttatcatccaaaagaaattgtggctgacaagtgaaagcctcaggaattctgaatagagtatttcaaccctcacagtttccccctttcttatttcatctgcagctccaaagagattaagaaggccaggcattattaaaatgcagtaaacagtttcattttgtagcattaaacaaatggttcacattatttttttgtttacctttttttttctttttctttttaatgaattacttgacaagccataaactggtcattgtgatct

SEQ ID NO: 218849 - DNA, 447 bp, Gossypium hirsutum
cctggaacgaatggccagcacagcttttatcaactaatccaccagggacgtgtaattccttgtgatttcattggtattgtgaagagccagcaacctgtgaaccttaaaggtgaagttgtgagcaaccatgatgagcttatgtccaactttttcgcacagccggatgccctagcatatggaaagacagcagagcagttgctgaaggagaatgtttcgcagcatcttattcctcataagacgttctctgggaatcggccttctctcagtcttttgctaccatctcttaacgcttacaatattgggcagctcttggcaagctatgaacatagagttgctgttgaaggttttgcttggggcatcaattcttttgaccagtggggagttgagttgggtaagtcactagctactcaagtccgaaaacagcttaatggatcacgtacaaaaagt

SEQ ID NO: 218850 - DNA, 250 bp, Gossypium hirsutum
agccagcaacctatgaaccgtaaacatgaacaacttagctcgcttaataagcttacgtgcaactttatcgcacattcggataccatagcataatcaaagacagcagagcaattgctgaacgagaatgcttcgcagcatcttattcctcataagacgttctctggtaatcgaccttctctcagtcttttgctaccatctcttaacgcttacaatattggtcaactctaggcaagctatgaacataaagttg

SEQ ID NO: 218851 - DNA, 434 bp, Gossypium hirsutum
  unsure (1)..(434): unsure at all n locations
tgcagttttgggttctgttggcgctccattcactctagcatcatatgtggttgaaggtggtgcatcgaagaacttcacaaaaataaaaaaattggccttctctcaacccaaggtacttcattctttgcttcagaaatttgcgacctccatgacaaagtatattcggtatcaagctgacaatggagcccaatctgttcaaatatttgactcttgggcaacggagctaagtccggtggattttgaggagttcagcctgccgtatttgaagcaaattgtagatgctgtaaaacaaacccatccggatcttcctctaatcctttatgcaagtggatctgggggcttgcttgaaaggctagctntaacaggtgtagatgtagttagcttagattgngactgtgacatggctgaaggtagaaaacgacttggacacgata

SEQ ID NO: 218852 - DNA, 212 bp, Gossypium hirsutum
cggacgcgtgggttgaaccaactgataccattgatcgtatcaaggaacgggtcgaagagaaagaaggaattcctccagttcagcaaaggcttatatacgccgggaagcaacttgcagatgacaagacagcgcgggactacaatattgagggtggctctgtgctgcatcttgtgcttgcactgcggggtggccgtctctagatggtgcaatat

SEQ ID NO: 218853 - DNA, 420 bp, Gossypium hirsutum
gcgagatgctgcgttgcttgcagatgcatacaagcaggagcttacaaatgcaatgaatgctgctgaaataactgacatgcttggccttcattcccttcgacagcgctactgttatatccagagtacgtgtgcaacatctggtgaggggctatatgagggcctagattggctttccaacaacatagctaacaaggcctgaagctattaagaagatttttgcaatgtgggaagatctggaagcacgggggagcattatatcgtcttattattattattattcattctcctttacgcctcacttttcatctgagacagtcggattgttgatatgcctttatttgcattttgtgatgatcattaatttacgtgggaacttatggctatattggcactaaaaaactgggtgattggatatataat

SEQ ID NO: 218854 - DNA, 419 bp, Gossypium hirsutum
tacgatgtgagcttggtggatggctacaacatagcaatgtcaataaccccattcaaaggctcaggcaaatgtagctacgctgggtgtgtgagtgacttgaacttaatgtgcccacttggtttacaagtgagatcgaaggataacaagcgagtggtagcttgtaaaagtgcttgctttgctttcaactcgccgaggtattgctgcactgggaccttcgggaacccccagtcatgcaagccaacagcgtattcgaagattttcaaggcagcttgtcccaaagcatattcctatgcatacgatgatccaaccagcattgctacttgcacccgcggcaattatttggtcactttttgcccccatcgtcgctagaattgttattttatatatatttagggttagtttggatgggcgtgctaatt

SEQ ID NO: 218855 - DNA, 347 bp, Gossypium hirsutum
gatccacgcgtccgcgtgatagatcagctcgttaacaagcttcatactgctataattactgaacatggtgtaacaagttcccggccatattcattgaagacgtactgggaattctctgcttttgagaaccctgcacagggtgctataggatcatggtagctgtagcaaactttttatcccttctggaatcttctatgcaatcatatgaaatgaacattaaacatatatggaagacaacttgattcatgttttatgtctggttgaaacttattgagtttgaggctgattgtcatttgatttaatgcgacagcgtatgctttacttaaaaaatcttaatatacctatct

SEQ ID NO: 218856 - DNA, 461 bp, Gossypium hirsutum
gcgagatgctcatctggctaatgaagctacatagaagttcacatcaagcaattggattctcatggagatagcttgcagtaggtcttcgcatgaactactcaatgtgaaaaaggcgtatcatgctcgttataagaaatcccttgaagaagatgtcgctcaccacactaccggagagtactgcaagcttttggtccctcttgttagtgcattccgatatgagggagaggaggtgaacatgacattggcaaaatctgaggctaagatacttcatgataaaatctcggacaagcattataccgatgatgaggtgattaggattgtatcaacaaggagtaaggcacagctcaatgcaactctcaaccattacaatacctcattcggcaatgctatcaacaaggatttgaaggctgatcccagtgatgaattcctcaaattactaagagctgtgatcaagtgcttga

SEQ ID NO: 218857 - DNA, 415 bp, Gossypium hirsutum
gagctttgctttgaagcacgttggacccggcgtattaagtatggccaatgcaggtcctaataccaatgggagccaattctttatttgcacagtaaagactccatggctggacaacagacatgttgttttcggacatgtgatcgatggaatggatgttgtgcgtgaactagagtcccaagagacaagcaggacagatggccctcgagtaccatgcagaattgtcaattgtggggagctgcctataggaggctaatatccgatccgtttaaccactaccacaaatctcccattttatcatttactttctctgcttcaagatgattttacctggtaatacctataacagtcggtgttaattatagaagagagaattttggatgatactttataagctcttggcaagggtgtgctatta

SEQ ID NO: 218858 - DNA, 395 bp, Gossypium hirsutum
ggttctcctcaaacaaagaaattgcaagatattctccctggaatcatcaaccagttgggacctgataacttggacaacttgaggaaattggcagagcaattccagaagcaggcacctgctgccggttctggtgacggtaccggtgcagccactactcaggaagaggacgatgaggaggtaccagatcttgtacctggcgagacctttgaagctgcagcagaaggccaagctgctaaatagagtttttatctttaattttcttttgttatatgtttttgatgaatttaactatttggttctttttccaaaatttctctatctgtggtttttggttgctctaccttgtactcttaatggtttggttcagggtaagccttctagaattcctattatta

SEQ ID NO: 218859 - DNA, 418 bp, Gossypium hirsutum
gaaagcaaaaggagaaggtgaacaacatggtgctatttgatcaagctacctatgacaagcttctctctgaagctcctaaatacaagctcatcaccccctctattctttctgatcgtatgaggatcaatggatcacttgcaaggaaggctataagggaattgatggcaagggggtcgattagattggtgtctgctcattctagccagcagatttacactagggctaccaacacttaggatcatttttccccttaatttagttattatttagaattatatttgctgagtttatcatcattgaatgctttcttttgttatttatttaagacttccctgtagtcactttttttccctctacaatgtttaagcaacaggttcttgatattgttatggtttaaaggatgtacttttcagatttt

SEQ ID NO: 218860 - DNA, 309 bp, Gossypium hirsutum
cgtgatagatcagctgttaacaagcttcagattgctaaaattactgaagatggtgtaacaatttcccagccatattcattgaagacgtactgggaattctctgcttttgagaaccctgcacagggtgctataggatcatggtagctgtagcaaacttttcatcccttctggaatcttctatgcaatcatatgaaaagaacattaaacatagatggaagacaacttgtttcatgttttatgtctggttgaaacttattgagtttgaggctgattgtcatttgatttaatgcgacagcgtatgctttactt

SEQ ID NO: 218861 - DNA, 360 bp, Gossypium hirsutum
gtcaggcgggattacccgctgagtttaagcatatcaataagcggaggaaaagaaactgaccaggattcccctagtaacggcgagcgaaccgggaaaagcccagcttgagaatcggtcgccatcggcgtccgaattgtagtctggagaagcgtcctcagcgacggaccgggcccaagtcccctggaaaggggcgccggagagggtgagagccccgtcgtgcccggaccctgtcgcaccaagaggcgctgtctacgagtcgggttgtttgggaatgcagccctaatcgggcggtaaattccgtccaaggctaaatacgggcgagagaccgatagcgaacaagtaccgcgagggatagatgaa

SEQ ID NO: 218862 - DNA, 457 bp, Gossypium hirsutum
attatattatgcctcctactttcattcttatatttcttaattaattgtgctataatatgtagaaatattttatatttaaaatagtaaaaataatttaaaagtctatataaaaatttgtatataaaaaaaaaaaaaagccggttatacccgagaagtaccttgatgagaaaaccattttccaccttaacccgtcaggccgtttcgtcattggaggtccccatggtgatgctggtctcactggtcgcaagattatcattgatacttatggaggatggggtgctcatggtggtggggctttctctggtaaagaccctaccaaggtggatagaagcggggcttacattgtgaggcaagctgcgaagagcattgttgctaatggactagctaggaagtgcatcgtgcaagtctcctacgccattggtgtacctgagccattgtctgtatttgtggacactta

SEQ ID NO: 218863 - DNA, 444 bp, Gossypium hirsutum
agactggccttattgttggcgggtgggatatttatgaaggtggtaaaatatacgcaattccgcttggtggaactctgattgagcagccttttgctattggaggatctggctccagttacctatatggattttttgatcaagcatggaaggaaggaatgacaaaggatgaagctgagcaattagtggttaaggcggtttcccttgccattgctcgtgatggtgctagcggtggtgtcgttcgcactgtgattatcaactctgaaggagtcacgaggaacttctatcccggtgacaaactgcagctatggcatgaggaattggagcctcagaactcgttgctggatttactgaattcttctaatcctgaacccatgaatatttaatcaaatcaaaggctaaggggaaattttttattaaaaaaaaaaataaaccatcataattaat

SEQ ID NO: 218864 - DNA, 421 bp, Gossypium hirsutum
caagaagaaggtggcggagagtagcggatactcgggggctaatgtgaagcggctcgagactgaaacagatgcaaagatcaatcacttgaaaaacgaagctgcaaggatatctcatgatgttgtacagatgcttttgaagaatgtgacaactgtgaggaactagggggtcttccatgaagactgatggtttaattttctacaacattctatcaattcccaaaactcagagctcatgcttaggaacaattttatgtcattattttatgatttgctgttatttttgtttgtgccatgttcctgttctgaaataaactccaatgtgtgccttctagaaatggtttctcttagtatttcttggaacttgatttgaattcttgatgagtcttgatctcagctcaatattgcttaatggattcatttt

SEQ ID NO: 218865 - DNA, 422 bp, Gossypium hirsutum
  unsure (1)..(422): unsure at all n locations
gttccggcgcccttcttgacgaaaacgtaccagctggtggatgatccgaacaccgacgacgtgatttcttggaacgaaagcggcacctcttttgtcgtttggaaaactgctgatttttctaaggatttgctccccacctatttcaaacacaataacttttccagcttcatccgtcagctcaacacttacggatttcgaaaggttgttccggacaaatgggaattcgcgaacgacaacttcaagcgaggggaaaaacagctcttgtccaaaatcagtcgtcggaagacggtgacatcaccgncggctgatgctccggcgaaaggcaaaacatctggtgctgcaactccctcttcgactgacttcggagaggacctaggatccacttncacgtcatcaccggaatcgaagaatccgggatcggt

SEQ ID NO: 218866 - DNA, 237 bp, Gossypium hirsutum
cctaaccaaaacacaggcattgtgatccataaatgtaggataggtgccacctctgattgacagcctgttcgtaaaaacttgccaacatatcttgggaggccctggaaggaatactcgaggactggggtaatgcaatcaacaatcagtgacgtgattcaacctgctggctggcacgagtggagcgggagtttcgccctgaaaacactggtttattgcgaggtccagaacactggggcc

SEQ ID NO: 218867 - DNA, 456 bp, Gossypium hirsutum
aagatacccaaatatgagctgacggtggaggatggccgtagattggccaaggagtatagtcgggttttgatgaggaagcatagggcaaggcaggctgctgagactaatttgttgagaatgaaaaaggaggcaattgaagcgttgccggagaaacttaaggaggcggctatgataccagatttgaccccatttccggcaaatcgattgatggcgtctttgactccacctattgaagggtatattgagaaggttaaggaagcggctaagaaaagttcttccaagcagaagcttatgtgaaggcgaggtggaagtatgcaagggacaaacttcactcagtgaaactgatgatcaattacagctgcaatgtactgtgattttctctgatggcaatgagtctcaaaacaagaattattcaacattgaaattgagcaatgccatatttttcggttaacattg

SEQ ID NO: 218868 - DNA, 312 bp, Gossypium hirsutum
ggagatccacgcgtgcggccagcaacaactccaaaaccgtcttacagttacattacaccagttgccgcctgataggggagaggaggattgcatacaattatgaggacaaaggtgcaaattacactcatggactaacctatgcttgagagctagcatgacatgctgtgacagatgcacatgtgacccaccagggacatatggcaacagagaaatgtgtggcacatgttacactgatatgagaacccaccgaagcaagcacaaatgtgcttgagaaacccaatcaaagccctcaaacaacgacacttcttgagt

SEQ ID NO: 218869 - DNA, 368 bp, Gossypium hirsutum
attgccaccgtcacttctgcagctcgtttttattccctcattcactggcctcaaggcaggcgcatgcaaagtgagtgccggacttaaagactcagctccccaagccacaaggttgggcatcaaggcttcgctgaaagacgttggagtcgctcgctgtgccactgccgctagtgcagtgctggctagcaacgccatggccattgaagtgttgctgggtggtgatgacggctctctggctatcgttcccaacaatttctccgtggcctttggggagaacatcgtgttcaagaacaactcatgtttcccccacaacgtcgtgttcgacgaggaccatattcctagcatccatgatgcaaggaaaatctcca

SEQ ID NO: 218870 - DNA, 415 bp, Gossypium hirsutum
agatatggtaatggctactgtcaagaatgggaagcctgatcttaggaagaaggtcttggcttctgtcattgtgagacagcgcaagccctggcgcagaaaggatgttgtttacatgtactttgaagataatgctggtgtcattgtgaacccaaagggagaaatgaaaggttctgctataactggtccaattggaaaagagtgtgctgatctatggccaaggattgcaagtgcagctaatgccattgtttaggaactcacattttagtcattgggtttctctgcatgggactaatatagtttgctggatcaagattttgtttatttttatttttccttcagaacatcatttcgatggtatcttttgatttgatcttgattttggaggtaaattgtagtttgtggagagttttttaat

SEQ ID NO: 218871 - DNA, 236 bp, Gossypium hirsutum
ccactttgtctctcttaagtcttaccataaaacagagcagagaaggtaaaacccaaaggttgaaaaccatcaaaaatgggtcaaaggctcacttaccgtactcgccatagctacgctaccaaatccaatcaacaccgtgtcgttaagacccctggtgggaaattggtctatcagacaactaagaaaagagcaagtgggcctaagtgtcctgtcactggcaagagaattcaaggtat

SEQ ID NO: 218872 - DNA, 292 bp, Gossypium hirsutum
tatcgaatatctcggattcttatgagagggtcaaagttatcgtaggcccgagaagcaacaacgaacttgatgcgaccaaattgaagacagaattccctgagctcctttcgattaaagagtctcttattaagtatgtattcgaaccgaataagaagactggtggagcttgatcagttactttgcctgttaaaaagtttgtcttcaaaggtaaactatgtgagactagttgagcttgagatcttaggttatgaattcattgatattcctctctttttttatcaacttttttatg

SEQ ID NO: 218873 - DNA, 431 bp, Gossypium hirsutum
gcgtccgactcttagctctaagccaagaaagcaggcctttaacatcaaaatggcttcaaaacaatcaggttccatggccctccttgtggcactcaacattctcttcttttccttgcgtagtgctactgccccatcccctcccaccaaacctaaccataaaccaaaggcaaaccccaaccccagcaccccatcttcacaaggcacgtgccctagagatgcccttaaattaggtgtatgtgctaatgtgcttggcttagtcaagcccgtcattggttcacccccagtgatgccatgctgttcccttcttgatggcctcgtcgatctcgaagctgctgtttgcctttgcacagctatcaaagctaacatcttaggcatcaaccttgacattccagtttctcttagcttgctccttaatgtttgctcaaagaaag

SEQ ID NO: 218874 - DNA, 347 bp, Gossypium hirsutum
  unsure (1)..(347): unsure at all n locations
atgctcctnctggacagaaagttggtcttattgctgctaggagaactggtaggctcagaggacaagctgctgctacagctgccaaagctgacaaggcttaagcttaggcttaggcttaggatattacttgctgtaattttagttcttttggtcttcagattttacattcaagagtgtttaagacctttatgcttgaaaatgtgtttgaattatcagatattggtactgttttgagttgtttgagcaatgattttgtttttgattcggatttttacccatgtttttggtatttgttgttttcggcttttaccccctgttttatggtcgagtttttttgaatcgagtta

SEQ ID NO: 218875 - DNA, 346 bp, Gossypium hirsutum
aaagccggatccctggaaggctgggaaggcaatgcaatctgaagccacttttaagaaaaaggccaggagaatccgaacaaaggttacgtttcacaggccaaggaccttgaagaaagataggaacccgaagtatccgcgcattagtgccccaccgaggaacaagcttgaccattaccagattctcaagtttcccctcacaactgagtcagccatgaagaagattgaggacaataacactttagtatttattgttgacatccgtgcagacaagaggaagatcaaagatgctgtgaagaagatgtatgatattcaggccaagaaagtgaacaccttgatcaggcccgat

SEQ ID NO: 218876 - DNA, 438 bp, Gossypium hirsutum
ccacgcgtccgcttcactcgcacactgcttgaacaatggccatgcccacattatgccggcttgaccttaccgtgttaaccctctctttactggccgtcgccgtcaatgctcacaacatcaccgccatactcgaagggttccctgattactccgtttacaacgatttcctcactaaaaccaagctcgccgatgagatcaatactcgacaaaccatcacttgcctcgatcttaataatggagctatgactgctctcactgctaaacacccactttccgtcgttaaaaacatccttagccttcatgtgcttttagattattatgacccacagaaactccataaaatttccgaaggtactacacttactactactctttaccaaaccaccggaaatgctcccggaaatttgggtttcgctaatatcaccgatctacaaagtg

SEQ ID NO: 218877 - DNA, 481 bp, Gossypium hirsutum
  unsure (1)..(481): unsure at all n locations
ctcaaagatatcactgcaagaaaatttaaattccagacatggcttccaacactgtgggatccgctgctcttcttcttaccttgaacttgttgttcttcactttggttagctctacctacgtgccttgcccaccaccaccaaagagccacaagcctacccacaaaagcccaccctcggcacctgaacagccaggcacttgccccagagatgcactgaaactaggcgtttgtgctgatttgttgggctcagtgcgcgttgttgttggaccgttgaggaccaaatgctgttctctcatttcgggtttggctgatctcgatgctgcttgttgcctttgcactgctattaaagctaatgtgttgtgggttaacctaaacgttcctgttcattgtctttgctcctcaattcctgcgaaaagcaaattcctgctggttacaaatgncctaaacctcatttccacttgttcctaacaaattttggtttt

SEQ ID NO: 218878 - DNA, 400 bp, Gossypium hirsutum
gaaatgtaccgtgactacattgaccctaacttcacctggaagaacttcaatctcgaggagcgggccaaagttatcgtagccccgagaagcaacaacgaacttgatgcgaccaaattgaagacagaattccctgagctcctttcgattaaagagtctcttattaagtatgtattcgaaccgaataagaagactggtggagcttgatcagttactttgcctgttaaaaagtttgtcttcaaaggtaaactatgtgagactagttgagcttgagattttaggttatgaattcattgattttcctctctttttttatcatcttttttatgaatttggttcgtgtgggtcgatatggatggtgataacctcgggcgatacgcacgcacgcctctttccagatgac

SEQ ID NO: 218879 - DNA, 421 bp, Gossypium hirsutum
taatctccacgccttcttcccattacttcattacattctcaagagaaaaacccagagccaaaggaatggccaaattattgctgttcattgcactatttgtggttccatgtcttgttagtgctacacgcatggtgaagaacccgttggtggttcaaggtcaagtttactgtgaccattgccgtgctgggtttgaaacaccaaagactagaaacatggctggtgccaaggttaaggtggtatgttccaaccggaagaccggtgatgtcgtgtacgagaaggaaggacacacggattcaaccggacaatacaagatcgctgtctccgaggatcatttggatgagatctgcgacgctgttctcgttaagagctcgcagcccgagtgcgctgaaatgtcaccgggacgtgaacgtgcacgcgtggt

SEQ ID NO: 218880 - DNA, 401 bp, Gossypium hirsutum
  unsure (1)..(401): unsure at all n locations
ccaatgcctacctcaaccgtcaatcgttgtcgttcaaggtcaccactaccgatggtgttacgcgactgttccctgatattgtgcctgcaagttgggggtttggccagactttctctagcaaagtacaattctaagctcactaaaagctttagttcccggcggaggcgtgctacattattttacaaaaaagctgcccgccatacatggtatttatcgatacatcacatggtcaataatatcaggctacttgtttttctggagaactggttgtttagatggaagtgaaatctttgtttttgatacaagtcgatgtttgaaattatttcatgatcataataaattgtcaataagaagtgcaagaaaaacatngcagcttcagaagatgtaaattttgtcatcac

SEQ ID NO: 218881 - DNA, 408 bp, Gossypium hirsutum
  unsure (1)..(408): unsure at all n locations
gagagaaaaaaaaagttgaaatcttttttgagcaatggaaggatcagtttttactccatcattggaaggaatgaagcatatcaaatctccagaaggggaaatgcttaccaagccttttttggatgtctgcaagttgattttgccagtcctcgataagttcggatctgctatgagccttgtgaagagtgatgttggtggtaacatatcgaggttggaaaagaaatatgaaactgatcccgctaaatacaatcacttgtacagtatggtgaaagaagaggttgattgtaaaacagcaacagattcatctagttgtaccaatggtcttctctggttgacacgagcaatggatttcctcgtagaattgttccgcaacttacttgcacatnncagatgnactatgactgaatc

SEQ ID NO: 218882 - DNA, 439 bp, Gossypium hirsutum
gtaaactgcaatggtgttgaggtgctatgtctgggttctgctccaacaatttcaggggacagcacatctggctgtcagttgtacgtaagcaaagactctttagggacatctataacatcagcaaagtcaagtgagatcaatgtgttggtgcctaccggacctgatggtgactggggggagcattcattgccgcaacagtatatccatgtatttaaggatggtcaatttgaaactaccccagtgtcgcactcaggagcataaatgaggcctatttgaattgaaaacttatctttcctttgtgtgaaaaacaattatattcttttattttcttggatacatacctatgggtgaattttaactttttctgacggctggttatttaatttaacacacatatcatttggtcatcattctgaatatttctacatttcatttttaa

SEQ ID NO: 218883 - DNA, 465 bp, Gossypium hirsutum
acttttagctctaagccaagaaagcttgccactaacatcaaaatggcttcaaaacaggcagggtccatggccctccttttggcactcaacattctcttcttttccttggttagtgctactgccccatcccctcccaccaaacctaaccataaaccaaaggcaaaccccaaccccagcaccccatcttcacaaggcaagtgccctagagatgcccttaaattaggtgtatgtgctaatgtgcttggcttagtcaagcccgtcattggttcacccccagtgatgccatgctgttcccttcttgatggcctcgtcgatctcgaagctgctgtttgcctttgcacagctatcaaagctaacatcttaggcatcaaccttgacattccagtttctcttagcttgctcctcaatgtttgctcaaagaaagttccttatggcttccaatgctaatttaagtcaatcattttc

SEQ ID NO: 218884 - DNA, 456 bp, Gossypium hirsutum
tggtgtagctatgaaccctgttgagtatcctcatggaggtggtaaccatcaacacgggggtgatgctagtactgttaggcgtgatgctcctcctggacagaaagttggtcttattgctgctaggagaactggtaggctcagaggacaagctgctgctacagctgccaaagctgacaaggcttaggcttaggcttaggcttaggatattacttgctgtaattttagttcttttggtcttcagattttacattcaagagtgtttaagacctttatgcttgaaaatgtgtttgaattatcagatattggtactgttttgagttgtttgagcaatgattttgtttttgattcggatttttacccatgtttttggtatttgttggtttcggtttttacccctgttttatgttcgagttttttgaatcgagttattaggtatgaaatattttggatttttgt

SEQ ID NO: 218885 - DNA, 378 bp, Gossypium hirsutum
gccacgcgtccgaaattttctcgggaaaggaaagagtaaattagaaaaaagagttagggaaatggagaaagtggtctcggaggcggaagagctgccgaaggccatcgtgcgacgggtggtgaaggagaagctctctgagtgttcaccggattacgactttaacgttcacaaagacgcccacctcgctttcaccgaaagcgctcgcatcttcatccattacctttccgctacggcaaatgacatatgcaaggaatcgaagaggcaaacaatgaatgcggaggatgtgtttaaagcacttgaagaaattgaattctcggaatttgttaaacctctgagggcttcgcttgctgagttcaggaaagaagaatgctgtgaaaa

SEQ ID NO: 218886 - DNA, 386 bp, Gossypium hirsutum
gaggacgcttggaagatcgttcatcccttatggcagatattcagaatataaagccaacccatgtttttaatgctgctggtgtgactggtaggcccaatgttgattggtgtgaatctcacaaaacagaaacaattcgcaccaatgtggctggaaccttgaccttagcagatgtttgcagagaacatgggcttttgatgatgaattttgctacagggtgtatattcgagtacgatgcaggacatcctgagggctccggcattgggtataaagaggaagacaaacccaatttcactggttccttctattcaaaaaccaaggctatggttgaagagctgttgaaagaatatgacaacgtctgcactctcagagttcgaatgccgatctca

SEQ ID NO: 218887 - DNA, 359 bp, Gossypium hirsutum
cgtccaccacttctacttttagctctaagcttagaaagcaagccactagggttttaggataggattaaaatggcttcaaaacaatcagcttccatggctctacttttggcacttaacattctcttcttttctttggtcagtgctactgccccgtgccctcccaccaaacctaaccataaaccaaagccaaaccccaaccccagcaccccatcttcacagggcaagtgccctagagatgcccttaaattaggtatatgtgctaatgtgcttggcctagtcaagcccgtcattggttcacccccagtgatgccatgctgttcccttctcgatggcctcgtcgatcttgaaacttctgtttg

SEQ ID NO: 218888 - DNA, 267 bp, Gossypium hirsutum
tgtaatttaagatacataatggtctcaaagatctctgatacaagaggtgaagcctgggtttcagcctttaatgaacaagcagagaaaattgttggatgctcagctgatgaacttgataaactcaagtcggagcaaggggatattgatggataccaaaaaaagttgaaggaagcaacttgggttcctcatcttttcaaagtcagtgttactcaaaatgagtataacaatgagaagcggcaaagataacagtaaggctgttgctcaatc

SEQ ID NO: 218889 - DNA, 466 bp, Gossypium hirsutum
gttgatgtgttaggtggcttagtgcacattggtatcggcagcagcgccaaggacacatgttgcccagtgcttcaagggttgctagacttggatgctgctatctgtctttgtaccacaatcaaggccaagcttttaaacatcaatatcataataccaattggccttcaggtcctcatcgactgtggcaagactccacctccaggattccagtgtccagcataaggatagtacccctttttggacaataacatcatgttcatctcatgacaagaagttataattgtcgaaaatttcgagtttccccgtaaagatatattgaggcatgacaagatgtgctgatgtatttcttagtaggtagtgttccgagttcctaaggagggagtgggcttcaagtttctattatgttttaatttgatttatcgcacttacatttgtggggctgtttttctttcaatgtattttgatg

SEQ ID NO: 218890 - DNA, 436 bp, Gossypium hirsutum
aacatgcaacaagaaagttactgaagctgttggatctggctattggtgtgagggatgccagaaaaatgatgaagagtgtaatttaagatacataatggtctcaaagatctctgatacaagaggtgaagcctgggtttcagcctttaatgaacaagcagagaaaattgttggatgctcagctgatgaacttgataaactcaagtcggagcaaggggatattgatggataccaaaaaaagttgaaggaagcaacttgggttcctcatcttttcaaagtcagtgttactcaaaatgagtataacaatgagaagcggcaaaggataacagtaagggctgttgctccaatcaactttgctgaagaatccaggtttctgcttgaagagatcaagaagatgagaaatcctcagtagattgtttagttttgggttgtaatgatg

SEQ ID NO: 218891 - DNA, 444 bp, Gossypium hirsutum
aaaccagactcctttaactgttgtgcggggtcccttgttggatgaagtacatcaagagctgaattcatggatatcacaggttaccagggtatacaagggaaaagagcatgctgagctcgagttcagtattggacctattcctgtgaatgatgggataggtaaagaaatcatcactcaaattacaacaactatgaggaccaacaaaacgttctatacagattctaatggacgtgacttcattaaacggattcgagattttaggaaagactgggaccttcaagttaaccaaccaattgctggaaattactacccggttaaccttggaatctatgtccaagatgatagcacagagctctcagtgttggtggatcgttcagtgggggcatccagcttagctgatggccaaattgagctgatgcttcacaggagggtgattcacgatga

SEQ ID NO: 218892 - DNA, 344 bp, Gossypium hirsutum
gcttacttccatagatttatcactttcttccggacaagaaattgtaatcgaggaaagatcaggtaaggagttattgcacacacggggaggactgggagaacaagtggctgcttccgggatctcagtctggaacccggctttcgatgtcacccctgccaatctaatagccggtatcataacagaaaagggtgtaattacaaagaatgacataaaggatgatgcatttgacattaaggatttcatagagaaggcaacaggcaaatctaccgtatgaagtcggcatctctaaccttaaacgattcctaggtctcaccattcacgagactcgatatcgagaacttact

SEQ ID NO: 218893 - DNA, 382 bp, Gossypium hirsutum
  unsure (1)..(382): unsure at all n locations
gaagcatcanaattaccatcttcaaactccacagagaaccttgtcgagtgggtgcaaaataggcacgattacagcaacatttccagcatcattgatccgaggttgggcagtagcttcacagctgaaggcatggaggaattcataaggttaaccgtccgatgtttggaaccatcgagtgagaggagaccgaccatgagctatgttgtagcggaacttgatcggatactcgataaagagatgagcttgacgacggtgatgggggaaggaagcccaactgtgacccttggaagccagctttttagagcaacaaaatagaaaaaggaaaaaaaagaaaaccttgtagcctgcagcattcaaataccgggagtgacatgcgtgtgat

SEQ ID NO: 218894 - DNA, 320 bp, Gossypium hirsutum
cctgctcgtgttggtctggttgcgcctatttatgtggtcgttccacctggaaacactggtcgtgacgcatcacagacctctttcttccaggtgctcaatattcccaccaagattaacaaaggtactgttgaaattatcactcccgttgagcttatcaagaagggtgagaaggttggttcttccgaggctgcacttcttgccaagctcggaattagaccattctcatacggtcttgatgtcttgtctgtttatgacaatgggtcagtctttagccctgaggtgcttgaccttaccgaggatgacctgattgagaaattcgc

SEQ ID NO: 218895 - DNA, 333 bp, Gossypium hirsutum
gcgaaacgagactcctttaactgatgttcttgtttccttgttggatgaagtacatcaagagctggtttcatttatatcacagtttaccaatgtatacaagggaaaagagcatgctgagctcgagttcagtattggacctattcctgtgaatgatgggataggtaaagaaatcatcactcaaattacaacaactatgaggaccaacaaaacgttctatacagattctaatggacgtgacttcattaaacggattcgagattttatgaaagacttggaccttcaagttaaccaaccaattgctgtaaattactacccggttaaccttggaatcta

SEQ ID NO: 218896 - DNA, 392 bp, Gossypium hirsutum
gggattgagacagctgtaaccaatgtctcccaaggttgagaagaaggcagatgcagaggcgcgaggccttgaaggctgcgaaagcagtgaaatctggagccacttttaagaagaaggccaagaagatccgaacaaaggttacgtttcacaggccaaggaccttgaagaaagataggaacccgaagtatccgcgcattagtgccccaccgaggaacaagcttgaccattaccagattctcaagtttcccctcacaactgagtcagccatgaagaagattgaggacaataacactttagtatttattgttgacatccgtgcagacaagaagaagatcaaagatgctgtgaagaagatgtatgatattcaggccaagaaagtgaacaccttgatc

SEQ ID NO: 218897 - DNA, 366 bp, Gossypium hirsutum
atagatttcaaagtcagagaaaaaccaaaacagatagggttttccaggatctaatcgtttacggaccggaaaaccagttttgatggcaacaaatgattatgaaagtgggttgaagatgatggaggaactaacaacagatgctcgacaaattcaagaccagttattgggtgaattactgagtaaaaatgctgaaactgagtatttacagggattcctccatggccaaaccgacaagcaactctttaaaaaaaaggtacccatcgttacttacgaacatctcaagccttatattgatcggattgccaatggggagcatcatctgatatcttttaagttgaacccttaattgggtcttttttaactttt

SEQ ID NO: 218898 - DNA, 351 bp, Gossypium hirsutum
  unsure (1)..(351): unsure at all n locations
cagagcagttgctgaaggagaatgtttcgcatcatcttattcctcataagacgttctctgggaatcggccttctctcagtcttttgctaccatctcttaacgcttacaatattgggcagctcttggcaagctatgaacatagagttgctgttgaaggttttgtttggggcatcaattcttttgaccagtggggagttgagttgggtaagtcactagctactcaagtccgaaaacagcttaatggatcacgtacaaaaagtgaacctgttgaaggctntaattttagtactactacgttgttaacaagatatctacaggcaaagttctgatattccagctgagccactcact

SEQ ID NO: 218899 - DNA, 366 bp, Gossypium hirsutum
  unsure (1)..(366): unsure at all n locations
cttcactcccacactgcttcaacaatggcgacgcccacatttcgccggctagacctgaccctgttaaccctttctttactcgccgtcgccgtcaatgctcacaacatcaccgccatactcgaaggtttccctgattactccgtttacaacgatttcctcactaaaaccaagctcgccgatgagatcaatactcgacaaaccatcacttgccttgttcttaataatggagctatgtctgctctcactgctaaacacccactttccgtcgttaaaaacatccttagccttcatgttcttttagattattatgacccacaaaaacctccataaaatntccgatggtactacacttactactactcttta

SEQ ID NO: 218900 - DNA, 369 bp, Gossypium hirsutum
cgacccacgcgtacgcactggccacaatcaatcttacaaggctcacaagaatggcatcaagaaacccaagaggcacggccacacttccaccaaagggatggatcccaagttcttgaggaaccagaggtatgcaaggaagcacaacaagaagagcggtgagtctgctactgaagaagagtaaatttttaatggcaaaagatctagctttgattagtgttttccaattgttgtttttccccccggtggaattgagtgttcgtttactataatcaccttagttgaaatgttattttgggattgttgaatctcattttcaaaagagatttgaagctgtgagcttattaatattaaagaacatgttttgagctt

SEQ ID NO: 218901 - DNA, 427 bp, Gossypium hirsutum
  unsure (1)..(427): unsure at all n locations
caacttctcattaaaacccaacctgtggaagtcgttaagcctgatcaattcaaagcggtagacgatgaaggaatgccgatttatcagaggccatttatgagaggtaaacttttcattcacttcactgttgacttccctgactcgttgaccccagaccaatgcaaggcactggaggctgtgcttcctcccaaggcatcggttcagctgactgacatggagctggatgagtgcgaggaaacaaccatgcatgatgttaacattgaggaagagatgcgtaggaaacaggctcaagctcaacaagaagcttatgaggaagatgaggacatgcatggtggtgcgcaaagagtacaatgcgctcagcaatgataaaaaaagccgaatgtccgagacacagacnggtggtttttgccatggaatgtactgtggt

SEQ ID NO: 218902 - DNA, 347 bp, Gossypium hirsutum
gcggaaaaaaacagtggaattaagggtatggcatttgagaaagatctcaaccttgatgccaccgagctccggctaggcttaccgggaacctccgacgagtcaactaagaaccaaacgccggcaactcttcggagcaacaacaaaagagccttgcctgaagaatctatgtctagtaatgccacagcttccaaaaactgtgaccaagaaactgctccactccccaaggcacaagtgatagggtggccaccgatcagatcttacagaaaaaacaacttgcaacctaagaaagtgagggtgaaattagtgggaattatgtgaaagtgagcatgggatgggctcttatctta

SEQ ID NO: 218903 - DNA, 402 bp, Gossypium hirsutum
gcggggagctggttttggtcatccagatgaatcttcttatgcatacaccatcccatatgatcatgaaagggatcacccttatccttatgcgccagaacgtggcaaaggatcggggaaagcggttgtggggtggcttaagttaaaagctgctttaaggtggggaatatttataagaaagaaagctgctgaaagaagagctcagcttgttgagcttgattaactgttctgatgcttaaaaaaacgtattttaacatcattatctattagctggttgacaaaggattggtgcctcagcaatcattaaccttcatttggcaacattgttgaaaaattccaagttctgttatcttttgccatatttggataaggcataattcatcagaagaatgcttgttatataac

SEQ ID NO: 218904 - DNA, 284 bp, Gossypium hirsutum
  unsure (1)..(284): unsure at all n locations
ggaagccgtggagtttgcagacgaaagccctgttcctcctcgaagccagctgctcgaaaatgtatttgcagatccaaaaggttttggaatcggacctgatggccaatatagatgtgaggacccaaagttcactgaaggcactgctcaggtctaagctttcaaaataggaggttgatcaaaactatttttgtcaacttatttattatttcatggtcacatatgtttagtttgtggtagcagtcacgcgttcacttgattntagtgtttattgtgtaccaagtatt

SEQ ID NO: 218905 - DNA, 268 bp, Gossypium hirsutum
gtcttctttcctgggtataaatctgttgttcctccggtgattgatcatcgccggttgtgttgggttgcacaccaatgggagacgagtatttgcagcagttcttggatgaaaccacttggtacaatcacattgttttgggataccttttgcctacaaatgtatggtaccctcttccccgtttcttgcagacatggctactaaactaccttgctgggactttgctttacctcatctctggtttactttggtgtttctatatatactactt

SEQ ID NO: 218906 - DNA, 325 bp, Gossypium hirsutum
acggttgggtcacttggtgcaccacttttgttggacaactgcggagggagtgaaagctgaagaaattgacttgcttgaaaaccctggactggttgcttatatgcggactccattgcaagctattgccactcctaggctgccttctcatctgtacaaacgtgtggctgcggatatctaagttttttccctaaacttctaattcttattgctcttagcattagattttgaattctgaacttttttttttttacaagttctgttgtattatcaattatgtctcatgtgatttgtgatcggtcgcgtgaaagaagaccaaataaaaacg

SEQ ID NO: 218907 - DNA, 330 bp, Gossypium hirsutum
ctctgacacctcgtggtttcagtttattctaactcgtcgccatcatgaatcccgaatatgattatctgtttaagcttttgcttattggtgattctggtgttgggaaatcatgtctacttttgaggtttgctgatgattcatatctggatagctacatcagtaccattggtgttgactttaaaatccgtactgtggaacaggatggaaaaaccatcaaactccaaatttgggacactgctggccaagaacgctttaggacaatcactagtagctattatcgtggggctcacggtatcatacgttgtttatgacgtgacagaccaaagagag

SEQ ID NO: 218908 - DNA, 283 bp, Gossypium hirsutum
ggcaactaagttgttcttgttgcttgctatctgtgtcctccctgtgcttgttaatgcaaacaataaagctttccaaatccgttggctgggtttactgtgatgcctgccgtgctggttttgaaacatctaaaagcacttacatccaaggtgcaagggtcgaaatcaagtgctttgataggtctacattgaagctgaaatacagcatcggggcagagacggacgaaactggaacatataacattggttgaagatgaccacgaagaccaaatttgctacgcaacac

SEQ ID NO: 218909 - DNA, 441 bp, Gossypium hirsutum
gatttggaaagaaaggttgtgaattggagagatgatgatgacaacactgtgttgcacattgcagctacaaagcaacagcatcaggcagtacaactgttgttggattccttttatgggttagatgcaaacgctaagaactcggaaggcttgacagctcgagaaatcatagaaagggttgaaagacaggggttgaacatgagtggcgccgaagacgatgataccaccaccgtcaagattgagcgcattaagaaaagaaccaggacgtctgaaagagcattaataaagttgattcgtgcaaagaatgggttgttggagaacatgcttaacgcaacaattggggtagcggcgctggtcataacaacaatctaccagtcatctttaaagccaccaagaggtctttgggaaggggataaacactatcccaacaacaccacaaacctt

SEQ ID NO: 218910 - DNA, 266 bp, Gossypium hirsutum
cccacgcgtccgagaggccgccgttgtccgtccttgcgcaaaaccaccaaagaagccaaggcatggcaaggatcaaggttcatgagttgcgacagaaatcaaaaaccgatcttttggctcagttgaaagatctcaaagctgaacttgctcttcttcgcgttgctaaagttaccggtggtgcacctaacaagctttctaagataaaggtggtgaggctgtccattgctcaagttctgactgtaatctcacagaagcagaagtctgca

SEQ ID NO: 218911 - DNA, 316 bp, Gossypium hirsutum
ggcgctttgaacactcatcttgcttccaacacatttcttgttggacattttgtcacccttgctgacattatcatgacatgtaacctctacttgggtttctcccagatcatgaccaagagttttacctcggagttccctcatgttgagaggtacttttggaccttggttaatcagccaaaaatcaagaagattcttggtgaagtgaagcaggcagtctctctaccacctgttccttcaaagaagcctgctgcccagccaaaagaaactaaaccaaaggctgaaccaaagaaagaagccaaaaaggaggttgagaaac

SEQ ID NO: 218912 - DNA, 436 bp, Gossypium hirsutum
ggagccagttgagaagtgtttgagggatgcttagatggataagagcagtgtccatgatgttgttcttgttggtggttccactcgtattcctaaagtgcagcagttgttgcaagacttcttcaacgggaaggagctctgcaagagcattaatcctgatgaggccgttgcttatggtgctgcggttcaggctgctatcttgagtggtgaaggaaatgagaaggttcaggatctattgcttttggatgtcactcctttgtcccttggactcgaaactgctggcggtgttatgactgttttgattccgagaaacactaccattcccaccaagaaggagcaggtgttttcaacttactctgataaccaacccggtgtcttgatccaagttatgagggtgagagagctcgaacccggacaacaattttgtggtaaatcgagc

SEQ ID NO: 218913 - DNA, 240 bp, Gossypium hirsutum
gggagggaagcacatagaagaattctatggcaaagtggctagactacacggatccgttaagaatttgccagcgtcttgcacttcaagaatgggagccagaccagagttgtgtttcttcccacagtacgtggtgcagactatgcaaacaccaatcttcttcggtaattcagcttatgactcctggcagattaagaacattttggctcccagtgctgctgacaaaagtaaggagtggaaaag

SEQ ID NO: 218914 - DNA, 434 bp, Gossypium hirsutum
gcgagaggcgaaccaaggagccaaaaaatccgcagttcagcaaccaaggagcactcattcgacaagtccgccatgggtaaggttcatggatctttagctcgtgccggtaaggtaagaggccaaacacctaaagtggctaagcaagacaagaagaagaagccccgtggccgcgcttacaagaggatgcaatacaaccgtcgtttcgtcactgcagtggtgggattcggcaaaaagaggggacctaactcatccgagaagtaagagctatgcaattgaaaaaaggtcttgtttgaagcttttatgggtttagtctgtgttttccccccctttttttttgtaatgttttatgatacttatttttatccactggtattaaggttcaagttgaacttggaagttttgttagctaaatattatgtgatttcgatattcgt

SEQ ID NO: 218915 - DNA, 294 bp, Gossypium hirsutum
tgaaatcccacctgagaagattgaggaactcataaaaggctatgccaatcttgttaatctcattcaccccatgaaagctttccactgggggaaggatgttagtattgagaacctgcatcaagggttcactcatgtgtttgaatccacatttgaagcacagaggggattgctgagtatatagctcatcctgctcacgtggagtttgcaaatctgtttctccccagcttggacaaggtcattgtatttgactacaaacccaccgttgtacgttgctaagttacaagcatagttctg

SEQ ID NO: 218916 - DNA, 439 bp, Gossypium hirsutum
gagaggcgaaccaaggagccaaaaaatccgcagttcagcaaccaaggagcactcattcgacaagtccgccatgggtaaggttcatggatctttagctcgtgccggtaaggtaagaggccaaacacctaaagtggctaagcaagacaagaagaagaagccccgtggccgcgcttacaagaggatgcaatacaaccgtcgtttcgtcactgcagtggtgggattcggcaaaaagaggggacctaactcatccgagaagtaagagctatgcaattgaaaaaaggtcttgtttgaagcttttatgggtttagtctgtgttttccccccctttttttttgtaatgttttatgatacttatttttatccactggtattaaggttcaagttgaacttggaagttttgttagctaaatattatgtgatttcgatatttgttaagctt

SEQ ID NO: 218917 - DNA, 418 bp, Gossypium hirsutum
ggttagcatattggaattttatttaggtaggttccctttcgcggttggtagacaaggggattgggccagtctcatgtgcgcgatttgtatgtctcagccaccggaggccccacccactgctttcaatgaatttaggcattttatatcatgttgtttgcagagggatccagccaggaggtggtcggcggcttacatgcggcagtatgcttttattgtgagaggacaaccacatcagaggtgatcataaccttcatcagttattaccacctccacctcctctttcttcttagctttctatttctttttatttggtttgggattaggggaaaaaatcttttgtaagttttgatataatgagggtctggcgggagttgggtgcaatggctttccttcttctttttttttttcccttcaatgt

SEQ ID NO: 218918 - DNA, 157 bp, Gossypium hirsutum
ggctgcaatgccaaggttgcaagcacgtttcacaacatccgatcaaaaggtgcaagcactgggaaattgttgaaaacaggaggggaaaagaacatttttggtttaaactgttattcagggatcttggttgtttgctttatttatatggtatttgaac

SEQ ID NO: 218919 - DNA, 451 bp, Gossypium hirsutum
ccataattgaatcaatgctccaaactagaggaatgttatggtaaaacttcgtttgaaacgatgtggtagaaagcaacgtgcgacttgaaggacatgatcagctgtggatgtcaaaacccaccactttccgttatgtagaaatgaaggtgctttttgctcgacatcctttgttctattataatccgtctttttgttgggttgtaatgtaaatagtacaggatggagctcgaagagaaacatccatttttcaggggcaaggatctagggttagttaatggaaatcaataagttggaacaacttcgtaagtctatttgtgatatagaaatcgaaaggatccgattcaaactattttcaaatcaaaaagaaaagttgttggaattggtaaaactctttcgatcaaaagtgtatcatgcgggaattaatcgttcatatgattctttgatagaaaaa

SEQ ID NO: 218920 - DNA, 362 bp, Gossypium hirsutum
  unsure (1)..(362): unsure at all n locations
tagagcttctgatgattttcaagaaattgtttctgaagaaagaacttttanaagaaagggtaacatggatgcaccggtggggaacaagatttgtgaactttatgacctctatgttgatggattagatgaagatgctggtccgcacatcagaaagttttatgtagagcttgcacagctctggccagatggtatgatgaacaaccatgagattaaacatgcaatttgtagggcgaaagaaaggctgagagcaagatacaatagacgcaaggatcaagagaaaatgaggagggaaaagatgttgacactaggaccggaggagagtgttcgagtggactcttgcttaagtgcacaatcgcagcaca

SEQ ID NO: 218921 - DNA, 389 bp, Gossypium hirsutum
tggccgagttgttagaagtggaaagagttggtgtatgccatcaagctggttcggatagtttgctcacatcatgcacatttaggaagttgagggataactttttcaaatcagtacagaaatatgcaggtgtactgtatggcttagaggtcgagggcgggcagaattcggattaaaagagaaaataattgggaaaaaggatgtagactactaagtgtgtgagacttaattttatttgtatacattggcctaagaagaaagattgttgatttagttgtgactttttctcttttgcttgcattgtaactaaaacctttaactggtgttcaagttaaagtccagtgtaaattatgcagttagtgtttcaataataattgtaacaattcccatct

SEQ ID NO: 218922 - DNA, 317 bp, Gossypium hirsutum
ctcttacgagacacacaactcacgtgtatccaaattcatggacagctatattggtgtccctggacaaccagcgtatgtggaacatgaggtctgcatcatgggaaaggcaatatctggggcaacaattttatctgagagtctggaatcctgttcggagtcttgctaacgaatacgacattccttctaatgtcttactctgcggtaaagcagttgggcgccacccttagccagccagtatggccctaatggctattatctgttaccagtcatcagagtttgactgctgataaaatagattgagagagaagaaattggat

SEQ ID NO: 218923 - DNA, 371 bp, Gossypium hirsutum
acgcttccatccttctatctttattttctcgcctgtgacgagaagccgacgctaccatggttcgggtcagtttctaccgggggtatgggaagacctttaagaagccacgacgtccgtatgagaaggaacgattggatgcttagttgaggcttgtaagagagtatgggctccgatgtaagagggagctgtggagggttcagtatgctttgagccgcatccgtaatgctgctagggaccttctcactcttgatgagaagaaccctcgtcgtatttttgaaggtgaagcccttcttcgtaggatgaacagatatggacttttggatgagagccagaacaagctcgattatgtgttggctttgacttgtgaaaac

SEQ ID NO: 218924 - DNA, 452 bp, Gossypium hirsutum
acaatgactgtaatttgggtcacaggtaccaaagagaggaagcaaaaatccaagcttgggtgaaccttcaaaatgcaaaagcagaagctcaatcaagaaagcttgaggtgaaaatacaaaaaatgagatcaaagttagaagagaaattaatgaaacgaatggcggttgttcatagaaaagccgaagaatggagagcttcagcccaacagcaacatgctgagcaaatgcaaaagccaaacaacattctgattagtaaccgaagtaacttgcaattttcaggcaacatttcatgtggttgtttcccttgcaataacagccgctaatccaatgttccattgagtgtaattccaaaaccccattcttgcaaagcttttttatgggagaaaaaatcacaccatcaattttgttggcaactgttggcatgaaaattgtatcatatcggaaaaatttta

SEQ ID NO: 218925 - DNA, 334 bp, Gossypium hirsutum
gaatgttcctcaaatcaccgaacatcgatggcaatgtacaagattaagcttgtagggccgaagggtgaagtgaatgagttcgaagtccccgataaccagtacatcttagaggcagccgaggcagcacgagtagagctgccttattgatgcagagctggagcttgctctatatgtaccgcgaaggtcgtttcgggtacggtacatcaaccagaagccatctacctcgaggacgatcaaattaaggatgggtatatgttgacttgtgtttcaaagccaacctcagattgtgagattcacactcacaaagaacttgatgcttactctccatcaaaaa

SEQ ID NO: 218926 - DNA, 378 bp, Gossypium hirsutum
agactttcactctcttatctagggactcaatatggggcactgaatgcgaactgccggagaggtgtgggaactttggactctgtgaggagaaccaatgcgttgcttgcccgtcaacaaacggattactcggttggagccagaattgtcagccgaagaaggtgaattgtaggccgaatggtttcagctactacctagaaggagttgaccatttcatgagccagtacaacgaaggagaagggataaaggagagtgattgtgggaggaaatgcacctctgattgcaagtgtttggggtacttttaccacagggaaacatccaaatgttggatcgcttattagttgaaaacccttgcttaaacctctaactcttcccatgtta

SEQ ID NO: 218927 - DNA, 296 bp, Gossypium hirsutum
  unsure (1)..(296): unsure at all n locations
caaaatttgagcaggatgaggatgtaaatcttgatgacatagatgctgtctttaatgactcaactgaacaccttgtaacagaaaggaaagagaaacctgtgtcaatgaatgcttttgagcttatctctaggtcacagagctntagtcttgacaaattgtttgaaaggcagtgtggttctgggaacccgaaaccagtttcgcttccaacgccctctaatgaaattctgccaaaatgaggaactgaaaaccttgggcttaatgtacagcaactacagatgagtgaagggacaagtgga

SEQ ID NO: 218928 - DNA, 413 bp, Gossypium hirsutum
gatggaattattgatgacagctgttggagcagcgaagaattttgcagagaaaataagctatggcttgcattgggtgagaccaaggcagacaaggtagcttggatgaaagcaaaggagctaaaagtaaacctggttactgtctgccctggtcttctcatggctcccacttttccaaattctcatatacaaacttctataccataccttaaaggtgggcagatgatgttgcaacaaggttgcttagcaattgcagaggtgggaaaagtggccaaagctcatgttagtgtgtatgaaagcatgaattatggagcaaggtggaccggacttatgcttttgatgggagttgtgagaagacaacaagagggcattgagcttgaaaaggggttaaaaatgacaaggtttttgttgggaga

SEQ ID NO: 218929 - DNA, 409 bp, Gossypium hirsutum
caggattaagagggttccgactgttgtttcgaattaccagaaggatgagacggaagagactgctcgccgcagcagtgggtgtggaaagaattgccttagaagctgctgcatcccaggagcaaagcttcctttatatgctttcaggaaactgaacaatattgagagtgaaaaagttgtgcttggaattgagaataaagatccccctgttgcttttcttgactcgctcattcttggggagtgggaagatcggatgcaaagagggctctttcgctatgatgttactgcctgtgaaaccaaggtgattcctggtgaatatggcttcattgcccagctgaatgagggtcgccaccttaagaagaggccaactgagttccgcgttgataaagttctccagcccttcgatgggaac

SEQ ID NO: 218930 - DNA, 322 bp, Gossypium hirsutum
gaggaatcgacatgctcaaggagagatcaatgctgggatcaatgtgaggaaaggacagatgactaatatcttggaggagaatgtagtgcagcctttgcttgtaagcacgagtgcaattacactggctacagagtgtgtgaggatgattttgaagattgatgatatcgttaatgttaggtaatttcatgctctggagatgatatgtgtttctctagttatcttttgcatctgttggctatttgaattagtagttatgtttcattttagactcgactatggttagaattatgaaatggcaatctactgccaaatatttgctttc

SEQ ID NO: 218931 - DNA, 332 bp, Gossypium hirsutum
cccaccaccgcaagggtcccgcccgttttcgcagcctcgactttggtgaacgaaacggctacctcaaaggcgtcgtcaccgatgttattcacgacccacgccgcggtgcgcccttagctcgcgtcgtgttccgtcacccgttccgttacaagaagcagaaggaactgttcgtcgctgctgagggtatgtacaccggacagttcgtgtactgtggtaagaaggccacccttatggtcggaaacgtgttgcctcttagatctatacccgaaggagctgtcgtttgcaacgtggaacaccacgttggtgatcgagggcgtttcgctagggcttct

SEQ ID NO: 218932 - DNA, 326 bp, Gossypium hirsutum
gtttcaaactcagaagttggatataaatgggaaggaagttaaggcacacatctgggatacggctggtcaggagcgcttcagggccgttacacctcggttcagaaatgctacatcgaaatctccaagcaggtcaaggcaaaactaggcaaggtagatgactacttcaacaagctggctgatgctatggggacctggatcgaaacatgggatgagctgaatccatctggtgcaaaatcccgcgagctgtccaatggtgcttcgaagtaagcttggtcaagtagcaacttacatattggttagcaaccctaggcttggttggggatcac

SEQ ID NO: 218933 - DNA, 325 bp, Gossypium hirsutum
acaagaaaaaggtggatgcaaagaacgcgttggagaactacgcatacaacatgaggaacacagtgaaggatgagaagattggtgccaaacttgctgcagcagataaaaagaagattgaagatgcaattgacgaggccatccaatggttagacaacaaccagcttgcagaggcagatgaatttgaagataagatgaaggaattggagagcatctgcaatcccatcattgccaaaatgtaccaaggcgctggtgctgacatgggtggcatggatgaggatgccccagccagtggaaccggcgcaggccccaaaattgggaagtggac

SEQ ID NO: 218934 - DNA, 343 bp, Gossypium hirsutum
gcctgcctggctcgaccgacgcgtgcgcgcggttaacatttcgcttcttcaccctatcccaaactcatttacttggcctcttctttctttttctcggatcttgctttctacgtctcagcaaagatctttgattctttctgtctccttttcgttcgctctctgattaaagtgcttttaatggctgctaaaggattttaatccagattgcggggactctgtctacgctggtaggattgtggacttgttacttgaatgtgtggaattgtcctatagaccacgacatttttctcaaggtagaaagcagggatattgtcatgtttgatcactgaagatgctatggtca

SEQ ID NO: 218935 - DNA, 331 bp, Gossypium hirsutum
gaagaacaattgttttttggtgaaacaatttggaagaggaactgctggcgttcgattcagcaaagagcccaacaatctctacaatgtcaactcttacaaacactctggtttggcaaacaagaaaactgtcaccattcaacctgcaggcaaagaccagtctgtactcttagccacaaccaagtctaagaaacagaacaagccttcgagcttgctccataagtctgtcatgaaaaaggagttccctaggatggccaaggcagtcaaaaaccaggtgacagacaactactacaggccggatttaacaaaagctgccctagcaaggttgagtgct

SEQ ID NO: 218936 - DNA, 332 bp, Gossypium hirsutum
gttctatggtgttcttgcttcccttggtctatggcagaaagaggctaagatcttgtttctcggtctcgataacgccggcaaaaccactttgcttcatatgttaaaagacgagagattggttcaacatcagccaactcagtatcccacatcggaagagcttaatattgggaaaatcaagttcaaagcttttgatttgggtggtcatcagattgctcgtcgagtctggaaagattactatgctaaggttgatgctatggtgtacctggtagatgcctatgataaagaaaggtttgcagaatcaaagaaagaactggatgcccttctttccgatg

SEQ ID NO: 218937 - DNA, 143 bp, Gossypium hirsutum
gttctatggtgttcttgcttcccttggtctatggcagaaagaggctaacatcttgtttctgggtcttgataacgccggcgaaaccactttgctttatatgttaaaagacgagagattggttcttcataatcccactcatattt

SEQ ID NO: 218938 - DNA, 119 bp, Gossypium hirsutum
tttggtgaaacaaattaataaaggtcttcttctaacttcttgggggggtttaataatgccggcaaaaccactttgcttcatatgttaaaagacgagagattggttcaacatcagccaac

SEQ ID NO: 218939 - DNA, 414 bp, Gossypium hirsutum
atttatggctaggaaagctctcagagcttcctaacaaatatcagaaggatgctctcccaacactgttttatggatttaggttttggatccccgtcaccttgttgaatttttggatggtccctcttcaagcccgtgtagctttcatgtccgtaggatccattttttggaacttttacttgtcgtcaactatgagtaagtagattcaaccgcaccgcaccggaccggacaattgattgattaattcatgtcacatgagctaatgatgtatttttttgttcttgctcccaattttacttcctttgggcttgctttatttaagaggtaccggcttttttggctgggccggtacggtttaccgtcggttttcatatatgataaattggcggtgccttaaaaaaaaaaaaatggaatttt

SEQ ID NO: 218940 - DNA, 439 bp, Gossypium hirsutum
aaggactctgctgttaatgctatttgttatggggcgaagttgatgattcctggattactgaggtttgagaatgacattgatgttgtggaggaagttgtgttaatgacgacaaaaggagaggcaattgctctgggaattgctgaaatgaccactgcggttatggctacttgtgatcatggtgtgttggcaaagattaagagggtagtttaggacatagatacttatccgaggaagtggggcttggggtcaactgcatccatgaagaagaagttgattgcagaaggcaaattggataagcatggaaagccaaatgacagcactcctaaagagtggttaagaaatgtcgcgttgccaactggtggggattctatggttgccagcctagcagcttctgctgaacctgcggcggtggaaaaggaaaaggaggatggagaggggc

SEQ ID NO: 218941 - DNA, 402 bp, Gossypium hirsutum
aaagtaccaaaagagtactgagcttcttatcaggaaattgcctttccagaggcttgttcgtgaaattgcccaggacttcaagactgatttgcgtttccagagccatgctgttctagctctccaggaagctgcagaggcataccttgtgggtctttttgaagacaccaacctttgtgcgatccacgccaagcgtgtcacaattatgcccaaggacatccagttggctcgtaggatcagaggagagcgtgcttaatttccatgtgtgtggatcagtcgcttagaaagaagaaactattgtttatttttaggcaaatgtattggcttttttgctttttctaatcatcttttaggccatgatggtagtggtaggttcaatgtgatgtgatgatgaagtggggcgtc

SEQ ID NO: 218942 - DNA, 394 bp, Gossypium hirsutum
tttttgtgtggaaaattaagggagaaagggaaagatgtagatcacgtcgttattggtggtgaagtgcaacccagatggacctgatccgatcatattagcgaacgcaactgatgtgagccatttcggatacttgcaaaggtaaagcgtgagggagtttatcgtctttgttgctcgaaccgtcgccaaacgtacacctcccggccagcgccagtcccgtccagcacgaagagtacaaggtacacgcttacaacagaaatggacttgttgtcttgggatttatggatgaccactatcctgttcgaagagctttttacgctttaaaccaggtgcttgatgaatatctgaaaaattttgtggaatcatggagaaccgtgcaagctgatagtactcaatc

SEQ ID NO: 218943 - DNA, 431 bp, Gossypium hirsutum
acaagtctcttcaatggtgggtgaagcaaagttgatagaaaatagggtgggaaaacccgtatccacagatgatttatttcgttttattaaatcagtcatttccgatgaacaacaagaagaaacaggcccattttacgtgctggatttgggtgctacgaggtcgctagtcgagacatggttccataatcttcccatggttcaacctttctatgcagtcaaatccaaccctaaccctgctttcctcaaagaaatggcagctctcggcacggtctttgactgtgcaagccttcatgagatcgaaaccattttatcgcttggggtttcgcctgatcgaatcgttttcgcaaacacatgcaaacccgagtctcacatcaagtatgcagctaaagttggcgttaacttagccactttcgactccaactgtgagctcg

SEQ ID NO: 218944 - DNA, 395 bp, Gossypium hirsutum
cattattggtcctcataatactgtacatgaaggtcgaatctatcagctgaagctgttctgtgataaagattatccagagaagccaccaagcgtccgttttcattcaagaatcaacatgacttgtgttaaccacgaaactggagtggtggaaccaaagaagtttggacttcttgcaaattggcagagggagtataccatggaggatttactgacacagctgaaaaaggagatggcagcaccacataaccgaaagctggttcaacctcccgagggtacctacttctagctctcaagattatcggacatcctggatctaagtgcatttctggtatgcaatatatagcttgtaatgcttgttgatctttaaagaaaatagtggggaatgccccaaaagc

SEQ ID NO: 218945 - DNA, 415 bp, Gossypium hirsutum
gttgggaaatcatgtctacttttgaggtttgctgatgattcatatctggatagctacatcagtaccattggtgttgactttaaaatccgtactgtggaacaggatggaaaaaccatcaaactccaaatttgggacactgctggccaagaacgctttaggacaatcactagtagctattatcgtggggctcacggtatcatagttgtttatgacgtgacagaccaagagagtttcaacaatgtcaagcaatggctaaacgaaattgaccgctatgccagtgacaatgtgaacaaacttttggttgggaacaagtgtgatctaacagaaaacaaagttgtgtcatatgagacagctaaagcttttgctgatgacattgggattcctttcttggaaacaagtgcaaaggatgccacta

SEQ ID NO: 218946 - DNA, 282 bp, Gossypium hirsutum
gaggtcgagagctccgacacgatcgacttcgttaaggcgaagatccaagacaaggaaggcatcctcccagaccagcaacgtctcatcttcgccggaaaacaacttgaagacggccgtaccttggccgactacaacatccagaaggagtcaacgctccatcttgtccttcgtttgcgtggcgggatgcaaatcttcgttaagacgcttacgggaaagaccatcactctcgaggtcgaaagctctgacacgatcgacaacgtggaagcccaaattcaagaccag

SEQ ID NO: 218947 - DNA, 422 bp, Gossypium hirsutum
gtttgtttagatggaaaggctaaaaaggctaaggaagtagtggaagcagtagaccctgagaagaatttggtcactttcagagtgatcgaaggagatctaatggaagagtataagagctttgtaatcacgattcaagtttcgcccaagagcgagggtagtggcagcgtagtgcacttgactttggaatacgagaagctgcacggtgggattgagcatcctgagactctgctgcaattcggtcaagaagactctaaagacattgacggccgagctaaccaagcaagttaagccagatcacatgatgctattggtggccgttactggaagcacttatcatcaattaaaggaataaggggccaccttccttcttcatgtattttgatctgaatatgtacgtttagatcaatatgcagtcacgggga

SEQ ID NO: 218948 - DNA, 349 bp, Gossypium hirsutum
cgtccttcaaaggatcaaatataaccggtgctgatttcacagatgtaccattgcgagatgatcaacgagaatatctttgcaaagttgcagacggggtgaatccaactaccggaaacgcaacgcgggacacattgctttgcaactaggtgaaaattcgagaattgacactgcggctgttattattcgaggtttgtaactattttgctgtaaacggttgtcatattcttttgttgaagatgcatacacttcgatttgtacgacaaagaaagttatataaactctctttatagcctgtaaaaaaaaaagcatgaatagcttggattatacaacattgagttgttattgagaa

SEQ ID NO: 218949 - DNA, 283 bp, Gossypium hirsutum
tcggtgctgctgtctttgcagtttatcggttattcctttcaatcctcagccatggctgaagagacggagaaagcatttctcaaacaacccaaggtgtgtttaagctctaaaaaaactgggaaaggaatagagacctgtaaagggcgataatcgcttcttgaaaagccattgcttaggctttatgacacccagagaggccattgaaggaacatatattgatgagatatgcccatttactggcactgcttctattagaggccgtattcttgccggtacttgtcat

SEQ ID NO: 218950 - DNA, 384 bp, Gossypium hirsutum
acgttttaccggacggtactctctgcgacttcgacgccgatgataagctccagcaggtgtccgtacattccctggctgccggtaaaaaggttatcatctttggcgttcccggtgcctttacccctacttgcagcttgaagcatgttcctggattcatcgagaaagcaggggagctgaaatccaagggcgttgatgaaattatttgcattagcgtgaatgatccctttgtgatgaaggcatggaccaaaacttaccctgagaacaaagatgtcaagtttctagctgatggttcagcaacatacacccatgcccttggtcttgagctcaaccttggcgataaaggtctcggcactcgttctaggaagttcgcactcttggtcgatg

SEQ ID NO: 218951 - DNA, 415 bp, Gossypium hirsutum
gacccacgccgttcgcacatgatcctatggctgtcgaacgctgttttttgaagttttaccagcacggtactcttctgggacttctgcgcgcgatgataagctacaacaggtgatcgtacattcactggctgcctgtaaaaaggacatcatctatgcgcgctccgatgcctatacccctactcgcacctcgtagcatgttcctggatttattgagaaagcatgtcagcttagatccaatatcgatgatgaaagcccatgtactggcactgcttatattagaggtcggatgcttttcaatacttgccatagtgcaaacatggtaaggaccattatagttcgaaggaactaccttgactacattaagatataccaaagatacgaaataaaggcactgcaattattccaggttatatat

SEQ ID NO: 218952 - DNA, 206 bp, Gossypium hirsutum
atgtaaccgttgttcacggcaccatcacaggtgtggatatcagtatgaacacccatctcaaaactgtgaaacttacattgaagggaaaaaatccagtgactatgcatcacctcagtgttaggcgtaacaatattcgctactatatcctgcctgacagcttaaatcttgaaacattgctggttgaagagacaaccgaggtgaaacca

SEQ ID NO: 218953 - DNA, 418 bp, Gossypium hirsutum
ctcttttacgtggtatcctttattggattgctcaactccttggctcaaccgtcgcttgcctgttacttaagttcgccactagtggcctgggagtaccagctttcggactatcatccggcgtgggagcattaaacgcgttcgttttcgagatcgtgatgactttcggactggtctacaccgtctacgccacagccgtcgatcctaaaagaggcaacttgggagtgatcgcaccgttggcgatcggtttaatcgtgggagccaatattttagccggtggggcattcgacggagcctcaatgaacccagccgtttcatttggaccagccttggttagctggtcctgggaaaaccactgggtctactgggctggaccacttattggtggtgggctcgctggtctcgtctatgagttcatctt

SEQ ID NO: 218954 - DNA, 434 bp, Gossypium hirsutum
cacactctctggtcacagatgtcatcatgatcttgagactgcaagaatcaatggaatgttaggaaatattgatgcatacactggggatcctcaagatggttgggacacagatcagttcttgactgatgtcggggaggcaaccatgattatgctaagtgtgataagaaatggaggattagcaccaggaggcttcaacttcgatgcaaaattacggagagagagtacagatgttgaggacttgttcattgctcatattagtggaatgtacaccttggctcgtggactccgaaatgctgctaaactgattgaggatggttctttggctgagcttgttcgtaaacgatattctagctttgacacagaacttggtgcccagattgaggctggttaagctgattttgaaatgcttgagaagaaagccatggaaatgggag

SEQ ID NO: 218955 - DNA, 387 bp, Gossypium hirsutum
ggcaaacagctcaatctctctcccgcttcctttcacagttcaacaactgctgcctctctttctctcacatttttgcttcaaccattacctctcctcaacatgaagctcgtcaggtttttgatgaagttgaacaatgaaacagtgtcgattgagctcaagaatggaaccgttgttcacggcaccatcacaggtgtggatatcagtatgaacacccatctcaaaactgtgaaacttacattgaagggaaaaaatccagtgactatggatcacctcagtgttaggggtaacaatattcgctactatatcctgcctgacagcttaaatcttgagacattgctggttgaagagacaccgaaggtgaaaccaaaggagccaacagctgggaag

SEQ ID NO: 218956 - DNA, 415 bp, Gossypium hirsutum
gccggaggaagcgacgagagtgacacgtagtattatgatcgtaaagccgcctggttaccagagcggatcgcctccggtttcgccggccggatcgacccctccggtatctcctttttccggaggcagagaatcatatcggtttcggagaaggtccacatcggatgcatacgagaaggctaacgaggttggaccaaggagcccttgtcctcctccttacgacgtgtgagatatgagtcctctcccatatttggcgacaaatcaaatgggttttggtactgtttgcatgcttaggtctttcaaatgtgtaacttaatagtgtagtatggggtgatgtatgcaagaatgtagtctggtacttgtgtatatagagcttgtaatagtacggttcggccgttgtttgtcgggataagatttc

SEQ ID NO: 218957 - DNA, 409 bp, Gossypium hirsutum
  unsure (1)..(409): unsure at all n locations
gacccacgcgnccgcgaaagcggaggacctttggattgacgtgcacagngnacgccacagccgnggancccaaaaagggaagctngggaacaagcgtaccanaggcaaagggcnncatcgngggggccaacattttggcaggaggtgccttcgatggagccttaatgaacccatctgtttcattcggtctagccttggttagctggacatgggacaaccactgtaactactgggtcggaccccttatcggtggtggtgctgctggtctcatctacgagttcatcttcatcagcaacacccacgagcagctcccaaccaccgattattaagcctaatcagggtttaattgatttgtctgtcactttgaaaccggattttctccgatcacatttgagtctcctatctcttt

SEQ ID NO: 218958 - DNA, 327 bp, Gossypium hirsutum
ccggattctctcttcatctggcactggtcaaaaccctaattatatattgttatttcctattttgtttcatataattttgcttttcaatggccaacagtaatctccctttatttttattattgttctttatttttactcattgtaccttttatttgaattagtgctttaacttttttttttatattcgatattataatgtgatgattctttgttctacacagtcttcatatttttgaggggttttcaagttggaactttttttgcctgaagaatattccatggccgctcccaaggttcgatttcttacaaagatatatcatcctaaca

SEQ ID NO: 218959 - DNA, 406 bp, Gossypium hirsutum
caaatttacagtattgctaatgccaaatggatcagatcggattacatcccatcccctgcaagaactgcagccaaccaagatgatagacgatcctgaaatcaaggcctggttggctttgggaacaaagacaaagaagaaaggtggtgggaagaagaagaaaggtaagaagggtgataaagctgagggtggagccgagggtgaggccatggatgcatcgacaaattgtggtgcatcataaggaaacaataataaaaatgtttttgcgcatattttctaatctgcccttttatatattatgatgattgccaaaatttttgatactgtgttcacttgtagcttgttggttatgagttaaaattttaatagagtagttttttattttatggcatgacatccacttggagtc

SEQ ID NO: 218960 - DNA, 254 bp, Gossypium hirsutum
gcgcttaatgcagacatgactacctcacggtgcgtggatgaatcaagttacttgcagtcaggtgaaatggcgcaccacggaaccccttcgactggaccctttggtacggatcacaagtgggagtacctacgggcgctcattggatattgccaaggatagcagctataatgagctgcgtcgtgagcttgctcgaatgtttggtctggaaggccacctagaggaccctaaaagatcaggctggcaactagtatttg

SEQ ID NO: 218961 - DNA, 397 bp, Gossypium hirsutum
gattcccggtcgactacgcgtccgcgcacaatcaccagattggtgctttggctgttgccttgaaacaatccatgtcacctgggttcaaggcttacgccaaacaagttaaggccaatgcagttgccattggaaagtaccttatgagcaaaggataccagcttgttacaggaggaaccgagaaccaccttgttctttgggatctccgacctcttggattgactggcaacaaggttgagaaactctgtgacctgtgcagcatcactgtcaacaagaatgctgtatttggtgacagcagtgccttggcacctggaggagtacgaattggtacccctgccatgacttcgagaggtttggtcgagaaagacttcgaacagataggtgaggttcttcaccgagc

SEQ ID NO: 218962 - DNA, 449 bp, Gossypium hirsutum
gattcctactgcctttgatccctttgctgatgcaaatgctgaggactcaggtgccggtgcaaaggagtatgtgcacattcgtatacagcaacgcaacggtaggaaaagcttgacgactgtccaagggttgaagaaagaattcagctacaacaagatactcaaagacctgaagaaggagttttgctgcaatggtactgtggtccaggaccctgaatgagggcaggttattcaactccaaggtgaccagcgcaagaatgtctcaaccttccttgttcaggctggcattgtgaagaaggaaaacatcaaaatccatggtttctaaattgcatctgcttatggttttctgctaagtcacccgtgcctcgtgtcaaagcaggaaacacaacttgattacaacttgattagaatctatatagtgttatgttttctttatgttggtttgataaaaa

SEQ ID NO: 218963 - DNA, 374 bp, Gossypium hirsutum
cagatatcatgaattgggcaaaccggatagtcaaaagtacaggaagaagtactcaaagagaaagcttgaaggataaaagcctttccactggactgttcttcctcgaacttttaagtgctgtggagcctagagtggtcaactggaaccttgtaaccaagggtgaaagtgatgaggagaagaggctgaatgcaacatatatcataagcgtggcacgaaagcttgggtgttccattttcttgttgcctgaagacatcatggaagtgaaccagaaaatgatccttacattaacagccagcataatgtactggtgccttcaacacgcagcggaagaaggtgaggtggctctatcccctgctaatggcaacggaagcact

SEQ ID NO: 218964 - DNA, 445 bp, Gossypium hirsutum
tggtgttggaatcggatcaattctgcttcttggcctagcagggttcttgttctggttcgtcaaacgtcaacgccaagcttacaaggtcaggccaatagctactgcttcaccaccaccaatgccaccattcaatctgaaacctttctcggattcaacaacttacacttcaaactcctggtctgtttcaatatcttcccaaggggttcgtcatgcaatcgaatccttaactcgttacaagttcgaggacttgaaagctgctacagggaactttagtgaatccaacaggattaaagggtcagtttttcgaggttctttccaaggtgatgctgctgctatgaaagtaatgaacggggatgtttcttcagagatcaatttattgaagaagatcaatcacaccaacattataaggctttcaggtttttgtgtacatgaaggaaacacatac

SEQ ID NO: 218965 - DNA, 440 bp, Gossypium hirsutum
gcagcaccatgtaagaagaactaaaagcgttgtgaggtttttttccccttaattttctagggaaacaaacaaaaccatggatgattacacgatagagattatggatttgaaaaccctggttactcgaaccctagagaagaaaggggttttagctaagatccggtctgaactaagggctgatgtctttgaggcaatagaagaggaagatcgagtaatttaaaaagaggagagtttacctcctgcattattggtaagttgcaatgatcgcgctatacgacttcatgcttctccttctggaagattgttaactgcactagtgtgtgagtacttagactgggcgcaactaaaccacactctaaaagtgtaccagccagaatgcaatttgcaaaaagactcctggaaagctgagttggaagactttagcggcaaaaatggttatg

SEQ ID NO: 218966 - DNA, 428 bp, Gossypium hirsutum
  unsure (1)..(428): unsure at all n locations
gtttgggatcagctcggtgtacttgggattcgctggtgtgtgcgctcttgctgtcttgtacatagctggtaacgctgtggaaacaaaggggcgatcattggaagaaatagagcttgctctgaatgcgacgacttaattcgtacaatatccaaaggtatgcagaaataatctctgaagctggttaatgctcatctcatgagcattccattattttgcatcttttggttaaggccagagagaggcaactagttctagtgacgtgtacgtatacctatgttgcttgaaatatggaaagaagagatttttggtagtttgaactctgttggtttatgaaatgcaagatgttgcgtaagaaaattagtcccatgtacaacgctttaagcgtgaaataantttattaaaaaaaggaaggaagataatgagatgat

SEQ ID NO: 218967 - DNA, 398 bp, Gossypium hirsutum
cccaacacccccaaccaaagcaccaacttcagcaccagcaccgccaactaaagcaccagctcccccatataagcccccagttcctacacctccagttaagccaccaacaactccagcaccgtcttacaagccaccaagtccaccattgccacctgttaggacaaaaaaggattgcatcccattatgtggacaaaggtgcaaattacactcaaggactaacctatgcttgagagcttgcatgacatgctgtgacagatgcaaatgtgtcccaccagggacatatggcaacagggaaatgtgtggcaaatgttatactgatatgagaacccaccgcaacatgcacaaatgtccttgaaaagcccaaccaaagcccccaaaaaacgacacttcttgagtat

SEQ ID NO: 218968 - DNA, 414 bp, Gossypium hirsutum
cgttgagtcagcaagtagagtatttcaaggagtaccaggcaaagctagcagaggtagctggtagtagcaagtcagcagccatcatcaaggatgcactctatgtattgagtgctggaagcggtgactttctccagaactactatgtcaatcctttggttaaccatgcctatactccagaccagtatggctctttccttattgatgccttcacaagattcgtccagaacgtgtatggcttgggagcgaggaaaattggtgttacttctcttcctccgttaggttgcattcccttagcaagaacattgtttggttaccatgagaagggatgtgtgagcaggttcaataccgacgctcagcaattcaacaaatagctcaacgcagcaacaaccaatcttccagagcaacaccctgatc

SEQ ID NO: 218969 - DNA, 397 bp, Gossypium hirsutum
gaaagcaaagttcctttcctgggcatctgccttgggatgcaaatagctgtagtagagtatgcacgttcggttcttggcctgtatgatgcaaatactgaagagtttgatcctcaaacctcaaatccttgtgtcatatttatgccagagggttctaaaactcatatgggaggaacaatgcgtctgggatcaaggaggacttacttcaaggttcctgactgcaaatctgccaagttgtatggtgatgcaacctttgttgatgaacggcatcggcatagatatgaggtcaatcctgatatgatatcacaacttgaagcagctggtctatcatttgttggcagagatgaaagtggtaggcggatggagattgaagaactaccaagtcattcatattttattg

SEQ ID NO: 218970 - DNA, 325 bp, Gossypium hirsutum
gagcaaggttggagttcaccactacaatggaaacaacgtagacttgggcactgcttgcgggaaatactttagagtgtgctggctcagcattattgaccctggtgactctgatattataaagagcatgcccggcgatcactaagctatggggggataacttcctaggtgctgatttagtttcaatttttggatgtctaaaaacattgcagatgttaaagacaaacttattctgaaattcataactttctttgtagcgtttgtgggacagagatggtattggcccatgtattaatgaatttttggagtggatttagcttaaaaatct

SEQ ID NO: 218971 - DNA, 340 bp, Gossypium hirsutum
aaataagttggctaaatggactgctcaagcgattttagccagtgctgatttgatgaaagtgggatatgtgacaagagtgcatcctagggatcattttaaccatgtgatattaggtgttgttgggtataaaccaagagattttgcttcccaaattaatctgaatacttcgaatatgtgggggatcgtcaagtctattgtagacttgtgtatgaagttgaatgaagggaaatatgtgcttgtgaaggatccatctaagcctcaagttaagatttatgaagttccagctgatgcttttgagaatgaatatgttgaagaaccattgccagaagaagaacaggtt

SEQ ID NO: 218972 - DNA, 414 bp, Gossypium hirsutum
ggagattaccaaagttgggttcaagggaaaacattcaccgtaagcgacacacttgtgtttacctacggtggcaggcactcggtggaggaagtatccaagagcgactacgataattgcaacaccggcaatgctattaatcctacggcgatgggaacactgtcatcacactgtccaatccaggggcaatgtatttcatatgccccaccataggtcactgtgctggtggcatgaagctagccatcaatgttgtagcagctagtggcaactcaccctgcaccccctctactgcgtctggttccaccactccttccgggactccccccagtggtggtacaacaacttctcccccgtcaacacctagcggagctccgagcaccgagaattatggttttatggtagccttgttgggagccg

SEQ ID NO: 218973 - DNA, 409 bp, Gossypium hirsutum
gaaaatggaagtttcatctttacgccattggaaggttatcccaatcctgcttatgacccttcaattcactactaacatggtcttgagcttaattgatgcaccatttgacaaccaaagaaacattgagtacatcaaatcttcatgcagctccacaacttatcccagactgtgctatcgctcactctcaatctacgcaaacaaaatcgacaccagccccagattgttagtggatactgccctcaatgttaccctcaaggccagcaaatcaacttcaaggttgatggtgaagatctctagaatccacggtttgaggcctatggtagctgctgccatggcagattgcattgaggtgatcggggactctgttgatgagctccaacagtctatagaggaacttggtcacgttagc

SEQ ID NO: 218974 - DNA, 415 bp, Gossypium hirsutum
gcagaaaatatcacaaatcttcttctccttctcagaaatcttagtatcatcactatgggctcaaatcccaaggtcttctttgacatgacgatcggtggtcagcccgctggtcggattgtgatggagcttttcgcagattgcactcctcgcactgcggagaacttccgtgccctctgtactggcgagaaaggcgtcggccgcagcggtaagcccctccactacaaaagctcttctttccatcgtgtgatccctaactttatgtgccaaggaggtgacttcaccgccggatacggttccggaggtgaatccatctacggatcaaagttcgctgacgagaacttcatcaagaagcacactggtcccggtattctctcaatggctaacgctggaccagggactaacggatctcagttct

SEQ ID NO: 218975 - DNA, 357 bp, Gossypium hirsutum
gatatatatgatctcaaatgagatgtctctttcttccattctcgccgcgtactctctagaagatacccaatcctgagactgctaaaggaaacgaatttcgaaccctgttcaccatgagagctaagtggaagaagaagcgtatgaggcgcttgaagaggaagagaagaaagatgaggcaaagatctatgtagcctaatgttgcttgatgggtacttttttttttgttaaaggatttgagatttatctttataatttgtatgggttacctctgtatttctgtagaacccttttttcatctacatgaacaatgtcatggaattttctttttagaactaaatgcttatctgattcgatgtt

SEQ ID NO: 218976 - DNA, 410 bp, Gossypium hirsutum
agcatataaagatcttgggaaaatgttgctaaaatatccatggatactttcaacaagtagtcaagaaaattatgagcagatccttttgttttttgaggaagaaaagataccaaaaacaagtgttgaccgggcaattagaagctggcctcatttattgggttgttctacaagcaagctaaagttaatggtggatcaatttggtgaattacgtattagaaacaagaaatttggccgggttattgccaaaagtccccagctgctattaaagaaacctcaagaatttctccaggtggttctattttttgaagaacttggtcttgctcaggaaactgtggggaagttagtttctcgctgtccagaagtctttgctgccaacatcgatacaactttgaagaaaaaggttgagcttc

SEQ ID NO: 218977 - DNA, 415 bp, Gossypium hirsutum
cccacgcgtccgggagagttcgtcgtgaatacaaggctaacaagatctcagaggatgattacgttaaagccattaaagaggaaattaagaaagttgttgaccttcaagaagagcttgacattgatgtcctggttcatggagagcctgagagaaatgatatggttgagtactttggtgagcaattatctggttttgctttcactgttaacggatgggttcaatcttatgggtctcgctgcgtcaagccaccaatcatctacggtgatgttagccgccccaaaccaatgaccgttttctggtcatctactgcccaaagtatgactaaacgcccaatgaagggaatgcttactggccctgtcaccattctcaactggtcctttgtcagaaatgatcaaccgagattcgaaacttgcta

SEQ ID NO: 218978 - DNA, 271 bp, Gossypium hirsutum
cccacgcgtccgcccacgcgtccgcccacgcgtccgcccacgcgtccgattttggtgcaataatttcacaaatcgggcaaatcaagtctacttctaatatgggggttcctctcggccccggcaagttctacggcagcagtcttcctcggccccgtatctacaacgaaaccagggtcaactccgaacgcgtaaatcctccggttccagttcttgatccgctgctctcttgggccaatgaagcccactggtccatgggtggtcttaatttcaa

SEQ ID NO: 218979 - DNA, 440 bp, Gossypium hirsutum
tctggaacatgtattatatagtgttctttgaggaccacataccaatcagagtgttcaggaactgctttgatttgggagtgaggttcccattcaaccaaccaatgaagatatactcagcttatggaacgccgatgactgggccacaaggggtggtctcgaaaagaccgactggtccaaagccccattcataaccgcagactgcgttgggtccgcaacatgttcactatttacaactattgcagcgattgggagaggtaccccacaatgtctcccgagtgcaagaaatacagatacgcttgagtcatttccatcaccaccgagtccatattccccccttatattcttcactaccatatgaaatccgtcattgtcctttagattcaattgcttgctggccttcacttattttccacatcaatttcattatttagtattttact

SEQ ID NO: 218980 - DNA, 410 bp, Gossypium hirsutum
cttcactctatttcggtccatatagcttctgattatctgattgacgaagctacaaacttgtggggccacaatcttgaaataatgtattatcgggttttacaatatccaaatcgtgttgaaaacctgtacttcacattcctctttgttctccgagctgtgacaaagacagctgactacttggaacaagctgaatatgatacaggtaatccaactgaggacataaaaacgcagtccctaatgaagcagctactttatgatccaaaactgcaagctgcatgcccacttccatttgatgaagccaaattgtggaaaggacgaacaggaccagaactgaaacagaaaatacaagcacaattcaaaaatatcagtgcggtgatggactgtgttgggtgtgaaaaatgtcgactttg

SEQ ID NO: 218981 - DNA, 403 bp, Gossypium hirsutum
cgaggaactgaagttggagaaagaaagcttggcgatggatctttctcgatgtaccgaagacctggagataaccaaggctaaattacacgaaaccgaattgcttctaacagaagctaaatctcaattggcttctgctcagaaatcaaacagcttggctgagacacagcttaagtgcatggcagagtcgtatagatcactcgaaacgcatgcagaggagttagcgactgagctgaacattttccgggtaaaaaccgaaacttttgaaaatgagcttcaagatgaaaagaaaggtcatcatgatgctttagctagatgtaaagaacttgaagagcatttgcaaagcaaggaaatctgctcggtttgttcttcagcagccaatgttgaccgcacgagcaagcaggag

SEQ ID NO: 218982 - DNA, 412 bp, Gossypium hirsutum
aacagctcaaaaaagcttccaacattttgaagaaacaaagaatcaaacatgtcgaaagaagtgagtgaagaagggatgagccgaaaggactatgtggatcctccaccggcaccgctcatcgacgtggctgagatcaagctttggtctttttacagagctctcatcgccgaattcatcgctactctccttttcctatacgtcaccatagccaccgtcatcggccacaagaaacaacacgatgcatgcgatggtgttggtcttttgggtattgcttgggcttttggtggcatgattttcattcttgtttactgcaccgccggtatctcaggtggtcacattaacccggcggtgacatttgggttgtttttggctaggaaggtgtcgcttataagggcggtggcttacatggtag

SEQ ID NO: 218983 - DNA, 409 bp, Gossypium hirsutum
gcctgtaagaattggggtttctctgagttggtgaaccactggaacactctcatgagctgagggaaaccgtggagaggctgaccaaggaacactacagaccgtgcatggagcaaaggttcaaagaaatggtgggcaatgcggctcttgaggctgtccaatctgagatcaatgacatggactgggaaagctccttctttttgcgccactcgcctgaatctaacatgtgtgacagtcctgatcttgaagaagattacagacaggtgatgaaggaatttgccatggaattggagaaactcgcaaagcaacttttggaccttttgtgtgagaatctgcggtcggagcctggatacctgaaaaaagcgttgtatgggtccaaagggccaacctttggtaccaatgccagcaacta

SEQ ID NO: 218984 - DNA, 388 bp, Gossypium hirsutum
gtcatttcactgttgatattatttgtgcttgatctgttgacggtgcctaggacttctggcgcttgcagtgcatcgaaaccgagatatgaataagatatctgcttaaccatggctaccaaggctaggactgtgccgacaaggaaagtcatgacgtacaggcctctttgcaggaaacaattgactattgaagttttgccttctgtgaagcccaatgtttctaacgcggaattgaaagacaagctctgtagaatgtatgaggagaaggacccatgttcgatattcgggtgcaagtccaggactcattttggaaagaggaaagctactggatttaggtagatatatgattctgactagaacgcgaagatgtctgagccgaaatacagactga

SEQ ID NO: 218985 - DNA, 324 bp, Gossypium hirsutum
  unsure (1)..(324): unsure at all n locations
gtcgagccacgcgtacgtccaattggctacagcattaaggggctgcttcttttaagtagngnngctaagggctgtcctggggcgttttgactttgtggggagccatgttctccctatctctgctgtagatgaagcccacgtccacaaagtgaaagagctggaagacctgtagcacctgaagctggacttctggcggggccctgtccgcccgggctcccccatctatattatatntatctcttatccttttttccttatttattaatattttttcaggtaatttcctctttctattcttattttaccttacctataattcatata

SEQ ID NO: 218986 - DNA, 413 bp, Gossypium hirsutum
cgttttcattggcactctgcatctctaatttgtttggtttttctttttggctaatcattcgctttctgtttctggcatctttatatttttctccgattcatacacagtcgaaatcttttatctttgtgatttgcaaagaaaagaaaatgaaggaaagtatgggaaaccctcttcacctcaaatctttgaaccacatctcccttgtgtgtagatcagttgaggaatccatgaacttttatcaggatattcttgggtttgctccaatcaggagacctggatcatttgactttaatggggcatggttgtttggatacggaattggaatacatctcctgcaatcggaggatccagagagtttgcccaagaaaaaggaaatcaatcccaaggataatcacatttctttccagtgtgag

SEQ ID NO: 218987 - DNA, 340 bp, Gossypium hirsutum
gctagaagagcttgagaggggtgaaatgggaattggagatggaactgttagctatgggatggacgatgctgatgatatatacatgcagtcatggactgggactattattggccctccaaacactgttcacgaaggatgcatatatcagttgaaactgttctgtggcaaggattatccagataatccacctagtgtgaggtttcaaacccggataaacatgacctgtgtcaatcaggaaactggagtggtaggtgatgttattcttaggaccttttatgccacaatatgtactgaaagccgctaaaattgtcaggttgaacctaacctttttcccatgctt

SEQ ID NO: 218988 - DNA, 352 bp, Gossypium hirsutum
acgcgaacagaggaagacgcataacggaaagacgatcactctcgagggcgagagctctgacacgagggagagcgtgaaagccaaaagccaagacaaggaaggcatcccgccagaccagcaacgtctcatcttcgccggaaagcaactcgaggacgggcggactttagccgattacaatatccagaaggaatcgactctgcatctgggtctacggcttcgaggggggatgcagatcttcgtcaagacttagaccgggaagaccattactttagaagtggagagctcggatacgaatgagaacgggaaagcgaagattcaggacaaagaaggaattccaccagatcagcaaagg

SEQ ID NO: 218989 - DNA, 351 bp, Gossypium hirsutum
atactgtgaagaggagtgtgcgctcagaaattactgatgatacatatccaaacgaatagaagctcagaggtagacctggatatgagcacctgaatgatccgcttcacatcttaatcgaggccgatttgcctgctaatattgatgatacacggcttagacaggcacaggaaatcatagaggaattacttaaacctgtggatgagtcgcaagattttatcaagagacagcagttgcgggagctggcaatgctaaattcaaacttcagagaggatagtccgggtccaagcgggagtgtcttaccttttaattcaagtggaatgaaacggaccaaaaccgggcgctgagaaataa

SEQ ID NO: 218990 - DNA, 307 bp, Gossypium hirsutum
  unsure (1)..(307): unsure at all n locations
ggccgacccacgcgnccggaagcgcaagagaaagctatccaacagggaatcngcacgccgctcncggacgcgaaaacagaagcacctggangagcggacgggccaacgcacngaacncaccaaccacaanaaccagagccgcacaagcancaagggcaccacgcagcnngactccaacggagaggcggagaacnngggncgaagagctcagaagactgagctcagcaacaggttgcaatctctcaatgaaatcattcatttcataaactccagcaatgggggtcttcaaaggggacactaacttttg

SEQ ID NO: 218991 - DNA, 338 bp, Gossypium hirsutum
ctccgccacccaacagatcaattcgttgagggctccccgctcttcattttctttactctcagaagccccgatcccatcttcaactccaaaaatgtcgggagaagaggttgccgttgcccaaccagaggcacccgctactcttggtgagccaatggacatcaacacagccttgcctcttgtggtgaggaagtcccaagctcatggtgggcttgctcgtggcttacatgaagctgccaaggcaattgaaaagcacaatgcacatctttgtgttttggctcgatgactgtgaccaacctgattttgttaagctggtcaaggcactctgcgctgaccataat

SEQ ID NO: 218992 - DNA, 297 bp, Gossypium hirsutum
aaaaagactcacgacgtcaatcctcttttgttacgagctttcctcaaccagaagggaggctggtccgacaagagaaaaatggaggagcagaagcctaaggaacagagacccaaagcaaatgagaataagcctgtcatgacagagtaacagctgcttttgtttagtatgcatggcaagttggtggatggttgttcttagaactctgatatgttcaagattgaaaatgcttgttgatgtattcaaatactgccataacggtttttctttgagatggaatgatattcaactttgtggatg

SEQ ID NO: 218993 - DNA, 342 bp, Gossypium hirsutum
atgaatatcacaaatttagagagtgtgccaaagaacattgggattccatgagatcttattatcagaaggctgctactgcatattcaaagggagagttggagtatgcagcttatctttctgatcagggaaagatacagagtaaattggcacgggaagcagatgaaagggcaagccagaatatatttaaagccaggaacaaagcctttgaaaatgtgataacaattgatttgcatgggcaacatgtcaaacaagcgatgaaacttttaaaactacaccttctatttggaatacatgttccttctgttcaaactctgagggttattactggctgtggaacacatg

SEQ ID NO: 218994 - DNA, 339 bp, Gossypium hirsutum
  unsure (1)..(339): unsure at all n locations
gatttgcaatcncaactcaccggggctcacgattggatcctccttaaaatcatggctgcggagattagcaagaagcgcaaggttgttgcggatggagtgttctacgcggagctaaatgaggttttgacaagggagcttgctgaggatggatactccggagttgaagtcagagttactcctatgcgtactgagatcatcatcagagctactcgtactcaaaatgttcttggtgagaagggtagaaggattagagagttgacttctgttgttcagaaacgattcaagtttccggagaacagtgtggagctctatgctgagaaagttaacaacaggggtctt

SEQ ID NO: 218995 - DNA, 330 bp, Gossypium hirsutum
acatcacttgggaccaaaattatcgagtcactcgagtagatttaggtgatggtaacctgtctggacatttggtacctgagcttgggaagcttgagcatttgcagtatctggagctttacaaaaataagatccagggaaccatcccaactgaacttgggaacttgaagagcctcattagtttggacctatataacaacaacatctcagggaccattccttcttcactagggaaattgaagtctcttgtatttttacggcttaatgacaacaaattaactggaccaattcctagggaacttgccggtattttaagcctcaaagttgttgatg

SEQ ID NO: 218996 - DNA, 292 bp, Gossypium hirsutum
atgctggatcgcgtgttagtctttgatgaggggcaatgcggattgggtcgaactggttatctctgggcacacgaagcgtacggcgtattcccggatatgatgacacttgcgaagccacttgcaggaggacttccaataggtgcgactttggtaactgaaagagttgcttctggcatagcccatggggaccatggaagtacttttgcaggttcaccttttgtttgcagtgctgcaatttctgttttcaataaaattgcaaaccccagtttcttgtccagcgtctcgaagaaag

SEQ ID NO: 218997 - DNA, 350 bp, Gossypium hirsutum
agcaaacacttcgcggggagccagtacttttattagatactcttgaagcgcgcatttagaggccgcgggctacgatctctagttcgcaacgcgccattcttgttttcccgcgcgtgatgcacttggaaatggacggctatgatttcaagatgaaagacgtgtgttacgcaacgtcggctgatccgacggttgtgggagcagtaggaatgaagtcagcggatgagaggacgaaaatcctggcggtagaaggtggggtggccatgaacaatccagctgcggcggcgataacacacgtgctgaataataagcaggagttcccgttttgtaatggggtggaggatcttttggtc

SEQ ID NO: 218998 - DNA, 349 bp, Gossypium hirsutum
cgcgtccgggcattcttctgataaacaaaaactgagtgaagagtttggttgtgcttactatagcaagagaaacctatcttaatttgggcatcggtcctttggcgttttccaaaatccctagcccgatctcctgtggaggcagccatgaggaccctattttcaaccaccaaacgcctcatttcttgcactagcgccaccgccgtggccacccattcccgttccttcagcttgatacccatggtgatcgagcactcttcccgcggcgagagggcttacgacattttctctcgtctcctcaaggaaaggatcgtctgcatcaacggacccatcaacgacgacacctcccacg

SEQ ID NO: 218999 - DNA, 351 bp, Gossypium hirsutum
tcgaaaagttttacatttaagaaaggcgataggtgttaagtttgtaggtactacttcaccttcgggattttcctctctacagcctgctttgaggggaccggcaattggttttcggggaaaagttctccttgcttttgaagaaaatggttcatcaaaaattggggtcagatttgacagatctattccagagggaaatgaccttggtgggctttgtgaagtagaccacggtttcttctgtgctgctagttcactccgtttggaaccttctggaggtgatgatgttgacaagttagctgttaatgaactttttgaggctgcagcgaatgaaagcaagtgtagtcccttaatatt

SEQ ID NO: 219000 - DNA, 342 bp, Gossypium hirsutum
accgtacacattcacacacacattcactgaatgggtcgagtcatccgagctcaacgtaagggtgctggttccgtcttcaaggcccacacccaccaccgcaagggtcctgctcgtttccgcagcctcgacttcggtgaacgaaatggctacctcaagggtgttgtcaccgatgtcatccacgaccctggccgtggcgctcctttggcccgtgtcgtcttccgtcaccctttccgttacaagaagcagaaggagcttttcgttgccgccgagggtatgtacactggacagttcgtctattgtgggaagaaggctactcttgtgggcggaaatgtattgcctctt

SEQ ID NO: 219001 - DNA, 344 bp, Gossypium hirsutum
gaaaaagtgaaggaagctggactccaggataacatcaaaatacttctctgtgactatcgccagttacctaaggaacaccaatttgacagaatcatatctgtagagatggtagaacatgttggtgaagaatatattgaggagttttacagatgctgtgaccaattactgaaagaagatgggctttttgttcttcagttcatatctatcccagaagagctttccaaagaaatccagcaaacagcaggttttctaaaggaatatatattccctggaggaaccctgctttctttggataggaatttatcagccatggctgctgcaacaagattcagtgtggagcatgt

SEQ ID NO: 219002 - DNA, 352 bp, Gossypium hirsutum
  unsure (1)..(352): unsure at all n locations
tcgntattttttccatccttggcttcttctttcattatttcaaagatgtatacatcaaggaagaagatgcgcatagataaggatgctgaaccaacagaatttgaggagtctattgcgcaggcattcttcgatttggagaataccaatcaagatctgaaaagtgaccttaaagatctctatattaattcagcagtccaaattgatgtttctgggagccggaaagctgttgctatccatgtcccgtatagattgaggaaagctttccgcaaggttcatgttaagcttgtgagggaacttgaaaagaagttcagtggcaaggatgtgattcttattgccaccaggaggatattaa

SEQ ID NO: 219003 - DNA, 355 bp, Gossypium hirsutum
cagcaccaaatcagcatccattaccaaggatgcactgtatgtattgagtgcaggaagcggtgacttcctccagaactactatgtcaaccctctacttaaccatgcctatactccagaccagtacggctcattccttattgataccttcacaaacttcgtcaagaacctctatgggttgggagctaggaaaattggggttacctcacttccaccgttaggttgcgttccattagcaagaacattgttcggttaccacgagaaaggatgcatctccaggttcaataccgatgctcaacaattcaataaaaagctcaacgccgcagcagccaatctccagaagcagcatcctggtctt

SEQ ID NO: 219004 - DNA, 345 bp, Gossypium hirsutum
tcttcgtattgggaattcttggtacaatcttcaaatgtcgattccactggaccaaactaatcttactcttggagcagtaacggagacaagtgctacagcaaattggactatcaatgcgtcaaatataagaacagttaaggtcagtaatatttctctagctgcttctgagagggatatcaaagaattcttttctttctctggtgatattcaatatgttgaaatgcgaagggagactgaaaatgctcaagttgcttatgttaccttcaaggatacacaaggagcagatacagcaatactattgactggagccaaaatagttgatctttctgtcaatatcacacctgg

SEQ ID NO: 219005 - DNA, 185 bp, Gossypium hirsutum
tttccattccaccaagagtggtgatgagctgaccatctttaaggactatgtgtccagaatgaatgagggtctttaatgattcctactacatcactggctatagtataaaggccgttgagaactctcccttccttgagaatcttaagactaagcggtttgatgttcttctacatggctgatgctat

SEQ ID NO: 219006 - DNA, 274 bp, Gossypium hirsutum
ggctaaccattttgataggcactattgcggtaagtgtgggctcacttacgtttaccagaaggctggtggggattgagtagagtccgcttctaccttcggttagtgtcctgcaaaaattgaatctatagctatttttctttacaatatgaacattagggctttgattttccgtaatcgttgaacttttttaaatttatgtatgctttattatgggatgatactttgggtatgattttggagttttgaatgatttatcaaatcagctgtttgaatc

SEQ ID NO: 219007 - DNA, 363 bp, Gossypium hirsutum
  unsure (1)..(363): unsure at all n locations
ccgggccgacggagacctgggcganctgctgaatgcgcgccatcggctggctgtcgctgctcgcgaccagcgcaccctcgggcacgagggcctggtcgatgcggcccgtgatcggcgcttcgacggtcgcgaacttcaggtcgagcttgcgtcgtgcgagcgtcgcgcgggcctgcgcgacatcggcggcagcctggtcgcgttgcgacaccgagtcgtcgtagacctgccggctgatcgcgtcggcttcgaccagcggcttgagccgcgtggtctgcaccctggcccgttcgagcgcggcttgcgcgcgttgcaacgccggcgcggccgtgtccatgtcggccttgaacggcgccgggttga

SEQ ID NO: 219008 - DNA, 156 bp, Gossypium hirsutum
  unsure (1)..(156): unsure at all n locations
caaaagngacccacgccaggggaagaacatggctcgctgacttatgtaccgaggagatgttgtgcccaaagatgtgaatgcggatgtggtcaccatcaagaccaaacgcacaatccaatttgtggattggtgccctactggattatagggcggatc

SEQ ID NO: 219009 - DNA, 298 bp, Gossypium hirsutum
tctaactcataccataccctatcgccattatttattgttgaaaatcttgagcacaatgggcacgggtgaactcgtctgtgcttacgccgcgttgattctccatgacgatggaatctcaatcaccgccgagaagattgctacattggtgaaggcagcgaacttgagcgttgaatcttactggccaagccttttcgccaagctccttgagaaagtcaacgtcgatgatctcatcaccagcgttggctccggtggtggggctgcccctgttgccgttgctgctgcttctggtgcaactggc

SEQ ID NO: 219010 - DNA, 356 bp, Gossypium hirsutum
  unsure (1)..(356): unsure at all n locations
cgggccgaccgacgcgagcgncccggnactgactccccgaaggttgtcctataggttattgctgagtacactgtccgggcgttgcaacgtaccgtccctgctgcagttcccgctattgtgttcttgtctggtgggcaaagtgaggaggaggctacccttaaccttaatgccatgaacaagctccagaccaagaaaccatggtcactctctttctcatttggacgtgcccttcagcagagcactctcaaggcctgggctggaaaggaggaaaacgtgaagaaagcacaagatgctttccttggtaggtgcaaggctaactcggaggccaccttgggtacatacaaaggtgatgcaaa

SEQ ID NO: 219011 - DNA, 435 bp, Gossypium hirsutum
ttgttattttcccaccctctttcccgaaaaaatttaatctcaaaattttctagggaaagcgagggtttattacaaacacagctatatagtggagcagtaatcatgagctttcgagatctggaagccggacggccattggtgtcgaggcaaaacctgatcaacggcaagcaagacgccacgcaagcagtggcctctggcattttccagatcaacaccgcagtcaccacctttcagcggctcgtcaacaccctcggtactcctaaggatacgcctgagctccgagaaaagctgcataaaacaaggctacatattgggcaattagtgaaggacacttcggctaaacttaaacaagctagggaaacagatcacagcgcccggaattagtgccagcaagaaggtagcagatgctaaacttgcaaaagattttcaagcagt

SEQ ID NO: 219012 - DNA, 396 bp, Gossypium hirsutum
tgcaaagaggaaccaaactgtcatttggcaaaagcctttgacaaatgattgttatatggaacgagcacctggtacaaatccaccgctctgtcggtctgatgatgatccagatgcagtttggggtgtgccaatggaagcttgtatcactccttattccgaccatgatcagaaagccaagggaagtgggttggctccttggccagcgagatagacatctcctcctccaaggcttgctgattttggttattcaaatgaaatgtttgaaatagacacggaaacttggcgccagcgggtagagaattattggaatctcttgagtccaaagattgaggccaacactttgagaaatttgatggacatgaaagcaaacatgggatcttttgcggctgctctaaa

SEQ ID NO: 219013 - DNA, 442 bp, Gossypium hirsutum
atgagggcttaatcatagatatattgggttatagaaatgccgagcaacgaaacttgattcgaaggacctacgctgaaacctatggagaggatctcctcaaggcactagacaaggagctctcgaatgactttgagaggctggttttgctttgggctcttgatcctgctgaacgtgatgccctttttggctaatgaagccaccaaaaggtggactttaagcaatcaggtccttatggaaatagcttgcacaaggtctgccaaccaactgcttcacgcaaggcaggcttatcatgctcgttataagaagtcgcttgaagaggatgttgcttatcacacgactggcgactttcgtaagctcctcctacctctagtgagttcatacagatatgaagggagaggaggtgaaacataaatctggcgaaaacagaggcgaagttgcttta

SEQ ID NO: 219014 - DNA, 415 bp, Gossypium hirsutum
tcttcttctatgatcttcagttattgcaccaacaatggctcagcctcgttcacctttttgtgaagggaaatgcaaagggaggtgcaataaagcggcggtttgggatcggtgcttcaaatattgcggcatatgttgcgaggagtgtcaatgcgtttcgtccggtacttacgggaacaaacacgagtgtccttgctacagagataaggtgaacaacaagggcaaacccaaatgcccttgaaaatgaaatatattcgagttcgggatgtaatcaatcttaaagatcgaggacgaagaggccatatatatatatatatatgcatgttgatgatgatgttattataaaaataaacttgttttgtagctgttatttacttttggtatttgtgttggtagtgtataataatattttcctaat

SEQ ID NO: 219015 - DNA, 398 bp, Gossypium hirsutum
ggcatactccgcagtgaacaggggatgggtccgacatcagctccaacgacggccacaggggggtcggcggacacggctccggcggcgggaaaggcgccatcaagtgggtcggggaagtggtgcgtggctaaatcaaacgccagcgatgcggcgttgcaagcgaacatagattacgtgtgcagcagcggagtggattgtaagccgatccaatcggctggggcctgctttaaccccaataatgtgagggcacatgcatcgtacgcaatgaatgcgtactatcaagccaatgggcggcatgatttcaactgcgaattcaatcgtacgggtgtgatcacctctaccgagccaagtcatgcagcttggaactattcagggaatcaagggccaggggtaaaaat

SEQ ID NO: 219016 - DNA, 370 bp, Gossypium hirsutum
aaggggggagtttcaaatgttggatttgcacaggcgtggtggtggcaggcatggcatctggtgcaaaagtttggggttagcgggaacccaggtgaccttcccaaatggaacgccattactgtggtgcttatcatctgcatttacgttgccggattcgcctggtcttgaggacccctcggatggttggtgcctagtgaaattttcccattggaaatccgatcagccgcacaaagtgtgaacgtgtcggtgaacatgatcttcacattcgcggtggcacaagtgttcttatccatgctttgccacttgaaaatcgggctattcctgttcttcgccttctttggggtggtgaatgtcatctttgtgtactact

SEQ ID NO: 219017 - DNA, 435 bp, Gossypium hirsutum
gaaggcccaggctttgagggataacagcatggctggttacatgtcaagcaagaagacaatggagatcaacccggagaaccccatcatggaagagctgagaaagagagccgatgcagagaagaatgataaatctgtgaaggaccttgttctccttctcttcgagactgctctcctcacctctggcttcagccttgatgagcctaacacctttggcaacagaatccacaggatgctgaaactcggcttgagcattgatgaggatgcaggtgaaggtgaaggtgatgctgatatgcccccattggaggatgctgatgccgaaggcagcaagatggaggaagttgattaagcctaacatgtttttataagatcagtagatttatcttacttttgaagcatctgttagcttggtttacattttggttggtgcttttgctt

SEQ ID NO: 219018 - DNA, 411 bp, Gossypium hirsutum
atacaaactaccacatggatctaatagctgggctagcaaacatgagggccaggaactacagggttcctgaggtggataagctgaaagccaagtatattgctgggagaatcatcccagcaagtgctaccaccacagccatggccaccggtcatggctgcctagagcattacaaggctcttgatggaggccacaaggtagaggactaccgcaacacttttgcaaaccttgcactgcctctgatctccatggctgagccagttctacccaaagtcatcaaacacggtgacatgagctggaccggttgggaccgaaggagcccgagagacaacccaactttgagagaactcaatacaaaggcttgaaaggataagggcttcgaatgcctacagcatattctacggaaggggcttg

SEQ ID NO: 219019 - DNA, 318 bp, Gossypium hirsutum
tacatgtgttcaagaaaggagaagcataaaaacaggggggaagggctgtagttcattgcactaagagagcttccagctctgggtagtgctacacgcattctgaataatcaattggtgggagaaggctatgtgtactgtgagacttgccgtgctgggtttgaaacccctaagactagaagcctagctgaagccatggttaggttggtatgctccgacaggaagagcggccaagttgtcttcaaaaaggagggagacaccgacaaaaccggaaaataccaaagtcgtgtattcgaggatcacttggaacagatctgtgat

SEQ ID NO: 219020 - DNA, 454 bp, Gossypium hirsutum
ccgattctgaatatccgggtcgatccactcgtacggtaattattggtagtaattgctaaaggaattaacagggaagaaatgggtattgattttactgggatgatctcctctctgtacggtaacagagaagctcgaattcttgtactgggtcttgacaatgctggcaaaactactattctctatcggcttcatatgggtgaggtagtctctacaattccaacgattgggtttaatgtagagactgtacaatacaacaacatcaagtttcaagtatgggatttaggtggtcagacaagcatcaggccatattggagatgctattttccaaatacacaagcaataatttatgttgttgattcaggtgacactgatagaattggaataaccaaggaagaattttatgccattttagaggaagatgaaacttaaaggggcaatatccctaattttttgc

SEQ ID NO: 219021 - DNA, 406 bp, Gossypium hirsutum
tcgtatgccaaagataatgttcctgagaatgtatagaatgttggctctgtgaagcagtctggggaggaagatgccatggttgctggcaaggagaatgcttgcaatgaagctgaggagaaagagccagaatacaaggagatgactttggaagaatatgataagattgttgaggagaagaggaaagctttgcttgcccttaagactgaagaaagaaaagttgataccaaagagtttgagtccatgcaacaacttttaagtaagaagaacaactgatgacatttttaatcaaactgggtttctgaaaagggacatagcgcatggatgcctgattaaagaataaaggagtcaaaaaagttctgttagccatcaattgagttttcttgaacccatcttgaaggggaaaagg

SEQ ID NO: 219022 - DNA, 344 bp, Gossypium hirsutum
acggcataacatgcacctgaaggctagaacaaaatttatctgttctactcgtagtgaatgggcaacaattaggggggagtgtagcatacgtgaataatgcaaatgcactggacaatctacattgtataaaatgtgatcgtttacaagatattggagattgtactagattgagttactcacatgaaggaaacctgtagatattgcacaaccatcaggacaggaaaaccttgttactagggcgaggtcaatcctaagagacacggatcggcgtggaagagctttctgaaccagggctcggaggggaggacccgaaagaagatttcatacgagtttgcacaattgct

SEQ ID NO: 219023 - DNA, 401 bp, Gossypium hirsutum
cgcgttcggagccatacttgtaggcgattggggagggtgcttatagttactatgggaagaaaccctaaatgaacgggctgatgcaaaaggcgatgtcaggagtttcagtgccattcatgagagcaatattggacggctatgatgggttgaaaggagtgaagagattagttgatgcgggaggcagcgcgggggattgcctccgaatgattttgcagaaatattcccatgttgagggaatcaactttgatttgcctgaggtcgttgccagagcacctattatttcgggcgtgactcacgtttgggggggacatgtttgagtcaattccagcggcttgtgcaatctcatgaagtgggtgttgacaaccatgacagatgattaatgtaaggcgataatggagaac

SEQ ID NO: 219024 - DNA, 323 bp, Gossypium hirsutum
accaggcaagaccagcgagagaacctgcagagctccaaggggacaaaaggagcaaaacaatgacggggctacatgaagcatgtgagaaatggggctaccttcagggggatagccagggaggagataagaagtaaatggagaaagcgaaggagaaggtgaatggagactatgacgagaaccagaaggaaaaggggtatgaaccagagaggaccaaaaggaggaacaagaaggagaaaagctacgacatggagagggaaaggacattcgtcattaggcaccggccaaaagcgaacaaaaagcaaaacccaaacgaaacgaagcaa

SEQ ID NO: 219025 - DNA, 417 bp, Gossypium hirsutum
gccactgttaaatttcataacccaggtgtttatgatgatcccacctgtggtccattgttggatgcggatgctattaaggagcttgtccgtcccagagctaccagatataatctggtgaagaacaatggctttgaagagggtcctcatcgcctagtcaactccaccaatggtgtcttgctcccccctcggcaagaggatttcacattcccactcccgggctggatcattgaatcacttaaagccgtaaaattcatcgatgcaaagcacttcaacgtcccggcgggacactccgcagtcgagctggttgccgggagagaaagtgccatcgcccagatcctcaggaccatcctcaacaaatcatacaacatgacgttcatcatcggggacgcttcgcacggttgcaacggagaaatgatg

SEQ ID NO: 219026 - DNA, 403 bp, Gossypium hirsutum
gcgaacggcgcactctctacaactgtagaagcaaagtctgtaggctgtcgcttcgagagagagcgagggggtttaccaggagcgcagctccggagacgagcttctttctgactcattcccctacaaggaaatcgagaatgggatgctgagggaagatgagggaaagtgggttgcgcaaggagctattgaaggtgacaatggtgccaatccttcagccgaagatgctgatgaggaagaaggtgtagatgaccaatctgggaagggtgatgacattggtgacactttcaggcttcaggagcaaccccctttcgacaagaagcagtttgtcgtggtcatgaagaagttcataaagaacttgacaccgaaactggaagcggaaaaggaagagtccttcaagaaaaac

SEQ ID NO: 219027 - DNA, 426 bp, Gossypium hirsutum
gtccaggctaacaatctgcttgaggatcaaagccagattgaatctggctccttgagcactctcgagtctggtccattagttaccttcgtaggaatatatgacggtcatggtggccctgagacgtcgcgttatatcaatgatcacctcttccagcatctaaagaggtttgccacggagcagcaatccatgtctgttgatgtcataaagaaagcatttcaagcaacagaagagggatttttctctgttgttgcaaaacagtggcctatgaagccccagattgctgctgtgggatcatgctgcctggtgggtgttgtttgtaatgggaccctctacattgctaaccttggtgactctcgtgctgtgctgggaaggcgtgtcaaggcaactggggaggttctagccatccagctgtcttcagaacataat

SEQ ID NO: 219028 - DNA, 329 bp, Gossypium hirsutum
cgaatatcaagagtgatagtggatctctatttactaaatagaggtataaggaaagattaacaagcggggagttgtcttgaccgacaacgcaattgttgagcaggcactaggcaagttcggcaacatttgtgttgaagatcttatccatgaaataatgactgcgggaccttatttcaaggaagccaacaactttctttgaccatttaagcttaaggcaccattgggtgggctgaagaagaagaggaaccattatgtcgaaggtggagatgccggcaaccgggagaattaccataacgaatgaattttgagaatgaattaaaaaaccaaac

SEQ ID NO: 219029 - DNA, 292 bp, Gossypium hirsutum
gaactgagcgtcgttgaatattcgggaacgtcgagaaagaaaaggaggggaaggaaattctttgtcgggggaaattggaaatgcaatggaaccactgaggaagtgaataagattgtgagtactttgaatgctggagaggtgccttctccggatgttgttgaggttgtgggtagccctccatttttgttgcttcctttgggaaaaaactcactgagacctggagttcaagtcggtggacaaaattggtgggtcaagataggaggtgcttttactggggaagatagtgcgggag

SEQ ID NO: 219030 - DNA, 382 bp, Gossypium hirsutum
cgcgtccgaacgagcagaagctgaaattccctttgagttacaagacctttggtgaagctattccacctcaatatgcaattcaggttcttgatgaattaactggcgggaatgcaattataagtaccggtgttggccagcatcaaatgtgggctgctcaattttacaagtataagaagcctcgtcaatggttaacgtctgggggattgggtgctaggggatttggattgcctgctgctattggagctgctgttgcaaacccggaggcagttgttgtagacatcgacggtgatggaagttttatcatgaatgtgcaagagttggcgactatccgtgtggaaaatcttccgttaagatattattgttgaataatcagcattttggt

SEQ ID NO: 219031 - DNA, 260 bp, Gossypium hirsutum
gccaaaaatgttactggtaagatgatgcttaatgcttcttacatatttccttacaacacgccgacgacaaaagaagcatattactacaggatgatattcgagagaatcttccctcaaaactcggttagattgacagtccctggaggagctagcgtggcatgcaccactgttaaagctggtgagtgggatgttgtctggaagaacaaccttgattctttagggagggctgccctgggaggccatctctttgcttacgatgc

SEQ ID NO: 219032 - DNA, 162 bp, Gossypium hirsutum
caagaactacatgtgtatgagttgaatgagagagatcgtgggagtccagcttaccttcgggtgagtcagaaatctgtgaactcactgggtgaacttgtcccttttagcaacaaaggaagccttccctttctattttcactgaattcaatttaaggaaataat

SEQ ID NO: 219033 - DNA, 335 bp, Gossypium hirsutum
ggaaaaactggggcggggggagcgaacgaaagaacccaagcggagactacaccaggggtaaaaccctaagctgtcaacaaaggcgaggggggagacagaggtggcgggggggggagtgcctaaaaagagaacattcaagaaatgaagcgtcagaggcggggagtaggatgctcttctagagatgaccaccgatgagcgtgacaagctcttccccgcacgtgctcggagaaggttccaaaggggtctcaagagaaagcccatggcaggaagaaagaaactccgcagggcgaaaagggagggcccaccgggagagaaaccagaaccaggcagaaccc

SEQ ID NO: 219034 - DNA, 238 bp, Gossypium hirsutum
cgaaagatgacatgctcatactctatggactgaacaagcaagggactgttggaccagtgaataccagccgtcctggaatgttcaacatgagggaaaagtacaagtgggatgcatggaaggctgttgaagggaaatcaaaggaggaagcaatgggggattatatcaccaaagtaaaacaactggttgaggctgctggaagatcatgatgtgtgtggggatgaccaatgaaaactggtgg

SEQ ID NO: 219035 - DNA, 383 bp, Gossypium hirsutum
gaaaaccgggccgacccacgcgaacggatcacctcatctccattttgtttccttcttcaaatacccaatggccgtcactatctcaaaggtgcacaccgagtctgggcttaaagctcttaatgacttcctctctggaaaatcttacatctctgggaataagctgaccaaggatgacataaaagtttatgccgctgttctgaagaaccctggtgattctttccccaatgttagccagtggtataattctgtttcttctcaacttgccgccagcttccctggtaaagctgttggcgttgggtttggtggcaaagctgctccagctgagtctgctaaagctgaggctgctgatgatgaggacgacttggaactatttggggatgaga

SEQ ID NO: 219036 - DNA, 354 bp, Gossypium hirsutum
ggctagatctatgaagaatccaacggtgatttgaagattttctatggagaatgtgatgcgtgatgctcgtgacttataccgagcacgccacgaggaagaccgctaccgctatggatgatgtttatgccttgaaaaggcagggcaggactctctatggatttggaggttaagtttaggatcaagtcttaagaacgtaactgtaatgcctttagacctcgacttgagatctataacgtgctgaacatgttgtggtactctgagtgatgtgttaacgatttgcaaacctaaaaatgatcgcttaattcacatactgcaaagctttctttgggcaaaaaaaaaaaacaaagggcggcc

SEQ ID NO: 219037 - DNA, 352 bp, Gossypium hirsutum
  unsure (1)..(352): unsure at all n locations
cccggggcgacccacgcgnccgggggggaggagacgaccgcagcggagaatgtaccgggagcatccaggccaggatttcgggaggggaatgaggccacgagggagggggagttgcagagctagtgggggtacccaacaaagacgaggcattcaaaactcaaacagggaatctactgaatgaaaggacactcaagggtacaaacgtaggcaactacaaaccacgaaccgatatacccgctggcggtgagagatacatgaacaaggaacatgaaccggacaagggcatcacgcactcaaggcccttctcagagaataacaaggcataaggagacaagcttgggggggagggcca

SEQ ID NO: 219038 - DNA, 340 bp, Gossypium hirsutum
gaaatattggagatggcttgacctcctgtaaagatgaataccccatatttgataaggagggtgtgaatggcgagaacgcaggtgcgatatacaaattcctgaaggctagcataggtggagctctgggtggacttctgggggacgacatcaagtggaattttgccaagttcctggtggataaagacggacatgttgaggatcgttatgcccccactacttcccctattagcatcgagaaggatataaagaaactgcttggctgatgttttgggcttcgatacctcaggctttgagggaataaaagttaaatgtttttaccaataaaaactattacgaaggg

SEQ ID NO: 219039 - DNA, 424 bp, Gossypium hirsutum
cgtgatttggttggtgttgcgtattcttattaggagacgaaggctatggcaactgagattgaggtggttgacggtcctaatgatgagggtgagatgttaactcgtccggtttaacttagtgaccgtttttctcagtcatatgcaaacgaacaagcagctaggtttgcaaatggaggagcttatcctccagatctaagtctcattaccaaagcttgtcataatggccagaactatgtgtttgcgcttttaactggttaccgtgaccctcctgctggtgttatgattcgtgaggggctacactatgacccatactttccaggaggagcaattgtcatgcctaaaaagcttattgatggtgctgtagagtatgaagatggcacccctgcaactgaagctcaaattgggaaagatgtggtgacatttt

SEQ ID NO: 219040 - DNA, 340 bp, Gossypium hirsutum
gatgaatgtttgattatagccagtgatgggttgtgggatgcgatatccaatgaggaagctggttaggtggctcgactgcgaatcctgctctggcacaaaaagaatggggttccatctctggtggaaagaggcataggaattgacccatcggtgcaagcggcagctgaatacctttcgatgctggccatccaaaatggtagcagagacaacatctttgtaattgttgtagacttgaaagctcaaaggaagttcaagagctaaacattatctgagtgttaaccccccccaaatccaatcattttaaaatcatagtcgatatagtacctcgcatattagagac

SEQ ID NO: 219041 - DNA, 376 bp, Gossypium hirsutum
gatttgattgcaatgacatgccctatgacagatcttccacccagtaaggaaccgttggagtggaacacgagaatgaagatagcatccggttgcatctaaaggttaggagtaccttcatgataaagcaaaccctcctgttatttacagggactttaagttcttcaacatattactggaagaaggatttcacccgaagttatccgattttgggctcgcgaaacttggaccctgtggagataaaacgcatgtttacaccagggttatgggcacatatggttattgtgctcctgagtatgccatgactgggcaattgacggtgaaatctgatgtttatagttttgggttgtctttttagagctaaatactggtaggaaag

SEQ ID NO: 219042 - DNA, 363 bp, Gossypium hirsutum
attcatagcatagcagcttagtccaactatacactccaccaccattggctgtttgtaatcatgcgaaaaagaatggtgaccgtggaagaagttcgtaaggctcaacgtgcccaaggccctgccaccgtgttggccatcggcacatcaaccccgcctaattgtgttgatcagagcacatacccggactactatttccgtatcacaaatagtgagcacaaaaccgagttgaaagagaagttcaagcgcatgtgtgaaaaatcgatgatcaagaagcgatacatgttccttacagaagagattttgaaagagaatcccaatggatgtgaatacatgggtccttcactggacgctaggcaagatttg

SEQ ID NO: 219043 - DNA, 352 bp, Gossypium hirsutum
gacaggggcggaatttaagaatacgggatcggtggaaactacgtcggcagtgaacacgaatcattacgccgatctatcagacgagaacgagaagctgaagaaggataatgagatgttgagctcggagctggcgcaagccaagaagcaatgcgacgaactggtcgcgtttttaaccgagtgcgtgaaggtggggcccgatcaaatagatcgcatcatgcggcaaggaaacggtggttccacccttgaaggcgacgatcttggccgtttctacggcgtcgatgacaactaccatgatgaaaaagggggcggcgaaaatggaaaccgaaggttgaaactgtttggggggtgggtg

SEQ ID NO: 219044 - DNA, 360 bp, Gossypium hirsutum
aaagcaatataagtagatacttctctgatccccagtactactttcaagtgaacgatcaatatgggagaaacaaattgaagggtgttttactgccatttcttcacaggggccattggacaagaataactgagccagtaggtggcaggctttcctataaacccccaatttatgacataaacgcaccagacttatacatcccatttatggcatttggcacctatgtcgttcttgctggattgtcacttggccttcaaggaaagtttagccctgaagcacttaactggctatttgttaaggggttgtttggctggtttctgcaagtctcgctgctgaaagaaacattactattactgggcaggg

SEQ ID NO: 219045 - DNA, 333 bp, Gossypium hirsutum
gtgatgtcccctacacacatgccaatgttattttagcttacaaggattttgggtataaacgcaccacggatttagctgctgggttgagaaaattcgtgaaatggtacgtgagttactttgggattgaatcgaaacgctcaaaagaaacccaacattttgatgaatccagttaagaacaagctttcatattttcatttccatggctgctgcccggtcctttttaattcttccttgttatttaatggttatattgatgtaaaaaagaaaaaccaaaaaaaggaaagggatcaaaattgttgttccttttgttcaatattttttttgtgttttttt

SEQ ID NO: 219046 - DNA, 324 bp, Gossypium hirsutum
  unsure (1)..(324): unsure at all n locations
ccgggcggaaacccgggacgcccacgcgacgaaaaaagacaggganancaaaaagggggcagaagccgaggagaagacagcaggaggggggatgcagacagaggcaagcaaagaaaaaccttccatcggcacggggatagcagacggaccaggaacataggatgaggaaggaaaaaggaagccacaaactgccgcaccagggaagacagagacataaaccaaggatgcagggaatgacaacaaagggaaggagggaacaagtgaaaatgctcatagagcaacggacggaaaggaagggcaaccctagaagaccgagaaaacaaa

SEQ ID NO: 219047 - DNA, 269 bp, Gossypium hirsutum
cggcaaggaaaccatcaacatccaagagcaatattttgaagatgggaggcaccaagaagttggcgataaaagccgtatgcagagcgatgctctataccagtatatgacggagaatagtgaatatccaagggagtctgaacccatgaaagagcacaaagagttgaccgttaagcatacatggaaccttatgactacataatctgatgaaggacaattgttgaacatgcttcataagctgatcatgtgcgaagaataccatggaaaattgg

SEQ ID NO: 219048 - DNA, 381 bp, Gossypium hirsutum
gaggacaagcatgggccgagtttgatgaaattgacttccgctagtaacgccttccgtcagatgcggaacttcccatagtatgatagacctatgcggatacaatatgcgaagacaaagtcagattgtatcgccaaaaacgatggaagctttgttcccagagaaaagaagaagaagcaagaagaaaaagctgaaaggaagcgtcgtgcagaggaagcacagcaatctgcaatgccgaatggcacaggttttcaaaataatggtgggccaaaggctcctctccatcatggaaacctgaatgctgagcaggccgcaccaaacaatattctgtacatacagaatttgcctcacgagacaacaagcatgatgccgcagctggttttc

SEQ ID NO: 219049 - DNA, 323 bp, Gossypium hirsutum
  unsure (1)..(323): unsure at all n locations
accgcacgcgacacgggaaaaaaaggaaaccagaaggggccaaggaggaaaacagcaggagcnagctgcagaacaagaagctcagcacaatggcaatactgccagaaatgccaagaaggctaggctgaaacaagccaaggaagaggctgaaaaggagattgcagaatatcgagctcaagtggagaaggagtttcagaggaaacttgccgagagcagcggggattcaggtgctaatgtgaaacgccttgagaaagagactgaagcaaagattgaccacctgaaaaatgaggctgcaagaatataagatgatggtggcaaaatgc

SEQ ID NO: 219050 - DNA, 408 bp, Gossypium hirsutum
ccgaccgacgcgtacgagttggggaaaaagatgatgatttttcgattatttatgctgacattgaagggccagctgggactccatatgaaaatggtgttttccgtatgaagttgttactgtctcatgatttccctcattctcctccgaaaggctactttctgaccaagatttttcatccaaatattgcacccaatggggaaatttgtgtaaacacactaaaaaaggattggaatccaagtcttggattacgacatgtactcatcatagttaggtgtttattgattgagccatatccagaatctgcactaaatgaacaggctggcaagatgctgcttgaaaattatgacgagtatgcccggcatgccaggctttatactggaattcatgcgaaaacaaaaccgaagttga

SEQ ID NO: 219051 - DNA, 412 bp, Gossypium hirsutum
  unsure (1)..(412): unsure at all n locations
gaccgacgcgnccgctagcgcagaggatgaggtaatcgccgcatgctttcatcctttccctggaggaggtcttgtgggtggaaccaaggaagggagactgagagtgcttcattacgatggtgcttgagacaccaatcacaacacatcaaattacttctctgtagaaaacacggccagagttgaatagcaagagtaaggtttaagttattcttccttcttgtggaatgccaaatccgatgaccatttttcagaagaaaacatggctgtcatagaatagcaaggtcgtccttattgtggtattcaggatctgattaaccattttggaattaaaatgccactatgcactgatattggtggattggaacaacagagtacccattttattcagatgctggggggggttttaactatt

SEQ ID NO: 219052 - DNA, 383 bp, Gossypium hirsutum
tctcgtcttctcctgtatgggagctgcatatgggacggctaagagtggtgttggtgtggcttcaatgggtgtgatgaggcctgaattggtgatgaaatctattgtaccagttgttatggctggtgttttgggtatttatggcttgattatcgctgtcattattagtactgggatcaatcctaaggccaaatcgtattaccttttcgatggttacgcccatctttcttctggtcttgcttgtggccttgctgggctttctgctggaatggcaattggaattgtcggcgatgctggtgtcagagctaacgcacagcagccaaagctttttgttggaatgatccttatcctcatctttgctgaagctttggctctttatggtctta

SEQ ID NO: 219053 - DNA, 278 bp, Gossypium hirsutum
accgtactctataacacagaatatattcatttgtttatgaaaatatctatggcgccttggaaaggattcaacactagacagtaacaaatgcactatctgttttacgtgaagcaatacatgaagtaactgcggatctaacgataaaagcaagacatggtgagcaatctgctgcatttgtagcagatgcctatgattaatatctcatctaaggctgtaattgcatgcttataatttcatacatattatgcgactgattgatgatcattggactttttgtt

SEQ ID NO: 219054 - DNA, 383 bp, Gossypium hirsutum
acgggtgactcttaagaggtctcaccgaggctattaacactgacgggagtgtatgggttctggaagcacgtttccaaccttgaccgtcgcgagagccgccgttacctggagatgttttatgctcttaagtaccgcaagctggctgaatcggttcctctggcagaggagtaaaacaaaggaagaggcgggttttccctggaggatttttctgagttcttcacaataaaataataataatcttttgttgttttcatatttatggtcggacaagaaaaagcctcttttgtatctcttttcctttttttttctttttttttgttgttttatttttcccggcattgttagaacatggagggggtactgcgcccctggattccaacaaa

SEQ ID NO: 219055 - DNA, 389 bp, Gossypium hirsutum
cggaatcgagagctccaagtgggccatttttggtaagcataactggcgatgcgggatgaaccggaagccgggttacggtgcccaactgcgcgctaacctagaacccacaaagggtgttggtcgattaagacagcaggacggtggtcatggaagtcgaaatccgccaaggagagcgagtcaggctctatgtaagaggaaccatcttgggttacaagagatcaaagtcgaaccagtacccaaacacttcgttgatccagattgagggagttaacaccaaggaggaagtagcttggtatgctggcaagcgtatggcttatatctacaaggccaaagtgaagaagaatggctcacactatcgctgcatttggggaaaagttactagatctcat

SEQ ID NO: 219056 - DNA, 370 bp, Gossypium hirsutum
aaggactggaagggcaggtgcaactggattggcttatacattcttcgtcgatcaggattcgaagcatgcttcagatctcatcaaagttctggaaggagcaaaccagctggtgcccgctgaacttcgtgatatggcttcacgtggtggtttgatgggaaggcctaggcgttgggctccaagttctggtggctttggtaggggacgtggtggacgtactgatttgggctatggtggctgggacagtggaaggggtggtcgtggaatttctacatcctctacctggcttgagaaaagcggcggaagacgtggaaatgatcatgagtctcgcgataggtacaatcgtggtttccatggtagtaatgataggaga

SEQ ID NO: 219057 - DNA, 381 bp, Gossypium hirsutum
gtttctggcaagtttggatggtcagctaacatggaaaggttgatgaaagcacaagcgcttggagatacagcaagtttggagttcatgaggggaagaaggatcctggagattaatccagatcatccaattattaaagacttgaatgctgcttgcaagaatgcgcctgaaagcagtgaagccaagagagcagttgacttgttgtatgatacagcattgatctccagtggtttttctcccgacagccctgccgagttaggtaacaagatatatgagatgatggcaatggcacttggaggaagatggggtagatatgaggacgatgatgaagtggaagcatcagaagttagtgctgctgaaactgatacgagtgccagtgaagct

SEQ ID NO: 219058 - DNA, 346 bp, Gossypium hirsutum
cctacttcgaaaattgtatatgacgagtattatcacgagcggtttccacctggtgatcccagcaagcgtgcttttgcttatttcgtcttgtctggtggcaggtttgtttatgcctctttaatccgccttctgatcctcaagtttgttctaagcatgtctgccagcaaagacgttcttgcactcgcttcccttgaggttgacctttctagcatagagccatggagcactgttactgtcaagtggagagggaagcctgtttttatcagacgtagaactgaagaggacatcaagacggctaacagcgttgaccttgcatcacttcgcgacccccatgaagatgcagtca

SEQ ID NO: 219059 - DNA, 379 bp, Gossypium hirsutum
  unsure (1)..(379): unsure at all n locations
agggaaacagagagcaagagaaaatgaagaccatactctcatcagagaccatggatatccccgatggggtcaatatcaaagtgaaggctaaaatgatcgaggttgaaggtcccaggggtaagctcactcgttacttcaagcacctaaacctttatttacacctcaccaaggacgaggagaccggcaagcgtaagctcaagatcgaggcctggttcggtaccaggaagaccagcgctgccatccgtaccgccctcagccacatcgagaatctcatcaccggtgtcaccaaaggttaccggtacaagatgaggttcgtctacgctcactttccgatcaacgcctncatcactagcngcaacaagtccatcgagatccgtaa

SEQ ID NO: 219060 - DNA, 335 bp, Gossypium hirsutum
ggagagtactggggagctgtaatgaaagatcagcctatgcctgaggcactccaagagcttgttcggattgaggctgccgttgccaaccccgatgagaaaaccaagtgccatacatcaggtaacattgagcttaaggaagagaagattattgttaatgaggagttcgaaccaaggccaaacatttcagcttacggtgatgacgctaatctaaaaggagataaatcatcatcttttgcagaagattttgaaccgagacctaacatttcggcttacgggggcgatgatgctggtcttaaaggacagaaagaatcattcactaaagatttcgatccaca

SEQ ID NO: 219061 - DNA, 346 bp, Gossypium hirsutum
tacagattcaaaaagaaataatggtagaagttgcaatggccactcttacagtgcccacgagagttccttcagtgtctgaagattgtgaacaactaagaaaagccttttcaggatggggaactaatgagggcttaatcatagatatattgggtcacagaaatgcggagcaacgaaacttgattcgaaaaacctacgctgaaacctatggagaggatctcctcaaggcactagacaaggaactctcgaatgactttgagaggctggttctgctttgggctcttgatcctgctgaacgtgatgcccttttggcttatgaagccaccaaaaagtggacttcaagcaatca

SEQ ID NO: 219062 - DNA, 385 bp, Gossypium hirsutum
catctataaatcgggcattggaaccccaaaataaaaaacagcttccttctgccttgggactgatagagagcatttctaataatgtctggcgaataggaagaaaacgcagctgagctcaaaattggagaagagtttttgaaggccaaatgtttgatgaattgcgaagtggctctaattcttgagcataagtatgagcagcttcagcaaatgtctgacgatcccatgaactaagtttcccacgtattcgagaagtcaccgcactatgtaaaacgccttaaccggcataaaaatccagatgctgtcagacaagttccagaaatcttgagtagatatcagttagctgaattcgagctatgtgttcttggcaacctgtgtcctgaaactg

SEQ ID NO: 219063 - DNA, 192 bp, Gossypium hirsutum
cggggtggaccaagccgtccggggaaagactgattacagggctaggattctcttaaccattcaagacaggaacaaatacagcgcgcctagataccgattcgttgttcgatttatcaacaaagatatcactgcacaaataatttctgctaatattactggtgatatgattcttgcctcggcttactcgcatga

SEQ ID NO: 219064 - DNA, 376 bp, Gossypium hirsutum
tacagattcaaaaagaaataaaggtagaagtagcaatggccactcttacagtgcccacgacagttccttcagtgtctgaagattgtgaacaactaagaaaagccttttcaggatggggaactaatgagggcttaatcatagatatattgggtcacagaaatgcggagcaacgaaacttgattcgaaaaacctacgctgaaacctatggagaggatctcctcaaggcactagacaaggaactctcgaatgactttgagaggctggttctgctttgggctcttgatcctgctgaacgtgatgcccttttggctaatgaagccaccaaaaggtggacttcaagcaatcaagtccttatggaaatagcctgcacaaggtc

SEQ ID NO: 219065 - DNA, 282 bp, Gossypium hirsutum
aaagctaatgtagactatgagaagattgtgcgtgacacgtgccgcaacattggatttgtttctgatgatgtgggtcttgatgctgacaactgcaaggtcctggtcaatattgagcagcagagccctgatattgcccagggtgtccatggccactttaccaagcgcccagaagatattggagctggtgaccagggccatatgtttggttatgccactgatgaaaccccaaaattcatgcctctcatccatgtccttgcaactaagcttggggcacgtcttact

SEQ ID NO: 219066 - DNA, 369 bp, Gossypium hirsutum
cgtctataaaaatcatacgaaataagcaaaccggacagtctgaagggtacggattcgtggagtttagctctcgagcaacggctgaaaaggttttacagagctgtaatggttctctgatgccaaatacagagcagcctttccatctgaactgggcctcgttcggtgtgaacgaaagacgatctgatgctggctctgatctgtctatattcgtaggagatttggctgccgatgtaactgatacggtgttgcatgaaaccttttctagtaaatttcaatcggtcaaaggagcaaaagttgttatcgattcgaataccggtcgttcgaaaggttatggtttcgttcgattcggtgatgaaaatgaaaggtcga

SEQ ID NO: 219067 - DNA, 389 bp, Gossypium hirsutum
gcggcacttgcagtgggcatttcatgtgctggcacaggattgagtgaggcgatatcattgctagaacccttaacatcagatgttgttgattttgttcgccaaggtgccctcattgcaatggctatggtcatggtccagaccaatgaagccagtgattctcgtgtcggaacattcaggcgacaattagaaaagataattcttgataaacatgaagacacaatgagcaagatgggagcaatcctagcctctgggatccttgatgctggtgggaggaatgtaaccataagattgctttccaagacaaagcatgacaaagtcaccgcagttgttggtcttgcagtttttagccaattttggtattggtatcctctcatttattttgtaagctt

SEQ ID NO: 219068 - DNA, 394 bp, Gossypium hirsutum
accccgcgtaagatattgccaagccccaccattatttttcttttgctttccctactaagcattgtttgcgaggccagatctccaactgctgcaagatcaggtgcctaaaatttcatcaaggcttcatgtagtgccaccaaatatccatcactttgcatccaatctctcgcagcttttgccccttcaatccagcggagcccacgccaactggctcatactgccctttcggtgagcctagagagggcaaagtccacccaggcattcgtctccaaaatgaagaaattcaagggacttaagaggagggaatatgaagcaatcaaagattgcattgaggagatgagcgagagcgtggacaggctgagcaaatcagtgcaagagctcaagtacatgggtc

SEQ ID NO: 219069 - DNA, 380 bp, Gossypium hirsutum
gaaacagtcctggcatttgctgacatgattaagaagaaaatcgccatgccggctgagttcatctatgatggcagagattataacttatttgaccactactcagctgttgcccaaagaatcggggtttacactgctaaggactatgttgatatagtagagcacctggtggatcgatggaaggtgaaggagctagctgggctttcagccgaggggcgtaaagctcatgactacttgtgttcacttccttcgagaattagaaggttagaggagagagcgcaagaaaaggccaaggaagcacccagtgtcccattcagttggatatttgatagagaagtgaaactttaggtcatgaaatacagttaagactcctgcaatgcatt

SEQ ID NO: 219070 - DNA, 377 bp, Gossypium hirsutum
ggaaaagacatcaatgcattggagcagcacatacagaacctgctgagtccatccactccatttttcttcaacactctttatgacccataccgatccggtgctgacttcgttcgtggctaccctttcagcctccgtgaaggtgttcccactgctgtctcacacggtctctggctcaacatcccggattatgatgctcccacacagcttgtcaagccactcgagaggaacaccaggtatgttgacgctataatgacgattccgaagggaaccttgttccccatgtgcggaatgaatctggcatttaaccgagaattgatcggccctgcaatgtactttggactcatgggagatggtcaaccaattggacgatacgatga

SEQ ID NO: 219071 - DNA, 379 bp, Gossypium hirsutum
agggccgacgacgcgtccgggaaaagacatcaatgcttttttcagctttttctgaacctgctgagtccgggccactccagtgttcttcaacactctttatgacccataccgatccggtgctgacttcgcttcgtggctaccctttcaacctccgtgaaggcgttcccactgctgtctcacacggtctctggctcaacatcccggattatgatgctcccacacaacttgtcaagccactctagaggaacaccatgtatgtcgacgctataatgactattccgaaaggaaccttgttccccatgtgcggaatgaatctggcatttaaccgataattgatcgacccttcaatgtactttggactcatgggagatggtcaacc

SEQ ID NO: 219072 - DNA, 382 bp, Gossypium hirsutum
attaattaccctccactttcggataatacccacagtgcacctcaccatcatcaccgtcatagctttctttcaacttcacttttctccggttcttccctcgttggtggtgcggcgtgggagaaacaagtccgtcactcttcgactccacgtagggttaatgggttttctgttttggtcaccggcgccgctgggttcatcggttctcactgttcacttgctttgaaaaaacgcggcgatggggttttgggattggataattttaacgattattacgatccttcgttgaaaagggcgaggcagaatctgttaagcaaacaccaaattttcatcgtcgaaggggatttgaacgacggcccgttgttgacgaagctgttcgacgtcg

SEQ ID NO: 219073 - DNA, 378 bp, Gossypium hirsutum
gaaattgcaagatattctccctggaatcatcaaccagttgggacctgataacttggacaacttgaggaaattggcagagcaattccagaagcaggcacctgctgccggttctggtgacggtaccggtgcagccactactcaggaagaggacgatgaggaggtaccagatcttgtacctggcgagacctttgaagctgcagcagaaggccaagctgctaaatagagtttttatctttaattttcttttgttatatgtttttgatgaatttaactatttgtttctttttccaaaatttctctatctgtggtttttgtttgctctaccttgtactcttaatggtttggttcaaggtaagccttctagaattcctattatta

SEQ ID NO: 219074 - DNA, 353 bp, Gossypium hirsutum
ggcaagagttcaatgaatttgtcgtcgattgtggtccaacggcgaaagagctgacgccaaagttcaacgtcttatgaaagactgcgtcgtatcacacaggggtgcaagtgcctgaatttgatatcatgtatgttgatgctgctgctgtgacctttaaaggtgtggggagtattctctgtacctccgtcagcaccgataagagcttatcttgtggcattgcaccaactcgttcttacttccattgtttatgacttatacaattacgacacggaaaagaaagaattaggtcttctgtctacaaagcatccactgaacttgacgctgttaggggcattgctgttcttcattggcgt

SEQ ID NO: 219075 - DNA, 349 bp, Gossypium hirsutum
gacatgtttgagatgtattcagtaacttccaccggtctgtctcctgaaattgcatacttccatactaaggattattttgagagtggtcttgatggcggaaataagagttcagaatatgtaaatgacataataatcaaacatgcagaccgtcacaatctattgcgtccagaaactgttgaatccctgttcgtattatatcgaatcactcaggatccaaaatatcgagaatggggttggcatatctttgagtcatttgagaaatacacaaaggtagaatccggcggatactcttctttagatgatgtcaccacagttccttcttcaaaaagagacaagatggagacatttt

SEQ ID NO: 219076 - DNA, 358 bp, Gossypium hirsutum
gagagctcagatacaattgataacgtgaaggccaagattcaggacaaggagggtatcccacctgaccagcagaggttgatttttgctggaaagcaactcgaggatgggaggacgcttgcggattatagcatccaaaaggagtcaaccctgcacttggttctgcgccttcgaggagggatgcagatattcgttaagaccttgactggtaaaaccataacactggatgtcgagagctcggacaccattgacaatgttaaagcgaagattcacgacaaggagggaattcctccagaccagcagaggttgatttttgctggaaagcagcttgaggatgggaggacactcgcggactataaca

SEQ ID NO: 219077 - DNA, 383 bp, Gossypium hirsutum
gagggctgcaacatcaggacaagctttcccacaatgtgtgtttgatcactgggatatgatgtcatcagacccattggaacctggctctcaggcagcagcccatgtcgccgaaatccgcaagaggaaaggattgaaggaacagatgaccccactttctgagttcgaggacaaactgtaagctaagagagagtaactgtgattgtgcggcataacctttgctgcaatttagttttgttttctgtctggttatattttgttagcatggatgctttttcacccatatgtactttcgtttttagacgcttgtgttttgatgatgatcatgatgtactacaatcgacattgcgttgaacttttttatacatctcttatcttcatatgcc

SEQ ID NO: 219078 - DNA, 378 bp, Gossypium hirsutum
ccaagtttgtgattccagatcttactcgcaaagcacctttggcttattatgacataagggataggttgaaagaccttttgaagaacagccctgaggcgaaagttatagtgacgggccacagtttgggcggcgccttggctgctcttttcccggcgattttgttttaccacgacgaacagttggtgcttgagagaatggaaggcgtttacacgttcgggcagcccagagttggtgacgaagcctttgccggctacatggagaagaatttgaacaaaaatgggatccagttttacagatatgtttactgtaatgatatagttcctagggttcctttcgacggcatgttcaagcactttggtacctgcgtttactacaaca

SEQ ID NO: 219079 - DNA, 386 bp, Gossypium hirsutum
gcaacccccatgattagcattgtgaaggacatagtgaataacatcagggccatggaagaagaggaagaagaagagaaaagttgtggtatagagaaaggaaacggggttaataaaacgaattccacatcaccaaattcaaaaaggaaagaaaacttcaagacaaggagggcatacttttattgggtgacgagggaacaaggttccttcgattggttcaaagggataatgaatgaagtggctgaaatggaccataaccatgtaatcgagcttcataattactgcacaagtgtgtatgaagaaggcgatgctcgctcagctctcattactatgcttcaatcactcaatcatgctaaaaatggggtcgacatcgtctctggtacgagagt

SEQ ID NO: 219080 - DNA, 325 bp, Gossypium hirsutum
  unsure (1)..(325): unsure at all n locations
gccggcacttatgaagagcttcggacgaatcaatggcgagaatcaaggtccatgtgttgagacagaaatcaaaaactgagctcttggctcaactgaatgatctcaaagctgaactcgctcttattcgtattgccaaagctaccggtggatcacctaacaagctttccaagataaaggtggtgaggtcgtcaattgctcacgtgttgacagtgatctcacataaacagaaagctgcactcacggtggcatataacaataagaacttcttgccccttgatctcnctccaaagaacaccagaaccatcaagagaaggcttaccaagca

SEQ ID NO: 219081 - DNA, 386 bp, Gossypium hirsutum
cttgaacgcgacttaccataaaacagaggtgttcgggctagacatccccaccgagatcgagggagtgccttccgaaatcttgcatccagagaacacctgggctgataagaaggcatacaaggaaaccctgttgaaattggctgggctattcaagaagaactttgagaccttcactaattacaagattgggaaagacaacaagttgacagaggaaatcctggcagctggtccaaacttctaatttttggagcaatgaaaaaacaaagggaagaagaagaaactattatggtttttcacagatttgcagaaaagtgaatgaatttgatagaataagagtgtgtgtttgttggtaaattataaaagaggaagtagtcctttaattgggt

SEQ ID NO: 219082 - DNA, 338 bp, Gossypium hirsutum
aaaccagggtgttacccagctgaaattccaacgtagcaaacgatcagttgcagaggaacgagctggccggaagcttggtggtcttagggtcgtgaactcttattggatcaatgaggattcaacttacaaatactttgaagtcatcttagtcgatcctgcccacaacgctatccgcaatgacccaagaatcaactggatctgcaatccggttcacaagcacagggaactccgaggactgacctctgctggcaagaaatacaggggtcttcgtggcaaggggcacttgcaccacaaggctcgaccttcaaggagggcaacctggaagagatacaacacac

SEQ ID NO: 219083 - DNA, 377 bp, Gossypium hirsutum
ctttcagaaaggaccagaagaacttccgtccatgtattgtatcaaattaggttatatgtgcataagttatcctaatgtctttcgaatcgtaggaatattttattcgccacatggatggctgcacacttgatactgaaggagagaaagaaagggttgttaaatgtctcgaagccgccattcatagaagagtgagtgagggtttaagcctggagctttgcgcaaaggacagagttgggttgttgtccgaagtaacaaggattctccgagagaacggattgtccgttagaagggcaggggtgtcaacagttggggagaaagcagtgaatgttttctatgttagagatgcttacggtaatcctgtagatgcaaagacaatc

SEQ ID NO: 219084 - DNA, 383 bp, Gossypium hirsutum
ccgatggctggattttggcggctatgagaataagatgaataaaactgctaaagcgttggatgaaatttccgggggatggctagatgaccacagaaagggtggacattgggatgaaaataaaaaggagaaggatttcatggatgtaatgaactctgttcttaaaggtgcaagtcttgcaggttatgatgctgacaccatcaacaaagccacttccctgaatatgattttagcaggcagtgacaccacaacagttactttaatatggggtctttccctaatgttaaacaaacctcatgtactcaaaaaggctcaagaagaactagacacccatattggcagggataggtttgtgaatgaaacagacattggaaaattggtgtaca

SEQ ID NO: 219085 - DNA, 335 bp, Gossypium hirsutum
ttttgtctaaggttaaacggtagtataattaaatgattataacagagaaagcgtgggagggaattggggaaggatggctagatgaccacataaagggtggacattgggatgaaaataaaatggagaaggatttcatggatgtaatgaactctgttcttaaaggtgcaagtcttgcatgttatgatgctgacaccatcaacaaagccacttccctgaatattattttagcaggcagtgacaccacaacagttactttaatatggggtctttccctaatgttaaacaaaccttatgtactcaaaaaggctcaaaaaaaactagacacccatattggc

SEQ ID NO: 219086 - DNA, 188 bp, Gossypium hirsutum
  unsure (1)..(188): unsure at all n locations
gccgatataccatcaaaaaattttgatttcnctctttgtatagtctcaaattacgggacatgtgggtaacttatcctaatgtctttcgaatccgtagaatattttattcgccacatggatggctgcacacttgataccgaaggagagaaagaaagggttgttaaatgtctcgaagccgccattcatag

SEQ ID NO: 219087 - DNA, 321 bp, Gossypium hirsutum
ctttcataaagaccagacgaacttgcgtctttgtattggatcaaattagggtatatgtgcataagctatcctaatgtctttcgaatcgcaagaatatcttattcgccacatggatggctgcacactcgatactcaaggagagaaagaaagggccgctaaatgtctcgaaaccgccactcatataataacgagtgaggggttaagcctggagctttgcgcaaaggacataggtggactgctgtccgaattaacaaggattctccgagagaacggattgtccgttacaacggcaggggtgtcaacagttgaggagaaagcagt

SEQ ID NO: 219088 - DNA, 344 bp, Gossypium hirsutum
ggaaactctgctggcacagtcactgcctattatgatcaacatgggatgaaattgatttcgagttcctcgggaatttaagtggcgacccttacattcttcacacaaacgtgttcagtcaaggcaagggtaacagagaacaacagttttatctctggtttgacccaactgcagatttccatacttattcaatcctttggaacccccaacgtataatcttctctgttgacggtacacccattagagagttcaaaaacatggaatcacttggtgtcccatttcctaagaaccagccgatgagaatttactctagcttgtggaatgccgatgattgggccacaaggggt

SEQ ID NO: 219089 - DNA, 380 bp, Gossypium hirsutum
gccgtctaatacaaccgttgttgctagctgtcacgtggtttgcaatattacacggcccaagaacgcaagcccaaagtgctgcgtatccttttctgcatacttcaatgaatcagttgtcccatgcccgacttgtgcctgtgggtgccctcgcaactcagccaacacttgtagagcaaatgctacagctgttcttgttccacctgaggcacttcttgttccatttgagaaccgaactgctataaccagagcttgggctgatcttaaacactttacggtgccaaatccaatgccgtgtggtgacaattgttgagtcagcataaactggcatctatattcagacttctatcgacgattgagtgctaggatcacaatattcaact

SEQ ID NO: 219090 - DNA, 372 bp, Gossypium hirsutum
gcatgttcccaggcattgtctttgccatcttctttgtcttaaatgcaattatatggggccagaagtcttctggggccgtgccttttgggacaatgtttgctctggtcctcatgtggttcggaatttcagttccacttgtttttgtgggtggttatgttgggttcaagaagccagcaattgaggatcctgtgaagacgaacaaaatcccaaggcagatcccagagcaagcttggtatatgaacccgactttttctattctgatcggaggaattcttccattcggagctgttttcatcgagctgttcttcattctcacctcaatctggctgaaccagttctactacatctttttcctgttcttggtattcatta

SEQ ID NO: 219091 - DNA, 393 bp, Gossypium hirsutum
gataccgttacaagatgaggttcgtctactctcactttcctattaatgcctccatcactaatggcaacaagtcgatcgagatccgtaacttccttggcgagaagaaggtccgtaaggtggatatgttggaaggtgtttccattgttcgatccgagaaggttaaggatgagattgttttggatggtaatgacatcgaacttgtatcccgatctgcagctttgataaaccagaaatgccatgtgaagaacaaggatattagaaagttccttgatggtatctatgttagtgagaagggaagggtcgccgaagaagaatgaatactatctccctgaatcatagttatagtgctgctttatttttttgtcgtagtaatattttgggactccgtttttt

SEQ ID NO: 219092 - DNA, 371 bp, Gossypium hirsutum
gcagaatggacaaaggattactttcccaggttaagctgatgaagcgcccgatacggttactggggacattgtattcgtcctgcaacagaaagatcatcctaaatttaaacgaaagggtgatgacttatttgtagagcatacattggcacttactgaggccctttgtggctttcagttcatactgactcacttagatggcagacaacttctcattaaaacccaacctggggaagtcgttaagcctgatcaattcaaagcaataaacgatgaaggaatgccgatttatcagaggccatttatgagaggtaaacttttcattcacttcactgttgacttccctgactcgttgaccccagaccaatgcaaggcac

SEQ ID NO: 219093 - DNA, 331 bp, Gossypium hirsutum
caggcttgttcctcgctacaggaaggatagatgcctcgggttacatttgttgtggttcaaaagaggcatcatactcgcttattccctaccgatcgcaacaaaactgataggagtggcaatatattaccaggggacgagcaagtccacacattaccacgttttgtttgatgaaaatggcttcactgctgacatcttgcaagtgctcacaaacagtttatgttacacgtatgtgtttactcctttctctataatcctgatatggggtgaataaataatgctttagatcagcactaggaattatatagtaataattttactttgtggacaggta

SEQ ID NO: 219094 - DNA, 82 bp, Gossypium hirsutum
gtgttattcatggtatcttgttatgtttgctttactttatatggagtagtttgaacttacaagactgtaatggaattttgtt

SEQ ID NO: 219095 - DNA, 414 bp, Gossypium hirsutum
taccgggttggaacacgcgtccggatgccttttgtcaaacgggcaccgaatgtttgtttcaagtttccaattggaagtgtgagtgtttctggcgataagtttgtgggttgtccaatgccttgtggtgttcagatcacaaggatggaacacatcaatgtgctttcaagcaatgttgaatacctagcatcaagggatgctacgatcatgggaagtcggaatggtcatgctcctcttttcctttggtatactctcaatagaaaaggttataaaggatttcaaaaagatgttcagaaatgcctcagaaatgctcactacttgaaagaccgactgcacgaggctgggatcagtgctatgctaaatgaactcagcagtacggttgtgtttgagcggccccgggatgaggagtttgttcgt

SEQ ID NO: 219096 - DNA, 70 bp, Gossypium hirsutum
gttggaaactcggagactcagtgtccgggtcaatgtgcttggccttttcatcaacctatttacggtccac

SEQ ID NO: 219097 - DNA, 356 bp, Gossypium hirsutum
  unsure (1)..(356): unsure at all n locations
tgaacatgcttcaccttgttgaaccttatgtgacttatggatacccgaatctcaagagtgttagggaactcgtttacaaaagaggttttggaaagttgaacaagcagcgagttgccttgaccgacaacgcaattgttgagcaggcactaggcaagttcggcatcnattgtgttgaagatctcatccacgagataatgactgtgggacctcatttcaaggaagccaacaacttcctttggccatttaagctcaagggcaccatgggtggtctgaagaagaagaggaaccattacgtcgaaggtggagatgccggcaaccgtgagaattacatcaacgaagtaattaggagaatgaat

SEQ ID NO: 219098 - DNA, 361 bp, Gossypium hirsutum
  unsure (1)..(361): unsure at all n locations
ccacgcgtccggctaccttcgtggagagtgtgatgggttctcaatgtccaaaagagctcgaaccagctgatccgagaacaaaagtggatcttcacctctntagacgggatgaaaactattccgaaccaaatagacgccaaagtgtgtttcaaggtgttggaagaaccctangaagtagcagcccgagccctactccctctgagtcaactgctgcagccggtaatatcatcactgcaccagcgccatcaatgggcctggttgtggatacatcatngccaacaacctctattcagctgaggttatcggatggtacgcgcatgatctcacgattcaatcaccatcatacgatcagagacattcg

SEQ ID NO: 219099 - DNA, 234 bp, Gossypium hirsutum
  unsure (1)..(234): unsure at all n locations
atcgagttagactcattntattaagtccattgatggaagtgttacttgccttatcttctttgttcgcttcattgatattgtacctggtggatggtggtgatttgtgtatagtgcaaggtgtgcatgcaaacattcatctgtactacaacagaagtgaaatgccgggagcatgccgaggcgaagcattctaaatccgacctatacacatgttttcctcaccttaaaaagatcaca

SEQ ID NO: 219100 - DNA, 350 bp, Gossypium hirsutum
  unsure (1)..(350): unsure at all n locations
cacgcgtccggaacggaagtggcatcctaaatcatntaaggccgaagatattacattgaagttcctcaagaaccttacaaccattgacgacatagtccatttcacaagtgatgaaaagaggatgcttacaggaccatgcctgtggaatggaataaagagaccttgttatntattcgcaagaaagtttatccagaaacattgagaggtgatgtctattctctaatatacncactatctgtgtagcttccctttcccttgctttcctaggctggataatgtattatcttgatttgtggatcagatcacaagcggactagatcaatgcattcaacaggattaaaattttgatt

SEQ ID NO: 219101 - DNA, 371 bp, Gossypium hirsutum
cattcctgcttatggaggtatagttgcttgggaaggagatggatctccattcgccgaatctgatgatagcatcactcatcatattgtggacagaccaacccatggacatgtatatctttcaagagaatatgttcaacctcagtgggtttatgactgtataaatgcacggatcatcttgccaactgagccatatatggttgggagggacccacctacacatctgtcgccttttgatgattatgaggctgaaggttatgttcctgattattccaagaccataagacaactacaggctgctgcaaaaagtgatattcaaccattgtctgtcaccggaaatgatgagtaggataactctcaaaatatgttggcat

SEQ ID NO: 219102 - DNA, 97 bp, Gossypium hirsutum
tgttccatcttcactagtaaacctgaattcaatttcaaatggattgggccacaaggaagtgacgctggtattgtcaatgtgaacataccaaccaatg

SEQ ID NO: 219103 - DNA, 360 bp, Gossypium hirsutum
  unsure (1)..(360): unsure at all n locations
gaggaatatcatgggtgccaaagttctcttcttcnttagcttgctttccttntcagctgtgtcggcatttgcacaggatgaggaagaccaaggtcttgttatgaacttgtacaaggattcttgtcctcaggctgaagacattatcaaggagcaagttaagctactgtacaagcgacacataaacactgctttttcttggctgagaaacattttccatgactgtgctgtccagtcatgtgatgcttcactgctgctggactccacaagaaggagcttgtctgagaaggagacatgacaggagcttggcctaaggaatttcatgtacattgagaccatcaaagaagctgtagaaagggaatg

SEQ ID NO: 219104 - DNA, 298 bp, Gossypium hirsutum
tcacgcgtgcgccacgcgtccgctatgtagttaccctatctgttccagctgtagttgcagtccatgtcgcggcatatccagttcaatactcctaccgtaaagatgaacaatgaaaggctcatgaaaatggctggtgcagtccgcactgatgggaagggtagcatgagaaggaagaagaaggctgtccacaagacaaccaccaccgacgacagacgattgcagagcacccttaagagaataggagtgaatgctattcctgcaattgaggaagtcaacgtattcaaggatgatgttgtta

SEQ ID NO: 219105 - DNA, 203 bp, Gossypium hirsutum
  unsure (1)..(203): unsure at all n locations
atctactaacatcagctgaaacattgctaaaatacttttacgagaaggttntatcgataacgtaaggaaacatcgggaacgcaacagatattttttggttntaaccctacgacatagacggaatagaaaaggaccacatagaacntatttaaanttacgacggatcagtcgaccaggtctacgaatctattctaactatcaac

SEQ ID NO: 219106 - DNA, 193 bp, Gossypium hirsutum
  unsure (1)..(193): unsure at all n locations
gtaatggctaccaagcagccaaatactggcctctntgtgggactgaacaagggccatgttgtaaccaagaaggagttggctccacgtccctctaatcggaaaggaaaaactagcaaaagagtccattttgtgaggaacttgattagggaaattgctggttttgcaccatatgagaagaggattactgaacttc

SEQ ID NO: 219107 - DNA, 420 bp, Gossypium hirsutum
ctattcttcacaaaaaagaaaagaaaaaatacagtgaaaatggcaacccttaaggttccagctcatgtacctgccccttctgaggatgctgagcaacttcgtaaagcttttgaaggatggggtacaaatgagcaattgattatcgacatattggctcacaggaatgcagctcagcgcaatttgattcgtaaaacttatcgtgaagcttatggggaagatctccttaagtctttggatgaggaactttcaagtgactttgagcgagctgtggtgctgtttactttggaccctgcagagcgtgatgcatttctggctcatgaagctacaaagaggttcacatcaagccattgggttctcatggaaattgcttgcactaggtcttcacatgaactgttcaatgtgaggaaggcgtatcacgat

SEQ ID NO: 219108 - DNA, 384 bp, Gossypium hirsutum
tatctaagcctataaacaaaaacccaagtcaacaaaacccagaaatgaattaaagttttttttttcaatagcttttgtccgatttaatataaaaacgtaaaaggaatgatttatttcaatgtgggttattgtttatattataagatgtttgatagctgaaagttgatttttgggtgactaggacgtggagggtcagctggaaacaagttcaggatgtcactgggtttaccagtggcagccacagtgaactgtgctgataacactggtgctaagaacctttatatcatctcggtgaaaggaatcaagggccgtctcaaccggttgccctctgcttgtgttggagatatggtgatggctaccgtcaagaaagggaagcctgatctc

SEQ ID NO: 219109 - DNA, 409 bp, Gossypium hirsutum
agagaaagactggaccgatgtcgagttcttatcatcaacagagccaccaacttgggggtgccctgcatgcaagacgttggctgagaaggcatcttggaaatctgctgaagaaaacaacatcgatctcattacagttatcccttctctcatgactggcccttccctcaccccagttgtgcccagcagcataggccttgctacatgtttgatttcaggcgatgaattcctcataaatgctttgaaaggaatgcagatgctgtcatggtctatctctatcacacatgtggaagacgtatgccgagcccatgtttttctggctgaaaaagaatctgcatcgggtcgatatatatgcagtgctgtcaataccagtgtgccagaactagcttagttcctcaacgaaagataccct

SEQ ID NO: 219110 - DNA, 402 bp, Gossypium hirsutum
atttgatatcaagtatgtagttgctgctgctgtagcctttaaaggtgttgggagtattctctttacctttggcagcaccggcggagcttatcttctggttttgcaccaactcgttcttactcccattgtttatgacttctacaattacgacacggaaaagaaagaatttggtcttctttttacaaagttttcacagaacttgacgctgttaggggcattgctgttcttcattggcatgaagaactcaatccccacaagacaactgaagaaaaaggctccgaaaaccaaaacagtttgaagacgtaacacatccggttaaaaccgaagagggtctggtttttctcgttcgatcttaatttgtatacctcggtgtaactagatctgtttctgtatgcttgtacc

SEQ ID NO: 219111 - DNA, 402 bp, Gossypium hirsutum
gtaccggaggtgaatccatctatggagccaagttcgcggacgagaacttcatcaagaagcgacacgggacctggcatgcttgtgcatggcgaacgctggacccggaacaaacggatctcaattcttcatctgcacgaccaagacggagtggctggacggaaagcacgtggtgttcggacaggtagttgaaggcatggatgtggttaaagcgattgagaaggtggggtctagcggtgggaggacttccaagcctgttgttattgctgactgtggacagctttgaaaaagggcttattgaattgtgtttccttcataatatctggtctttttaggctccttttttttatgctatgctgcttctatggctactgggttttggtgttttttaagaagttgcttgat

SEQ ID NO: 219112 - DNA, 384 bp, Gossypium hirsutum
atcagatgcaggccaatggaaccttgttgttccctgctattaatgtcaatgactctgtcaccaagagcaagttcgataacttgtatggatgccgtcactctcttcccgatgggttgatgagagctaccgatgtcatgattgctggtaaggtcgctgttgtctgtggttatggtgatgtcggcaagggttgtgctgctgccttgaagcaagccggtgctcgcgtcattgtcaccgagattgatcccatctgtgcccttcaggctctcatggaaggacttcaagttttgacccttgaggatgttgtctccgaggctgatatctttgtcaccacgactggtaacaaggacatcatcatggttaaccacatgaggaagatgaagaaca

SEQ ID NO: 219113 - DNA, 415 bp, Gossypium hirsutum
gcgaccctctttttcctctaccaggtgattttagctttgtgttagttcctttaagcaatgcgccaagatgcagaacgaagagggtcaaaacatggatctttacatccccaggaagtgttccgccactaacaggctcatcacctctaaggatcatgcttccgtccaaatcaacgtgggacacttggatgagcttggcagatacactggcacattctccacttttgctctttgtggatttgtccgtgcccagggtgatgctgacagtgctcttgacaggctttggcagaagaagaaagctgaagtccgacagcagtagttggatacctttttaccctagtctatctccgagcttgggaaagaaaaatctcatggcagcgactattatgttctaggttttttcaggttaaactatgtc

SEQ ID NO: 219114 - DNA, 420 bp, Gossypium hirsutum
aaacacttctccagtgaccaaaaaagcttcattgtctcttctatcgaaaaccccatggctgctcttaagctagtttgtgctctagtgttgtgcatgttggtggttgagcccattgccacaaccaccataacatgcggcgatgtgacaagcaaagtggccggttgcttatcatacttgcagaacggagggaacgtgccgaaggcttgctgcgacgggatccggtccctgaacaacatggctcgaaccacccctgaccgccaaaccgtgtgtgggtgcttgcaagctgccgctaaggctgtcaaaattaaaggcaacttggctgagaccctcccagccaaatgtagtgtcaacatcccttacaagatcagcacttccactaactgcaaaaatgtgaagtgagatggatgaagagagggtttt

SEQ ID NO: 219115 - DNA, 417 bp, Gossypium hirsutum
gagagagggagggaggaaaagatgcagatattcgtgaaaaccctaaccggcaagaccataactctcgaggtcgagagcagcgataccattgacaacgtcaaagccaagatccaagacaaagaaggaatcccaccggaccaacaacgtctcatcttcgccggaaaacagctcgaagatggccgtaccttggctgactacaacatccagaaagaatcaacacttcatcttgttctgaggttgagaggtggaattatcgagccttctttgatggctttggctcgcaaatacaaccaagacaagatgatttgccgcaagtgttatgctcgtcttcatccaagagccgtgaactgccgcaagaagaagtgtggtcacagcaatcagttgaggccgaagaagaagatcaagtagatactgact

SEQ ID NO: 219116 - DNA, 386 bp, Gossypium hirsutum
gaccgattcgccagggtgtcaagagaaggcatcgtatattcttatggtaatggcacataaagcatatggagatagacaggccatgatcgaagctggcattgtttcatcattgcttgagctaacacttttgggtagtacattggctcagaagagagcttctaggatcttggaggtcctgagagtcgacaaagggaagcgagtttcagaaaacttcggtgggaacatgaatgcagctgtctcggctccaatttgcggctcttcatcatcgtcttcaacaaatctgaacggaaaggagtgcttggtggaagaagcaggcatgatgagcgaagagaaaaaagctgttaaacagttggtccaacagagtttgcaaaacaatatgaggagaa

SEQ ID NO: 219117 - DNA, 420 bp, Gossypium hirsutum
ataaaacaaggcttgctcatgggggaattcacaaggaggttcacgaccttctcttggactatgggcttgaaattattgcagaaattcttattgaaggtctatcacgagtgaaaagatgtactgatgaaggacgagctctcatgtcattagaccttcaggttttaatcaatggcttgcaacactttgtctccttgaatgtgaagccaaagttacagatcgttgaaactttcatcaaggcttattatctccctgaaactgaatatgtacactgggcacgagctcatcctgaatacagcaagaatcaaattgtgggattgataaaccttgttgcttcaatgaaaggttggaaaagaaaagccaggtttgaagtgctagaaaagatagaataaacaggtacatagccctggaatcactacttaa

SEQ ID NO: 219118 - DNA, 321 bp, Gossypium hirsutum
  unsure (1)..(321): unsure at all n locations
gcaggaggtactttcacatccgnttgttattcttcaaaacttacatggacagccatgggtaggaagcttcataagaaggatgttgcccaatatgccgtgaagaatagaagacgtgcatccaataatccttactcccgatccattgttggtgcctccttagaggttatccataagaagataagtgagaaacccgaagtccgtgatgctgccagtgaagctgctctccgagaaatcatggaaagaaagaaaagaagaaagactatgaagctaaggaaaagatgaaagataataataataatgatgatgtacgagatgaatatg

SEQ ID NO: 219119 - DNA, 390 bp, Gossypium hirsutum
gccagttcattttcaagggtcttgcaaggtcaagaattctcgaccttgagaggcacatttgctgagagtaatgattctgaaactgctgataggtcagtgatgtggccaccttcaatagatgatgagaagattgatgtagctcatggtgaaagaaaatttgggtcagagaattggatgccctctaggaggcatgaaccaacttacacagatttgctctcaggttttgggtcgaatgctgatacatcgcgcggatattatccttcctttgttgatcaaacttcagtagctggtaattcggggaaaaaaacaattactaggtcaagaagggaagcttggctcttggtccctcctgccatctggtctctcactcaagttgtctgacagtagtac

SEQ ID NO: 219120 - DNA, 415 bp, Gossypium hirsutum
tgcagatcggctcacttaaaggcaatggaagtggccaaagaatcaggtgctttgttgtcatatgatccaaaccttcggctgccactttggccttcagccgatgaggccaggaaacagatattatccatctgggataaggccgatattatcaaggtcagcgatgttgagctagagttcctcaccggtagcaacaaaatcgacgatgaaactgctatgaaactttggcgccccaacttgacactactcttgatcaccctcggtgaaaagggtagcatgtattataccaagtacttccatgggtcagtggatgcattccatgtgaatacagtggatacaactggcgccggggactcttttgttggtgctttactatgcaagatcgtggaagacccaaccatacttgagaatgaatcga

SEQ ID NO: 219121 - DNA, 424 bp, Gossypium hirsutum
tatgctccagtccttgactgccacacatcacacattgctgttaagtttgctgagcttttgaccaagattgacaggcgatctggtaaggagcttgagaaggaacccaagttcttgaagaatggtgatgctggtatgattaagatgattcctaccaagcccatggttgtggagaccttctctgagtacccacccctgggtcgttttgctgtgagggacatgcgtcagaccgtggctgtgggtgttatcaagagtgtcgagaagaaggacccaaccggtgccaaagtcaccaagtctgctgctaagaagaagtgaagaggccaaaaggttttagccgtgaagcagattgagtgttttatctttggttatatgtgggttgaagtttttgcctgttttatgtaggatttttaaaagttgagatgctttg

SEQ ID NO: 219122 - DNA, 412 bp, Gossypium hirsutum
catccgttcctggcttcacgccgaggagaacaagcgacggacgcttcagaaaaacgacatcgcggcggctattactaggaacgacattttcgatttcttggtggatattgtgcccagggacgagatcaaggatgaggctggtctgggtgggatggtgggtaccactgccagtggggtgccatatttttatcctcccatgggtcagcctgctggcgctcctgctggacctggcgggatgatgattggaaggcccgccgtcgatccaaccggtggtatttatgctcagcctccttctcaggcttggcagagtgtttggcagacggcggtggctgacggtgggtcgtatgccagtggaagtagcggctgtcaggggaatcttgacggtcaaggctaagcaattcatttgtccgat

SEQ ID NO: 219123 - DNA, 415 bp, Gossypium hirsutum
atcgaggactaagctcgaaaaggaatatgaagaagaagttttggttctacaaaacggtcgactagaccgagatgcgggggtgaagttcgatgtgtacattaatgatgaagacgacgagacaccgactgaacctgaagattcagagttcgctgggagctttacgaatctaccgcataaccatcacaagactgggatgaagcttaacaccaacttaacattgccattaacagatttgttggaggatttgaatgttgaaggtgatgagagtattttggtgactttggtgcctaaagaaggaaagggtctggtttctattggtaacattaagatcgactacatccgagattgatgatcagttaatttgccgactcttcggtcgcttactgaaacattttgcttcgtgaatttgtttccc

SEQ ID NO: 219124 - DNA, 421 bp, Gossypium hirsutum
  unsure (1)..(421): unsure at all n locations
gaaaaacgctgcttgcagctttgctattaaggtatgtcatcatccgataagccagaattagttgaaagggatgttaaggacaaggtggatgacaaagaagacaacagtggatttatagacaaggtcaagggtttcattcatgacattggtgagaagatcgaggaaacaatcggctttggcaagcctactgcagatgtagctgagattcacctcccttgtatcaatcttgagaaagcagaaattgtcgttgatgtcctcataaagaacccaaaccctgttccaatccccctcgtcgacattgactacctcattgaaagtgatggtagaaaactcctttcaggcttgattccagatgctggaaccatccatgctcatggtgaggagactgtcaaaataccagntactttgatatatgatgata

SEQ ID NO: 219125 - DNA, 420 bp, Gossypium hirsutum
cctcaatccagagcccatccaattccaacccaattttccaacacgaaactccgctcccggggaaggcacgatccaagcgttcaagggtggccccatgcgattggtccacccgactcctccacctcaatccgaaatcggtggcccagaagaaaagggagaacccgaacgccaattcggagttgccagtccggaaatgtttacattgtgcggcggaaaagacgccgcaatggaggactgggccgttgggtccgaaaacattgtgtaatgcatgtggggtgaggtacaagtcgggccgattggtgccggaataccgtcccgcagcgagtccgacatttgtttcggcgaagcattcgaattctcataggaaagttttggagcttaggagacaaaaggaagtccaaagagcacagcatcaacagc

SEQ ID NO: 219126 - DNA, 418 bp, Gossypium hirsutum
atgaaaccattatttgaagatgaaaatataagactgtttcattgattatgatctcggcatcatgttgcagactggtgtaactttactcgtgatcaacttgagcaatcagacgaatttcataatgaatgctcaaaacagcatcaatctgaagttggctgcgaatgaacaaaacattagcagggacagcttcacacatagtcttaagaaaacattctcctgggtcggaaccaaagcttccgacgatgctctactccgagaagagtatcatttaacaccaaaagacggataccttagaagtcgaactatggttctaaatggcatccctttagaacttacaagcaccggagacatcccatcactaaaccccgtccgtgttaacgtgaagtctccaataaccatctcgcctttgtcaattgca

SEQ ID NO: 219127 - DNA, 396 bp, Gossypium hirsutum
  unsure (1)..(396): unsure at all n locations
cctcactttgtggacctcagacatgcaggatgatgggacagatgaaatcaaagaagctcgcaaacaagaggatgagaaacaaccgtgaagtctctaatcttcatggtagtgttttacttctctggttgtttttgtatggagaagtcgcttggtcctactatcgtcttcaattacttgtttttagtagatcaggcctcaatttatgaaccttggaagtactcctaagaatttcttagtgtttcactggttattgtttttgagtttgaagccttctagctttctaatggcagtgaagttatgtgcacacatgcttaattgttttcatgacaataatggagctgatggttgagatattttctatggttaaggtttgaaatttgttttcaaaaaanaaaa

SEQ ID NO: 219128 - DNA, 418 bp, Gossypium hirsutum
acaagattggtggtattggaactgttccattcggccgtgttgaaaccggtgtcttgaagcctggtatggttgtgacctttggcccgtctggtctgacaactgaagttaagtcagttgagatgcaccatgaagctcttacagaagcacttcccggtgataatgttgggttcaatgttaaaaacgttgctgttaaggatctcaagcgtggttttgttgcatccaactccaaggatgaccctgctaaggaggctgccaacttcacttctcaggtcatcattatgaaccaccctggacaaattggaaatggatatgccccagtccttgactgccacacgtcacacattgctgttaagtttgctgagctcttgaccaagattgacaggcgatctggtaaggagcttgagaaggaacccaagtt

SEQ ID NO: 219129 - DNA, 357 bp, Gossypium hirsutum
ggtggtgtgaatttgcagaacctgttaatggggaatctacacagtttcttcaggagatttgcacgcaagtataacatggtcattataagctcaattcttgagagggatataaatcatggagagactctctggaatactgctgttataattggaaatcatggcaacataataggcaagcaccgtaagaaccatattcctagagttggggacttcaatgagagcacgtattatatggaaggaaatactcggcatcctgtatttgagactgcttatgggaagattgctgttaatatatgttatggaaggcaccatcctttgaattggctagcttttggtttgaatggtgctgagatcgtt

SEQ ID NO: 219130 - DNA, 337 bp, Gossypium hirsutum
acaacacttgcattaagtctcaaagatatcactgcaagaaaaaaaaaaaaccagacatggcttccaacactgttgcgtccgctgctcttcttcttaccttgaacttgttgttcttcactttggttagctctacctacgtgccttgcccaccaccaccaaagagccacaagcctacccacaaaagcccaccctcggcacctgaacagccaggcacttgccccaaagatgcactgaaactaggcgtttgtgctgatttgttgggctcagtgcgcgttgttgttggaccgtcgaggaccaaatgctgctctctcatttcgggtttggctgatctcgatgc

SEQ ID NO: 219131 - DNA, 420 bp, Gossypium hirsutum
gtcagcacaagcgatctgactatggtcttcctgaagataaattcatttttgcatgtttgaaccaattgtataaaatggatcctgaaatctttaatacttggtgtaatattcttaagcgtgtaccaaatagtgcactttggctcctcagattcccagctgctggagaaacgagactgcgagcatatgctgctgcacaaggggtacagccagagcaaataattttcacagatgttgcaatgaaacatgaacatatcaggcgcagtgctttagctgatctctgtctcgacacccctttatgcaatgcacatactactggcacggatgtgttatgggctggtttacctatggtgactctaccccttgagaaaatggctacaaggggttgctggttcactttgtctcgctactggtttgggggag

SEQ ID NO: 219132 - DNA, 419 bp, Gossypium hirsutum
tgagtggtctgccaagcagttggagggagagattgagagctctgctgcttccacttacgagctccagcggaaacttgtccaggccgccaccgcctgcgactcctctggtggtgtcacctcctctttctctgtcgttacccctaattctgccgttttccaggtggttattggaggtgctgtaggcggagccttcatcgggggtggaggagctgctgccgctccggctggaggcgctgccgctgccgctgaagctcctgcagctgaggagaaaaaggaagagaaagaggagagtgatgacgatatgggattctctctctttgattaagctcctttactgccttactgcctgtttagatcttagcaagttgttacattttcatttttcatttatgcgtgaattagactatcttgggtgacat

SEQ ID NO: 219133 - DNA, 420 bp, Gossypium hirsutum
ggtgattttagctttgtgttagttcctttaagcaatccgccaagatgcagaacgaagagggtcaaaacatggatctttacatccccaggaagtgttccgccactaacaggctcatcacctctaaggatcatgcttccgtccaaatcaacgtgggacacttggatgagcttggcagatacactggcacattctccacttttgctctttgtggatttgtccgtgcccagggtgatgctgacagtgctcttgacaggctttggcagaagaagaaagctgaagtccgacagcagtagttggatacctttttaccctagtctatctccgagcttgggaaagaaaaatctcatggcagcgactattatgttctaggttttttcaggttaaactatgtcaaatttatatttttgttgaatggatgac

SEQ ID NO: 219134 - DNA, 401 bp, Gossypium hirsutum
gttttggttggtggattgcaggatagtttcttggcaagtttcttgctgggttggggtatgacaataggtgctggactggcatcttatccaattgatacggtacgtagaagaatgatgatgacttctggagaagcagtgaaatacaagagctcgatggcagcattttctcaaatcatcaagaatgaaggtgccaaatcgctgttcaagggtgctggtgcaaacattcttcgtgcagttgcaggggctggtgtgcttgctggctatgacaagctgcaagtccttttccttgggaagaaatatggatctggtggcggctaatgtggaaggtgattctgctgccttaaagaatgatctagcgtcccaagtttgaataattttggaaggacaaagtgcttatgatg

SEQ ID NO: 219135 - DNA, 409 bp, Gossypium hirsutum
ggactcagtcacgtaggccgctagcattggcattacattctcgaatctccgatgttttcggcgttgatatacatccggcagcaaagatcgggaaagggatcttgttagatcatgccaccggtgtggtgatcggagaaaccgcggttgttggcaacaatgtgtcaattttgcatcacgttaccctcggtgggaccgggaaggcatgtggagatcggcatccgaagattggtgatggagttttaatcggagccggtgcaaccatattagggaatgtgaagattggggaaggagcaaagatcggggcagggtcagtagtgctgatcgatgtgccacctcggaccacagacagcaggtggaagagcctgcattaaggaaccaatgcatggtcgtggtccgaggggaaacaaga

SEQ ID NO: 219136 - DNA, 422 bp, Gossypium hirsutum
agagcatcttgaaaggaacagcttacttacttctatcaccgtcaccttcccgctctgatggtgggttagacgacagtgttgctgaggttagtgatgctgaactatgctgcatatgcttcgagcagatctgcacgatcgaagtccaagactgtggtcaccagatgtgcgcacaatgcacattggccctttgctgccataacaagccgaaccctacaactgcaagcataacacccccggtctgccccttttgccgcagcaccatcgtccgattggcagtagccaagataaaagattgcgacgacgatgttggggaggatggtagttccccgaaggtgagaagacggaggaagtcgaggaatttcagcgaggggagcagcagtttcaagagcttatctgcagttggatcctttaacaagatgggg

SEQ ID NO: 219137 - DNA, 423 bp, Gossypium hirsutum
gacataaggttttgctgttggataatgagatcacatttaatgaggctgtcattgaagaaggagaacaaggaattcaagagagttcagcagcaaattggtgaggtgaatgagatcttcaaagatctcgcagtgctagtacatgagcaaggaactatgattgatgacattgggactcatatcgagaattcacgggctgccactatacaggctaaatcccaacttgcgaaagctgcaaagactcagagatcaaattcttccctgacctgcttgcttatggtgatatttggaatcgtgattctgattgtggtcatactactagtagtctaatcggaaactaaagatcatctcagcaacgagacggtgatctcttcgcctatgtatttgattatgttgttctatgagaaatgatggccaacaggagtt

SEQ ID NO: 219138 - DNA, 208 bp, Gossypium hirsutum
ggactatgaatttgcttcaaggtcaaagacaacagaggagttagctagcaaatacataggcatctacacattcaccggcggcaaggctgtctactaccggaatctattagttataccggggacttctttcatgggtgaagacagacttcacttcataaatggcatactacatcttgaggctgagttaaccatcaggcgataaccaact

SEQ ID NO: 219139 - DNA, 59 bp, Gossypium hirsutum
tgttgactgtgtatgatgcatgaatttcaaagatttaaaagttatgatgattcatgcat

SEQ ID NO: 219140 - DNA, 372 bp, Gossypium hirsutum
caagtcttcaaatatactgttggatgaacaatggaatgctaagctttcagactttgggttggccagattagggccttcagatggattaagccacgtctcaactgcggttgtaggaaccatcggatatgcagcacctgaatacattcaaacaggacgccttacaatcaaaagtgatgtttggagctatggagttttcctctatgaactcataaccggtaggcgtccgttggatcggaaccgtcccaaaggtgaggaaaagctcttggaatgggtgcgaccacacatctccaatataaaaaagttcaggttgatcattgaccctaggcttgatggcaagtattcgctcaagtcggctcataaacttgcagcagt

SEQ ID NO: 219141 - DNA, 378 bp, Gossypium hirsutum
  unsure (1)..(378): unsure at all n locations
ggggggngggagaagggtggaaatatacttttttaanaactactgcattctaaccccncaaacttatcggtgacgggattattaccttcagagggaccaaaccacatctcaactgctgttgtatgaaccatcctatatgcagcacctgaatacattcaaacaggactccttacaatcaaaagtgatgtatgtatctatggagtattcctctatgatctcataaccgttacgcatccgttgtatctgaaccgtccctaaagttgataaaagctcttctaatggttgccaccacacatctccaatataataaaatttcaagttgatcatttaccctaattttgatgtcaaatatttcatttcaattcctctctataaact

SEQ ID NO: 219142 - DNA, 394 bp, Gossypium hirsutum
ctctctctctctctcatcttttacatggcatctcaagccagcctcctccttcaaaaacagctcaaagatctttgtaagaatccggttgatgggttctcggctggattggtcgatgagaacaatatctttgaatggagtgtaacaattattggacctcctgatactctttatgaagggggatttttcaatgctatcatgagttttccaccaaattatccaaacagccctccaacagtcaaatttacatcagagatttggcatcctaatgtttatcctgatgggcgtgtttgcatatcaattcttcatcctccgggtgatgatccaaatggctatgagcttgcaagtgagcgctggatgccagtccatacagttgaaagtattggtttgagtatca

SEQ ID NO: 219143 - DNA, 359 bp, Gossypium hirsutum
cagatctcctcatctccactttttttccttcttcaaatacccaatggccgtcactttctcaaatctccacaccgagtctggtcttaaagctcttaatgacttcctctctggaaaatcttacatctctgggaataagctgaccaaggatgacataaaagtttatgccgctgttctgaagaaccctggtgattctttccccaatgttagccagtggtataattctgtttcttctcaacttgccgccagcttccctggtaaagctgttggcgttgggtttggtggcaaagctgctccagctgagtctgctaaagctgaggctgctgatgatgaggaccgactggatctatttggtgatgaga

SEQ ID NO: 219144 - DNA, 366 bp, Gossypium hirsutum
gaaattcagaggagtaaggcaacggccttggggaaaatgggcggctgagatcagggacccgctaaggcgtgtacggttatggttgggtacctatgacaccgccgaagaagcagcaatggtgtacgacaacgcggctattcagctgcgtggtcccgacgcgctcactaactttaccactccccagcaaaaatcactgcaagacaaaaacagtcaaaagccgttatccagctcagagtacaactccgtggaagaatcccacaccaccaccaccaatatttgctccccaacctccgttcttcgttgtccttcgctttcgaccgacgaagtagattcgccgcaaagcgtcaaaagaatctcgagaaatcg

SEQ ID NO: 219145 - DNA, 361 bp, Gossypium hirsutum
caagaactacggattccaactttacatgagtgatcctagtggtaactacagtggatggaaagctgcagctatcggtgccaataatcaagcagctcagtcaatgttgaaacaagattacaaggacgatatcacaagggaagaagccgttcaacttgcgctgaaggtgctgagtaaaaccatggacagcaccagccttacttcggagaaacttgaactggctgaggtttttcttacaccttctgggaatgtgaagtaccaggtttgctcacctgattctctgagcaagttgttggtgaagtttggagtgacccaacctgccactgaggcttcttgagttagctttctttattttccattcatc

SEQ ID NO: 219146 - DNA, 356 bp, Gossypium hirsutum
gcgttggctctgccattgcttacaacaagttgacaactgatgcagccctagatcccgatgggctagtcgccattgctgtttgccatggatttgctctctttgttgcagtggctatcggtgccaacatctcaggtggccatgtcaaccctgcagtcacttttgggttagctcttggtggccaaatcaccatactaactggcatcttttactggattgcccaacttcttggatccattgttgcttgcttcttgctcaaagctgtcactggtggcttgacagttcctatccacggtcttggagctggagttggagctattcaaggagtggtgatggagatcatcatcacatttgcattg

SEQ ID NO: 219147 - DNA, 347 bp, Gossypium hirsutum
agagaatcagagccgcagctgccgccgtcgccatggtgaagtttcttaaaccaaacaaggcagttatcgtcctccagggccgatacgctggccgcaaagccgtcattgtcagatctttcgacgatggcacacgtgaccgcgcctatggccattgtttggttgcagggataaagaagtatccaagcaaggttatccgcaaggactccgcgaagaaaaccgccaagaagtcacgcgtcaagtgcttcatcaagctcgtcaattaccagcacctgatgcccacgcgctacaccctcgatgtggacttgaaagacgtggttaccgtcgatgctctccagaccaaggacaag

SEQ ID NO: 219148 - DNA, 389 bp, Gossypium hirsutum
gtctgtctctcttgcagtcgcctttatcataagcaaaaacactaagctttagcttctacagcggagaaaatggtgaagggacgccaaggagagcgagtcaggctctatgtaagaggaaccatcttgggttacaagagatcaaagtcgaaccagtacccaaacacttcgttgatccagattgagggagttaacaccaaggaggaagtagcttggtatgctggcaagcgtatggcttatatctacaaggccaaagtgaagaagaatggctcacactatcgctgcatttggggaaaagttactagacctcatggtaacagtggggttgttcgtgctaagttcaagtctaaccttcccccgaaatcaatgggagatagaagtagagtcttcat

SEQ ID NO: 219149 - DNA, 393 bp, Gossypium hirsutum
caagtcttcaaatatactgttggatgaacattgttatgctaagctttcagactttgggtgggcgggattatggccttcagatggattaagccacgtctcaactgcggttgtaggaaccatcggatatgcagcacctgaatacattcaaacaggacgccttacaatcaaaagtgatgtttggagctatggagttttcctctatgaactcataaccggtaggcgtccgttggatcggaaccgtcccaaaggtgaggaaaagctcttggaatgggtgcgaccacacatctccaatataaaaaaagtcaggttgatcattgaccctaagcttgatggcaagtattcgctcaagtcggctcataaacttgcagcagtggccaataaatgcttgtcacg

SEQ ID NO: 219150 - DNA, 393 bp, Gossypium hirsutum
caagaagctgtttcaactggttttattaagctcttaaagcagcaagattctgtcgtaagcgcatgccgtgatcacgtgcacgccttgagcaaaggagtccccgcacgcgccgtcatgagtgagctcttcggtaagaccaccggctgctgccgcggccaaggtgggtcgatgcatatgttctctagggaacacaatctgctaggggggtttgcttttattggtgaaggaattcccgttgccacgggggcggcttttacctccaaatataagagggaggttctaaaagaagcggattgtgatcatgttaccttggcgtttttcggcgatggaacttgtaacaatgggcagttctttgagtgtttgaatatggcggccttgtggaagttgcccatt

SEQ ID NO: 219151 - DNA, 313 bp, Gossypium hirsutum
cttgttactggatatgggctttacgaatttgtccttaacgactgctctggggttttgggtggcaacaatgggcttgctgagtcgggatggtttatcgggttttggctaatcgttaaaagcatgatcaaaaaactgagattatcatttatgataccttggactactctatatgaaaggggatttttcagtgctatcatgagttttccaccaaattatccaaacagccctccaacagtcaaatttacatcagagatttggcatcctaatgtttatcctggtgggcgtgtttgaatatcaaattcttcatcctccg

SEQ ID NO: 219152 - DNA, 394 bp, Gossypium hirsutum
aacaaaatcaccatcacaaacgacatgggccgactctccaaagaagaaattgaaaagatggttcaagaagcagagaaatacaaatccgaagatgaagaacataaaaagaaggtcgaggcaaagaatgcattggaaaactatgcatacaatatgaggaacacagttaaggacgaaaagattggtgccaaactcccagcaactgataaaaagaagatcgaagatgctattgaacaagccattcaatggctagacagcaaccaactcgccgaatccgatgaatttgaagacaagatgaaggagttggagagtatttgcaaccccatcattgctaagatgtaccagggtgccggcggtgacatgggtggtggcatggatgaggatgttccggctggtg

SEQ ID NO: 219153 - DNA, 402 bp, Gossypium hirsutum
cccaattgctccagccaggcttttcaaggcttttgttcttgaagctgccaaggtttggcccacggctgcccctcatgcagtcaagagtgttgagctcgaaggtgatgctagtcctggaagtattgtaaagatcacctttgttgaaggccttccataccaatatatgaagcaccagattgggggacacgacgaaaacaatttttcatacagttacagtatgattgaaggtgggcctttaggggacaagcttgagaaaatcagctatgagaaccagtttgtggcagctgcagatggaggaagcatttgcaagagctcaataaaatattacaccattggcgactatgtaatcaccgaagatgaaatcaagactctcattaaagggagtgaggtagtttacaaggc

SEQ ID NO: 219154 - DNA, 402 bp, Gossypium hirsutum
  unsure (1)..(402): unsure at all n locations
gttaagatggttctgccaggggacaatgttactgcaacttttgagctcatctcacctgtgcctcttgaagcaggacaaagatttgccttgagggaaggaggtagaaccgtaggtgctggtgtagtatcaaaagtactgacctaagaagttgccattcccatagcaatgcctggttttctccatcttgttgatcgcagaaatggagaaattgatagaacaatcagttggtgatattttctgttctagaattactaaagagattgttagtgatatgaaaaatgagggctgttattgaaattattttgattcaatttcgctggtggttggtaagcagacagcatgtttttccctgtttccacccaaaaaatcacgattgaacagctntttaatgtcattgaaaat

SEQ ID NO: 219155 - DNA, 333 bp, Gossypium hirsutum
cccacgcgtccgggtcccactggtttgtcttatgactcgaggaagaccatgttcaagatgatgtcttttacttccatgacggctatattcattgttatttgtgtgacatcacctcctttcaccacgcgcatcatctgcttgtctttatgtctagcagagcacatttcataacacaaccattggtttaaatatgcgtaggtacatcaatgtcatgtccacatatcagtgggctagcagcgttgatcaaggctgctcatccagaatggagcccaagtgcaatcaaatcggctctaatgaccactgcctacacccaagacaacaccaactcgactc

SEQ ID NO: 219156 - DNA, 400 bp, Gossypium hirsutum
  unsure (1)..(400): unsure at all n locations
gcaagttcctttcccccatctactctctgtctatgttggcatattgctagacaatgaaggggaaatttctaaaggcatgcattaccaaatggaggaagatggggaatagagtcataccttgtggcagttgcgaatactgttatgagtgggcaaagtggcctaataccaagaatgaagagagttcaatcccgagagatgtgccaaagggtcacttggtagtatatgttggtgaaaactataagaggtttgtaaattaaacttaccttgctcaagcacccactgttcaaggcattgctagatcaagctcaggatgaatatgattntaccacagaccccaaactctgcattccttgtgatgaaagccttttcctcgaagttgttcgatgcgctagctctcctc

SEQ ID NO: 219157 - DNA, 376 bp, Gossypium hirsutum
cacaaatctcttggctgctgttattatagctttaacatttggccaaattggggacagcacggttgaaaggcccaatttcttcacgcaactttcccaggataattggtcttcggttttattcgcaatggctggtggggtggttctcagcttgggaaacctttctacacaatatgcttgggcttttgttggtttatcagttgtagaagtcatttcatcaagcatgactgttgttataggtacaaccttgaattacttcttggatggaaaaataaacaaagctgagatcctttttcctggtgttggttgcttcctagttgctgtttgtcttgcatcagctgttcactcatccaatgcagctgattataaaacaaagctt

SEQ ID NO: 219158 - DNA, 399 bp, Gossypium hirsutum
gcaccagggaaatagaaaagctgcgtctgaaacaagaagaagaggacaggcttaatagactgttaattgagaataagataaaggattttgaagctgggtggataaggaaattcgatgcacacaaggatgcagtttctcttctgagtgacaaattgactaacgcagagaatgaagttaaacttctcaaagagctttgcaacctaaaggtttcagcaggtactccagaatgtgttccaaatgaatctggaatgtctagttagtaaggtatgtctagtaagtttttatgtagtgcagaactactcttatttatatgtcaaacaatatgcatcatgcgcggcatctacgaatggaagcttttgttctagttggctcactatatggcagatttgatatgcaaag

SEQ ID NO: 219159 - DNA, 399 bp, Gossypium hirsutum
gcaagctagtcatccagttccatgttattttcccagaatctggggtattttcacctgagcaatgccggaagattgagagtgtattgcccatgaggcctagtaagcatttgacagacatggagcttgatgactgtgaggagactactttgcatgatgtcagtgctgaggaggtaaagaggcggaaggaacaacgacagcataggcaccgtgaaggttacgatgaagatgacgatgacgatgagtcagcaccaagagtgcaatgtgcccagcagtaagaaatgtttgcgttcaatgttttgcccctcttattttatagcagcagccaccttagatcactacatatccggaacttgtatgcggttttgtctgcaaccagcacattaaattgggtgtttgtct

SEQ ID NO: 219160 - DNA, 392 bp, Gossypium hirsutum
gctctctgaatacattgggaagaaatatttgattctcttcttttacccgttggacttcacatttgtttgccccacagagattactgctttcagtgaccgctatgaagaatttgagaagctaaacaccgaaatattaggtgtttctattgacagtgtgttctctcaccttgcctgggttcaaacagatagaaagtcaggtggtcttggtgatttgaagtatcctctcatatctgatgtcacaaagacaattgccaaagcctatggagtgttgattcctgatcagggaattgcattgagagggcttttcattatagataaagagggaattatccagcactccaccatcaacaatcttgctattggacggagtgttgatgaaacaatgaggactc

SEQ ID NO: 219161 - DNA, 399 bp, Gossypium hirsutum
gcagatttgatttacagagaccaaagggggggaaatggcgatcacactgaacaatggatttaagatgccagtggttggtttaggtgtttggcgtatggatggaaaagacgttagagacctcatcatcaactccatcaagcttggttatcgtcattttgattgtgctgctgactacaagaatgaagcagaagttggtgaggcattgtctgaagcattcaaaactgggcttgttaagagagaggacctctttattacaaccaagctttggaattctgatcacgggcatgttcttgaggcctgtaaagacagtcttaagaagcttcaattggattatctggatttgtatctagttcactttcccgttgctgtaaagcacactggagtcggtcaaacggacag

SEQ ID NO: 219162 - DNA, 388 bp, Gossypium hirsutum
cccacgcgtccgaagaatatgagaagattctcgaggagaagaggaaagctttggatgccctcaagactgaaggaaggaaagttgatgtcaaagagttcgagtccatgcaacaactttcgaacaagaagagcaatgatgacatctttatcaaactgggatctgaaaaggacaagcgcaaggatgctgataaagaagaaaaagccaaaaagtctgtgagcatcaatgagttcctgaagccagctgaaggggagaagtactatggacctgggcgtggacgaggccgtggccgtggtcccagaggtggatatggaggcaacacagccagcaatgtgcaagctccctcaattgcagatcctggacacttcccctcattgggtggcaagtgatg

SEQ ID NO: 219163 - DNA, 317 bp, Gossypium hirsutum
aacaggtatagtgagtattgaggctggatcatcatttgcgtgggggaagatggttggatcgcgaacggaatgcaatcataattgatcggtttgtggcatgtgcaccatcggggagaatatacatggaatttggcttaactgcacaggctactattgctgctgccatagaactttgctaagcttggatgaaagtttctgttgtaacttaacgttttcgattgtagatgtcgatgaacatctgttccaattgtgacacactcttctgcatagtttacttttataagaaacagacttaaattctctttagttgcttatga

SEQ ID NO: 219164 - DNA, 403 bp, Gossypium hirsutum
cgattccgttgtccagaagtcctcttccagccatccatgatcgggatggaagctgctggcattcatgaaacgacatacaactcaatcatgaagtgtgatgtggatattaggaaggatctctacggaaacattgtcctcagtggtggcaccacttactccagctcaggcagcacagagagcaaaggaatcagccaaggatattctgggtgtcaagaacttgattgacaaaaaagcctggccttatgtcatgaatgatctccgtctcaaggccgagtatctccgctatgacctcaacaccgtcattgctgccaagcccaaagatgagaagaaaactctcaaggacctcaccaaaaagctcttcagtaccatcgatgatcttgaccatgcagccaagatcaagagc

SEQ ID NO: 219165 - DNA, 381 bp, Gossypium hirsutum
catacttgctatgacaagattcaaggatgcgatttacatgaaggtgaatgggggaaagtcggtgccattgtccattggagttatgtgcatgatggaaaagctaaaaaggcaaaggaagtagtggaagcagtagaccctgataagaatttggtcactttcagagtgatcgaaggagatctaatggaagagtataagagctttgtaatcacgattcaagtttcgcccaagagcgagggtagtggcagcttagtgcactggactttggaatacgagaagctgcacgatgggattgcgcatcccgagactctgctgcaattcgttcaagatgtctctaaagacattgacgcccacctcacccaagcaagctaaacagtatcacat

SEQ ID NO: 219166 - DNA, 387 bp, Gossypium hirsutum
gttccttgggctcctggtggttccaagtttactcgaaaccctgtcccaccttctgggatcgagatcgtgtatgattatggtcgagaagaaaatgactaagacatccatcttttcaacttccccagaaataaagttgatgcaggtctaaaggatcgttgagtgtgtaacgagtggtctaggacagcaactaatttgcattacctcaattgaaacgagataaggcttttaataacatttatggtgattctccattgtgcttattgttgtgtgcctggtgttttgtataataaaagatcattggtctgattgaaggtacaaaatgcttgcttacatggcatggaactacaacgatcttgaatctttcttgtcataaactatatttctctt

SEQ ID NO: 219167 - DNA, 408 bp, Gossypium hirsutum
ggagaggagtattgccttagacattgacactagtctataaataatgtctagcctaaacatcaacgcaaaccactcccacattaaacaaaccactcccacattaaatattgttgctgaaacaatggcgttttcagctctgacaggtaagcttgaggcagatgtagagattaaggcttctcctgagcagttccatgaaatgtttgcccacaaaccgcaccacgtgcaccatacttgctatgacaagattcaaggatgcgatttacatgaaggtgaatgggggaaagtcggtaccattgtccattggagttatgtgcatgatggaaaagctaaaaaggcaaaggaagtagtggaagcagtagaccctgataagaatttggtcactttcagagtgatcgaaggagatctaat

SEQ ID NO: 219168 - DNA, 317 bp, Gossypium hirsutum
ctgtacaccaacaaatgattgacgaccaagtgaaaaagacatatctggctgaaccgaagcgatagaatacgaccctaatcgaaatgcatacattggtctcatacactatggggatggagagaagagatgtattttacatacgagaggggctatatttggagataccatggtttatggtacagaagatgctatccaaatgggaaatgccctacctttgaccgatatgcccttatgcacggccatacataacatagaaatcacactggaaaggggtggacaatgagctacagcacaggtgctgatgcgaaactgattgc

SEQ ID NO: 219169 - DNA, 404 bp, Gossypium hirsutum
  unsure (1)..(404): unsure at all n locations
gaatanncgggcggaccgcacgcgtccgatcgtctataccgtaaaattgattntcatactaatgtaaaaagacatatatggtagaatcatgacggttttttacgaccctggccggaaatacatacatttgtctcatacactatgttgatggtgagaatagatttttcctacataccagatgggctataattggagataccattgtttctggtacataatttcctattaaaatgatgaaattccctactctttaccaatattcccttatgctcttacatacatttcattttaattacactttttatttttggatcaattaactatattcatactatttcctgtttgcaataactgatttcataatgaaggtttaaatccgctcacatttttaaatttaccctttt

SEQ ID NO: 219170 - DNA, 398 bp, Gossypium hirsutum
ggtttattgcattaaatagatcatgaaatctttcctttctttttttgcattcctctcacttctgctgtttgtagacaccattgcagcagctaggaaagatgctggagagtactggggagctgtaacgaaagatcagcctatgcctgaggcactccaagagcttgttcggattgaggctgccgttgtcagccccgatgagaaaaccaagtgccatacatcaggtaatattgagcttaaggaagagaagattattgttaatgaggagttcgaaccaaggccaaacgtttcagcttatggtgatgacgctaatctaaaaggagataaatcatcatcttttgctgaagattttgaaccgagacctaacgtttcggcttacgggggcgatgatgctggtctta

SEQ ID NO: 219171 - DNA, 360 bp, Gossypium hirsutum
cttcaataatttcttccgttgatctttgttagagattagctttttaatttttcattatgggaaagatcaagatcggaatcaatggatttggaaggatcgggcgtttggttgcgagagttgctctccaaagcgatgatattgagctcgttgctgttaacgatcctttcatcaccactgaatacatgacgtacatgtttaagtacgacagtgttcacggtcaatggaagcatcatgagcttaaggtgaaagactcaaagacccttctctttggtgaaaagcctgtcacagttttcggtatcagaaaccctgaggaaatcccatgggctgaggctggagctgagtatgttgttgagtctactg

SEQ ID NO: 219172 - DNA, 401 bp, Gossypium hirsutum
acccaaatatgactaaagaagaaatagaaaatgaacttaaggcatatcttggagttgagaaggggatctggttgcctcgtggattatatggtgatgatgatacgaatggtcatattgataatatgtgttgctttgcaaagcctggtgttgttgtgttgtcttggattgatgatgaaaaggaccctcaatatgaacgttccatggaagcattcactgttctctcaaatgaaaaagatgcccgtggtcggaaattagaaatagtcaaactccatgtccctgggccgctttatatgacagatgaagaagctgatggagttgttcaagatggtgacgctaaagcgagacttcctggtacacgacttgctgcttcttatgtaaacttctatattgccaatggagcg

SEQ ID NO: 219173 - DNA, 292 bp, Gossypium hirsutum
attacagacaaagttccttcatgatgaacccttggaagctttgtgcagttacaagggtggaggaggttaagaagatgatcaggctactcccgatttgggcaacaacgattatattttggacgacatatgcacagatgatcactttctcggtggaacaagcaaccaccatggagagaaccatatgacatttccaaattccagctggttcacttactgtcttttttgtgggagccatattgatcagcttagctgtatatgatcgttttattattgcactttggaaaaaatggag

SEQ ID NO: 219174 - DNA, 397 bp, Gossypium hirsutum
gaaaaaggggtgatcaccttcgacagcctgaagaagaattcggcattgttgggtttacaggatttgagtgatgatgatttgaggtgtatggtgaaagaaggagatttcgatggcgatggtgcgcttaaccagatggagttttgtgttctgatgtttaggttaagcccagagttaatggaagcgtctgggtttttcttggaagaagcttttgcaacatgatttcaaggattttatttaatccccttcattttgctctttctttcttgtaatgaaattgtagaatttgagatcagaaatttgctttttgtcattgcttctctcattttttttattcattctggcaaatataattatagctgaaaattaaaatggaaactgtataataatttcatttcat

SEQ ID NO: 219175 - DNA, 357 bp, Gossypium hirsutum
cggacgcgtgggcccacgcgtccgtgaatttggtcagatcactagtgctgtggtaatgagggatgctgatgggaaatccaagggctttgggtttatcaacttcgagaacgcagatgacgctgctagagccgttgagttcctcaatggaaagaaatttgacgataaggagtggtttgtcgggaaagctcaaaaaaaatctgaaagggaggctgaactgaaacatcgatttgagcagacaatgaaagaggcagcagataaatttcaaggagcaaatttgtatgtcaagaatttggatgatagcataagtgacgaaaagcttaaagagctattctctcaatatggtaccataacatcatg

SEQ ID NO: 219176 - DNA, 428 bp, Gossypium hirsutum
gaaaggaccaaaagggtttaatctgctgtgctcgttgtagctcaccacccaaactttaacaatggccgtcggtaagaacaagaggatttccaagggaaagaagggaggaaagaagaaagcagctgatccatttgcgaagaaggattggtatgatatcaaggctccatcagtttttacgagcagaaatgttgggaagactcttgttacccgtactcagggtaccaagattgcttcagaaggactcaaacacagagtgtttgaggtttcactggctgatcttcaaggaggtgatgaggatcatgctttcagaaagattcgtttgagagctgaagatgttcaaggaaaaaatgttttgaccaacttctggggaatgaattttacgactgacaagctgaggtctttggttcgtaaatggcaaactctgatcg

SEQ ID NO: 219177 - DNA, 425 bp, Gossypium hirsutum
ttcaaggttgagtaccaaaagcttgggtatacaagcttatccctttcaaagcagattccagtcaggccatatagacacaatgaatatgaaagattcataccaactgcttatccctactacggagctgcattttctacgatggcaggattcttcatcttttcttttgttcatctatataacaagtaaagtgtggcatgtctagtatgctttgcctcggacggtgggattacaatttctagccaacaatggtagtcataaatgtatcgtagaaattttagactttgagttctagtatcaatgatgaaaatcaaaccctaacagatctccaaaaaaggattttgatgcaccatgattttgagtggatacagaaggtgcattcgcagttacatctactttattttaaccctggatgtatttgactttac

SEQ ID NO: 219178 - DNA, 420 bp, Gossypium hirsutum
cgttgacttgtgcttggaccgtatcaggaagcttgctgataactgtaccggccttcaaggtttccttgttttcaacgctgttggtggaggcactggatctggtcttggctccctccttttggagcgtttgtctgttgattatggcaagaaatccaagttgggtttcactgtcttcccatcaccccaggtctccacatctgttgttgagccctacaacagtgtcctctcaactcactcccttttggagcacactgatgtggctgttcttcttgacaatgaggctatctatgacatttgcaggcgctctcttgacattgagcgacccacttacaccaatcttaaccgtcttgtctcccaggtgatctcctctttgactgcttcacttacgttcgatggtgccttgaacgtggatgtaacaga

SEQ ID NO: 219179 - DNA, 396 bp, Gossypium hirsutum
agtaatcaagctcctgggtcaggtagggcatagagagatgctgctgctcgtgccatgcggagctggcattctcaacgtgttctcgataacggtgaggtctgtcatccaatcatcaaggacaagacctctagtccgacgctcaaaagtgacagacaacttaaaaattttggtttattgaagcgtaaaaagccatccactttggactctggtgtccgagtttctcaacttaaagcaactaaatcacagcgttcttttggtaggttggataccgcggttgttgatgttggagccccagctgattgggtgaagattaacgtgcaaaaaaccgttgactgctatgaggtctatgctttggttcccgggcttcttcgtgaggaggtgcatgttcagtctgat

SEQ ID NO: 219180 - DNA, 423 bp, Gossypium hirsutum
  unsure (1)..(423): unsure at all n locations
ttttgtgattgttgtgatggaagtgatgagtatgatggtagcatcctgtgtcccaacacatgtatcatgggtggtaatgtcgagtacaaaactgaagattatgtttctacaactagtcatctgcactctactaaattgaaggaaatgaaaattggaattaaattagaagacttgattcagactcttgcagggttgaagatgataacagtagcagaggtggctcttggttgtgttctggtggttaaatggatatttcataagcgtgtcaagtctaagaaaagacatcatagatgaaggaatctaccgttagcttggtaataatactctagaatatccttgtcctctaattntcactttntacattttaatatgtaggggaaggatccacttatttcataataaaactcaagtgattttataccc

SEQ ID NO: 219181 - DNA, 422 bp, Gossypium hirsutum
  unsure (1)..(422): unsure at all n locations
gaanntccgggtcgacgccacccatccacgctttcgagggtaccagataacatgcgaatgtgtgcaccatactctcatcatataccatggatatccgcgatggggtcaatatcaaagtgaaagctaaaatgatcgagggtgaacgtcccaggggtaagctcactcgtaacttcaagcacctcaacctctatttccacctcaccaaggacgaggagaccggcacgcgtaagctcacgatcgaggcctggttcggtaccaggaagaccagcgctgccatccgtaccgtcctcagccacatggagaatctcatcaccggcgtcaccaaaggttaccggtacaagatgacgttcgtctacactcactttacgatcaacgcctatatcactagcggcaacaagttcatcgagatccagaacttcctt

SEQ ID NO: 219182 - DNA, 418 bp, Gossypium hirsutum
gattcctcccaaaactcaacaatgaaatcaatggtatgagaaatttacttacaaggaacggcttgcaagtttacagaatctggtgcttataatgtttgaggacgatacagttttgataccaaaagaaacagcctggttcagttattttccagacggtgctttcgaacctgtattgcctgtacaagcggccaagctctataaggaagattggatcggtttgaaaactttggatgaagctggaaaagttaaattcgtaaatgtctcgggtaatcacctacaaatctcaacaagcgacatgaagaagtacatggtaccatatttggagtaccaaacacctgcaccaacagggcagacaccgacagaagcttcatcgtatcaatggttttcaaaagttgggcacttttttaaagatttaatt

SEQ ID NO: 219183 - DNA, 421 bp, Gossypium hirsutum
gttataatggggagtagagggtgtggagctgagaaaagagggaatgatgggaggttggggagcgttactgattattgtgtgcatcactgtgtttgtcctgttattgttgttaggcatcctgatgagaaagatggcgggaatggtcagcctgtggtgatagataaggaggccagggtggaggaaaaaggtggcaaatgttaatcctattgatgcctagcaagtccggtaattgcagctttatcccatcagtagcagatagcaaagaagactatgagtcgctcaggattagctcggatgaaggattcagttaaaatggatcctgggattctctttttctactttcatctccgcattgtttaactttttattggtgatgttatcgtatgattgatgaggttcttgatttccttttatggcactc

SEQ ID NO: 219184 - DNA, 398 bp, Gossypium hirsutum
ctctgaaatagcagagaacaaggaagattacaacaagttttatgaggcattctcgaagaacctcaagcttggtatccatgaggattctcagaacaggactaaaattgccgaattgctccgctaccactccaccaagagtggtgatgagatgaccagcttgaaggactatgtcaccagaatgaaggagggtcagaatgatatctactacatcactggggagagtaaaaaggccgttgagaactctcccttccttgagaagctgaagaagaagggttatgaggtcctttacatggttgatgctattgatgagtatgctgtgggacagctcaaggaatttgagggcaaaaagcttgtgtcagctaccaaagaaggtcttaaacttgatgagagtgaggatg

SEQ ID NO: 219185 - DNA, 431 bp, Gossypium hirsutum
  unsure (1)..(431): unsure at all n locations
cacgcgggcgntctgaaatggcananaacaaggaagatttttactttttttatgaggcattctcnaanagcgtcaggcttgttatccatgaggattctcanaacaggactaaaattgccgaattgctccgctaccactccaccaagagtggtgatgagatgaccagcttgaaggactatgtcaccagaatgaaggagggtcagaatgatatctactacatcactggggagagtaaaaaggccgttgagaactctcccttccttgagaagctgaagaagaagggttatgaggtcctttacatggttgatgctattgatgagtatgctgtgggacagctcaaggaatttgagggcaaaaagcttgtgtcagctaccaaggaaagtcttaaacttgatgagagtgaggatgagaaaaaaaagcaggaagctttg

SEQ ID NO: 219186 - DNA, 425 bp, Gossypium hirsutum
gaagcccctgcccttaattcgagtttctttaaggttattgaattaaaacgcgagatctgagcaatggcgacagattcatcaaatggggaacaaaagacaacctcaaagccaccacctttgccatctccattgcgcttttctaagttttatcagtccaacatgaggatcctggttactggaggagctggttttattggttctcacttagttgacaaattgatggaaaatgagaaaaatgaggtgattgttgctgataactacttcaccggatccaaggacaatcttagaaagtggattggccatcctagatttgagcttattcgtcacgatgttactcagccgttgttggttgaggttgatcagatttaccaccttgcctgtcctgcttctccaattttctacaaatacaatcctgtgaagacaat

SEQ ID NO: 219187 - DNA, 330 bp, Gossypium hirsutum
atcaagtacgatccttcaactggtatctacggcatggacttctacgttgttctggaacgagctggttatcgcgttggccgtcgtcgccgatgcaagtcacgtgttggtattcagcacagagttactaaggaagatgccatgaagtggttccaggtcaaatatgaaggtgtcatccttaacaagtcccaaaatattggagcttaagaaatagcagtaacgagctcagtttgagttgttttcagttttggctacttgattttgactagtttgtgtatcagtttctctctttttcctgaatagatttatgcttgagactttcctgttggtttt

SEQ ID NO: 219188 - DNA, 422 bp, Gossypium hirsutum
tgcaacttcagatcaatctgcactaatcttgagcattcctaagcgcaagcccggtgatgaaactcaagaaactttacgaacatctcaattccccagcacacatgttaaggaaaaatgggcaaaaaatctctatcttgcttgtctatgctatgggaggactgtatcatgaaatggggtatcaatggtggtgacaattttcctagggaaaaaagggggaggttccctacatgttatctccatcagtttccttttgatgtgttccccatgttaaatgtttatagcggacattaggatgtcttaaaaatatctcccaagtccttgtactattaaaatgttgcaatttagtcctaattttggttatttctggattttaaaatacaactgttaacaatgtttgctagtgtctgttaaatatgtgctat

SEQ ID NO: 219189 - DNA, 359 bp, Gossypium hirsutum
  unsure (1)..(359): unsure at all n locations
gttggtggaaaacactcccgatgatccccgacaaaggaagccggacataaccaaagcaaaagaggtgctcggatgggagccaaaggtgaagttgcgtgacgggcttccgcttatggaggaggatttccgtcagaggctcggggtcccaaagaagaactgattgaaagttattttacagcaacagaagttacaaatataaagtactattgcttcttttcctttctataatcaaattccaatatgtttatcttcaatgcataataatggcagcaatggagttattttggattttgtttttaatgttttttgaacgatatttgagttaaatggaacacaatttttgcctttccttnnnnaaa

SEQ ID NO: 219190 - DNA, 422 bp, Gossypium hirsutum
gtattccatacctgaatacctacgatggacgcacaatacgctacccagaccctttgatcaaagccaacgacaccatcaagcttgacttagagagcaacaaaattgttgatttcattaagtttgatgttgggaatgttgtcatggtcactggtggaaggaacaggggacgtgttggagtgattaagaacagggagaagcacaagggtagcttcgagacaatccatgtacaagatgctgctggacacgagtttgcaactcgtctaggcaatgtcttcacaatcggtaaaggaacaaagccatgggtttcgcttcccaagggcaagggtatcaagttgtcgatcattgaggaagcgaggaagaggcttgctgctcaggctgctgcttaaacctatcatatctggagtttttttttttgtcgaaag

SEQ ID NO: 219191 - DNA, 397 bp, Gossypium hirsutum
cgagtccataaaaaaatcaaatgctgggacgaatagggcggcatcaagtagtacttctttgaacacaaggaagctcgatgaagacactgagaatcttgctcatgaccgagtgccaactgagctaaagaaagccatcatgcaagctcgaatggataagaaacttacccaggctcaacttgctcagatgatcaatgagaagcctcagattatacaggagtatgaatccggaaaagccatccctaaccaacaaataattggtaaactggagagggctcttggtgcgaagctgcgaaggaagaagtgagtgagtaagagtctcgtagaaagaacaaacagaacttgaatatcgcccagaatcttgagtcctaaaacttggtgatgtaaatgaatgttttat

SEQ ID NO: 219192 - DNA, 305 bp, Gossypium hirsutum
  unsure (1)..(305): unsure at all n locations
aattaaactacatctancaacctcgccgcaatctcataccattccctccctccatttatttatggttcgctcactccacttacttctcaggctcacaacaatacaggcctgttactgttcccgatctcactcaacaaatgtgctatgccaaaaacatgatgtgtgctgctgatcctcaccatgggcgatacttgactgctttagccatattccgcgccaagatcagcaccaaggaattacgatgaacaaattattaatgtgcacaataagaactcatcatactttgtggagtggatccccaataa

SEQ ID NO: 219193 - DNA, 360 bp, Gossypium hirsutum
agatgcgatcagataagatcagcaattgaatcaagcacttctgattacgacaaggacaaattacaagagaggcttgcaaagctctctggtggcgttgcagttttgaagattggaggagcaagtgaagcagaagttggtgaaaagaaggatagagttactgatgccctaaatgccacgaaagctgctgtggaggaaggaattgttcctggtggtggtgctgcacttctttatgcctctaaggaacttgaaaacctggagactgcaaactttgatcagaagatcggtgttcagatcatccaaaatgctcttaagatgcctgtacatacaattgcatctaatgctggagttgagggtgcagtg

SEQ ID NO: 219194 - DNA, 337 bp, Gossypium hirsutum
ggctccgtcatcacggatggcaatgacaagaagagtgcatcctcttgtttcattgaatccttaccagggcaattggatgattaaagttcgtctcacaagcaagggaaacatgcgtacctataagaatgctagaggagaaggttgtgttttcaatgtggagttaacagatgaagatggtacacaaatacaagccacaatgtttaatgaagctgctaggaagttctatgagaagtttcaactggggaaggtctattacatatcaagaggaacactaaaagttgcaaataagcagtttaagactgttcaaaatgattatgaaatgactttgaatgagaat

SEQ ID NO: 219195 - DNA, 426 bp, Gossypium hirsutum
gcatccgacatggagaaatttctatgcgaccggttgcttgacccgacacaacccatatccgagcgcttccgagctctcttctcccttcgcaacctcaaaggccctgcccctcgcaacgctctcattcaagcgacaagggattcatcaaatttgttggctcatgaagctgcatttgcattgggtcaaatgcaagatgctgaagctattcctgctttggaagtagttctaaatgatctttctttgcatcccatcgttcgtcatgaggcagctgaagcacttggtgccattggtttggagagtaacattcctcttttgaagaatagtttggttctagatcctgctccagaagtccgtgaaacatgtgaactggctctccagcgaattgaggagttaaaatccgatggtagtgatgacaaatcatccatg

SEQ ID NO: 219196 - DNA, 312 bp, Gossypium hirsutum
agaaaaacaggggtctccatggaaagggtcatttgcaccacaagaaccgtccttctcgcagggcaacctggaagagaaacaacactctctcccttcgccgctaccgctgagttactgtgttccttagactttttatcctagttgattttagaagtcattgttttgagtttgaaatttttggaagttttaaaaaactgactctttgaatttacatgcaatttatttttgttttggatgctatgaatttctgaagttattgctacttgcttttcagaataactacttgcacatcatttgcctatcttgggctct

SEQ ID NO: 219197 - DNA, 392 bp, Gossypium hirsutum
cccaattgttgaaaggcttacaatctcacttatgatgcatggccgaaacaatgggaagaagcttatggcagtcaggattgtgaagcatgccatggaaattatttatctcttgactgatcagaacccaattcaagtcattgttgatgctattatcaacagtgggccacgtgaagatgctactcgaattggttctgctggtgttgtcaggcgtcaggctgttgatatttctcctcttcgtcgtgtgaatcaggccatctatcttttgaccactggtgcacgtgagtctgcattcaggaacattaaaacaattgccgagtgtttggctgatgagcttattaatgctgctaagggatcatctaacagctatgccatcaagaagaaggatgaaattg

SEQ ID NO: 219198 - DNA, 349 bp, Gossypium hirsutum
cccacgcgtccgcatgaacccagctcgctccttcggaccagcagtggctagtggcgacttcaacggcatatggatctactgggtgggaccactgatcggtggtggattggctggtctcatctatggaaatgtgttcatgaactctgaccatgcaccattgtccaatgacttttaatcaagttattctcaggacagtctaattcgcttaatttgatcttttaatccattgcttactgtaataaaatggcacttcttgttgttctttcctcttttagctttgggtttggttttgttttgttattgtttggaaagttattgtcgccaatcgttgctattgtggaaatggatg

SEQ ID NO: 219199 - DNA, 425 bp, Gossypium hirsutum
cttcaaaaggatcaacatgggatgaaattgatttcgagttcctcgggaatttaagtggcgacccttacattcttcacacaaacgtgttcagtcaaggcaagggtaacagagaacaacagttttatctctggtttgacccaactgcagatttccatacttattcaatcctttggaacccccaacgtataatcttctctgttgacggtacacccattagagagttcaaaaacatggaatcacttggtgtcccatttcctaagaaccagccgatgagaatttactctagcttgtggaatgccgatgattgggccacaaggggtggtttggttaagaccgattggacccaagctcctttcactgcttcttacaggaacttcaatgccgatgcttgtgtgtggtccaatggagcttcttcatgcaaatcg

SEQ ID NO: 219200 - DNA, 423 bp, Gossypium hirsutum
gcttgccatttcttctgaaaagagatagagattgaaaatggaggctgatcaaaagggtaaatccgatatctccttcgctggaacctttgccagcagcgctttcgctgcttgctttgctgagatatgtacaattcctttggacactgctaaagttaggctccagcttcagaagaaagctcttggtggagatgctgcagccttaccgaaatacaggggtttgttaggtacagttggtactattgctagagaagaaggtttagctgcactatggaaaggtgttattcctggattacatcgccaatgtctttttggtggcttgagaattgggatgtatgagcctgttaagaatttttatgttggaaaagatcacgttggagacgttcctttgaccaagaagatacttgctgcccttacaactggtgc

SEQ ID NO: 219201 - DNA, 398 bp, Gossypium hirsutum
cacggcttctgattactggctcactaagcatgttcagtaataggtttttcagatctggtgtgcagaaagctgggagccaaactaaacatgagaaatcaggcaatgaacaatttttgactgaaattagcaaatggattttccatgaaagaggtcatcttaaggctgtaaatgtgaaacaccacagagttggggaaacagatgaacctgcattatacaggattaatgatgagttggaatactcagttgagatctatgagtggtctggaacaagctgggagccatatgttgctaatgatgtccaagtgcagttttacatgatgagcccctatgttttgaaaactttatcatctgacaaaaagggtctatattccgcatcatttaaggttcccgatgtttat

SEQ ID NO: 219202 - DNA, 378 bp, Gossypium hirsutum
cccacgcgtccgaaagctcctctttctgtgaaagtgaaagtaagaatcagatttttggtgataatgatggagccttgatatcatacaaagatccggatccattgcttccctgtttcctgtaagcaaaaaagagagaaaatgaaggttgttgctgcttatttgttggctgtacttggaggcaatgcctctccttcagctgatgatcttaagaacattcttgccagcgttggagctgacgctgaagaggaaaggctccagcttcttttatctgaagtgaagggaaaagatataaccgagcttattgcatctgggagggaaaagcttgcctctgttcccagcggtggtggtgttgctgtggcggcatctgcacccggagcc

SEQ ID NO: 219203 - DNA, 423 bp, Gossypium hirsutum
gtcctcttctttgaccaagtcagggctacttcatcagctgaaaacagcacgtccgatctcccaggttccatcagggcccttctccctggtgggtctcatggcagctcaaggtccactacaacgaacaccgaagaggattgggattcggtgccaacagctgatgatatcaaagctttgaaaggggagcttgctactctaagattaggcagtaatgatagtggaaatgaggcagctaaatccgatgttgaaaaggttgctgctagtcgaatgaaaggtttggtgatgtcaaaaatattctcgaaactttggtcgagtaaggaaagacatggtgaaattagcagctcggatacatcagacagccatggatctgtgaatgcggaagaaacaaagtccaccccttctagaagtaggagacattcacta

SEQ ID NO: 219204 - DNA, 417 bp, Gossypium hirsutum
tctcattcttttgtttccttcaaccaatgcggactggccaccttctcctggttactggccaagctctaaatttaggcctatgagctttcacaaaggctttaaaaatctctggggtccttcccatcaaagtgttaaccacaatgcattaaccatctggcttgacaaaacttcaggaagtggattcaagtcagttcgtccatttcgatccggttacttcagtgcctcgattaaggtccaacccggttacactgcaggggttataacagcattctatctatcaaacaacgaagctcatccggggttccatgatgaagtggacatagagttccttggaacaacatttgggaagccttatactttacaaaccaatgtttatgtcagagggagtggggatgggaaaatcattggagggaaatg

SEQ ID NO: 219205 - DNA, 420 bp, Gossypium hirsutum
ataagctcgacatatccttgggtgtggctttagggtcatcaactcagatttctatgttggggatacctttttgtgtggttattgggtggatgatggggcaagaaatggacttaaacttccaacttttcgagacagcaactctgttcattaccgttatagtcgtagccttttttctgcaggaagggacgtctaactacttcaaaggactaatgcttatactttgctatctgatagttgctgcgagtttcttcgtacatgaagatcctcccacagatgatcaaagtaagcaaccgggaacctgatgaatgacacagttgaatcgagatatggaaattcggagcccttgaaagatgcaagaggcaagaagcaagaacccatggagatttgaaacaagtttgtcccacatggtgtaaatagtac

SEQ ID NO: 219206 - DNA, 385 bp, Gossypium hirsutum
cagaggttgaccctgccctcaaccccgaccatgttttacacatactccataaatgccctgatcagatcccagaccccaaggccgtccagtatgtgagaaacgaccgtgggacacccatggttttggataacaactactacaggaacatactggacaacaagggtttgttgattgtggatcaccaactggcgtacgacaaaaggaccagaccttatgtgaagaaaatggccaagagccaagactatttcttcaaggagttctcaagggccattactctcctctctgagaacaatcctctcactggtagcaagggtgagatcaggaagcaatgcaatcttgcaaacaagcttcactaaaatgcctcgccaaagagaaagccgagtgt

SEQ ID NO: 219207 - DNA, 368 bp, Gossypium hirsutum
  unsure (1)..(368): unsure at all n locations
accacacanacnccataaatggctctggtttgattccaaacccgaccgcccacacaaatannanaaacnaccgtnttacactcatgtttttggataacatctactacaagaacatactgtacaacatggttttttttattgttgttcaccaactgtcttactacaaaatgaccataccttatatgaataaaattaccaatatccaagactatttcttcaattagttttcaatttccattactcttcttttttaaaacaattttttcactaatatcaactgtcaaatcattaaatcaattcaatcttacaaacaatcttctttaataattcttttctaaacataaattttctatttttttcaaataaaa

SEQ ID NO: 219208 - DNA, 386 bp, Gossypium hirsutum
gcaagggttaataatccacagtggttgattgtcgttgggggttgcacacatgtgggttgcattcccttgccaaatgctcgtgattatggtggatggttcacgcccttgccatggttcccattatgatgtctgtggcaggattcgcaagggtacagcaccatacaacctgtaagtacccacttacacctttttggatgagagcaaactgcttatactttaaaaattggtagcgttcctttgggttctcgtgagttcatataatgttattagataatgccgaacgcttgttacaaaattttgcttttacttgcctcggactttgacggcattggtagtgttgattttgtaactggaataattgcaactgcaaccagttcatatttctc

SEQ ID NO: 219209 - DNA, 301 bp, Gossypium hirsutum
ttgacggaccgacccacgcgtacggcgagctctcaaggtagctaaaagaaaattgggaactcacaagagagccaagaagaagcgtgaagagatgtcgagtgttctccgcaagatgagggctcatcatcctggaggtggagacaagaagaagtgaagcttttatttttgttgatttatggacaagcttgaaggtttgatttagtagctgttagagattttgtttagcactttgtttgagactgaaaatcatgcactcaaatttgctgctttacatgaattactgcaagtttttttttttttt

SEQ ID NO: 219210 - DNA, 417 bp, Gossypium hirsutum
gtacttcgcaatgagccctcaaatgagaaatgtgatgtttatagctttggaatcattctctgggagctcgccactttgagattaccttggagtggaatgaatccgatgcaagttgtaggtgcagtaggtttccagaatcgacgcctcgacattcccaaggagctcgatcctttggttgcaagaataatttggcaatgctggcagactgatccgagtttgcgcccatcctttgcggaccttacggtagctttaaaacccttacagcggcttgttatcccattgcatcaagatcaatcaagctcccctatgccacaagggatttcagtaaattctacaccctgaaatcaaaatactcagctcctcaattgtgaataagaagaaaagttcgctgtatgttcctttcccttcacttcaatg

SEQ ID NO: 219211 - DNA, 423 bp, Gossypium hirsutum
cgacatatgcacagatgatcactttctcggtggaacaagcaaccaccatggagagaaccataggacatttccaaattccagctggttcacttactgtcttttttgtgggagccatattgatcagtttagctgtttatgatcgttttattattccactttgtaaaaaatggagaggtgaaccagggtttacaaatctgcaactgataggcataggtctgttcctgtcagccatgggaatggcagctgcagcagtggtagaggtgaaacggctatcagtggcaaagaaatacaatgaaacaaccacactaccaataaccgttttctacctgattccgcaattcttcttggtgggtgcaggagaaggatttatatacactggtcaactggatttcttcatcactcaatccccaaaaggaatgaaaa

SEQ ID NO: 219212 - DNA, 368 bp, Gossypium hirsutum
agcacatagaagaattctatggcaaagtggctagactacacggatccgttaagaatttaccagcgtcttgcacttcaagaatgggagccagaccagagttgtgtttcttccctcagtacgtggtgcagactatgcaaacaccaatcttcttcgtaaattcagcttatgactcctggcagattaagaacattttggctcccagtgctgctgacaaaagtaaggcgtggaaaagctgcaagcttgacttgaagaagtgtacagcagcgcagctcaaaaccatccaagatttcaggacgcaattcttaagtgccctgaacagagccggggtggtcaactctccatctaaaggaatgttcatagattcgtgc

SEQ ID NO: 219213 - DNA, 405 bp, Gossypium hirsutum
agaatgtcgatggactctgattatcttgttgacaggcgtattgtgatcaaactacttgtgacctacttccagagaaaccagagcaaagaggttttggaacttatggttcggatgctgggattctcagatgaagacaagcagcggataggtattgctcaacaaggtactggcaaaggtgttgttcggggtgttttgggtctacctggtcgtttggttggtggcatcttgggtggaggttcggctgatgtacctgcaagtatagcccctgataatcagtcaattgcagatctttgggttgattttctactcaaggaaaccgaagaacgagaaaagagggcggaaggtgctagtaaatccaatgaagaccttaatggaagaaatccaaatgctacaggacctactaca

SEQ ID NO: 219214 - DNA, 419 bp, Gossypium hirsutum
aaatagaagagaaactaggatgtggagttaatgcttgctgatgattaggtttgaaaatggaatttcacaagtgaatgagagagtttgcctagttcgtaaagcaccaagctttagtggtccgttgatgcttcctactcgagcatctgcaaacagtttatcagctccaattaaatcatctggagggtttagggattctctggatgacaagtcaaaggctaatctggtgcaaataaaaggtcgattttcagtaacatctgaaaatttatatcttgtaaaggatattcctctaagttcagtttcgcgccgatcgtcacagacttcacctctcagaaagtctgctagtgtgggtgactggatacctgaatacaaacaagcggttcgtgcactagatcttctcctcaacatggtttaatcctaac

SEQ ID NO: 219215 - DNA, 377 bp, Gossypium hirsutum
caaagcttcacaagaaggaaacttgcgaagcagttaccattgttgagaccccgcctatggttgggggtggagtagtcggatgtgtggaaactccgcgtggtcttcgtactttaggcaccgtgtgggctcagcatttgagtgaggaggttaaacgaaggttctataagcactggtgcaagtctaagaagaaagctttcaccaagtattccaagaagtttgaatccgaagatggtaaaaaagatatccagtcacagcttgaaaaactgaagaaatattgcactgtgattcgtgtttcggctcacactcacataaggaaaatgaagggtttgaagcaaaagaaggctcatttgatggagattgaagtcaatggtggaact

SEQ ID NO: 219216 - DNA, 394 bp, Gossypium hirsutum
attttgcccatttcactgctctcccctagatcgtctccaagagagagatctccttacaggtaccgtacacattcacacacacattcactgaatgggtcgagtcatccgagctcaacgtaagggtgctggttccgtcttcaaggcccacacccaccaccgcaagggtcctgctcgtttccgcagcctcgacttcggtgaacgaaatggctacctcaagggtgttgtcaccgatgtcatccacgaccctggccgtggcgctcctttggcccgtgtcgtcttccgtcaccctttccgttacaagaagcagaaggagcttttcgttgccgccgagggtatgtacactggacagttcgtctattgtggtaagaaggctactcttgtggtcggaaatgta

SEQ ID NO: 219217 - DNA, 421 bp, Gossypium hirsutum
caatcagtcatcgccgctaaaaactttaaagaacaaaaaaatatcttgaaacccggagatgtcggacgaggagcaccatttcgaatccaaggccgacgccggcgcctctaaaacctatcctcagcaggccggtactatccgcaagaacggctatatcgtcataaaaaaccgcccatgcaaggttgttgaagtttccacctccaagactgggaagcatggtcatgctaagtgtcactttgtcggaatcgacatcttcactggcaagaaactggaagatattgttccatcttcccacaactgtgatgttccacatgtcaatcgtactgattaccagttgattgacatttctgaggacggatttgtgagtttgctgactgacagtggagacaccaaagatgatttgaggcttccaactgatgac

SEQ ID NO: 219218 - DNA, 232 bp, Gossypium hirsutum
gtctctactgacatgtccgccaagcagccagctacagacctttatgtgagactgaacactggcctggtggcatcctctatggaatgggttccacgtccatctaacggcggacgatatactagctccagacttcatttcgcgagcaacttaataagtaaatttgctgtttttgcacctaatgacaataggattaccgagcttttcaacgttggtgactacaaacaacctctca

SEQ ID NO: 219219 - DNA, 425 bp, Gossypium hirsutum
  unsure (1)..(425): unsure at all n locations
ctggtttcaaatgcggtattaactatcagcccccaactgttgtacctggaggagatcttgctaaggtgcagcgagctgtttgcatgataagcaataatacagcagtggctgaggtgtttgcacgcattgaccacaagtttgatctcatgtactcaaagagagcttttgtgcattggtatgttggcgaaggcatggaagaaggtgaattctcagaagcccgtgaggatctggctgctcttgagaaggattatgaagaagttggtgctgaaggtggagatgctgaagaggaaggtgaagaatattgatgtgcttatgcaaaatcatctattttgaagatcggttcaccgtgtgagggtatgcccaccctcttttcctatatccttcctatcgntctttatttgtgaggtttgcgaaattatgcatgt

SEQ ID NO: 219220 - DNA, 427 bp, Gossypium hirsutum
ggagggggccgcgcgaacacgagcccccaactgccacaaattatgacgtacactctccataagaaggagatgttaggctgatgcaccacctcaatgtgcaatggaggccaccaacctaggccatgggcctacttgatcgcccatagaccccgtccaggtatgtatggatgcacttgccccttttcctcttttttaaaccactaacctccacctgcatcttgcttacctcagcgatgtgggataataggaaatatggcttcttaatttttaaatccaataactgccaataactggctttctttgggaagttggggcctgcaaaatgcactaaccagtgaccaatttgattggtaatctaattacataaagttgtaataatctttgttgtgaaaatgagtaatttctttagattattgggttatgattt

SEQ ID NO: 219221 - DNA, 406 bp, Gossypium hirsutum
cccacgcgtccgcaagaatcaaactctaccttcaaaactaggagaaaaaactaaaaatggacgcaattgactcagtttttgatccgctaagagagttcgctaaggacagtgttcgtcttgtcaagagatgccacaagcccgatcgtaaagaatttacgaaagtagcggtccgtacagcgatcggattcgtggttatgggattcgtaggatttttcgtcaagctcatctttatccctattaacaacattattgttggatccggttagccttgcttcatgttacagactcacaggaaggacgggaactggtagaaattttcaacactgagataaaagaagaactgtatgtttttagatcaagagctatatcatgtgagtttttgaactagttttaatttaagccccgg

SEQ ID NO: 219222 - DNA, 416 bp, Gossypium hirsutum
gaacaaaatgtgaagaggataaaggattataggcaaagggtcgaagatgaactctcaaagatatgcaatgacatactctcagtcattgataagcacctcattccatcttcctccaccggggaatcaactgttttctactataagatgaaaggagattattttcgttatttggcagaatttaaggcaggagatgatcgtaaagaagctgctgatcagtcacttaaggcttatgaggctgccacttccactgcaagctcagatttgcctccaactcacccaattagacttggcctggctttgaacttctcagttttctactatgagatattaaattctcccgagagggcttgtcatctggctaaacaagcatttgatgaggctattgctgagcttgatagccttaatgaagaatctta

SEQ ID NO: 219223 - DNA, 407 bp, Gossypium hirsutum
gttcaaagagaaaaacaaggtggacaaggttgttgtactctggactgcaaacactgagaggtacagcaatgtcattgtggggctaaatgacaccgtggaaagccttatggcttctttggagaagaatgaatcagagatttctccttccactttgtatgctattgcttgtgttcttgaaaatgttcctttcatcaatggcagcccacaaaacacctttgttccagggttgattgatttggctattcaaaggaactgtctgattggaggagatgacttcaagagtggccagaccaagatgaaatctgtcctcgtggatttccttgttggggctggtatcaagccaacatcgatagtgagttacaaccatctgggaaataatgatggcatgaatctgtcagcaccccaaa

SEQ ID NO: 219224 - DNA, 421 bp, Gossypium hirsutum
cgaagattgcaagctactatgaggaatattatcaatctaaaggagttaagttcgtcaaaggaactgtcttgacgtcgtttgaatttgattctagtggaaaggttatggctgttaatcttagagatggaagtcagctacctgcagacttggtcgtggttggaatcggaatacgcccaaacacgagcctttttgaaggccaactaacacttgaaaaaggtgggatcaaggtgaatgggaagatgcaaacaagcaacgactcagtttatgcggttggagatgttgcagcatttccagtcaaactatttggtgaaactcgcagactggagcatgttgattcagccagaaaatctgctaaacatgctgttgctgcaataatggaacccaagaaatcaggcgagtttgactaccttccattcttcta

SEQ ID NO: 219225 - DNA, 386 bp, Gossypium hirsutum
agacaaaatggagatgcatgtcggtgccgtgcaagctggagaacgtgctttgataatagatgatgtcgttgccaccggtggaaccttgtctgctgcgattaggctacttgagcgagtcggcgtgcatattgtggagtgcgcttgtgttatcgaattatcaggtttaaagggtcgggaacggttaggagatacaccgctgtttgttcttgtaaactcggcttgatatcacaagtgttgtggtggtggtagatgggcattgtttgttgcactttttagagttttcaatatatagctacaactttgcctaaaggcctaacaagtctatttggttgaataaaaaaggctgcatttggtaaaagttttagtggattgaaccatgataatat

SEQ ID NO: 219226 - DNA, 424 bp, Gossypium hirsutum
cttgtgctcactcggctacaccgtcgaccatgtcaagaccatagtgaaacgccccaacattacatgttcgacgaaattcaaggaccctggtgaactcaattacccatcgttttcagtcttgtttgggggcaaaagggttgttcgatacactcgtgaattaacaaacgtaggccctgcaaggtccatatacaaagtcacagtaaatggaccatcgacagtagggatctcagttaggcccaagacactcatctttagatccgtgggtgaaaagaagagatacacagtcacctttgtagctaaaagaggaacaagcccaatggctaaacctgaatttggttcaatagtatggggcaatgctcaaaaccaagttaaaagcccagtttccttctcatggtcattgatgtgagagtgtcccacagtttat

SEQ ID NO: 219227 - DNA, 417 bp, Gossypium hirsutum
atctatctcctcaccactggtgctcgtgagtctgcattcagaaacagtaaaactatcgctgaatgtttagctgatgagcttattaacgcagcaaagggatcatctaacagctatgccatcaagaagaaggacgaaattgagagagttgccaaggccaatcgttgaggaattggtaggagttcgcataaaccatggcggtggacacttttgttttttcattcagtactttataagttacctattttatgttccagacataatatgaatgttccgttatttaagttgagatgttattgaagaaaaaaaactggagtttacaaaagtgtcaagatggtcaaaaaacacaccatgtgacgataattcaataaccacctatttatagctgataagcgcaggtcaaggattatgtatgatatg

SEQ ID NO: 219228 - DNA, 409 bp, Gossypium hirsutum
aacaaggagtaaggcacagctcaatgcaactctcaaccattacaatacctcattcggcaatgctatcaacaaggatttgaaggctgatcccagtgatgaattcctcaaattactaagagctgtgatcaagtgcttgaccaccccagagcaatatttcgagaaggttctacgtcaagccatcaataagttgggatccgatgaatgggctcttacccgagtcgtcacaactcgtgcagaggtcgacatggtacgtattaaggaggcatatcaacgaagaaacagcatccctctcgaacaagcaattgctaaagatacttcgggtgactatgagaagtttcttcttgccttgatcggagctggagatgcatgaaccgtcttcggtattaagttcctctgtatgaatgtctag

SEQ ID NO: 219229 - DNA, 424 bp, Gossypium hirsutum
attgactacggggagtttgtagctgctacgctgcacctaaacaaaatcgagaaagaagatcatctatttgctgccttctcctactttgataaggatggtagtggttatattactccagatgagctccaaaaagcttgcgaggagtttggcatagaagatgttcgccttgaagaaatgatccgagaagttgatcaggataatgacggacgcatcgattacaatgagtttgtggcgatgatgcagggtggaaatgttgccggtgctggtaagaaaggcctgcaaaatagttttagcatcaagtttagagaagcattaaaattttagtacaggcaattgcactagttcttgttccttttttattttcacctttcaagtttttgagggaactgaggtttgtatagtaagaagttacctattgttcttt

SEQ ID NO: 219230 - DNA, 417 bp, Gossypium hirsutum
gttttcctcaccttaggagcagtgatgtggttcttctatggccttttgttgaaggatatgaacgttgctgttcccaatgtacttgggtttatctttggaattcttcaaatgattctttacgccatatacaagaactaccccaagaaaatggtggaagatcccaagcttcaattatcggctcagcaagtagtcgtcgacgtcgtcaaactgggatcgacgacggtgtctctggaagtgaacgcggtgggtcctaaccccaacaatggtgacggaaccggtgaagctcaaaatatcaagactaacaacaccgcagatgcttcaaacaaagtctgaaagtggaattagaattattctaagcatgcaacgtcatattgtgaggtttttgcatggaaaaatctgggttgaaacccatgcaaa

SEQ ID NO: 219231 - DNA, 411 bp, Gossypium hirsutum
gtgagtgatgcggatatccgcaagtaccatgcatttgcacaaacattgcagcaatcaaggggatttggaagtgaatttaggtttgctgaaactggttcaaggactgcagcatctgatccttttgcagcttctgctggtggagctgatgaagatgacctttacagttaaattacctttcatctgtgtttgcttatgggtctttcatatgatatttacatataaacgtagtgttaattgaactgtatgatattaagaacacattggcacagatcttgagcctgtgggtgctcaatggagtttagaaaacaggttttgttattttggaattccaagtttttattttctactagagttaaattcaaattttacccttttcatcatataaatagaatttacaatatttagtgttcg

SEQ ID NO: 219232 - DNA, 445 bp, Gossypium hirsutum
tatttcctttggcttaggataggcctaataagaaaacaaataattccaattcatatatgaacatttttgcctccttatttcttgaaaatgtggaattggaattcctttcctttggcttcaggataggcctaataagaaaacaaatgattccaattcatatatgaacatttttgcctccttatttcttgaaaatgtggaattggaattccccgaggaattccgatctcatttcctttggcttcaggataggcctaataagaaaacaaataattccaattcatatatgaacatttttgcctccttatttcttgaaaatgtggaattggaattccccgaggaattccgatctcatttcctttggcttcaggataggcctaataagaaaacaaataattccaattcatatatgaacatttttgcctccttatttcttgaaaatgtggaa

SEQ ID NO: 219233 - DNA, 406 bp, Gossypium hirsutum
gccgcaccgaggaaggaagcagaaggcaagcaaaatgaagaccattctttcttcagagacaatggacatccctgatggggttgatattaaggtgaaggccaagatgatcgaggttgaaggtcccaggggtaagctcatccgtaacttcaagcacctcaacctcgattttcatcttatcaaggacgaggagagcggcaaacgcaagctcaggatcgaggcttggtttggctctagaaagactagcgccgccatccgtactgctctcagccacgttgagaatctcatcaccggcgtcaccaagggctaccgttacaagatgaggtttgtttatgctcattttcccatcaacgcctccatcactaacggcaacaagtccatcgagatccgtaatttccttggcgagaaa

SEQ ID NO: 219234 - DNA, 422 bp, Gossypium hirsutum
caggcgtacgaatgacatcgccatctttcaacatctggttattgtatcacaatgaacacggctcacaccaggatggtaacaaactccatggggccggcaacatcaacccttaccaatgtccatctaaggatacatttgcattttagactgccacattaccatataccatgcatgttcttctacaagaaatgttgcaggacatgcctttgtgttcctccaacgtattataggaacaaacaatttaaaaccttatacaacatctgcaaaaccaacgaaggaggccccaaatgcctttaaattactcaaaaaaagacccttttattactttcatacattattatccctatcaaatttctattttaaattcaagtcattgaatcatagtgtcgcgctgtgatactaactctatatcaaacgttctt

SEQ ID NO: 219235 - DNA, 409 bp, Gossypium hirsutum
gaaccgaacgacaacctgccgccgcaacaatgaagtacaacccgcgtgtctcctcctctcgccgcaagagccgaaaggcccatttcacagcaccttcttccgtccgccgcgtcttaatgagcgcacccctctcatccgatctgaagtccaagtacaacgtccggtctatgccggtgcgcaaggatgacgaggtccaagtgattcgtgggacctacaagggacgggaagggaaagtggttcaagtgtaccgccgcaaatgggtgatccacatcgagcgcatcacgcgcgagaaagtgaacggttccaccgtcaacgttgggatcaacccatccaaggttgtcatcaccaagctgaggctggacaaggataggaagtctttgctggatcgtaaggctaagggacgcgtcgc

SEQ ID NO: 219236 - DNA, 362 bp, Gossypium hirsutum
gtgctgccaaggtcgtcggaaaagtttagtcagctctggatggcaagctgactggaatggctttgcgtgttcccactgttgatgtgtctgtggttgacctcactgtgagacttgagaagaaggctacatatgatgaaggttgggctgctatcaaggccgaatctgaaggcaacttgaagggaattcttggttatgtggacgaagatttagtctcaactgacttcatcggagacaacacgtcaagcattttagatgccaaggctggaattgctttgaatgacaactttgctaagcttgtgacttggtatgacaactaatggagttacagttcccgtgttatctactagatccgacacatgtct

SEQ ID NO: 219237 - DNA, 413 bp, Gossypium hirsutum
gatgagtttcctttctgtgtccatcttgtgagttgggagaaggagaacgtctcaagtgaggcattggaagctgcccgtattgcctgcaacaagtacatggccaagtttgcagggaaggatgctttccatttgagagtgcgggttcatcccttccatgttctgcgtatcaacaagatgctttcatgtgccggtgctgataggcttcagaccggaatgaggggtgcttttggaaaacctcaaggaacatgtgccagagttgacattggtcaggttctgctctctgttcgttgcaaggatagcaacagccatcatgcacaggaggccctccgtcgtgcaaagttcaagtttcctggtcgtcaaaagattattgttagcaagaagtggggatttaccaagtacaaccgtgctgatta

SEQ ID NO: 219238 - DNA, 402 bp, Gossypium hirsutum
attgccatctccatggttcaaactttggttatggcatcacatggacatggtggtcaccattatgataacaaacgttatggacctggaagtctcaagccttaccaatgtccatctcagtgcacaaggaggtgtagccagacacagtaccataaaccatgcatgttcttctgtcagaaatgttgcaggacatgcctttgtgttcctccagggtattatgggaacaaacaagtttgcccttgctacaacaactggaaaaccaaggaaggaggccccaaatgcccttaaattactcaaaagaagaaccctttttttcttttttacattattatccctataaatttcctatttgaaattcaagtcattgaagcataaaggtgcacttgtatactaactatatatttt

SEQ ID NO: 219239 - DNA, 422 bp, Gossypium hirsutum
aaatcgtcatctcctagctcgtaagtacagatccaaaaagtccttgactccctgtccaattcttctctcttaaaactttaaaagcaatggagaatctatggcgagccgcaacgcgtcaggatccgaatccggaagactacaaaggcgtcgatttctggaccaaccccgaacgagctggttggttaacaaaacaaggcgattatatcaaaacttggcgacgccggtggtttgttttgaagcgaggcaagctgttatggttcaaggaccctggctccgtcgcccgcacctccgctccacgcggcgttgtatcggtggacctttgccttactgtcaagggagccgaggatatcgtcaaaaaggccttcgctttcgagctatcaacacgagattcaaccatgtatttcgtcgccgatacggagaag

SEQ ID NO: 219240 - DNA, 418 bp, Gossypium hirsutum
catgtctccatgggtggcagacatggaccagaatactcgtgacgttatcatgcgtgaattccgctctggttcatctcgtgttctcatcaccaccgatctccttgctcgaggtattgacgtgcagcaagtctctctagtcataaactatgatctgcctactcaaccagaaaactacctccaccgtattggtcgaagtggaaggtttgggagaaaaggtgtggccatcaactttgtgactacagatgatgagaggatgctttttgacatccaaaagttctataatgtggtcattgaggagctgccatcaaacgttgctgatctcctttgatgagattagacaccctttttgaatattgttgaggcaaggtgttttgttgttttggcaagtttcttatttttctccctatctagcgtctta

SEQ ID NO: 219241 - DNA, 422 bp, Gossypium hirsutum
gtttctctcttcaggtaaattcttggttgtttcgttcgttttaagaacagagattcgaagatgagtaagcttcagagtgatgcccttagagaagctatttcaaccattgtggctaattccaaggagaaaagtcgcaagttcaccgagaccattgaactccagattgggctgaaaaactatgatccccaaaaagacaagcgtttcagtggttccgtgaagctgccacacattcctcgtcccaagatgaagatttgcatgcttggagatgctcaacatgttgaagaggctgagaagattggtttggattatatggatgttgaagcattgaagaagctaaacaagaacaagaagttggtcaagaagcttgctaagaaatatcatgcatttttggcctctgaatctgtcatcaagcagatcccccg

SEQ ID NO: 219242 - DNA, 420 bp, Gossypium hirsutum
ggaagattagcaaaagctatcctctagcaattactaaagttgaggaatctggtgagcacactatattaggtactggagagttgtacttggactcaattatgaaggaccttagggagctttattcagaggtggaagttaaggtggcagatcctgttgtttcattctgtgaaacagtggtggagtcttcatccatgaaatgctttgctgaaacacccaacaagaagaataaaataaccatgattgcagagccattggagagaggtcttgcagaggacattgagaatggtgttgtaagtgttgactggagtcggaagcaacttggtgacttcttcaagacaaaatatgactgggatttgcttgctgcacgttccatctgggcatttggccctgataagcagggacctaacattttattagatg

SEQ ID NO: 219243 - DNA, 413 bp, Gossypium hirsutum
ctctggtaaatgttatagttttgttcgtggaaagaacagagattcagagatgagtaagcttcagagtgatgcccttagagaagctatttcaaccattgtagctcagtccaaggagaagcagcgtaagtttattgagactattgaactccagattgggttgaaaaactatgatccccaaaaagacaagcgtttcagtggttccgtgaagttgccacacattcctcgacctaaaatgaagatctgcatgcttggagatgcccagcatgttgaagaggcagagaagataggtttagattatatggatgttgaagcactgaagaagctaaacaagaacaagaagttggtcaaaaagcttgccaagaagtatcatgcttttttggcttctgaatctgttatcaagcagatccctcgtc

SEQ ID NO: 219244 - DNA, 407 bp, Gossypium hirsutum; identical to SEQ ID NO: 197814

SEQ ID NO: 219245 - DNA, 415 bp, Gossypium hirsutum
cgttcataaaaattaaaagcctcttttttctctctgttcttcgccatttttttgaatccgaaaccaatcccagatgttctgctgaaaaacaaaaacaccctctaagtaactttccgggaaaatgtcggggaaaggagcaaaaggattgattacggctggaaaatccaccaaggacaaagataaggacaagaagaaacccgtctctcgctcttctcgtgctggtctccagttccctgtgggtcgagtccaccgactgctgaagacaagggttagtgctaatggaagggttggagctacagctgcagtctacacagctgccatactggaatacctgaccgcagaagtcctagaactggcaggtaatgcaagcaaggatttgaaggttaagcgtattacacctaggcatttgcagctc

SEQ ID NO: 219246 - DNA, 422 bp, Gossypium hirsutum
ctggtggccacaccctgggaaggtgccacaaggagaggtctggatttgagggaccatggactaccaaccctcttatctttgacaactcttacttcaaggagctcttgactggagagaaggatggcctgttacagttgccaactgacaaagttctcctttccgaccctgttttccgtccattggccgacaaatatgcggctgatgaggatgctttctttgctgattacactgaagctcacctgaagctgtctgagctaggatttgctgatgcataagctgatgattgcaaaaataggaaaaagccagcggcacacagatgttttaggttttgttttctctccaaaagtggcttaaagaatgaatttggggaagtttccgagacaagcttttttcgataattttattctaagctcacattcccc

SEQ ID NO: 219247 - DNA, 414 bp, Gossypium hirsutum
gtcaaactcaccgtccagaaccgtcaggcgaaagtcgctgtggtcccgtcggcggcggctgttgtaatcaaggcgttaaaggagccagagagggataggaaaaagaccaagaacatcaagcacaacgggaacattaacctcgacgacgtcatcgaaattgctaaggtaatgaggccgaggtcgatggctaaggatttgagagggactgtgaaagagattttgggaacgtgcgtctccgttgggtgtactgttgatggaaaagaccctaaggatctgcagcaggagatcgatgatggagatgttgatgttcctttggagtgagcaagcttgttcttctcgttttttacgtctatcctcatgcttgcctcttttagaaaaatgttcaatataaagattttgaacaatttgcttata

SEQ ID NO: 219248 - DNA, 378 bp, Gossypium hirsutum
  unsure (1)..(378): unsure at all n locations
gttgctactggaaatgggtcacaaaaaacaacaagatgcatgtgatggtgttggtctcttgggtattgcatgggctttcggtggcatgatctttatccttgtttactgcactgccggtatctcaggtggacacattaaccctgcggtgacttttgggttgtttttggcccgtaaagtgtctttcattagggctgtggcttacatggtgtcacagtgcttgggtgctatatgtggagttgggttggttaaagctttcatgaagcatccatacaactcccttggtggtggtgcaaacaccgtggcttctggctacaacaagggaacttgccttggagctgagattattggaactntcgtacttgtctacactgttttctc

SEQ ID NO: 219249 - DNA, 442 bp, Gossypium hirsutum
gaatcggagggtcgacctagaccctaccggccatgctgaaggccttcttgatggcctcgtcgatctcgaagctgctgtttgcctttgcaccgctatcaaagctaacatcttaggcatcaaccttaacattccagtttcccttagcttgctcctcaacgtttgctcaaagaatgttccttccaacttccaatgctaagtcttcactgttcccaatattctttctagtcttccttattgtgtttggttattgaaagttacggtttccgacatttgcagcaaaccagtggtttttcatttgtaactttattatttggatttccttgtgagggagggatactgaataaatttaatacttctcttcaagtgtttttcttttggggttttttttatctccaaaagacatgaaaaagacttgtattattcccttgcttttggttctcta

SEQ ID NO: 219250 - DNA, 363 bp, Gossypium hirsutum
atgcgacagtggtttgaagacccttgaaacggagcatcttaccaagtcaagcacccttgtgcaaaactatactgttataataacaccagaagagataccagctgcgatgatggaggatcgtcacaccgtgccttacccttatgctgtcctgtattgccatagccaagtgactgaaaacagggtgtttaaggtatcattggacggtgagaacggagataacgtgaccgcggtggctgtttgtcacacggatactacgcaatggaaccgcaaccacgtgtcgtgtcgtgttttggggaccgagccaagaacgcccggtgtatgccatttctttcaggggaataactttgttctggttccagaccc

SEQ ID NO: 219251 - DNA, 398 bp, Gossypium hirsutum
  unsure (1)..(398): unsure at all n locations
ggtctggcgatggcgacgacggtggtgaatagcgcgttgcaggcgatccgtgagaggggtctccgcactttcttaagggagctcaaggatgatggcttcacgaaatgcttcttcgatggaaaccttctgcaaaccaaaatccacaacataggggcaacagttgtgggtgttgataaatttggcaataagtattatgagaaactcggagacacacaagctggaagacacaggtgggttgaatatgcgaaaaaggatcgttatgatgcttctcaggtaccaccagaatggcatggttggcttcacttcataactgaccataccggtgatgagcttttgatgctaaaacccaagaggtacggngtggagcacaaggagaacttatctggtaaggggaatga

SEQ ID NO: 219252 - DNA, 196 bp, Gossypium hirsutum
gaacattctttgcataatcaatattcatcaagaaaagaatatagaggaacaaatgtatcttaagctttatatatgccagatggatcagcatcctgaacaatccatggatgctcaagaagcttatgtagtgggaggcgctgggaggaatctttgacaagcatctgtaaataatgttgaaatgtgttcagtatatgcc

SEQ ID NO: 219253 - DNA, 399 bp, Gossypium hirsutum
atgacgatgaaggcaaagtttgtggtgtcacatctgaaggtgaaactgccaggtgtaagaaagttgtttgcgacccttcctacttgccaaacaaggttaggaagatcggcaaggttgctagggcaattgctattatgagtcacccaattccaaacaccaatgattctcattctgtgcagattatcctgccacaaaagcagttgggtcgtaaatcggatatgtatgtcttctgttgttcatattctcacaatgttgctccaaagggcaaattcattgcatttgtttcaacagaggccgagacagatcaccctgagagtgaactaaagcctggaattgaccttctaggtcccgttgatgagatattctttgatatctatgacagatatgaaccagtcaacg

SEQ ID NO: 219254 - DNA, 342 bp, Gossypium hirsutum
catttagccgttctttttgcactgaacaacgaattctttggggtatttttcaaaagaagcgaaggcatcacctgatataaggaaacacttaaaaccctaaaatctttgaattcacaaatatgtggagaaggctgttgacttcacagctcaaaaccctagccacagcttcatgcagatccgcttctaaaacggtgccgcttccattcaaatctaacgtttcatcatcgcctttttcctgtctcctcactcgtcacttatacgcctcgtcagcggatagtgctgtaaagaacacagttgaggatgtcatgcctatcgccacttgtcatgagcgcgaagagcttg

SEQ ID NO: 219255 - DNA, 395 bp, Gossypium hirsutum
gcaggtaataggaggactgccatgagcattaccagaaaagtgaaaggagttggctgggatgtttcggctattggaaacgctgtctggggtggtgccaaattggctgatattcttgaacttattggggttccgaagttgacaagttgcactcagagtggaggaaaacacattgaatttgtgagcgtgataagtgtgaggaggaaaacggaggtccatacaaggcatcgattccacttagtcaggccacaaaccctgaagcagatgttttacttgcatatgagatgaatggagaagtaagcaacttctatcttatgatcatattctttcccacactcgggaaaaccagaaatcaaactgaactcaacaagtatgctaaaatggttgcatcttttata

SEQ ID NO: 219256 - DNA, 413 bp, Gossypium hirsutum
acgataagaaacctgaggactgggatgagagagccaaaattcccgacccaaatgctgtaaagccggatgattgggatgaggatgctcccatggaaattgaagatgaggaggctgtgaaaccagaaggatggttagatgatgagcctgaggagatagatgatcctgaggcaaccaagccagaagattgggatgatgaagaggacggtgagtgggaagcccccaaaattgataacccgaagtgtgagacagcccctggttgtggtgaatggaagaggccaatgaagatgaatccagcttacaagggaaaatggtctgctccactaattgataaccccaattacaagggtatttggaagcctcaagagattccaaaccccgactacgttgagcttgataagcctgactttgagcct

SEQ ID NO: 219257 - DNA, 404 bp, Gossypium hirsutum
gtttgtttgtgtgaattttctgagaaagataaactgaggttgcttcctatgtgtagccatgcttttcatataaactgtattgacacctggctcttgtcaaactcaacatgccctctttgtagaggtacccttttcactcctgggttttcaatggagaatccagtttttgattttgatgacttaagggaagatgaagggtgtgttggtaatggtgaaaatggatatacccctagtcaaaaaacagtggaaatggaagaaattgttgttgacaaaggggttttacctgttaggcttgggaaattcagaaggataaatggtgaaccagatgaagcaggtggtgaaaccagtagcagcaacttagatgcaaggaggtgtttttcaatgggttcttatcaatatgtgct

SEQ ID NO: 219258 - DNA, 416 bp, Gossypium hirsutum
gcttaacaatcttttgatggaagtggaatctgcattaggagaatccagggcaaaggggaagatagtagtaggtcaccatgcaatcaagagtgcaggacaccatgggaacgctaaggagctcaacatttatctccttccacttcttcagacatacgacgttgatctttatattaatgggcatgaccattgcttacagcacataagcagcagtgacagtggaacccaattcatgacaagtggagggggatcaaaggcatggaggggagacgtgagttggtggaatccacaagaactgaaattttatcatgatggacaaggtttcatgtcagtggaaatgactcccactgaagttagcattaaattctatgacgtttttggtaatgttttgcacaattggagcagttccaagcaacttt

SEQ ID NO: 219259 - DNA, 404 bp, Gossypium hirsutum
caaaaaataaaaccctttgaaaaccaaagaaggaagaagaagatgtcgtggcaagcttatgtagatgatcacttgatgtgtgaaatcgaaggaaaccatctctctgccgccgctatcatcggccaggacggcagcgtttgggcccaaagcgccagtttccctcagctcaagcctgaagaaattagtgccatcatgaatgactttaatgaaccgggttcactcgctccgaccgggttgcacctcggtggcacaaaatacatggtgatccaaggcgaaccgggagctgttatccgagggaagaagggacccggaggtgttactgttaagaagaccaatatggccttgattatcggaatctatgatgaaccaatgacacccggccaatgcaacatgatcgtcgagag

SEQ ID NO: 219260 - DNA, 318 bp, Gossypium hirsutum
cttacacctttaaacactgtgcatagttattcaattaagcccaccagatgccaaggcttggaaaaaccctcactggggagaccactaccctctcggcggagagtgcacacaccattggtgatgtgcaggctaaaatgcactataatgatgggatatctccggatctccctaggcttatatttgctggcgaacaacatgaggatggtctcacgctatccgtctacaacattaagaaagaatccacccttcacttggtgcacaagaattcgtggcggcatgcatatctttgccaagactctcactggaaagacaattacc

SEQ ID NO: 219261 - DNA, 410 bp, Gossypium hirsutum
ctcaacgcctctctctctatcttctacaagccggcgagggaaggaaaacctgagagggtgaaaaatgccagctggtcacggtctccgatctcggactagggatctgttttccagacccttcagaaagaagggttacatcccattgtccacttacctcaggacctacaagatcggtgactatgttgacgtcaaggtaaatggcgccgttcacaagggtatgccccacaagttctaccatggccgcactggtcgtgtctggaacgtcaccaagcgcgccattggcgttgaggtcaacaagcaggttggtaaccggattataaggaagaggattcatgtcagagtggagcatgttcaaccttcaaggtgcactgaggaattcaagctgaggaagctgaaaaatgatcagctta

SEQ ID NO: 219262 - DNA, 403 bp, Gossypium hirsutum
tataatttaggaacaagcctaaaaaaatatatttaatttaatttttacatattttcttaagtactaaattaagtgacaccagataaatatttatagcagacgcagtataggttacacggtaaccatccccgattctcttgtgattagcccctacacagaggaaaaaaaagaagaagaaggaaccaccttgatggctactttggcggcggttgcagctcgtaggatagcgactgtacctcgaacaccacctccctgtcaagccgcttctctcattacccgccggggtcttgccggcgctgcagatcaccatggacccccaaaagttaattgttggcaagaaccaatgaacccagctaattggaaggaagagcattttgttatcgtctctttaactggttggggg

SEQ ID NO: 219263 - DNA, 371 bp, Gossypium hirsutum
gtctgatatttgaagccattccttggatgatgatcacacttgctgaaatcaataatcattcatggtttgtgacgcacttgcccagactgctaacatacacagcacacagctgcattattaccgtagcgataaccttacattttctatgcaaagtataaacgagataatgaaaactgcggaagaggcaagaattccacctccatccttagtgcctgtcaagggctctggttggggccaacacgatgatgataaagtggtagacatgcttctggaagtgaatgaagacgtcgaacaacatgtatatgataaactggctatggaagtacatgcaagtgtagaatatactatatattcagcacacgtaatcttta

SEQ ID NO: 219264 - DNA, 417 bp, Gossypium hirsutum
gcaggaactggagactgcgaagagcagctcatctgttgagaagaactatgagttgcctgacggacaagtcattactattggagctgagagattccgttgcccggaagtcctcttccagccatctttcatcgggatggaagctgctggaatccatgaaactacctacaactctatcatgaagtgtgatgtggatatcaggaaggatctctacggtaacattgtgctcagtgggggttcaaccatgttccctggtattgcagaccgcatgagcaaggagatcactgcacttgctccaagcagcatgaagattaaggtcgttgcaccaccagagagaaagtacagtgtctggattggaggatctatcttggcatcactcagcaccttccagcagatgtggatttccaggggtgagtatga

SEQ ID NO: 219265 - DNA, 316 bp, Gossypium hirsutum
gctagaactcgagactgctaacagtttttctattttagagaagaacgatgacttgcctggcggtcaagtcaatactagtggagctgagagatttccactacccgaagttttataacagccaggcttcataaatattgaagctgctagactaaatcaaactacatacaactctattatgaagagtgacttgaatatcaaaaaggatctctacggtcacattgacctaagcaggggtacaacgaagctcccttgtgtcgcacaccgcatcagcaccgaaatcactgcaattgttccaattaccatgaacattaatgtt

SEQ ID NO: 219266 - DNA, 399 bp, Gossypium hirsutum
  unsure (1)..(399): unsure at all n locations
ggggtttcggctttgtaacttacaattctagtgaagaggtggatagtgctgtcaaaacatttaatggtgttgagttggatggcagaccaattcgagtctcagtggctgagtctaggccgaggcgtcaattttgagcgcgactggtatctactggtactgctgaagttctttggacacactgagaacagctctttatgttcctaggaatctacaaacatgcaaattgtagcagctgcatttggatggtattcgcaatctgtgcttagattagattagaaagagccgataacgagatgataatatcaattgaaatattttggttatatgttccgaaagtatcatgattcagtgactgacatgtgccttaattntgtttattcaagtgtgggatttccagtt

SEQ ID NO: 219267 - DNA, 400 bp, Gossypium hirsutum
gatacaactggcgccggggactcttttgttggtgctttactatgcaagatcgtggaagacccaaccatacttgagaatgaatcgaaattgagggaggtactgaaattcgcaaatgcatgtggagccataaccacaaccaagaagggagcaatcccagcccttccaaccgaggctgaagtccttgccttaatcaatggagcttaggattattagcagcaaacttcaataatctatgctcatctttttctttttttaatttcttacatttcagagagagggttttgaaaggtatcgattttttcttcccctcttttgatttcctttttccctcgtttttcctccatccctccctgtgtagtgttgttaggctttgtgctttcaaggggagtaggaataaaaa

SEQ ID NO: 219268 - DNA, 399 bp, Gossypium hirsutum
gttctagatctttctagacttgaagatggctgcctagagttagattttggaatgttcgatcttcatggaatcttcaaagaggccattaatcttataaagcccattgcatccataaagaagctatctatgactatgatcctggcacctgatttgccaatgtacgctgttggcgatgagaaacggcttatgcaaaccattttgaacattgttggtaatgctgtgaagttcacaaaggagggctatgtttcaattatagcttcagttgcaaaaccagagtctttaagagactggcgacgtcctgaattttacccagtgtcaagtcaaggccacttctacttacgagtccaggttaaggattctggttgtggtgttctcccacaagatataccaattcttttt

SEQ ID NO: 219269 - DNA, 396 bp, Gossypium hirsutum
agaacaagttattgatggcctcgataaaactgtgaaggccatgaagaaaggagaacttgcacttatcactattcagccagaatacgcgtttggttcgtccgaatcacagcaggagttggctgttgttcctgcaaactcaactgtgtattacgaggttgagatggtctcttttgtgaaggagaaagaatcttgggacatgaatgctcaggaaaaaatcgaagctgctgggaagaagaaagaagaagggaatgctttattcaaggcaggtaaatatgaaagagcattgaaaagatatgagaaggcttttaggttcatagaatatgactcttctttcagtgacgaggagaagcagcaagctaagttgctaaaagtaacttgcaatctcaacaatgcagc

SEQ ID NO: 219270 - DNA, 421 bp, Gossypium hirsutum
  unsure (1)..(421): unsure at all n locations
gaacaattggaaaagaagaaagcagaatatgcagagaaaatgaaaaacaaggtagctttgcttcacaaggaagcagaagaaaagagggcaatggttgaagccaaacaaggagaagaggttctcaaggcggaggaaatggctgcaaaataccgtgcaaccggacaaactccaaaaaaggtccttgggtgtttctgaagttcaaaagcttggggtctgaggttgaagcaaatgtgaattttgactggtgttgtttgaagcttcccgtttttcatctgtatatctcttggtttctatgtttgttttgtgtgtaaacagtaacatcacaaatatttaatctaccatcgtatttgttgattgatatagttttcgttttggttcttttagacacaagttgngaggttntccatctggacttattaaa

SEQ ID NO: 219271 - DNA, 317 bp, Gossypium hirsutum
gccttcatccacagaaagaatatcatagattacgtagaataatgggtcaacggctgacataccggacccgccatagctatgccaccaagtccaaccagcaccgggtcgtcaaaactcctggtggaaaacttgtctaccatacaactaataagagagctagcggacccaaatgtccagttactggcaaacgcatccaagggattcctcacttgagacctgcggaatacaagaggcctaggtcacctaggaacaggtggactgcgaaccgtgcctatggtggtgtgacatactgcagtgcattcaagtagaggatcatt

SEQ ID NO: 219272 - DNA, 388 bp, Gossypium hirsutum
atttgtgaactgttcaacactgtatggtgaattactcgtttttcttttataaaaacactcaacctgcttgatattttaagacgggatttcttagtgaaagatgttaataagcaagactcgcagtcgtggtcaatcatatatcttttctatcccttaaataatcatatatgatcgggatcaattaagatgtatttttggttcagtgtttcatatgcatttctctccatcctgatcgcaggataggaagatttccccctgtggtgaggactgcagttcctgtggatgggaggtttgagcatatagttctttcctgcaatgcaacctctgatcatgctattatttggatagaaagagagtcccaaagagctcttgatttgatggtggagaa

SEQ ID NO: 219273 - DNA, 391 bp, Gossypium hirsutum
tgcgagtatacaatggcaggtcggggtaaaactcttggatccggggcctcgaagaaggcgacatcgaggagtagcaaggccgggcttcagtttccggtgggtcgtatcgctcggttccttaaggctggaaaatatgctgaacgtgtcggagctggagctcctgtttacctagctgccgttcttgaatatcttgcggctgaggttctcgagcttgctggaaatgcagccagagacaacaagaaaacccgaattgtgccacgtcatatccagcttgctgtgaggaacgacgaagaactgagcaaactacttggagatgtaacgattgccaatggaggtgtgatgcccaacatccacaacctcctcctccccaagaaagccggaggctcctcaa

SEQ ID NO: 219274 - DNA, 398 bp, Gossypium hirsutum
cagaagcaagcagctagcagtttgctttgaattatactactataactccaccactttccaccagatttacattgcagatggcttcatcaatgctgtgggcttcaagggcggcttcttatcttaggatctctgtcttccacagaggcttttccactgttctaaaggatctgaaatatgcggattctcatgagtgggtgaaggttgagggtaactctgccactattggtattactgatcatgctcaagatcatttaggtgatgttgtgtatgttgaattacccgaagtgggagctgctgtaaagcaaggtgaaagttttggagcagttgaaagtgttaaggctactagtgatgttaattctcctgtttcaggaaaagtggttgaagttaatgaagagctc

SEQ ID NO: 219275 - DNA, 341 bp, Gossypium hirsutum
  unsure (1)..(341): unsure at all n locations
gggaagttcagcactcgattgatcctcgtgcgccggacttaattaccttggagagcatgctccagaaaccatcatggccccgtctctcgtttactgcagaagcattgctgcagcaacaggaatctaaaatatatgaaagtgctagtgctttatctttagcaacattcgcatcactattgattgagtttgttgcaaggctccaaaatctcgtggatgcatttcaagagcttagtgagaaagcaaatttcaaggttcctgtggaccaatcacctcaaaaggaggctccaggattntggagaagattaagaaatngcttccagtcaaaagaactanattctatt

SEQ ID NO: 219276 - DNA, 312 bp, Gossypium hirsutum
cccatctatctctcatacttactctactttccctttgaggttaggaaaacagctgagaaattaaggaatggtgaccttcctatttacctcggagtctgtgaacgagggacatccgcaagctgtgtgatcagatctctgatgcagtcctcgatgcctgtttggcacacgatcctgaagcaaggtggcttgcgagacctgcatcaagacaaacatggtgatggtgtttggtgagatcactaccaaagccgtcgtagactacgagatgattgtgcgtgacacctgtcgtggcatcggtttcacatctgacgatgt

SEQ ID NO: 219277 - DNA, 400 bp, Gossypium hirsutum
ggaaatttaaagcaaccgaaggaactttctattaataaagtcgggcatgcgttacatgagattgatccagttttcaaagaattctcttgctctgagaaggtttcgagtttgcttttctccttaggttataagaagcccgtgatcattcaatcaatgtatatctttaagcaaccaggtataggaggtgaggtaactcctcaccaggacaactcgtttctttatactgaacctaaaacttgcaccggtctgtggctagctctagaagatgcaacagttgtaaacggctgcctttgggccattcctgaatctcaaaaaaatggtcttgttagaaggttcattaggggtgatgatggagtctactttgataggccgtccctatcatatgaccagaaagattttg

SEQ ID NO: 219278 - DNA, 392 bp, Gossypium hirsutum
  unsure (1)..(392): unsure at all n locations
ctcttgggctcttgttacttaacctagggctgctctttattttccttttctctctgttcttttgtccctttgctttacttctttttgcttccatgtcgtttagaggattcagtcggccaaatgctacatcaggcatgggcgttgctgatcagaccaaggatactttcttggagctgaaaaggaagaaagtttatcggtatgtgatatataggatcgatgagaagaaaagggaggttgtggttgagaaaactggtgcccctgctgagacctatgatgacttcgctgcatctctgcctgaaactgattgccgatatgccgtctacgactntgattttgttacttctgagaattgtcaaaagagcaagattttcttcattgcatggtgcccttca

SEQ ID NO: 219279 - DNA, 309 bp, Gossypium hirsutum
acttttgctctttgtggatttgtccgtgcccagggtgatgctgacagtgctctcgacaggctttggcagaagaagaaagctgaagtccgacagcagtagttggatacctttttaccctagtctatctccgagcttgggaatgaaaaatctcatggcagtgactattatgttctaggtcttttcaggttaaactatgtcaaatttatatttttgttgattggatgacatttcagacttggttttcttatatttgaacctaatatatatgccttcggtcatgttaatcgacaaaaaagaaaaaacaaatga

SEQ ID NO: 219280 - DNA, 414 bp, Gossypium hirsutum
caaaaggagtagtgaagcacatattgttggcaaagttcaaagatgaaatccaacctgagaagattgaggaactcatcaaaggctatgccaatcttgttaatctcattcaccccatgaaagctttccactgggggaaggatgttagtattgagaacctgcatcaagggttcactcatgtgtttgaatccacatttgaaagcacagaggggattgctgagtatatagctcatcctgctcacgtggagtttgcaaatctgtttctccccagcttggacaaggtcattgtatttgactacaaacccaccgttgtacgttgctaagttacaagcatagttctgtctcaatgtagcttttgtcctgttcatgtctgttgttattttgaataaagtttgacgtcttgtactatgaaatgca

SEQ ID NO: 219281 - DNA, 271 bp, Gossypium hirsutum
gttagttattgtcatgcaatgcaagtatgccaccgtgatttgaagttggaaaacactttgttggatggtagtccagctcctcggcttaagatatgcgattttgggtattcaaagtcttcagttcttcattcgcaaccgaagtccactgttggaactcctgcatacattgcccccgaggtactccaaaggcaagaatacgatggcaagattgcagatgtatggtcatgcggggttaccttgtatgtaatgctggtcggggcatatcctttcg

SEQ ID NO: 219282 - DNA, 372 bp, Gossypium hirsutum
  unsure (1)..(372): unsure at all n locations
cgtaggtattgtattcaatgcaagatgcttccttattngaagttggaaaacacttcgtgggatggtagtccagctcctcggcttaagatatgcaattttgggtattcaaagtcttcagttcttcattcgcaaccgaagtccactgttggaactcctgcatacattgcccccgaggtactccaaaggcaagaatacgatggcaagattgcagatgtatggtcatgcggggttaccttgtatgtaatgctggtcggggcatatcctttcgaggatcccgatgagccaaaagactttccgaagacgatacaaagaattctcaggatccagtactccattccagattttgttcaaatatcttccgaatgtcgacat

SEQ ID NO: 219283 - DNA, 409 bp, Gossypium hirsutum
gtcaaatgcttgacaaagcattttacgaggtggaagtgaaaaggctttgcttagctttcgagcaacagttccattacggtgttttctttgcatacatgagattaagggagcaggagataaggaacctgatgtggatctctgaatgtgtggctcaaaaccaaaagtctagggttcatgacagtgtggtctttatattttaaatgatccatctgaccaccgagccgaagtcggttaggaataatgaatggtaatgtcttttacttgatcagctgtacattgtctgtcctccctcaaattctccacccatattttcatttaagtggtgtgtttagccgctctttatcccaacaatttgtgtgctgaggaataaatcccttcatatattattatatgttttctttggtaattg

SEQ ID NO: 219284 - DNA, 396 bp, Gossypium hirsutum
cccatctctcctctcatacttcactctaacgttccctttgaggttttaggaaaacagcagagaaattaaggaatggagaccttcctatttacctcggagtctgtgaacgagggacatcccgacaagctgtgtgatcagatctctgatgcagtcctcgatgcctgtttggcacaggatcctgagagcaaggtggcttgcgagacctgcagcaagacaaacatggtgatggtgtttggtgagatcactaccaaagccgacgtagactacgagaagattgtgcgtgacacctgccgtggcatcggtttcacatctgacgatgtgggtctggatgccgacaactgcaaagtgctggttaacatagagcaacaaagccctgatattgcccaaggtgtccat

SEQ ID NO: 219285 - DNA, 415 bp, Gossypium hirsutum
cgattacatggaatatatacttacatttactttagctccaggtggtcagaattgttcagccaatgctaatataacagtgtcaggaccagacaaccagggaatcttctctttcaggcagaattatgggaagcaagcatggcagagctgtggcctgtacctaggccttagcggtcaggacgaaactgttaacctcgtctttgaaagccaagcagttgaatccgatgataattccacatgttggccggtcatcgactcattacttgtcaaagcagtagaaaatctggttcaaggcaaagataacctactgctgaatggaggattcgaatttggcccagatttcttaagtaactccaccgaagggattctacttgattccgcatcaagtccagttcaatcgccattaagtcaatggtct

SEQ ID NO: 219286 - DNA, 258 bp, Gossypium hirsutum
ggcgaccgtaagctttgcgccatcacatcttcatgagagccaagtggaacaagaagcgtatgagaagattgaagagaaagcgccgaaagatgaggcacatatccaagtccacagcgaaatctgtgggttgtgttttagttattggattactgtcttatttcgatctttcgaatcgagagcaatccatcagtggatgggttttagatttttaaatagatgagaacagcttactggtttctatagaatgggtatttgtac

SEQ ID NO: 219287 - DNA, 345 bp, Gossypium hirsutum
ctggagtacaaaattttccaactgttggattatttgatggtaactttagacaaaatctgggagagactggaatgggatatgggctggaggttcaaatgattgcaaaagcacataaaatgggattcttgacaactccgtatgctttcaacactaatgaagctgcggaaatggcaaaagctggtgccaatataatattagcccatatgggactcactacatcatggttctataggtgccaaaacagctgtctcattggaagaaagtgttcttcgtgttcaagctattgccgatgctgctcatgccatcaatcctaatgtcatcgtgttatgtcatggaggtccaata

SEQ ID NO: 219288 - DNA, 324 bp, Gossypium hirsutum
attacccgctgagtttaagcatatcaataagcggaggaaaagaaacttaccaggattcccgtagtaacggcgagcgaaccgggaaaagcccagcttgagaatcggtcgccatcggcgtccgaattgtagtctggagaagcgtcctcagcgacggaccgggcccaagtcccctggaaaggggcgccggagagggtgagagccccgtcgtgcccggaccctgtcgcaccaagaggcgctgtctacgagtcgggttgtctgggaatgcagtcctaatcgggcggtaaattccgttcaaggctaaatacgggcgatagaccgattgcg

SEQ ID NO: 219289 - DNA, 410 bp, Gossypium hirsutum
ccaatcggtatcctctaattttaaacctaagagttttaagttaacgaagcatttgggtcgtttcgaagtaatggaaacttcaggaaaagtaaagaagggagccggaggaaggaaaggcggtggcccgaagaagaagcccgtttcaaggtccgtcaaagccggtctccagttccccgttggtaggatcggccgttatttgaagaaaggaaggtattcacagcgggtcggaaccggagccccagtttacttggctgcagttcttgagtacttggcggctgaggttttggaattggctgggaacgctgcacgtgacaacaagaaaaacaggatcatcccaaggcacgtgctactcgccgtgaggaacgacgaagaattagggaagcttctcgccggcgtaaccatcgctcatg

SEQ ID NO: 219290 - DNA, 328 bp, Gossypium hirsutum
aaggaattcgccggtggctcatgctgttggattttgggattaccattcttttattttggctgcttccatttatgagcctttgggttttgggactactggtggtaagcgtatgcaaatgaaggaagtcgcggcttttcttgcacatgtcggcgccaagacatcttttggggagagggtgatataccggggagcttttggatggggggttttcttttcaagagagaaatgagtcctagccaggattactgtgatgattactacaaatacatgtatccatgtgcccctggagctcaatactatggccgtggtgctttggcaatttactgga

SEQ ID NO: 219291 - DNA, 399 bp, Gossypium hirsutum
tgttttcactgctcattcttgccatcactgcaggccactcaagtggtgcgacgggcaaatggtgtgtttgcaaagatggtgtgggtgatggaaacttgcagaagacgttggactatgcttgtggaaacggtgctgactgtaaccctatccgttcaaatggaccttgttacaaccccaacactgttaaagcacattgcaattatgctgttaacagctatttccaaaaaaaaggccaaggtcaaggctcctgtgaatttgctggcacggcagctatcactacaactgaccctagctctggtggctgttcttacccctccagtgccagtggtggaggcacgaccttaacaccaacaacaccgggcacgacaacaactccatcatcatcaacaaccaccacgc

SEQ ID NO: 219292 - DNA, 402 bp, Gossypium hirsutum
gttcggtggtatatgcgcctttcttctcttggtctaaggtgaatcatggataaacatagcaatgtggtgccatatgggctcttcaagaaacactggcagaactatgtgaagacttggttcagtcagccagcacgaaaggctagaagaagaatttcaaggcacaagaaggctgtgaggatctttccaaggccaactgctggaccccttcaccctattgtccatggccagactttgaagtataacatgaacttgagagctggaaggggtttcacccttgaagagcttaacgctgctggtatttcaaagaaacttgcaccgaccattggtatcgctgttgatcaccgccgtaagaacaaatcacttgaaggtcttcaagccaatgttcagaggcttatgacctac

SEQ ID NO: 219293 - DNA, 406 bp, Gossypium hirsutum
catggcctaaggtttcggacaatgcaaaggaccttgtaaagaaaatgcttaatcctgatcgagagcagcatcttacagtacagaaagtgcttgaacatccatggctacaaaatgccaagaaagcacccaacgttttgttgggtgagactgtgaaagctaggctcaaacaattttctataatgaacaagctgaagaagagagctctaagggtaataatccaatttgcaccacctttgactagtttttattgattatatgttgcattattaaatgttttccagggccctggtgctggaactagctctaacttacctcctgtaggtgcaattgctgatagtcagtcaggcatgttctatttttcttgctcctgattttgtctggtcatttattgcaatagtttattttt

SEQ ID NO: 219294 - DNA, 404 bp, Gossypium hirsutum
atcatttttctcgatccatgcttttttcgatctggaacaaaaccattgcttagtgattggacttccgatcaagggaaagctcgtcaaatcaattcagaattgactgataaatgcgttgtgagtgatgcattgaaaagcacattcacgaggtcaaggattttgtttggtctcatttccgggactgttttcctcttatgtactggtttcttcttccggttatacggatgggaatttctacatgaggcattgctataccatcttactcgcacggatccaagacataatttttccatctatttctaccatatctatcttaactatgaacgcgagctttcggttcttgaaaagctcatctcctttttgcctcagtttatagtgcagctagtcctcattttatgcttcgc

SEQ ID NO: 219295 - DNA, 315 bp, Gossypium hirsutum
  unsure (1)..(315): unsure at all n locations
cactncaagacacactcacaaaactatattaaaacttgactcaatcaaccatcacaaaacgctataataataatttcaaggcaaaaaaatgctgtgaggatctttccaaagccaaatgatgcaccccttcgccctattgtccatggccagactttgaagtataacatgaaatttacaactgtaaagggtttcacccttcaataacttaacgctgcttttatttcaaaaaaacttgcaccgaccattgttatcgttgttgatcaccgccctaagaacatatcacttgaaagtctttaacccaatgttcaaaagctt

SEQ ID NO: 219296 - DNA, 414 bp, Gossypium hirsutum
gttcgtttctctttgcgcctttcttctctctgccgaaggtaaggcatggttaagcataacaatggggtgccaaatgggcacttcaagaaacactggcagaactatgtgaagacttggttcagtcagccagcacgaaaggctagaagaagaatttcaaggcaaaagaaggctgtgaggatctttccaaggccaactgctggaccccttcgccctattgtccatggccagactttgaagtataacatgaagttgagagctggaaagggtttcacccttgaagagcttaaggctgctggtatttcaaagaaacttgcaccgaccattggtatcgctgttgatcaccgccgtaagaacaaatcacttgaaggtcttcaagccaatgctcagaggcttaagacctacaacgccaaactt

SEQ ID NO: 219297 - DNA, 408 bp, Gossypium hirsutum
ggaatggctaccaagcagccaaatactggcctctttgtgggactgaacaagggccatgttgtaaccaagaaggagttggctccacgtccctctaatcggaaaggaaaaactagcaaaagagtccattttgtgaggaacttgattagggaagttgctggttttgcaccatatgagaagaggattactgaacttctgaaagttggtaaggacaaacgagcgctcaaggttgctaaaagaaagttgggaactcacaaaagggcaaagaagaagcgtgaggagatgtctagtgtgctccgcaagatgagggctcaccctggaggtggagaaaagaagaagtgaagctctctggtgacaagtcaccttgatgatttcattagagaacttttgttagcatatatttcaacttat

SEQ ID NO: 219298 - DNA, 410 bp, Gossypium hirsutum
ctatttgctcagagagtaatggatcttgctgagtatcgaaagaatctttatgattacttagtgactaagatgaacgacattgcaccaaatttggcatcgttgattggggaagttgttggggctcggttgatctctcatgctggtagtctcacaaatttggccaaatgtccctcttccactcttcagattcttggtgctgagaaggcccttttcagggcactgaaaacacgagggaacacacctaagtatggtctaattttccattcatctttcattggtcgagcatctgctaaaaacaagggccgaatggcacgctatcttgcaaataagtgttccattgcatctcgcatagattgttttgcggagcgaggcaccactgtttttggggagaaactgcgggaacaagtggg

SEQ ID NO: 219299 - DNA, 252 bp, Gossypium hirsutum
gatcagtcttgcatttggcgatgcttatggtaatcatgtgtatgcaccaaggctggatgagccatgctcgagaacatttgaaagctgttcaactgatacatttcaaataaagggtccttgcacataccagatttgctatctttacctctacaggagtggatatgatggttggaagccacatagcgcgactgtgtactgatattataccacagtttgcacatgtaattacattgtctttatttctaatgtggt

SEQ ID NO: 219300 - DNA, 148 bp, Gossypium hirsutum
gcagaggcaatagaaaatggcagataacgatgacattcagcctcttgtttgtgacgagggcgactggaatggacaaggctggattttctctaaatgatgctccaagaacttcattccctaacattgttggtcgcccacgtcacacatg

SEQ ID NO: 219301 - DNA, 371 bp, Gossypium hirsutum
gtaattggcggaggaatagccaactttactgatgtcggtgctacatttaacggcattatgcgagccttgaaggagaaggaatcaaagctcaaagccgctcggatgatgctatacgtgaggagaggaggtccaaattaccagaggggcctcgcgaaaatgcgggcacttggagaggaaatcggaatccctatcgaggtttatggtcccgaagctacggttcgggttcatgttcggtctctgttttttttttctccgtttcaagtgggtcattttcattagatttcccttttgccatgttactgaaacatttggaatttatttgctgaaaagtgaacatgaaatcttaggcataaatggcatttgtcagcaat

SEQ ID NO: 219302 - DNA, 321 bp, Gossypium hirsutum
accaccgtcactagcggcgctgtcacaaaatgtcgtcaacggagtctctcatcctccaacgccatgaaatctccgccgttaaattcggtaacttcaagctgaaatctgggatcttctcccctatctacatagacctccgtctcatcgtctcttacccttccctcctccgccaaatctcccactccctcctctcctctctccctccccaaacaccctttaacctcatatgtggtgtcccttacactgccctccctatagccacctccatctctctcgacacctccatccccatgctcatgcgccgcaaagaagtaaaagact

SEQ ID NO: 219303 - DNA, 414 bp, Gossypium hirsutum
caggtacattgagaccatcaaagaagctgtttaaagggaatgtcctggagttgtttcttgtgctgatatccttgttctgtctgctagggaaggcatcgtttcgttgggaggcccttatattcctctcaaaactggaagaagagacggtagaaggagcagagcagatgttgtggaggagtatcttccggaccacaatgagaccatctctggcgttcttgacaggtttgccgccatgggtattgacacccctggagtcgttgccctcctaggagctcacagtgtcggcagaactcactgtgtgaagctggtgcatcgtttgtacccagaggttgaccctgccctcaaccccgaccatgttccacacatactccataaatgccctgatcagatcccagaccccaaggccgtccagta

SEQ ID NO: 219304 - DNA, 396 bp, Gossypium hirsutum
gttcgtttctctttgcgcctttcttctctcggccgaaggtaagtcatggttaagcataagaatgtcgtgccaaatgggcacttcaagaaacactggcagaactatgtgaagacttggttcagtcagccagcacgaaaggctagaagaagaatttcaaggcaaaagaaggctgtgaggatctttccaaggccaactgctggaccccttcgccctattgtccatggccagactttgaagtataacatgaagttgagagctggaaagggtttcacccttgaagagcttaaggctgctggtatttcaaagaaacttgcaccgaccattggtatcgctgttgatcaccgccgtaagaacaaatcacttgaaggtcttcaagccaatgttcagaggcttaag

SEQ ID NO: 219305 - DNA, 391 bp, Gossypium hirsutum
  unsure (1)..(391): unsure at all n locations
ggcagaaggcagcttcttgaacccgatcttaacgttaaattttccttagtggatggacaacattaccagatcttattttccaatctagaatcttcctgggaggagaaatgagttatgaagattgagacagaggtgtagctgtagataaacagcagcataaccaatatgggacattccaaggagttgccaaatacaccttcttacgtgctctacagttccaccaccacaacccgcatacgcaacagcaacagcaccagcaccagcaacagcaacagcaccatgtgccaactattgggtttcctccacctccctctatcgctgctcctcagnattacccccaagcctaccagaccgtgccgggttatgatgttgctgaaggaacacctgttag

SEQ ID NO: 219306 - DNA, 342 bp, Gossypium hirsutum
gctgttggtaaggacacaaggattggaccttaatttttgaatgctagtgtcggttttgggggatcctgcttccagaaggatattctaaatctggtttacatctgcgagtgcaatggccttcccgaggtggcagagtattggaagcaagtcattaagatcaatgactatcagaaaaaccgatttgttaatcgtgttgtttcctcgatgtttaacaccgtttcaaacaagaagattgctatcttagggttcgcctttaagaaggataccggtgacactagggagacccctgccatcgatgtatgcaaaggactcttgggagacaaagcacggttgagcatatat

SEQ ID NO: 219307 - DNA, 415 bp, Gossypium hirsutum
gaagcccaaaggaccacttgaagccctccggcccaaattgcagcccacacaacaacaaacacgatacaggaagtctccttgtgccccatctgatggtgaagttggagggagtgctcaaccggaggatgaaaccaccaacgaatgagaaactgctgccaatcttctaaacttgtgaggactattgatagttattctaatacctcgacaggtaatgagtaattttcaattgttcccatgaataaagcttgttaaagatgctttgatcttagtcaagatttacaagttacaacattaatgcagtcgactatattatgggaactgaaatgtatgttgttccaatgtttttcctgatgtggaacatacaagtaaatcacttataaaatgatttttcgctctactagattcccatttggct

SEQ ID NO: 219308 - DNA, 402 bp, Gossypium hirsutum
caggattccaccatcagtggatgaatcaacctttcggaggcattttgaggagtatggtgagataacagatttatacatgccgaaggatcaagtctcaaaagctcaccgtggaattggctttatcacttttgctagcgcagaatctgtggagaatctgatggctgatgctcatgaactgggtggttctacagtagtagttgatcgagcaacacctaaggaagatgacttaaagccaataggcagaatgtcacagggggggtatggtgcatacaatgcttacatttctgctgccactaggtatgctgcagttggtgctcctaccttgtatgaccatcctggccccatgtatggaagaggggagtccagccgagggatgggcaaaaagatatttgttggcagact

SEQ ID NO: 219309 - DNA, 410 bp, Gossypium hirsutum
ggcgagagctgggagagatcgcgattcatcggccttgtccattgcaacagcagaagcagcaataatggtagcagcgatgctaaaaagggagtccctaattcaaactacgttgtgccactcaacaagtcgttttcggcatcaaactcttcgtacatcactcgtcctctagttgaaatccttcgcgatctcaacaagcgaatccctgataacatcgtcaagcctccttctgattcttcttccacttttctcccttggtaccatgccaatcgcatgttgagcttctacgcccctggatggtgtggagaagtacgtgatgttatattctctgagaatggaactatcactgttgtatatcgactcactattcgaggatctgatggagaagcacatagggagtcaacagggacagt

SEQ ID NO: 219310 - DNA, 356 bp, Gossypium hirsutum
gaagacaaatcctcagacggaatttcattttgtgatgtcacacgcgaaacaggtggtgggtgcacatgctatgaaaatggacggtacgtatattctgatgacgatgacagcttcaaaggaaggtacatgttatcctatagcacctctggcactaccacattctttacatgcatgcggactagtcttttcagcagatgaactgaacatggaaggtttccatacatttcgtgggggattctggaattacttcattatgggaatggatgctccactatcttatgctattcactcagagacggatgatgatactgaaaaatttaaaaaccaaggggattattatagcactaatgcaaaga

SEQ ID NO: 219311 - DNA, 406 bp, Gossypium hirsutum
gaaagaagaatcctgggactgatcggaattctgtgctgtcattcttggaacaagtaatgaaagcaaaggaaatgaaaatagacaattggcatattctcatgaggatgagagctccaaaggaaggtccatgtgatcctattgcacctctggaactaccacattctttacatgcatttggtcgagtctcttcaacagatgaactgaacatggaaggttaccatacatttcgtgggggattctggaattacttcagcatgggaatggatgctcaagtatcttatgcttttcactcagagcggaagttgcatcctgaaaaatttaaaaaccagttggttaatcagagcacttatgcaaagcttggctgtacccaggggtggtttgctgcttctgtttttcatccctcttc

SEQ ID NO: 219312 - DNA, 382 bp, Gossypium hirsutum
ataattcgaaaaattgttttaccgaacaaagcaattttaaaaagtctccctttcgaccacccaacgtaaaatgcaaattctaggattattaatgttacaaaaacatttacaattacatctaattttacaaacctcacaacattaaaaccatgactgaacctaacttaaattacaacatttcactcgaatcccccactgcccacatcttcaagttcaacgtcccaggatacaataaggaggatataaaagtgcagatacaagatgggaatattatgcatataaaaggagagggtattaaagaggagagtcacacgaaagatactgtttggcatgttgcggagagagggacagggaaagctgaattttctcgggaaattgaatt

SEQ ID NO: 219313 - DNA, 420 bp, Gossypium hirsutum
aacaaagaagcgattagggttgatgtagcgccgaaagatggaaacttcggtttcgatgttccactgcttgagactatgttcccgagtgggacgttggatcctagtcttggacgagtttacggaaagatgccacaatgggaagaaacggtggatgaatctagaagtagatataaacaaattattaaggcattggctgataaatacccctctgagaacttgctattagtcacacatggggaaggagttggagtttcgatatctgggttcttggagcacacgacagtggttgaagtagaatattgtggttatgcagagttaaaaagattaatgacatgcaaaaatgggtcaaccactgctggaaactttttggtgcttacaaaaagtggtcagagtgggattacttattttgattaaagaatg

SEQ ID NO: 219314 - DNA, 408 bp, Gossypium hirsutum
ccagaatcaacgtaagaattagggttgtgtctagaaatggcgattgcagcgcgcatcagatccactctccctctctttcacaggcttttgagatccgattccctgccttctcacactcccagagctgctcttcaccgaactctactttgtcccgaactgtcgaggaaatattccacttctccgaagaaggacgagaatgttaaggtgcctttggctttgtttggtggatctggaaactatgcatctgcactgtaccttgcagccgtaaaaggaaatgctctggacaaggttgagtctgaacttcttgaccttgttcaggcatcaaaaaacagtcaattcttttctcaattcactaaggacttgtcagtacctgcagagacacgggtcaaagccattaatgagatatgt

SEQ ID NO: 219315 - DNA, 331 bp, Gossypium hirsutum
ggtcaccagggaccagtatggcaggtggcttgggctcatccaaagtttggctctttacttgcttcttgttgttatgatggacgtgtgattatttggaaggaaggcaatcagaatgattgggctcaggctcatgtatttgatgaccataagtcatctgtgtaattcaaatgcttgggctcctcatgaactgggactatgtttggcatgtggttcttttgatggaaatatattggattttacagcacgggcctacggcggctgggatgaattagggattgttcaggctcagctggacgtgatctcatttgcctcattgactccttcaacagca

SEQ ID NO: 219316 - DNA, 410 bp, Gossypium hirsutum
ccggcttgttggcttgctgcgtttggcttcagaatgcacaggtcacatgtccaaggttcgagggctggtgccagagagaagaaggtgagaaaagagaagctaggagatagaataacagcacttcaccagttagtttccccatttggaaagactgacactgcttctgtgttgttagaagttattgggtatatcagattccttcaggatcaaattgaggctcttagctccccttacttgggtactgcatctccaggcgtgacaaaccaacaatctgaaaaaccaaaggacttgaggagtagagggctgtgcttggttccagtatctttcactcatccagttgaaagtgattgtaatggtgctgattactgggcaccggcattcgcaggcgccggcagcttttaaggagctgg

SEQ ID NO: 219317 - DNA, 412 bp, Gossypium hirsutum
ttttgattttacaatacaaggtatgttatgcaaggattttggatttgaagaggaagttcttggaagcagcattgcgatactatgacatatctcaaattgagaagcgacaaataggagacgaaacaattgacgaggatgctctggagcaagctctatctgctgctgttacatgtacaatattagctggtgcaggtcctcagcgttctcgtgttcttgccacactttacaaagatgaacgttgctccaagctgaagatttatccaatattacaaaaggtttatttggagagaatattaagaaaacctgaaattgatgcatttgctgaagaactgaaaccacatcagaaagcattgcttcctgacaattttactgtgctggaccgtgccatgatagagcataatcttctgagtgc

SEQ ID NO: 219318 - DNA, 411 bp, Gossypium hirsutum
ttttgattttacaatacaaggtatgttatgcaaggattttggatttgaagaggaagttcttggaagcagcattgcgatactatgacatatctcaaattgagaagcgacaaataggagacgaaacaattgacgaggatgctctggagcaagctctatctgctgctgttacatgtacaatattagctggtgcaggtcctcagcgttctcgtgttcttgccacactttacaaagatgaacgttgctccaagctgaagatttatccaatattacaaaaggtttatttggagagaatattaagaaaacctgaaattgatgcatttgctgaagaactgaaaccacatcagaaagcattgcttcctgacaattttactgtgctggaccgtgccatgatagagcataatcttctgagtg

SEQ ID NO: 219319 - DNA, 414 bp, Gossypium hirsutum
gttttgtaccacctgatggtgaatttgaactaatgaagtaccgaatcactgagggagttgagcttcctttccgggtattgccaacaatcaaggagcttggtcgaacacgaatggaagtaaatgttaaggttaaaagtgtctttggagcaaagatgtttgctcttggagttgtcatcaaaattcctgttccaaaacagacagcgaaaacaagtttccaagtaacatcaggtcgagcaaagtaccaagctgctattgattgcttggtttggaagataagaaaattccctggacaaacagaaccaaccttgagcgcagaagtggagttaatttccacgatggcagaaaagaagtcatggacaaggcctccaattcagatggaatttcaggttccaatgtttacagcctctggcttac

SEQ ID NO: 219320 - DNA, 423 bp, Gossypium hirsutum
  unsure (1)..(423): unsure at all n locations
gaaatggagaatggtgaggcatttagagtctgcagtgcacgtattggaagttcaagcatttggaggaacaacgccatggaagctttctccatgtctgctcgtgaagaagatgatgaagaagacctgaaatgggctgccatcgagaaactgcctacatatttgcgtgtaaggagagggatattcacagaaggtgaaggtcaatcaagggaaaaaaaaaaaaaaaaaaaaaaaaaaaaaaaaaaaaaaaaaaaaaaaaaaaaaaaacaaaaaaaaaaaaaaaaaaaaaaaaaaaaaaaaaaaaaaaaaaaaaaaaaaaaaaaaaaaaaaaaaaaaaaaaaaaaaaaaaaaaaaaaaaaaaantggggggggccctttaaagggaccaaattttaaaaccgggggttggaaaaagataattttttt

SEQ ID NO: 219321 - DNA, 415 bp, Gossypium hirsutum
ccgacatcttgtttccttgataggttattgtgatgagaagaacgagatgatcttgatttacgaatatatggagaatgggacactcaagagtcatctctacggttcaggccatccaagtttaagttggaaacaaaggcttgaaatatgcattggagcagccagaggactccattaccttcacacgggctatgcaaaagcagttattcatcgtgatgtgaagtcggcaaatatcttacttgacgagaatctcatggccaaagttgctgattttggactgtcaaagacaggtcctgaacttgatcagacccatgtcagcacggcagttaaaggaagttttgggtaccttgaccctgagtatttcagaagacaacaactgacagagaaatctgatgtgtattcatttggcgtggtcttg

SEQ ID NO: 219322 - DNA, 316 bp, Gossypium hirsutum
ttcattgatgaacataactctaacaacaacactacatataagcttgggttgaacaagtttgctgatttaaccaaccaagagtaccgagccaagttcttgggcaccaggactgaccctagacgtcgactcatgaagtccaagatccccagctcacgttacgctcaccgtgccggcgataacttgccggattcagtagactggagagatcatggagctgttagtccggtcaaggatcaaggatcttgtggtgagtgaatttttatgtaatttctaacttcaaaatgaaaataattatatccatgcacttctttttttt

SEQ ID NO: 219323 - DNA, 421 bp, Gossypium hirsutum
gaaaaaatcaaacctttttcatcgtttagcaaagctaaaccagaagaaaggggaaaatggacgcaattgactcagttttcgatccactgagagagttcgctaaggacagtgttcgtctcgtcaagagatgccacaagcccgatcgcaaagaatttaccaaggttgcgttccgaacagcgatcggattcgttgttatgggattcgtaggatttttcgtcaagctcatctttatccctattaacaacattattgttggatccggttaggccttgtcaacgtttgctgaaaatcggtagaatgtttaagttaagaggtacgtcatgagtttatgaagtaatttcaatttagacttgggtttgtctttaaattcagttttgttgaaaaagggttcaattttggtgtttgtaatagaatcttgttg

SEQ ID NO: 219324 - DNA, 423 bp, Gossypium hirsutum
gggaaaacgagtggctgaaactttgatgtttgattaccataggcagcatggcatagagattcgaattgctcggatcttcaacacttatggaccacgcatgaacattgatgatggtcgtgttgttagcaatttcatagctcaagcactccgcaatgagcctttgactgttcaattacctggaacacagacaaggagtttctgttatgtttccgacatggttgacggcttaatccgacttatggaaggagagaacaccggaccaatcaatatcgggaatccaggtgaattcaccatgctcgagcttgcagaatccgtgaaggagcttatcaatcctgaggtgaagatatcgatggtggaaaacactcctgatgatccccgacaaaggaagccggacataaccaaagcaaaagaggtgctcggatg

SEQ ID NO: 219325 - DNA, 415 bp, Gossypium hirsutum
ctaagatatcgagccatcccccaaatctaatagtcagtttttacacgatggcggagttgttggacaaggcgaagaactttgtggccgataaggtggccaatatgaagaagcctgaggctagcatcacggatgttgatctgagccatgtaggccgtgacggcatccagtatgacgctaaagtctccgtcaccaacccctatagcgctcctatccccatctgcgagatctcttacactctcaaaagtgctggcagggtgattgcatcggggaaagtaccagacccgggttcactgaaggcaagcgactcgacgatgttggacgttgcagtgaaggtaccgcatagcgtattggtaagcttgataaaggacatcggtgcagactgggatattgactatgaattggaagtgggactcac

SEQ ID NO: 219326 - DNA, 379 bp, Gossypium hirsutum
  unsure (1)..(379): unsure at all n locations
gggggggagggaagcgtggggnnaaaactaatttttcaaaccctgtctttttattaccaaaggcancatggcatagggagggttattgttcagatctgcaacactcataaaccactcatgaacattgatcatggtcgcgttgatagcaatcaaatatctcaagcactccgcaaagaacctttgactgttcaattacctgcaacacagacaaggagtttctgttatgtatccgacatggatgacggcttaatccgacttatggaacgagataacaccggaccaatcaatatcggtaattcaggtcaatccaccaaactcgagcttgcagaatcctttaacaaccttatcaatcctgaagtaaatatattgatggttgaaa

SEQ ID NO: 219327 - DNA, 390 bp, Gossypium hirsutum
tcttcacagaaaatagcgacttcgaagatgatgagagcagtgatctatttgctccccttgactttcatcttcttcaccatagctgatggtaagcgcatccttccactgcttcagcctcagcctcttgaatccttcaaggtcaatgcaacccagaatgtggggagctgcacttacacagtatcaataaggacaagctgttcttcaactacctacacaagagatcagatcagtcttgcatttggcgatgcttatgggaatcaggtgtatgcaccaaggctggatgatccatactcgagaacatttgaaagctgttcaactgatacatttcaaataaagggtccttgcacataccagatttgctatctttacctctacaggagtggatatgat

SEQ ID NO: 219328 - DNA, 417 bp, Gossypium hirsutum
gaaaaaagaagcaaaaaaacatggccaaagttctgttgttcattgcactatgtgtgcttccagctttggttagtgctacacgcattctgaataatcaattggtggtagaaggctatgtgtactgtgatacttgccgtgctggttttgaaacccctaagactagaagcctagctgatgccatggttaggttggtatgctccgacaggaagagcggccaagttgtcttcaaaaaggagggatacaccgacaaaaccggaaaataccagattcgtgtatccgaggatcacttggatcagatctgtgatgcagttcttgtgaagagctcccagcttggttgtgccacaatgtcccccggtcgtgaacgtgcccgtgttatcttgaccaacttcaatggcatttcatccaccacccgttatg

SEQ ID NO: 219329 - DNA, 427 bp, Gossypium hirsutum
tgaaaatgaaaggtcgagggccatgactgatatgaatggagtgtattgctcgagtagaccaatgaggattagtgttgccactcccaagaaagcatttggatatcagcaacagtattactcacaaggtagacaagcatcgaatggtgctgtggaacaaggtcttcattctcataatgactcgaacaatgctactatttttgttggaggacttgactcggatgttagtgatgatgatcttagacaacccttttcccagtttggtgagatcatctctgtgaaaataccgcctggaaaaggatgtgggtttgtgctatttgcaaacaggaaggacgctgaggaagcaatccagagcttgaacggaacaaccataggcaagcagaccgtccgactttcttggggtcgaagtattggaaacaaacagcggaga

SEQ ID NO: 219330 - DNA, 415 bp, Gossypium hirsutum
tgaaaatgaaaggtcgagggccatgtctgatatgaatggagtgtattgctcgtttagaccagatgaggattagtgttgccactcccaagaaagcatttggatatcagcaacagtattactcacaaggtagacaagcatcgaatggtgctgtggaacaaggtcttcattctcataatgactcgaacaatgctactatttttgttggaggacttgactcggatgttagtgatgatgatcttagacaacccttttcccagtttggtgagatcatctctgtgaaaataccgcctggaaaaggatgtgggtttgtgctatttgcaaacaggaaggacgctgaggaaacaatccagagcttgaacggaacaaccataggcaagcagaccgtccgactttcttggggtcgaagtattggaaa

SEQ ID NO: 219331 - DNA, 412 bp, Gossypium hirsutum
gaggactcaaaatcagcacttgaaaaagttcttagacatgaagatcttcagggagcccctctcttgatattagcaaacaagcaggatctctcagaagctttatcagctgaagaacttgcccaatacctagatcttaaaaagttggacgaaagggtttacatgtttgaggcggcttctgcttttgatgggatggggattaaagaaggtgttgagtggtcagtggaggtaatggagagaagcaagagaaccgagactttgagaattcgtgcaggtataactggtcctaattagagctttagagggaaagaaaccgagttacagctgcttcaaccctttttttgtagcttctgtgcataaatcagggttcacgttaggttttatattgattaaaagttaaatcaatttttcccac

SEQ ID NO: 219332 - DNA, 413 bp, Gossypium hirsutum; identical to SEQ ID NO: 197828

SEQ ID NO: 219333 - DNA, 425 bp, Gossypium hirsutum
ctgagatcaacaatggctactgatcaaaacgtgttgcaaaaacatgctgcgttcttcgataggaatcatgacggccttgtttatccatgggagacctttcaaggttttcgagcaattggagctggttatttactgtcaatggcgggtgctgtcttcatcaacctttctcttagtggcacaactcgaccaggaaagtttccatctcttctctttcctattgaggttaaaaacatccaaatgggaaaacatgggagtgactctggtgtatacgacagtgaaggaaggttcgtaccttcgaaatttgatgaaatcttcagcaaatacgcacgaacacatactaatgcgttgacatctgatgaactaatggcgatgctcaaatctaacagggaacctaaagattacaaaggctggattggaagctggac

SEQ ID NO: 219334 - DNA, 422 bp, Gossypium hirsutum
cgcaagagccgcaaggctcatttcacagcaccttcttccgtccgccgcgtcttaatgagcgcacccctctcatccgatctgaagtccaagtacaacgtccggtctatgccggtgcgcaaggatgacgaggtccaagtggttcgtgggacctacaagggacgcgaagggaaagtggttcaagtgtaccgccgcaaatgggtgatccacatcgagcgcatcacgcgcgagaaagtgaacggttccaccgtcaacgttgggatcaacccatccaaggttgtcatcaccaagctgaggctggacaaggataggaagtctttgctggatcgtaaggctaagggacgcgccgctgctgataaagataaggggactaagttttcagctgaggatataatgcggagcgtcgattaaggttgtcttttttt

SEQ ID NO: 219335 - DNA, 394 bp, Gossypium hirsutum
cgcagagaaccgcaaggctcatttcactgcttcttcttccgtccgccgcgtcttaatgagctgacccctctcatccgatctgaagtccaactacaacgtccggtctatgccggtgcgcaaggatgaccaggtccaagtggttcgtgggacctacaagggacgcgaagggaaagtggttcaagtgtaccgccgcaaatgggtgatccacatcgagcgcatcacgcgcgagaaagtgaacgattccaccgttaacgttgggatcaacccatccaaggttgtcatcaccaagctgaggctggacaaggataggaagtctttgctggatcgtaaggctaagggacgcgccgctgctgataaagataaggggactaagttttcaactgatgatataatg

SEQ ID NO: 219336 - DNA, 200 bp, Gossypium hirsutum
  unsure (1)..(200): unsure at all n locations
aagccaaacaacggcgcctatatgcgacccatccggggacancgacgtcttcncccgcgtcaccggtggtgaggtcggagcagccagttccatcgctccaaagattggttcgtcgggtctctctcccaaaaagatcgtgaaaaacattttcaaagaaactgccaagaatggaaggttctccacgtaactgataaactcac

SEQ ID NO: 219337 - DNA, 193 bp, Gossypium hirsutum
attggaagcagctgtgcactgtctgatgcacagaactcgtcactttttgtgaagattcttgtgattgagatttttggcagtgcacttggattatttggagtgattgtaggtataatcatgtcagctcaagcaacatggcctgcaaagtcagtgtaattttccgctcttagttacaacttagctctgtgagact

SEQ ID NO: 219338 - DNA, 428 bp, Gossypium hirsutum
gcaaaaagaacccaccgctttattgttttcaaaatcgaggagaagcagaagcaagttatcgtggagaagcttggtgagccaactgagagctatgaagattttactaaatgtcttcccgctgatgaatgtcgttatgctgtgtacgattttgattttctaacagccgagaacgtcccaaagagcagaatctttttcatcgcatggtctcccgatacatcaaggatcaggagcaaaatgatatatgctagctccaaagacagattcaagcgagaactggatggaatccaagtggaattgcaagcaacagatccaaccgagatgggtcttgatgtcttcaaaagccgtgcaaactgaatacagttcttttaggcttttgcaacggggaagcttccttccttccttcctacagtatgtcttttacttatgtg

SEQ ID NO: 219339 - DNA, 420 bp, Gossypium hirsutum
caatggttggcttgcttgcatatttgtcgtttacaatgggaccaatgccattgcttaaactctacggcatcccttatgcaatatttgtgatgtggttggatttggtgacatacctacatcaccatggtcatgacgagaagcttccatggtatcgaggaaaggagtggagttacctgagaggagggcttacgacgcttgatcgggattatggatggattaacaacatccaccacgatattggaactcatgttatacatcatctcttccctcaaatcccacattatcacttgattgaagctaccgaagcagcgaagccagtgctcgggaaatactacagggagccaaagaaatccgggcctttaccattttatttacttgggatactcataaaaagcatgagaaaggatcattatgtgagtg

SEQ ID NO: 219340 - DNA, 419 bp, Gossypium hirsutum
ttccgaatcttttacgactcgtaaaatagttgaattgactcatggcttccgccgttgcttccgttgcgaagaagaaaactgctggctctaagaagtctaaatcagctccttcacatcctccatttcttgagatgatttcagatgcaatcgtttcgttgaaagagaggacagggtcgagccaatatgcgatcgcgaaattcatcgaagagaagtataagcaattaccggcgaatttccgcaaagtcttacttgttcagacgaagaagtttgttgcttctggaaagcttgtcaaagtaaaagcctcttttaagctgccttcggcttctgccgcagctaagaaaccggccgccgtagctaagaagcctgccgccgcgaagcctaaatctgcagctaccactgccgcctcaaagtccaagccg

SEQ ID NO: 219341 - DNA, 254 bp, Gossypium hirsutum
gaaatggagaatggtgaggcatttatagtctgcagtgcacgtattggaagttcaagcatttggaggaacaacgccatggaagctttctccatgtctgctcgtgaagaagatgatgaagaagacctgaaatgggctgccatcgagaaactgcctacatatttgcgtgtaaggagagggatattcacagaaggtgaaggtcaatcaagggaaaaaaaaaaaaattacacaacaaatttgaaacttatgttattcat

SEQ ID NO: 219342 - DNA, 419 bp, Gossypium hirsutum
gaaaaaagaatggcagaggagcatagatgccaagcgccagaggccatcgctttgcgtcaataactgcggctttttcggaaattcggcgacgatgaacctttgctccaaatgttacagagatctctgtctcaaggaacaggaagcttcttcgatcaaatccgctctttcctcttccccttcgtcttcgtcaacggttgtcgaatctatttctcaggttcctcttttggctctccctgaagtcaacagagaatcggcggtcccggagattgcaccggcggccgaacagctatcgcagcaacaaccgaatcggtgcatggtttgcaggaagcgggtcgggttgaccggattcagatgcaagtgcggtgttacgttttgcgggtcccacaggtaccctgagaatcacgggtgtacgttcgatt

SEQ ID NO: 219343 - DNA, 415 bp, Gossypium hirsutum
caagaactgtgatttccaaatggatcgttacgtcttcaagcgtcgcaatgacggaatttacatcatcaaccttggcaagacctgggagaagcttcagcttgcagctcgtgtaattgtcgctatagagaaccctcaagatatcattgtccaatctgcaagaccctatggtcagagggctgtcttgaaatttgctcagtacactggttgtcatgccattgctggaaggcacactcctggtacattcactaaccaactccagacatctttcagtgagcctcgccttcttatcctcacagatcctaggaccgaccaccagcctatcaaggaagcagctcttggaaatattcctaccattgctttttgtgacacagactcaccaatgcgatatgttgacattggtattcctgctaataac

SEQ ID NO: 219344 - DNA, 409 bp, Gossypium hirsutum
cccacgcgtccgcccacgcgtccgcgatttctcctccatcaaagaagaagccaaacaatgccgcctaaattcgacccaacccaagtcgtcgacgtcttcgtccgcgtcaccggtggtgaggtcggagcagccagttccctcgctccaaagattggtccgttgggtctctctcccaaaaagatcggtgaagacatcgccaaagaaactgccaaagaatggaagggtctccgcgtaactgtcaaactcaccgtccagaaccgtcaggcgaaagtcgctgtggtcccgtcggcggcggctcttgtaatcaaggcgttaaaggagccagagagggataggaaaaagaccaagaacatcaagcacaacgggaacattaacctcgacgacgtcatcgaaattgctaaggtaatga

SEQ ID NO: 219345 - DNA, 426 bp, Gossypium hirsutum
ctctaccaagctcctactcgctctcaatggagtcaagaaatcccagctccgcccactccctacccagatccaagctgaggcactttctacccccattatttccggaacaagccaagggagtggagagtacttttcccgggtcggagtcggtaaaccggctaaacaattctacatggttcttgatactggaagtgatatcaactggattcagtgtgagccctgtaacgaatgttaccaacaatccgaccccatatttaacccatccgggtcctccacttacagcccggttacttgcgaatcaaaacagtgctcttctcttgaagtttccgcttgccgtagcgggaaatgcctataccaagtctcgtacggtgatggatcttacacggtgggtgatttcgttaccgagacagtgtcgtttggaaactc

SEQ ID NO: 219346 - DNA, 409 bp, Gossypium hirsutum
ggcacttgcagcgttatgacaacctcggtcgccgccaggtcgtcgggtgcattccctatagattcaaatgtagcagtgatggaaccattagtgatgagttagaggttcttgtaatctcctcacaaaaaggtcaaaaaatgatgttccctaagggtgggtgggagcttgatgaatccatagaagaagctgctttaagagagtcaattgaagaagctggagttataggcaatgttgagtgtgaactgggcaaatggtactttataagcaaaagccatggcacattttatgaaggttacatgttccctttgcttgtgaaggaggaacttgatttctggcctgagcagaatgttcgccgaaggacttggatgaatgtgaaagaagcaagggatgtatgccagcattggtggat

SEQ ID NO: 219347 - DNA, 409 bp, Gossypium hirsutum
caggttcgtggtgcaatggaaaaatatcctccctatcaatcgattttctctaaattatcatatggagaaagtcaaatgcttgacaaagcattttacgaggaggaagtgaaaaggctttgcttagctttcgagcaacagttccattacggtgttttctttgcatacatgagattaagggagcaggagataaggaacctgatgtggatctctgaatgtgtggctcaaaaccaaaagtctagggttcatgacagtgtggtctttatattttaaatgatccatctgaccaccgagccgaagtgggttaggaataatgaatggtaatgtcttttacttgatcagctgtacattgtctgtcctccctcaaattctccacccatattttcatttaagtggtgtgtttagccgctct

SEQ ID NO: 219348 - DNA, 261 bp, Gossypium hirsutum
tttttttgcaatatcctgcttccgtaactgtgcttcaatatcaactcttctttttccctcaagttcttcaatggttgttgggaacttaggctgttccacaggtctatcttcatcagcaacatcataaaaccccggaggaggcctcttctcaaaggggatttcagcattataatcaattccctttctttttctctttcgttgccttgtatcgatcccagcagccttaagttccctccttttctgcaaagatgcaaggcaacg

SEQ ID NO: 219349 - DNA, 418 bp, Gossypium hirsutum
atggttttagactgtcttgtcttaggtataagggctataattaagttattcagggttatcttacttcggattgggtttccttaaaatgcaacttttttttccctccttttggcagggtggatttattgatgatttcctctcacatttgatgtgctgctgttgcgcccttgttcaagaatggcgagaagtagagatacgtgggtttaatgggtcagagaagactaaaacaagcccgccaccatcacaatttatggaatcatgagtaacaggacaggataggattcaaagcttttcccttcttttttttttggaggtttaatatatagagcgtaaccctccttagtggcctctgtgaaattaaaactgtactaagaatatggcgccctttgcttttgaacctatagatatgtaaattagt

SEQ ID NO: 219350 - DNA, 412 bp, Gossypium hirsutum
cttggtggtgtcatgaccaaaatcattccaagaaacaccacacttcccacctccaaatcggaggtcttttcaacagctgctgatggccagacaagtgttgagatcaatgtactccaaggtgaaagagaatttgttcgggacaacaaatctcttggcagcttccgactcgatggtattccaccagcaccacgtggtgttccccagattgaagttaaatttgacattgatgccaatggcatcctttctgtaactgctgtcgataaaggaaccgggaagaagcaggacatcactattactggtgccagtactttgccaaatgacgaggttgatagaatggtaaaggaagctgagaagttttcaaaggaggataaggagagaagggatgccattgacacaaagaaccaagctgatt

SEQ ID NO: 219351 - DNA, 422 bp, Gossypium hirsutum
caaatttctaaagctattgaagaagaatggcaagttcctccattatttttctcttgctttcccttctatgcattgtttgcgaggccagatctccaactgctgcaagatcaggtgcctcaaatttcatcaaggcttcatgtagtgccaccaaatatccatcactttgcatccaatctctcgcagcttttgccccttcaatccagcggagcccacgccaactggctcagactgccctttcggtgagcctagagagggcaaagtccacccaggcattcgtctccaaaatgaagaaattcaggggacttaagaggagggaatatgaagcaatcaaagattgcattgaggagatgagcgagagcgtggacaggctgagcaaatcagtgcaagagctcaagtacatgggtcaagccaagggtcaggat

SEQ ID NO: 219352 - DNA, 409 bp, Gossypium hirsutum
aacgtgggctagatgggtgaaccgcaatgttgatcctttgaaaaccaaggtttttttccagggcatttctccaacccattatgagggaaaggattggaacaagccaacagagtcctgctcgggacagacacaaccattcttcgggatgagatacccaggaggcacacccatggcttgggttgttgtgaagaaggtcctgagtaggattaagaaaccggtgtttttgctcgacgttaccggactctctcagtaccgaaaagatgcacacccgtcggcatacagaggcatggacggcgggactgactgtagccattggtgccttccatgtgtgccagatacttggaacagtttactttatgcagctgttttttagtgaatttaggcaggaagatggaaaaccatttgtttt

SEQ ID NO: 219353 - DNA, 419 bp, Gossypium hirsutum
  unsure (1)..(419): unsure at all n locations
ggaacaaaagcttgctgcatagcatgtggaaatgcagagacttggtacagaaaaccagagaattgctgctacccatgggacattgagacaggaacttgctactgcacagcatgagttacagatcttgcacgctcagataggagctgtaacatctgaaagagaataacaaatgaggagccttacggataaaatagctaagatggaagcagaactgcaagctggacattgttataatagaatgttctttcaattttaaaactgtatgagcaaaatgaaatggactaggatactgcaaagaagtaatcactttgataataagtcattgagtttaagttggattataggttcaattgtatttattgttctagaggctacactaggtatcaactntagcaccctntctctttcaaatttttttt

SEQ ID NO: 219354 - DNA, 423 bp, Gossypium hirsutum
agaagatggtctagacttcgctgagctggcattaatgacagaaggatataccggaagtgaccttaagaatttatgcacaaccgcggcttatcggccagttagagagttaatacagcaagagagattgaaagatctggagagaaaacaaagagttgttgaagtacaaaacaaagaagatggtgcagaagaaagagtcattaccctaaggccattgtctatggaagatttcaggcaagcaaagaatcaggtggcggctagcttcgcatctgagggagctggaatgaatgagttaaaacagtggaatgacttgtacggagaagggggttcaagaaaaaaggagcaactatcttacttcctatgaaggggttcgttttacagttacagacaccgcaggaagaattttaacagagaaaccatgattga

SEQ ID NO: 219355 - DNA, 392 bp, Gossypium hirsutum
gtcttgcagcttgttaaaagcaatagatcttatacttgaaggagctcaaaaccttgtggtaccaatcaaaaccaagctcagcaacaagagaaaacagcaccagaagccatcaccgacggtcactgtccacaaaggccgtgaattctgctggttaactcaagaagatgtgattagattcctactcagctcaattggcctcttttcacctgtccctactttctccatcgacactcttggcatcatcagctctgaaatcctcaccattgagtaccactcccctgcttctgcagccataggagccatttctcgatcccttgtggaccaaacttcagtggctgtggttgacagtgaaggctgtttgattggagaaatttctcccttcaccttggcct

SEQ ID NO: 219356 - DNA, 418 bp, Gossypium hirsutum
gaacttttatatacataaaggatgctattgtagctgttctcttgatgattgaaaatccagatagggccaatggccatattttcaatgtgggtaacccgaacaatgaagtcacagttaggcaacttgctgaaatgatgactaaggtctatgccaaggttagtggagaaactgtgctggagtctccaacagttgatgtcagctccaaggaattttatggtgagggttatgatgatagtgacaagagaattccagacatgaccataataaacaaacaactcggttggaaccccaagacatccctttgggacttgctcgaatctaccctaacctaccaacacaggacttatgccgaggctattaagaaatctatagcaaaaccttctgcatcctaaaggaggctagatgtttaaaccacggc

SEQ ID NO: 219357 - DNA, 414 bp, Gossypium hirsutum
ctcgaagctgctgtttgcctttgcaccgctatcaaagctaacatcttaggcatcaaccttaacattccagtttcccttagcttgctcctcaacgtttgctcaaagaatgttccttccaacttccaatgctaagtcttcactgttcccaacattctttctagttttccttattgtgtttggttattgaaagttacggtttccgacatttgcagtaaatcagtggtttttcatttgtaactttattatttcaatttccttgcgagggatggatactgaataaatttaatacttctcttcaagtgtttttcttttggggttttttgtttctccaaaagacatgaaaaagacttgtttaattcccttgcttttgtttctctatccatttactaatggattttgtatgtgaaccaatct

SEQ ID NO: 219358 - DNA, 350 bp, Gossypium hirsutum
  unsure (1)..(350): unsure at all n locations
acgcgnncgaggagactggtgtaatgtactacactgcttcccataggcacttacttgggccaaactatcagcgactacgagccaatgctgccaaatgagctcatcacaacgatcaccaaaaaggttttatgaatttcatagcacacaggatcaggacagaaatttctttccttcaaggtacaataacggtgcgtcgatgcaaaggaaccccctatcccacctgctgtttgcaccgtaaaagccaaaatgtgcggtatatgacaaggagagcatctttatacagaaccggacagagatacccgcgccgcgcagcgggctagcaataacgaatggtctggcgctgtatttag

SEQ ID NO: 219359 - DNA, 393 bp, Gossypium hirsutum
gtggtagaccagagatggtggcgggagggtaccattcacattctggatctggctgccggctcaatggagtggacataaacacacagcttagttacgaagctttgaaccaaagggccgcccccaaggtggagcacccaatgacgagcgtttaacggccagtggagaacgatgcatagcgttggaccaaaccacaaaccacgatgcttgcccaagagccacaaccatcatcatgtactcgcctgcattttaataagccacctatccaagcgttactacatgggctccacacacattcctactcgatgaacattagactgaccggagattgacactgagaaaaagatgctgttgaaacttcacaagaagaagatgacagatggactgacacttaca

SEQ ID NO: 219360 - DNA, 408 bp, Gossypium hirsutum
ggatgggttaggggggttttggaacataggtatctcggcgtgcgctgtgtgtgatggggcagctccgatcttcagggagaagcccttggcagtgatcggtggaggtgactccgccatggaagaatccacttttctcaccaagtacggttccaaggtttacatcattcacaggagggatacgttcagggcatccaagattatgcagaacagggttatttcgaaccctaagatagaagtcatatggaactcggtggtcgtagaggcctacggcgatagggttttgggagggctcaaggtgaagaacttggtcaccgaagaagtttccgatttgaaagtcaatggtctattctttgccatcgggcacgagcctgccaccaagtttttgggaggtcagctggagctcgactc

SEQ ID NO: 219361 - DNA, 375 bp, Gossypium hirsutum
attttacactgggttccccgtatattgtgttaggattgctccgcacgtcatgatgacttggatattcctcaaccagattcagaaggtagagaaaaaaatggggttgtagagcgttgtcacttctcagagacgtggagtaatgctggactaattgattgcgtcaaataaaatcctggatttttgctggttctggctaatcatgcaaattttgaaatacatttcaagtcaatgttgtcttatttttctgattaaatattttagggtgagataggaaaaccatttgcatcccagagttatgatttgattgctcatacttctgattaaaaataaatgtgtaccaaaccaagttcaaagcattaaatcttcatatttttc

SEQ ID NO: 219362 - DNA, 326 bp, Gossypium hirsutum
gacagcccccaaatccgatgatatttacctcaaactcctcgtcaagctttaccgtttccttggtagaagaactggaagcaaattcaatgctgtgatattgaaacgcttggttatgagcaaagttaacaagcctccactatctctctctaagcttattgaattcatgaaaggaaaggaggataagattgctgtggttgtggggacagtgacagatgatattagggtttatgagggttcctcttttgaaggtactgctcttaggtttactgagactgctagagctaggattgagaaagctggtggagaatgcttgacttttgatcagc

SEQ ID NO: 219363 - DNA, 403 bp, Gossypium hirsutum
aggaagtactgatggtatattggatgatcttgaaagagctgctgatgatggagtcaatacatataaggcaatgtgcaaggatagtcgtatggaacctggagctgctgctacagaaatcgagttggcgagaagactgaaagagttcttcttcaaggaaacaggattggatcagtatgccattgctaagtttgctgaaagttttgaattgctaccgagaaccctggcagagaatgctggactcaatccaatggatattatatctaagttgcatgaaaagcatgcatctgggaatggtcaagtgtgcatcgacttgaggggagacgactctgaggacggtgtttgcgaagatgtctcaaccgtgaatgtttgggacctttatgtcactaagttttggctctaaata

SEQ ID NO: 219364 - DNA, 338 bp, Gossypium hirsutum
aaaactctctcattttatcactgccgatttttcagcagccgcgccacactcgagagagagctcgtcagccatggccgaacagactgagatagcctttttgaagcaaccaaaagtgtttttaagctcaaagaaatcttcaaaagggatgagacctggaaagggaggtaaccgcttctggaatgagcttaggttggtgcttgatgactattggtgaagctatcgatggaacctacttctacactaaatgcccgggagctggcactgaagcggtcaggagagctagcatatctgaatcgtgccatagggctcatattgataggacactaatctgacgacgg

SEQ ID NO: 219365 - DNA, 424 bp, Gossypium hirsutum
agcagctgcaccacaactacagagaagagagttaaggggaaaaaaagcgtcgtcgtttttgctgcttcttctacttcgctctctctccttctccgaagttcctctttcgttctttcatttattcagtattgtaaaagatggccgacggtgaggatattcaacccctcgtctgtgataatggaactggaatggtgaaggctggttttgctggtgatgatgctccaagggcagtttttcccagtattgttggtcgtccccggcacactggtgttatggttgggatgggtcagaaggatgcctatgtaggagatgaagcacaatctaaaagaggtatccttactttgaaatatcctattgagcatggtattgtgagcaactgggatgatattggaaagatctggcatcatacattttacaatgaact

SEQ ID NO: 219366 - DNA, 344 bp, Gossypium hirsutum
ccaaagagctcatgtattaaggacggcttatctaaaaattgccaaggcccaatccaaggagctcaataatgatgctctttaagcaatggaaacacaaaagaagccgtaggaattcaaggatgaggcaatgcctgatgtgaaatcattggacatccgaaactttatctgaaactcgaaattcgcctttggtggttccagtttgagggagaacaagtataactgttcaacaattgcttaaaacctttctttttcattttgctacaataatatgattaataataataatggaaaagttgaaactcattattgaatgtgcacaaccgtaatatctgaacaacttaaat

SEQ ID NO: 219367 - DNA, 436 bp, Gossypium hirsutum
agcaatgcaacaactgttgctccatcggcgatcaaacttgcaccaaagtgctcaagtatgaagaacaactggagctaaaaattgccaaggcgcaattggaggagctgaagaaggatgctcttgaagcaatggaaacacaaaagaagcgggaggaattcaaggatgaggcaatgcctgatgtgaagtcattggacatccggaacttcatctgaaactcgaaattcgcctttggtggttccagtttgagggtgaacaagtataactgttcaacaattgcttaaaacctttctttttcattttgctacaataatatgataaataataataatggaaaagtgaaaccggtgattgaaagtgcacaaccgtcagatctgaacaacttaaattggtggttttggttgtggttattattctcaagtttttgggatgaacttcg

SEQ ID NO: 219368 - DNA, 384 bp, Gossypium hirsutum
  unsure (1)..(384): unsure at all n locations
gctccattcaagcagtggtatctccagcactatggcattgacattggtcgcaagaagaaatcagctgcagccaagaaagaaggagaggaaggtgaaactgctacagaggaggtgaagaaaagcaaccatgtattgaggaagctggagaagcgtcaacaaaatcgcacgcttgacccacatattgaggaacaatttggcagtggtcgactgttggcttgtatctcttcacggcctggtcaatgtggccgtgcagatggatacatcttggagggcaaagagctggagttctacatgaagaagatccagagaaagaaagggaagggagctgcttaaaaattattgcatgagttttcagctttcatatcaaaantgccgcctgagttt

SEQ ID NO: 219369 - DNA, 401 bp, Gossypium hirsutum
gcttaaggaaaaatcgccaaataaaataccactaccctcaaggaatctacagatctctgtgcctctttctctacgtctcaaaccctaattccttaatttttacagaagatcgggggtttaatcgcggagaatcaaccatgtttaacaggcttttcgggaaacccaagcaggaagcaaatgctctaaccacgttagacaaattaaatgagacccttgaaatgcttgagaagaaggagaaagtacttgcgaaaaaggctgctgctgaggttgaaaaggccaaggaatttgccaaagggagaaacaagagagcggctatacagtgcttgaagaggaagagactatatgaacagcaaatagagcagcttggaaacttccagcttcgattcatgatcaaatgataa

SEQ ID NO: 219370 - DNA, 162 bp, Gossypium hirsutum
gcctttgctggctcttagctaggatgggtctttattttcgcgcaacaattcctcctggacagagaggggttgtcatgaaagatctattcttctacagggagcctgatgaaactaaacatctagaagaggaggaagccatctctactcctgagtattgaatgg

SEQ ID NO: 219371 - DNA, 440 bp, Gossypium hirsutum
  unsure (1)..(440): unsure at all n locations
gattgcccagctcgagctatggaaggagaattctaactggaaaatatgagaagaaggttgacgtgttgccaaagcacctcgacgagaaagttgctgcacttcacctcggcaagctcggagctaagctcactaagctcactaaagatcaagctgattacattagtgtgcctgttgaaggtccttacaagcctcctcattacaggtactgagggggacagttaatgagtttttatcgagaaagaaaaagcatccggatggtttgattgtttcttgttttactgaaatttcatgatggttaggtttttgttttattnttagagttcttttttgtgtttgggtgatgggaaagtgtctggggatgggaaaatgatgtgggatttggtctcttcttgtttgaagatgaccaaatggtttgaaataaaagtgttttgagggatgtg

SEQ ID NO: 219372 - DNA, 436 bp, Gossypium hirsutum
  unsure (1)..(436): unsure at all n locations
ggctcaactgagggtatataatttggggaatacttcgcctgtgccagtttcagatcttgtgagtatcttggagaggctgttgaaagttaatgcaaagagggatattatgaagttgccacgaaacggggatgttcagtttactcatgccaatattagcttggctcaaagagagcttggatataagccctcaactgatttgcagactggtttgaagaaatttgtcaagtggtatcttggttactataatggtgggaagaaagctgctgggtgattcattctttgaattgcggtaggatcctccaaattcttgttcattatcattcgaatcctttgttttaacatttctctgttcgttaggaaattatcngttgttcatacatctttaatgatgccatcgtataaagaaggatatcatgtcctacttgggagaaagttt

SEQ ID NO: 219373 - DNA, 395 bp, Gossypium hirsutum
  unsure (1)..(395): unsure at all n locations
ggctcgactganggtatataattnggttaatttttcgcctgtgccaggttcagatcttggnagtatcttttagaggctgctgaaagttaatgcaaagagggatattatgaagttgccaccaaacggggatgttcagattactcatgccaatattagcttggctcagagagagcttggatataagccctcaactgatttgcagactggtttgaagaaatttgtcaggtggtatcttggttactataatggagggaagaaggctgctgggtgattcattctttgaattgcggtaggatcctccaaaatcttgttcattatcattcgaaatcttgtttttaacatttctctgttcgttaggaaaataatcgttgttcatacatctttaatgatgccat

SEQ ID NO: 219374 - DNA, 413 bp, Gossypium hirsutum
  unsure (1)..(413): unsure at all n locations
gtaccacattcctccgtcctctcaacgccaccgcggcacccgaaaaaatcgaaaacctcggcactgaaatctccaacttaaccctcgaagaagcccgaacactcgtcgactacctccaggacaaactcggtgtctccgccgctgcatttgccccttccgccgtcgccgtcgcagcaccagatgccggtggtgccgcagctccagttgttgaggagaagacggagtttgatgtggtgattgaggaagttcctagcaatgcgaggatagcggtgattaaggctgtgaggggtctgactagtttggcattgaaagaagctaaggaattgattgaagggctgcctaagaaaattaaaagaggagtttctaaagaggaagctgacgatgccaagaaacagctngaagaagctggtgct

SEQ ID NO: 219375 - DNA, 402 bp, Gossypium hirsutum
ctaaaaaggcaaaggaagtagtggaagcagtttaccctgataagaatttggtcactttcagagtgatcgaaggagatctaatggaagagtataagagctttgtaatcacgattcaagtttcgcccaagagcgagggtagtggcagcttagtgcactggactttggaatacgagaagctgcacgatgggattgcgcatcccgagactctgctgcaattcgttcaagatgtctctaaagacattgacgcccacctcacccaagcaagctaaacagtatcacatgttgctattgttaccgctactttaagcactattcatctatttaatgaataaagtgacaactttctttcttcagtattttgatctgaatatgtatgtttagatcaatattcactcaatggga

SEQ ID NO: 219376 - DNA, 432 bp, Gossypium hirsutum
caaatggataggatatcgaaagaggaaaggatttatatttcgggtatgattaaaaagattaaggcgactggttgtaaagttctggtgatccaaaaaagtattgggtgagatgcaagcacggatttatcaatgcattataaagccatggcttaaatgaccgatgctgaggactaaacgaggcataaaatactataaatattccaggatgaaagaagtcagctttgctcttatagtatgcactgtgcatatattatccttcgtcatacattacaaggattaaaatctcgactttatagctcgaaaaagagagaaaagaaaattataatataataatacaatgttctccttttgtttgtatttctgctgttgcttgtttgtttctttgcaagtgcaggtgtgctgacactcgggtattggctgtgctggcgcgga

SEQ ID NO: 219377 - DNA, 418 bp, Gossypium hirsutum
  unsure (1)..(418): unsure at all n locations
ctcaagctccagccttttggaacagttcctgtcactcaagatggagattatgttttatatgaatcccgtgcaatcataagatactatgcaaaaaatacaaatcacaagggactgatctactgggaaagacagtagaggaaaggggtcaagtggaaaattggctagaggttgaggcacacaatttcaacccaccaatttacgccttgaccctacatttgatgtttgcttccaagatggggttccctcctgatgaaaatttgatcaaagaaagcgaggaaaagctaggcaaagttctggatatttatgaggagaggctgtcaaaaaacaagtactnggccggtgatttcttcagccttgctgatctgagccacctacccattactcagtacttggtgggtcaaatggggaagggatacat

SEQ ID NO: 219378 - DNA, 153 bp, Gossypium hirsutum
  unsure (1)..(153): unsure at all n locations
ctattgggcattatgctagagagtacaatcatgcctaaggatatccagcttgctaggaggattagaggtgagagagcttangttgcctgtatttaccttgatttgattattaaaattttaagaaaaggaatctaagatatctttgggaatttt

SEQ ID NO: 219379 - DNA, 243 bp, Gossypium hirsutum
gcgaaatgatgattgtgtacgacttttacgccatacggaagcctcgacaaatggctgtttggcgcaggggttcttccctggacacgacgtttcaaagtcatcaacgacgttgcaaaagcactgagcttccttcattctaagcagctcgcccacaagaacatgaaaacaagcagcgtttttcttgatgtaagcttccgggcttgtttaagtgatttcgggatggtgctttcaacaaccgattct

SEQ ID NO: 219380 - DNA, 385 bp, Gossypium hirsutum
  unsure (1)..(385): unsure at all n locations
ggaagggtattgatttggccaccacacttgaacgtatagagaaaaactttggcattactggtccaagggtggctggtaatcccattatctttggctctgataactttttggaacttgccaaagtccatcgggaaaaaatactggccaaaactggagtttctacaaggccttgaactgtccagctactgtaaggaaatcgggaggcatcgataccagacagaataactgtgcagctaataactacactaagagtgggaagaagtctggaatctgttncatctacagnctatgcgtgatcagaaaggagaagttcagtatttttatcggagtgcagctagacggcagtgccaaagtcgatccacttcattatagtattcctgatact

SEQ ID NO: 219381 - DNA, 421 bp, Gossypium hirsutum
  unsure (1)..(421): unsure at all n locations
gcaagtccaagggtgatcgatgttatattaaaaagttcgataacattgttaatgactgcagcgaatttttcaaatctatctgtgctcaggaagaatacaggggaaagagcagatttttatatggagagcccgatgagaacgtggaaatggtgttcgcggatatcataggttggcttgacaagcgctgcaatgctgtaactttagaccaaagtctgggtcctttcgatcaaggttcggaagaatgcagtgataatatagtgatttcgatggcaacggccagtggcggaacacaagcaaacgggagatatttgtgtggtttgaagggaccacgcgcacggnctcactcggcaatgtaggctgatcgtatcaagttaactaaacgttgtctctgaatattgcaaaatatttgaaagggggaatt

SEQ ID NO: 219382 - DNA, 409 bp, Gossypium hirsutum
gcagccaacatggggaagacacgaggtatggtagctggacgtaagctgaggacccaccgaaggaggcaaaggtgggccgataagtcatacaaaaaatccaaccttggtaatgaatggaagaagccatttgctggttcttctcatgccaaaggcattgtccttgaaaagataggtattgaagctaagcaacctaactctgctatcagaaagtgtgctcgagttcaattgatcaagaatggaaaaaagattgccgcattcgttccaaacgacggttgtttaaattacatcgaagaaaatgatgaggtgttgattgccggatttggacgaaagggtcatgccgtcggtgatattcccggtgttagattcaaagttgtgaaggtgtctggtgtttcattattggcactttttc

SEQ ID NO: 219383 - DNA, 441 bp, Gossypium hirsutum
aatggacttgttgctcataaagatgggaaactcattggaacccagagtttgaagtcgtttctcggagaagataagctgaaggaatttataaacttcacattgcattatattgctgacttggatatcccgataaaaagggggacattcattgaattccgaagtgggatgcttaatgtatctccgattggacgtaactgtagccaagaagaaagggatgaattcgaaaagtacgacaaggttcacaatattcgcctgaaaatggtgtctgtacttcgagaaaagtttgctcaccttaacttgacattttcaattggagggcaaataagctttgatgttttccccgagggctgggacaaaacatattgcttgagatatcttgaagagtttcaagaaatccacttctttggggacaaaacttacaagggaggtaacgatcatgaa

SEQ ID NO: 219384 - DNA, 441 bp, Gossypium hirsutum
gcgattccctggtcagctcaactccgatctcatgaaacttgccgtgaatctcatcccctttcgtcgtcttcactttttcatggtgggttttgctccactcacttctagggggtctcaacagtaccgagctctaacagtacctgagctcacccagcaaatgtgggacgcaaagaacatgatgtgtgctgctgatcctcgtcacggtcgatacttgactgcatctgctatgttccgtggtaaaatgagcaccaaggaagtggatgagcagatgttgaatgtccagaacaagaactcctcatactttgttgagtggatcccgaacaatgtgaaatcgactgtttgtgacatcccacccactgggctgaagatggcatcaacatttattggcaattcaacatccatacaggagatgttcaggcgtgtgagtgagcaggtcacagc

SEQ ID NO: 219385 - DNA, 311 bp, Gossypium hirsutum
  unsure (1)..(311): unsure at all n locations
cggatatctcggctctcgcatcgatgaagaacgtagcgaaatgcgatacttggtgtgaattgcagaatcccgtgaaccatcgagtctttgaacgcaagttgcgccccaagccattaggccgagggcacgtctgcctgggtgtcacgcatcgtcgccnaaaaagaaaaaaaaaaaaaaaaaaaaaaaaaaaaaaaaaaaaaaaaaaaaaaaaaaaaaaaaaaaaaaaaaaaaaaaaaaaaaaaaaaaaaaaaaaaaaaaaaaaaaaaaaaaaaataaaaaatantaaaaaataaataaaaaaattggggggg

SEQ ID NO: 219386 - DNA, 370 bp, Gossypium hirsutum
aagaaaaagaaggtagcttctaaggaaaagtttgtggttctttgcaaggctcatcaaggatgtgctgcgcgacaaggttgaaaaggttgttgttcttgatcgagcggacgactcatctaggaggctacatgactgccgagcattgctggactgcaaacatgtaaagtattatgaaagcctatgctttgatgaatcacactatacattgttacatgtctagcacgtatacactggacttctaccctgataacttcatcatagaagatctgataaggagagccgatccataccatagtgatagatctgtccaggaccttgaactccttatcttctagactgctgatctgacctctaacttgaaacttgatga

SEQ ID NO: 219387 - DNA, 331 bp, Gossypium hirsutum
  unsure (1)..(331): unsure at all n locations
taaaaataaaaatggcccaatacatctttgaacatttaagcctcatgctaattaattaatgtatacgatgagttgcacattcctngacaaggcagccattctgacggaagaagatattgtaaaaccagggcaagctcctaatctatggagactgaacaccatccatcgagtggaggaactaaaagcagtgatccgaatgggaccgatatgggcagcaagaattcttctaatcacagcctatgctcagcaaaacacattgtccgttcaacaggccaaaagcatgaacaggcacctcaccaagttatttgagatccctgctggttccatgact

SEQ ID NO: 219388 - DNA, 431 bp, Gossypium hirsutum
aacttttatcacaacgccgacgtgagtaggtgttgcagattgtctccggtgattgcgatacgaagaaaacgcctggacaagataatgatgtaatgggtgaagttttgaaaacccatgaagcaattcaatctctagacaagtcggttgcaatgctagagatgcagttagctgcctctcgtagttctcaggaaatggacaatggggaggcatctaaagttgtttcaaccttgactcgtgatggtccacctaggaagaaggtgttcatggtcattggaatcaatactgcttttagtagtaggcgacggcgcgattctgtccgggagacttggatgccacaaggggaaaagcttattaaattggagcgtgagaaggggatcatcattcgtttcatgatcggccataggttaaccatttcacgcaagagaaagctt

SEQ ID NO: 219389 - DNA, 429 bp, Gossypium hirsutum
cagggttcatgtttgagaaacagctgatgaatgggttatatttcaatcaatcaccaacaaaggatgttgctttggccatggtgtccatgagatccaccccactaggtcctatcatggagaaactgtcattgacccccgagaagtacggaactgggcggcggttctacgttcagacattggaggatcgtgctctttcgccagatgtgcaagaaaagctagtaagagaaaatccacctgaaagagtttttaaggtcaaagggagtgatcactgcccattcttctcaaagccacagtcacttcacaagattttaatagaaattgttcaaattccttagcttaattttcagattaaaaaagaaaagaacatatttctttagtcttttatttctatagtgaaagaagacgataataagttgtcattacacttgt

SEQ ID NO: 219390 - DNA, 281 bp, Gossypium hirsutum
cccacgcgtccgcattttaaggaggccaacaatttcctctggcccttcaagctcaaggcacctttgggaggtctgaagaagaagagaaaccactatgttgaaggaggagacgctggcaatcgtgagaattacatcaatgagctaattcggagaatgaattagacgttggctttatttgttaattcagtatttttggtttgttttgaaggatcctgatatgatttcttttggccttttagaaacagttttgtttaaaaggatgaatatttttcacggtgttt

SEQ ID NO: 219391 - DNA, 433 bp, Gossypium hirsutum
ccagtccagcggcattcactagggcaacagttgtcattgccgtaaaatattctattgttgagcggccagagaagatagatgagatcatttatcctgagattgcttcattccttatgcttatcaaggatcaggatcgacatgttaggcgtgcagctgtgttggctttaagtacttttgctcacaataagcctaacttaattaaggggcttcttcctgaattattgccgcttctctatgatcaaacgactgttaagaaagaattgataagaactgttgaccttggtcccttcaagcacatcgtcgatgatggccttgagctaaggaaggcagcgtttgagtgtgtagacacattgctggatagttgtcttgatcagtgaacccctcatctttcattgtcccgaccttaaatctggacttgatgatcattatgatg

SEQ ID NO: 219392 - DNA, 374 bp, Gossypium hirsutum
caccgagcttttgaaggtcggtaaggacaagcgagctctcaaggtagctaaaagaaagttgggaactcacaaaagggcaaagaagaagcgtgaagagatgtccagcgttctccgcaagatgagagcccacggtggaggtgcagaaaagaagaaataaagctttattttcttggtttcttactgttgtcgtgctcgagtttcttgtttaggagcagctagaggtttgtttagcatatgtttcatttttgttgttttgagactgaaatcagtgctttggaacttttgtttatttgagttagagatgagaaattggaagaagtaataacttttaaattttatgtttcttgaattatatttaacgccattactattct

SEQ ID NO: 219393 - DNA, 447 bp, Gossypium hirsutum
cccacgcgtccgccaagtttgatttaagttagtgagtttcttagtttccctagaagttaagcgtggctcaaattaagaggatggagtgccaactcgagatcaagtcctcagctgataagttctttgatgcctacaagaccaaagcccagcttatgccaaaaatggccaatcaaatcgttagagatgtaaaacttgttgagggtagtggttgggattccgagagttcggttagacaatggtattttgttgccggaggtaagcttgagacttgtaaggaaatgatggaaaaggtggatgataaagataggactgtcgtttacaaattggtggaaggtgaaatcatgaaagctttcaaaagctggaactccatcctcaacgtgatgccgatgagggagggaagtttggtgaaatggactatggaatttgaaaagcaaaatgatgatgtcc

SEQ ID NO: 219394 - DNA, 438 bp, Gossypium hirsutum
gcgttatgatatcggccggacacatatcaggcggccatcttaacccagccgtcacgcttgggttgctattcggtggtcacatcacggtggtccgtgcgatcctctactggatcgatcagttgttggcatcttcagctgcttgtatacttctcaagtatctcaccggaggattgaacactccggttcacacattagcaagtggaatggggttccttcaaggtgttatatgggagattattctcacattcgcattgctgttcacagtgtatgccaccatagtagaccccaagaaaggttccatcgatgggctaggtccaatgctcactggcttcgtcgttggggccaacatcttagccggtggagctttctcgggtgcttcaatgaatccggctcggtcattcggaccggctctagtgagctggaactggaccgatcact

SEQ ID NO: 219395 - DNA, 327 bp, Gossypium hirsutum
ctttaaagtaggacgttacaacccagaagagagacaagaaaggatttccaagtacagagcaaagcgcaatcaaaggaacttcaacaaaacaattaagtatgcatgccgcaaaacactagccgacagccgtcctcgtatacgtggcagattcgcacgcaacgatgaagctattgagattcccaaagctgcatgttcaaccagagatgaagaggaagatgatttatgggtattgcatgaggttgaagatgatgaaacactagcaagaggagattttatgaacagtttctgtcaaaatcaatttcaataccaccatggctacttctgata

SEQ ID NO: 219396 - DNA, 355 bp, Gossypium hirsutum
cggacgcgtgggtgaggatgagctgagggatgctgtgctgctagtattcgcaaacaagcaagatcttccaaatgctatgaatgctgctgagattactgacaagcttggccttcattcactccgccagcgccattggtatatccagagcacatgtgctacttccggtgaaggactgtacgaggggctggactggctctcaaacaacattgcaaacaaggcataggtgtgacatgactgagttggcagtcttacaacccttttggattttatgaatgtctgcccccgttttatgtgttattttttatggtttttcacgtttgttgcaaacactgccatttgttacttatagtttaag

SEQ ID NO: 219397 - DNA, 413 bp, Gossypium hirsutum
gttcattatggaatttgcagagaatctggtgttgaggttaatggaggacccaaaagagagggatagaaaattcagagaacacgtttacactatgaaggatcgatgcgcaaaaaccaaggagatgtggagttatccactgcggccttatgggttttggacatttgagcgccacaatgctcagctccgttgggatcctcagattagccaagtccccggccgcagggatccttatgatgaccttcttcaagacagttatgcgtcctccaccaaacgaaactgaggaatcataagccattagcagatggtttggagcttgatctacaaatgggaagtggacattgaaaccttttttactgttggtttgaattaaaagattctgcttgttttgtagtgtacttttgaacatttcagtt

SEQ ID NO: 219398 - DNA, 387 bp, Gossypium hirsutum
  unsure (1)..(387): unsure at all n locations
cgaaaatctctcccccattttccacagtttagtttttgcagccacaacacagccaaagaaagaagaaaatggcgtcgaacgcggcggttccattctggcgtgcagccggcatgacttatataacctactcgaacatatgcgccaacctcgttaggaactgcttaaaggaaccttacaagactgatgcccttagtcgtgagaaagttcatttctccatctccaagtggacggatggaaagcctgaaaagcctactctccgcacagactcaccttgagaatgagatgcangtttggtcatggaagtttcgaactggaaggattttaatttttttttagtaatttctggtatgtctgaaacgtaagaacagatttcaagctgagatgatg

SEQ ID NO: 219399 - DNA, 433 bp, Gossypium hirsutum
  unsure (1)..(433): unsure at all n locations
ccgccgttgattattatcttcaaaaatacgctgcggcaactaagtgagttggtgcgaagatgagtcgtggtacagcagcgggacccaaggggaagaagaaaggagcgacctttaccatcgactgtgctaagccggttgaagataagatcatggacattgcctcactcgaaaagttcctccaggaacggatcaaggtaggcggcaaagccggtgctcttggcgactccgtcaccgtcacccgcgacaagaccaaaatcaccgtcacgtccgattccaacttctccaagcgttatcttaagtacttgaccaagaagtacttgaagaagcacaatgtccgggattggcttcgagtgattgcttccaacaaggacagatctgtttatgaactccgctacttcaatattgccgagaatgaangggaggaggaagaatg

SEQ ID NO: 219400 - DNA, 421 bp, Gossypium hirsutum
catccactctcccagaataccatcaaccgaatagattgctgacagaattaacaagatgcttgcgcgtgctcgagaccaacatcttgtgggttaaccctgactgtgggctcaagactcgcaagtacgcttaggtgaaaccagccctgagcaacatggttgctgctgccaagctgctccgcacccaactcgccagcgccaagtgataggctcccgagatattggaaatcctaatcccataccactccagagagattaaaaagaaaaatggcaaacaagtttcttctatcttatcatttgaataactttgattgttgctgaaatattagctacatgcccttggcgtgcctgtgatttacttatttttgggtttacttatctctaagtatcatgcacctttttgggaatattatatatatgcagt

SEQ ID NO: 219401 - DNA, 435 bp, Gossypium hirsutum
ctaagattcaggacaaggaggggattcctccataccagcagaggttgatctttgctgggaagcagttggaggatggtcgaactttagcagactacaatatccagaaggagtccactctgcatcttgtccttcgcctccgtggtggtttctaattgggtgtcttctgcttcttgtcgtaattttcatttctatggaactgtgggtgttatataatgaacactgtgttttgtggtgctgaaatggtcagtgaaccacatctttagttactgtatcgaataaagtttgatgttcaaacattattactgtgttatacttaaatcgagcttagctaagtttgtgtttatattttaagtaatattgaatttctgtattatctcttttgtttcatatattctctccgtggcaatattacggtcagtgaggatggcgtgctct

SEQ ID NO: 219402 - DNA, 448 bp, Gossypium hirsutum
gttttaaagaggggcttgagttttagccaaataaaactccatggctaaacttgttgctactggcttcttggctctcattgccatctccatggttcaaactttggttatggcatcacatggacatggtggtcaccattatgataacaaacgttatggacctggaagtctcaagccttaccaatgtccatctcagtgcacaaggaggtgtagccagacacagtaccataaaccatgcatgttcttctgtcagaaatgttgcaggacatgcctttgtgttcctccagggtattatgggaacaaacaagtttgcccttgctacaacaactggaaaaccaaggaaggaggccccaaatgcccttaaattactcaaaagaagacccttttttttcttttttacattattatccctataaatttcctatttgaaattcaagtcattgaagcataa

SEQ ID NO: 219403 - DNA, 269 bp, Gossypium hirsutum
cattaatcctgatgaggccgttgcttatggtgctgcggttcaggctgctatcttgagtggtgaaggaaatgagaaggttcaggatctattgcttttggatgtcactcctttgtcccttggactcgaaactgctggcggcgctatgactgttttgattccgagaaacactaccattcccaccaagaaggagcaggtgttttcaacttactctgataaccaacccggtgtcttgatccaagtttatgaaggtgagagagctccaaccccgg

SEQ ID NO: 219404 - DNA, 280 bp, Gossypium hirsutum
  unsure (1)..(280): unsure at all n locations
gntagatgctctcctcactgaatttcgctttaacagaactcgcccttggctcaggcctgggggctatactcatgtcaccgtcgaatattacaacgacaaaggtgccatggtgcctattcgtggccacaccatgctcatctccactcaacatgacgagaccgtgactaacgatgagatagctgctgatttgaacgagcatgtcatcaatccggttataccccttaaaggaccttgatgagttaaccatttttcaccttaacccgtcaagccggtttcgtat

SEQ ID NO: 219405 - DNA, 407 bp, Gossypium hirsutum
gttgtttcaaaaatctactggggaggagattccagagtaaaaattcttgatgccattgaagatctaaagcttgattctttggttatgggaagccgcgggcttggaactgttcgaaggattatattggggagtgtgagcaactatgttgtgacgcatgctacttgccctgttaccatcgacaaggaacaatcaagctccagcaagcactgagtagtttacataatattttctagttcgatttcccaaacaataatttgatggacgagtgtatgttgctggatcatgttttaccaagtagcttacgcagtgttacgtttgtttactgaatcttaaagatatatggtacgttgtgagttaatgcactgtattggggacgataatattaatggatatattttggcttggcc

SEQ ID NO: 219406 - DNA, 208 bp, Gossypium hirsutum
cttagttgatggatttgttatcctgaatattgatacagcgaatcctacaaacccatccatggaattggggcctgaattcaagaaggttggtaacttcttaagtcgattcaagtcgattccgaacatcattgagcttgatagccttaaggtgactggtgatgtttggtttggcgctgacattgtgctcaaggagaaagtgagtatcgct

SEQ ID NO: 219407 - DNA, 295 bp, Gossypium hirsutum
caaaccaaaggttaaccatgagagctaagtggaagaagaagcgtatgagaaggttgaagaggaagaggagaaagatgaggcaaagatctaagtagtacagtctttgttgttcttcatggatagttatttgatgggtacttttttttttgaaggatttaaagctgttgttttcattttcatggcttaaggttttcgttcttgtatttttgttgaaccattttcatctacttgataaatgttattggagttttaaaggatcgataatgattgaattggaaagagatagtttcttgct

SEQ ID NO: 219408 - DNA, 341 bp, Gossypium hirsutum
gttggttcaaaagtctactggggaggagattccagattaaaaattcttgatgccattgaagatctagggctagattctttggttatgggaagccgcgggcttggaactgtccgaatgattattttgtggagcgagagcaactatgtcgggacgcatgctacttgccctgttaccatcgtcaaggaacaatcaagctccagcatgcactgagtagtttacataatattttctagtttgatttcccaaacaataacttgatggacgagtgtatgttgctggatcatgttttaccaaatagcttacgcagttttacgttggtttactgaatctaaaaaatatat

SEQ ID NO: 219409 - DNA, 320 bp, Gossypium hirsutum
atcgacgccatggcacctaacggggtcgtttccgacaagagtttaatcgtgagtttcggtgagatgctcatcgacttcgtccccaccgtctccggtgtttctttagcggaagctccaggcttcctcaaagcccccggtggagccccagccaacgtggcgattgccgtctcaagactaggcggtaaagcatccttcggcggaaaactccgcgacgatgagttccgtcacatgcttgccgatattctcaagcgaaactgtttcttctgcgcccgaaacttattttgaccctttccttatacactctttaggtttatttacct

SEQ ID NO: 219410 - DNA, 388 bp, Gossypium hirsutum
aaagagcttcagcttggagaagaccacccttatgtgcatagattatttctggccatttacggaagcttcatggaggctattgatgcgattgacaatggaatcaaccagtttgatactgacaagccaccaaaatatgtgaacaatacacacatatcttctagagttggaagattaaatctagactggacagatcctgatcaatcacctgagaaggagaatgaggctttccaacgagcaatggctctagctggtagtgagttcttagaaagtgtccgatttcatgcaagatcatggctaccagcaaggtcaattgtattggagtgcttggcggaaggatttgacttaaatcctagggggaaattttgggtttggaaaaggtttggccctg

SEQ ID NO: 219411 - DNA, 277 bp, Gossypium hirsutum
gatgttgttgagtctactggtgtttttactgacaaggacaaggctgctgctcacttgaagggtggcgcgaagaaggttatcatttctgctcccagtaaggatgctcccatgtttgttgtgggtgtcaatgagaaggaatataagcctgaccttaacattgtctccaatgctagctgcaccaccaactgtcttgctccattggctaaggtgatcaacgataaatttggcattgttgaaggtcttatgaccactgttcattctattactgctacacaaa

SEQ ID NO: 219412 - DNA, 255 bp, Gossypium hirsutum
ggaaagccttatggcttctttggagaagaatgaatcaaagatttctccttccactttgtatgctattgcttggggtcttgaaaatggtcctttcatcaatggcagcccacaaaacacctttgttccaaggttgattgatttggctattcaaaagaactggctgattggaggagatgacttcaagaatggcccgaccaaaatgaaatctgtcctcgtggatttccttggtggggctggtatcaaacccacatcgat

SEQ ID NO: 219413 - DNA, 280 bp, Gossypium hirsutum
gttggatcagctattgcttatgggaagctaacgtcggatgcagcactagacccaccaggcttggtggccatagcggtagctcatgcacttgcgttgtttgttggggtagccattgcagccaacatctcaggtggtcatttgaacccagccgtcacctttggtttggccatcggaggaaacatcaccatcttgaccggccttttctactgggttgcccaatgccttggctcaattgttgcttgccttcttctccagtttgttaccaacgggattgagtgta

SEQ ID NO: 219414 - DNA, 387 bp, Gossypium hirsutum
atgagctttaataattttaagggcgagatcccgaaagagcttgcaaatctacccgagctccgttatctctatcttcaagaaaaccgtttcactgggcgaattccacccgaattgggcactttacaaaaccttaggcacttggatgttggtaataaccatttggttggtaccattcgggagcttattcgtattgaaggctgcttcccagttctacgaaatctatatctgaataacaattatttgaccggaggagttccggctcagctcgcaaatgtgacaaatttggagatattatacctttcatacaacaagatgtctggagtgataccaacggcagtcgccgatattccgaagctaacatatttgtacttggatcataacccattc

SEQ ID NO: 219415 - DNA, 415 bp, Gossypium hirsutum
ggcaaatctactggatttggtttgatttatgattctgtcgagagtgcaaagaagtacgagcccaaatacaggctgatcaggaacggactcgataagaaggtggagaaatcaaggaagcaaatgaaggaacggaagaacagggctaagaagatccggggagtaaagaagaccaaggccagtgaatcagcgaagaagaagtgaggtaagatgcccggaacggaaaaaggcgaggatcgcgcttatcttaaagccgatgtttctcgagagcgatgcataagtagtctgaagtttttaggtgttcttgaacctatatttttggaaactgagtttggtgttatttgattatttagttatacgctacttatagtatctgattatcctattttgaaatattttagtgttatgcagttttatt

SEQ ID NO: 219416 - DNA, 415 bp, Gossypium hirsutum
tgttggaaattaactgattcttccttgaatatcattgcggaaacctgttcaaatttacgagctcttgacattggtaacatatccaaactgacagacacttctttcggctatctggccagtggttgtcggtcattgcagtcattgaaactctgccacaatgcattcagtgatgatgctatagctgcatttcttgaaatgtctggggaggttttgaaagagctagcactgaacaatgttgggaaggttggtcttaatacagccttatcacttgcgaggcgttcaagaaatttggttagtctggatctatcttggtgccgaaatctgactcatgaagctacgggcttgattgtagatagcttgttatcgctgagggtgcttaatacttttggatgctctcagattacagacgtctttt

SEQ ID NO: 219417 - DNA, 406 bp, Gossypium hirsutum
gtctaccttttcgacaaaataatcacaaggtaatatcttttattcatatttatatttccaaccaatcaattgggataagtatttcatgcaaccttgtaatggtggcaggatgccaccagggcaagagaaattcatagtgataggagatcttaaaggatggggatacgcaaatagcgacatccgtgcataccttgcagctctatctctcgtacaggattattaccctgtaaggcttgaaaagctgttcgtagtccatgcaccattcatcttcatgacagcatggaaaggtgtttaccctttcatcgacccaaaaaccaggacagagatgatattcgttgattacatatcactcaaatcaactctgctagaagaaatacacgagagccaactgcctggtacattgggt

SEQ ID NO: 219418 - DNA, 313 bp, Gossypium hirsutum
gaggtgcaaattgcaaaggcagcaaaattaatggctactgaagaggtcaataagcctccttcacttccttcatacccacagctgattatgaacgccattgaagcattgaacgacaagaatggttctaacaagacatcaatatccaaatacattgaatccaagtatggagatttgcctgctggtcacactactctcctttcacaccaccttaatggtatgaaacaaacaggggaacttgtcttcttgaaaaacaattacatgaaagctgaccctaatgcaccacctaaacgtggtcgtggtaggccacctaaac

SEQ ID NO: 219419 - DNA, 425 bp, Gossypium hirsutum
  unsure (1)..(425): unsure at all n locations
cacaaaaacacctattctcttgagtaactgttacaaaattcagcaaatatggaagccaacaggggccagaacggtattcaacagctgctagctgcggaacaagatgctcagcatattgtcaatgctgcaagaaatgcaaaaatggctagactgaaacaggccaaggaagaggcagagaaagagattgctgaatatcgtgctcaagtagagtatgagttcaagaagaaggtggcggagagtagcggatactcggnggctaatgtgaagcggctcgagacggaaacagatgcaaagatcaatcacttgaaaaagaaagctgcagggttttttattgatgtggtacaaatcctttggaaaaatgggacaactgtgaggaactagggggtcttcatgaagactgatggttaaatttctactacattcta

SEQ ID NO: 219420 - DNA, 346 bp, Gossypium hirsutum
cgatattcagagagggatggttttggctaatccagggacaatcactccccataccaagttcagcgccgttgtctatgtgttgaagaaggaagagggtggcagacattctcccttcttcgcaggttataggcctcagttctacatgaggaccactgatgtcactggaagggtggcttccattatgaatgataaggatgaggagtctaagatggttatgcctggtgaccgtgtaaagatggtagttgagcttatcatgcctgtggcttgtgagcaagggatgcggtttgctatcagagaaagacggaagacggttggagccggagttattcagtctattattgagtga

SEQ ID NO: 219421 - DNA, 304 bp, Gossypium hirsutum
ataggccagggattctatcaaacgcaggtgttccaacgcttcccaccactggtttcgctctgcaaagcggcgaaaccaaagccattactgcaccggcatcatggggtggtcggttctggggtagaacccattgctccgaggattccaccgggaaattttcctgccttaccggcgattgtggctccgggaaggtggaatgttctggaaacggggctgctccgcccgcgagtttagctgagttcacattggacggtgctggcggcctcgattttttcgacgtgaggttggccagaggttacaacat

SEQ ID NO: 219422 - DNA, 416 bp, Gossypium hirsutum
gagatattccagattactgacctacttgttaatatcacaaagcatgtgctgaagccccaggaccgggtactaacagaacatgagaaacaaaggctcttgcagaagtacagcatagaagaaaaacagctccctcgactgttaaaaaaagatgccattgcaagatactatggttttgaaaagggtcaggtgataaaagttacgtatgggggtgaaatcactgagtcacatgttacttatcgatgtgtctggtgatgaaacaaatcaatgctgtcgctgttctttatgtttcttcctgtaggaaaattgagtttgtagttttctgtccgaagtgttttcccgaacctttctatggggcttccgacctttgtttgctgttttatgaacactaattgagttggattcttctttaattttac

SEQ ID NO: 219423 - DNA, 418 bp, Gossypium hirsutum
  unsure (1)..(418): unsure at all n locations
aaccctctcaaaaaacaatcctcttcctgaaagaaacgaaagtcttgaatttatttgcttggggcttgtaaagaaggagaagaaaaaaatggcagatgatagcacagctacctgcgtagatatcctcttagccatcattttgcctcctctcggtgtcttcctcaagtttggttgccaggtggagttctggatatgtcttgtactcaccctgtttgggtacatccctggtattatttatgctatctatgccatcaccaagtagtcctctaatcccatccttctcatctgtggagatttggagtaggattctggttttgtttgaatatgtgtcggntatagtattttatttcaattaatattttgtctgttaatttgatggtgatgtaaaagcttgtggtatgttatgatgatgatttat

SEQ ID NO: 219424 - DNA, 263 bp, Gossypium hirsutum
agctcaagagagttcgtcgtgaattcaaggctaacaagatctcagaggatgattatgttaaagccattaaagaggaaattaagaaagttgttgaccttcaagaagagcttgacattgatgtcctggttcatggagagcctgagagaaatgatatggttgagtactttggtgagcaattatctggttttgctttcacttgtaacggatgggtgcaatcttatgggtctcgctgcgtcaagccacccatcatctacggtgatgtt

SEQ ID NO: 219425 - DNA, 317 bp, Gossypium hirsutum
gtttcaggatacctgatcacaagtctggctagttggatgtccaatatcttcatcctcatgctgccattgattctaccattggcctgaatccaactcccctattggagctttcagcaacaattggcagcaaggagcttgctttgggtggtgaaattggatttgatacagcttctgcttcttttaccgagtacactgctgggatcaacttgaacaagccagatttctctgttgctcttttgctgactgataaaggtcaggcattgaaggcatcttatatccattctgtcaaccccttcacatgtgttgccgctgaaatg

SEQ ID NO: 219426 - DNA, 363 bp, Gossypium hirsutum
ggagcattaaagattacagatggtcaaattgagaataataatgttgcggctgaaacgtacagaatgccctttctgatgcttggtctggatttgccagaaccaccacttttcaaagatgtgatggagaaaaatataatacctcaggtacctttgtttaatatactaaagaagtttgatggtgagatggtaacaactactgttcgtgctccagcaagaatgagatatcgagtcaccatattgccacagtattttatacttcatatgcgccgatttactaagaataatttcttcagaaaaaagaacccaacattggtgaactttccaaagaaaaacctcgagttgaaagactacattcctttgcct

SEQ ID NO: 219427 - DNA, 364 bp, Gossypium hirsutum
ccttgagtgggtccaccatgagatggagatctatcccatttggctctgcccgcaccgactgttcaagcttcctgtcaagacaatggtgtatcctgaaccaggctttgagcagcatcgcagacaaggcgacacaccatacgctcagatgttcaccgatgttggggtgtattatgctccaagccctgtattgaggggtgaagtatttgatggtgcagaagcagttcgtaaattggagcaatggctgatcaaaaaccacagtttccagccacagtatgcagtgtcggagctcaacgagaaggatttctggaggatgttcgatgctgacctgtacgagcatgtgcgtaggaagtacggagctgtggga

SEQ ID NO: 219428 - DNA, 391 bp, Gossypium hirsutum
  unsure (1)..(391): unsure at all n locations
ctcgccgccgcctgcgtctctctcttcatctctctgaacctaaaagtctttagcttttcgcttcgagagagaccatgttggtttaccaggatctcatctccggtgacgagcttctttctgactcattcccctacaaggaaatcgagaatgggatgctgtgggaagttgagggaaagtgggttgtgcaaggagctattgatgttgacattggtgccaatccttcagccgaagatgctgatgaggatgaaggtgttgatgaccaatctgtgaaaggtggtgacattgttgacactttcaggcttcaggagcaccccctttcgacaagaagcagttgcgtgtcatgaagaagtcatcnagaactgacaccgaactggatgcgaaagcagagtcc

SEQ ID NO: 219429 - DNA, 419 bp, Gossypium hirsutum
taggtatcttgctgagttcaagactgctgctgagaggaaggaagctgctgagagcactttgttggcttacaagtctgcacaggatattgctctcggagacctagcgccaactcatccaattaggctgggacttgctcttaacttctctgttttctactatgaaattcttaactcacctgatcgtgcttgcaatcttgcaaaacaggcatttgatgaggctatttctgagttggatacattgggtgaggaatcctacaaggatagtacattgatcatgcaacttcttcgggacaacctaaccctttggacatctgatatcacggatgaagctggagacgagatcaaggaagcttccaaacccgagtcaggagagggacagcagtgatgagttaagttcatatgatatgtactctgtaatt

SEQ ID NO: 219430 - DNA, 282 bp, Gossypium hirsutum
attgtccatttcttttttgaaattcatcaccgatggcgaccgccatggtcgaagattcgagcttcgaagaggaccagttggcttcgatgaccaccgaggacatcgtccgagcttctcgtcttctagataacgagattcgaattctcaaggaggagatgcaaaggacaaatctcgagttagattcgcacaaagagaaggttaaagagaatcaagaaaagatcaagcttaacaagcaattgccttacttggttggcaacatcgccgagatattagagatgaatc

SEQ ID NO: 219431 - DNA, 431 bp, Gossypium hirsutum
cagaagcttcgggcgttttttgacaagaggatctctcaagaggttgctggagatgctttgggcgaggaattcaagggctacgttttcaagatcatgggaggttgtgataagcaaggatttccaatgaagcagggtgttctaactcctggccgagttcgtctcttgcttcatagaagtactccatgtttccgtgggtatggaagacgtaatggtgagcgcagaaggaagtcagtccgtggatgcatcgttagtcaagacctctctgttttgaacttggttatagtgaagaaaggtgagaatgatttgcctggtctgactgacactgaaaaaccaaggatgagaggttcaaagagggcatccaagatttgaaagctcttctacctttccaaggaagatgatgtccggaagtacgtcttcacttaccggaggac

SEQ ID NO: 219432 - DNA, 429 bp, Gossypium hirsutum
ggaagaagaattggtcctgtttggttctcattggtggcctctgaggaccaggaaggaggtgctcccctccctcagattcctgcaaattacctaaggataaaggatggaaatatgcctgtttcttttattcaaaaatacctgatgaagaaattggaccttaccgatgaagctgaggttgaaatcaaatgcatgggacaacctgtgcttcccacactgcagttgtataatttagtggatttgtggctacaaacagcatcgacatcacaacgtgtagctgcatctaggggttcttgtgcaaaggattttgtaatggcattggcatatgctcgaaaagagtcagggcaacaataaagcgttgtttcattcttttcccaccacgtcaataatcttaaatgcaaacattgatgatatgtatgagtcattattgga

SEQ ID NO: 219433 - DNA, 394 bp, Gossypium hirsutum
tcaatttgctgtttttaagaaggaagcttctcagagcactgggttgtctttcaaagctgcacaagatatttctctcatcgacctatctccacctcatccaattatgctggaacctgctcttaacttctcttttgtatactatgaaattattcactcacctgatcatgcttgctatcttgcaaaacaagcatattctgaggctatttctggatcggatacattgggagaggaatcctacaaggatagttcattgatcatgcaacttcttcgggacaacctaaccctcttgacatctgatatcacggatgaagctggacacgatatcaaagaaacttccttaccccactcctgagagggacagcagagatgacttaaggtcatatgataaatactc

SEQ ID NO: 219434 - DNA, 135 bp, Gossypium hirsutum
gaagaatttgcagctgtcagaatgggacatggaaccatcgaaaatgactctctaccggttcgggaacaccttaagcagttttctttggtacgaattaagttactccgaagctgatggttgaattagaaagggtga

SEQ ID NO: 219435 - DNA, 330 bp, Gossypium hirsutum
ggccaagaggaagctcagaggtctcatcgctgagaagaactgtgctccactcatgctccggttagcgtggcactcaactggaacttttgatgttaagaccaagaccggaggtccattcggaaccatgaagcattctgctgagctcgcacatgctgctaacaacggcctagatatcgccgtcagacttctcgagccgatcaaggagcagtttcctaaccttacctacgctgacttctatcaacttgctggtgtcggtgccggtgagattactggtggacctgaaattccctttcattccggaagagaagacaagccttaacccccttctga

SEQ ID NO: 219436 - DNA, 374 bp, Gossypium hirsutum
cttgcattaagtctcaaagatatcactgcatgaaaaaaaaaaaaccagacatggcttccaacactgttgcatccgctgctcttcttcttaccttgaacttgttgttcttcactttggttagctctacctacgtgccttgcccaccaccaccaaagagccacaagcctacccacaaaagcccaccctcggcacctgaacagccaggcacttgccccagagatgcactgaaactaggcgtttgtgctgatttgttgggctcaatgcgcgttgttgttggaccgtcgaagaccaaatgctgctctctcatttcgggtttggctgatctcgatgctgcttgttgcctttgcactgctattaaagctaatgtgttgggg

SEQ ID NO: 219437 - DNA, 376 bp, Gossypium hirsutum
caacgcctccatcactaacggcaacaagtccatcgagatccgtaatttccttggcgagaagaaggtgcgaaaggtggatatgttggaaggggtatccattgttcgatcagagaaggttaaagacgagatcgtgttggatggtaacgatatcgaacttgtgtcacgctcggcagctttgataaaccagaaatgccatgtgaagaacaacgatattaaaaagttccttgatggtatctatgttagcgagaagggcaggatcgctgaacaagaatgattggtacgggatctcttggttcataacgttataatgctctgctttggttttcaaactttaaattataaagatgttatcttatatttgtttcatctttatggt

SEQ ID NO: 219438 - DNA, 306 bp, Gossypium hirsutum
  unsure (1)..(306): unsure at all n locations
gacccacggngggggagaacccaaagtgtgagacaccccctggttttggcgaattttataggccaacgaacagggatccagctggtgaaggaaaatggtctcctacactcattgacaattccagttacaagggtatttggaagccttaagagattccaaaccccaactactttgagcttgaaaagcctgactttgatcctattgctgccattggtattgagatttggacaatgcaaaatgggatattatttgacaatattttgatggccaaaaacgacaaggttgctgagtcatatcgggagacca

SEQ ID NO: 219439 - DNA, 375 bp, Gossypium hirsutum
gcgcgttgttgttggaccgtcgaggaccaaatgctgctctctcatttcgggtttggctgatctcgatgctgctgtttgcctttgcactgctattaaagctaatgtgttgggggttaacctaaacgttcctgtttcattgtctttgctcctcaattcctgcgaaaagcaaatgcctgctggttacaaatgtgcttaagctcatttccactggttcctcaccaatgtttgggtttttcttttacgtggtctttttttttcttggcttgtttaatttggtattttgatatgtcaagggttagataaaatggtaaaggtttcttttaccttaaccaatagtcaattctcatctatttatacaatatttgtcatgttagt

SEQ ID NO: 219440 - DNA, 351 bp, Gossypium hirsutum
gggcaacaaccatcctcgaagtctaaggttggtatatttgtggcattagcaatggtattgcggcgtaaacccgatgccctaattagtgtattgccaaagctgagagaaggatcgaaatatcaaggacaagataagctccctgttattatatggatgataattcaggcatcccgaggagatcttgctgtggggctgtacatgtgggcgcatcacctcttgcctatagttggtggcaagaactgtaatccacaatccagagatctaattttacaactagtggaatggatcttatctgccccaaaagcttggacaattttagtaaatgccgcagttagaaaaagggaacgtttg

SEQ ID NO: 219441 - DNA, 396 bp, Gossypium hirsutum
  unsure (1)..(396): unsure at all n locations
aagggnngaaccacgcgnncgnttgggttaaatctcaaagttatcactgctttaaaaaaaaaaaaccaaacgtggcttccaacgactgttgcatacgctgctcttcttcttaccttgaacttgttgttcttcactttggttagctctacctacgtgccttgcccaccaccaccaaagagccacaagcctacccacaaaagcccaccctcgggacctgaacagccaggcacttgccccagagatgcactgaaactaggcgtttgtgctgatttgttgggctcagtgcgcgttgttgttggaccgttcaggaccaaatgctgctctcttattttgggtttggctgatctcgatgctgctgattgcctttgcactgctattaaagataatgggttgggg

SEQ ID NO: 219442 - DNA, 228 bp, Gossypium hirsutum
  unsure (1)..(228): unsure at all n locations
gaaaaaaggggngagcacgcggcccaacggctaattactaacttaacaaggtcttttttatcacgaatatccttggcgagacggaggtgcgaaaagtggatatgttcgaaagggtatacattgttcgatcagagaacgataaagaccacatcctgttggtatgtgaccaaatataacttgtttcaccctcggccgctttgattaaccatacatgccgtgtgaagaaca

SEQ ID NO: 219443 - DNA, 286 bp, Gossypium hirsutum
gttggccaccagttcgatcttataggaagaacattatggctaaccagaagaacaacagtgacgaaatcagtgacagagctagcagtggcagtggcagtggcggtgcaacgtttgtgaaggtttgcatggctggtgcaccatatttgcgtaaagtagatttgaagatgtacaacagctaccaaaagttatccgatgccttggctaagatgttcagttccttcaccatggggagttatggatgtgaaggaatgatagacttcatgaatgagagcaagttgatggatct

SEQ ID NO: 219444 - DNA, 377 bp, Gossypium hirsutum
gtgcaacaaccatcctcgaagtttaaggttggtatatttgtggcattagcaatggtattgcggcgtaaacccgatgccctaattagtgtattgccaaagctgagagaaggatcgaaatatcaaggacaagataagctccctgttattatatggatgataattcaagcatcccgaggagatcttgctgtggggctgtacatgtgggcgcatcacctcttgcctatagttggtggcaagaactgtaatgcacaatccagagatctaattttacaactagtggaatggatcttatctgccccaaaagcttggacaattttaataaatgccgcagttaaaaaaagggagcgtttggtgcccccggcttcatttgagattct

SEQ ID NO: 219445 - DNA, 298 bp, Gossypium hirsutum
gagaacccaaagtgtgagacagcccctggttgtggcgaatggaagaggccaatgaagaggaatccagcttataaaggaaaatggtctcctccactaattgacaatcccagttacaagggtatttggaagcctcaggagattccaaaccccaactactttgagcttgaaaagcctgactttgatcctattgctgccattggtattgagatttggacaatgcaagatggtatattatttgacaatattttgatagccaaaaacgacaaggttgctgagtcatatcgggagaccacgtgga

SEQ ID NO: 219446 - DNA, 353 bp, Gossypium hirsutum
gcatttggggcaaggtaactagaccgcatggtaacagtggtgtcgttcgtgctaagttcaagtctaaccttccccctaaatctatgggagatagagtcagagtcttcatgtaccccagcaacatttgagttgtctagatgcctgacggcattcgatcgatgactcaagtgactgtgcctttccaccaggttttacaaactttgtcgaaatgttttggtttcagtcattttgtttctttactaccatagaaactctgcttttgtccaaaatgtctcttctatctcggattttttgcgtgtttgttcatggacttcgaagttttgggtaatcaatcatttatggaacttgatagc

SEQ ID NO: 219447 - DNA, 395 bp, Gossypium hirsutum
  unsure (1)..(395): unsure at all n locations
aactgctggtgctgctcttgctactcatattccaagtggccagcttggtttcactgggtccacttgaaccgggaaaaatgttctttgagtgggttgcaaaaagcaaccttaaccccttaccatgggacctgggaggaaaatggcttttattggtttgcaaggatgttgatgtcaccaaggcggttgagctggccaactttgttttgttcttcattcaaggacaatgttgctgggcttgctctcgtacatacgtacatgagagtgtgtatgatgaatttttagagaaagcaaaggcacgtgcattgaaacgtagtgttggcgatccatttgtagcaggcattgaacanggtcctcagattgattcagaacagtttgaaaagatcatgaggtacata

SEQ ID NO: 219448 - DNA, 374 bp, Gossypium hirsutum
cattggacaaagtttccatctttttcaccactactgagtcaagtagaggttgatggggggaaatctttggacctgagtaattacccatacatatttatgagatggaaagagcaatacttcgtaaatgttgggacagactgtgggctaaccatagccggattttactatgtttgcttctcttgcagcgatggttctatcagcggcttctattacgatcctaatagcaggtttctgtatttcttcatgtccatttcagaagcttgagctgaaatccacaaatgaaggaagatcaggatacagtttttcatcatatgaactgcagtaaataagaatgtgggatgttgattccaatattatcagggaaatctgatttc

SEQ ID NO: 219449 - DNA, 341 bp, Gossypium hirsutum
aaggaagctcttgtagaagagtacagtgttgcatcacaagtttggaagctcaatgcttgcgacttatgtgagattgctagaaattctgtataccagtctgcgtttacgcatatgtcaaagttgcattggctagaccacaaatattttctatgacgtgcagaagggaatgacattcataagacagatgttccaaacatgaggattgcccttcgacatgagacatggatagatgagatgcagtatctctactcatggagagcaagaattccacaaaaaatagatcctgcgatgtaactgaatgtgatacgtgaatcatgaaatttcacgtagtgggacgatga

SEQ ID NO: 219450 - DNA, 377 bp, Gossypium hirsutum
agccgccgcctgcgtctatctcttcatctctctgaaccaaaaagtctttagcttttcgctgcgagagagaccatgttggtttaccaggatctcatctccggtgacgagcttctttctgactcattcccctacaaggaaatcgagaatgggatgctgtgggaagttgagggaaagtgggttgtgcaaggagctgtcgatgttgacattggtgccaatccttcagccgaaggtgctgatgaagatgaaggtgttgatgaccaagctgtgaaagttgttgacattgttgacactttcaggcttcatgagcaaccccctttcgacaagaagcaagttgtcgtgttcatcaagaagttcatcaagaacttgacaccaaaact

SEQ ID NO: 219451 - DNA, 375 bp, Gossypium hirsutum
cttggcgataacaacaattctagttgccaaatcaacatcagcagcaaagcagaagacaagaagaagaacaagaagaagaagcgtgggggaagcaagagaaagatgacggctgagcaaacctcggctttcaaatcggtgaccgaatgggtttatttagaccggcaccaccaccccaattcttcttcgacggcgggtttatcgtcgtgggtggtggatgattttggtgtgcaaaagagtttggggagagggacggagaaaatggtgtttgaattgcattcccattcgaaacacagagatgggttcttgtcttcttctaagctcgttgagagagctcatggcaatggggtgaaagatcttgctctgacagatcatgat

SEQ ID NO: 219452 - DNA, 366 bp, Gossypium hirsutum
gcacttgaaaaggctactgtgtcttacgggactgatcttgtgagatttacccagaagaattgcctgaggatatatcccaagggtactcggtttaactcctcaaactacatgccacaaattggttggatgcatggagctcaaatgattgcctttaacatgcacggatatggcagatccctttggttaatgcaagggatgtttagagctaatggatgctgcggttatgtaaaaaaacccgatttgctgatgaatgtggatgcgaacagtgagagagctaatttaccggttcagaagagattaatggttgaagtctacatgggacatggatggcactgagattttaaacacacacactatgacacctat

SEQ ID NO: 219453 - DNA, 386 bp, Gossypium hirsutum
gcgcgttgaaggtggttccgattgtgcttctgttggttcttttcgcattagcgaatgccaagaaatcagctgatgtgaccgagctgcagatcggcgtcaaatataagcctccatcatgtgaattccaggctcataaaggtgatagagtaaaagtgcactatcgggggaagctcactgatggaaaggttttcgattccagttttgaaagatgtgatcccattgagtttgagcttggtagtggacaagtaatcaaaggatgggaccaaggattgctggcgatgtgcgttggtgagaagcgcaaattgaaaatacctgctaagcttggatatggtgaacaggggttaaccacccaccatcccacgtggagcaacgctaatatttgacgc

SEQ ID NO: 219454 - DNA, 106 bp, Gossypium hirsutum
  unsure (1)..(106): unsure at all n locations
gctcaacgagaacagaaatctcgtgtggaacaanaaggtaaaagctcgtttgattctgatttccagtacgaatacgaaccggggaagcggggcctatcgatccttt

SEQ ID NO: 219455 - DNA, 199 bp, Gossypium hirsutum
tggaagactaaatgacattgttggaagtgcttattatgttgcccctgaagttctgcatagatcttatagtctggaagcagatatatggagcattggagtaatcacctacatcttgttatgcggaagccggcctttctgggcacgtactgaatctggaatttttcgttctgtgctaagatccgatcccaattttgatgat

SEQ ID NO: 219456 - DNA, 109 bp, Gossypium hirsutum
tggaaagggcacacagtcgcctatgattaatgatgattactgcttgtgccatttagccacaggtgatatgctcaaagctgcagttgctgccaaaacacctcttgggatt

SEQ ID NO: 219457 - DNA, 235 bp, Gossypium hirsutum
cacgcgtctgccccgtaagacccacaaaggtttgcgtaaggttgcttgtattggtgcctggcatcctgccagaatctcctttacagttgccaaggcaagtcaaaatggataccaccaccgtactgagatgaacaaaaaagtctacaaggttggcaaggttggtgatgagacccactctgccataactgattatgacaggactgagaaagatattaccccaattggtggggtccct

SEQ ID NO: 219458 - DNA, 394 bp, Gossypium hirsutum
  unsure (1)..(394): unsure at all n locations
ncatttcagggccattgttgtggttggtgatttgcaagggcaagttggggttggagttgggaaagctaaggaagtcattgctgccgttcagaaatcggctgtgaatgctcggaggaatctcattactatacctatgacaaagtacttgactttcccacaccgatccgagggtgactatggggcagctaaggtgatgcttagacctgccgcacctggtactggagtgattgcaggaggtgctgtgcgaattgttcttgaaatggcaggtgtggagaatgctttgggcaaacaaattggaagtaaaaatgcccttaacaatgccagagctacagttgttgctgtgcagaaaatgaaacagttccaggaggttgctcaagaacgaggaatccccatg

SEQ ID NO: 219459 - DNA, 374 bp, Gossypium hirsutum
gtttccgtacacttaagctctccaatcccagctttggtgatctgaatcatctaatatctgcaacaatgtctggagttacttgctgcttacgtttccctggccaactcaactccgatcttcgaaaactcgccgtaaatctcatcccattccctcgtcttcacttcttcatggtcggttttgctccactcacttcaagaggctcccaacaataccaagctctaactgtccccgaactcactcaacaaatgtgggacgcaaagaacatgatgtgcgcagccgatcctcgacacggccggtacttaaccgcatcagctatgttccgtggtaaaatgagcaccaaggaagtagatgaacaaatgctaaacgttcaaaac

SEQ ID NO: 219460 - DNA, 364 bp, Gossypium hirsutum
aggatattctaaatcttgtttacatctgcgagtgcaatggccttcctgaggtggcagagtattggaagtaagtcattaagatcaatgactatcagaaaaaccgatttgttaaccgtgttgtttcctcgatgtttaacaccgtttcaaacaaaaagattgctatcttagggttcgcctttaagaaggataccggtgacactagggagacccctgctatcgatgtatgcaaaggactcttgggagacaaaactcgattgagcatatatgaaccgcaagtgaccgaaaaccaagttcaacgggatctttccatgaacaaagttgactgggaccatcctcttcacttgcaacccatgagtcccacgac

SEQ ID NO: 219461 - DNA, 375 bp, Gossypium hirsutum
  unsure (1)..(375): unsure at all n locations
cggncgaatattcttacagcactggtaatcccatacattttcttgaaccttcctttctttctggtcaacattttggggggagaaagtgggaaatggattggttttattggaagccgtttgcccctggtctttccttccccgttaccaaaatggcttgaaccttctggaaccatggttccttttattagggggggaaccgacctaattttcaggcccaataaggaacgactggatgggggtggggatatgcctaggcataccttgttatctacttcaggaccacatcaaagcatcgggtgggtttcgaaattcattcaccaaagccaatggattatccaccacaatgggcataatatttctgttggttaaccctgc

SEQ ID NO: 219462 - DNA, 391 bp, Gossypium hirsutum
  unsure (1)..(391): unsure at all n locations
ttacagnactgttaatcaaatactttttattgagtttgacttagttgctgtntgggaggttgtggggagaagttgggaaatggattgattttattggagttgttttgtgcttgttcttccctacacgtgacccagattggctggaacttcctggagcattgatactggtgatagtggaggtaccgagcttattttcaagcacaataaggtacgactggattggtgtggagatatgcctacgcatagcttgttatctacttgaagagcacattacagcatccggttggtttcgaaattcattgagcataggcaatggggtatccaacacaattggtataattattgtgttggcttaccctgcttgggctttggacactgacatactgtagat

SEQ ID NO: 219463 - DNA, 380 bp, Gossypium hirsutum
  unsure (1)..(380): unsure at all n locations
cccagaccttagtttctctcggcatccgcttcgctttcctctcccctctcgacgccctccacggcgacattggcgcgctctccgccaccgacatcctcgtcctcttttcgaaatccggctccactgaagaactcctacgtctcatcccctgtgctagagccaagggggtttatatcatttcggtcacctccgtccccaacaatgccttggcaaacgcttgcgatatgaacgtgcatcttccgttggagagggaattgtgtccgtttgatttggcgccggttacttcgacagcgatccagatggttttcggagatacggtggcaatcgcgcttatgggagctaggaactngactacggatcaatacgcggccaatcatcct

SEQ ID NO: 219464 - DNA, 402 bp, Gossypium hirsutum
tcttgacaacacaagaaagctgaagaggccagtttcccagcttcagccccagcagctgagccccatcacgaaggggagtcaaaggaaaagaagggaattctggagaagatcaaggagaagcttcctggtaaacactccaaatcagatgaagaaaaagaaaaggcttgagattcaagttcacataaaaatactgatgggattgtgtgtttcttcaattgttaaaaaaatatctgtttttgttttgaggttgtatttgttgtatatttcatattaagtttcttcttttcccagcatttttagtacaaatcataagaaaaaaaaagtttgctttcggtatgtaagaaatgacatgtttccattctgtctttttgtgattcgaacagtatttaatgaatcaatttc

SEQ ID NO: 219465 - DNA, 333 bp, Gossypium hirsutum
  unsure (1)..(333): unsure at all n locations
ggaactaaaggagaccttgcaggaaataattggacaggggaagcaggttaagctggaacagaagatcgatcctagtattcttggtgggcttgtcgtaaagtttgagcaaaaagtatttgacatgtccattaagactagggcacgacagatggagaagttcttgcgtgagcctatcaactttggttccctctgaaagatgttataaccgccaagtgaccatttcaagttccttgtgcaccaattgggttattccgagaactgcaaagaataattaatggnctttttggtttgcctctggtttcttctactcttgacattatatgatgggatgca

SEQ ID NO: 219466 - DNA, 193 bp, Gossypium hirsutum
ttgggcttggtaaaaaggcaagcgggtttcaatcgcccaaatggactgggtttgttcggggggcaacaaatgaggatcttaatgtggttgtaaagcggcctgtttttcagttgcattccagtttcaataacccaccaagggttgtggagtctgctccatttgagttatcagaatcagggtggggcgaatttga

SEQ ID NO: 219467 - DNA, 386 bp, Gossypium hirsutum
tcgggtttggtccggggaaagaacaaaaatccaattttgattaaccttaaaagggatgccctaaaagaacctttttcaacaatggtagctaagtccaagggaaagcaccgtaggttaattgaaactattgaactccaaatggggtggaaaaactatgatccccaaaaagacaagcgtttcaggggttccgggaagttgccacacattcctcgacctaaaatgaaaatctgcatgcttggagatgcccagcatgttgaaaaggcagagaagataggtttagattatatggatgttgaagcactgaagaagctaaacaagaacaagaagttggtcaaaaagcttgccaagaagtatcatgcttttttggcttctgaatctgttatcaa

SEQ ID NO: 219468 - DNA, 368 bp, Gossypium hirsutum
ggcaaaaagaaatatatgtttggattggacgccactcgactattaaatcaaagcaagaagcccttaacttgggtctgaaattccttcaaacaaacattctggaaaaaaaactttctttggaggctcctatatatggtattaccgaaagggctggaccacccttctttacatggttttttggatgggaaccctccaaagccaatattccttggaatttatttggaccggaacttacttcccttgaagggaaaaccatcaaggggaactgccccttccaaaattgccctaaaaccgcgctccagggaagctaccccaaatggcttaagaagcaaatctagcagttcaaatggatgggaaagaagtttttt

SEQ ID NO: 219469 - DNA, 231 bp, Gossypium hirsutum
gatcgctgaggctcaacaacaagagaaggtttcttcggaggttccggcagctgaaaagaaaagatggacccttggcgattttgacattgggaagcctcttggacgggggaagtttggccacgtttatttagccagagaaaaaaggagcaatcatattgtggccctcaaagttctttttaaaagccaactacaacaatctaaaggtaacataactacgtcgagagtggaata

SEQ ID NO: 219470 - DNA, 353 bp, Gossypium hirsutum
catcgatgttatcaagaaggcgattgagaagttgggtctgcgccacaaggagcatattgccgcctacggagagggtaacgagagacgtctaactggtcgtcatgagactgcagatatcaactcattctcatggggtgttgcaaacaggggagcctccatccgtgttggtcgtgacactgagaaggatggaaaaggctacttcgaagacagaaggccagcatcaaacatggatccttacgttgttacatcaatgattgccgagaccaccattctctggaagccttaagaaggggtggaaattgaaaggtgtgaaagacgagaaggaaaaacctattcagattaataaccccctc

SEQ ID NO: 219471 - DNA, 257 bp, Gossypium hirsutum
ggtgataacacgtctcgtcatggaccatgtagggtgtatgttggtaatggtaattctctgcctgtgttatgctccggtcagtcagctcttattactaagacatgaccactttacatgaagtctttactatatacaccttgaataactaaaaacctgctttctgtgtctaagttcaccagaaacaatcaagtgatgtttaaaatctttccttcacaatgtcaagttcgagacttaaagaccaatgaggggcttcttca

SEQ ID NO: 219472 - DNA, 401 bp, Gossypium hirsutum
ggagtattcaccccattgaatcggaggggaaacaaggattacctagtaatgcggtcgatgacgatttaccgaatatcacaaagatctatacatagtgtgcttgcgctacttgaaagaaggaacttgctaaccaaatgttctatgatatggaagcatgtaaaaactacatacgtgtatagacacagtgaacgggacttgattgggagaaatcatatgatgaatctaggatatgaaactatgatagcgaatgcttaaaattgactgttggactaaacgatggctaattataagataagcatgtgaatgttcaaccatgggcttccggagtgcaagagacgtttactgggtcttatgtctttgtgtgcgctcatggtaatcgagacaagagatgtggtgtatgt

SEQ ID NO: 219473 - DNA, 424 bp, Gossypium hirsutum
  unsure (1)..(424): unsure at all n locations
ggaaagctagttcagatcgagcacgccttgacggcagtaggatcgggtcaaacatctcttggaatcaaagctgctaatggggtagtaattgctactgagaagaaattgccttcaatcttggttgatgaaacctctgttcagaaaatacagtgtctgacaccaaatattggagttgtttacagtggtatgggccctgattttcgagttttggttcggaaaagtagaaagcaggcagaacagtatcatagattgtataaggaaccaattccagtaacacagcttgtaagggaaactgcagctgtgatgcaggagttcactcagtctggtggtgtaaggccttttggtgtatctctactggttgctggatatgatgacaatggtccacaattgtatcangtggatccatctggttcctatttctcat

SEQ ID NO: 219474 - DNA, 247 bp, Gossypium hirsutum
  unsure (1)..(247): unsure at all n locations
ggaaagctanttcaaatctaacactttttgttttcaaaaggaacagcacaaacatgtgctcgtatcatttctaataatgacgtcctcaaccctactgaaaaaaaattaccttcaatctttcttgataaaacctctgttcacaaaatacagagtcttacaccaaatattgcagatccttacagagaaatggcccctgactttccaattttgaatctaaaaattataaaacacgcagaacattatcata

SEQ ID NO: 219475 - DNA, 406 bp, Gossypium hirsutum
cccacgcgtccggttttgtatttcatactcatttagcccctttcattagcatcgaaatcacgccagttttctttatcactgaaaaatgtcttgctgtggtggaaactgtggctgcggttctggctgcaagtgtggcagtggctgtggaggatgcaagatgtacccagacctgaacgttgccgagatgaccacaactgagactctggttcttggtgtagcaccccagaaagcacactttgagggagctgagatggaattcggggctgagaacggctgcaagtgtggagacaactgcacctgcaacccttgcaattgtaaatgattagagaccaaagccaaagctccctggaagcagaaacgcctttgtctttaaaaaataatatgttttggtggttatgtggtttta

SEQ ID NO: 219476 - DNA, 405 bp, Gossypium hirsutum
  unsure (1)..(405): unsure at all n locations
gttaaaaggacttgttacgctcagtccagccagattagacagatacgccgaaagatgagggaaataatgactgcccaggcaacatcttgtgatttgaaggaactggttcaaaagttcatccctgagatgattggaaaagaaatcgagaaggcaacatctagcatctatcctttgcagaatgtgtttattcgtaaggtcaaaatcttgaaggctcccaagtttgatcttgggaagttgatggaggttcatggtgactactcagaggatgttggtgtgaaactagagaggcctgctgatgagacaatggctgangctcctgcagaggttgttggagcttgaacgaaaaacaatagtccatgaatgtcttgtttttttatgcttctaggagtttttgctgatcatttt

SEQ ID NO: 219477 - DNA, 199 bp, Gossypium hirsutum
agatattgggcatgaaactgtaaatatctaaagggagtgccacacaaacccacacgtgcgactgtgatttaaagggggggagagaaaaaacaaacgtgtgaaaaaaaacccagatccgcgatggggaaaaaaatttcagtttatggggggtgaaccacccacgaatgataaaattcacatcgaagcgttcagtacattc

SEQ ID NO: 219478 - DNA, 401 bp, Gossypium hirsutum
gtacaaggtgttcagtgcttcacctgatcaatcaaggaaggaaatgcgtcaagcttgcttcgattatgtaagccttggtggtgtgttctcaacaagaccaatctccttgctctctggtttgaatcctcgccctatgagtttggtgatgcatttctttgccgcggcaacatatggtattggtcgtttactggttccattcccttcacccaaaagaatctggattggagctagattgatcacgggggcatcaggaatcatcttccctattatcaagtcagaaggagttaggcaaatgtttttcccagcgactgttcctgcatattacagagctccccctcttaagtgagaaacccatacttcctaatctcattagtgttcccccttttctagagtgtgggaaa

SEQ ID NO: 219479 - DNA, 416 bp, Gossypium hirsutum
gaaaaacttgcttacgttgctcttgattttgagcaagaattggagactgccaagagtagctgtgccatcgaaaagagttatgaattgcctgatgggcaagtgatcacaataggggcggagaggttccgttgtccagaagtactcttccagccatctctgattggaatggaagctgctggaatccatgaaactacttacaactccatcatgaagtgtgatgttgatattaggaaggatctttacggaaacattgtgcttagtggtggatcgaccatgttccctggcattgctgataggatgagcaaggaaatcactgcacttgcccctagcagcatgaagatcaaggtggttgcacctcccgagagaaaatacagtgtctggattggaggatccattttagcatctcttagcacctt

SEQ ID NO: 219480 - DNA, 401 bp, Gossypium hirsutum
agagaatcagagccgcagctgccgccatcgttatggtgaagtttcttaaaccgaacaaggcggttatcgtcctccagggtcgatacgccggccgcaaagccgtcattgtcagatctttcgacgatggcacacgtgaccgcgcctatggccattgtttggttgcagggataaagaagtatccgagcaaggttatccgcaaggactccgcgaagaaaaccgccaagaagtcacgcgtcaagtgcttcatcaagctcgtcaattaccagcacctgatgcccacgcgctacaccctcgacgtggacttgaaagacgtggttaccgacgatgctctccagaccaaggacaagaaagtggccgcttgtaaggcaactaatgagaggtttgtagagaggttcaagact

SEQ ID NO: 219481 - DNA, 402 bp, Gossypium hirsutum
ggagacttttttatcttgcacttccaccatcagtgtatccatctgtttgtaggatgatcaggaaatattgcatgaataaatctgatcttggcggatggactcggatatttgttgagaaaccatttggtaaagatttggactctgcagagcaactaagttctcaaatcggagagttgtttgatgaaccacaaatctaccgtattgatcactatttgggaaaggaattggtccagaacctgttggtacttcgttttgctaatcgcttcttcttgcccctttggaatcgcgacaacattgataatgtacagattgtattcagagaggattttggaactgagggtcgtggtggatattttgatgaatacggaattatccgtgatattatccaaaaccacctattac

SEQ ID NO: 219482 - DNA, 262 bp, Gossypium hirsutum
ggagacttttctatattttttttccaccattttactatacaactgtttgtgggattatcgggaaatattgcaataataaatatgaccctggcggatggactacaatatattatgagaaaccatttggaaaagattacgactatgcacagcaacgtaacttctcaaatcggacagttgattgatgaaccacaaatatactcgcatagatcactatttgacaaacgaattgtaacagaacctgatggcactaggctttgctaat

SEQ ID NO: 219483 - DNA, 421 bp, Gossypium hirsutum
aatttgtcataaatcaaacagattttgtcaaatctcgaaatcatcacattaattgcttcgtccaaagaaaacagcttaggaagtcgacttgggggaaaagctccaaggaagcagctagccacgaaggccgctcgtaagtccgctccggcgaccggcggagtgaaaaagcctaaccgtttcaggccaggaaccgtggctttgaaagagatccgtaaataccaaaagagcaccgagttgttgatcaggaagcttcctttccagaggctggtgagggaaatcgctcaagatttcaagactgatttaaggttccaaagcagggccgtcgttgcacttaaggaaccggcggaggcttatttcgttggattgttggaacacactaacctgtgtgcaattcatgctaagagggttactatcatgccca

SEQ ID NO: 219484 - DNA, 425 bp, Gossypium hirsutum
atacaagctatctctttccttctccaatgattacccttttaagcctccaaaggttaagtttgagactgcctgtttccatccaaatgttgatgtctttggcaacatttgcttggacattcttcaggataaatggtcatctgcttatgatgtaagaaccatactgctatccatccagagtctgcttggagaacccaacattagctcacctttgaacacccacgcagctcaactttggagcaaccaagaagaatataggaagatggttgaaaagttgtacaaacctcctaatgcataacttgagaaaccagaacaggagttttgttatgtttttttcttcttattattaatttttttttcttattgaagaaacgagaacatgaaatgtgtcatttttctacagcatgtatgattttactttactattg

SEQ ID NO: 219485 - DNA, 347 bp, Gossypium hirsutum
aatcaagccggctgagcatgtcaagaatccgttttttactgcgtggcattgatttgaaaacgtatatatttctatttatactggttccgacctgcatattcggtatatatattcatgggcagaagatttcatacttcctgcgcccgatatgggaatcgccacccaaaccattccatgatatcccacattattttcatgagaatgtatcaatggaggcgctctgcgaacttcatggttggagaattcgtgaatttccaagacgggtgtatgatgctgtgttgcttagtaatgaagaggatatccttaccatacgatggaaagaggtgtacccttacataacgcatttt

SEQ ID NO: 219486 - DNA, 373 bp, Gossypium hirsutum
aatcaagccggctgatcatgtcaagaatcctttgtatactgcgtggcattaatttgacaacggatatatttatattcatactggtcccgacctgcatattcgagatatatattcatgggcagaagatttcatactttctgcgcccgatatgggaatcgccacccaaaccattccatgatatcccacattattttcatgagaatgtataaatggacgcgctctgcgaacttcatggatggagaattcgtgaatttccaagacgggtttatgaagctgtgtcgcttagtaacgaagtggatatacttaccatacggatggaaagagttgtacccttacataacgcattttgttcttcttgagtctaattcaacat

SEQ ID NO: 219487 - DNA, 411 bp, Gossypium hirsutum
gcgaaggttctctacgtatccaagatcatattaccttattcatgctaatggtgtctttagcttgtatcaagataagtgtagctttgaagacatccttctggaaatggatcgcattttacggcctgaaggggctgtgatattccgggatgatgtcgatgtcctaaacaaggttaggaaaattgctggaggcatgagatgggacaccaagatgaatgatcacgaggatggtccccttgtgccagagaaaattctagttgcagttaaacagtactgggttggtggtatcaaaggaaacagtacatccagtgctgaataaaccaacatcaacaggtcaagtatttcaaggtaaaactaaaaagcaaaggttaaaatctcgaactgatggtgaagttggttcagacagagggactg

SEQ ID NO: 219488 - DNA, 341 bp, Gossypium hirsutum
acgggaaggacttcaggttttgaccctagaagatgttgtttcctaagctgatatattcgtcaccgcaaccggtaacaaggacatcatcatggttgatcacatgaggaagatgaaaaacaatgccattgtttgcaacattggtcactttgacaatgaaatcgatatgctcggtcttgagacctatcctggtgttaaacgcatcaccattaagcctcaaaccgataggtgggtctttcctgaaaccaaaaccggcatcattgtgttggctgaaagacgtctgatgaacttgggatgtgccactggacacccaaggtttgtcatgtactgctcgttcactaacc

SEQ ID NO: 219489 - DNA, 369 bp, Gossypium hirsutum
gtttgagattaacaggggtttcgccgtcctgcgggatattgcatcaagaagagatcttaagaagttcctctctgtgatcaggggcttgggggtctcgtctattgagggaagttggcgcaacttcttgacactggtctacataatattcgtactactgcacaccgtgccttctgtatgagaagtatgaagacaaggtggacccattggccgagaaagcatggcatgagatcaagaagcatgatgcagtgtttgatgcaaaagtactgagtcagattcccaagagaccattgtaggagaagaagaaagattcgattactggtgaagatgttggtgttgctaggtcctgacatacatatgctagctgtgttt

SEQ ID NO: 219490 - DNA, 394 bp, Gossypium hirsutum
gttcgtctcgtcaagagatgccacaagccctatcgcaaagaatttacgaaggtggcgctccgtacagcgatcggattcgtggttatgggatttgtaggatttttcgtcaagctcatctttatccccattaacaacattattgttggatccggttaggtttgctttcatgttactgactcaacagcacagatcgagagataaattgtctgagatctcgaactaatttcagtatagactttggttttcctctatattcatatttgttggattttggtttagtttttagtgttgaaatggaaactacttgaagcaaatacaatccttgagttttggtccattgatttatgttttttccttgtatcgatgcttatcttgggtaaaaagatcatggatg

SEQ ID NO: 219491 - DNA, 421 bp, Gossypium hirsutum
  unsure (1)..(421): unsure at all n locations
ggtgttgatattgggaggaagaagaagacagcagctaagaaggaagctactgaggacggagaagttgctgccgaggaaactaagaagagtaaccatgtgctaaggaagcttgagaagcgccagaaggaacgtacacttgatgctcacattgaagaacaatttggctctggtagattgttggcatgcatttcttcccgaccaggtcaatgtggcagagctgatggatacatattggagggtaaagagctagaattctatatgaagaaaatccaaaggaagaagggcaagggcgctggagctgcttagatgcagtatttcaaatggtctactctctcatcaatgtggtttttgttgcctttaaattttgttctctntattttcctacaattgaggatatggtacatttttattgtgaacattt

SEQ ID NO: 219492 - DNA, 419 bp, Gossypium hirsutum
ggaagctttagcaactctggttgtgaacaaacttagaggtgctttgaagattgctgctctcaaagctcccggctttggagaacgcaagagtcagtatctggatgacattgctatccttactggaggtactgttattagagatgaggttgggctttccttggacaaagctagcaaagaagtcttgggtcatgcctctaaagtggttcttacaaaggatacaaccaccatcgtgggtgatggaagcacccaggaagcagtgaataaacgagttgtacagattaaaaatctcattgaggctgcagaacaggattatgagaaggaaaaacttaacgaaaggattgctaaattatctggtggtgtggcagtgatacaggttggagctcaaactgaaacagagcttaaagaaaagaaattgagag

SEQ ID NO: 219493 - DNA, 421 bp, Gossypium hirsutum
aatcaattcggtcgttatggtcggacaaaatattttaattgttaatttatattaaattgaagtttattattattcgaattaatattcgaattatataataataattttttaatattctacaaaataaaaaaataaataaaaaaaaatgaaaatctagaaatttaatattaatatataaattgcataaaattaaaataaaataaagtaggaaattactaaaaaaatgaatacataaactaaatacaataatagataaaacgagatgcgacttccccctagatattttacactttctcccacaaaaaaacttgtaatgcctactccatttgtaattccatcgattactcgcctatcaaaaaaatgagttagttcggccaatcctcttataccttttgttaaggatattgaataaaacatatct

SEQ ID NO: 219494 - DNA, 415 bp, Gossypium hirsutum
ccaagttcttgaagaacggtgatgctggtatgattaagatgattcctaccaagcccatgggtgtggagaccttctctgagtacccacccctgggtcgttttgctgtgagggacatgcgtcagaccgtggctgttggtgttatcaagagtgtcgagaagaaggacccaaccggtgccaaggtcaccaagtctgctgctaagaagaagtgaagaggccaaaaggttttagcggtgaagcagattgagtgtttttatctttggttatatgtggtttgaagtttttgcctgttttatgtaggatttttaaagtttgagatgctttggtttgccaaggcatcttagtcaagttttgtgtctgatcttgcggaactatactttgttttttctatatatttgactgattcttttttctaaaa

SEQ ID NO: 219495 - DNA, 308 bp, Gossypium hirsutum
ggcggggatggtgtcattggactggttaattttattgactttatgaccctttactggaaagggctcggtaagcacttgtggaacgaactggggttttcattgtggaaagagatatcaatgattcggctctttttgggaagcttttcaaggttgttgcatttacgcacgttatgcatttggctgctcaagctggggtcaagtatgcaatggaaaaccctggctcttatgttcatagcaacattgctggtcttgttagtttacttgaaagttgtaaagtagccaattcacagactgcaattgtgtgggct

SEQ ID NO: 219496 - DNA, 346 bp, Gossypium hirsutum
gcaattttcaactgtgttgttgagataccaaaagggagtaaagtaaagtatgaacttgacaagaagacaggattgattaaaggtgatcgaattttatattcatcaatgggctaccctcataactatgggttcattcctcgcacactttgtgaaaacaatgatcccttggattggttgggtattatgcaagaacctgttctttcttgatggtttctgcgaaccaaaacccttggacttatggccatgattgaacaaggggagaaagatgaccagaacattggaagttggggtgatgattctgaataccaacatttcaccgacattaaaaaactttccccttaaccgc

SEQ ID NO: 219497 - DNA, 296 bp, Gossypium hirsutum
ttgtaggggaactaatgattttatgctgtttaatgaatacaaatacagatggatactcgtggacaatcactacagcatatcacacatatgcataacaattccaatataaatcaaagaagctttctatgaatcaaaacacataattctttcgataattaactgaacaagcagcggtttactgaacaaggaggtgcactatcatttgaagctaaacttaacaacatatacctgcgaactacgactaaaatagtaattctcgatcatgcaatgaactgaactcttgtattacacaaaga

SEQ ID NO: 219498 - DNA, 173 bp, Gossypium hirsutum
tcgcaataaagctgggagaatgcaagctgtgtatgttagaactgagaaaggtggactttttgaaggtaaacctcatgttagaatttcgagaacatataagcggttctctggtattatgttgcaactgctacaaaaactaaatataactgccgtcggcaagcgtgaaaagcttt

SEQ ID NO: 219499 - DNA, 419 bp, Gossypium hirsutum
tataaataacagtgaagctatacgtacagcttataatagttttgcaaggcctgagccatttgttccagaggagcagaaagctgctgggaaagatgacgatgtctaccatttcataagctacataccagttgatggagtactttacgaacttgatggactgaaggagggacccattagccttggtcaatgccctgctagtccaggtgacatggaatggttgaagttggtgcaaccagtaatccaagaacgaattgagagatactcccaaagtgaaataagatttaacctcatggcagttatcaagaacaggaaagagttgtacaccgctgaacttaaggagctccaaaagaagagggaacgcatcttgcagcagttggctaccatacagtctgaaagacccacagacaaaaccagttttg

SEQ ID NO: 219500 - DNA, 394 bp, Gossypium hirsutum
gttaactagtagagctattttccagacgatgaaaaactatactatttatgcagcttccatcagactacgtatagtgttgggagttatgcttattgctctcatttggaagtgcgacttttcaccgtgcatggtttagatcattgccattctaaatgatggaactattatgaccatctcaaaggacagagtcaagccatctaccttgcctgatagctggaaactgaaagaaatttttgccactggtattgagcttggaggctacttggcattgatgaccgctgatttcttctggattatgcatgataaagacttcttttcggaaaaatttggtgtatgtctgtcatgaagatggatgaccaaatgatgggtgctttatatttacaaatgagcattg

SEQ ID NO: 219501 - DNA, 244 bp, Gossypium hirsutum
ctcacacgtacgaccacgcgtacggaggatctacattggattctcatcatggctttgatcgtgaatatcgaattgacagggacgttgagcttgacttccatgtggacgattccgaactcactcttaaatgtttgcttgtatgaacaatattctggaagggacttgttttttcgaggtgttaggtgtgataagcatgtcattactatcacccagacggatgaaattttggattattcacatgttc

SEQ ID NO: 219502 - DNA, 386 bp, Gossypium hirsutum
ggcatgccccacaaattctaccatgttcgttttggtcgagtctggaacgtaaccaagcgcgggataagcgtagaggtcaacaagcaggtgggtaaccgtattatcaggaagaggattcatgtcagagtggagcatgttcagacttcaaggtgcactgaggaattcacactgaggaagataaagaatgatcatctcaaggcaaaggccaatgcaaagggtgaggtgattagcacaaagaggcagcctgagggcccaaaacctggtttcatggtcgagggtgcaatgttggaaacggttactaccattacatatgatgttgctaatgatctcaagggcggctactagatctactacgcattttggattatactgggcataacttaagt

SEQ ID NO: 219503 - DNA, 417 bp, Gossypium hirsutum
ccagcttccggagaagatgatgctactgtttctgagaaacgaagcattccaaggttggactacaaaaggctatatgatgagacatatggcaatgttccttctagttccagtgatgacgaagattggaacgatggcacagcaccaagaaaaaagaagaaacgtaatgctgaagtggctacaacatcagcaaatggaaatgcttctccaactggtagagtctcggtttccaatggtttaaacgaacccacgagagaagcgtgcacctaggagaagcgccaatggtttaaagcagaaccgaggagagcggcatacaactaagagaagtgccaatggtttaaagcagaacccagaagaggatcatacacctagaagacgcactcggaagaaatcaaatgagaagggtactgctaaattacc

SEQ ID NO: 219504 - DNA, 332 bp, Gossypium hirsutum
  unsure (1)..(332): unsure at all n locations
tcacactcnccggcgggagaaaccagagaaaaatgaccaagtgttacccaaccgttagcgaggactaccaaaacaccgctcaaaaagctaataggaagctaataggtctcatcgctgagaagaaaagaggtgcactcatgctccgtctagcgagggactcatctggaacttttgatgttaagaccaacaccgagagggcgttctgaaccatgaagcaacctgctgaggtcgctcatgctgcttacaacagactcgatattgtagtcaggcttctcttgccgatcaaagagcagaatcctatcctttcatacgctgacttctattaacttgct

SEQ ID NO: 219505 - DNA, 258 bp, Gossypium hirsutum
ccattgtgaaattctcttcctttggatcttttaagcccgggtctttgactcaaaggtcctttaagggtttggttgtaaaagcggctactgttgttgctcccaagtacacctcgattaagcccttgggtgatagagtgttggtgaagatcaaagaaacagaagagaagacagagggtggaattttgctaccaacaacagctcaatcaaagcctcaagggggtgaagtggttgccatcggcgaagggaaagacaatttgg

SEQ ID NO: 219506 - DNA, 341 bp, Gossypium hirsutum
caagctacctatgacaagcttctctctgaagctcctaaatacaagctcatcaccccctctattctttctgatcgtatgaggatcaatggatcacttgcaaggaaggctataagggaattgatggcaagggggtcgattagattggtgtctgctcattctagccagcagatttacactagggctaccaacacttaggatcatttttccccttaatttagttattatttagaattatatttgctgagtttatcatcattgaatgctttcttttgttatttatttaagacttccctgtagtcactttttttccctctacaatgtttaagcaacaggttcttgat

SEQ ID NO: 219507 - DNA, 101 bp, Gossypium hirsutum
ggcatgccccacaaattctaccatggccgcactggtcgtgtctggaacgtcaccaagcgcggccatcgcgttgaggtcaacaagcaagtgggtaaccggat

SEQ ID NO: 219508 - DNA, 397 bp, Gossypium hirsutum
ggcatgccccacaaaaagtaccattttcgttttggtcgcgactggaacagaaccaagcgcgcgatcagttttaatgttaacaagcaagtatctaaccaaattatcaggaagaggattcatgtcaaattgtagcatgttcagcacgaaagatacactgaggaagtcaaactggggaagatttcaaatgatcagatcaaggcaaaggccaaggcaaaggagcgggtgattagcacacataggcagtctgatggcccaaaacctatttacatgatcgttgatgcaattatataaacggtaacttcgattgcatatgatgatgataatgatctcaatggtggctactaaatctactctgatttttggtttattcttggcataacttaaataagctttgcta

SEQ ID NO: 219509 - DNA, 405 bp, Gossypium hirsutum
  unsure (1)..(405): unsure at all n locations
cgcaaagaaggcaatccattttccccgagtaaaacgccaaagaaaacaaaaaatatgagagaaatcttgcacatccaaggtggtcaatgtgggaaccagatcggggctaagttctgggaagtcatatgcgacgagcatggagttgacaacactggaaaatataacggtgactccgaccttcagttggagcgcatcaatgtctactacaatgaanccagtggtggaaggtatgtcccacgcgctgttctcatggatctggagccgggcactatggattccgtcagatctggtccttttggacaaatctttcgccccgataacttcgtcttcggacagtctggtgctggcaacaactgggccaagggtcattacacggaaggagctgagctcattgattctgttctt

SEQ ID NO: 219510 - DNA, 342 bp, Gossypium hirsutum
tctgttggcttgtatctcttcacggcctggtcaatgtggccgtgcagatggttacatcttggagggcaaagagctggagttctacatgaagaagatccagagaaagaaggggaagggagctgcttaaaaaattattgcatagttttcagcattcatatcagaatgccgcccttagggtttgcctttcacatttccagaacatttaaagttgtgttagcattgaacttttaatctggatccctgagagttattatttttgtattggaatttagattatctttgaactttataaatgcagcttattttggttggtaaagatgcagatcttctgcttttattttt

SEQ ID NO: 219511 - DNA, 399 bp, Gossypium hirsutum
tcgggcaaggtcaggccttacgagagggctattatctctgattctggcacctccctctcttctaacccttgttcaccctacctaaaaacccaacccacggtggctcactggtggcggaccaccgagaaatactaccatctcgcctttaagaaatcgtatatttccttgtctttggggaagcagatacttgatgaacactattcgcttggcaagtctctcaagaagaaacaaattgttgagttggcctcaaagggtgaccaaaagcatgctattaatggtgttttaacagcatctgatgttgctcgtgaaaggttttgcatgaccctatgtgggactcatgggtctgccttgagctccaccaagggtaaaaggtctgccaaatttgcttacatttgggtt

SEQ ID NO: 219512 - DNA, 368 bp, Gossypium hirsutum
tcgggcgaggtcaggctatacgataggggttttatttcggatgcatgcaacgtcatatcttttaaatagtgttaactatatctaaaaaactggccgacggtggataacgggtggacggggaacaagaaatagtaacatatcgtatttgagaaataggatatttccttgtctttggggaagcagatacttgatgaacactattcgatcggcctgtctatcaagaagacacacagagtggagtatggctcacagggtgaccaaaagcatgctatgaatggtgttgtaacagtatctgaagttggagctgaaaggtttggtatgagctaatgtgggactcatgggtttgccttgagctctatcaagggtaa

SEQ ID NO: 219513 - DNA, 419 bp, Gossypium hirsutum
aggcaacagatgggctgcaatagcatcttacttgcctcaaagaacagacaatgacattaaaaactactggaacactcatctgaagaagaagctgaagaaactccatggaagtgaagtttattgcagagatgggttcacatcatcagctgcatcagaccagatttcacgaggtcaatgggagagaaagttgcagactgatataaatatggctaaacaggctttatcagatgcattgtcccctgagaaatcaagtgatttaactgagttgaaaccttgtcatgggaacacttatgccaaaccagaagggtatgcatcaagcacggagaatatagctaagctgttgaaagggtggatgagaaagaacccattaaagcctgcttcaacaaactctggtgtcactcaacaatcatatgacaaca

SEQ ID NO: 219514 - DNA, 346 bp, Gossypium hirsutum
gctctggacaatccaaacttacatattcgtttatgcgacatcatacctcttctatagcgcggcctaaattcaatatactggccgcccttacacaacctactgactggaaaaacactgccgttaccaaactaaatcttcttgcagcacaacccccactacacagctgccatgatagcgaacaggcccgcaccgttcaaccttcccaacaaaggcacaacctgaatcagtggtcacacacaccttgtgtcagctcattaagctcaaccattatcctgggtacactcatccagaccgctactcttaccatctacctagctccctatcgtttcactttcttcccttactt

SEQ ID NO: 219515 - DNA, 412 bp, Gossypium hirsutum
ttcccgacagcaatttcttctcattttcgagaacatttttttaaagattttttctatatatgctttgaagatattaatcagaaaaatggcgctggtttctttcatcggaagggttctttttgcgtcagtgttcatcctctctgcttggcaagagttcaatgaatttggcgtcgatggtggtccagcggtgaaggagctgaggccaaagttcaacgtcttctcaaagactgtgtcgtctcacacagggttgcaagtgcctgaatttgatatcaagtatgtggttgctgctgctgtagcctttaaaggtgttgggagtattctctttacctttggcagcaccatcggagcttatcttctggttttgcatcaactcattcttactcccattgtttatgacttctacaattacgag

SEQ ID NO: 219516 - DNA, 363 bp, Gossypium hirsutum
aaaagaccctttgtgaatgtgctgtttgtttgaatgagtttcaagaagatgagaagctaaggatgataccaaattgcaaccatgtttttcatatagattgcattgacgtttggcttcaaaacaatgcgaattgcccgctttgcagaacgagaatttcgagtagtaccatcaatgcaccaagcttagctccacaagatccaatcattaatggtggtgatgaaagttatgtggtgattgaattaagtgataataataaccatagttcaagcgatgagtcaattagtggttcacctatggagctcaaggatgtggagaaacgaggaaggaagttgcataaagggacaagcatgggggatgaatgga

SEQ ID NO: 219517 - DNA, 387 bp, Gossypium hirsutum
  unsure (1)..(387): unsure at all n locations
gcttccctccaagcctctccctcctgctcatgctgtgagggaggcaaagaatgaaagtgctcgtggtggaagtcgtggtgggcgaagatatggacgtggtggtagtggtagtggtggttacagacgtgattttgcaaatgacgagaacttattcagcaataatgctgtacctgaagatggagagagtggaaaaccctctgaaaggcgtggttatggtggtcctcgaccttaccgtggtggtcgccgtggtggtttcagtaatggggaagatgcagacggngagcgacctcgcagattgtatgaacgccgtagtgggacagggcgcggaaatgagctcaaacgtgaaggctctggtcgtggtaattggggaactcagactgatgaact

SEQ ID NO: 219518 - DNA, 417 bp, Gossypium hirsutum
cagaaaacggagcagacagtcagataagcatagaaaatggaggctgccagaactgttaaggacgttgcccctcatgacttcgtcaaggcttacgccgcccatctcaagcgttccggcaagatcgagcttccttcatggactgatattgtgaagactggtaaactcaaggaacttcctccctacgatccagattggtactatatcagagctgcttccatggcaaggaagatatacttgaggggaggtcttggtgttggtgcctttaggaggatttatggaggggctaagagaaatggaagtcgccctcgccatttctgcaagagtagtggatctgttgcccgtcacattcttcagcaattgcagaatgtgaacatcattgatattgatcctaaaggtggaaggagaatcacatcaaac

SEQ ID NO: 219519 - DNA, 419 bp, Gossypium hirsutum
cccacgcgtccgtattactcgacgctttttgattcgttggaggggtcggtgagcagtcaggataaggttatgtcggaggtgtatttggggaaacagatatgcaatgtggtggcctgtgaaggggtggaccgaatcgagaggcacgagtcgctgactcagtggagaaaccggctgagtacggcggggttttcaccggttcatttgggttcgaacgcgttcaagcaagctagtatgttgttggccctgtttgcaggcggagatgggtatggggtggaagagaacaacgggtgtttgatgctgggatggcacaaccgcccactcattacaacttcagcttggaagctcaccaacaaaaccaccgccataagccagtaaaatttatttatttttaatgagtcgactaaatgagtctaagaaga

SEQ ID NO: 219520 - DNA, 417 bp, Gossypium hirsutum
  unsure (1)..(417): unsure at all n locations
caccaccccacatacaacctttgacaccagtctcggaggtttcggagccgccggaatcgccgtctgcgtacttggatacaacagcggaagctgctggtgaagcggcacaggtggaggcggaggaagagatggaagaggaagaagagatcgaaccgccccctgccgctgtgcccttctctggattgtttgcctgtgctgacaggcttgattgggttctcatgatcgttggatcccttgctgctgcagctcatgggactgctcttgttgtttacttacattattttgcgaagatcattcangttcttggacttgggccacaagaacaagggcaagacagaatggatgagcagtttgagaggttcaaagaggtggcaaatacaatgaagcgagctgttttattagttttacatattcgac

SEQ ID NO: 219521 - DNA, 403 bp, Gossypium hirsutum
cagctatctctactgttgatgtattgaccccgaaggttttcattggtttaatagttggtgccgtgcttccctactggttctctgcaatgaccatgaaaagcgtgggaagtgcagctttaaagatggttgaggaggttcgcaggcagttcaacaccatccctggtctcatggagggtcgtgccaagcctgattatgctacctgtgtcaaaatctcaactgatgcctctatcaaggagatgattcctcctggtgcccttgttatgcttactcccctaattgttggaactttctttggtgttgagactcttgccggtgtccttgctggtgcccttgtttctggtgttcagattgcaatatctgcttccaacactggtggtgcatgggataatgccaagaagtacat

SEQ ID NO: 219522 - DNA, 393 bp, Gossypium hirsutum
cgtgcccccaaagggacaaaaactccatatcatttgcaaaagcaaaaatactttcgggaagacaactctaggaagagtgactatacaaatagacaaagtcgtgaccgagggagtatacagcggtttattcagcctgaaccatgatagcaacaaagacgggtcttcgagaacgcttgaaatcgagattatctggtccaacatgatttcgaacgaagataggatataaaatgggttcaaagattatttggctacataccagccaccaccatggaaccgggtgccaaaatttaccggtggagggtattatattaatactattcaggaccggttccgggttccatttggttgggtgaaggaaatggtatatatatctatctattccaaggccaagtt

SEQ ID NO: 219523 - DNA, 415 bp, Gossypium hirsutum
gctcattctactacaagaccgatgaaatggttcaacgggaccctgaacttcaagcctggtggaaggaactccgagaggtgggtcatggtgacaagaaagacgagccatggtggcctaaaatgcagaaccttgaagacctgatacaatcttgcaccattatcatatggatcgcttctgcactccatgcagctgtcaactacggacaatacgcttacggaggctacttccccaaccgcccaacactaagccgaaggttcatgcctgagaaaggcacccctgagtatgcagagcttgaaaagaaccctgagaaggtcttctttagaatcatgtcttcgcagctacagtccctgattgtcattacggtggtcgaaacgctgtcaaaccacgcatcggatgaggtgtatcttggacagcg

SEQ ID NO: 219524 - DNA, 441 bp, Gossypium hirsutum
ttcagaaagagtttgacattcaaggcaagcccgatgccaagcttctaccatgagggaccaccaccaaaagttgaactgaaaaaaatgccaccaactcgtgcaaagtccccaaagctaggtcgaaggaagagctgcagtggtccagtcagttcaagtcagggagacaaggtaaaaggtacttctcatcacaaaaatcgtcacagtttgggtagtcaaagagaagccattattgccaccacattcagttcagcaaacaaaaagaatcaaaacaatgtccagaatggaaactctcctttggaattcaaagatgagtcttcgaaagcacaagagatgtgtgagttggttccacccgaggcaaatggccacattgacttggacataaatttcctatcttgagtttctggtgagttttctaatttaagggaaacacttattccctta

SEQ ID NO: 219525 - DNA, 386 bp, Gossypium hirsutum
aaaatatacaaaccttgttcttctattttagctgctcttcacattgagaagctagctttttggtgtgtttgcttagcttcaatccacattttctttgttgcgaagatggttgcacacaaattcaccgttgatttgaataaaccccttgtcttccaggttggtcaccttggagaaagttatcaggagtgggttcatcagcctattgtgagcaaggaaggtcctaggttctttgagagtgatttttgggagttcttgactcgcactgcctggtgggcaattccaaccatatggctgcctgttgtttgctggtgcatttcaatgtccgtacgtatggggcatacactttcccaaatcgctttaatgggtgctttttggcatttttgtgt

SEQ ID NO: 219526 - DNA, 310 bp, Gossypium hirsutum
gtttggtcaagttgttgaaggtatggatgtggttaaagccattgaaaaagttgggtctagcagtggaaggactgctaagcctgtcgttattgcagattgtggacagctttgttaagaacaagaacaagaacaagaaatggaataatgttgactctggtctatgaatggtgattcatgtctgaaatttatcatttttatgtgttttcttttgctggttactggatttggcttaggttgttctctaagaacatgactgccataaataatgtacgctatttatcatcatatttgaccatataattgagttatt

SEQ ID NO: 219527 - DNA, 416 bp, Gossypium hirsutum
gcgtcgtcaaaaccccaggagggaagcttgtttatcaaacgacaaagaaaagagctagtggacctaaatgtcctgttaccggcaagaggattcaaggaattcctcatttgaggcctgctgagtataaaaggtctaggttgcctagaaaccgtaagactgtgaaccgtgcttatggtggagttctatctggaagtgctgttcgagaaaggatcataagggccttcttggtggaagagcaaaagattgtgaagaaggtactgaagattcagaagacaaaggaaaagcaatcatccaagtgagagctaggatttgctaatggattgatagtgaatcttggaatagcagtttgaggggatttaagatttggatttatgtttttacatttgttatgaatcatgttctactttttcatctct

SEQ ID NO: 219528 - DNA, 426 bp, Gossypium hirsutum
caaattttgcgagaggaaaagcatttcatcatcagcgaaaaaaagggaattttagtcttcaggggaacgatcgaacgatgtcgtacctactaccgcacctgcactcaagatgggccgtagatcaagccatcttggcagaggaagagcgtctcgtcgtcatccgattcggccacgactgggacgaaacttgcatgcagatggatgaggtgcttgcttctgtcgctgaaacaataaagaactttgctgtgatttatcttgtagacataacagaagtacctgattttaacacgatgtatgagctttacgatccatcgacagtgatgttctttttcagaaacaagcacattatgattgatcttggcactggcaataacaacaagattaactgggcactcaaggacaaacaggagttcatagacatcattg

SEQ ID NO: 219529 - DNA, 343 bp, Gossypium hirsutum
cccacgcgtccgatagatcgccgtctcgactggcatggccaccaagcagccaaatacaggcctttttgtaggactgaacaagggccatgttgtaaccaagaaggaattggttccacgtccatctaacagaaaaggaaaaactagcaaaagagtccattttgtgaggaacttgataagggaagttgctggttttgcaccgtatgagaagaggattacggagcttttgaaggttggtaaggacaagcgagctctcaaggtagctaaaagaaaattgggaactcacaagagagccaagaagaagcgtgaggagatgtcgagtgttctccgcaagatgagggctcat

SEQ ID NO: 219530 - DNA, 367 bp, Gossypium hirsutum
tccacgaaccgtatacacttcgccagacgggtatttgttttctcctgatatgttggcctccattgacaaatgcagaaacgatctggcgtcttctataatcgagaaggccaagaagatatgcagggagcaaggtgataaagaggttaaagtagaggtgataatagagagtggtgatccaagggacgtgatttgccaggctgctgacaagatccatgctgatgtgcttgttatgggaagccatggctatggcttgattaagagggcattcttggggagtgtaagcaatcactgtgcacagaatgtgaagtgccctgttttgattgtgaaaaagcccaaatcttcctcctctgcaactggaaccaaatga

SEQ ID NO: 219531 - DNA, 308 bp, Gossypium hirsutum
gttgggtttcactgtctacccatcaccccaggtctccacatctgttgttgagccctacaacagtgtcctctcaactcactcccttttggagcacactgatgtggctgttcttcttgacaatgaggctatctatgacatttgcaggcgctctcttgacattgagcgacccacttacaccaatcttaaccgtcttgtctcccaagtgatctcctctttgactggttcacttaagttcgatggggccttgaacgtggatgtaacaaaattccagaccaacttggtcccttacccaagaatacacttcatgc

SEQ ID NO: 219532 - DNA, 412 bp, Gossypium hirsutum
gcacatggatgtaaagtgtttgctgatacccttttagccaatcctgaagccatgggaacatatgaggataatctgaatggaggattgactgtgttctgcccactggatgatgcatttaaagcctttttaccaaagtacaagaacttgactgcttcagggaaagaatcattccttgagttctttggtgtgcctgtttaccagtctttatccatgttgaaatccaacaatggtctcatgaacacattagctaccgatggtgctagcaagttcgacttcaccgtccaaaatgatggcgaacaggtgacactaaagaccaagatcaacaccgtcaaaataaccgggactttactcgacgaacaacctgtggcgatttatacaatcgacaaggtcttgatgcctagagaattgttca

SEQ ID NO: 219533 - DNA, 354 bp, Gossypium hirsutum
gactcgatccctaagctagttttgtactaatgggaacagttagtgttgcaaacaaggatatcaatgttagcttagctgaaaaaaagcctagagttgtttttgttttgggtggccctggcagtgggaaaggtacccaatgcgcaaatatagtcgaacactttcattacacccatctcagtgctggagatcttctccgagcagaaattaagtctggttcggaaaatggaaccatgattcagaacatgatcaaagaaggaaagattgttccttccgaggtcacaattaagcttctccagaaagcaatgctggaaagtgataatgacaagttccttatcgatggttttcctcgtaatg

SEQ ID NO: 219534 - DNA, 444 bp, Gossypium hirsutum
gttttctgtgacaatgacgaggaagatgatcttcttaaaggcatcaacagttaccgagcttcgttaaacttgacaagcctaacaacaaatgagaacgccgagtgccttgctgatgaactagccgaagaattcaagaaccaaccttgcacaaactccacaggcgccaacactgtcccaggcaccgaaccacagtttgccaactatccaaaccttctagccaaatgccatttgaacgtttccgtcacaagggacggagcagtaatgcctgcttgtgttccgaacctggctccgagtcttgtgctcactaattttacgcagtctcaatactccggaaacctcaatgaaaccaagtatacaggaatcgggatcggttctgaaggagactggattgttgttgtcctaacaaccagtacaactgaaggaaactacgctacggctactact

SEQ ID NO: 219535 - DNA, 429 bp, Gossypium hirsutum
gtcggagtgacataacggctttggcaaaaggcagagcttatacgcataatctaaacgaaatgaccatttatcaggcattgcaattgggacaagattcaaacactccttatgagatgagaagtcaaagatgtcagatgtgtttgcgcactgatacattgcttaaagtgatggaacaattggcaaaccctggtgttcgacggcttgtcattgtggaagccggcagtaaccgtgtagaaggcgtcgtgtcgcttacggacgtttttaggttcttgcttggttagttagaagtaattgcagataacttttatctagaagcagttttttttgcattggactcccatttcttgtgggcaccataccctgcccctaatgttccatagagactgcaatatttaaaaaccaatgatcatcgaatctcattcaacaatt

SEQ ID NO: 219536 - DNA, 418 bp, Gossypium hirsutum
tggatgtacaccggcacaacttgcacttgcctgggttcttcatcaaggggatgatgtttctcctattcccggaacaaccaagattaaaaatctagacagcaatatcgaatcagtgaaagtaaagctgacaaaagaagatttgaaagaaatttcagatgcgatcccaatccatgaggttgcagggggtacttatcctgatggtttaaagcaattcacttggaaatatggcaatacaccaccaaagaagagcacctaggtttagaagcaaagtttcatgggtgttgggatgaatggatttcccaagaaactgaagccattgaaagattgatgagttactaaagctttggattgtcattataatggagggttcagtatttatgatgttagtgtgtcatattttgtatcgggttatttttag

SEQ ID NO: 219537 - DNA, 412 bp, Gossypium hirsutum
aaaatctagggatttgcgggtggagaagactagagcccatctctctgcttcaaagctcctgtccaggtagaattctcttcttcccttgcgttgtgttctttgctgttcaatcgccatggcttcaaagctgattttgaaagaactcaaggatttgcagaaagatccacccacttcttgcagtgctggtccagtagctgaagacatgtttcattggcaagcaacaatcatgggaccctcagatagcccttatgctggaggtctgtttttagttactatccatttccctccagattatcctttcaagcctcctaaggtcgcgtttaggaccaaggtcttccatcccaacatcaacagcaatggaagcatttgtcttgatatcctcaaagaacaatggagccctgcactaaccatt

SEQ ID NO: 219538 - DNA, 428 bp, Gossypium hirsutum
cgaagtgggaagcacaaggaaagcctgcaagaactgcacttgtggaagggctgaacaggaggagaaagtacagaagctagaactgagtgctgatcagttgaacaatcctcaatcagcttgtggcaattgtggactaggtgatgcttttcgctgcagtacatgcccatacaaaggtcttccaccattcaagctgggcgagaaggtatctctgtcagggaacttccttgcagctgacatttgaactcccaaatgatggatttttggcccaaaatttaatttttggatacctcaaaacattagatactggtttggtttagtggtttaatgtggaagtttaaaattctacttcattttatagaacatttgatgaaaatacatgcagttcttatgtaagtgttcaagtggatattttatttttatggaaacat

SEQ ID NO: 219539 - DNA, 423 bp, Gossypium hirsutum
gccgcctcccacaagctttgaggtgttttttaggttgctcttggaacatctagcagccaaccaaaaatggttctccaaaacgatatcgatttgttgaatcctccagcagagcttgagaagaagaagcacaaactcaaacgtcttgtccagtctccaaattctttcttcatggatgtcaaatgccaaggctgtttcaacataacaacagtgtttagccactctcaaacagtggtggtatgtgggaattgtcagactgttctttgtcaaccaacaggaggaagagctagactcactgaaggatgctctttcaagaagaaaggtgattgatctcatattttgctattttatgattcacaaaaacaaaagaaagtaatctttggatcaaatatgggaatcatatgagtaatctttttcatgtgtttc

SEQ ID NO: 219540 - DNA, 392 bp, Gossypium hirsutum
ggattatattgatctttactatataatcagagttgaccgcaagactcctatagaagatactatggaagaactgaagaagttggtggaagagggaaaaataaagtacattggtatatctgaagctagccccgaaactataaggagggcacacgctgttcatcctcttactgccgtacaacttgagtggtcgctttggactcgtgatgttgaggaagaactaattcccctttgcaggtttgttcttctatcttcaatcatcggtaactttttttttattcgaatatagatatattcaaatttttatatatttggagggatataaatatacccttttgctcaaatatattgaaattcacttattgattggcttttctcaaagtatcaactggttt

SEQ ID NO: 219541 - DNA, 444 bp, Gossypium hirsutum
  unsure (1)..(444): unsure at all n locations
cagaaagtagtcaaaggctttccttatccaagtagctactacaaatgtacaaccccgggatgcaatgtccgtaaacacgtcgagagggcttcgactgatcccaaggctgttataacgacatacgagggaaaacataatcatgatgtaccggctgccagaactagcagccacaacaccgccagtagtaacgcaacacaagtaagaacacagaatatagtaaccgataacaaccacggtgtaaataacagtgtcgattctacgaacgataggcaacgaccggtagcacggttacggttaatagaagacaggatacgtaatgtctctgaattgcagcatggaaaatctgtcatatttcaagcanatgtaaagcttaaaaaagtgtacgtaaagtagtttagtgcgtgcgtgtatatatagagtaatttgattctcttattccatgca

SEQ ID NO: 219542 - DNA, 371 bp, Gossypium hirsutum
ctttgttcctcattctctgatccggctctttccgcattcgtcccgccggatttaacaaggtttcaaaccaaaaatgaggggaatccctcaccttccaagggggccatgccggaacccaatccggtcccaagtcttggaaaggggttgggaccaaccccggatttgcccttcccgacccctttcccggaacctccatcctccattggaacgccgttaccgtttactccattaaggctcttgggggaaggttggcccaccccccctggctcttggttcttaaccccgggaccatggttagtgtgagaaccgggccttatggtcagatctttaggcccaataactttgtcttcggccaatctggagctggtaat

SEQ ID NO: 219543 - DNA, 335 bp, Gossypium hirsutum
ttcagcgaaggggtgctctgagatcacataccaaaatggtgaaggccgttgccgtccttggcagcaatgaaggtgttagcggaactgttttcttctcccaagaaggagatggtccaactaccgtgactgggaacctttctggtcttaagccgggactccatggcttccatgttcatgcccttggggacacaactaacgggtgcatgtcaactggaccccattttaatcctgctggcaaagagcatggtgctccagaagatgagaaccgccatgctggtgatctagggaatgtcacttgtggtgatgatggctgtgcaagcttctccatcaccgac

SEQ ID NO: 219544 - DNA, 393 bp, Gossypium hirsutum
cccatttattttttcaccacagaatgataatcccgaagaagggtggtctaaaactggagggatctctcatgaaacagtctctaatgaaaccgtaatcttatcccatggtttcatatccagaatggattacaatactatgacgaaccttgccgctgctttagaaatagaaggaatcagtgtcttccgtttcgattttgctggaaacagagaaagtgaaggttcatttcagtatgataactattaccgagaagctgatgatttacacactgtaattcaacacttatcaagggaaaatcatgtcttaagtgcaattcttgggcatattaaagggggaaatgtgcgacttctttatgcttataaccatcaagatatacatataattgtaaacaattt

SEQ ID NO: 219545 - DNA, 369 bp, Gossypium hirsutum
agacaaaatatggagggattattcccatgaaaccaccactaatctccaaggaccatgaacgtgcgtactgcgattctgctgattgggcacttagaaaagcaaggtgtcgagaagcccaaaggaccacttgaagccctccgaccgaaattcccagcgacacatccacaaacacgatgcaggaaatctacctgtgccccagcagatggtgcaagtggagggagcgctcaaccagacggagggactgccgacgaatgataaactacccctaatcggctgatcttgcgaggactattggcggctactctaatacccagataggtaatgcattatgttacactgtttccatgaataaatacttgatgaaagatg

SEQ ID NO: 219546 - DNA, 418 bp, Gossypium hirsutum
gcgtcgtcaaaaccccaggagggaagcttgtttatcaaacgacaaagaaaagagctagtggacctaaatgtcctgttaccggcaagaggattcaaggaattcctcatttgaagcctgctgagtataaaaggtctaggttgcctagaaaccgtaagactgtgaaccgtgcttatggtggagttctatctggaagtgctgttcgagaaaggatcataagggccttcttggtggaagagcaaaagattgtgaagaaggtactgaagattcagaagacaaaggaaaagcaatcatccaagtgagagctaggatttgctaatggattgatagtgaatcttggaatagcagtttgaggggatttaagatttggatttatgtttttacatttgttatgaatcatgttctactttttcatctcttc

SEQ ID NO: 219547 - DNA, 425 bp, Gossypium hirsutum
gggaaagaaaagcagcgtaatgggtgaagaagtgaaagtttttggatactgggcaagcccttacagctacagggcagagcttgctttgaagttgaaaggtgtttcttatgagtacataaatgaggatatctttggcaacaagagcgatttgcttttgaaatacaatccggttcataagaaagtcccggttcttcttcacaacgggaaaccaattgtagagtctcttgttatacttgaatacattgaggaaacttggaagcataatccctatttgccacaagatccttatgacaaagctaccgctcgattctggatcaagttcatcgacgaaaagtgctttcctaccctttggctagctgcatggagcgccgagaatgatcgagaaaaagtgacgaatgaagcttgcgagtatctgaaaacgcttg

SEQ ID NO: 219548 - DNA, 407 bp, Gossypium hirsutum
gatggctcactctcattctacccaaaacccagtgattgagcagcagagaatgataattccgaacaagcatggtgaaaaactggtgggattattgcatgaaacagagtctaaagagattgtaatcttatgccatggtttcagatccagaaaggattacaatactatgacgaaccttgccgctgctttagaaatagaaggaatcagtgtcttccgtttcgattttgctggaaacggagaaagtgaaggttcatttcagtatggtaactattaccgagaagctgatgatttacacgctgtaattcaacacttctcaagggaaagtcatgtcgtaagtgcaattcttgggcatagtaaaggggggaaatgtggtgcttctttatgcttctaagtatcaagatatacgtata

SEQ ID NO: 219549 - DNA, 303 bp, Gossypium hirsutum
gatgaggaaaatcatgggtgccaaagttcttttcttctttgctttgctttccttttcagctgtctcggcatttgcacaggatgaggaagaccaaggtcttgttatgaacttctacaaggattcttgtcctcaggctgaagacattatcaaggagcaagttaagctactgtacaagcgacacaaaaacactgctttttcttggctgagaaacattttccatgactgtgctgtccagtcatgtgatgcttcactgctgctggactccacaaagaaagagcttgtctgagaaggagacagacagga

SEQ ID NO: 219550 - DNA, 267 bp, Gossypium hirsutum
tttttcaagatgaggatgacccacttcttcttttgtacttttacaaagattcttgtactcatgctaaatacattttcaaatagctagttaaactactgtacaagctacacaaaagctctgctttttcttggctgaaaatcattttccatttctgtgctttcaacatatgtaatgctttaatgctaatgtactccacaagaaagagcttgtctgttatagagacagtcatgatctttgtccttatagaaatttcatgttcatttaaac

SEQ ID NO: 219551 - DNA, 436 bp, Gossypium hirsutum
gaaacatttgaagaggctcaatgcccccaggcattggatgcttgacaagcttggtggtgcttttgcacccaagccatcgtctggtccccacaagtccagggaatgcttgccattgatccttattttgcgaaaccgattgaagtatgctctcacctatagagaagtcattgctattcttatgcagaggcatgttatggttgatgggaaggttaggacggataagacctatccagctggtttcatggatgttgtgtccattcctaaaacaaatgaggacttccgtctactttacgacaccaaagggcgatttcgtctccatgccatcactggcgatgaaaccaagttcaagctctgcaaggttcgatctgtccagtttggccagaacggtattccatacttgaatacatatgatggtcgtactatccgttaccctgat

SEQ ID NO: 219552 - DNA, 376 bp, Gossypium hirsutum
atgatttccaactcaaccagcgttgctgaggtgttctcccgcattgaccacaagtttgatctgatgtatgccaagcgtgcctttgttcactggtacgtgggtgagggtatggaagaaggagaattctcggaagctcgtgaggaccttgctgcacttgagaaggattatgaagaagtcggtgctgagtcaggcgagggtgatgaggaagatgaagatgagtactaaataagtaatgtttgagtggagggcttgcattttgctacccaatgatttgtttgcttttatcgagtgtttttgcttattctattgtgtgaacttcgactcttcgaagctttgttcaagactctatatggactgcaatagatttgacgagtag

SEQ ID NO: 219553 - DNA, 435 bp, Gossypium hirsutum
  unsure (1)..(435): unsure at all n locations
ctctcagctcttttcttctcttgtgacactgctaatattttttttattgtcgnctccggcgttcgaagatcataaaaaaccggagtcgtttcaaatggctacgagaacggatctagatgggaggccaataaagccgatgacgatatgcatgatcggtgccggaggcttcatcggctcccacctttgcgagaaattgatgtcggagacgccgcacaaggtgctcgccttggacgtttacaatgacaagatcaagcacctcctcgagcctgactctctcccttgggctggccgtattcagttccaccgacttaacatcaagcacgattctaggctcgaaggcctcatcaagatggcagatctcgtgataaatcttgctgccatctgtactccggcagattataatacgcgtccactagacacgatttacagcaattt

SEQ ID NO: 219554 - DNA, 389 bp, Gossypium hirsutum
cccacgcgtccggttaaagctctcttctcgttttccttcttgttcagagaggatcaaggatataatactccagaataaacgaagctttgtgcttgagttgcaacagagatctattgaatttaattgtattcttcagaagcatcagaacattagatctgcactggttgaaaggatgccagttttggatgaggcaactttcagtggaaggagagctggctctttgccgacatctgtttcaacttccactgggacagcacgtaatcttccaaatggaattgctaaaccagctgcagctcctgttgcagacttacttgacctaagttcagatgatgcccctgcacctagctcttctggtggtgattttcttcaagatcttcttggtgttgatt

SEQ ID NO: 219555 - DNA, 421 bp, Gossypium hirsutum
ggtagctcttggaattgttgtcttagaggctattattttcttgttagcccttatggttagggccgccaatgtacctgctgattatgacagtgatgatgagttcattgcaccaaggcaacaaatcagacagcctttaatcaacaggccaccagttccagctacaggtgttcctgttactggcagccttgatcaacgacccagcagaaatgatgcttggagtgcacgaatgagggaaaagtatggtctggatacgtccgagttcacctacaacccttcggagtcaaacaggtaccagcaggcagctccgcaaccagcagaagaaagcagccgttgcaccattatgtgatgatcatctggctggttgggtggtttccgaaggaaggttattgcattgtcgatggagtgacaaacttcatatttt

SEQ ID NO: 219556 - DNA, 427 bp, Gossypium hirsutum
ggcaaagcaagaaacagatggagacaaagagttagaatcagaacccaaatcttgtaggatacgaagacaacttttttcaagttctgggttgggggaaccagtaggtgatggtgaagatagtggtgctgtgatgcaaacactggttatgggcggtggagaagaaaatggtggtggtaaaatctgtggaggaggaggatcagggggcggcgttggtggtgtcgggtcggggttctttgagagtgatagcactgacgtttactatcagaagatggttgaagccaatcctggcaatccacttttgcttggcaattatgccaagttcttgaaagagattagaggagattatagcagagcagaggagttctgcggcagagcaattctggcgaaccctgatgatggggaaattgtggcactttatgctgatcta

SEQ ID NO: 219557 - DNA, 294 bp, Gossypium hirsutum
  unsure (1)..(294): unsure at all n locations
gaggaggtgttanataagcttaatacacatctttataggtagcagcgccaaagacacttgctagcctgttctacaagggctgntggatttacacactgccatctgnctctgtactactatcatatccaaccttttgaatatcaatattataatccccatagctcttcacgtcctcatcgactgtggcaaaactccacctccagggttccaatgtccagcacaatgatgaaaaacataaaaaccccatgttcttttttctttcgaagtaacaaatatgttcatgtctcactatat

SEQ ID NO: 219558 - DNA, 266 bp, Gossypium hirsutum
atgttgttcttcaaatcactgaggtagaggcttataggccaaatgattcagcttgtcatggtagatttggagtcactgcaagaacagcccctgtttttggtcctggagggcatgcttatgtttatctttgctatggacttcatacgatgctcaatgttgttgctgccaaaaaagagctggggctgcagtgttaatacgtgcttcccttcggtgtgggggttggaaaactattccagaccgcgggggcaagaaaactgaaaagcctt

SEQ ID NO: 219559 - DNA, 347 bp, Gossypium hirsutum
atctaatatagaaagagatatacgtattcagtatagagatcaatcagactttgaatacattgcacagcaatttggagtttttgaagaatggaaggacggtgtaccaaggacagcgtataaaggagtagtggttttcaggtaccacccaccaagacgtgtatttctggttggtcctgactctctacagcagcttgggattgaaaatgcttgaactgaaaaggttagcgaccatgtctggttttgattgtttccatttattttatgatcacacagtaactgaatttggtataatagcaaatttaggaggaattagtgacatacagagtttcagcatgttttagtttttg

SEQ ID NO: 219560 - DNA, 343 bp, Gossypium hirsutum
catactctatcttcttctttccaagaaatcgatcccgaggatgatatcaagctagccgaaaagaatcaaaaggaaaaagagggcaacatctctcttccgccgtttgggttagcaacttacaagatgcaaggggacgtgtggttgtcctcctccggttgtggaggaggggaccaagaaaggctattgtcacttttgggtgttgccgattcgtggctaaagcaactaagcgttcaacaccatgacttcaactatttctcgggtattcgacatggctaaaaaagccctctacatccctaataaacatggaaaaaagttcactcatcactcatttatcatcaaaagc

SEQ ID NO: 219561 - DNA, 368 bp, Gossypium hirsutum
cttgctcttcctcctcctccatggaagccccccctcaaggttacaggagaaatgtgggtatttgtctcatcaattcctccaaaaagggtgggattgatgacaatgaagatccaaaagttgcagccctcagagaattaaaggaagaaacaggtgttagctcagctgaaattctcgcagaggtaccttattggctgacatacgacttcccaccagaagtcagggcaaaactgaaacatcagtggggatcagactggaaaggtcaagctcaaaagtggtttctccttaaattcacggggaaagaagaagaaatcaatcttctgggtgatgggagtgagaaacctgagtttggtgaatggtctttgatgaca

SEQ ID NO: 219562 - DNA, 405 bp, Gossypium hirsutum
ggcccctctcctccatctccaataaagcctcctactgtttgcgataattattacagctgtcccgaaagcaatacctgctgctgtgtctacgagtactatggctactgctttgcttgggggtgctgcccacttgaggctgccacttgctgtgacgaccactacagctgctgtcctcatgactatcctatctgcaacttaaatgaaggcacctgcttgatgagcaagggtaacccaatggcagtgaaggcactgaggcgcactcctgctacgcctttctgggcccatggaagtgttggcgtaaagaacaatgcttaaagagaagcctgggattttatgcagaaaatgatactacagggagaagggaacagtgcttgaccgatctcctctgttttgtcatactgcaat

SEQ ID NO: 219563 - DNA, 406 bp, Gossypium hirsutum
cgacatcggccttcttgcaaacaatgtcgatatgaacaagagggctggtgagttgactgcacaggaactggacaatctcatgaccattgttgccaaccccaggcagtttaaaattccagattggtttctgaataggcaaaaggattacaaggatggaaagtattcccaggttgtttctaatgctctcgacatgaagttgagagatgacttggagcgtttgaagaaaatcaggaaccaccgtgggctgaggcactactggggcctccgtgtccgcggtcagcacaccaagactactggtcgcagagggaagactgttggtgtctctaagaagcgttgagtgcatatacatatatattctgaggcagaatttatttccttgcttttaggcactgtttgcatgaagaca

SEQ ID NO: 219564 - DNA, 397 bp, Gossypium hirsutum
ttcttcttcttcaaacataagattttcaaagaagccaagggtggatgagagtgagaaccttactctcaacagtataagacaggccttaattcgacaagaagatagcataatatttagccttttggagagagctcagtactgttataacccagacacatataagcaagattcattctccatggatggatttcatgggtctttgtctttggttgagttcatggttcgggaaaccgaaaggctccatgctcaggttggcagatataaaagtcctgatgaacaccctttcttcccatcatatctacccgagccaatgctttcacctttgcaatatccaaaggttttgcattactgtgctgcttcaattaacataaacaataaggtttggaatatgtatttt

SEQ ID NO: 219565 - DNA, 404 bp, Gossypium hirsutum
gaaaaagctttttgtgacttatccttcctctcacaagcatatgtattttacaaattatcacaaacccaagatattagtttttataaattcaaacctatccttcaatatcatggaacatctctttttcttaaaaatgaaataaaagattattttgaagaacggggagtatctcattccatattaagacatcattatgggttgagacagaaaatagtttggcattctggaatgaatgaatggaaaaactggttaaggagtcgttatcaatacgatttagttcagaatagatggctaaaattaggaccaggacaatggcgaaatagagtcaatcaacactatctggctcaaaataaacatttaacaaaatgggattcagatgaaaaaaaaaaaaaaagggcgggcgc

SEQ ID NO: 219566 - DNA, 407 bp, Gossypium hirsutum
atttgttggaggacttgactcagatgttagtgatgatgatcttaggcaacctttttcccagtttggtgaggtcatctccgtaaaaataccacccgggaaaggatgtgggtttgtgcaatttgcaaacagaacgaatgctgaggaagcaatccatagtttgaacgggatgaccataggccagcagactgttcgtctttcttggggtcgtactataggaaacaagcagcagtggaatggaggacatcattgagggcaaggcgatggtggttatggctacggctatgctgcagcaccaaatcatgatccaaacacgtatactggggctgctgctactggttcttcttaagaggggtgcatgacaatcatgaatggcttgtaatctgaacttgcaggacaagttttcaagt

SEQ ID NO: 219567 - DNA, 402 bp, Gossypium hirsutum
gagcaaaccagggtgctacccagcctaaacccgagcaagagagtatactccagcatgcacagcagcagattgctttgcagaggctaattttgcaaccacaaggtgtgccgacaaaggttgtgtgtttgactcaagcacttaatgttgatgatctcagagatgatgatgagtacgaggacattgtggaagatatgagacaagagggtggaaaatatggtgcattggtgaatattgtcatcccacgcccaaatccgaatggagaacctgccccaggtgtcgggaaggtatttctggaatactcggatgttgaaggttccaaaaaggctcaagctgcaatgaatggtcggaaattcggcggaaatcaagttattggccgttactatccagaaaacaagttcgcac

SEQ ID NO: 219568 - DNA, 251 bp, Gossypium hirsutum
gggatctggtgactgtcaaaaaggacagattgaatgctgttggagctgcaatatatcaaaagccagctttcaacgactgctactacaaaaggtctaaaaatgcacctccactttgtgaagaatctgatgatcctaatgcagcctggaatgtatcccttcaggcatgcatgcataaagtgcctgaagattcaacagagcggggatccctttggcctgggcaatggccagaaccggttggaacaaccctccat

SEQ ID NO: 219569 - DNA, 404 bp, Gossypium hirsutum
gagattccgttgtccagaagtcctcttccagccatctctcattggaatggaagctgctggaatccatgaaactacctacaactctatcatgaagtttgatgtggatatcaggaaggatctctacggtaacattgtgctcagtggtggttcaaccatgttccctggtattgcagaccgtatgagcaaggagatcactgctcttgccccaagcagcatgaagatcaaggttgttgcaccaccagagagaaagtacagtgtctggatcggaggatctatcttggcatcactcagcaccttccagcaaatgtggatttccaagggtgagtatgatgagtcgggtccatccattgtccacaggaagtgcttctaaatttacaagtcatttaatggtgagttacattttc

SEQ ID NO: 219570 - DNA, 224 bp, Gossypium hirsutum
agggaagtcggcaaaatggatccgttacctcgggaaaaggattggctctgagggctgggcacgggggtcccagtcccgaacccgtcggctgccggcgcactgctcgacctgctcccgcgcgagagcggttcgcccctggccggccggggaacgaactggaaccggttccttgggggcccttcccgggcgaacaacaattgaattaaaactgggtccggcaaagg

SEQ ID NO: 219571 - DNA, 373 bp, Gossypium hirsutum
cgggcacacgcaatggagccgtagacagtcaagtgaaatccaatccacgaaataatttgatctatggacagcatcgttgtggtaaaggtcgtaatgccagaggaatcattaccgcaaggcatagagggggaggtcataagcgtctataccgtaaaattgattttcgacgaaatgaaaaagacatatatggtagaatcgtaaccatagaatacgaccctaatcgaaatgcatacatttgtctcatacactatggggatggtgagaaaaaatatattttacatcccagaggggctataattggagataccattgtttctggtacagaagttcctattaaaaagggaaatgccctacctttgacccgtatgccctt

SEQ ID NO: 219572 - DNA, 395 bp, Gossypium hirsutum
ctggaactcacgttgatgcccctagccacttctttcaaaagtattatgaggagggctttgatgtttccacacttagcctgcaacacttactggtcctgttctagtagttgatgttccaagaaacaagaacattactgctgaagttatgaagtcgttgaatattccccggggagtccatcgtgtgcttttcaaaacacttaatacagacaggaggttgatgcatagaagagagtttgcttcagacttcacagggtttaagaaggatggggcgcaatggttggttgataacaccgacatcaaactcgttggaatcgattacctatctatttctgcttatgttgatgctgcccctactcatcatatacttctgaaaagtagggaaaatcgtatagtcg

SEQ ID NO: 219573 - DNA, 384 bp, Gossypium hirsutum
gggaaagtggggttagcccaaatgcttcgaggaggtgttataatggatgttgtcacccctgaacaagctcgtatcgctgaagaagccggagcttgtgccgttatggctcttgaacgagtcccggctgatatccgagcccaaggtggtgtggctcgaatgagtgacccacaactcattaaggaaattaagcaagctgttactatccctgtcatggctaatgctcgtattggtcatttcgttgaagcccaaattcttgaagccattggtattggttatgttgatgaaagagaagttcttacacccgccgacgaagagaaccatttcaacaaacataactttaggatccctttcgtttgggatgtcggaatttatgtgaaagcactt

SEQ ID NO: 219574 - DNA, 404 bp, Gossypium hirsutum
aagcgaaagcttatctcttttcgtctctgaatctgatcaatcaacacctgaaaaggaaaacttacaaacaactactactagtctactacccagcactagaagcagctcgtagccagccatggatgaagagtacgatgtcatagttctaggaactggtctcaaggaatgcatcctcagcggtcttctttctgttgacggactcaaggttctgcatatggataggaatgattactatggaggagagtctacatcactcaacctcattcagctctggaagaagtttagaggaaatgataagcctcctgctcatttgggctctagcagagattataatgtggacatggtccctaagtttatgatggcaaatggcactcttgtgcgtgttcttattcatacggatgtta

SEQ ID NO: 219575 - DNA, 399 bp, Gossypium hirsutum
cagcaactgaaaagggggtgcaacttggtggtgagatacccattgaattggacattaagaaaggctgggacaaaggcatgccgattgtggtatcaacacctgattccgctgtcttcaaggcttaccatgatgtagctcaaactgttgtcatgagacttgaggatctggcaaaggcatgaaaatactcttgaggttggtcagtgaagtttgcttgtgccaaccatcttcattcccgtgttttcgtggtggtgctttgttcatcctgatataaataatttttaagtttgagcatttttggtcatgcgatgacaatattaagcatttgggaccatagtgattaagaaacttatttgatgaattacacactctgaccactttatctaggagcatacgatttac

SEQ ID NO: 219576 - DNA, 402 bp, Gossypium hirsutum
cagcagctgagatggggttgcaacttgttggtgagatacccattgaattggacattaggaaaggctgtgacaaaggcatgccgatagtggtatcagcacctgattccgctgtctccaaggcttaccatgatgtagctcaaactgttgtcatgagacttgaggatctggcaaaggcatgaaaatactcttgaggttggtcagtgaagtttgcttgtgccaaccatcttcattcccgtgttttcgtggtggtgctttgttcatcctgatataaataatttttaagtttgagcatttttggtcatgcgatgacaatattaagcatttgggaccatagtgattaagaaacttatttgatgaattacacactcagaccaggttaactaggagcatacgatttacagt

SEQ ID NO: 219577 - DNA, 409 bp, Gossypium hirsutum
gcaggagcaaaactctgataagacactttggaaacttggaactcttcctgttggccttttagctttctacgggctgacagaaccacttgatcggagatggcatgtgttaggtttaggttacgatcttaacatcgacaaccgcctgatcgagagtgcagcagtcattcacttcaatggaaacatgaagccatggctaaaactagccatcggaaggtataagcctctatgggaaaggtacataaatcttagccacccatatctccaagaatgtgtcacaagttagacaaatgtgctctgtgctctatttttggttccaattgctcgacctccaatgatataaacccatgaaaaggccgatcgcggaaattcttttttgacattgttaggagatttgacatatcttttttgt

SEQ ID NO: 219578 - DNA, 407 bp, Gossypium hirsutum
ctggaactcacgttgatgcccctagccacttctttcaaaagtattatgaggagggctttgatgtttccacacttagcctgcaacacttactggtcctgttctagtagttgatgttccaagaaacaagaacattactgctgaagttatgaagtcgttgaatattccccggggagtccatcgtgtgcttttcaaaacacttaatacagacaggaggttgatgcatagaagagagtttgcttcagacttcacagggtttaagaaggatggggcgcaatggttggttgataacaccgacatcaaactcgttggaatcgattacctatctatttctgcttatgttgatgctgcccctactcatcatatacttctgaaaagtagggaaatcgttatagtcgaaggtctaaacc

SEQ ID NO: 219579 - DNA, 391 bp, Gossypium hirsutum
aagatttcagctggtgtccttggtggagcaaccgcaatttgggtcctttttgagttgattgaataccacctacttgctttaatctgtcacatttcgatactctgtcttgcactactgtttttgtggtccaatgctcataccttcatccacaagtccccacctcgcatccccgaaattcatttgccagaggagccattcctccaagttgcctctgcattggcaattgaacttaaccagggattgaaacttctgcgagatattgcatctggaagaaatctgaaggagttccttatggttatagctgcattctgggttctgtcaattgtggggagttggtgcaacttcttgaccttgttctatatatgtttcgtattgctgcacacggtacctg

SEQ ID NO: 219580 - DNA, 402 bp, Gossypium hirsutum
ccctaatctcttcttatcaaggaaatagcggttgctgatcatctctggattctgtatttcttgatctctcgtggatctgatcatttatttgctggattattgtatatctttcaggatcttggatttcaatttccttgtattgaagaaaaaagatggctcgtacgaagcaaactgctcgcaaatcaaccggagggaaggctcccaggaagcagctcgccaccaaggctgcaaggaaatctgcgcctacgaccggcggagtcaagaagcctcaccgctaccgtcctggaaccgtcgcccttcgtgaaatccgtaaatatcaaaagagcactgaacttttgatccgcaagttacccttccagcgtcttgttcgtgaaattgcccaagacttcaagacggatttga

SEQ ID NO: 219581 - DNA, 317 bp, Gossypium hirsutum
aaaataatattccatcttcataccttttaaccgccggccgactttcacttctacggcgatatcattttttacgtcaagagctactctcagcaaaatttgtcacagatggcttcttccttacgagcattcttgaacagtccagttggtccaaaaacaactcacttttggggacctgttgccaaatggggattagatcttgctggactggtggacatgaataagcccccagaaatgatttctagcaacatgacttcagcaatgagtgtctattcaacaatgatcatgaagatagcatggatggtacaaccacgaaacaa

SEQ ID NO: 219582 - DNA, 404 bp, Gossypium hirsutum
gcgatttacatgaaggtgaatgggggaaagtcggtaccattgtccattggagttatgtgcatgatggaaaggctaaaaaggcaaaggaagtagtggaagcagtataccctgataagaatttggtcactttcatagtgatcgaaggagatctaatggaagagtataagagctttgtaatcacgattcaagttttgcccaagagcgagggtagtggcagcgtaatgcactggactttggaatacgagaagctgcacggtgggattgcgcattctgagactctgctgcaattcgttcaagatatctctaaagacattgacgcccaccttacccaagcaagcttaacagtatcaaatgttggctattgttgccgctacttgaagcactgttcatctatttaatgaata

SEQ ID NO: 219583 - DNA, 378 bp, Gossypium hirsutum
ggcgacctttaccacccctattcaactttaaacaggaattatctggggcttcaccggagctcataaataagttgattcctgatcacgtgaaacggcaaataggacttcaacatttcatgcatccgcctgggacatgagacttcaaaaccgttttcaaattcgatgtctgtagtttgatgcgtgacacaaaaagaattactatctttggattatcataggttgatttgaggcctatccggcatcattttgtacgcttccataacacatacagcctttggtagtgtggtggctgccttctctcgatccatatatgtcaatgatgtctctcttgctcttggattctatgagtctactttttttcaaaaaggcttttttttt

SEQ ID NO: 219584 - DNA, 326 bp, Gossypium hirsutum
gcgctcatcacaaaaaatttctagatcccaatatacccaatgccagatagctgccaagaagcacaagccagaaaacacaatatgtgctccggccacaccttcgtaactccaaatacccggtttgttatagtcccccctgtaatactccaaccgccccatgaattggtattcctaaacgagtcatgaagggtataacgaacataccttgtctccacattggatcaagaacgggatcggagggatcaaaaacggctaattcatatagagccattgaaccggcccaaccagcaaccagagccgtatgcattatatgaacagaaagcaag

SEQ ID NO: 219585 - DNA, 402 bp, Gossypium hirsutum
tacaatcgaaacccttaggcggcgactactcgagcttcataacacccgaagcttttaactatggcggatgtagagacggaggttgcgacggccggtgtgcccaagaagagaacattcaagaagtttagcttccgaggtgtcgatttggatgctctccttgatatgtccactgatgagcttgtcaagctcttccctgctcgagctcgcagaaggttccagaggggtttgaagagaaagcccatggctctaattaagaagcttcgcaaggcgaaaagggaggctccacctggtgagaagccagaaccagttagaacccacctgcgtaacatgatcattgtacccgaaatgattggaagcattatcggtgtgtacaatggcaagacattcaaccaagttgaaatc

SEQ ID NO: 219586 - DNA, 375 bp, Gossypium hirsutum
atcttgggttaccgtcagatcttcacggcgaaccccgataatgtccagcatatactcaaaacccgttttaataattacccaaaaggtgagttcttcattaatgttttctttgattttctcggcaacggaatatttaacgccgatggggaagcttggaagttcgagagacaggtttcgagtcacgagtttaatactaggtctcttcgtaagtttgtagaaaccgtcgttgatgctgagcttaacgaccggttggttccgatgttatccggcgctgttaccggcaagacagtgcttgatttgcaagatgttcttcagagatttgcttttgataatatttgcaagattgcttttgggtatgacccagaatgtctttta

SEQ ID NO: 219587 - DNA, 380 bp, Gossypium hirsutum
cccacgcgtccgggcctagtcaagcccgtcattggttcacccccagtgatgccatgctgttcccttctcgatggcctcgtcgatcttgaagctgctgtttgcctttgcaccgctatcaaagctaacatcttaggcatcaaccttgacattccagtttctcttagcttgctcctcaatgtttgctcaaagaaagttccttatggcttccaatgctagtttaagtcaatgatttttcccctacattctttctcaacttctttatggtttgggtttgggtttttttcgagttatgatgccataacttcattgttttaatgtggtttcatttgtaaatttaatttccttcggggggatagatatagaataaggttaatactttt

SEQ ID NO: 219588 - DNA, 373 bp, Gossypium hirsutum
cacctatccaatagcagctccagctcttctagtgacgaggaagaaggtgaaggcggagagaagaagaagaagaagaaaaaggagaagggaaagaaagaacaggacagtgcagtcccagtggagaagtgcgatgaggtagcaacagttcaccactcagagacgccggaaaagaagggtttcatggataagatcaaagacaaactcccaggacagcataagaaagatgaagaggacaccacccaaccaccagctgctgctgccccaattgagaacgaccaccatgaaggagagacaaaagagaagaagggatttttggtgaaaatcaaggagaaaattcctggttaccactccaaaacagaggacgagaaggaaa

SEQ ID NO: 219589 - DNA, 403 bp, Gossypium hirsutum
cgatttggttgaaatggtcttcgcaaaaggagatcccgggatcgccgccttatatgataatctccttgtttctcaagaactatggtcattcggagagcggttgaggactaactatgaagaaactaaaagccttctcctacaaattgccgggcacaaggatcttctcgaaggtgatccgtacttgaagcaaagactacggctccgagactcatacataacaacactaaatgtctgccaagcctacacactcaaacgtatccgtgacccgagctacgacgtcaagttccgtccacatatctccaaagagatcatggaatcaaacaaatccgcggatgaactcgtgaaactaaacccgacgagtgaatacgcgcccggtttagaagacaccctcatcttgaccatg

SEQ ID NO: 219590 - DNA, 410 bp, Gossypium hirsutum
gcaaagtttataatagaggcagcaaaccatcctacagatccagaagcagatgagattctatcaaagaaaggagtaataatactacccgatatatatgcaaatgcaggaggggtgactgtcagctactttgagtgggttcagaacatccaaggtttcatgtgggatgaggagaaagtgaaccaggagctgaagaaatacatgactaaagcttttcataacatcaagaacatgtgccagtcgcacgactgcaatctccggatgggtgcatttacacttggggtgaaccgtgttgcccgtgcaactatcctgagaggatgggaagcataaacgcctcccttccggcttttatttctcttagtttatagtctccattgaaaagcacaagcaataactttcaagaattcttagct

SEQ ID NO: 219591 - DNA, 387 bp, Gossypium hirsutum
tcgcatcaaccatgaagagacttggctgctcagattcattgagtgctttgatgtcaatctgcccaacttcagatgaacgtagtccaagaaacaacaatgtttacagtcgagagtttcagtcgatgttagaaggattcgatgaagaaggttgttttgaagaattaacagtcggccatggcgggggtgccaagaagagacgattaagtgtggatcaagtgaaggcattggagaagaattttgaagttgaaaacatactcgaacccgacagaaaatcgaaactagctcaagaacttgggttggagccacgacaaagttgctgtctggttttaaaacccacgtgctagatggaaaacaaagcatttggaaagagattatggaggtcttaag

SEQ ID NO: 219592 - DNA, 378 bp, Gossypium hirsutum
gtgagcatgcaggtattgactttgttaggctgccatgcaagcatttctactgctggaaatgcatggaaacttattctaatatgcatatctctgacgccaccataaccaagctgcaatgccctgaagctaaatgtggtggtatggtccctcctgctttattgaaacagttgcttggcgatgaagggtatgaacgatgggaatcccttatgctacagaaaacacttgaatcaatgtcagatgttgcatattgcccaaggtgtgaaacaccttgtatagaggatgaagagcaacatgcacaatgctccaagtgcttctttagcttttgtaccctttgtagggagcgccgtcatgttggcatagcttgtatgacaccagaaa

SEQ ID NO: 219593 - DNA, 384 bp, Gossypium hirsutum
gaggcagccatgtttgggtggaccattgctctttgtctaactgcaacgatgggctgatcgacgccattcatggatccaccgccatcaccatttctaacaattacttgacccatcataacaaggtcatgctattgggacatagtgacacttacaaacaagataagaacatgcaagtcaccattgcctttaatcactttggagaaggccttgtacaaagaatgcctagatgtaggcatggatactttcacgtggtgaacaatgattacacgcactgggaaatgtatgcaatcggtggcagtgctgatcctacaatcaacagccaaggcaatagatttcttgcaccaaatgatgcagacaacaaagaggtgacaaaacatgaggatg

SEQ ID NO: 219594 - DNA, 408 bp, Gossypium hirsutum
gaggcagccatgtttgggtggaccattgctctttgtctaactgcaacgatgggctgatcgacgccattcatggatccaccgccatcaccatttctaacaattacttgacccatcataacaaggtcatgctattgggacatagtgacacttacaaacaagataagaacatgcaagtcaccattgcctttaatcactttggagaaggccttgttcaaagaatgcctagatgtaggcatggatactttcacgtggtgaacaatgattacacgcactgggaaatgtatgcaatcggtggcagtgctgatcctacaatcaacagccaaggcaatagatttcttgcaccaaatgatgcatacaacaaagaggtgacaaaacatgaggatgcgccgcaaattcaatggatgcatt

SEQ ID NO: 219595 - DNA, 409 bp, Gossypium hirsutum
gggaagctaaggccaaccctttttgatatgtttggcgaagatgcaagccccaaagtgaagaagtttatgaacatcattatgaccaaactgcaggggagtggcgatgacggtgaagggggtggtttcatggggaaggttgggaatctggcactacagtttcttaaacaaaagctggatgatgacgaaggatacggtaaaccggcacttgagactgaagtgagtagcaagcaagaggcttatgcaggagctggtaagcactctcttcctgacagtggaattcttatcagcggctgccagaccgaccaaacttcagcggatgccagcccatcagggaatgcaagcaaagcttatggagcacttagcaatgctattcaaaccataattgccgactcagatggctcaattacta

SEQ ID NO: 219596 - DNA, 401 bp, Gossypium hirsutum
ctcaactgcagttgtggagccttacaatagcgttctgtccactcattcgcttcttgaacacacagatgtggctgtgctcttggacaatgaagcaatttatgacatatgtcggagatccctcgatatcgagagaccaacttacaccaatttgaaccggttgatttctcaaatcatatcgtccttgacaacttctttaaggtttgatggagccattaatgtggacattacagagttccaaaccaatcttgtgccttatcctcgaatccacttcatgctctcttcttatgcgcctgttatctcagctgagaaagcataccatgaacagttatcagttcctgagatcacaaacgctgtgtttgagccctcaagcatgatggcgaagtgcgatcctaggcatggga

SEQ ID NO: 219597 - DNA, 410 bp, Gossypium hirsutum
gtttcttaggtgggctttgcgccctcctggttattacaagagctggcatattggggtccgtgctaagacatcaaagaagcttgttgccttcattactggtgtgcctgctagaataagggtgcgtgatgaagttgtgaaaatggcagagatcaatttcttatgtgttcataagaagctgagatcaaagagacttgctcccgtgatgattaaggaggttactaggagagttcatttggagaatatttggcaagcagcttatactgctggagttgttcttccaacaccaattactacttgccaatactggcataggtcactaaaccccaagaagcttattgatgttggcttttctaggcttgggcctaggatgacaatgagccgaaccattaaactctacaagttacctgatc

SEQ ID NO: 219598 - DNA, 360 bp, Gossypium hirsutum
ggaatgcaagattggaattatgcctggatacattcacaaaccaggtcgtgtaggaattgtttctcgatcaggcactttaacatatgaagcagttttccaaacaactgcagtaggtctggggcaatcaacctgtgtaggaattggtggggatccctttaatggaaccaacttcgttgattgtgtgacaaaattccttgctgatcctcagacagaaggcatcattctgattggtgagatagggggcactgcagaagaagatgccgctgcactgataaaggaaagtgggactgaaaagcctattgttgctttcattgctggactcactgcttcttcaggacagcgtatggggcatgctggagc

SEQ ID NO: 219599 - DNA, 401 bp, Gossypium hirsutum
gtgaaacctccaatcaagttgccaccggttgttcctccaatagttaagccacccattgacctccctccggttacagtccctccaattaacctccctccagggacggttcctccagtaactaagccaccaagtgggaaaccctgcccaacaccaccaaccaaggacacttgccccattgacacactgaaattgggtgcttgtgtggatctgctgggagggttggtgcacattggactaggtgacccggttttgaatcaatgttgtccggttctttcaggacttgccgagctcgaagctgcggtctgcttgtgcaccaccctcaaacttaaggttctcaaccttaaaatttatgtgccactggctcttcaactccttgtcacatgtggggaaaacaccccttc

SEQ ID NO: 219600 - DNA, 356 bp, Gossypium hirsutum
gccgaaaaatatgatggtcggagaaactcaccgtcttaatccgacggtccatgttccaccatggcctaacctcgacgatgatcaaacggccgagatttactctccactcaactacaatgcagccgatagtcacttcaacaacaacggcggcaacccggttcatttccatgaagcgttagcagcgttacaacgttacttgccgtcgaacgaaccggactttgtctacccagattccgatcttccggttctcgaaaacgcggattcttcggtcgacgcttactcgtgcgatcatttcaggatgttcgagttcaaaatccggaagtgtccacgtggccgagcccatgactggaccgagt

SEQ ID NO: 219601 - DNA, 430 bp, Gossypium hirsutum
gggttcacaacaataccgagctttaacgatccccgagctaactcaacaaatgtgggattccaaaaacatgatgtgcgcggctgatcctcgtcatggaaggtacttaacagcctcggcaatgtttcgaggcaaaatgagcaccaaggaagttgatgaacaaatgatcaatgtccaaaacaagaactcttcgtactttgtggagtggattccgaacaatgttaaatcaagtgtttgcgacatcccaccaactgggttgacgatgtcatcgacgtttatggggaactcgacatcgatacaagagatgtttcgacgtgtttcggaacagttcacagtgatgtttatgaggaaagcatttttgcattggtatacaggggaagggatggatgaaatggagtttactgaggctgaaagtaatatgaatgatttggtt

SEQ ID NO: 219602 - DNA, 418 bp, Gossypium hirsutum
ggcactttggaaaggtgcaggccccaccgtagtcagagccatggcattgaacatgggaatgcttgcctcttatgatcaaagtgttgagttttgcaaggattcgcttggcttaggagaagctgctacggtgctaggtgcaagtactgtttcaggtttctttgctgctgcttgcagtttgccttttgattatgtcaaaacacaaattcagaaaatgcaacctgatgcttcgggaaagtatccatatagcggctctttggactgtgccatgaaaaccctcaaggctggaggaccattcaaattttacaccgggttccctgtatattgtgttaggattgctccgcacgtcatgatgacttggatattcctcaaccagattcagaaggcagaagaaaaaatagggttgtagagcgtggtcact

SEQ ID NO: 219603 - DNA, 337 bp, Gossypium hirsutum
cgcaaataagtcagttaaggagataattgaagaacttaaaaaacatcaacaaagtacagaagcttcagtggtcgagtgggcaaatgaagctctgcagggtctcggaaagggtgctccattttctcttttcttaacacacaactatttctctagagttgcatctggatatggtaaacagaacaacgaatttacgatgctaaaaggcgtcatgaaaactgaataccgtgttgccttacggtcttctctgcggaatgattttgctgaaagcgtccgtgcagtcttgattgacaaggataagaatccgaagtggaaccctgccaccttagacgaagttgac

SEQ ID NO: 219604 - DNA, 347 bp, Gossypium hirsutum
atttggtgatcagggttaccaagttaccaagaagtcggatgtcaataaaagtggttatcttcatcaccatgaggaacctggcgccggtgatttatatcgtcgtcaagcttctcctcatagtgctgtttcttcgttttctagtggtagagtcaagagagaaagagaggttagcagcgaggaattagaggtagagaagaattcgtctagagttagtgatgaagacgaagacggtgttaatgcaaggaagaaactcaggctcaccaaagaacaatctgctcttctcgaggaaagcttcaaacagcatagcactctcaatcctaagcaaaagcaagctttagcaaagcaat

SEQ ID NO: 219605 - DNA, 427 bp, Gossypium hirsutum
caaacacttcttattaccgacgatctcttcaggaattcggacgtaattacgaggcaaaagtatgtcagtttggtgaactccgttaagaattcggggggcactgctcacattttttcgtctatgcacgtatcaggggaacaactggcacagctgaccggcattgcggcaatccttcgtttccctcttccggatctggaagacatcgaaatgtagggtaccattttctgcatatgttcgagtttccggcgtcgagattttatactgtactcgtatttctccccctttttctttcatatatatatatataatgcgttaatcagtatttgaactgtatcatatctagaaacagctagtatttaatcaactctagaagtgtaacattatttcattcagtgtgttatggaaaaaaaatattttaatatttttt

SEQ ID NO: 219606 - DNA, 422 bp, Gossypium hirsutum
  unsure (1)..(422): unsure at all n locations
gaaaggatctcggagactcaccaaagcacgaaagccaggatctttcagaaaatggattcctattcgaagagtgcataaccgcatggataagctcacactaacccgtcaattttggatccaattcgggattttccttggggggtatcagtaaggaattggaatgtaataatattgattcatataggaggaaaaggttctctattgattcaaatgctgtacctatgggatagggatagagaaagaggaaaaaccgaagatttcacatagtgcttttgatcgaaaaatcaatctgatttatttcgtacccctcgctcaatgagaaaatgggtcagattctataaggatcaaacctatgggacttaggaatgatggaagggaataaaantaaaaaaaaaaaagaaatctaaaaaagagggggaaaa

SEQ ID NO: 219607 - DNA, 353 bp, Gossypium hirsutum
gttttcctccgccgttagtaaaagcttggaagaagactaacgtggtgcaaaaaatgggccccaagcgaggtggaaaggtggccgtcccagccaagaagaaacaagagaaggttgtcaatccattgtttgagaagcgtccaaagcagtttggtattggaggggctctacctccaaagaaggatttgcatcggtttgtgaagtggccaaaggttgtccgcattcaaaggaaaaagagaatccttaagcagaggttgaaggtcccacctgcattgaaccagtttaccaagactcttgataagaaccttgcaacaagtttgtttaagttgcttctcaagtacaggccagaggacaag

SEQ ID NO: 219608 - DNA, 216 bp, Gossypium hirsutum
gcagctagctacaaaagccgcgcgtaagtccgctccggcgaccggtggagtgaagaagcctcaccgtttcaagccaggaactgttgctttgagagagatccgtaagtatcagaagagcactgaactgttgatcaggaagcttcctttccagaggttggtgagggaaatcgcgcaagatttcaagaccgatctgaggttccaaagcagcgccgtcgc

SEQ ID NO: 219609 - DNA, 384 bp, Gossypium hirsutum
tgaagatccaagtattttctctctctttttctctctcatttttgtttctctagtggtttttgttaaagattatacctttacttcgtttctactcaaaaaatcttttttttttgcttgtttgcagacttgtgtcctcaaagttaacatacactgtgatggatgtaagcacaaagtgaagaaaatcttacaaaagattgaaggggtttttaagaccaccatagattctgagcaaggtaaggtaacagtgttgggaaatgtagatcctaatgttctaataagaaagcttgcaaaatcagggaagcatgcagagccttggggttctgcaaaagctaacaacaatcaagcacatcttgcccaccagttcaagaacatgcagatgcttga

SEQ ID NO: 219610 - DNA, 341 bp, Gossypium hirsutum
ctagccccgaaactataaggagggcacacgctgttcatcctcttactgccgtacaacttgagtggtcgctttggactcgtgatgttgaggaagaactaattcccctttgcagggaactcggaattgggattgttgcatatagtccccttggtcatggtttctttgccggtaaagcaaaggaggatacctctaatagttctctggaagtgtacccaaggtttcaaggagaaaacttggagcaaaataggatcctatattcgaaagtagagaagttggctgaaaagcatggatgtacaccggcacaacttgcacttgcctgggttcttcaccaaggggatgat

SEQ ID NO: 219611 - DNA, 277 bp, Gossypium hirsutum
tacatcagcttgagaggcgtacaacaatgtgctgaccactcattcactccttgagcacactgatgtcgctggtcttttggattacgaagcaatatatgacatctgcaggcgttctttggacattgaacgacccacttatacgaatcttaaccgtcttgtctctaaggttatctcatttcttaccgcatcttttaggtttgatggagccctgaatgtggatgtgactgagtttcagactaaccttgttccatattccaagatccactttatgctttct

SEQ ID NO: 219612 - DNA, 366 bp, Gossypium hirsutum
aaaagtcgaagctgggtttcaccgtctatccttcacctcaggtttctacatcagttgtagagccttacaacagtgtgctgtccactcattcactccttgagcacactgatgtcgctgttcttctggataacgaagcaatatatgacatctgcaggcgttctttggacattgaacgacccacttatacgaatcttaaccgccttgtctctcaggttatctcatctcttaccgcatctttgaggtttgatggagccctgaatgtggatgtgactgagttccagactaacctggtcccatatcccaggatccactttatgctttcttcttatgcccctgtcatttcagctgagaaggctaccatgagca

SEQ ID NO: 219613 - DNA, 383 bp, Gossypium hirsutum
aatctatcagctgctaactgctacaagtctgagcatttgaagaagcctgagaattgggcgttggttgagaaggccaagtacttctatattgctggatttttccttactgtatctccggaatccatacagcttgttgctgaacacgctgctgcaaagaacaaggtgttctcaatgaatctttctgctccatttatttgcgagttcttcaaggatgcacaagagaaagcactaccgtatatggactttgtctttggcaacgaaactgaagcaagaaccttctcaaaggttcatggctgggagactgatgatgttgcagagatagccctgaagatttcacagtggccgaaagcttcttgaacatacaagaggactactgttattac

SEQ ID NO: 219614 - DNA, 425 bp, Gossypium hirsutum
atggtgctggaatcggccctggtgtctatgacatccactctcccagaataccatcaaccgaagagattgctgaccgaattaacaagatgcttgctgtgcttgagacaaacatcttgtgggttaacccagactgtggtctcaagactcgcaagtatgccgaggtgaagccagccctgaacaacatggttgcagctgccaagctgctccgcacccaacttgcgagtgccaagtgagaggcatatccaaggtcggacatcatcctttatatcgaagatgatccagaggaaatttgtcttaaatcatttgaataactgtgtgttggaagtatttgttaggcgtatcatatgcccctctttgaggccaattgttttccttttcttttttgggtatttcccctctaaatattttgtatttttggggatata

SEQ ID NO: 219615 - DNA, 393 bp, Gossypium hirsutum
tgattattcaacgaaactacatgtgatcctggaagtcctcttaaaggcaatggcacggtcactaaacttggaggagaaccagtttttgcaacaatatggagaccaagcaacaatgcaagcaagatttaacttctatcctatatgtccaagaccagatcaagttcttggggttaaacctcatgcagatggatcagtaatcaccatgctgttgcaagacaaagaagtggaaggtcttcaagtcctgaaagatgatcaatggtttaatgttccaatcatacctcaagctcttcttatcaacattggagatcaagcagagataatgagcaatgggatattcaagagcccagtacaccgagtggtaacaaactcaaagagggagaggattactctagc

SEQ ID NO: 219616 - DNA, 395 bp, Gossypium hirsutum
ggatttcttccagtgcgaagagcagcagccatggttctcaagacggagctttgccgatttagtggtgccaagatataccctgggaaaggcatcagatttgttcgtggtgattcccaggtcttcctcttttccaattcaaaatgcaagaggtacttccacaaccgcctgaagccatcaaaacttacatggacggccatgtacaggaagcaacacaagaaggacattgcccaagaagctgtgaagaagaggagacgtactgcaaagaagccatactccagatccattgtgggtgccaccttagaggttatccagaagaagaggagtgagaaacctgaagttcgtgatgctgccagggaagctgctctccgagaaatcaaggaaaggatcaagaagac

SEQ ID NO: 219617 - DNA, 412 bp, Gossypium hirsutum
cggaggcatgacaacggaagaatatcggtgccatttcagcatatgggcattagctaaagctccgttgttgattggctgtgatgtgaggtctatggataatgtgacatttgaattggtagccaataaagaggttattgatgtcaatcaagataaacttggtgttcaaggtaaaaaggtgaagaaagaaggggatcttgaggtctgggcaggcccattggctaacaatatggtagctgtggtgttatggaacagaggatcttcctcagcaaacatcacagcttattggtccgatataggccttaagccatcaacggttgtcgattctcgagacttgtgggcgcattcgacggagacgggtgttgaagatgagatatcagcggaagtggattctcatgcatgcaaaatgtacact

SEQ ID NO: 219618 - DNA, 361 bp, Gossypium hirsutum
cgaacgctgttgacgctgtgtagaaatgccgttcagaaggtacgttgagatcgggagagtcgctctcgttaactacagcaaagactacggcaagctcgtcgtcatcgacgatgttgttgaccagaacagagctgtagtgtgatcccccagatatggagaggggccaagtgaactctaacaggcacaaaatgactgattttgccaatgtgattcctagcgtaccaaagaagaagacactgattgaagcaatggaaaaagctgatgttaaaaacaagtgggagaatagctcatggggtaaaaagctgattgttcaaaagaagagagcatctctcaatgacttcgacagattcaagatcatgtt

SEQ ID NO: 219619 - DNA, 362 bp, Gossypium hirsutum
gacattttatggatgttggggtgcactgctagtacgcagcttcttaggaagcacttagtatgaaaaattagtgggaaaataatggatggaagaaccctacatgaaaaaattccgatttatgttgtatatttggccgatagaaacctatctagttctatgtggatcgattcttcttttctggcatcggtcgatgtaatggactattcattacttgttggggtggatgaggagcgcaaagagctggttttgggaattatcgatttcatgagacaatatacttgggacaagcacttggagacatggggtccggcatcagggatactatgtggccccgcgaatgcctccccaacaatttttttttc

SEQ ID NO: 219620 - DNA, 356 bp, Gossypium hirsutum
gaaaatgcctggcaggatgggaggaagcaaaagaaagatccgaaagctcaagattgtgaaaatcgacaatgagcttcgagttgtgatgatcaaaggtgctctccctggtaagcccggaaatctgctacgtataaccccatctaagattgttggaaagaacataccaaagagctagtttcatgtattggactcatttcattttagctagtatttcagttgtgggaacttttgatatattcattggtgtatgagtttaagtcgaaatttaccttttcttttattgagttgattcctgaatttggaaatggcttctcaatttgtgaactacttaaattgatcagtcaattctacttgtc

SEQ ID NO: 219621 - DNA, 336 bp, Gossypium hirsutum
gaaatgctcggtaaccctctgaatttcagtggtggagctaggtcatcggctccaacaccatccaactcatccattttcaagaccgttgctcttttctccaagaagaaggccgctcctccaaagcccaaggctgctgctgtcgccccggccgatgaagagctggctaagtggtacggtccggacagaaggattttcttgcctgaaggtctgttagacagatcggagatcccagagtacttgaacggagaagttcccggagactatggatacgatccgtttggtctgagcaagaagccagaagactttgcaaaatatcaagcatatgagttgatacac

SEQ ID NO: 219622 - DNA, 342 bp, Gossypium hirsutum
cttaaatgtcaaggctgaagacaaaggcacaggtaaatcagagaaaatcacaatcaccaacgacaagggtcgtttgagccaggaggagatcgagagaatggttcgtgaggccgaagaattcgcagaggaggacaagaaggttaaggaaaagatcgatgctcgcaacagcctcgagacttacgtttacaacaaaaaaccagattaatgacaaggataagcttgctgacaagctcgaatccgatgagaaggagaaagttgaaacggctgtgaaagaagccctcgagtggctggatgacaaccagaatgccgaaaaggaagactttgaggagaaactcaaagaag

SEQ ID NO: 219623 - DNA, 345 bp, Gossypium hirsutum
gttggtggttgagcccattgccacaaccgccataacatgcggcgatgtgacaagcaaagtggccggttgcttatcatacttgcagaacggagggaacgtgccgaaggcttgctgcgacgggatccggtccctgaacatgatggctcgaaccacccctgaccgccaaaccgtgtgtgggtgcttgcaaactgccgctaaggctgtcaaaattaaaggcaacttggctgagaccctcccggccaaatgtagtgtcaacatcccttacaagatcagcacttccactaactgcaaaaatgtgaagtgagatggatgaagagagggttttgcagcagcttgaaggagata

SEQ ID NO: 219624 - DNA, 366 bp, Gossypium hirsutum
aacagccctctttgacgagtgtttcgaagctaataaagaaggatgagaggcaaccctaaaccgaacaccattaggacgggatggacagccaaaggaagtgtcacctatggaggcaatcctgtgcctaccagcggatacatatgtaacggggcaagatatgagtgttgacggcgggatgagcgtgaatggcctctcctttcctaaggaaatcatgaaagaaacaaagagccatgaactcaagtatgtaagatgaaaatcgagatgaattggacatgggtaagccatgagaaaagaataaaaaaacaagtttgtcaacccggaaaggcaaaagacgcaacatacactaaaaaatgcccttaatggccg

SEQ ID NO: 219625 - DNA, 401 bp, Gossypium hirsutum
gcgagaaatggggagaatgcgacagtatttggcaatgaaaacggatcctgttgctcaagaattgatcagttccgatatcaaagaactcaagctggctgcgattaaattgatggatgatgcaactaaacttggaggtcttggttttggaacttcttttcttaaatgggtcgcctcattttctgctatttatttattaatcctggaccgaacaaactggagaacaaacatgttgacctcacttttggtaccttacatcttctttagtcttccttcaggattgttcagatttctaaggcgggatgttggaaaatggattgccttcattgctgtcgttctaagactgttcttccccagacactttccagactggctggagatgccaggatcaatgattctttact

SEQ ID NO: 219626 - DNA, 428 bp, Gossypium hirsutum
caatgatctaaatagctgtgcacataaccattgttcacagtttgaaactgctactgcaatggccttcattagctggtttacttcattaccatcatttctcttgaacttttggtcgctggcatcccggtaaacaggtaacatggaaaaaaagaagtcgatgggagtattcagatcatttcagaatgccatccaaagcatttttttattattatcccaagtatattccttcatagctttctcagatgccttgaagatacaagaacttggttttgtgattttaaagttgtatagtttgtattctataaattggtcttgtgagaaaaatatctggggcattggacattatgaataccgccagttgcatcttttggagattgaatgattcgatcacattattgtaaaacatgtataatttttaatactagatg

SEQ ID NO: 219627 - DNA, 373 bp, Gossypium hirsutum
cgcttggaaaggggagacccttcaggaatactggtggtgtactgagagagcccttgattggggtcctactggtggacctgatctgatcgtcaatgatggtggtgatgctactttgttgatccacgaaggtgttaaagctgaggaagtttatgagaaaactggtcaactcccagatccggcttcgactgataacgctgagtttcagattgttttaaccattatcagagatgggttgaaagcagatcccaagaagtatagaaggatgaaggagagattggtaggtgtttctgaagaaactacaactggagttaagaggctttatcagatgcaggccaacggtaccttgttgttccctgccattaatgtcaatgac

SEQ ID NO: 219628 - DNA, 424 bp, Gossypium hirsutum
gtagctgtccgggacgcattccggagacgagtaatggtggcgaacgtgacatctctgggtgggttcgacacatgttactcggtcccaatcaatgcaccgaccataacatttatgttttcgggcatgaacgtgacattgccacaagagaacctactgctccacagcacagcaggcagcatcacatgtctggcgatggcaccggcaccagcgctgaatgtgatcgccaatatgcagcagcagaaccatagggtggttttcgatgtgccaaattcgagggtgggggtcgcccgtgagcgatgttcttaaaaagtgtggggtctttttcttctaacttttgggaaacagtgttggtgttgattaaaagcagaatatatctgattaataatgaaagtcaaatttttggtagtatatatttacttgtact

SEQ ID NO: 219629 - DNA, 392 bp, Gossypium hirsutum
gataaatcatgcgtttggcacgccgctgatttcgctgatgggaatttgaaagaagagatgttctgtatcagatttgcttctgttgagaattgtaagaccttcatggagacagttcaagatgttgctgaaagtcagggaaagaaagaggaaaataaagacgctacagtcactgctgatctcctcgacaagttgagtgttggagaaagtaaaagtgacggtaaagaagaagatacggtcgttgcctccgacaccaaggaagccgtcaaagatgaagcaaaaacagaggaagataagaaggatgaggctgcttcaaaagcatagacctgaaagagaaagcaacaatatactcgagtaagtttattataaaaaaattaatatttagtggtttaagg

SEQ ID NO: 219630 - DNA, 392 bp, Gossypium hirsutum
gatttatcatgcgtttgtctacgccgctgttttcgctgatgggaatttgaaagaagagatggtctgtatcagatttgcttctgttgagaattgtaagaccttcatggagacagttcaagatgttgctgaaagtcagggaaagaaagaggaaaataaagacgctacagtcactgctgatcttctcgacaagttgagtgttggagaaagtaaaagtgacggttaagaagaagatacggtcgttgccttcgacacctatgaagccgtcaaagatgaagcaaatacagaggaagataagaaggatgaggctgcttcaaaagcctacacctgtaagagaaagcaacaatttactctgagtagtttattttaaaaaaattaatatttattgggttaag

SEQ ID NO: 219631 - DNA, 391 bp, Gossypium hirsutum
  unsure (1)..(391): unsure at all n locations
ggtgatgcgaccctctcatcatcacattcactttatttaggcttcctctttttttttttttttcttttataagtctcaaagaaacttagaccccttcgtattctccgctcataccccaaatccccataccccttctgttcaacagcaaagatggcgactgtgcgagatacctcctctagtatcgtgcaagcttcgatcccgaaccgatttacgagtgcgattgtgaaggcgccgacttctcttggatcttttaagaacatctccaaaccttttggcttgaaatgttcctccaatcacaaaacatttatgggggcttataagattaaactcgtangaccccatggtgaggtgagcgcgtttttagcccctgtcgatcaatacattttatatg

SEQ ID NO: 219632 - DNA, 385 bp, Gossypium hirsutum
  unsure (1)..(385): unsure at all n locations
caaagaaattactcttcgggttattatcagctttatttcgacacagataatgtgctttgccttgtctacaaaggtccagagttttcaagtgtttattggccaagtccatggctattgagatgggaagctggaagatccacattcaataacaccaaaatagctgttttagactctttgggtaatttcagttcaactgataatttcaccttcttgtcagctgattatggtttaaacatctcaaggatgttgaaaatggatttggatggtaatcttaggttatatagtctaagtgaagatacaaaagcttgggttgtttcatggcaagcctttcttcaccatgtaaggttcatggatgttgtggaccaaacagnatatgtatttattc

SEQ ID NO: 219633 - DNA, 338 bp, Gossypium hirsutum
tctaactgcggtaaatgttgccctaaggataagtcaatcaagaggtttcttgtgaggaacatcgtggagcaagctgctgtcagggatgtccaggaagcctgcgtctatgacacgtacactctgcccaagctgtatgtgaagatgcaatactgtgtttcatgtgcgatccattcccacgttgtgagggtccgatcccgcactgacaggaggaaacgtgacccgcctcagcgcttcattagacgcaaggatgatatgccaaagcccggtcagcctggtcaggctcctcgtactggtgttgcggctcctgctcttgcataaggcttttgaagtttaagatg

SEQ ID NO: 219634 - DNA, 384 bp, Gossypium hirsutum
gttcgacaaggacggagatggttgcattactaccaaggagttgggaactgtgatgcgatcacttgggcagaaccccactgaggcagaactgcaagatatgattaatgaagtcgatgctgatggaaatgggaccattgattttcctgaattccttaacctgatggcaagaaaaatgaaggatacagactctgaggaggagcttaaagaggcattcagggtgtttgacaaggatcagaatgggttcatatctgcagccgagctgcgccatgtcatgacaaaccttggtgaaaagcttacagatgaggaagtcgacgagatgatccgcgaagctgatgttgatggtgatgggcagatcaactacgaggagttcgtcaaagtcatgat

SEQ ID NO: 219635 - DNA, 286 bp, Gossypium hirsutum
  unsure (1)..(286): unsure at all n locations
gggcaaactccaaaggtagccaagcaagacaagaagaagaagcccagaggtcgtgcctataagcggatgcaatacaatcgccgtttcgtcactgccgttgttggctttgggaagaagcgcggacccaactcgtcagagaagtgaggccggacatgtaggagtcttacattatattgataattttctagcttcattagcattacattgttatgatttagtttggagtctttctttgctttaagaaaactataacatcggtatctgttgttttgaaatatttnanana

SEQ ID NO: 219636 - DNA, 368 bp, Gossypium hirsutum
catagtgcttggacttgttgcagttgggttgttttcatttttccttttcaagttgtggcaaaagaagaaacgagacgaacaatatgcccgtcttttgaagttgtttgaagaagatgatgagctcgaggtcgagcttggcctgcgggactagcagcacattgagaactgagctcgtcctaattgaggcttaaatggcaacaatggcttgtgtgttgtttaggaatctcatttttgtgaaggacaatgtcaggattttaggcatatgctgtggtgaggtctgataatttttcaaccttaaagttgtactatttgtaatgatatgttggaatttattatgaatttaagttttttgtggatgcttagaaatg

SEQ ID NO: 219637 - DNA, 317 bp, Gossypium hirsutum
ggaaaatgcttaacgcaaaagcttcttaaaaagaagcctaagaagggttcaaagaatgccaagccaatcactaaaacagaggagtgtgaaagtttcttcaacttcttcaatcctcctcaagttcctgaggatgatgaagacattgatgaagatactgctgaggagctacaaaatcaaatggaacaagattatgacatcggatcaacaattcgagacaagattattccacatgctgtgtcatggtttacaggagaagctatccagggagatgagcttgatatagatgacgatgaagaagatgacgatgatgatgatga

SEQ ID NO: 219638 - DNA, 354 bp, Gossypium hirsutum
gctcgatccacatatcgaggatcaatttgcaagtggtcgtttgttggcttgtatctcttcaaggcctggtcagtgtggccgcgctgatgggtatatcttggaaggcaaagagctggaattctacatgaagaagatccagagaaagaaggggaagggagctgcctaaaaattttgttatgtgagcttttaacatatcatgtcagaatctcctctctgctacttttatctttttacaggacattcaagattgtattagtttttgaactttttagtttgaatgtcaactagtgggttggtgtgtaatgttgaacaatataatatttgtgtttgaattttgatattcttgaactttat

SEQ ID NO: 219639 - DNA, 272 bp, Gossypium hirsutum
acacgtgcgaagaagtaagggagaaagctgaagaagcactatcggctcaaatgaaattaacagcaatttgggaaataagagctcgtcagaaagggtggagagaaaaggtcgccaaatctaatgcatttccttatttcatttaagtaacttcattataatgtcttattttattgatatttttatatttaatctagtttttattatttaaaaaaaaaaaaaaaaaaaaaaaaaaaaaaaaaaaaaaaaaaaaaaaaaaaaaaaaaagggcgaag

SEQ ID NO: 219640 - DNA, 90 bp, Gossypium hirsutum
taaaaaaaatggtatgaaattccaactcaaccaacgttgctgaggtgttctcccgcattgaccacaaatttgatctcatgtatgccaggg

SEQ ID NO: 219641 - DNA, 372 bp, Gossypium hirsutum
gtcgtattccatctgctgtcggttaccaaccaaccttggctactgatcttggaggtcttcaggaacgtattaccaccaccaagaaaggttctatcacttctgttcaagccatatatgtgcctgctgatgacttgacagatccagctcctgcaacaacctttgctcacttggatgccacaactgtgttgtcccgacagatctccgagcttggtatttatcctgctgtggatcctttggattctacatctcgtatgctctctcctcatattttgggtgaggaacactacaacactgctcgtggtgtccagaaggttctccaaaactacaagaacttgcaagatattattgctattttgggaatggacgagctta

SEQ ID NO: 219642 - DNA, 358 bp, Gossypium hirsutum
ggcggatgccatttgctggcgtgttccagccaacctcggctactgatctaggtggcttgcaggaacgtattacctccaccgagagcggttctatcactattgttcaagctcatatatgttcctgctgatagacacgacagatgcaactcctgcatacacctttgctcaatcgaatgccacatcgtgtgggtccggactgaactacaagcttggtatttatcctgctgtggatactctgaattatacatgtcctatgctctctcctcatattctgcgtgaggaacacttctacactggtcgtggtgtccagaaggttcttcacagctacactatcgttccagaatttattgcttttttg

SEQ ID NO: 219643 - DNA, 400 bp, Gossypium hirsutum
  unsure (1)..(400): unsure at all n locations
agtgtaaatacattcattcccagtacttctccagcatttgttatcttttaccctaccgagaaatggcaaaatccatttttgcattaccaattttgcttggattatgctatctggctactgatgtaagtgccttcacggcttctgggtggaccaaagcacatgctacattttatggaggcagtgatgcctcaggaactatggggggagcttgtggatatgggaacttgtattcagctgggtatggaaccaggactgctgctttaagcacagccttgttcaatgatggagcttcatgtggacaatgctacaagatcatgtgtgattaccaagctgaccctaaatggtgcataaaaggaacatncgtcaccatcacagccacaaacttttgccctcctaactt

SEQ ID NO: 219644 - DNA, 362 bp, Gossypium hirsutum
gagatgagaaagaggcaatcaggacctggcgatggcgttttgtttcggacctttctaggactctccgataaccggacccgctagcacccggcgtcagcttttggaccggctttttcctcttctcttcctcgggccacggtttttgctaaggttacttcgatggtgaccaatgattatatcaccatgaacgggaacgggtttagcaagagggcagaagagttcatcaagaggtaccacgaactcgaggttaaagaaaatcagtgcagctcttcgctcgttaaacacatcaaagctcctgttcacctggtttggtcattagttaggaggtttgatcaaccgcagaagtacaaaccatttgttag

SEQ ID NO: 219645 - DNA, 413 bp, Gossypium hirsutum
cttcactgtttgggatgttggtggtcaggacaagattcgtcctttatggaggcactatttccagaatactcagggtctcattttcgtggtggatagcaacgacagggaccgtgttgttgaggcaagagatgagttgcacaggatgttgaatgaggatgaactgagagatgctgttttgcttgtatttgccaacaagcaagatcttcccaatgcaatgaatgctgccgaaataactgataagcttggtcttcattctctccgtcagcgccactggtatatccagagtacgtgtgcaacttctggggaaggcctctatgagggccttgattggctttccagcaacattgctagtaaggcatgagaaaggatcagtgtattggttgttagttagacttgttgaaactctggcaact

SEQ ID NO: 219646 - DNA, 387 bp, Gossypium hirsutum
agcaaagcggcgaagcgatttgcaatctcaactcaccgtttctcacgattggattctccttaaaatcatggctgctcagattagcaagaagcgcaagtttgttgcggatggagtgttctacgcggagctaaatgaggttttgacaagggagcttgctgaggatggatactccggagttgaagtcagagttactcctatgcgtactgagatcatcatcagagctactcgtactcaaaatgttcttggtgagaagggtagaaggattagagagttgacttctgttgttcagaaacgattcaagtttccggagaacagtgtggagctctatgctgagaaagttaacaacaggggtctttgcgccattgcacaggcccgagtcctgcgata

SEQ ID NO: 219647 - DNA, 408 bp, Gossypium hirsutum
tcctcttgctgagacttctagcaaccaattagtagctgctgatgcaaagttgaactttgatgataatgctgcctttcgtcaaaaggagatatttgctctccgtgatccatctcaagaggatcctcgggaggttgctgctgccaaagctgatttaaattacattgggttagatggagaaattggttgcatggtgaatggtgcagggttggcgatggctacaatggatataattaaatttcatggaggaactcctgccaattttctggatgtaggtggaaatgcttctgaaggccaggtggtcgaggcatttaagattttgacttctgatgataaagtgaaagccattttggtgaatatatttggaggaataatgaaatgtgatgtgattgcaagtgggatcgtcaatgc

SEQ ID NO: 219648 - DNA, 369 bp, Gossypium hirsutum
  unsure (1)..(369): unsure at all n locations
ntccggtcagcgacgtgataaccttatggctgaggaaggaggtaaatttgtcgtcaatgcatatattggaaaatacctgtcctactcccttgaccggctttgagaggaaaatgatgccattggtttggcaattggagccacataacccagggaccttactgtaccatgacgagatttatctggtgttcattttgcaatggaattcctacatgcaaatactaaaagcttgcttgatagtgatctccaagatgagcaactacatatcatctaagggcaagaaagtagtattcatcggtggaggtgacactggtacagattgcattgggacatctatacggcatggatgcaccaccattgtaaatattgagt

SEQ ID NO: 219649 - DNA, 433 bp, Gossypium hirsutum
gtcaatttgagcattccttgggttattattggtcattctgagaggagacttattttgaaggagtcaaatgagttcgttgcggataaggttgcttatgcacttgctcaaggcttgaaggtgatagcttgtattggggaaacacttgagcaacgtgaagcaggatctactgtggcggttgttgctgaacaaactaaagcaattgcagcaaaaatatcaaactggactgatgtcgttttggcatatgagcctgtgtgggctattggaaccgggaaggttgctactccagctcaagctcaggaagtacattgtgagttgaggaaatggcttcaggctaatgttagtcccgaagttgctgcatcaacccggattatttatggagggtccgtcactgctgcaaactgcaaggaactagcagctcagcctgatgttgatg

SEQ ID NO: 219650 - DNA, 423 bp, Gossypium hirsutum
ggaaggcattccacctgaccaacaacgtcttatcttcgccggcaagcaactcgaagatggccgcaccttacccgactacaacatccagaaggaatccactctacaccttgtcctccgtctcaggggaggtgcgaagaatagaaagaagaagacctacaccaagcccaagaagatcaagcacaagaagaagaaggtcaagctcgctgtcctccagttttacaaggtggatgagtccgggaaggttcagagactgagaaaagagtgccctaatgcggaatgtggcgccgggaccttcatggctaaccattttgataggcactattgcggtaagtgtgggctcacttacgtttaccagaatgctggtggggattgaataaagtccgcttctacctttcgttagtgtcctgcaaaaattgaatttat

SEQ ID NO: 219651 - DNA, 404 bp, Gossypium hirsutum
cccacgcgtccggtacatcttcgctttgagattagatccaaaattcccctttcatcttatttccgattccccaatttttcctgaaaccctaatcctaatcccggattcctctcgtctacatcgtctagcaaatggcaaccgaggagccggcagtcgtggcagaccccgcaccggagacggaggaggacaagactgctgagaccaaagctacttcaaaatctggcagagcaaagaaaaccaaagaacccaaaaccaagaaagctgcagctcctcggaaaccacgggctgctcctactcatccaccttacgaagagatgatcaaagatgcgatcgttactttgaaagagaggacaggttcaagtcagtacgccattgctaagttcattgaagagaaacagaagaat

SEQ ID NO: 219652 - DNA, 380 bp, Gossypium hirsutum
agcagaatcagaatcagggtttgaaaaaaatgcagatcttcgtgaaaaccctaacagggaagaccataaccctagaggtcgaatccagcgacactatcgacaatgttaaggccaagatccaggacaaggaaggtattccaccggaccagcagagattgatcttcgctggaaagcagctcgaagatggccgtactcttgctgactacaatattcagaaagaatcaaccttgcatctggttctgagacttcgtggaggcattatcgagccttcttcgatggcattggctaggaaatacaaccaggacaagaagatctgccgcaagtgttatgctcgtctgcacccccgtgccgtgaactgcaggaaaaagaagtgtggacac

SEQ ID NO: 219653 - DNA, 184 bp, Gossypium hirsutum
atggataagcgcacactaacccgacaatagtggatccaattcgggattttccttggggggctggcatcaatgcattgaaatgtaccgatactgattcgcacatgaagaaaaggaagtgcagagattcaaatgacggacgtatgggacagggataaagaaagaggaaagctcgtaaaggcgacat

SEQ ID NO: 219654 - DNA, 313 bp, Gossypium hirsutum
atgcagatccggaatgtgttcaactcctattcatgttggatccaattcggtgatctgccttggcaggtatcatgtgcgaagtggtgaaggcaaacctttgtcctggagccattgcaaatggccttgccaagaataggactgttccgagctgggacaacttgttaaacatgtataacctaactagttcacatagtgcttttgatcgaaaaatcaatctgatttatttcgtacccctcgctcaatgagaaaatgggtcagattctataggatcaaacctataacccctgaagaatgagcatgttggggacactac

SEQ ID NO: 219655 - DNA, 427 bp, Gossypium hirsutum
gagatattaaattctcccgagagggcttgtcatctggctaaacaagcatttgatgaggctattgctgagcttgatagccttaatgaagaatcttacaaggatagcacccttatcatgcagcttcttagggacaacctcaccttgtggacctcggatctgccagaggaaggaggtgagcaatcaaaagcagatgaacctcaggctgagagttaattggatgaaagagtattcttttaagactgggcttgtcgagataggaaaggggcttgctgctagagtgacctgctttcaactcatggtagtagtaccaggatttgttacctatgacatggttcgatttgtttatcagatgttttcagactgttgttctgtgttctcttctgtttaaacataattgaatcggttacactttatagtctttatgact

SEQ ID NO: 219656 - DNA, 272 bp, Gossypium hirsutum
gagatataaaattctcccgagagggtttgtatacggctaaacaagcattagaagaggctattgctgaacttggtagccttaacgaataatcttacaaggatagcacccttatcatgcagcttcttatggacaacctcaccttgtggacctcggatctgtcacaggaaggaggtgagcaatcaatagctgatgaacctcaggctgagagttaattggatgaaagagtattctcttaagactgggcttgtcgagataggaaaggggcttgctgc

SEQ ID NO: 219657 - DNA, 419 bp, Gossypium hirsutum
gagaaaactcttattttttgcatcaagacattaacaaagcttgtccatcggctttctcaagaggaacttctggctcagctaccttcatttttaccggttcttttttgcgcattcagcaatcaaagcgctgaagttcgcaagactgttgttttctgcttggtcgacatttacgtcatgctcgggaaggcgttccggccatacctgcaggatctcaatgggacccagttgcgtctggtgactctttatgccaacagaatttctcaagccagaactggaacttgtgttgaagctattaatttgccagcagtctgaatctgtgaatttaggggttcttttatgtaattctttatttaattaattttcctttttcatatatttgtctttggtgttcttgtgattttgagtttggaatagaaagg

SEQ ID NO: 219658 - DNA, 422 bp, Gossypium hirsutum; identical to SEQ ID NO: 197630

SEQ ID NO: 219659 - DNA, 448 bp, Gossypium hirsutum
  unsure (1)..(448): unsure at all n locations
cctcggattagaaaccgccggcggtgtgatgactgttttgatcccaagaaacactaccatccccaccaagaaagaacaggtcttttcaacatactccgataaccaacccggtgtattaatccaagtttacgaaggtgaacgaacaagaacaagagataacaacttattaggcaaattcgaactctccggcatcccaccagctccacgaggtgtaccgcaaatcaccgtgtgcttcgagattgacgccaacggcatcttaaacgtttcagccgaagacaaaacaaccggtcaaaagaacaaaatcaccatcacgaacgataaaggaagactttcgaaagaagagatcgaaaagatggttcaagaagctgagaaatacaaatcttgagacgaagaacacangaagaaagtggaagcaaagaacgcatgggagaattacgcttacaacatg

SEQ ID NO: 219660 - DNA, 427 bp, Gossypium hirsutum
cctgaagtttcgatgcctaatgttccaggaggcatgctttctgttccatatgatatgggcagcatgccaatgcgtgatgcaccactttctcaaccaattccaattggagctttggcctcagctcttgcaaatgctactccagaacagcaaagaacgatgctgggggagaatctctatccacttgtcgagcagctggaacccgatgcagcagccaaagtaacagggatgcttctggagatggaccagacggaggttttacacttgctcgagtcaccagaagctctaaaagccaaagttgcagaagcaatggaagttctgaggactgtagcacagcaacagcagcaagctggtggagctgctgatcagctggcttcattgtctttaaatgataaccttgtttcatgagttggtagtagtgttggcctat

SEQ ID NO: 219661 - DNA, 383 bp, Gossypium hirsutum
gtgatttcattagaagcgctttgtttgcgagctagccgacgcaccgtcccttcctcctccgcagtttgcttctaaagttcatcaattccaatctggacttttaggtaaaaatcttgtggctgacgtggataaagggaagttgctgcaatgggcgttcaagattatgcagagtcaaagttgaagccatctgttgatttaactggatctgcaaaagaatgtagtaacgggccatctattggtgttatagacatcggtgtcagtcaaagtgcctttcttttccgagttgcattgccggggatcaggagcgatcaaagtaagttaaaatgtgagatccaacgtgatggaaaggttctgatacagggtatagtaacgcaaggcagtga

SEQ ID NO: 219662 - DNA, 431 bp, Gossypium hirsutum
  unsure (1)..(431): unsure at all n locations
cgctcgcttccccatctacagggtttacaaagggattgaggcagctgtaaccaatggctcccaaggttgagaagaagggagatgcaaaggcacaggccttgaaggctgcaaaagcagtgaaatctggagccacttttaagaagaaggccaagaagatccgaacaaaggttacgtttcacaggccaaggaccttgaagaaagataggaacccaaagtatccacgcattagtgccccaccaaggaacaagcttgaccattaccagattctcaagtttcccctcacaactgagtcagccatgaagaagatcgaggacaataacactttagtatttattgttgacatccgtgcagacaagaagaagatcaaagatgctgtgaagaagatgtatgatattcangccaagaaagtgaacaccttgatcaagcccgat

SEQ ID NO: 219663 - DNA, 383 bp, Gossypium hirsutum
cgtttgtcttagatctcagaagatggcccgtaccaagcaaactgcgcgtaagtcgactggtgggaaggctccaaggaagcaacttgctaccaaggctgcccgtaaatctgccccaaccaccggtggtgtgaagaagcctcatcgctaccgtcctggaactgttgctcttcgtgaaattcgaaagtaccagaagagtactgagcttcttatcaggaaattgcctttccagaggcttgttcgtgaaattgcccaggacttcaagactgatttgcgtttccagagcccatgccgttcttgctcttcaggaagctgcagaagcataccttgtgggtctctttgaagacaccaacctgtgtgcgatccacgccaagcgtgttactata

SEQ ID NO: 219664 - DNA, 300 bp, Gossypium hirsutum
cgtttgtcttagatcttataagatggcccgttccatgcaaactgcgcgtaagtcgactggtggggaggctccaaggaagcaacttgctaccaaggctgcccgtaaatttgccccaaccaccggtggtgtgaagaagccttttcgctaccgtcctggaactgttgctctttgtgaaattcgaaagtaccagaagagtactgagcttcttatcaggaaattgcctatccagaggcttgttcgagaaattgcccaggacttcaagactgatttgtgtttccagaaccaagccgattttgcttt

SEQ ID NO: 219665 - DNA, 421 bp, Gossypium hirsutum
aattttctcccttactaacaacataaaccctgaaatgtcggacgacgatcatcatttcgaatccaaggctgatgccggcgcctccaaaacctatcctcagcaagccggtactatccgtaagaacggctatatcgtcattaaaggccgtccctgcaaggttgtggaagtttccacctccaagacggggaagcacggtcatgctaagtgtcacttcgttgggatcgatatcttcactggcaagaagttggaagatattgttccctcctcccataactgtgatgttccgcatgtcaatcgtactgactaccaattgattgacatttctgaggatggatttgtgagcttgctgactgatagtggtgatactaaggacgatctcaggctcccaactgatgagaacttgttgaaacagatcaaggat

SEQ ID NO: 219666 - DNA, 390 bp, Gossypium hirsutum
ctttcaagtacccccactggagttgagacacctgatgttattgaccttcgtaaacagcagagaaaggagcctgagaggcctctttaccaagtgcttgaagaaaaaaaagagaggatggctcctgggactttacttggcacaactcacacatatgtggttaacactggcacccaagacaagtcagcagccaaaagggttgatcttctgaagggtcaaaaatctgacagggtggaagtcagtttacagccagaggagttggaagttatggacaatgtgttgcctgcaaagtatgaagaagctagggaagaggagaagctacgcattcagcgagaggactttagtgatatggtggcttgaaatgagaaaaaaaggaagcgaaagatgcaggag

SEQ ID NO: 219667 - DNA, 355 bp, Gossypium hirsutum
  unsure (1)..(355): unsure at all n locations
cttatctctctggttctgcatttcggttccgctcactctcttaggaggatacttcggtacccgagctgaacctatccaataccctgtacgaaccaaccaaatcccacgagaaatccctgcacgcaaatatccatcatggctacttgttctcggtgctggtacccttccatttggaaccctcttcatcgaactcttcttcatcctttcaagcatttggctcggcaggttttactatgtcttcggtttcttgcttatcgtccttctactcctcatcatcgnttgtgctgaagtatctgttgtcctcacttacatgcatctttgtgtcgaggattggcgatggtggtggaacgcattc

SEQ ID NO: 219668 - DNA, 414 bp, Gossypium hirsutum
cggaactggatgatgcgttcagtgcggcaacggcgttcgtggcggctgccgcggctgatcggttgtcgcagaaggttccgaacgaggtgcagatgcagctttacggtttgtacaagattgccaccgaagggccttgcactgctccgcagccttccgctttgaaaatgacggctcgtgctaagtggcaagcatggcacaaattgggtgctatgcctccagaggatgcaatgcagaaatacattgatgttgtgacagagctatatccatcttgggctgctggttcagctatgggcaaaggtggggctgataatgcttcaagtaaagatgtcaaaggaccaatgggaccggatttcagctcttttgtgtatgaagaggaatctgaaaatgatttgaaaatggatgctttccacactt

SEQ ID NO: 219669 - DNA, 261 bp, Gossypium hirsutum
ggaggagaaagctgcaagagcatatgatctagctgcactcaagtattggggaccctccactcacatcaatttcccattggagaattaccaaaaagaacttgaagaaatgaagaacatgacaagacaagagtatgttgctcacttgagaaggaaaagcagtggattttcaaggggagcttcaatgtacagaggagtgacaagacatcatcaacatggaagatggcaggctcggataggaagaatcgacaaggaatccataac

SEQ ID NO: 219670 - DNA, 413 bp, Gossypium hirsutum
ctgaagggagctagtgagcgtggtgctaaaagaattcgtgttcatattctcaccgatggtcgtgatgtattggatggttcaagtgtagcctttgtggagactcttgagagtgaccttgcaaaattacgtgagaatggtgttgatgcccggattgcatctggtggaggccgcatgtatgtcacaatggaccgttatgagaatgattgggacgttgtgaaacgaggatgggatgctcaggttcgtggtgaagcccctcacaagtttgcaaatgctgttgaagctgtaaagaaattaagggaaaatgccaatgaccagtacttacctccctttgttattgttgatgagaatgagaaagctgtgggtccaatagaagatggtgatgctgttgttacttttaacttccgagcagatcg

SEQ ID NO: 219671 - DNA, 402 bp, Gossypium hirsutum
gttaagtttgctgaacttttgaccaagattgacaggcgatctggtaaggagcttgagaaggaacccaagttcttgaagaatggtgatgctggtatgattaaaatgatttccaccaagcccatggttgtggagaccttttctgagtacccacccttgggccgttttgctgtgagggacatgcgtcagaccgtggcagttggtgttataaagaatgttgagaagaaggacccatccggtgccaaggtcaccaagtctgctgtttataagaagtgaaccgtgctggttaaatctaatgaagtttccgcagatggagtattttattatcataataatagtttgatagactttatcatttatgatatagcttgggcttttgcttggttttgcatgttatagtgtgtt

SEQ ID NO: 219672 - DNA, 357 bp, Gossypium hirsutum
gattataaaatatttataaaaacctcaataatataaaagcttaactttgaagctgcattaaatagttccacaactttttcctgtctagcccacgcgtccgtcttctttcactcagttcgacaacaccaaggccggttccaaagccaagaaccttgaaaaagtggcaaacgagacgactcagaagacaagccgagggagagagaaagaagggaagactcagcgaactcgaaagaacatttacagaggaatcaggcaaaggccatgggggaaatgggcggctgagataagaaatcctcacaaaggtgtccgagtctggctcggtacatacaacacggctgaagaagcggctcgagccta

SEQ ID NO: 219673 - DNA, 373 bp, Gossypium hirsutum
  unsure (1)..(373): unsure at all n locations
gcttgcagcagcttggaatattcttacacctgttctgcaatggatagaccagaataatatagcaccagagctgtacgagctcggaggtagaggaccagttggctcatactatctttgggctaaacatggggtttggtgggcagatgactaaaagggaatagcctgttgttgttcgagtttgagataacaaaacaggtaatttggctcgttacgatgtaaatcatgtaaaacaagagtatgttatgtatctgttttttggttttgctgctatacgaaaatggcaactgtgtatgattggatacatgccagaaagggaacaatgctcttttgcttgtgcatggctacaacaattccacattccanattgattaac

SEQ ID NO: 219674 - DNA, 425 bp, Gossypium hirsutum
  unsure (1)..(425): unsure at all n locations
cggcgagcgaaccgggaaaagcccagcttgagaatcggtcgccatcggcgtccgaattgtagtctggagaagcgtcctcagcgacggacccggcccaagtcccctggaaggggcgccggagagggtgagagccccgtcgtgcccggaccctgtcgcaccaagaggcgctgtctacgagtcgggttgtttgggaatgcagccctaatcgggcggtaaattccgtccaaggctaaatacgggcgagagaccgatagcgaacaagtaccgcgagggaaagatgaaaaggactttgaaaagagagtcaaagagtgcttgaaattgtcgggagggaagcggatgggggccggcgatgcgccccggtcggatgtggaacggcgagaagccgtccgncgatcggctcggggcgtggaccgacgcgggtcatg

SEQ ID NO: 219675 - DNA, 349 bp, Gossypium hirsutum
gtggaaggtttgtcccacgcgccgtgctcatggatcttgagcccgggaccatggatagtgtgagaaccgggccttatggtcagatctttaggcccgataactttgtcttcggccaatctggagctggtaataattgggctaaggggcattatactgaaggagccgagcttattgattcttttcttgatgttgtcagaaaggaagctgagaattgtgattgtctccaaggttttcaagtttgccactctcttggagggggaactggttcgggtatgggtactctgttgatttctaagatcagagaagaataccctgatagaatgatgctcacgttctcagtctttccatc

SEQ ID NO: 219676 - DNA, 144 bp, Gossypium hirsutum
gagaaaattagttagatggatccagacgcagtagccaaggcgttcgtcgagcactactacacgacgttcgatgcgaaccgggccggtctagccaatctctaccaggacggttcaatgttgaccttcgagggtcaaaagatccaa

SEQ ID NO: 219677 - DNA, 387 bp, Gossypium hirsutum
ctcattctttacccggaacacaaataaacactaagaacaagacaatggcaccaaaagctgagaagaagccagctgagaagaagccagctgaggagaagaagacggtagctgagaaagcccccgccgagaagaagccaaaggcaggcaaaaagcttcccaaggaaggcggagctgcggccggagacaagaagaagaagagggccaagaagagtactgagacctacaagatctacatcttcaaggtcttgaagcaagttcaccctgatatcggtatctcaagcaaagctatgggaatcatgaacagcttcatcaatgatatctttgaaaagcttgcccaagaagcgtctaggctcgcaaggtacaacaagaagcctaccatcactttca

SEQ ID NO: 219678 - DNA, 431 bp, Gossypium hirsutum
ccctgttgctgaagacatgtttcattggcaagcaactattatgggtcctccagatagcccgtatgccggtggggtgtttctagtcaccattcatttccctccggattatccatttaaaccacccaaggttgcattcaggacaaaggtatttcaccctaatattaacagcaacggtagcatttgccttgatattttaaaggaacagtggagccctgccctcaccatatccaaggtgttgctgtcaatctgctcactcctgacggatccaaatcctgatgaccctttggtgccggagattgcccacatgtacaaaacggataggaacaagtatgagacaaccgctcggagctggacccaaaaatatgctatgggttaaagtgctactacgtatgtaataagagggcttcattccctgtgactttggtctttaa

SEQ ID NO: 219679 - DNA, 383 bp, Gossypium hirsutum
ccggactccatacagcttgttgctgaacacgctgctgcaaagaacaaggtgttctcaatgaatctttctgctccatttatttgcgagttctttaaggatgcacaagagaaagcactaccgtatatggactttgtctttggcaacgaaactgaagcaagaaccttctcaaaggttcatggctgggagactgatgatgttgcagagatagccctgaagatttcgcagtggccaaaagcttctggaacatacaagaggactactgttattactcagggtgcagatccggtaattgttgccgaggatgggaaagtgaagcaattccctgttattttgttacccaaggaaaaagcttgttgatacaaatgggtgcaagtgatgccttt

SEQ ID NO: 219680 - DNA, 352 bp, Gossypium hirsutum
aaaaaacatggccaaagttctgtaggtcattgcactatgtgagcttacagctttggttagtgctacacgcattctgaataatcaattggtggcagaaggctatgtgtactgtgatacttgccgcgctggttttgaaacccctaagactagaagcctatctgatgccatggttaggttggtatgctccgacaggaagagcggacaagttgtcttcaaaaaggagggatacaccgacaaaaccggaaaataccagattcgtgtattcgaggatcacttggatcagatctgtgatgcacttcttgtgaagagcttccagcttggttgtgccacaatgttccccggtcgtgaacgt

SEQ ID NO: 219681 - DNA, 406 bp, Gossypium hirsutum
gaaagagagagtttcttcttcgctgctgcggaaggtttattttctttcccaaagaataaaagctttttctgcagtagcgttcaagtttttaccaatccaaaatttcaatttaaagaaaaaggagaaaacagaaatggctcgctctttctcaaacgctaagcttttctctactttcgttgtcgatggaatctctaacgttatctccagacgaggatatgcggcggcgtcacaaggaattgtgtcgagtggaataagaggaggagcaggaaggagcgctgctgcggtagtcaagaaaacaggggaagagatgtctggcggagctaaagagaaggtttcatgggttcccgaccccggtaccggatgctacagacccgagaactgtgccaacgagatcgacttggggagc

SEQ ID NO: 219682 - DNA, 346 bp, Gossypium hirsutum
ccgcatactctatcttcttctttccaagaaatcgatcccgaggatgatatcaagctagccgaaaagaatcaaaaggaaaaagagggcaacatctctcttccgccgtttgggttagcaacttacaagatgcaaggggacgtgtggttgtcctcctccggttgtggaggaggggaccaagaaaggctattgtcacttttgggtgttgccgattcgtggctaaagcaactaagcgttcaacaccatgacttcaactatttctcgggtattcgacatggctaaaaaagccctctacatccctaataaacatggaaaaaagttcactcatcactcatttatcatcaaaagc

SEQ ID NO: 219683 - DNA, 393 bp, Gossypium hirsutum; identical to SEQ ID NO: 195979

SEQ ID NO: 219684 - DNA, 348 bp, Gossypium hirsutum
ggccctctcctccatctccaataaagcctcctactgtttgcgataattattacagctgtcccgaaagcaatacctgctgctgtgtctacgagtactatggctactgctttgcttgggggtgctgcccacttgaggctgccacttgctgtgacgaccactacagctgctgtcctcatgactatcctatctgcaacttaaatgaaggcacctgcttgatgagcaagggtaacccaatggcagtgaaggcactgaggcgcactcctgctacgcctttctgggcccatggaagtgttggcgtaaagaacaatgcttaaggagaagcctgggattttatgcagaaaatgatac

SEQ ID NO: 219685 - DNA, 344 bp, Gossypium hirsutum
ccctcaaatgttactttgattccctccagtccaattatgacactattctcaaagaaaatgagaagctcatatgtgaggtagcttacttgactgaaaaactacaagccaaagatgtggcaacagaagcaatagcacgtgaaaaggatgaagggatagcagctgagatggcctgcgccctccaattcagtatgaaggtggaggaccgtcttatgagcggcagtgtctgaagcgcggtggtggatgaggatgccccacagctggtggacagcggcaatttctactttgcaagcgatgaatactccatatgcattggccctttcgatgggggtcattcagaagatgag

SEQ ID NO: 219686 - DNA, 390 bp, Gossypium hirsutum
aaaaccggcatcattgtgttggctgaaggacgtctgatgaacttgggatgtgccactggacacccaagttttgtcatgtcctgctcgttcactaaccaggtgattgcccagctcgaactatggaaggagaaggcaactggaaaatatgagaagaaggtttacgtattgccaaagcacctcgacgagaaagttgctgcacttcacctcggcaagctcggagctaagctcactaagctcactaaagatcaagctgattacattagtgtgcctgttgaaggtccttacaagcctcctcattacaggtactgagagaagagttgatgagtttttatcaagaaagaaaaaacatccggatggtttgattggttcttggtttactgaaatttcatg

SEQ ID NO: 219687 - DNA, 353 bp, Gossypium hirsutum
cgacacggtcttcttgcaaacaatgtcgatatgaacaagagggctggtgagttgactgcacaggaactggacaatctcatgaccattgttgccaaccccaggcagtttaaaattccagattggtttctgaataggcaaaaggattacaaggatggaaagtattcccaggttgtttctaatgctctcgacatgaagttgagagatgacttggagcgtttgaagaaaatcaggaaccaccgtgggctgaggcactactggggcctccgtgtccgcggtcagcacaccaagactactggtcgcagagggaagactgttggtgtctctaagaagcgttgagtgcatatacatatata

SEQ ID NO: 219688 - DNA, 439 bp, Gossypium hirsutum
ccgttcttcttcttcaaacataagattttcaaagaagccaagggtggatgagagtgagaaccttactctcaacagtataagacaggccttaattcgacaagaagatagcataatatttagccttttggagagagctcagtactgttataacccagacacatataagcaagattcattctccatggatggatttcatgggtctttgtctttggttgagttcatggttcgggaaaccgaaaggctccatgctcaggttggcagatataaaagtcctgatgaacaccctttcttcccatcatatctacccgagccaatgcttccacctttgcaatatccaaaggttttgcatcactgtgctgcttcaattaacataaacaataaggtttggaatatgtattttgcagagcttctaccaagattggtagaagctggagatgat

SEQ ID NO: 219689 - DNA, 382 bp, Gossypium hirsutum
ccggaaaaagctttttgtgacttatcctccctctcacaagcatatgtattttacaaattatcacaaacccaagttattagtttttataaattcaaacctatccttcaatatcatggaacatctctttttcttaaaaatgaaataaaagattattttgaagaacggggagtatctcattccagattaagacatcattatgggttaagacagaaaattgtttggcattctggaatgaatgaatggaaaaactggttaaggagtcgttatcaatacgatttagctcagaatagatggctaaaattaggaccaggacaatggcgaaatagagtcaatcaacactatctggctcaaaataaacatttaacaaaatgggattcagatg

SEQ ID NO: 219690 - DNA, 441 bp, Gossypium hirsutum
tccgatttgttggaggacttgactcagatgttagtgatgatgatcttaggcaacctttttcccagtttggtgaggtcatctccgtaaaaataccacccgggaaaggatgtgggtttgtgcaatttgcaaacagaacgaatgctgaggaagcaatccagagtttgaacgggatgaccataggccagcagactgttcgtctttcttggggtcgtactataggaaacaagcagcagtggaatggaggacatcattgagggcaaggcgatggtggttatggctactgctatgctgcagcaccaaatcaggatccaaacacgtatactggggctgctgctactggttcttcttaagaggggtgcatgacaatcatgaatggcttgtaatctgaacttgcaggacaagttttcaagttaatcagattcattaattaagtaggatggg

SEQ ID NO: 219691 - DNA, 368 bp, Gossypium hirsutum
gagcaaccagggtgctacccagcctaaacccgagcaagagagtatactccagcatgcacagcagcagattgctttgcagaggctaattttgcaaccacaaggtgtgccgacaaaggttgtgtgtttgactcaagcacttaatgttgatgatctcagagatgatgatgagtacgaggacattgtggaagatatgagacaagagggtggaaaatatggtgcattggtgaatattgtcatcccacgcccaaatccgaatggagaacctgccccaggtgtcgggaaggtatttctggaatactcggatgttgaaggttccaaaaaggctcaagctgcaatgaatggtcggaaattcggcggaaatcaagtta

SEQ ID NO: 219692 - DNA, 423 bp, Gossypium hirsutum
ggatctggtgactgtcaaaaaggacagattgaatgctgttggagctgcaatatatcaaaagccagcttccaacgactgctactacaaaaggtctaaaaatgcacctccactttgtgaagaatctgatgatcctaatgcagcctggaatgtatcccttcaggcatgcatgcataaagtgcctgaagattcaacagagcggggatccctttggcctgtgcaatggccagaacggttggaacaacctccatactggttgaattctcagatcggcgtttatggtaaggctgctcaagaggatttcactgcagactacaatcactggaaaactgttatctctgagtcgtatttgaaagggatgggaatcgactggtcttctgtgagaaatggcatggatatgaaagctgtttatggagggtttgctgc

SEQ ID NO: 219693 - DNA, 339 bp, Gossypium hirsutum
agattccgttgtccagaagtcctcttccagccatctctcattggaatggaagctgctggaatccatgaaactacctacaactctatcatgaagtttgatgtggatatcaggaaggatctctacggtaacattgtgctcagtggtggttcaaccatgttccctggtattgcagaccgtatgagcaaggagatcactgctcttgccccaagcagcatgaagatcaaggttgttgcaccaccagagagaaagtacagtgtctggatcggaggatctatcttggcatcactcagcaccttccagcagatgtggatttccaagggtgagtatgatgagtcgggt

SEQ ID NO: 219694 - DNA, 386 bp, Gossypium hirsutum
  unsure (1)..(386): unsure at all n locations
agattccgntgtccataaatcctcttcctttcatctctcattggaatggaagctggtggaatccatgaaactacctacaactctatcatgaagattgatgtggatatcaggaaggatctctacagtaacattgtgctcaccggtggttcaaccatgttccctggtatcgcataccgtatgagcaaggagatcactgatcttgccccaagcagcatgaagatcaaggatgttgcaccgccagagaaaaagtacagtggctgtatcggatgatctatcttggcatatgtcagcaccttccagcggatgtggattttcaaggatgaagttgatgagttcggttcttccattgttcacaagaagtgcttctattattgcaagccaattta

SEQ ID NO: 219695 - DNA, 350 bp, Gossypium hirsutum
  unsure (1)..(350): unsure at all n locations
tttgatctatggacagcatcgttgtggtaaaagtcgtaatgccagaggaatcattaccgcaaggcatagagggggaggtcataagcgtctataccgtaaaattgattttcgacgaaatgaaaaagacatatatggtagaatcgtaaccatagaatacgaccctaatcgaaatgcatacatttgtctcatacactatggggatggtgagaagagatatattttacatcccagaggggctataattggagataccattgtttctggtacagaagttcctataaaaatgggaaatgccctacctttgaccgatatgcccttaggcacggncatacataacatagaaatcacac

SEQ ID NO: 219696 - DNA, 364 bp, Gossypium hirsutum
tggaactcacgttgatgcccctagccacttctttcaaaagtattatgaggagggctttgatgtttccccacttaacctggcacccttactgggcccggtctaatagttgatggtcccagaaacaagaacattactggtggagttattaagtcggtgaatatttcccggggaggccatcgtgtgcttttcaaaacacttaatacagacaggagggtgatgcataaaagagagtttgcttcaaacttcacaggggttaagaaggatggggcgcaatggttggttgataacaccgacatcaaactcgctggaatcgattacccatctatttctgcttatgttgaggctgcccctactcatcatatac

SEQ ID NO: 219697 - DNA, 382 bp, Gossypium hirsutum
gtgaagtggggttagcccaaatgcttcgaggagtgtgttataatggatgttgtcacccctgaacaagctcgtatcgctgaagaagccggagcttgtgccgttatggctcttgaacgagtcccggctgatatccgagcccaaggtggtgtggctcgaatgagtgacccacaactcattaaggaaattaagcaagctgttactatccctgtcatggctaaggctcgtattggtcatttcgttgaagcccaaatccttgaagccattggtattgattatgttgatgaaagtgaagttcttacacccgccgacgaagagaaccatatcaacaaacataactttaggatccctttcgtttgtggatgtcggaatttaggtgaagcac

SEQ ID NO: 219698 - DNA, 425 bp, Gossypium hirsutum
tccgaagcgaaagcttatctcttttcgtctctgaatctgatcaatcaacacctgaaaaggaaaacttacaaacaactactactagtctactacccagcactagaagcagctcgtagccagccatggatgaagagtacgatgtcatagttctaggaactggtctcaaggaatgcatcctcagcggtcttctttctgttgacggactcaaggttctgcatatggataggaatgattactatggaggagagtctacatcactcaacctcattcagctctggaagaagtttagaggaaatgataagcctcctgctcatttgggctctagcagagattataatgtggacatggtccctaagtttatgatggcaaatggcactcttgtgcgtgttcttattcatacggatgttacaaagtatctttacttc

SEQ ID NO: 219699 - DNA, 404 bp, Gossypium hirsutum
cagcagctgagatggggttgcaacttgttggtgagatacccattgaattggacattaggaaaggctgtgacaaaggcatgccgatagtggtatcagcacctgattccgctgtctccaaggcttaccatgatgtagctcaaactgttgtcatgagacttgaggatctggcaaaggcatgaaaatactcttgaggttggtcagtgaagtttgcttgtgccaaccatcttcattcccgtgttttcgtggtggtgctttgttcatcctgatataaataatttttaagtttgagcatttttggtcatgcgatgacaatattaagcatttgggaccatagtgattaagaaacttatttgatgaattacacactcagaccagtttagctaggagcatacgatttacagtct

SEQ ID NO: 219700 - DNA, 374 bp, Gossypium hirsutum
cagcagctgagatggggttgcaacttgttggtgagatacccattgaattggacattaggaaaggctgtgacaaaggcatgccgatagtggtatcagcacctgattccgctgtctccaaggcttaccatgatgtaactcaaactgttgacatgagacttgaggatctggcaaaggcatgaaaatactcttgaggttgggcagcgaagtttgcttgtgccaaccatcttcattcccgtgttttcagggtggtgctctgttcatcctgatataaataatttttaagtttgaacatttttggtcatgcgatgacaatattaagcatttgggaccatagtgattaagaaacttatttgatgaattacacactcagacca

SEQ ID NO: 219701 - DNA, 422 bp, Gossypium hirsutum
  unsure (1)..(422): unsure at all n locations
caggagcaaaactctgataagacactttggaaacttggaactcttcctgttggccttttagctttctacgggctgacagaaccacttgatcggagatggcatgtgttaggtttaggttacgatcttaacatcgacaaccgcctgatcgagagtgcagcagtcattcacttcaatggaaacatgaagccatggctaaaactagccatcggaaggtataagcctctatgggaaaggtacataaatcttagccacccatatctccaagaatgtgtcacaagttagacaaatgtgctctgtgctctatttttggttccaattgctcgacctccaatgatataaacccatgaaaaggccgatcgcggaaattcttttttgacattgttaggagatttgacatatcttttttggtagntntttttttt

SEQ ID NO: 219702 - DNA, 373 bp, Gossypium hirsutum
tggaactcacgctgatgtccctagccacttctttcagaagcattatgaggagggctttgatgtttccacacttagcctgcaacacttactggtcctgtgctagtagttgatgttccaagaaacaagaacattactgctgaagttatgaagacggcgaatattccccggtgagaccatcgcgtgcttttcaaaacacttaatacagacaggaggttgatgcatataagagagtgtgctttagacttcacagggcctaagaatgatggagcgcacaggttggttgataacaccgacatcaaactcgttggaatcgattacctatctatttctgcttatgtagatgctgcccctactcatcatatacttttgaaaa

SEQ ID NO: 219703 - DNA, 382 bp, Gossypium hirsutum
  unsure (1)..(382): unsure at all n locations
aagatttcagctggtgtccttggtggagcaaccgcaatttgggtcctttttgagttgattgaataccacctacttgctttaatctgtcacatttcgatactctgtcttgcactactgtttttgtggtccaatgctcataccttcatccacaagtccccacctcgcatccccgaaattcatttgccagaggagccattcctccaagttgcctctgcattggcaattgaacttaaccagggattgaaacttctgcgagatattgcatctggaagaaatctgaaggagttccttatggttatagctgcattctgggttctgtcaattgtggggagttggtgcaacttcttgaccttgntctatatatgtttcgnattgctgcaca

SEQ ID NO: 219704 - DNA, 414 bp, Gossypium hirsutum
  unsure (1)..(414): unsure at all n locations
gaaagtcttcactccctaggatctagcagtcattccatatagaaattttattccctcttccaattctccaccacaacccacttcggaggagaccttttgctgcccagatgctcttttaggtaaaagaaggtaaattttccaattctgcacttagaaaattcgaattcgaaaaatattttgctttaagaactctggccagtaaagaatttaggtaattaaaaatacaccaaccttgtttggctaataatgcaatattgaattggctaaaaatttggaaacccaaacctccattctcttttcaaaaacaaatatttttccacgagcactagtgaatacctttttttccccttgcccttgtgccacanatacttagcaataatatcttccactttatcatataaaggttttggtaat

SEQ ID NO: 219705 - DNA, 358 bp, Gossypium hirsutum
agcagcgtacgagtgattgaatcagtcgatgtcaatgtacatattctcatactgagtggaagaatgaacaataccttctacaatgcccaaggatatgcagttggatcttcactcgtactagatgacacaccatatctacctgcaacagtccttgagaaaggcaacgctaaatgagtctctatttagctccccactgatgacaaggttgctgacaaggctgatactgatgctaacaccacggtagtgacaccataagggatcatagactggtatatgggatcggatatcatacctgactccatcgaaacctttaacgcgacttaggacactatctagaacattatcttgaatggaccaa

SEQ ID NO: 219706 - DNA, 428 bp, Gossypium hirsutum
ccctaatctcttcttatcaaggaaatagcggttgctgatcatctctggattctgtatttcttgatctctcgtggatctgatcatttatttgctggattattgtatatctttcaggatcttggatttcaatttccttgtattgaagaaaaaagatggctcgtacgaagcaaactgctcgcaaatcaaccggagggaaggctcccaggaagcagctcgccaccaaggctgcaaggaaatctgcgcctacgaccggcggagtcaagaagcctcaccgctaccgtcctggaaccgtcgcccttcgtgaaatccgtaaatatcaaaagagcactgaacttttgatccgcaagttacccttccagcgtcttgttcgtgaaattgcccaagacttcaagacggatttgaggtttcaaagtcatgcggttctggca

SEQ ID NO: 219707 - DNA, 343 bp, Gossypium hirsutum
ccctaatctcttcttatcaaggaaatttcttttgctgatcatctctggattctgcatgtcgtgatctttcgaggatctgatcatttatttgctggattattgtatatctttcatgatcttggatttcaatttccttgtattgaagaaaaaagatggctcgtacgaatcaaactgctcgcaaatcatcctgagggaaggcttccaggaagcagctctccaccaaggctgcaaggaaatctgctcctacgaccgtcggaattaagaagctctatccgtttccgtcctgtaactcgctccctttcttaaatccgtaattctttaatatagcactggccttttgatc

SEQ ID NO: 219708 - DNA, 425 bp, Gossypium hirsutum
aaaatattattccatcttcatcccttttaaccgccggccgtctttcacttctccggcgatatcattttttccgtcaagagctactctcagcagaatttgtcacagatggcttcttccttccgagcattcttgaacagtccagttggtccaaaaacaactcacttttggggacctgttgccaattggggatttgttcttgctggactggtggacatgaataagcccccagaaatgatttctggcaacatgacttcagcaatgtgtgtctattcagcattgttcatgaggtttgcatggatggtacagccacgaaactatcttctgttggcatgccatgcttcaaatgagacagtacagctctatcaactttcacgttgggctagagctcaggggtatttgtctgagaagaaagaggaagcctcatc

SEQ ID NO: 219709 - DNA, 443 bp, Gossypium hirsutum
gagcgaccgcgatttatatgaaggtgaatgggggaaagtcggtaccattgtccattggagttatgtgcatgatggaaaggctaaaaaggcaaaggaagtagtggaagcagtagaccctgataagaatttggtcactttcagagtgatcgaaggagatctaatggaagagtataagagctttgtaatcacgattcaagtttcgcccaagagcgagggtagtggcagcgtagtgcactggactttggaatacgagaagctgcacggtgggattgcgcatcctgagactctgctgcaattcgttcaagatatctctaaagacattgacgcccacctcacccaagcaagctaaacagtatcacatgttgctattgttgccgctacttgaagcactgttcatctatttaatgaataaagtgacttcctttctcatgtattttgatctg

SEQ ID NO: 219710 - DNA, 420 bp, Gossypium hirsutum
gggcgacctttaccacccctattcaactttaaacaggaattatctggggcttcaccggagctcataaataagttgattcctgatcacgtgaaacggcaaataggacttcaacatttcatgcatccgcctgggacatgagacttcaaaaccgttttcaaattcgatgtctgtagtttgatgcgtgacacaaaaagaattactatctttggattatcataggttgatttgaggcctatccggcatcattttgtacgcttccataacacatacagcctttggtagtgtggtggctgccttctctcgatccatatatgtcaatgatgtctctcttgctcttgtattctatgagtctactttttgtcaaaatgcttttttttttagttgtgtacatgtaacatgttagatactaaaaaagtagat

SEQ ID NO: 219711 - DNA, 425 bp, Gossypium hirsutum
gcgtcatcacaaaaaatttctagatcccaatatacccaatgccagatagctgccaagaagcacaagccagaaaacacaatatgtgctccggccacaccttcgtaactccaaatacccggatttgttatagtcccccctgtaatactccaaccgccccatgaattggttattcctaaacgagtcatgaagggtataacgaacataccttgtctccacattggatcaagaacgggatcggagggatcaaaaacggctaattcatatagagccattgaaccggcccaaccagcaaccagagccgtatgcattatatgaacagaaagcaagcgaccgggatcattcaatacgacagtatgaacacgataccaaagcaaacccatggaaatacccctttatcaacgaaaaataaacactatgtaacttta

SEQ ID NO: 219712 - DNA, 418 bp, Gossypium hirsutum
tacaatcgaaacccttaggcggcgactactcgagcttcataacacccgaagcttttaactatggcggatgtagagacggaggttgcgacggccggtgtgcccaagaagagaacattcaagaagtttagcttccgaggtgtcgatttggatgctctccttgatatgtccactgatgagcttgtcaagctcttccctgctcgagctcgcagaaggttccagaggggtttgaagagaaagcccatggctctaattaagaagcttcgcaaggcgaaaagggaggctccacctggtgagaagccagaaccagttagaacccacctgcgtaacatgatcattgtacccgaaatgattggaagcattatcggtgtgtacaatggcaagacattcaaccaagttgaaatcaagcctgaaatgatta

SEQ ID NO: 219713 - DNA, 376 bp, Gossypium hirsutum; identical to SEQ ID NO: 197876

SEQ ID NO: 219714 - DNA, 411 bp, Gossypium hirsutum
gaccacgcgtccgggcctagtcaagcccgtcattggttcacccccagtgatgccatgctgttcccttctcgatggcctcgtcgatcttgaagctgctgtttgcctttgcaccgctatcaaagctaacatcttatgcatcaaccttgacattccaggttctcttagcttgctcctcaatgtttgctcaaagaaagttccttatggcttccaatgctagtttaagtcaatgattttcccctacattctttctcaacttctttatggtttgcgttcggttttttttcgagttatgatgccataacttcattgttttaatgagttttcatttggaattataatttctacgtgggggatagatatagaataaggttaatacctttcttcaagtgttgcttgaaagttttttataac

SEQ ID NO: 219715 - DNA, 377 bp, Gossypium hirsutum
cactatccaatagcagctccagctcttctagtgacgaggaagaaggtgaaggcggagagaagaagaagaagaagaaaaaggagaagggaaagaaagaacaggacagtgcagtcccagtggagaagtgcgatgaggtagcaacagttcaccactcagagacgccggaaaagaagggtttcatggataagatcaaagacaaactcccaggacagcataagaaagatgaagaggacaccacccaaccaccagctgctgctgccccaattgagaacgaccaccatgaaggagagacaaaagagaagaagggatttttggtgaaaatcaaggagaaaatttctggttaccactccaaaacagaggacgagaaggaaaaagag

SEQ ID NO: 219716 - DNA, 395 bp, Gossypium hirsutum
cgatttggttgaaatggtcttcgcaaaaggagatcccgggatcgccgccttatatgataatctccttgtttctcaagaactatggtcattcggagagcggttgaggactaactatgaagaaactaaaagccttctcctacaaattgccgggcacaaggatcttctcgaaggtgatccgtacttgaagcaaagactacggctccgagactcatacataacaacactaaatgtctgccaagcctacacactcaaacgtatccgtgacccgagctacgacgtcaagttccgtccacatatctccaaagagatcatggaatcaaacaaatccgcggatgaactcgtgaaactaaacccgacgagtgaatacgcgcccggtttagaagacaccctcatct

SEQ ID NO: 219717 - DNA, 432 bp, Gossypium hirsutum
gcaaagtttataatagaggcagcaaaccatcctacagatccagaagcagatgagattctatcaaagaaaggagtaataatactacccgatatatatgcaaatgcaggaggggtgactgtcagctactttgagtgggttcagaacatccaaggtttcatgtgggatgaggagaaagtgaaccaggagctgaagaaatacatgactaaagcttttcataacatcaagaacatgtgccagtcgcacgactgcaatctccggatgggtgcatttacacttggggtgaaccgtgttgcccgtgcaactatcctgagaggatgggaagcataaacgcctcccttccggcttttatttctcttagtttatagtctccattgaaaagcacaagcaataactttcaagaattcttagcttacccctccaaagcttttttta

SEQ ID NO: 219718 - DNA, 138 bp, Gossypium hirsutum
ctcaaccatgaagagacttggcagctcagattcattgagtgctttgatgtcaatctgcccaacttcagatgaacgtagtccaagaaacaacaatgtttacagtcgagagtttcagtcgatgttagaaggattcgatga

SEQ ID NO: 219719 - DNA, 395 bp, Gossypium hirsutum
tgagcatgcaggtattgactttgttaggctgccatgcaagcatttctactgctggaaatgcatggaaacttattctaatatgcatatctctgacgccaccataaccaagctgcaatgccctgaagctaaatgtggtggtatggtccctcctgctttattgaaacagttgcttggcgatgaagggtatgaacgatgggaatcccttatgctacagaaaacacttgaatcaatgtcagatgttgcatattgcccaaggtgtgaaacaccttgtatagaggatgaagagcaacatgcacaatgctccaagtgcttctttagcttttgtaccctttgtagggagcgccgtcatgttggcatagcttgtatgacaccagaaattaagcttcgtgtcctgc

SEQ ID NO: 219720 - DNA, 406 bp, Gossypium hirsutum
ggaggcagccatgtttgggtggaccattgctctttgtctaactgcaacgatgggctgatcgacgccattcatggatccaccgccatcaccatttctaacaattacttgacccatcataacaaggtcatgctattgggacatagtgacacttacaaacaagataagaacatgcaagtcaccattgcctttaatcactttggagaaggccttgtacaaagaatgcctagatgtaggcatggatactttcacgtggtgaacaatgattacacgcactgggaaatgtatgcaatcggtggcagtgctgatcctacaatcaacagccaaggcaatagatttcttgcaccaaatgatgcagacaacaaagaggtgacaaaacatgaggatgcgccgcaaagtcaatggaagc

SEQ ID NO: 219721 - DNA, 431 bp, Gossypium hirsutum
ggaggcagccatgtttgtgtggaccattgctttttgtctaactgcaacgatgggctgatcgacgccattcatggatccaccgccatcaccatttctaacaattacttgacccatcataacaaggacatgctattgggacatagtgacacttacaaacaagataagaacatgcaagtcaccattgcctttaatcactttggagaaggccttgttcaaagaatgcctagatgtaggcatggatactttcacgtggtgaacaatgattacacgcactgggaaatgtatgcaatcggtggcagtgctgatcctacaatcaacagccaacgctatagatttcttgcaccaaatgatgccaactacaatgaagtgacaaaacatgaagatgcgccgcaaagtcattggagccattgaattggatatcaaaagggatt

SEQ ID NO: 219722 - DNA, 410 bp, Gossypium hirsutum
tgggaagctaaggccaaccctttttgatatgtttggcgaagatgcaagccccaaagtgaagaagtttatgaacatcattatgaccaaactgcaggggagtggcgatgacggtgaagggggtggtttcatggggaaggttgggaatctggcactacagtttcttaaacaaaagctggatgatgacgaaggatacggtaaaccggcacttgagactgaagtgagtagcaagcaagaggcttatgcaggagctggttagcactctcttcctgacagtggaattcttatcagcggctgccagaccgaccaaacttcagcggatgccagcccatcagggaatgcaagccaagcttatggagcacttagcaatgctattcaaaccataattgccgactcaaaaggcttaattacta

SEQ ID NO: 219723 - DNA, 426 bp, Gossypium hirsutum
  unsure (1)..(426): unsure at all n locations
ctcaactgcagttgtggagccttacaatagcgttctgtccactcattcgcttcttgaacacacagatgtggctgtgctcttggacaatgaagcaatttatgacatatgtcggagatccctcgatatcgagagaccaacttacaccaatttgaaccggttgatttctcaaatcatatcgtccttgacaacttctttaaggtttgatggagccattaatgtggacattacagagttccaaaccaatcttgtgccttatcctcgaatccacttcatgctctcttcttatgcgcctgttatctcagctgagaaagcataccatgaacagttatcagttcctgagatcacaaacgctgtgtttgagccctcaagcatgatggcgaagtgcgatcctaggcatgggaagtacatggcatgctgnctgatgta

SEQ ID NO: 219724 - DNA, 376 bp, Gossypium hirsutum
tttcttaggtgggctttgcgccctcctggttattacaagagctggcatattggggtccgtgctaagacatcaaagaagcttgttgccttcattactggtgtgcctgctagaataagggtgcgtgatgaagttgtgaaaatggcagagatcaatttcttatgtgttcataagaagctgagatcaaagagacttgctcccgtgatgattaaggaggttactaggagagttcatttggagaatatttggcaagcagcttatactgctggagttgttcttccaacaccaattactacttgccaatactggcataggtcactaaaccccaagaagcttattgatgttggcttttctaggcttgggcctaagatgacaatga

SEQ ID NO: 219725 - DNA, 162 bp, Gossypium hirsutum
acatcaaagaagcttgctgccttcattactggtgtgcctgctagaataatggcgcgtgacgaagttgtgaaaatggcacacatcaagttcatatgagctcataagaagctgagatcaaagagacttgctcccgtcatgattaatgaggctactacgagagtt

SEQ ID NO: 219726 - DNA, 422 bp, Gossypium hirsutum
ggtggaaatcccaaacaacaagagagtggaattctctctgcagtacatccatgggattggtcgtacgagggctcgtaaaatcctatgtgatctccaaatggagaacaaaatcaccaaagatttgtcagaggaagagctcattacgattcgtgatgaagtctccaaatatatgattgaaggcgacttgaggaggttcaatgctcttaatatacggcgattgaaagagattcagtgttaccgaggggttcgccatattcagggattgccttgtagaggacagcacaccaaaaacaattgccggactttgaaaggtaagagagttgccattgctggtaagaagaaagcccctcgttgatcttaaccgtttttgtttcgatgaagtgaatcatgtttaattttatgtttgattcaaaatgaatgca

SEQ ID NO: 219727 - DNA, 296 bp, Gossypium hirsutum
ggtggaaatcccaaacaacttgagagtggaattctctctgcagtacatccatgggattggtgggacgagggctcgtaaaatcctatgtgatctccaaatggagaacaaaatcaccaaagatttgtcagaggaagagctcattacgattcgtgatgaagtctccaaatatatgattgaaggcgacttgaggaggctcaatgctcttaatatacggtgattgaaagagaatcagtgttaccgaggggttcgccatattcaggggttgcccttgtgaggacagcacaccaaatacaatt

SEQ ID NO: 219728 - DNA, 343 bp, Gossypium hirsutum
tagatctcccgcctgagaaggtgtttctatttcaaaaagctgctctttacaagtgcaacatgatgggaaagcctgcagtggtcactcgtgttgtggacagtatgacagacaacctaagacctactcgtgctgaagcaactgatgttgccaatgctgtgttggatgggagtgatgcaatacttttaggggcagaaaccttgcgtggactataccctgttgagactgtctctacagttggaaaaatttgtgctgaagcaaaaaaagtttttaatcaagatttatactgtcagaaaactgtccaaaatgttggagaaccaatgagtcatctggaatccattggttt

SEQ ID NO: 219729 - DNA, 380 bp, Gossypium hirsutum
ttcaaatctttattttttttcaagatccgatagaagaacccgacctggtgatccgaaatggcggcgtatagagcagatgacgactacgactatttgttcaagctagtattgatcggagattcgggggttgggaaatcgaacttgttgtcgagattcacgaaaaacgagtttaatctggagtcaaaatccacaatcggagtagaatttgctacccgaagtattcgggtcgatgataaggtcgttaaggcccagatttgggacaccgctggacaagaaagataccgggcgattacaagtgcgtactaccgaggagctgttggtgcattgcttgtctatgatgtaactcgacacatcacatttgagaatgtcgagagatggtt

SEQ ID NO: 219730 - DNA, 395 bp, Gossypium hirsutum
caaaacacatcactgcccttgcactcggatcataccaatcaatcaaaatccccaaaaaaatattaaaaaaatgagctctcagattttcagatctgcttctagagccgccaggtctctcctttcagcatccaaggcttctcgcttttactctgaagggcgagctgtagctgccgctgcagcagtttcacttggcggtaaagtgcctcttttggcttcagcttatggaagtactgcttctgccaatgcatctagagcatggctttcaggagtttttgctcttccagtggcagcttacatgcttcaggagcaggaggttcatgctgcagagatggagcgcaccttcattgctatcaagcctgatggagtgcaaagagggctgatttcagagatcatct

SEQ ID NO: 219731 - DNA, 349 bp, Gossypium hirsutum
cttcactccacatttcacactctttttcaactttctcttcttctctttgttttaaagaggggctggagttttagccaaagaaaactccatggctaaacttgttgctactttcttcttggctctcattgccatctccatggttcaaactttggttatggcatcacatggacatggtggtcaccattatgataacaaacgttatggacctggaagtctcaagccttaccaatgtccatctcagtgcacaaggaggtgtagccagacacagtaccataaaccatgcatgttcttctgtcaaaaatgttgcaggacatgcctttgtgttcctccagggtattatgggaacaaa

SEQ ID NO: 219732 - DNA, 418 bp, Gossypium hirsutum
cggtcccgaattggagttccgggccagacccacgcgtacggttgtctctcttaagtcttaccataaaacagagcagagaaggttaaacccaaagtttgaaaaccatcaaaaatggttcaaaggctcacttaccgtactcgccatagctacgctaccaaatccaatcaacaccgtgtcgttaagacccctggtgggaaattggtctatcagacaactaataaaagagcaagtgggcctaagtgtcctgtcactggcaagagaattcagggtattcctcacttgagacctgctgaatacaaaaggtctagattgccaaggaaccgccggactgtgaatcgtgcttatggtggtgttttgtcctgcagtgctgttagaaagaggataattcgagccttcttggtggaagagcagaaaattg

SEQ ID NO: 219733 - DNA, 358 bp, Gossypium hirsutum
gaggaactggatctggaatgggaacactgttgatatcgaagataagggaggaatacccagataggatgatgctgactttctcggtcttcccatctcctaaggtctctgatacgggtggagccttacaatgccactttgtctgttcaccaattggttgaaaatgctgatgagtgtatggttcttgacaatgaggccttgtatgacatctgtttccgcacacttaagctaaccactcccagcttcggtgatttgaaccatttgatatctgcaacaatgtctggagttacatgctgcttgcggttccctggtcagctcaacttcgatctcaggaaacttgccgtgaatctcatcccctttt

SEQ ID NO: 219734 - DNA, 385 bp, Gossypium hirsutum
ctcgaaccacccctgaccgccaaaccgtgtgtgggtgcttgcaaactgccgctaaggctgtcaaaattaaaggcaacttggctgagaccctcccggccaaatgtagtgtcaacatcccttacaagatcagcacttccactaactgcaaaaatgtgaagtgagatggatgaagagagggttttgcagcagcttgaaggagatataatatatgattaaaaagaagaagaagaatgaataaggattttgggatggaattttcaaaatccaaaattagtctccactttagtgtagtgaggctttgtttattttggttaatgttttggtccctgcatgtattggctgttttaatgtttttaatgaaaggaagtttatgctttgtcagatc

SEQ ID NO: 219735 - DNA, 319 bp, Gossypium hirsutum
gaaggctgcccttaaccagcaatcaaaaaccaggttgattggtccaaactgccctggcatcattaaacctggggaatgcaagattggaattatgcctggatacattcacaaaccaggtcgtgtaggaattgtttctcgatcaggcaccttaacatatgaagcagttttccaaacaactgcagtaggtctggggcaatcaacctgtgtaggaattggtggggatccctttaatggaaccagcttcgttgattgtgtgacaaaattccttgctgatcctcaaacagaaggcatcattctgatcggtgagatagggggcact

SEQ ID NO: 219736 - DNA, 299 bp, Gossypium hirsutum
cttcgatattttttttcttcacctccattgacaaacaaactgagatctctgtttatatttcgaaactgttagtaacaaagcaatggatcaagatattgatcgtgtgaagggaccttggggacccgaggaggatgagtcattgcgtaagctggttcagctccatggtccgagaaactggtcgttgatatcgaggccaatccccggccgatcggggaaatcatgcatgctgcggtggtgcaaccagttgtctcctgaagtcgcgcaccgtcctttcacggcggaggaagatgagatcatta

SEQ ID NO: 219737 - DNA, 387 bp, Gossypium hirsutum
caaggactcaatcatggactcaactgtgaattgcagggagaatggtggactgtttgatgtatcccatatgtgtgggctgagccttaagggaaaggactctgtttcattccttgaaaagctcgtcattgctgatgtagctggccttgcccccggaactggaactctaactgtttttacaaatgagaaaggaggggcaatcgatgattcagtgattactaaagtgaaagatgatcacatatatctggttgtgaatgcaggctgcagggataaggatctggctcacattgaagagcatatgaaagcattcaaggccaaaggtggtgatgtctcgtggcacatccatgatgagagatctcttctagctctccagggtcctcttgctgcccc

SEQ ID NO: 219738 - DNA, 395 bp, Gossypium hirsutum
gctgcactaaaagtagtcggtggaaccttggctgatcatagatttttattccttggtgctggagagttgaaggacagggacatctctcaaaccctttctgtttaataccattacaaccttaattgttgaaggctggcactggcatcgcagaacttatagctcttgaaatttcaaaacagacaaacatgccacttgaagaagctcgcaagaagatttcgcttgtggactccaagggattgattgttaaatctcgtattgactcacttcagcatttcaaaaagccctgggctcacgatcatgaaccaatcaagaaacttgtcgatgctgttaatggaatcaaaccaacagtgctgattggaacatcaggagtaggaaggacatttactaaagaagtg

SEQ ID NO: 219739 - DNA, 328 bp, Gossypium hirsutum
cacctctgatttacagcctgttcgtaaaaacttcccaacatatcttgggaggccctggaaggaatactcgaggactgtggtaatgcaatcaacaatcagtgacgtgattcaacctgctggctggcacgagtggagcgggagtttcgccctgaaaacactgttttatgccgagtaccagaacactggggccggtgcctcaacttctgcgagagtgaaatggggagggtacaaggtgatcactagtgcaagtgaagctcaggcttttactcctggcaggttcattgctggaggaagttggttaagctctacaagctttccttttcgctct

SEQ ID NO: 219740 - DNA, 390 bp, Gossypium hirsutum
cgccgctcaatctctccttttggttcacaacgctcttcacgcacggtaaaaatgccgttcaaaaggtacgttgagatcgggagagtcgctctcgttaactacggcaaagactatggcaagctagtcgtcatcgtcgatgttgttgaccagaacagagctctagttgatgccccagatatggtgaggggccaaatgaactttaagaggcttcaattgactgatttcaaaattgacattcctcgtgttccaaagaagaagacactgattgaagcaatggaaaaagctgatgttaaaaacaagtgggagaatagctcatggggtaaaaagctgattgttcaaaagaagagagcatctctcaatgactttgaccgattcaagatcatgttggcc

SEQ ID NO: 219741 - DNA, 385 bp, Gossypium hirsutum
aacatctctcaaaaagacccatagatgaaagggaaatggaaaggttcgaagagaaaactagggttgccagctgcccttctactgtgctcactctcattccttgctggattgtttgttcccacttttttctttcaggatgttccaatcattaaacccaagccgagaatgctcgaggcagtgcaggagaagacgtttcgtgatccgatggcaaatggagtaactggggagagttcgattgaatctattccatttcaggttttaagttggaaaccacgagcttactattttcccaactttgcaacttcagaacaatgtgaacatgtaatagaaatggcaaaggtgaaccttaaaccatctggtttggctttgcgcgagggagaaactg

SEQ ID NO: 219742 - DNA, 394 bp, Gossypium hirsutum
cattaaacaaaccactcccacattaaatattgttgctgaaacaatggcgttttcagctctgacaggtaagcttgaggcagatgtagagattaaggcttctcctgagcagttccatgaaatgtttgcccacaaaccgcaccacgtgcaccatacttgctatgacaagattcaaggatgcgatttacatgaaggtgaatgggggaaagtcggtaccattgtccattggagttatgtgcatgatggaaaagctaaaaaggcaaaggaagtagtggaagcagtagaccctgataagaatttggtcactttcagagtgatcgaaagagatctaatggaagagtataagagctttgtaatcacgattcaagtttcgcccaagagcgagggtagtggcagc

SEQ ID NO: 219743 - DNA, 396 bp, Gossypium hirsutum
gttcttgggcaacagaacagggcaaccatacattcttcagaccaatgtgttcactggtggcaaaggagacagagaacaaaggatttacctttggtttgacccaaccaaagaataccactcctactctgtcctctggaacatgtatcagatagtgttctttgtggacgacataccaatcagagtgttcaaaaactgcaaagatttgggagtgaggttcccattcaaccaaccaatgaagatatactccagcttatggaacgccgatgactgggccacaaggggtggtctcgaaaagaccgactggtccaaagccccattcatagccgcatacaagagcttccacatcgacgggtgcgagtcgtcggtggaagccaagttctgcgccacacaaggaaa

SEQ ID NO: 219744 - DNA, 386 bp, Gossypium hirsutum
cggagtcgaactcgtcactgatcagaagctcaagactccagcaaagcttgaaactattcatgtaatggatcagatgaaagaacttggggtactggtcgggaaaggtggattctatggcaatgtgtttagaattacccctcctctctgtttcactaaggaagatgcagatttccttgtagatgcgatggattacaccatggagaagatgtgaagcacccgacttaaaacgtggatgaatgaagatacgatgtttattcataaagttgctttaattagtgctccctatcgtaagtgaaaaaaagaatcatcggtgcacacagattttcagattgaataagtttcaaaaaattggtagctatggttttgaaaaagctgtttgatgagtc

SEQ ID NO: 219745 - DNA, 239 bp, Gossypium hirsutum
gtggccaaatcaccatacttactggcatgttctactggatcgcccagcttcttggatccactgctgcttgctatctagctcaaggctgtgactggtgcggcgacaagtatccatccacggtctcggagctgcagttcgagctcttcaaggagtggtgttggtgatgatcatcacatctgcatcggtttacacagtgtgttcgaccacacctgaccgattatatggatcacgccacacca

SEQ ID NO: 219746 - DNA, 365 bp, Gossypium hirsutum
atctcaaatacatcacagatcacttcaggttcaaatttgccaatgagagacttaaaagaacagcaagatactattcatcgaattggcggacatgggcagccgtgaatatacaacttggctggcggcgttacagaacgaggactcgaggtccgatgatttctgctgccgaaaacggcaacagcagtgaccgccggttgctgcaatacgctgccatgtttatgtcaataaggccacatgatcatctagaataaagaaaagccaattgccttctgcaattcatttgctcattatgtaatcctgactgtcatttaataaagtctttcattcaccatggaaaccattttgaacatagttgttttgctcat

SEQ ID NO: 219747 - DNA, 392 bp, Gossypium hirsutum
acaaaattgtagatttcattaagtttgatgttgggaatgttgtcatggtcactggaggaagaaacagagggcgtgttggagtgattaagaaacgtgagaagcataagggtagcttcgagacaatccacatccaagatgctgctggacacgaatttgctactcgtttaggcaatgtcttcacaattggtaaaggaacgaagccatgggtgtcactttcaaagggcaagggtatcaagttgtccatcattgaggaagccaggaagaggcttgcggcccaagctactgtctaaattttatgattaaagatataatatctggaattgttttttgtcaaatgaattaatctgtttggtggtcctttgtgtttgcttttgtaggatttatgttttgtt

SEQ ID NO: 219748 - DNA, 378 bp, Gossypium hirsutum
gtacttttaactctaagccaagaaagcaagtcactagggttttaagagaagatcaaaatggcgtcaaaaagatcagcttccatggccctctttttggcactcaacattctcttcttttccctggtcagtgcttgtggttcttgctattcacccacccctaaaccaaagccaaacccaaaccccaaccccacccccactccatcttcacaaggcaaatgccctagagatgcccttaaattaggtgtatgtgctaatgtgcttggcttatccaagcccgtcattggttcacccccagtgatgccatgctgttcccttcttgatggcctcgtcgatctcgaagctgctgtttgcctttgcaccgctatcaaagctaacatc

SEQ ID NO: 219749 - DNA, 238 bp, Gossypium hirsutum
gagccagctgatggtctagctcctgtttggaacaaagatgttaggttctaccgcgtcaaagattcttcaggtagtccaattgcctatttctattttgatccatactctcgtccatcatagaaaagggaaggtgcatggatggatgaggttgcttcccgaagtcgtgtactgtcaaggactggtaccacgccctggttgcctatttgccaatatggtgtgcatttaaactccaccattt

SEQ ID NO: 219750 - DNA, 297 bp, Gossypium hirsutum
aaagctgtcacgtcatcgttggggatggtgaagttggtacccttcgtgaagtcagcgtcatctcgggcctccccgctgccaggagcacagagcgcctcgagatccttgacgacgagcgtcatgttatcagcttcagcgtcgttggcggagaccataggctagctaactacaggtcggtgacgaccctccacccttccacttctgggaacggaacggtggtggtggaatcctacctggtggacgtgccgctgggtaacaccaaagatgacacctgtgtgttcgtcgacacaattgttc

SEQ ID NO: 219751 - DNA, 391 bp, Gossypium hirsutum
ctccgccatcttcaataatttcttccgttgatctttgttagagattagctttttaatttttcattatgggaaagatcaagatcggaatcaatggatttggaaggatcgggcgtttggttgcgagagttgctctccaaagcgatgatattgagctcgttgctgttaacgatcctttcatcaccactgaatacatgacgtacatgtttaagtacgacagtgttcacggtcaatggaagcatcatgagcttaaggtgaaggactcaaagacccttctctttggtgaaaagcctgtcacagttttcggtatcagaaaccctgaggaaatcccatgggctgaggctggagctgagtatgttgttgagtctactggtgtttttactgacaaggacaa

SEQ ID NO: 219752 - DNA, 384 bp, Gossypium hirsutum
ctcctccatcttcaataatttcttccgatgatctttgttagagattagctttttaatttttcattatgggaaagatcaagatcggaatcaatggatttggaaggatcgggcgtttggttgcgagagttgctctccaaagcgatgatattgagctcgtcgctgttaacgatcctttcatcaccactgaatacatgacgttcatgttgaagtacgacagtgttcacggccaatggaagcatcatgagcttatggtgaaggactcatatacccttctctttggttaaaagcctgttacagcttttctgtatcacattcccttgggaaaattccatgggctgaggctggtgcgttgtattccgttttataaactggcgtttttaagcg

SEQ ID NO: 219753 - DNA, 380 bp, Gossypium hirsutum
caggaatttattgagactactaaggagccaggtcttatatttttggcggccaagtttgatgggattttaggacttgggtttaaggagatttcagttgggaaagctgtcccagtgtggtacaacatgctcaaacagggtcttatcaaggaaccagtattttcattttggcttaaccggaacgtaggggaagaagtgggtggtgaaattgtgtttggtggggttgatccagaccattacaaaggaaaacacacatatgtccctgtaacacaaaagggatattggcagtttgatatgggtgatgttcttattggtgacaaaccaactggattttgtgctggcggctgtgcggcaattgcaaattctggaacttctttgctcgc

SEQ ID NO: 219754 - DNA, 370 bp, Gossypium hirsutum
gttcaagtttcctggtcgtcaaaagattattgttagcaggaagtggggatttaccaagtacaaccgtgctgattatctgaagtggaagtctgagaacaggatcatgccagacggtgtcaatgcaaagcttcttggatgtcatggtcctttggctaatcgtcaacctggaagagctttcctctctggatcagcctagactctcaactatccagcaaatttttaagttctctccaaaagctttctggtgaactcatttctggtttatcattacaggtgggttgcagatcttcctttagtggattttcaggtttaaaatatttggtttaatgaattgtttgtcacaccattttttatgggattgtaatttatt

SEQ ID NO: 219755 - DNA, 377 bp, Gossypium hirsutum
gtgaagttcttggacgatcagaaccggttcattatgaggaacgtgaagggaccggttcgtgagggagatatcctcacattgctggagtctgagagagaagctaggaggcttcgttgaagggttatctttatactttctggggtttatgcttgttttgaattgtctaccgtattgcttttgaattacgtttagtaggtattcgtatatcgagacttgcgatttgggagaatggttgctgcttaaacctggattttatgatgattatgttgaaatgaactgaattggttttgagttttggttatatttttgcctcccattttgagaaaaatgttcggattagatttgtttgtctgaatgatcacttgttatgattatgt

SEQ ID NO: 219756 - DNA, 386 bp, Gossypium hirsutum
caagagagcagcatcagtcgcggcggcggcagttctacccagggtctgttttctaaacaaccatcaaacagaaatgaagttcaatattgcaaatccgactactggctgccagaagaagctggaaattgacgatgaccagaaactccgagccttctttgacaagaggatctcccaagaagtcagtggtgatgcccttggtgaggagtttaagggctatgtgttcaagataatgggaggctgtgacaagcaaggttttccaatgaagcaaggagttctgacttcaggtcgtgttcgtcttttgcttcacagaggtactccctgctatcgtgggtatggtaggagaaatggagagcgaaggtagtaggcaggtcgcggatgcattgtta

SEQ ID NO: 219757 - DNA, 388 bp, Gossypium hirsutum
gtggaactgagaaccaccttgttctttgggatctccgacctcttggattgactggcaacaaggttgagaagctttgtgacctctgcaacatcactgttaacaagaatgctgtttttggtgacagcagtgcattggctccgggaggtgtacgaattggtacacctgccatgacttcaaggggtttggttgagaaggactttgaacagataggcgagttcctccaccgagccgtgacaatcactttgaacatccaaaagcaatatggtaagcttttgaaggacttcaacaaagggttggacaacaacaaggagatccaagagctgaaggttgatgttgagaagttcgcatcctcattcgatatgcctggcttcaagatgtccgaaatgaa

SEQ ID NO: 219758 - DNA, 391 bp, Gossypium hirsutum
gggccacccgcatatatgcgaatgtctcggctatgagctcgagatggcgttcctatacgctgcaggcgctgcgggttataccagcataataccggagcggtggaagcctgtggcatttgatattgcagggcacagccaccagatctttcatgtgtttgttgttctcgcggcacttgctcattgtgttgctacccttgtgattatggattttcgtcgggaatctgcaacctgtgcgtattagcattctactgttaggtaaacaatgttttgatgatcagggggatttcctagttctcccagtttttggcttaataaattctatcacttccaacaacatttttcttaacaaactggcactggtgaccttcaaaaatatatttgattggccatc

SEQ ID NO: 219759 - DNA, 401 bp, Gossypium hirsutum
ctgcagtaggaaaggaccaaaagggtttaatctgctgtgcacgttgtagctcaccacccaaactttaacaatggccgtcggtaagaacaagaggatttccaagggaaagaagggaggaaagaagaaagcagctgatccatttgcgaagaaggattggtatgatatcaaggctccatcagtttttacgagcagaaatgttgggaagactcttgttacccgtactcagggtaccaagattgcttcagaaggactcaaacacagagtgtttgaggtttcactgggtgatcttcaaagaggtgatgaggatcatgcttacagaaagattcgtttgagagctgaagatgttcaaggaaaaaatgttttgaccaacttctggggaatgaaatttacgactgacaagc

SEQ ID NO: 219760 - DNA, 388 bp, Gossypium hirsutum
cttgcttcgccatagcttgcatattgttggggaagttaagcttgctgttcaacattgcttagtagccaatcatggtgttcaacttgaggatttaagtagggttcttagtcatcctcaggctctagctcagtgcgagaacacgttaacaaagataggcttgagtagagaagcagttgatgatactgcccttgcagcaaagcatgtggctctccacaaactaaaagatactggagctgttgcaagttcttcggctgcaaagatatatggattgaacatccttgctcaaaatattcatgatgattgtgataatgttactcgatttctaattctggccagggaaccaattattcctggcattcagaattcattcaagacaaagttatgtttt

SEQ ID NO: 219761 - DNA, 305 bp, Gossypium hirsutum
gtcgggtccatccattgtccacaggaagtgcttctaaatttacaagtcatttaatggtgagttacattttctgttagttggcttttcgtgtcgtgtgtcaagtgaactcaaggtcgggttgatgtgggaaatggattattgaaagagggttgtactttgatcttgatgtaatattagcctttcattctgctgtgatttgtgatgcccgctggtgtcactgtgatagagatgatgggtctttggagctggtggtcggcagacagtgggtgtatatttccatcctttccatgcatttttcaaccatg

SEQ ID NO: 219762 - DNA, 256 bp, Gossypium hirsutum
acgcgaagttgcggcatatcctttttagtactccctactgtaaagatgaacaaggagaggctcatgaaaatggccggtgcattccgtaccggcgggaagggtagcatgagaagaaagaagaaggctgtccacaagacatcttccacagacgacaaacggttacaaagcaccctcaagagaataggagtcaatgctattcccgcaatcgaggaatgtaacatcttcaacgactatgattttatccagtttattaatc

SEQ ID NO: 219763 - DNA, 198 bp, Gossypium hirsutum
tcgggagagaaccggagctactgtcgtcgccgccgccatggtgaagtttctgaaatccaacaaggccgtgatagtcctccaaggccgattcgctgggcgcaaagcggtgatcgttagatccttctacgatggaacacgtgatcgcccctatggccactgtttggttgcagggataaagaattaccccagcaaggtcat

SEQ ID NO: 219764 - DNA, 428 bp, Gossypium hirsutum
aaccatttaaattctctgaacctacgcaagctgctatagcaaatggaattgctggaatgactgcatctctgtttgctcaagctgtttttgttccaattgatgtgattagtcaaaagttgatggtccaaggatactcaggccatgcaaagtacaacggaggtctagatgttgctcgtaaggttttaaagtctgatggaatccgaggattatacagaggatttggtttgtcagtcatgacttactctccatccagtgctgtatggtgggctagttatggttctagccaacgtgttatctggaggttcttgggccagggcacagacctaaaagaagtaacttctaatctatcgacatattggcagtgcaagctgttggaggaatcattgcaggtgctacagcttcctgcatacaacttcattggacacttt

SEQ ID NO: 219765 - DNA, 430 bp, Gossypium hirsutum
  unsure (1)..(430): unsure at all n locations
caccagattggattccataaagcaagctatccttctctttgtcaattccaagctctctatcaaccccgaccaccgcttcgctttcgccactctctccaaaaccgcctcttggcttagaaaagagtttagtagtgatgttgagtctaccattggtgctgttcgagcactctcggctaccactgtctctactgggcaagcagacctcaccaatttattccgcttagctgctcatgaagccaagaaatctcgtgcccagaaccgcattttaagagtgattcttatatactgcagatcatcaatacgaccccatcatcaatggcctgtaaaccagaagctcttcactctggatgtgatgtacctncatgacaagcctggacctgataatngtccccaggcaagttacgatgcactggttgatgcactngaacat

SEQ ID NO: 219766 - DNA, 401 bp, Gossypium hirsutum
tccacatcggtcactgggataaacaacactgaatatgaaataacaagagggaaggaattaaaccgcattgctggagtgggaaagacttgcaactttgtgaaggctgacttcatgaagatggcatttcctgacagcacctttgacgcaatttatgcaattgaagctacttgccatgctccggatgcgtatggctgctacaaggagatttacagagtactaaagccaggacagtattttgctgcatacgagtggtgcatgacagattcatttgatccaaataactcagaacatcagaaaattaaggctgaaattgagattggtgatggtcttccggatatcaagttgactggacagtgcctggaagctctaaaacaggcttgttttgagataatttgggagaa

SEQ ID NO: 219767 - DNA, 382 bp, Gossypium hirsutum
attttgtcagtggtgaagataacttggtcatcttgcttctaaatgccagggtattggtatgctgcttgaagggctttttggttctcttgttggtactactgcatctgtggaaaatgtgggccttcttggacttacacatataggaagcagaagggttgtgcagatttcaactgcttttatgatatttttctccatatttgggaagtttggtgctttttttgcctctattccattgccaatatttgctgccatttactgcattttgttgggcattgttgctgcttctgggatcacattcatacaatttgcaaatagtaactctatgagaaacatctatgttttgggtgtctctctattcctggggttatcaattcctcaatac

SEQ ID NO: 219768 - DNA, 199 bp, Gossypium hirsutum
tgtcaatttcaagctctctatcggccccgaccaccgcttcgctgtcgccactctctccaaaaccgactcttggcttagaaaagagtttagtagtgatgttgagtctaccattggtgctgttcgagcactctcggctaccactgtctctactgggcaagcagacctcaccaatttattccgcttagctgctcatgaagcc

SEQ ID NO: 219769 - DNA, 428 bp, Gossypium hirsutum
  unsure (1)..(428): unsure at all n locations
gccaggttacaggctcaattttctcaaatgcgaccagttacaatgtcaccttcagttgctcctcgtatgccaatgtacccacctggtggtccaggtcttgggcagcaaatattttatggtcaagcacctccagcaatgtttccgcagcctggatttgggtatcaacagcagctcgtccctggtatgaggcctggtggagctcccatgccaaatttctttgtaccaatggttcaacaaggccaacagggtcagcgtcccggtggtagaagggctggggctggtcagcaaagtcagcaaccagttccattaatgcagcagcagatgctaccgcgagggcgggtctatcgctatccaccagggcgtggtctacctgatgtttcaatgcctaacattgctggaggcatgctttctgntccatatgatatggg

SEQ ID NO: 219770 - DNA, 373 bp, Gossypium hirsutum
tactaagatggaggagattgaccacttgcatgagttgcaaattcttgaacttggttcgaacagattacgggtaatggaaaatttgcaaaatttcacaaaattagaagagctgtggctgggaaggaatcgaattaaagctataaacctttgtgggctcaaatacatcaagaagattagcttgcaaagtaatcgtttaacttctatgataggattggaggaatgtgttgctctagaagagttatatttgagccacaatggcatttcaaaaatggaaggtctatcaacattggttaacctccgagtattagatgtttcatcaaataagctaacatcagtaaatgacgtacaaaacttgacaaggttggaggactta

SEQ ID NO: 219771 - DNA, 352 bp, Gossypium hirsutum
gcagttggccggcccgaagaggcgactcaccccgatgctctcaaggcagctttggctgagttcatctcaaccttgatcttcgttttcgctggatcgggctcaggaatggcttttaacaagttgaccgacaacggagcaacaaccccggccggtctcgtagccgccgctctagctcatggcttcggtcttttcgtcgctgtctccgttggcgccaacatctcaggtggccacgtcaaccccgccgtcaccttcggtgctttcgttggcgggaacatcactctcttgcgcggcattctttactggatcgcccaactcctaggctcaaccgtcgcttgcctgttgcttaagttcg

SEQ ID NO: 219772 - DNA, 270 bp, Gossypium hirsutum
  unsure (1)..(270): unsure at all n locations
tttttgctgtggttatgatggggggtcgccaatacattgttttccctggaagatatctctacacccagagactgaaaggtgcanatgtcaacgataagattgttctaaacaaggtattacttgtgggaacaaaaacaactacatatatcggaaaacctgtggtaactaatgctgctgtacatgctgttgttgaggagcagggactaaacccaaaagtagttgtcttcaaatataagaagaaaaaaattatcggagaaatattggacatcg

SEQ ID NO: 219773 - DNA, 416 bp, Gossypium hirsutum
atatgtaccgcatggcgttgatggctttgatcgctggcgaccttcctggtgtgaatagagaaagctattgttggagatataacaccatcatgtggtgttcctaaagaagaaaaaagcagacgtgagcaagcagcgttaactgaaatgtgcaaaattctgggtggaggaatgagaggtgcttcctagccaattttatttttggaaatcttgggttgctaaattatttgtttattgcatctgcttgtcttattttggtattttgttagttgcagctgaggagatccaagaactgtgggtagaatatgaaaacaatgcttctctggaggctaaccttgtgaaagattttgacaaggttgaattgattctgcaagcactggaatatgaacttgaacatggaaaggtgctgaatgaaattt

SEQ ID NO: 219774 - DNA, 274 bp, Gossypium hirsutum
  unsure (1)..(274): unsure at all n locations
aaggaagaacccaaaagggaagagatttttgctgttgttatgattgggggtcnccaatacagggggtttcctggaagataggggtacacccaaaaactgaaaggggcaaatgtcaacgataagattgttctaaacaaggtattacttgggggaacaaaaacaacctacatatatcggaaaaccctgggtaactaatgctgctgtacatgctgttggtgaagaacagggactaaaaccaaaagtagttgtcttccaatataagaagaagaaaaat

SEQ ID NO: 219775 - DNA, 402 bp, Gossypium hirsutum
aattgagactccaaccaagtcctctggctctcaccacgcatcacatcctcctttgaatgaaaggattctttcatcgatgagcagaaggtctgttgctgctcacccatggcatgatcttgagattggacctggagctccaatggttttcaactgtgtgattgaaatcccaaaaggtagcaaggtgaaatatgaacttgacaagaaaactggtctgatcatggttgatcgagtgctttactcatcagttgtgtatcctcacaactacggattcatccctcgtactctttgtgaagacaatgatcccatggatgtcttgatcattatgcaagaaccagttattccaggatgctttcttcgcgctaaagctataggtctgatgcctatgattgatcagggtgagaa

SEQ ID NO: 219776 - DNA, 390 bp, Gossypium hirsutum
agatgatgcatcacagagccactttggtgcggctaatcccaaccagcttcagtctcagggtttgatgaactctctctactcccagccctttgcacactacaacacacagccactaaacttgcagtctcctcaacagcagcaaccacagcagggccagggttcccaaaaccagaatcttcgctataatggttaataataaagatgtatttggctttgatgggttatggtctttgcaatcagcaacttggtttgtgctgtccttgtatgcccaaatatatccttctctcaagtgcaaaatgtttgccaggtcagttaacttcctgttcgtaacctgtaagatgattccagttgatggggaataaatataattggagtaaggattatatcatt

SEQ ID NO: 219777 - DNA, 402 bp, Gossypium hirsutum
gattgaaatcaagtttaggacaaaggagctactggagtgcatgggcaggcttgaccaacagcttataaacatgaaggcaaaacttcaggaagcaaagagcaatggagcccatgcacagatggattctctgcagcagcaaataagatcacgtgagaaacagcttttaccagtatacacccagatagccactaaatttgccgagcttcatgatacttctctgaggatggcagcgaaaggggtaataaaagaagtagttgactgggatcgctcacgatctttcttctatagaagattgcgccggagaattgctgagagttctctggtcaaaattgtaaaagatgctgctggtgatcaactgtcgcataaatctgcaatggacttgatcaagaaatggtttttgga

SEQ ID NO: 219778 - DNA, 396 bp, Gossypium hirsutum
ggaccccaattcaatctttgtgttcaagtttaggactcattttggaggtggaaaatctactggatttggtttgatttatgattctgttgagaacgccaagaagtacgagcccaagtacaggctgatcaggaatggactcgataccaaggtagagaaatcgaggaaacaaatgaaggaaaggaagaacagggctaagaagatccgtggagtaaagaagaccaaggccagtgaagcagcaaagaagaagtgagagctaaaaggcaaaactcgtgcttatcacagagccaatgcttttcaacattgttttttagggttcttgaatcttttgttttggaaaccagatttttggtgttggtatctgatgtttagttatattattacgatctgatttttctt

SEQ ID NO: 219779 - DNA, 378 bp, Gossypium hirsutum
ggaaaagaggaaaggttttggccatgaaaaaatcgtcaaggactgctactgagggtctgcttgctctggctcaaaatgagggcaaggctgctgtaattgaacttaattgcgagacggatttcgttgccaggaatgaaatttttgagtacttggctttggcattggcaaagaaagctttgtttgtccaaaactcttcccaacagattcctggggttttctcatttgggcctgagtgtttagaggacttaaaattaaatcttgaccatccaaaaattagtggggagacaaccattcaaaatgcagttacagaagtggctgcaatgatgggagagaatataaaactcaggaggggtgttgtgatgtcaacatcttcgcatg

SEQ ID NO: 219780 - DNA, 393 bp, Gossypium hirsutum
aaggatctcaagcgtggttttgttgcatccaactccaaggatgaccctgctaaggaggctgccaacttcacttctcaggtcatcattatgaaccaccctggacaaattggaaatggatatgccccagtccttgactgccacacgtcacacattgctgttaagtttgctgagcttttgaccaagattgacaggcgatctggtaaggagcttgagaaggaacccaagttcttgaagaacggtgatgctggtatgattaagatgattcctaccaagcccatggttgtggagaccttctctgagtacccacccctgggtcgttttgctgtgagggacatgcgtcagaccgtggctgttggtgttatcaagagtgtcgagaagaaggacccaaaccgt

SEQ ID NO: 219781 - DNA, 420 bp, Gossypium hirsutum
gataaactgaagggaggcccacttttctggattgatacggctgataaacaaccttgcattggtaccggtggtatgataccgtggaaacttcaagtgacggggaagctttttcacagtggtttaccacacaaggctataaatgcattggagctcggcatggaagcacttaaagaaattcagctacggttttataaagacttcccaccccatccggatgagcaagtatatggatttgctacaccatcaaccatgaaaccaacgcaatggaattatccaggtggtggaatcaatcaaattccaggagagtgtacaatatcaggagatgtcaggttaactcctttctacaatgtaaaagatgtaatgaataagcttcaagaatacgtagattacataaacgaaaatctaaacaagctagacaca

SEQ ID NO: 219782 - DNA, 352 bp, Gossypium hirsutum
aatggagaacaccttttggacgagagtttttctgttgtgcttattcaggctcgaccaaccggtgagttacatgaaagagaggcgtgcggacacaaacagcaatgggccccatgcacagatggaatctctgtaacaccagatttgatcacgtgagaaacagcttttaccagtatacacccaaatagccactaaatttgccgagcttcatgatactgttatgaagatggcaccgaacggggtaataaaagaagtagttgactgggatcgctcacgatctttcttatatagaagattgcgcccgagaattgctgagagttctctggtcaaaattgtaaaagatgctgctggtgat

SEQ ID NO: 219783 - DNA, 427 bp, Gossypium hirsutum
cagttccttcagccaaattcacaccgctcttgaaagatgagctcgacatagtgatccccaccattcgaaacctcgatttcttggagatgtggagaccctttttcgagcaataccatttgattatcgttcaagatggcgatccatccaagaaaatcagggttcccgatggctttgattaccaactttataacaggaacgacgttaacaggatcttgggttccaaggcttcttgcatttccttcaaggactctgcttgtagatgctttggttaccttgtttccaagaaaaaatacatcttcaccattgatgatgattgttttgttgccaaagacccatccgggaaggaaatcaatgcgcttgagcagcacattaagaacctgttaacaccatccacaacccatttctttaacacactctatgatccata

SEQ ID NO: 219784 - DNA, 411 bp, Gossypium hirsutum
agaaagggccttgttcaagttccttaagcctgggcaacgtctacagcccgccgacgttcaagctgccgccatgtggggcgtcgctgccactaccggcgctctttggctcattcagccttttgattggttgaagaagacctttctggagaaaccagagtcggattagaagcaaatgggacatcttgcaactcattgcggttttgtttatcgggtttgctgatgaacaaatcatggaaagaataaaaataataatgtagtacgcgtaattttttgtggtttattgctaagagaacaagcctctttgcttttggtatcaattactgggaagttttgaacctttcaccttcagtttgaactggtgtctcatttctacttgagtttatgaattcatgcattcataaagaggcttat

SEQ ID NO: 219785 - DNA, 374 bp, Gossypium hirsutum
gtccttcaaagagatctgaaataggagctagttcaaagtctgtcgaagatggcaggaacaagctctgcgcggattgttttagttgttgtgtctggtgttttagcattgattgggtcagcacaggctcaactgcagatgaacttttatgccagcagctgtcctaaagccgagcagattgtgctggactatgttaaacagaacatccctaatgccccatccctcgctgcttctttcttaagaatgcacttacatgattgcattgtcaggggctgtgatgcatcagtgcttctaaactccacatctggccaagcagagaagaatgcagtcccaaatctaacactgacgggctttgatttcattgaaagagtgaagag

SEQ ID NO: 219786 - DNA, 407 bp, Gossypium hirsutum
gccaattcagggagactggaatggtgccgttgctcacacaaattacagtacgaagtccatgagaagtgatggaggctacgaggttatcaagaaagcaattgcaaagcttgggctaaggcacaaagaacacattgctgcctatggagaaggcaacgagcgccgtctcaccggccggcatgagactgccgacatcaacactttcttatggggtgttgcaaatcgtggggcatcaattcgtgttgggcgagacacagagaaagccggaaaagggtatttcgaagacaggaggccagcatcgaacatggatccatacgttgtcacatccatgattgcagaaaccaccatcctgtggaaaccatgaagggaagcccaatgttgggatgctgttttcatggtagaaaagaaag

SEQ ID NO: 219787 - DNA, 369 bp, Gossypium hirsutum
gaaatttgttgtctgaaaagagagttaagagctcatttttcagacaacaaatttcttaaaacatccattaatgaagtcttgcaacaggacaactcaacagaacagaaaaagaaacacaatctaactcgctcggagcatctgcattgaaccaccgagttaccccgaactgcactatccacatgcaaaatctaagcaacgagggtgctggcagtcgtagactcatatttccagacaggtggaagcttctttgttttcttgtagtaacgagcaagcctgtgaatcctgctctcaacaagaatcaaccgaaacttggaatccttatccttcctgtttctctccaaatgcttgcggatcgcgccaagatgatcg

SEQ ID NO: 219788 - DNA, 428 bp, Gossypium hirsutum
aatttttctctgggcttctgcatggttctatctcaacatacttcaaatcacagccaataccagataacaataatgcaagtgtgctagctgtcgtgggaaagacatttgatgacttggtcttgaacagtcccaagaatgttcttttagaggtatataccccgtggtgcatcaattgtgagaccacgagcaagcaggttgagaaattggctaagcattttaaaggcttggacagtctcatctttgctaagattgatgcttctgctaatgaacatccaaaacttcaggttgacaactacccgtcactctttttatacaaagctggtgataaagacaatccgatcaaactttcaacaaaatcaggttcaaaagaactagcagccttcattaacaaacaagtgagacccaagatcaagcggccaaagatgaac

SEQ ID NO: 219789 - DNA, 361 bp, Gossypium hirsutum
gcgtccgaatttttttttgggcttttgtttggttctttttttacatacttcaaatcacagccaataccaggggacaataatgcaagtgtgctagctgtcgtgggaaagacatttgatgacttggtcttgaacagtcccaagaatgttcttttagaggtatataccccgtggtgcatcaattgtgagaccactagcaagcatgttgagaaattggctaagcattttaaaggcttggacagtctcatctttgctaagattgatgcttctgctaatgaacatccaaaacttcaggttgacaactacccgtcactctttttatacaaagcttgtgataaagacaattcgatcaaacttttaacaa

SEQ ID NO: 219790 - DNA, 360 bp, Gossypium hirsutum
ggagtaactggggagagttcgattgaatctattccatttcaggttttaagttggaaaccacgagcttactattttcccaactttgcaacttcagaacaatgtgaacatgtaatagaaatggcaaaggtgaaccttaaaccatctggtttggctttgcgcgagggagaaactgaagaaagcacaaaaggaactagaacaagttcgggaacttttattagtgcatcagaagatgaaaccgggaccttggacttaatcgagaaaaaaattgcaaaggttacaagcatcccacagagccatggagaggcatttaatattttgaggtacgagattgggcagaagtatgattctcattatgatgca

SEQ ID NO: 219791 - DNA, 374 bp, Gossypium hirsutum
gctttccgtcgcttaatcaaccgtcttcagcaccaatccaaactcttaatttccattgacatttttcaaaattaaatttatttaattattaattttccttctgtgtgtgatttgggaggctgtttctgaagatggaaatcgaggaaaaacaagcagaggtaattgatcatttcgtgaagcaagtatcagctcagaagggctcggctcttggctccgttttcgttgaagcgacgtcgcatccttcacttttcgccttctctgagattcttgctgtgcccactgtcgctgagctagaaggaactgacaactcggtgcaccttgagatgcttcgattgtttgcacatggaacatggagcgattataagagaaatagc

SEQ ID NO: 219792 - DNA, 422 bp, Gossypium hirsutum
gtgctcttgagcagcagctaaagttgatccaaaaatgaagtttaatatcgcgaatccaaccactggttgccagaataagcttgagatcgatgacgatcagaagcttcgggcgttttttgacaagaggatctctcaggaggttgctggagatactttgggcgaggaattcaagggctacgttttcaagatcatgggaggttgtgataagcaaggatttccaatgaagcagggtgttctaactcctggccgtgttcgtctcttgcttcatagaggtactccatgtttccgtggatatggaagacgtaatggagagcgcagaaggaagtcagtccgtggatgcattgttagtcaagacctgtctgttttaaacttggttatagtgaagaaaggtgagaatgatttgcctggtctgaccgacactg

SEQ ID NO: 219793 - DNA, 380 bp, Gossypium hirsutum
gatgcactgaagagcatgtacaatgcagaaaagaggggcaaacggcaggtcatgatcaggccatcctcaaaagtgatcatcaagttccttttggtcatgcagaagcacggttacattggagagtttgagtacgttgatgatcacagatctggtaaaattgtagttgaactgaacggaaggctgaacaagtgcggggtgatcagtcctcgcttcgacgtatgagtgaaggagatcgagggttggactgccaggctgcttccatcaagacaggttagccggaaaactgaacttcataattttatgctttcataagattgttttaccctattctactgagttgtataatggatttgcagtttgggtacatagtgctgacaaca

SEQ ID NO: 219794 - DNA, 412 bp, Gossypium hirsutum
gcactaccaactgccttgctccattggctaaggtcatccatgacaaatttggcattgttgagggtcttatgaccactgtccattcgattactgctactcaaaagactgttgatggtccatcaatgaaggactggagaggtggtagagctgcttcgttcaatatcattcctagcagcactggagctgccaaggctgttggcaaagtgttgccatcattgaatggcaagctgactggaatggcattccgtgttcccacagttgatgtctctgtggttgacctcacggttaggcttgagaagaaggcttcttatgaagatatcaagggcgctatcaaggcggaatctgaaactaatttgaaaggaattcttggctacgtagatgaagacttggtatcgactgactttgttgggac

SEQ ID NO: 219795 - DNA, 361 bp, Gossypium hirsutum
catcgacaagctatttgcacttcccgtgggttatgacttggtaggaatattggattcgatctttcaaatagccatcttgaggacttttaggagctacttaatgacatcctgttttagttgcatgaattcaaatcgtcatatttgagagttttttgcaggtgtggaggaattgtatggatgactacacaactccagtgtctatttggtatccaagagctcctgaaggattcatcagtctcggttgtgttgctgtaccaggttttgaggagccagaacccgatttagtacaatgtgtggccgaagtaatattggaagaaactacatttgaagagcaaaaaatatggtctgcaccagaatcata

SEQ ID NO: 219796 - DNA, 412 bp, Gossypium hirsutum; identical to SEQ ID NO: 197905

SEQ ID NO: 219797 - DNA, 412 bp, Gossypium hirsutum
ggcaggttacaggtacaactaggagtgaacatgcccgcacaagctaaccaaaagctttcccgggatgaagcagattcagctgaagttgaacttttcgaggtttatgatgtggttatctatatgggaattattgacattttacaggaatacaatgcaaagaaaaaggccgagcatgcatgcaaatcggtgaaatttgatcccttgtcaatatctgttgttgaacctgaactttatgctcaacgtttcatcaatttcttaaagcagaaagttttcccggaacaaccatgaaaaaaaaacagatatatctatctgtttctaccattgcttctatattttggctcactttgacaaaatcgataagccaataactatctgtacctactgtattgttgcaagtgatattgagatatct

SEQ ID NO: 219798 - DNA, 406 bp, Gossypium hirsutum
caaatcttcgttaagacgcttaccggaaagacgatcactctcgaggtcgagagctctgacacgatcgacaacgtgaaagccaaaatccaagacaaggaaggcatcccgccagaccagcaacgtctcatcttcgccggaaagcaactcgaggacgggcggactttagccgattacaatatccagaaggaatcgactcttcatctggttctacgtcttcgaggtgggatgcagatcttcgtcaagactttgaccggtaagaccattactttagaagtggagagctcggatacgattgataacgtgaaagcgaagattcaggacaaagaaggaattccaccagatcagcaaagtttgatttttgctgggaaacagctggaagatggaagggacttggctgattacaata

SEQ ID NO: 219799 - DNA, 415 bp, Gossypium hirsutum
gaggtctgcatcatgggaaaggcaatatctggggcaacaattttatctgagagtctggaatcctgttcggagtcttgctaacgaatacgacattccttctaatgtcttactctgcggtaaagcagttgggcgccacccttagccagccagtatggccctaatggctattatctgttaccagtcatcagagtttgactgctgataaaatagattgagagagaagaaattggattgaaatgtttcgcctttattcatttgtatatcttagaaagcaatagagtaaaattatctataccgtagttattactttattatctcttcaattcgttttctgcaaacagagttaaaattatgaggttttgtaaaattaatcattttcttaagtattaggtgtgcaattatatatatatatcaa

SEQ ID NO: 219800 - DNA, 403 bp, Gossypium hirsutum
gggccacactttgtctcttaatggaggtgtttgcattgacatgaccttaatgaagagagtgtaaggcgttgcatatttgggacatggatgttgtagttgagcctggaattggatggatggaacttaatgaatacttggcgccttatggtttattttttcctgatgatccagggcctggtgcaacaataggaggcatgtgcgcaacacgctgctctggatctttagccatgatgtatgtgctactctactactgtctttctttgcattccctcagtgccctcttagtctgttgaaaaattacatctgacatctatcttactgaggtttgtagaattttcattttagcaattatgtaccgaacaagttgtttcagatttgaaatgatggatgctttttgttctgg

SEQ ID NO: 219801 - DNA, 377 bp, Gossypium hirsutum
ctaacctcaggaaacagaggattggctatatgaagacggtgaggatgaaataaagggtgtttatgttgccaagcttgaagagcttaagaagcaaggggatcctatagaagaacgttacaaagagtatatggagaggggaactgtcattgatcaacttgcttactgtattaacagttacagggaggcagcaatgtcaaatgatcccaaatttgatcacattgaacttgctgaaaagcaaaaggtcttgaatgagtgtgtagaagccgaggcctggttgagagagaaaaagcagcagcaggatctacttcccaaatatgccactccagttctcttgtcagctgatgtgagaaagaaggctgaagcactagataggtttt

SEQ ID NO: 219802 - DNA, 424 bp, Gossypium hirsutum
  unsure (1)..(424): unsure at all n locations
accttttataactgtggctttgacatatttccaacttgctgctgaaaatcatgaatggtgggggaggtctttcctctgtggtggatcaactggtctctttatctatgcctactgcttgtattattactatgcacgatcagatatgtctggttttatgcaaacctcgttcttctttggttacatggcatgcatctgctacggattcttcctcttgctggggacagtgggtttccgtgcctcgctattctttgtgcgtcacatatacaggtctatcaagtgtgagtaggggttttagttgtcccttgccctttcccagcaattctgttagagaaaaaaatctatggtttttgttagaaaattaactggaagattgaatgtcaagtaacaaatgangcatgctttgactatgcttaatggatatcta

SEQ ID NO: 219803 - DNA, 393 bp, Gossypium hirsutum
aggaggtgcatcgtgcaagtctcctacgccattggtgtacctgaaccattgtctgtatttgtggacacttacggtactggaaagatcccagacaaggaaattctcaagattgtgaaggagacctttgacttcagaccaggaatgattgccatcaatcttgatcttaagagagggggcaatagcaggttcttgaagactgctgcgtatggtcattttggtcgggatgaccaagatttcacttgggaggttgtcaagccactcaagtgggacaaggtccaggcttaattggagcttcatcacattggttctatgtctgatttatttgatctgctgtctgctaccatatgaggctgcttttcttacaaatttccttaattttcttttttgggtttg

SEQ ID NO: 219804 - DNA, 204 bp, Gossypium hirsutum
aatcagcaagtgtcagttctacatggatatgttgtcagagtgcaggaagaactctggatcaatgttgggtgcctaaatttatgcctcatttgttgcttctacaatgcaatgtctttgcccttcacttctgtttctcttttattgatgatgatgatgaagctgaactcccttcaatgattcaataatatttatctttactggctg

SEQ ID NO: 219805 - DNA, 426 bp, Gossypium hirsutum
  unsure (1)..(426): unsure at all n locations
aatagttccagcaacaactggacagatgggtattttgcctggacatgtccctacaattgctgaactgaaacctgggatcttgtcggtgcatgaaggaaatgatgtcacaaaatatttccttagcagtggttttgctcttatccatgccaactctgttgcggatattattgctgtggaagcagtgccagtcgaccgccttgacccagccttggtccagaagggtctggctgactttactcaaaagcttgtctcggctacaactgatctggagaaagctgaagcccaaataggtgttgacgttcacagtgctatgaattcagctatcacaggttaatcattttcttaaccagctttggttcaatcctaagactttttttctcatattgcttcccttttttgtatgtgttcatgatcaacanatgactg

SEQ ID NO: 219806 - DNA, 382 bp, Gossypium hirsutum
tgatttttctctcggctcttaaatatcatgtttcacctgataggtggacatatgtttatcgtcgcctctggcttttttcaagtgttgtcaactcactctactcattttattgggacataacacgtgattgggaccttagtgtcttcaccagaatcttcaagttcaacaaaccaagtttgtgcaccaatctgttctatgggcgaagatgggtttatttttgggttatcggaagcaacttgattttgcgttgcacatggacatataaactgtctgctcatctccgccacaactacttgactgtgtttatggtcactgccttagagatgctaagaaggttccaatggatattcttccgagttgaaaatgaatggaacaaaattac

SEQ ID NO: 219807 - DNA, 417 bp, Gossypium hirsutum
gcctaaaagagagccgggaaaggaagctagaagagcaaagcgaaaatgaagactatactttcctccgagacaatggacatccccgacggggttagcattaaggtcaaggctaaggtgatcgaggttgaaggtccaaggggtaagcttacccgcaacttcaagcacgtcaaccttgatttccatctcatcaaggacgaagagaccggcaagcgtaagctcaggatcgaggcttggtttggctccaggaagaccagcgccgccatccgtacagctcttagccacgttgagaacctcatcaccggtgtcactaaaggataccgttacaagatgaggttcgtctacgctcactttccgattaatgcctccatcactaatggcaacaagtcgatcgagatccgtaacttccttggcgagaag

SEQ ID NO: 219808 - DNA, 429 bp, Gossypium hirsutum
cccaatttctctcttctgctctaggttccttcctgttctcttaggattcttgtggtctgttcaaagcgtcatggcatcgaagcggattttgaaggaactcaaggatttgcaaaaggatccacccacttcttgcagtgcaggtcctgtagctgaagacatgtttcattggcaagcaacactcatgggcccttccgatagcccttatgcgggaggtgtatttttagttagtattcattttcctccagattatcctttcaagccccctaaggttgcatttaggaccaaggttttccatccaaacatcaatagcaatgggagcatttgtcttgatatcctaaaagaacagtggagtccagccctaaccatttccaaggttctgctctcgatctgctcgttgttgactgatccaaaccctgatgacccacttgt

SEQ ID NO: 219809 - DNA, 409 bp, Gossypium hirsutum
ggcattgatgccagtggtaactatgtcggcacttcgcctgttcagcttgaaaggcttaatgtttactataatgaagccagtggtggcagatatgtgcctagagctgtgttaatggatcttgagccaggaactatggacagtttacgaacaggtccttatggaaaattgtttagaccagataactttgtgttcgggcaaaatggagctggcaataactgggctaagggacattatactgaaggagctgaattgattgattcagttcttgatgttgttcgtaaagaggctgagaattgtgattgtttacaaggttttcaggtttgccattcactgggaggtggaacagggtcagggatggggacattgttgatatcaaagatcaaggaagaataccctgaccggatgatgc

SEQ ID NO: 219810 - DNA, 421 bp, Gossypium hirsutum
gccatcaccgccgccgtcgcttccattcccgcctacccttcagtgtcgacagactgcaccgtttccgccgaggatgataacccggttcccgttcgtcgtgaagtttacggcgacgggagaatcttcgacgttagccatagatacaccgtggatatgccttcgtgggggagcaaagatggtctgggtcagttcctttggcttccgtcaagcatgaagaacggttcaaggtccaataattccttgatgaagctgcagtcggtccattccggcacccacgtcgacgctccgggacatatggtcgacagctacttcgacgctgggttcgatgtcgacacccttgaccttgatgtccttaacgggccagctttattagtggatgtgccgagggatagtaatataacccgctaagtgatggaatcat

SEQ ID NO: 219811 - DNA, 429 bp, Gossypium hirsutum
ccctttcactggccctgtttcagtcaggggccgcatcttagctggtacttgccatagtgccaagatgatgaggacaatcattgttcgacggaactatcttcattatatcaagaaataccaaaggtacgagaagaggcattcaaacattcctgctcacatttctccatgcttccgtgtgaaggaaggggatcatgtcattattggtcaatgcaggccattgtcaaagactgtgaggttcaatgttttgaaagtgattcctgctgggtcttccggtggtgggaaaaaagctttcactggaatgtaagggcgtgagtgttatttaaaaaaatatatatatgttttggggttttagaaacctatgaagaagacactaagattttgatgaactgactacacatggaattttcaatatatttccaattattatta

SEQ ID NO: 219812 - DNA, 426 bp, Gossypium hirsutum
gaagagactatattcaaaaaggaaaaaaagaagaggaaaatggaggcaccaaagacgattcagcacgaaattggaggagtccagaacgacgccctgcgattcggtctccacggcgttaagagcgacctcgtcggatctcaccctctccaatctgcttacgaatcagcaaagaaaacgcaggaagagatgaagagaaaagttctggccaatacttatgggacagcaatgccactcaaaatggatctcgataggcaaattctctggcggtttcagaggccattgctaccatcttcgatgctagggttggaagcggtgacaggaactttagatgattttggctttgaggattatctgaatgatcctcgagattcggagactgttcggccattggacttgcaccacagcatggaagttcgtctcggcctc

SEQ ID NO: 219813 - DNA, 426 bp, Gossypium hirsutum
aatcatgtctactacagcacttgattctgttggccagcccagtgaatgtttgctgctgaagaatatgtttgatcctgcaactgagacggaaccagattttgatttggatattaaagaggatgtcgaagaagaatgcagcaaatatggcagggtgaagcatatatatgtagacaagaacagcgctggatgcgtctatctgcgatttgactccgcagaagcagcaggtaaagctcaacgtgcaatgcacatgaggtggtttgcaggccgatcaatatcagccttatttatgcaaccccaggagtacgaagcgaggtttaaatgctgaagcagatattggatttgtttgttatgatatgatgtgtgttgatgggtgggtaggtgttacttttgaagacgctttttattgtgctgagtttagaattttat

SEQ ID NO: 219814 - DNA, 415 bp, Gossypium hirsutum
cccacgcgtccgcaaactcagggcagaaaaacatggtgacagcccaaggcaggaccgatcctaaccaaaacacaggcattgtgatccagaaatgtaggataggtgccacctctgatttacagcctgttcgtaaaaacttcccaacatatcttgggaggccctggaaggaatactcgaggactgtggtaatgcaatcaacaatcagtgacgtgattcaacctgctggctggcacgagtggagcgggagtttcgccctgaaaacactgttttatgccgagtaccagaacactggggccggtgcctcaacttctgcgagagtgaaatggggagggtacaaggtgatcactagtgcaagtgaagctcaggcttttactcctggcaggttcattgctggaggaagttggttaagctctac

SEQ ID NO: 219815 - DNA, 299 bp, Gossypium hirsutum
gcgcttccttaccatcaatagccaaccagttgtctatggggagcgctctgattctccatgtgggggttggggaggcccaagagggtacctttaccaaaaggcttacctcgagtatttctgctcactggataaaatatatgtactagtgaaaaagtgcaattccttttcatcattgacctatgttgctgtcaacaaaaaggagaatttgttatcaaacattggcctcacagatgagaatgcagtaacttgtggagtcttccctgctaaagaaataatacaacctactgtgtgggatcctg

SEQ ID NO: 219816 - DNA, 148 bp, Gossypium hirsutum
cacaaatatgacatatcctaatatatagtagtggaggattatgggacaaaaaataaatccacttggtttcagacttggtacaacccaaagtcatcattctctttggtttgcacaaccgaaaaagtattccgagggtctacaagaagat

SEQ ID NO: 219817 - DNA, 425 bp, Gossypium hirsutum
attttctcggtacttgtattcaccgtaatctcccccgccaacggctgccctccgtcggaccgcgctgcgctgctagcattcaaagcagctctccacgagccttacttgggcatcttcaactcatggacgggcaccgactgctgccacaactggtacggcgttagctgcgacccacagtcacatcgagtcgccgacattaatctccgtggtgagtccgaagatcccatctttgagcgagctcaccggaccggttttatgactggttttatctctcccgaaatatgcaagctaactcgcctctctagtcttactatcgctgattggaaagggattacaggcgagattcctaaatgcattaccagtctaccatttcttcgcatccttgatttgatcggtaacaagctttccggagaaaatcctgctga

SEQ ID NO: 219818 - DNA, 430 bp, Gossypium hirsutum
cctcgccccaaaatgaagatttgcatgcttggagatgctcaacacgttgaagaggcagagaagataggtttggattatatggatgtggaagcattgaagaaactaaacaagaataagaagttagttaagaagcttgccaagaagtatcatgcctttctggcttctgaatctgtcatcaagcaaatccctcgtcttttgggtcctggtctcaacaaagcaggtaaattcccaacccttgtcactcaccaggaatccctagagtcgaaggtgaatgaaacaaaggcaatggttaagttccagctgaaaaaggttctatgcatgggagttgctgttgggaatgttgcaatggaggagaagcagatcttccaaaatgtgcaaatgagcgtcaatttccttgtttctttgttgaagaaaaattggcaaaatgtga

SEQ ID NO: 219819 - DNA, 426 bp, Gossypium hirsutum
ccaattcgctgctgcttttagtttccctagaaaatttgcagtttgtttgagttcatcttcaggctccaatggtgtcgtcatctttggcgatgggccttacaatctccttcccgatatcgacgtctcaaagtctctcatgtacaccccactcattctcaatcccgtcagcacctcaagtgcttcctttcaaggtgatccatctgcagactacttcattggagtcaatggcatcaccattaatactaaaccagtgtcattcaacaaaactttgctttccatcaacaaagaaggccaaggcggaaccaagatcagcactgtcactccctacactgtgatgcaaacatcaatcttcagagcagtagttaatgcttttatcaagcaaacttccaaggttgccagggttccagcagtggctcctttcagtgc

SEQ ID NO: 219820 - DNA, 387 bp, Gossypium hirsutum
accgacgcgtccgccttgccccaaaatgaatattttcatgctctgttattctcaccacgttgaagaggcagaggagaggtgttttgataatatggatgcgcaatcatagaacaaactaaacaataataagaagttagttaagaagcttgccaagaagtatcatgcctttctggcttctgaatctgtcatcaagcaaattcctctgtctttgggtcctggtctcaacaaatcaggtaaattcccaacccttgtcactcaccaggaatccctatagtcgaaggtgaatgaaacaaaggcaatggttattttccagctgaaaaaggctctatgcatgtgagatgctgtttgtaatgtatcaatgcatgagaagcctatctttcaaaaatg

SEQ ID NO: 219821 - DNA, 424 bp, Gossypium hirsutum
aaagttgggacttgtttaatccaaacctttttttttgtccgccccctgtacaatttcagcaggtttcttctcgaaagatgggctctacatcatcatatcaaccattctgaactaggacttactggagatgtggaggctcttttctcagccttaccatctgattattgttcaagatggtgatccttccaagaccatcaaggttccggagggcttctactatgagctttacaatatgaacgatatcaacaggattttgggtcctaagtcttcttgtatctctttcaaggatttctgcttgtcgctgctttggttacatggtttccaagaatatgtacatttataccattgatgatgattgcttttgtgctaaagatccggtcggcaaatacattaacgcacttgtacagcacataaagaacctttt

SEQ ID NO: 219822 - DNA, 359 bp, Gossypium hirsutum
gagaggtttatggctgttgaaggggagaaattgttgaaacatgtgttttggtcgaacggaccggaaacggagcatccgacggcggagaataaacactgtgccgctaaggaatttgtggtgttgctttctaggttggttgtggaggaacttttccgacgttacgatacgtttgagattgaatttgccacatcgacgttgggggccgccattaccataaagtcgttaaataaaacaagcttttaagtacactcgcatttatcgcaatgcaagggctttgtcaaatgtgtcatgttgtttcttgaatcaataatgtattataatttcgaaaaagaatcacagtaaaaggattaattattaac

SEQ ID NO: 219823 - DNA, 427 bp, Gossypium hirsutum
gccgagatcaatcccttctcgttcctcagccgaacgccgttcgatcaccggctcctgagatcgaacagtttagattctttttcataacgactcgagccatagccgagtcgaggaggttaattgagtgtggtaacgacttgacaagtgcacaccatctgttggcttcggctagagcattgttaatgcagtcgaattcgttgacggtggcggagtacgtgcgagggttagaagccgagctgacggaattgcagcggatgaaacaacagatggtggaaatccaacggcggcgagtgaacgagagggaacgagaaagggaggcgattatggtggtgatggatgagaatggggagccactaacaccgtcatcggcttggagaacggctgagaagttggctaaagtggccatggtgaagaataaagtcagtga

SEQ ID NO: 219824 - DNA, 333 bp, Gossypium hirsutum
gttatttattactttctggcctttccctttttgacagcatgaaactggatccttatttgtattatatatatatatgtgcgtgtatgcaaataagatgtgtattttccctttcaagttttgggtgggaaaaaaaatgatattttcaacttatataaaaaaaagaaaattcttagaaacgaaaaagacaatcacaatttacgaacagctgcaagattaacttgctatgaaatatggattgagttcaatcagaaaggatagttgaagcataattttcgaagcaacgcaaacgggggggagcggggaataagggaccccaagtggattatcgagatt

SEQ ID NO: 219825 - DNA, 388 bp, Gossypium hirsutum
aaatgaaagtgtggagatagcggtattcttgtcataaagtcaccacttcatgcattggggggaagctttgataaaagatgctaaactagtagtttcaactgaaagcatcaaatatggtctgaacattttgcaaggcattcaaagcgaaagcaaaagcttgaagaaatcacttaaggatgtggtcactgagaatgaattcgaaaagaaacttcttgcggatgttattcccccaagtgatattggggttagctttgatgatattggagcccttgagaatgtcaaatacaccttaaaggaattggtgatgcttccccttcaaaggcctgaattgttttgcaagggacagttgacaaagtcttgcaaaggaatattgatatttgggccttct

SEQ ID NO: 219826 - DNA, 410 bp, Gossypium hirsutum
ggggattctggtaaaggaggggaccctactctatgggcagatcttctgaagtattttggtgaacttggggaagattgctctaaagaagtgaaagaagtattgacatatattgagagggatgacatcttgcctcccattattgttctccagacactttccaggaacccatgtctcacattatctgttattaaggattacattgcccgaaaacttgaacaagagtcaaagctgattgaagaggacagacgagctatagagaagtatcaggaagacacaatggcaatgagaaaagaaattcaggaccttaagacaaacgccaggatatttcagctgagcaagtgcactgcttgcacttttacccttgacctacctgctgtgcacttcatgtgtatgcactcatttcatcagcg

SEQ ID NO: 219827 - DNA, 404 bp, Gossypium hirsutum
ggaaaaactattggaagctttcttcctaaagattctcctctccgtcaggatcctgcctactatgttcttaaggaagatacttccccctgcatttttggttcaattgagaagcagaggtggtcctatgcatgtgctaagcagttgattgagaggcttatttatgctgaaggggcagagaatggcctcgagttcactattgtgaggccttttaactggattggacccaggatggatttcattcctggcattgatggtcctagtgagggagttcccagagttcttgcatgctttagtaataatctcctacgtcgtgaaccacttaagcttgtggatggtggcgaatctcagagaacttttatatacataaaggatgctattgaagctgttctcttgatgattgaaaa

SEQ ID NO: 219828 - DNA, 421 bp, Gossypium hirsutum
cccgacgattacgcaccgggaccgggggatgtcgcgttgaaagaggtcaccgtggtcaaagattttgacttggccggaaattcttccctcggaatcgccgtcgacaggctcagaaaccggctgcttgtggttgtcgccgacttgctcggcaaccgatacagcggtctcgcggcttatgatttgtcatcgtggaagcggctatttctaacccggctcagtggccctagcgatgaaaaatccttcgccgatgacgtcgcaatagatgccgatggtaatgcgtatgtcaccgatgctaaagccagcaaaatctggaaagtcggtgcccatggcgagttattgtctatcataagaaacccactcttcactccaagacagtggtacaaaaccttggtcgcattgaacggaatcgtttaccaccccg

SEQ ID NO: 219829 - DNA, 409 bp, Gossypium hirsutum
gcgtccgcccgacgattacgcaccgggaccgggggatttttcgttgaaagaggtcaccgtggtcaaggaggtttacttggccggaaattcttccctcggaatcgccgtcgacaggctcataaaccggctgcttgtggttgtcgccgacttgctcggcaaccgatacagcggtctcgcggcttatgatttgtcatcgtggaagcggctatttctaacccggctcagtggccctagcgatgaaaaatccttcgccgatgacgtcgcaatagatgccgatggtaatgcgtatgtcaccgatgctaaagccagcaaaatctggaaagtctgtgcccatggcgagttattgtctatcataagaaacccactcttcactccaagacagtggtacaaaaccttggtcgcattgaac

SEQ ID NO: 219830 - DNA, 423 bp, Gossypium hirsutum
  unsure (1)..(423): unsure at all n locations
gccattataccagaggccattcatgaagggtaaattgtacattcagttcactgttgaattccctgattcccttagccctgatcaggttaaggcacttgaggccatcctgcctccaaaaccaacctctcagttgagtgatatggagctagatgagtgtgaggagaccacgctctatgatgtgaacattgaagaggagatgaggaggaagcagcagcaggcagcgcaggaagcttatgaggaagatgaagatatgcatggcggtgcccagagggtgcagtgtgcccagcaatgatgatgaagcaaaaaagaagatatatggtttcaaaagtattctcgaggatacagaaagctggtttctctagtaatgtagagtggcaaagcatgtcttgctcangtggtggatgagcggtgttattattgtta

SEQ ID NO: 219831 - DNA, 424 bp, Gossypium hirsutum
ggaacaacatgcaatacgtgacgacggctgcattccttctcaccatctactcagaattcctccaagatttgaaccaaaacctccgttgtcctgccggaacagtggatcatgaagagatcctcagttttgccaaatctcaagttgattacatactaggttcaaatcccatgaacatgagttatttagtgggttatggatcaaaataccccaccaaggtgcaccatagaggggcctcaatcgtgtcatacagggagaataaagggttcattgggtgcactcaaggttatgaccattggtataatcgagccgaagtgaatcctaatgtgttggttggggcggtggtcgggggacccgattccgaagataatttttgggaccaaagagataattacatgcaaaccgaggcttgcacgtataatacagc

SEQ ID NO: 219832 - DNA, 270 bp, Gossypium hirsutum
cccagccgcctgcctgcggcgtgctacctcatatatagtgtatcctgaaaccaatatacaggccactggccgacaacgtacagactgggaaaaccgagaaccctcccaactcactactcaatcagcacataccacattcgccagttggcagctgacctaataggcacgaagcgatcacccatcgcaacagctaaccagtctgcatggtgaatgggaaacgccacgcaccctgtcattaagcactaagcgcgtggggtgtactcgcaacgc

SEQ ID NO: 219833 - DNA, 416 bp, Gossypium hirsutum
ccacaacattgggaacctgtctgccaacaaatatagcggcaacaaccatagcaacaaagatattaataataacagcaacaccaactccaacaacaacgagaacagcaatgcaaacaatgctgtcgataaaaggttcaagactttgcctgccaccgagacactccctagaaatgaggtgcttggtggatacatctttgtttgcaataatgacacaatgcaagaagatcttaagcgtcagctatttggtttaccgccaagatacagggactctgttcgggcaatcacacctggcctgccattgtttctctataactacaccactcatcaattgcatggtatttttgaggcagcaagttttgggggttctaacattgatccaactgcttgggaagacaaaaagtgtaaaggcgagtcga

SEQ ID NO: 219834 - DNA, 429 bp, Gossypium hirsutum
gagactaataagcaaataggagccttaattatggaaccaattatccatgtgcattcctccagcaccttggataattggttccataattaaggtgctggaggaatgcacatggttgatccacttttccagcggatgcttgtcaatgagtgtcggcactgtagaattccagtaatctttgatgaggtttttactggtttctggcgtttaggagtagagtctgcagcagaactgcttggttgtgtaccagatatagcttgctttgcaaagctaatgactggagggatcatcccattagctgccacaatggcaaccgatgctatatttgattcattcaccggagattcaaagcttaaagctcttttgcacggacattcatattctgcacatgcaatggggtgcacagcagctgccaaatctattaaatggttc

SEQ ID NO: 219835 - DNA, 426 bp, Gossypium hirsutum
gacttttcgtcttctaaaactcgcacccaaaaaatttgcagctttggtcaacctaacgatgtcgtacgacgacgtggagatagaggacatgcagtggaacgaggagttacaggcatacacatatccatgcccttgcggcgatctttttcagataacaaaagaagagctcaagatcggcgaggaaatcgctcgttgccccagctgttctctctacatcaccgtcatctacaacgccgaggatttcgccgacagaaaatcaaacaacaatcttgagcctccaaaacgacaagccgtcgccgttgcttgagacctttaagatggcaaatggcaaacattacacttgagtataactggttttatagcagattgcaagaatgttttgttggagattagctccttatgtgtgctgtggtgctagcattggtg

SEQ ID NO: 219836 - DNA, 427 bp, Gossypium hirsutum
gtgaccagggccatatgtttgggtatgccactgatgagaccccagaactcatgccccttagccatgtccttgcaactaagcttggggctcgtctaactgaggttaggaagaatggcacctgcccctggctaaggcctgatggtaaaacccaggttactgttgagtactacaatgacaagggtgccatggttcccgttcgtgttcacactgtcctcatttccacccaacatgacgaaactgttacaaatgatgaaattgctgctgacctcaaagagcatgttatcaagcctgtcatccctgaaaagtacctagatgagaaaacaatcttccaccttaacccatctggccgctttgtcattggtggtcctcacggtgatgcaggtctcactggtcgtaagatcattattgacacctatggtggctgggg

SEQ ID NO: 219837 - DNA, 427 bp, Gossypium hirsutum; identical to SEQ ID NO: 197909

SEQ ID NO: 219838 - DNA, 431 bp, Gossypium hirsutum
cctccctttcctccacgcctccatcgcaaagcaaccagccgtcggttgcccaatggtggaaaaccaccgagaaatactaccacctcacctccaagaaatcttccctttccctgtctttgggaaagcagattcttgacgacaagtattcgcttggcaaatcactcaaaaacaaacaaatcgttgagctagcctcaatgggtgaccaaaagaatgctatcaacgttgttttaacagcatctgatgttgctgttgaagggttctgcatgagccgctgtgggactcatggctctgccttgggctccaccgatggtctcgtcaaggccaagaagcactccaagttcgcttacatttgggtgggtaactcccagacccagtgccccggtcaatgtgcctggccgttccaccagccaatctacggaccacatagcgcg

SEQ ID NO: 219839 - DNA, 225 bp, Gossypium hirsutum
ggaaatgctggcggcagagtagcttgcggtattattggtctgcaaggctaaaatccgagccaaatgcgtttgaaggatgcaatgggctttgtgaagtagaaagaacttggttataataataaaaaggttaaaagaatccttagtttgtgtacttttgttgtgtgttggttgtcatgtgtaactcagtgtcctttgaatcttaaaataccttttgttgaatgcttt

SEQ ID NO: 219840 - DNA, 361 bp, Gossypium hirsutum
ggaggaaggaaaggcggcggtccaaagttgtaaccagtttctcgttcagtgaaagccggattacagtttcccgtcggtcgaattggccggtacttgaagaaagggcgatactctcaacgtgtgggaacgggtgctccggtttaccttgctgcagttcttgaatacctagctgctgaggttcttgagttagctggtaatgctgcaagagacaacaagaagaataggatcattccaaggcatgttctattggcagtgaggaacgatgaagaacttgggaagcttttagctggtgtgaccattgctcatggtggtgttttacccaatattaacccatttcttttaccaaagaaaaacgaaaagg

SEQ ID NO: 219841 - DNA, 426 bp, Gossypium hirsutum
gtccgagttcttgagtccgagattcaatttgctgagggtgataactctgagcaggttgtaggaactcctagtggattcccttttgaagtcgaagataaccctgggactcaaactgtaacattgaaaagagaatataatggtgagctcataaaagttgatgttcacatgcttgatcttaacgaagacgagcaagatgaagatgaagttgaagacaaggatggggataataccaatgctagaatcccgttcgttgtcaccgtttcgaagaaagatggtccgagtttggagttcagttgcactgcttttcatgatgggattggaatcgacagtttgagttttagaaatcccaaccctgaggatgatgaacttgcttatgaaagccctgatttcaatgatttggatgagaatttgcaaaagggtttttac

SEQ ID NO: 219842 - DNA, 373 bp, Gossypium hirsutum
agaatgtgggataacactttggagctttcttatacttgcatcttgggaggaaagcggggggtttattaccctgatcaaacacataacactggtgttgttttcaatcacatttatgaactcagaggtcttattgctgatggccagttcctatctttggaatcacttaaccacaatcaaaagctttttgttgattccctggtgaagagagcatatgaaaattggcatcaagttattgaatatgacgacaaggttctcaatacccttagaagtacaaaggttgcaaattctacatcttcacctgttaactattaacatctttctattcataatactattcctcaacttctcaaaagagtatacagcattttattta

SEQ ID NO: 219843 - DNA, 426 bp, Gossypium hirsutum
gaaaccctcggagttgatgcaaatggaaactctcttgatttcacgacaaagttgctgcacttagcgtggcaccccaccgaaaacttgatagcttgtgttgctgctaacagcttgtacatgtactatgcataaaagatggtccaagaagcaatgtatttcctgggttaactttttttttgggagctggtagcaaaaccttctttcactttcctgctgaccatcgcgttaaatgctacatcgactcttaacacttttggtagccctaaaatccatagcacatcctagtatcgaggtcaagaaatatcttagcagggaagaaacatatctttgttctcgggtaggcagctcaattctcttttcccctttcccccctcatctccgaaacccgaaaattttcttttcccttccgtaatcttctttcaaagt

SEQ ID NO: 219844 - DNA, 432 bp, Gossypium hirsutum
caaaaatttccaaatgcagatcctttggctctacgtctactgcaaagattgcttgcctttgatccaaaagaccggccaacagctgaagaggcccttgctgatccttactttaaggggctggcaagagttgagagggagccttcatgtcaaccaattacaaagatggagtttgaatttgagaggcgaagggtcacaaaagatgatatacaagagctaattttccgtgagatactggagtaccatcctcagctgctgaaagatcatatgaatggaactgagaggacaaactttctctatccaagtgcggttgatcaattcaaaaagcagtttgcacatctcgaggaaaatggtggtaaaagtgcaccagttattccacttgaaagaaagcatgtctcccttccgaggtcaacaattgtacattccaataccatt

SEQ ID NO: 219845 - DNA, 431 bp, Gossypium hirsutum
gactaagtgggcgacctgtgaggaggaaatatactcctgcgttcaggaaccctaggtgaccctggctatattacgtcaattagatggggattagggttggaagaaggattgttgatattcaaccaagtgccattggtttcagtccttccactggtgctggcaccattattgatattgggactggatccacccggatagctgaaccaacctatgtctctgtgcgggacgcattccggagacaagtaagggtggcgaacgtgacatctctgggtgggttcgacacatgttactcggtcccaatcaatgcaccgaccataacatttatgttttcgggcatgaacgtgacattgccacaagagaacctactgctccacagcacagcaggcagcatcacatgtctggcgatggcaccggcaccagcgctgaatgtg

SEQ ID NO: 219846 - DNA, 385 bp, Gossypium hirsutum
gggattaccattcttttattttggctgctttcatttatgagcctttgggttttgggactactggtgggtaacatatgcaaatgaaaggaggtgccggttttcttgctcatgttcgcgccaaaacctcttgtggagatggggtcataaaccggggaccgttggcttggggtctttgcttcaagagagaaatgagtcctagccaggattactgtgatgattactacaaatacatgtattcatgtgcccctggagctcaatactacggccgcggtgctttgccaatttactggaactacaactatggagctgctggcgaaggtataaaaagtgatttgttgcaccacccctgatttttttgagcataaccccactattgtctttcaag

SEQ ID NO: 219847 - DNA, 422 bp, Gossypium hirsutum
agaatgtgggagaacacagtggagcatgcttagacttgcatcttgggaggaaagctttatgtttattaccctgatcaaacacataacactggtgttgttttcaatcacatttatgaactcagaggtcttattgctgatggccagttcctatctttggaatcacttaaccacaatcaaaagctttttgttgattccctggtgaagagagcatatgaaaattggcatcaagttattgaatatgacgacaaggttctcaatacccttagaagtacaaaggtagcaaatccgtcagctgcaccggtaaacgataacaactacgatgcagattactatgccacaactgctcaaaagagtagacagcagtatatcaccttagagccaagtccacaatgccataataataatacccaccaaacagtcca

SEQ ID NO: 219848 - DNA, 429 bp, Gossypium hirsutum
gcttgttccagaagatcagttttttgctcaacatccgggtcctgcttgcattactgtgtctgttcccaaccttgatgaagggaatctcaaaggacaacttcttgagatcacagtgcaggccttatctgaaacagttggcagtttgaaggagaaaattgcaggggagattcagcttcctgcaaataagcagaaattgagtggaaaagctgggtttctgaaggacaatatgacccttgcatattacaatgttggagcaggagaaacgcttgctctttcattgagggaacgtggtgggaggaagaggtgatgagttttttgaacgaggctatccaagcttccagtgggaacttaaaaattatcacattttcacttcagaacagccatttgtttggagtcatggtcaaggatgttatgtgaaacctgataagc

SEQ ID NO: 219849 - DNA, 420 bp, Gossypium hirsutum
ctcgtctctggcgtccagattgctatctccgcatcgaacacagggggtgcttgggataatgctaagaagtatatcgaggccggtgcttcagaacatgcaagaactcttggtcccaaaggatcagaaccacataaggcagctgttatcggtgacaccattggggaccctctaaaggatacatccggaccatcactgaacatcctcatcaagctaatggctgttgaatcacttgtctttgcacccttcttcgctacacacggtggactgcttttcaagatattttaagtaaaagaacacaaaaacggttacagtctctgccggttctcttccaaatctccttttttttttctcgagtatagttttagtgtgtagcacattttgacaatatcctcttaaaggttgaatctatagcgaaaattt

SEQ ID NO: 219850 - DNA, 434 bp, Gossypium hirsutum
tgctgctcagatagaacaataccagaaagccattgagatatatgaagagatagcgcggcaatcacttaccaataacttgctgaagtatggagttaaaggtcatcttcttaatgctggcatttgtcaactctgcaaaggtgatgttgtagcaatcaccaatgcgttagagcgatatcaggatctggatccaactttttctggaacgcgagagtataaattattggctgacattgcttctgctattgacgaggaagatgtctcaaagtttacggaagttgtcaaggaatttgatagcatgaccccattggattcttggaagacaacccttttacttcgagtgaaagaaaagctgaaagctaaagagctggaagaagatgatcttacctaaaagagctttgcgtcgtgagagttgcctttgtttctcagattttcat

SEQ ID NO: 219851 - DNA, 427 bp, Gossypium hirsutum
atcctatgtcgctcgtgaaatgacacgccgttacatgatggacatgattacctatgctgacaccgatgttatcatcgtcggcgccggctctgcaggtctctcctgtgcttacgagattagcaaaaaccccaacatccgtgtcgccataattgaacagtctgttagccccggtggaggcgcatggctcggtggccaactcttttcagccatggttgtgcggaaaccggctcacagattccttgacgagctcggcatccagtacgatgaacaagaagactacgtagtgatcaagcacgcagctctgttcacctcaacaatcatgagcaagctcttggcaaggcctaacgtgaagctattcaatgctgtggctgctgaggatttgatcgtgaaggaaaacagagtcgccggtgtggttacaaactgggct

SEQ ID NO: 219852 - DNA, 428 bp, Gossypium hirsutum
agcaagcttagcgaagtccgtacgagctcatggatgttcattcctaagggaaaggatcctattgttgctggtatagaggacaagatttcaacatggacctttctgcccaaagaaaatggggaagacatacaagttttgagatacgagcatgggcaaaaatatgatcctcactatgattattttactgacaaggtgaatatcgctagaggtggacatcgcattgcaactgtactgatatatcttacaaatgtgaccaaaggtggtgaaactgtattccctcaagccgaggaaccttcacgtcgtagaactcctccaaaagatgatctatcggaatgtgcaaagaagggaattgctgtgaaaccacgaagaggtgatgcacttctcttcttcagtctcttcccaactgctattcctgaccagaacagtct

SEQ ID NO: 219853 - DNA, 425 bp, Gossypium hirsutum
gtccaactgcaatggatgtagatggttataatcctggtcttcaggattttcaggcagtgctaactacatttacacgatacaggtacataacttctccactggttttgcctttgctaaaagtaatattttctttcttcaggaaattttgtctatctaactccaactgttctttccttctatgtaacatttgtaattgttgttcacattagtcggttgagggtcattgctgaacttaggcatggtgatattttccactctgctaacattgtctcaagtatagaatttgatcgtgatgatgagatgtttgctattgctggagtgtcaaggcgcatcaaggtttttgagttttctgcgattgtgaatgaaccagcagatgtgcattgtcctattgttgaaatgtccaccagatctaagcttaattgctt

SEQ ID NO: 219854 - DNA, 301 bp, Gossypium hirsutum
tcgccccagagtctatttcctcatctacccccaaatatcctcacattatgtctctggtgggcggcgaagattttcagcacattttacgtgtgctgaacaccaacgttgatgggaagcagaagattattgttgcattgacctccatcaagggtatcggaaggcgattcgctaacatcgttttgcaagaaggctgatgtcgacatgaacaagagggctggtgaattgactgctcaggagttggacaatcttatgaccattgttgctaacccccaggcagattaaaattccctggctgtttttt

SEQ ID NO: 219855 - DNA, 402 bp, Gossypium hirsutum
ctcgagtgtacacccaagcttgcgagatcaatggctactacatccccaaaaacaccaggctgagtgtcaacatttgggccattggccgagaccctgacgtgtggggcaacccactggatttcacccctgaaaggtttctgagtgggagatttgccaaaatcgacccacgagggaacgactttgagttgattccatttggtgctgggcgaagaatctgtgctggaaccaggatggggatcgtgctggttgagtacatcttaggcactttgttacactctttcgactggatgcttcctcccggtactggggaattaaacatggatgaggcctttgggcttgctttgcaaaaggccgtgcctctttttgccatggtttcgccacgccttggaccaactgcttatg

SEQ ID NO: 219856 - DNA, 334 bp, Gossypium hirsutum
  unsure (1)..(334): unsure at all n locations
gaaagggactgcatatgagaacatgaatcaagtggaagggcaagaaaatctgttcggtacccttctgtctgaaaacgtcattggcgtcatccatgatcattacatcacattctacttggatatggacatagacggctctgataattcctttgttaacgtaaatatcaaaaggcaagaaacttctccaggagagtcaccaaggaaaagctatctaaaagctgttagaaatgtggctaanacagagaaagatgctcaaattcaacttaaactctatgacccatcggagttccatgttatcaatccaactaaaaagacaggggttgggaaccctgtc

SEQ ID NO: 219857 - DNA, 380 bp, Gossypium hirsutum
cccagtccttgactgccatacctcccacattgctgtgaaattttccgaattgctgaccaagatcgacaggcgatctggaaaggagcttgagaaggagcccaagttcttgaagaatggtgatgcagggatgataaagatggttcccaccaagcctatggttgtggagactttctctgagtacccaccacttggacggtttgctgtcagggacatgcgtcagactgtggctgttggtgtcatcaagagcgttgagaagaaggacccaacgggtgctaaggtcaccaaatctgctgccaagaaagaatgagattgcatttgatagtatcagagccctttgaattttggttatcttttggagtttgggaccttgcagttttttt

SEQ ID NO: 219858 - DNA, 426 bp, Gossypium hirsutum
caagtagccagaatgccttcacaggactcgctggcactggattttctacttcttcattctcctttggatctgcaacaaaggatggtcctacaggtgcttttggttttggtctttcaacaaatggaaattcatccctcttcaacacatcagggacttcaattgtttctaagagtgagggaagtggttttcctgccttgcaggaggttccagttgagacaggagaagagaacgagaaagttgtattctctgctgattctgtgctgtttgaattcatagatgggggttggaaagagcgtgggaagggagaacttaaggtgaatgtctcaacagctggggctgaaagagccaggttgctcatgagagctagaggaaattacaagttgattctgaacgcaagtctttacccagatatgaagctgacaaata

SEQ ID NO: 219859 - DNA, 369 bp, Gossypium hirsutum
gatttgtctgaccgtgcatttcaagccactttgggcaaaaaattgtcctaggtttggaatagcacatgcactgtgtttgggacttgccccatggcttgctgcagagattccgattctcgtcgattccgggatgatcaagcataaggatgatgcagccacatcaaatgagtcttagcatgccgatgctgggatgatcaagtataggattatgcagcctcgtcgaacaagtcttagcatattggatgttaaaggcgaagcttgagtttttcctaaataagcgcacgggcaataattatacaatttcattgacaaattaatctgtcttgtgatgaattgataatgtcgaagcctcttgatttcttacttttg

SEQ ID NO: 219860 - DNA, 272 bp, Gossypium hirsutum
gccatttccttcactcagcagcggctccccccccccccgggccttttcaccttaaccctcaaccgcaaaaaaaaaaaaaaaagagtagcagttccggtttcaccagctatgggtattgacttggtcgctggcggcaagagcaagaagacgaagagaactgctcccaagtctgatgatatatatctcaagctccttgtcaagcttttaccgctttctggtaagaaggactggcagcaaaatcaatgcggtgatcttgaagcggctttttatga

SEQ ID NO: 219861 - DNA, 382 bp, Gossypium hirsutum
cgaaaggtgatgtttatagttacggtgtagtcttactcgagttgctaacaggtagaaggcctacagattctgttgattttggtgataacaaccttgcggggtgggtgaaacaacatgcaaaacttaaaataagtgacatcttcgatctggagctcatgaaagaggaaccgagtctagagattgaacttttacaacacttaaatgtagcctgtgcttgcttggatgaccgaccatggagacgacccacaatgattcaagtcatggcaaagttcaaggaaatacaagccgggtcgggactcgagtcccaatcaaacattgtcactgatgatggaggtttcagcgcactccaaatggtatacatgaaccataaaagaaatccccg

SEQ ID NO: 219862 - DNA, 293 bp, Gossypium hirsutum
ctcaggttgcatatgagaggaagaagcagctgaacaagcttagggtaaaagccgagaagactgcagaagagaaactcggctctcaactcgacatccttgccccagttaagtactgaatttctagtggctagctagtttcatagaattttgttaaaggttattggtttcactatttagttccttttgagatgtggaggttaaaatttttgttgaatcttgggttgtccctttttcttaatgaactttttggtgtaggatcattcaaatataattcatatatgccttttataatt

SEQ ID NO: 219863 - DNA, 410 bp, Gossypium hirsutum
  unsure (1)..(410): unsure at all n locations
gttcctccaatttcagaacctcaatggcaacttacaagattaagcttgtaggaccaaaaggtgaggtgaacgagntngagtcccctgatgataagtacattctagatgcagctgaggaagcaggggttgagctaccatattcttgcagagctggagcttgctgcacatgtgccgggaagatgatttcaggttctgtggatcaatctgatggttctttccttgacgataaacaaatggaggaaggttatctgctgacttgtgttgcgtacccaacttcagactgtgaaattcacacccaaaaggaaaccgatcttttttaagtagtttgtggtctgaaatgattacggctttagttgttggctatggacttatttaaacttgcttccaattgagatataaagctttttatt

SEQ ID NO: 219864 - DNA, 404 bp, Gossypium hirsutum
attttagctgaggagaaacaccttcccatgtatcaagaaatggcatccaagcccaatgtagagtatattgctggaggtgctactcaaaattcaatcaaagttgcacagtggatgcttcaaattcctggtgcaactggttacattggctgcattgggaaggacaagtttggggaggaaatgaagaagaactcaaaagctgctggtgttaatgttcaatatctcgaggatgaaactgcaccaacaggaacttgtgctgtttgtgttgttggtggtgaaaggtcactcattgcaaatctatcagctgctaactgctataagtctgagcatttgaagaagcctgagaattgggcgttggttgagaaggccaaatacttctatattgctggatttttccttactgtatc

SEQ ID NO: 219865 - DNA, 354 bp, Gossypium hirsutum
cccaaacccaacgctgaagatgaatctgcaacagaccgtgaagagtcagatgttagtggttctgatggagatgacacgtcttggattacatggatttgcaacctacatggaaatgaattctttcgtgaagctgatgatgactacattcaacatgattttaacactttgtgggctaagcagacaagttacttattatgattacgcacttgatttgattttggatgtcgaatcatcccatggtaagctgacagatagtttttcctgatgataagtcgaaaggatgtgcgaaattttgtaccatcttcttcttagtggagccgtatgatccattctgcttttagtttttggagactt

SEQ ID NO: 219866 - DNA, 434 bp, Gossypium hirsutum
ggttaatatcgaagagacaaaggcagaggaagaaggtgaggagaagaagaagcatggtctcctggagaagcctcaccgatcagatagcagcagctccagctcttcaaccgacgaggaagaaggtgaaggagaagagaagaagaagaagaaaaagaaggagaagaagggactggaagaaaagattgaagagaaattagaaggggaaaagaaagaagaggacacctcagttccagtagagaagtgcgatgagccagtagtccagccagagacgccagagaagaaaggtttcctcgagaagatcaaggagaaactccctggacaacacaagaaagctgaagaggccagtagcccggctccagccccagcagctgagccccatcacgaagaggagtcaaaggaaaagaagggaattttggagaaaatcaaggagaagc

SEQ ID NO: 219867 - DNA, 438 bp, Gossypium hirsutum
  unsure (1)..(438): unsure at all n locations
cttgctgcgacgggatccggtccctgaacaacatggctcgaaccacccctgaccgccaaaccgtgtgtgggtgcttgcaagctgccgctaaggctgtcaaaattaaaggcaacttggctgagaccctcccagccaaatgtagtgtcaacatcccttacaagatcagcacttncactaactgcaaaaatgtgaagtgagatggatgaagagagggttttgcagcagcttgcaggagataaaatatatgattaaaaagaagaagaagaagaatgaataaggattttgggatggaattttcaaatccaaaattagtctccactttagtgtagtgaggcttngtttattttggtttatgttttggnccctgcatggtggctctaattttatattctctatgtattggctattttaatgttttaaatgaattaaagtttatgc

SEQ ID NO: 219868 - DNA, 383 bp, Gossypium hirsutum
gacaactactacaggccggatttaacaaaagctgccctagcaaggttgagtgctgtgaaccgaagtctgaaggttgccaaatccggtgtcaagaagaggaacagacaagcatcgaggatccatggcaggaagtgagcttttttacacaacttcacaatcattttgctgcaattttcgttgtttccgatactttttcatccttgtttcgtggttttagcttgttggtgtattttataactagattttgaaacaaaaaaaagtgagaatcatggtggtttcgagttttgtttttcggactataatatcctaagtttgataattttgccctttaatttcctctttgactttgttgagaacattaagctcttttttgtttttttgcc

SEQ ID NO: 219869 - DNA, 426 bp, Gossypium hirsutum
atctgaacagttcaaccatacaaacagcttaaaattgattgctagagctcatcaactggttatggatggatttaactgggcgcatgaacaaaaggtagttactatatttagcgccccaaattattgttatcgctgtgggaacatggcatcaatcttggaagttgatgattgcaagaaccagtcattcatccagtttgagccagctccaaggagaggagaacctgatgttacccgtagaacgcctgattacttcctctgaagctgctacattccataactgattcaagatactccgcttttcggcctctcctctccccctttacattgtcaggtagttgccgatcctttacagaaatcttttgcatctactgttcttttggtgatttggggggggggtaccaaaagcatacatggggaatggttggg

SEQ ID NO: 219870 - DNA, 424 bp, Gossypium hirsutum
ttttgcatctttgcttcagttgctcccccaattattttcaagggcaaatcccttgcaggtattttgcctgcgattgatctcattggccacaatgctttggtggggatattctacttcattggttttggatttttctgcattgaatcattgctcagtgtctgggttattcagcaagtttacatgtatttcagaggtagcggtaaagctgacgagatgaagcgtgaggcggcaagaagaaccgtggctgcagcactctgataatgataaggaggccgtagcagaagatggtatttgcttgtattggacttagatcatgtcggataagataccatgtactcaaattgcatcttcttcccatacccttcctggctggcttacttgcctattcattttattgatatgttgtttaaatatatacacatac

SEQ ID NO: 219871 - DNA, 377 bp, Gossypium hirsutum
ggctcaacagatcgagaaggtgatgcgggcacttggtgattaccttggtgtgaaggtccacgcttgtgttggtgggactagtgttcgcgaggatcagcgaattcttcaaagtggtgttcatgttgttgtcggtactcccggtcgtgtcttcgatatgttgagaaggcaatcactccgtccagattatattaagatgtttgtcttggatgaggctgatgaaatgctctcccgtggttttaaggatcagatctatgacatcttccagcttcttccgggcaagattcaggttggggtattttctgctacaatgccacccgaagccctagagatcactcggaagttcatgaataaacctgtgagaatttggttaagcgcga

SEQ ID NO: 219872 - DNA, 408 bp, Gossypium hirsutum
ctttgctttacaacctcaaggagagaatcccagatgaggattatatctgtaatcttgaggaagctgagatggtaaggcctggagaacatgtcactattctaacctattcaaggatgaggtatcatgtgatgcaggcagcaaaaactttggtgaacaagggttatgatcctgaagtaattgatattaggtcattgaaaccatttgatctttacaccattggtaactcagttaagaagacacatcgtgttctcattgtggaggagtgcatgcggacaggtggtattggtgctagcttgaccgctgccatcactgagaatttccatgattatttggatgctccaatcatctgcttatcttcacaggatgtgcctacaccatatgctggaagattggaggaatggactgtag

SEQ ID NO: 219873 - DNA, 435 bp, Gossypium hirsutum
agaagatgaagatgaagataaagttcatggtttcaaatcacttaccacatcaagaattgttccaaggtttacaagaccagtatctgacatgatagatggcttatgggtttcttgtgatcgggcactcatgcgacaacctgccttacggcttgccattatggtctattgggctatattgcattcactgttagcagcttttgtattttgacgagccaaacctggtagcggccattttctctgatggttatctactagtttgtgtcgaaaggagtggcaaccatgaatgcgtacttggtccataatcattttattattatcattattcttttatttttcctttgtaaaacatggtccattaattgattatttcgataaaccaggcaactttgatttgccctttttatttgtatgcatctcaagttgctcggttatgtc

SEQ ID NO: 219874 - DNA, 301 bp, Gossypium hirsutum
caaaaagcttgtgtcatctaccaaggaaggtcttaaacttgatgagagtgaggatgaaaagacgagcattggaagctttgaaggaaaagtttgagggtctatgcaaggtcatcaaggatgtgctatgtgacaaggttgaaaaggttgtggtttctgatcgtgtggttgactcaccttgctgtttagtgactggcgagtatggttggactgcaaacatggagagaatcatgaaggcccaggctttgagggataacatcatggatggttacatgtcaagcaagaagacaatggagatcaaccc

SEQ ID NO: 219875 - DNA, 384 bp, Gossypium hirsutum
gaaacttccagagatccgcaagtggctttttggtcaggttgctgcttgaaggctgaagatggtattgtttttctcagcagcttttgtcatcggccatagagcatagtgattaagttatttgttccatgtatttgctttctcatattggtctccccgaatagtttatttgtttgataaaagtcagtgaaactcttgttcgattggtccgtatatcattttctgggattgtgaaagtactgtttttaaataatgaataaaatttgaaatgtttgcttattcacttttcggtaagcaagttttaaaaataaaaattataaatgtgttttaattataaagttttaaaaatgtgtttattggctttagcgttaaattttttttatccat

SEQ ID NO: 219876 - DNA, 435 bp, Gossypium hirsutum
taataggagtgatgcacatttatcagtggaagaagaggccaaattggaggagcagaccagggattactttgaccacacagcacctaaacgtcacactaagcctcaacgaagcgactattcttctaactacgtcgacgctcttgccgccgctgattccggtatccctgaatacctcgagtttcaacgtctagagaatgatccccagaaaatagtttacaatggaagtgaagtgagagaagaatttatggagactgaatattataaggatctcaattgcgtcgacaaacaccaccacacgacaggaacaggtttcataaaggtagagaacgacaatggcagaaactttaagttggaaccagattcaaacaccagctgccatgcctttttgtagggaaattcagcaactaacgactggattccagctgctttggatgc

SEQ ID NO: 219877 - DNA, 439 bp, Gossypium hirsutum
aggtaagaagaagaagataaagaagaaatggcggtgccgcttctaagtaagaagatcgtgaagaagagggtcacgaagtttaagagaccccagagcgatcgcaaaatctccgtcaagacaaactggcgaagaccgaagggtattgattctcgtgtaagaagaaagttcaagggctatactttgatgcctaatatcggctatggttcagacaagaagacacgtcactatctacctaatggctttaagaaatttgttgtacacaatgttggagagctcaaactgttgatgatgcacaacaggacatactgtgcagagattgcacatgatgtttcaacaaagaagagaaaagagattgttgaacgagcagcccaacttgatgttctggttactaacaagcttgcgaggttgctcaaccaagaggatgaatgaacattgaact

SEQ ID NO: 219878 - DNA, 436 bp, Gossypium hirsutum
ccacaacagctgcggatccattgcttccctgtttcctgtaagcaaaaaagagagaaaatgaaggttgttgctgcttatttgttggctgtacttggaggcaatgcctctccttcagctgatgatcttaagaacattcttgccagcgttggagctgacgctgaagaggaaaggctccagcttcttttatctgaagtgaagggaaaagatataaccgagcttattgcatctgggagggaaaagcttgcctctgttcccagcggtggtggtgttgctgtggcggcatctgcacccggagccgccgccgccgccgctcctgctgcagctgagactaagaaagaagagaaagttgaagagaaagaggaatccgatgatgatatgggcttcagtcttttcgactaaactaccacgcaccggcagcaacctatcaatgaaatac

SEQ ID NO: 219879 - DNA, 278 bp, Gossypium hirsutum
atcatcatccctctcgcctcagccgctcctagcgctgttgaggccttcacgatggctagggcatacgatgaggaaaggggggatggtgtctctaccctggttgtgggtagggctaacactttttacgctgctaacgctaccgtgtttgcctctgatggtaatgttgctttcgacggtggccattctcgaacaaccattctcgcactattttccctagccacaccaaaaggcaatttgactgacgagcgacttaatgcatctaacatcagcgaacacac

SEQ ID NO: 219880 - DNA, 395 bp, Gossypium hirsutum
ggtgatccgaccctctcatcatcacattcactttatttaggcttcctattttttttctttgttcttttttttgtataagtctcaaagaaacttagaccccttcgtattctccgctcataccccaaatccccataccccttctgttcaacagcaaagatggcaactgtgcgggttacctcctctagtatcgttcaagcttcaatcccgaaccgattcacgagtgccattgtcaaggccccgacttctcttggatcttttaagaacatctccaaatcttttggcttgaaatgttcctccaatcacaaaacattaatggcagcttataagattaagcttgtaggaccgaatggtgaggtgagcgagtttcaaccccttgcgataatacattttaaatg

SEQ ID NO: 219881 - DNA, 346 bp, Gossypium hirsutum
gtgctttacaaaacggaatgtacaataaggatgctgctgaccaaaaaaataacagtctgagccgtggaaactctactggcaacaaatatgtgagcaacactcagagcaacagagatgtgaacaatgacagcagcgccaagaataacagcacaggcgatgagaacagtaatgcaaacgatgccgttgacaaaagattcaagactttgcctgcaactgatacactcgcaataaatgaagagcttggaagggacatatgtgacagtaacaatgatacgacgcaggaagatataaagcgccagctattaggcttaccaccaagatacagggactctgatcgggcaattac

SEQ ID NO: 219882 - DNA, 386 bp, Gossypium hirsutum
gttctttccaaaatggtatgtacaatatgaatgctgtttaccagaaaaataacagtattagccttggaaaccctactggcaacaaatatatgagcaacaatcagagcaacaaagatgtcaacaataacagcagcaccaagaataacaacaatggcaatgagaacagtaatgcaaacaatgccgttgacaaaagattcaagactttgcctgcaactgagacactcccaagaaatgaggtgcttggagggtacatctttgtttgtaacaatgatacgatgcaggaagatttaaagcgccagctatttggcttaccaccaagatacagggactctgttcgggcaattacacctggcttgcctctatttctctataactacactactcat

SEQ ID NO: 219883 - DNA, 351 bp, Gossypium hirsutum
gttcaagttaataaatgttaagctggtaataggtttttgtaaatgtaaccccgaaatagctcttatttcttccttatgctagtgaaatttctagtttattttctagagtgtgtgtttttaattttagtagttgcttcattaacagggttatgatatcagtttccttatcacgaactaccactgtgaagagctgcagaaacagaagctcattgattttattgtgcaattcatggaggtaagaacattcttaaccgtatctgtttatctttgtcttctaattatatatagtggatccctatttaatcttaagtaatcaactataaaaaatattgataaacccatgatttcttt

SEQ ID NO: 219884 - DNA, 156 bp, Gossypium hirsutum
ctccattttattttcccattgaggccgaacctaaacctgtgctcgagagatagctgtccatacactgataagggatgtatggattatcgagaagagaggagccgtggtggtcccccccggaccgcccagatcccacgagtgaatagaaagtcgcga

SEQ ID NO: 219885 - DNA, 413 bp, Gossypium hirsutum
cttttatcgattagtgtcgcaaaaatttgaagacccggcagaaggagaagaagctctcgtggcaaaattcaaaaagctcaacgaggatctgactgctggtttccgtgcactggaggatgagactagatgaacggaagtttaaagatttgactttcctggccccaatgtttaaattgtccggctaaaatcactaggctctcgctttctttgtttccgtgtccttgtttatctgggtagatgcatgttgtgcacgcgttttagcttctgttggcctgaattctagagtgctctagctttgaattcgttattatgtattattattgtttgcacttttcctttttgacagcaggagattggaaccgtaatttattatttcatgtactttttgcaataaaaattgtcatttattattt

SEQ ID NO: 219886 - DNA, 347 bp, Gossypium hirsutum
cttgaactctcctgatcgtgcttgcactctcgcaaaacaggcttttgatgaagccattgccgagcttgatacacttggagaggattcatacaaggacagcactttgataatgcaacttcttcgtgataacctcactttgtggacctcagacatgcaggatgatgggacagatgaaatcaaagaagctcccaaacaagaggatgagaaacaaccgtgaagtctctaatcttcatggtagtgttttacttctctggttgtttttgtatggagaagtcgcttggtcctactatcgtcttcaattacttgtttttagtagatcaggcctcaatttatgaaccttggaagta

SEQ ID NO: 219887 - DNA, 353 bp, Gossypium hirsutum
gtgggacatgattaggggaaaaggaacaggttactctatgaaaggtcacatcaacgttgacactccgtttggagctatgaaattacccatcagcaaggagggtggcacaacccgccttaagaagaatagggaagacggtggtgatgatgatgatgatgatgaggtatgttaattactcctgacttgtcctttttgaagtttgaaacttgctatacgaatagaatcctatgttttcttatttcattcttgttttgggttaggatgttactcttatgttcgatttgattcttcttttaaatacaagaggatggtctttaaaaaaaaaaaatatatttaatatatttattattatt

SEQ ID NO: 219888 - DNA, 365 bp, Gossypium hirsutum
  unsure (1)..(365): unsure at all n locations
gcaaccactactcgtagaagatcggaggtctcgagctcaacattcaatttcactcaatttcagtggcatcttagtcaaattgatacaaatgcttgccaagaggatctttggtttgattcagttagtattcttgaatccgattcggacgatgatttcctcagcattcatggagatggttttccatcagtgagcaatgcaattgggaatatatcaagtgggcagctgcttcagtatgaaagttcgacgtgcttcatggacggcaagtgcaaaaacgaagaataccatgaaggttatttaaagacagatggaggtaaaatgagcanagatgaacctaaaggaacaagatcgatgtctcacattagtag

SEQ ID NO: 219889 - DNA, 396 bp, Gossypium hirsutum
acaaaattcagattatgttgttgaatcgggtgcaacaagaaattttgaaccttggcgtgctgaagatgaggaagcggagaaagagaaacagaaaagggaatctgaagaaatgggggatgcgatgaaatctttggagaacagaacgttggattcaaaaagagagatggatatccttgctgcgcttgatgaaatgaagtctatgaagtccagacatgccacggtgagcgtagattcaatgctggaggccttgcaacgcactgccgcagaaaaggaaaagaaaatagaagaagaagacgaagccctcattaaatcgattttccagaagccaaaggaatttgttcgaaggattttcagaatgaatgttttcgaacgatgattgagggatctggacccggt

SEQ ID NO: 219890 - DNA, 346 bp, Gossypium hirsutum
ggggttcatgtaacatcaacacctttagatctctcttactctcagctcactgttgccaccggaacgatgcggaaattttaccaatcaagaaagagccaaagggcattaactgtagtgatgttaggtagtcaaattccattgtatggaggaggggctagcttgggtagcctgaacggtgaaccgactcagccggtgccattgacactaaacttcattgttcgttccagggcttatgttttaggtaagttggtgaagcccaagttctacaagaagattgaatgttcagtcaccatgaacccaatgaagatgagttgggctatttcactgaaaaacaagtgcatttaca

SEQ ID NO: 219891 - DNA, 318 bp, Gossypium hirsutum
accacgttattcccaaatactactccttgaacgatctccaatttgttagcaaccccgttagaacccaagctggtgaggatttcggcctcaacgtaactggcctgaacaaccaggttaacgtctcaagcggggttgtcgagactcagattaacaacgcattatatcaaaagaaacctctggcaatttatcaagcggacaaggtgttgttgcctgaggagttttttgaagctaaatccccagcggctgcaccttcaccggcgacaaagaaatcatcaacagggtctaaatcgaactcaagagcatcagcaaccgcagatg

SEQ ID NO: 219892 - DNA, 397 bp, Gossypium hirsutum
acaatgtctatgtaaagaatctctcggaatcaactaccgatgaagacttgaataaaacttttggtgaatttggtctgatcactagtgctgtggtaatgagggatgtagatgggaaatccaagggctttgggtttatcaacttcgagaatgcagatgatgctgctagagccgttgagtccctcaatggaaagaaatttgatggtaaggagtggtttgtcgggaaagctcaaaaaaaatctgaaagggaggctgaactgaaacatcgatttgagcagacaatgaaagaggcagcggataaatttcaaggagcgaacttgtatgtcaagaatttggatgatagcataagtgacgaaaagcttaaagagctattctctcaatatggtaccataacatcatg

SEQ ID NO: 219893 - DNA, 314 bp, Gossypium hirsutum
cgaagcccgtgatcgacttgggcgatgatttcgagactgactttcaggagttcaaagatgaagaatctgatatagatgattatgatgttgatgatgttttggctgatgtaaagccctttgcttttaacgctacaaagaaacctgcttctgctgtatctcatggttcgaactctgaaaaatccatgcaattcaatggtcaagctgagaaatgtgcgaaaagaaagaggaagaaccagtatcgtggaatccggcagcgcccatggggtaaatgggctgctgagatccgtgacccaaggaaaggggttagggtctgg

SEQ ID NO: 219894 - DNA, 382 bp, Gossypium hirsutum
gacccctcctgtgcaggtaaaattctgctacagcccttgcgttgagtcctaacctgttcaatcgtgagggcttcaaagcggattttgaaagaactcatggatttgcacaaagatccaaccacttatctcgtagctggtccaatatctaacgacatgtttcattggcaacgcaacaatcatgggaccctcagatagcccttatgctggcggtgtgcttttagttactatccatttgcctccagattatccttacaagcctcctaaggttgcattgatgaccaaggtcttccatcccaacatcaacagcaatggaagcatttgtcttgatattctcaaagaacaatggagcccctgcacttaaccattttccaaggttctgctc

SEQ ID NO: 219895 - DNA, 369 bp, Gossypium hirsutum
gagaaattcgctactggtgtctccatggttacggcattgtctctcgccatctcgtacccaaccctggctgctgcaccacacatgttcatcaatggctacaagaatgtattggccgttgctgttgcaactgagtattccttcccccaggctgataaagtgaaggagtacttggcggatccaagtaagtttgctgttgtcgctgcccctgttgctggtggtggtggtggtgctgctcctgctgctgcccctggcgaggaggaaaaaaaacctgaaccttgaagaagagtctgatgacaatttgggattcagtctcttccgactaaggtttatttgttttaaaagccataaaaccttattgggatttaattt

SEQ ID NO: 219896 - DNA, 434 bp, Gossypium hirsutum
gtctgtggattcctcctagaaaccctgtgattgtgtataggttgatcttgtggtggctaatagcaataccaacaattcgtgagtacaactcgtacctccaagaccggaaacctgtgaaaaaagttggagcattttgttggctttcccttgcaatttgcattgttgagcttctcattggcatcaagtttggacatggtttatatccaaaggcgatgccacaatggttggtaatattctggttgtccattggagtgacactggtttcattcattctgatttggtcatggaaactgcaacgcaattttggcaaaaagagaagatagttttgggaaatgcagtaatactattacactattctttggttgttatttactactatcggtattgtattgaggtttgtaaataccgtgtatcaatcacttgataaattgtat

SEQ ID NO: 219897 - DNA, 175 bp, Gossypium hirsutum
gaacaatggagcccggcacaaaccatttccaaggttctgctctcaatctgctcgttgctgaccgagccaaaccctgatgacccttttgttccggagattgctcacatgtataagaccgaacgggccaagtatgaagccaccggctcgaactggacccagtagcatgccatgggat

SEQ ID NO: 219898 - DNA, 387 bp, Gossypium hirsutum
tgcaattctattgaatacatgctttgcttgccctttggcttcaatacttcacactcctctagatgaacaatcggcaaggttctgtgctgcctctattgttactgccttagaagatctacatgagaatggcgtgctttacagaagtgtgtcttcagatgttttaatgttggacaaaacaggccatttacagctagttgacttcagatttggaaagaagttatctagtgagagaacatttacaatttgcggaatggcagactctttatcgccagaggtagttcatggaaagggccatggtcttcctgctgactggtgggccctgggagtcctgaactatttcttgttgcaaggtgaaaagccatttgtgtcatggagacaaagcgagct

SEQ ID NO: 219899 - DNA, 287 bp, Gossypium hirsutum
gctgaataccaaaagctccttgcccaaaggttgaaggaacagcgtgagcgcaggagtgagagcttggccaagaagagatctaggctctctgctgcttctaagccatccattgcagcttaattgtaccacatacaaggattggtattttcttcggttttgaatgttgattctaaaatctcattataggttgaggtgattttgacttgacaatgcttttaagttttcatgacattatgttttggatgcttacctattcctctatttatttcatgaatttttttatattc

SEQ ID NO: 219900 - DNA, 412 bp, Gossypium hirsutum
gaaaaagctgctgaaaatgtttacatcaagaaaactgagaaagagaaattggagaaacttgcacgcaagggaccgaaaccagaggagaaaccagctgttggttcagggggttctgtgactgatgctaagcctagtagctctacatcaacatcaagagcttcatcgaccgagaaagtatcgaccgataagtatcaaaactatgcagtttttactggtgttgtaacctttgcaagtgctttgggatggtatatgatatctgcagataagaagaaagaagcccaggactgaggttaacacgaaaccgatcggattttagaaccaaaacatggcacggatagttgaaaataaaccaaacttttttgagaccagttggttatgttccttccatggcataaatagtacaatttcatgc

SEQ ID NO: 219901 - DNA, 383 bp, Gossypium hirsutum
atcgaaaatgccaaagcaaattcatgagatcaaggacttccttctcactgccagaaagaaaggtgcatgctctgtaaaaatcaagaagagcagagacgttgtaaagttcaaagttcgctgttcaaagtacttgtatacactttgtgtgtctgatgctgagaaggctgataagttgaagcagtctctccctccaggtttgagtgtccaggacctgtgaaaatagggccgctttgaattcatcatccaattactaggtgatgaaagctagattttgactttggttttatcatatttcatgcctttcaaactcaaaatttactgaaatggaggtcgagttactttttaatggttaatgaatgtgttttgcttttggttgtcctatt

SEQ ID NO: 219902 - DNA, 434 bp, Gossypium hirsutum
gcggcataagagttttaaggaaaatgcagatcttcgtgaaaaccctaactgggaagaccataaccctagaggttgaatccagcgacactatcgacaatgttaaggctaagatccaggacaaggaaggtatcccgccggaccagcagaggttgatcttcgccggaaagcagcttgaggatggtcgtacacttgccgactacaatatccagaaagaatcaacattgcatctggttctgaggcttcgtggtggcattatcgagccatctttgatggcattggctaggaaatacaaccaggacaagatgatctgccgcaagtgctatgctcgtctacacccccgtgctgtgaactgcaggaaaaagaagtgtgggcatagcaatcagctgaggccaaagaagaagatcaagtagattggatatcttgatggagtttta

SEQ ID NO: 219903 - DNA, 425 bp, Gossypium hirsutum
gagagtctgaggctcccaattccataggggttcattctaaagatccatcaaatcctgaacacatggttaagatagctgtttccaataacaccagtggaagcttatttagtaaaactgcaacaagctctaggagtagtcatagcagtgcaacacaaaagtctcatgtaactgaggctggaaacttgatgatttctgttcaagtacttcggaaagggaccaacgattttgctgaagaaaacgagcttggccgtggtgggtttgggactgtttacaagggtgtactaggcgatggaacggaactagcagttaagaggatggaggcctgggtcataagcaataaagcgttggatgaatttcagtccgaaatcgcttgtctatctaaggtccggcatcggcatctggtttctcttttgggttatttcatt

SEQ ID NO: 219904 - DNA, 440 bp, Gossypium hirsutum
gaaagaatcagcatccaaggaccttctcaatgtgagccatgatcaccatgtttacaaaaggcttttgaaagatctaattgttcagagtttagttagactgaaagagcctggagtcctactccgttgtcgcaaagaagatttgcatttggtggagtctgttctggattcagcaaaggaggaatatgcttctaaagtgaatgttcatccaccagagataatcattgatgatgtccatcttccccctggcccttctcatcatcatgttttttccatcatcatgctgaggctcacgggcctttctgctctggaggtgtagtcatagcatctcgagatggaaaaattgtgtttgagaataccttggatgcacggttggatgttgcattcaataagaaacttccagagattcgcaagtggctttttggtcaggttgctgcttgaag

SEQ ID NO: 219905 - DNA, 281 bp, Gossypium hirsutum
tggtaaacgatcaagttcctggcttctgattacgtatcttgatgaagatcttcggatatctaaaggagatggtggtctttttgtgcttgctagacaggggagtcctcttctggagcagtatccatacagtatctatgaaggggatgtaccatatatattgttgttgtcgacctttccactgatagccaattgtaatttttgctgttgtataattttttttgttaatgtttatgtttcttttatttattttattttttgaccctttataaaattttttattt

SEQ ID NO: 219906 - DNA, 314 bp, Gossypium hirsutum
tgcatgtggaacaatacaagtcccaagtgaggaaaacattaattggtccaagggtccggattttgggaatcggtggagaacaatggaaccacttaaagggtttgcccgaagccaagagaacattcaagctgccaaattccatttactacatgtcttaacttcatctgaataaatttttatgcactcattttcccacctcatgtgctttttgtatttgcttgggggtggttttcaaaaattccaattttaaatttttagttaaaattttcttttatttatttttcaaaaataaaaataaaactttcttaattata

SEQ ID NO: 219907 - DNA, 409 bp, Gossypium hirsutum
attttgtcaaatctcgaaatcatcacatcaatggctcgtacaaagcaaacagctaggaagtcgactggtggaaaagctccaaggaagcagctagccacgaaggccgctcgtaagtccgctccggcgaccggcggagtgaagaagcctcaccgtttcaagccaggaaccgtggctttgagagagatccgtaaataccagaagagcaccgagttgttgatcaggaagctttctttccagaggctggtgagggaaatcgctcaagatttcaagactgatttaaggttccaaagcaacgccgtcgctgcacttcaagaagcggcggaggcttaatctcgtggattgtttgaagacactaacctgtgtgcaattcatgctaagagggttactatcatgcccaaagatattcaac

SEQ ID NO: 219908 - DNA, 431 bp, Gossypium hirsutum
ggctttttgtagcggtggtgaccaggcgttgcgaaaagcagatggttatgctgattttgaaaattttggccgccttaatgttttagatcttcaggtacaaattaggcgtcttccaaaaccagtgatagcaatggttgctggttatgctgttggaggagggcatgttttacatatggtttgtgatctgaccattgctgcggataatgctatttttggtcaaactggtcccaaggtaggaagttttgatgctggttatggaagttccataatgtcccgtttggttggacctaaaaaggcgcgcgaaatgtggtttcttgccaggttttacactgcctctgaggcagagaaaatggggcttgtgaatgctgttgtaccgctagagaaactggagcaagaaacaattaaatggtgtagagagatcctaagaaaca

SEQ ID NO: 219909 - DNA, 397 bp, Gossypium hirsutum
aggctgaaaaacaaagtcaagcataaaataacttgatcactcatcttcaatacatagttcaaggtttatgacaacgcataaaaagcaaaaaagatacacggccgaatggccattcagtccatacaaatgccttcaaaatcaacatactacctatgtaaaaacagataataaccaggtaaacttatcgctttccaccaccaccaccaagcttgggacctttgggtgcaccaccctttggaaggttacccttgccttgtgtcttctgttgcttcgctgctacttctgccttctttgccttcttttcatccttagtcttcttgatcctttccttgatttctcggagagcagcttccctggcagcatcacgaacttcaggtttctcactcctcttcttctg

SEQ ID NO: 219910 - DNA, 433 bp, Gossypium hirsutum
gttcaacaagctgttaactacaagcagcttaaaaggggagcttatgaagctactaagacacttaatagaggtatatcggggtttgttgtcatggctggcgatactgagcctcttgagattcttttgcatcttcctttgcttgctgaaaataagaatgtcccatatgtatttgttccctcaaagcaagcacttggccgagcatgcggtgtcacaagacctgtaatcgcatgctccgtcacatcaaatgaaggaagccagttgaaatcgcaaatacaacagctcaaggatgccattgagaagctcctaatctaaagatattacgtaactcgtatttctgtgtgatgggctcttttggaatgtggagggcgctcctttagagactttgactgaataagtcgggccactatcgaacctgtgtttaatattcgacctt

SEQ ID NO: 219911 - DNA, 369 bp, Gossypium hirsutum
gccgtttcccttacacaattcctccaaggctaaggccgccaatttaaggcgctccgccaggatggaccttctttattggacggattttgtcaaaaccggcaaactcaaggaccttcctccatttgatccggattgggactatatcaaagccgcttccatggcggggaaaatatacctgaggggaggttttggggttggtgccttaaaaaggatttacgggggggctaagagaaatggaagccgtcctcgccatttctgtaagagcagtggatctgttgctcgccacattcttcaacaattgcagaacgttaacatcattgatattgatcctaaaggtggtaggagaatcacatcgaacggccaacgcga

SEQ ID NO: 219912 - DNA, 409 bp, Gossypium hirsutum
aaaaccctaaaatcttcttgagctgccgcagctgagatccgacactccacatcgcagcaatgggtgaggaagtaaaggctttggttcctgagtcactgttgaagaagaacaagaggaatgaagaatgggagcttgccaaaaagcaggagctcgaagccgccaagaagaagaatgtcgagaaccggaagttgattttcaacagggctaagcaatatgcaaaggagtacgaggctcaggaaaaagagttgattcaattgaagcgggaggcaaagttgaaaggaggattctatgttgatccaaaagctaagcttttgttcattgttagaatccgcggtatcaatgccatgcacccaaggaccagaaagatcttgcagcttctacgtttgagacagattttaaatggtgtttt

SEQ ID NO: 219913 - DNA, 293 bp, Gossypium hirsutum
cccacccgtccggctactgggaatcaggacacaacttgcagattgtgggatgtaagaaaaccagcccagtccctagctgtattgaagggaagaatgggagcaattagagctctcaagttcacatcagatggtcgatttcttgccatggctgagccagctgacttcgttcatgtcttcgacaccaagtccgggtatgtgaagtgccaggaaattgacttttttggtgaggttgctggaatatcctttagcccagatacagaatcgcctgcggttgaactctaacaagatcgcga

SEQ ID NO: 219914 - DNA, 285 bp, Gossypium hirsutum
agtggatacctactccaatctctataccatcataaccgttgatcaacctgcactcggactggaagcaatctttagcattagagtccctgatcagaagtttggcaaggatgaactccattatttgcattaatacgcatggataatctcaagcataggattaactgcaaatcctataattaacctttcaggtgattgtaactaatgtacttgcactgggaactgatctcttgtttgacacataaactgggaatttctcaaaatatcaatgcctggttgagctttttc

SEQ ID NO: 219915 - DNA, 299 bp, Gossypium hirsutum
gcttcacttagggtcgatggagccttgaacgtggatgtaacagaattccagaccaacttgggccgggacccaagaatacactggaggcggtcttcatacgctccagtcatctctgctgagaaggcttaccatgagcagctatcagttgctgaaatcaccaatagagcccatgagccctcatctatgaaggccaagtgtgatcctcgccacggcaagaaaatggcttgcagattgatgaaccgcggagaagtagggcccaaggaagtcaaagctgctgatggcaccatcaagaccaagag

SEQ ID NO: 219916 - DNA, 434 bp, Gossypium hirsutum
cagatgaatactggaaaaagtcgaagttgccaaatgcaaccttatttaagcctctgcagccatataaaagacgcataaaagagacatttaaagattttccaccatcatcactgccccttatcgacactctacttgcaattgatccagcggaacttctaactgcgactgctgcattaagaagtgaatgcttcatgaccgagccttatgcttgtgaaccttctagcctcccaaaatattcccccagtgaagagatggatgcaaaacggcgagatgatgaagcacggagactcatagcagctagtaaagccccaggtgacggtgcaaggaaaacacgaacacgtgatcgtgcaagggcagggcctgccccagaagccaatgccgagcttcagtctaatcttgatagaaggcggttaataacccatgcgaacgccaag

SEQ ID NO: 219917 - DNA, 353 bp, Gossypium hirsutum
  unsure (1)..(353): unsure at all n locations
cacatgtgctacttccggtgaaggactgtacgaggggctggactggctctcaaacaacattgcaaacaaggcataggtgtgacatgactgagttggcagtcttacaacccttttggattttatgaatgtctgcccccgttttatgtgttattttttatggtttttcacgtttgttgcaaacactgccatttgttacttatagtttaagaataattgacaaagtttgggaccgttatttcctagcgggaattgatggttagccagtttaattacccttttaatgtaaaatatacataatatatacatatatattttttccttcaaaannnanaannnnnnnnnnnnnnnnnnna

SEQ ID NO: 219918 - DNA, 412 bp, Gossypium hirsutum
ggatcattggccgcacaaacacagcagccattaagatggcataaggcttattttgatgcacccgagggtgacgagccgttggctttggacatggaaagtatgggaaaaggtcaaatatggattaacgggcagagcatcggtagatattggaccgcatatgctcatggtgattgcagtggctgtagttattctggaacgtttcgaccaacgaaatgtcagctcggttgtggccaaccgacccaaaaatggtaccatgttcctcggtcttggttgaaaccgacacaaaatctattagttctatttgaggagctcggaggagatcccttgaaaatctcacttgtaaaaagatccatgtccactgtttgtgctgagatgtcggagtaccacccaaatatcaagaactggcaaatcg

SEQ ID NO: 219919 - DNA, 396 bp, Gossypium hirsutum
cccacttacaccaatcttaaccgtcttgtctcccaggtgatctcctctttgactgcttcacttaggttcgatggtgccttgaacgtggatgtaacagaattccagaccaacttggtcccttacccaagaatacacttcatgctttcttcatacgctccagtcatctctgctgagaaggcttaccatgagcagctatcagttgctgaaatcaccaatagtgcctttgagcccttatctatgatggccaagtgtgatcctcgccatggcaagtatatggcttgctgtttgatgtaccgtggtgatgttgtgcccaaggatgtcaatgctgctgttgccaccatcaagaccaagagaactattcagttccgtgactggtgcccaactggattcaagagt

SEQ ID NO: 219920 - DNA, 383 bp, Gossypium hirsutum
cgatggttgcattactaccaaggagctggggactgtgatgcgatcacttggtcagaaccctactgaggcagaactccaagatatgatcaatgaagttgatgctgatggaaatgggaccattgattttcctgaattccttaacctaatggcaaggaagatgaaggatactgattccgaggaagaacttaaagaggctttcagggtgtttgacaaggaccagaatggtttcatatctgctgctgagcttcgccatgtcatgacaaatctcggtgagaagcttacagatgaggaagttgatgagatgatccgtgaagctgatgttgatggtgatgggcagataaactatgaggagttcgtcaaagtcatgatggccaagtaaggat

SEQ ID NO: 219921 - DNA, 425 bp, Gossypium hirsutum
ctcttttaacacatccatcgttcaatgcgcttgttttgatctatagatcttaggttcggagtctctgtgtgtgctttggtgtgggggttttctagtgacaaaaatagaatggggaaacaatcaaagtcaggagggtgtttggggtggttactggcgatagtaatattggctctggttgtgggagccattgtttatgcagtgaagcagaaaatcgatcacgccaatgataataagccatctcccgttccaggtcctccaggcgctattgacaagaagtatgccgatgctctcaaaatcgcaatgcaattctttgacattcaaaaatctggtaagttagtgaataataagatatcatggagaggagattctggacttaaggatggaaatgaagcgaacttggatctttccaaggggatgtatgatgc

SEQ ID NO: 219922 - DNA, 438 bp, Gossypium hirsutum
  unsure (1)..(438): unsure at all n locations
tgcaattctattgaatacatgccttgcttgccctttggcttcaatacttcacactcctctagatgaacaatcggcaaggttctgtgctgcctctattgttactgccttagaagatctacatgagaatggcgtgctttacagaggtgtgtctccagatgttttaatgttggacaaaacaggccatttacagctagttgacttcagatttggaaagaagttatctagtgagagaacatttacanattgcggaatggcagactctttagcgccagaggtagttcagggaaagggccatggtcttcctgctgactggtgggccctgggagtcctgatctatttcttgttgcaaggtgaaatgccatttgggtcatggagacaaagcgagctcgattcatttgcaaagattgcaagaggatacttttattcttttacataaat

SEQ ID NO: 219923 - DNA, 434 bp, Gossypium hirsutum
agctgaaccaaatggctgaggaagccaaaaggagagcagaaattgctaggttgagagaactgcatacactgaaagggcatgtggaatcggtggtgagattgaagaacctggacatagacacaatccagcaagcgtacacggtgtaaggtgggggaatggtattccgaaggaatagtggaaaatgtaatgagagggagcgttttcctgagagtgaagctctaatatatgtatcttttattaccttaatcccgtccgccattttacaagggaaaggttattgtttatggcattttatgtttatattagtagtaaaaaaccatatgttttgcttttgttgtagtaaaaaaaaaaccaaaaaaaaaaaaaaaacaaactgtgatagtagaaataagaacccaaattaactttttcggataattccagttttcgagtga

SEQ ID NO: 219924 - DNA, 434 bp, Gossypium hirsutum
cccgttttaaggtggatctccgtacatatatccactgtatggattaggcgagctgcctcaggcttttgcacggcttagtgctgtttatggtggaacatatatgttgaataaacccgagtgcaaggtggagtatgacgatgaaggcaaagtttgtggtgtcacatctgaaggtgaaactgccaggtgtaagaaagttgtttgcgacccttcctacttgccaaacaaggttaggaagatcggcaaggttgctagggcaattgctattatgagtcacccaattccaaacaccaatgattctcattctgtgcagattatcctgccacaaaagcagttgggtcgtaaatcggatatgtatgtcttctgttgttcatattctcacaatgttgctccaaagggcaaattcattgcatttgtttcaacagaggccgagacag

SEQ ID NO: 219925 - DNA, 441 bp, Gossypium hirsutum
aactttttaaaggtcgtttcaagtgcaataattgacaaatacattggagaaagtgcgaggctgataagagaaatgtttggatatgctcgtgatcaccaaccttgcatcatctttatggatgagattgatgccatcggtggacgccgttttagtgaaggaacaagcgctgaccgtgaaatacagagaacgctgatggagttacttaatcagcttgatggatttgatcagcttggaaaggttaaaatgatcatggctacaaaccgacctgatgtacttgaccctgcacttcttcgtcctgggcggctagatagaaaaatagaaattccattgccgaatgaacaatcgagaatggaaatcctcaagatccatgctgctggcattgctaagcatggtgaaattgactatgaggctgttgttaaacttgctgagggttttaacggg

SEQ ID NO: 219926 - DNA, 365 bp, Gossypium hirsutum
caaggcccttcgtgaccgagcaccttatcctccaaaccatgtggttggccatctaattgggagctttgctttcattgtctttgacaaatccacctccactttgtttgtggcttctgatcaatttggtaaggttcctctctattggggaatcaccgccgacggatatgtggcctttgctgataatgctgaattgctgaaaggtgcctgtggcaaatctcttgcttcttttcctcaaggctgtttctactccacagcagtaggaggattaagaagctatgagaatcctaagaacaagatcactgcagtgcctgctgaagaagaggagatatggggtgctaaattcaaggtggaaaggccaacagttg

SEQ ID NO: 219927 - DNA, 302 bp, Gossypium hirsutum
gaagacctagaaccagctttgaaggctctcaaagatgggcttatgaccaagaatgtggctgaagagatagcttacaagctttggtgatcaataacctgctagtcttgaagggaaaaagctggcctcattcacaagggtctcttcgacagttcgggctgccatggaagatgcccttgttcgtattttaactcccaggcgctccattgacatactgagggatgtacatgctgccaaggaacagaggaagccatatgttgttgtctttgttggcgttaacggagttgggaaatcaactaatctcg

SEQ ID NO: 219928 - DNA, 409 bp, Gossypium hirsutum
aagaaaaaaaaaaaaccagacatggcttccaacactgttgcatccgctgctcttcttcttaccttgaacttgttgttcttcactttggttagctctacctacgtgccttgcccaccaccaccaaagagccacaagcctacccacaaaagcccaccctcggcacctgaacagccaggcacttgccccagaaatgcactgaaactaggcggttgggctgatttggtgggctcagtgcgcgttggtggtggaccggcgaggaccaaatgcttgtttctcatttcgggtttgggctgatctcgatgctgctgtttgcctttgcactgctattaaagctaatgtgttgggggttaacctaaacgttcctgtttcattgtctttgctcctcaattcctgccaaaagcaaatgcct

SEQ ID NO: 219929 - DNA, 407 bp, Gossypium hirsutum
gttttctgaattgctgaccaagatcgacaggcgatctggaaaggagcttgagaaggagcccaagttcttgaagaatggtgatgcagggatgataaagatggttcccaccaagcctatggttgtggagactttctctgagtacccaccccttggacggtttgctgtcagggacatgcgtcagactgtggctgttggtgtcatcaagagcgttgagaagaaggatccaaccggtgctaaggtcaccaaatctgctgccaagaagaaatgagattgcatttgatagtatcaaagccttttgattttggttttctatgtagtctggtacttaacagttttttagaccaattttgatatgtgttcatttggttgagactggcatttgtccacggattgtgtgtttgcttttt

SEQ ID NO: 219930 - DNA, 391 bp, Gossypium hirsutum
gttcaaaaaaattctggcaaaccggcattcagctcaaagatcaagagtgagaaagctgcaatatatttcatagcttgaaagaagcgttacaacattacagactgaagtatcaacattatcaccaagagttgcatttctggatcattaaagagtggttcttactgttgaaaatagtgctttaaagcaaaggattgcagctctggctcaagacaagatttttaaagatgctcaccaagaaacattgaagaaggaaattgagagacttacacaagtttatcaacaacaacaaagccttaagaatatgaacgacaaccattctttaccaccaccgcaacagcagcaaccattgttggcaccgccaccgaacgaaggacaacttattagttgattt

SEQ ID NO: 219931 - DNA, 411 bp, Gossypium hirsutum
cgtgccggtccgaaccggagtttcgggctcgacctacgcgcacatttttgttctccttccaagtttctcccatctatccgcacgaggcaccaaaagttaaatgcaagaccaaggtctaccatccaaatattgacttggaaggaaatgtttgcttaaacatcttgcgtgaagactggaaaccagtgctaaatataaacactgtaatctacggattataccatcttttcacggagccaaattatgaggatcccctcaatcatgatgctgctgcagtgttgagggataatccaaagatgtttgaatcaaatgtgaaaagggctatgtatggtgggtatgtggggcaaacctattttccgcggtgtatgtagcttttacgatgtagctgaaagcgcaaactcactatgttatgga

SEQ ID NO: 219932 - DNA, 304 bp, Gossypium hirsutum
cccacgcgtccgccgtatggcgcaaggaagctgattggcgggatccctcgcgggtgcaccgccgaccgaccttgatcttcttcgcgttgctaaagttaccggtggtgcacctaacaagctttttaagataaagtggtgaggctgtccattgctcaagtctgactgtaatttacagaagctgaagctgattgagggaagcttacaaaagaaaaaattttgctctcgatctccgcccagaagacccgagctattcgcagaaggcttaccaagcaccaggcattttttaagaccgaaaggggagaag

SEQ ID NO: 219933 - DNA, 383 bp, Gossypium hirsutum
gaaagttgtgttccttctgattattccaatgataagcttaaatttatccaaaatccatcaattaacaaatcttgtgttaggactttgacggttcctaagctgatgaaaagccctgtttttatctattatcagcttgataactactaccaaaaccatcgccgttatgtaaaaagtcggagtgataaacaattgaggagcgtgtcagatgagaaatccacaaaagattgtagccctgaagacaaaacggtggatggtccaattgttccctgtggtctagtcgcatggagtttgtttaatgacacatactggtttttggggtatagtaagacattataagtttaaatacatgacatatcatggaatagtgacaaagatcttaaatt

SEQ ID NO: 219934 - DNA, 382 bp, Gossypium hirsutum
atccattctatgctggtttcgggaatagagtcaccgatgaaatcagctacgttaaggtcggaatgccgaaagggaaaatcttcattattaacccaaagggtgaggttgccgtgaaccgtcgtgttgacacaaaatcttatacatctcttcacgcccttgttcatggcatgtttccaccgacaacctgctccgagcaggaagatttcaattcgtggaatttctggaaactgccacctcctgtattcgacatatgaagttgtcggctaaagtatgttgctttagcatttggatgccaagatagatggatgatgatttcttcgatcattccagagctgtccaggttataaataatcatgactgcttgaagaactttcaccctgct

SEQ ID NO: 219935 - DNA, 371 bp, Gossypium hirsutum
  unsure (1)..(371): unsure at all n locations
cgacccangcggccgcaaagttgagaagaaatcatatccaaaggctcatgtcttgaaagcagcgaaagcagtgaaggctggggccacatttaataagaaggccaataatatcccaaccaaagttacattccacatgccaaggaccttgaataatgatatgaccccaaagtacccacgcattatttcttcaccaaagaacaagcttgatcattatcagattctcaagtttcccctcacgactgagtctgcaatgaagaaaattgaaaacaacaacactttggttttcattgttgacattcgtgctgattagaagaagattaaagatgctgtcaaaaaaatgtattatatttaagccaagaaagttaacacct

SEQ ID NO: 219936 - DNA, 393 bp, Gossypium hirsutum
cgcttattctcaccataaagagtctcctttacggcccagatcatttgctgtgaaagatgagatcttctgcttgtttgagggagcccttgataacttggggagtttaaagcagcaatatggtctggcaaagtcggcaaatgaagtgattttggtcattgaagcttacaaggcccttcgtgaccgagcaccttatcctccaaaccatgtggttggccatctaattgggagctttgctttcattgtctttgacaaatccacctccactttgtttgtggcttctgatcaatttggtaaggttcctctctattggggaatcaccgccgacggatatgtggcctttgctgataatgctgaattgctgaaaggtgcctgtggcaaatctcttgcttcttt

SEQ ID NO: 219937 - DNA, 383 bp, Gossypium hirsutum
  unsure (1)..(383): unsure at all n locations
cccacgcgtccggttatatggaagtaactgggtttggagctgatgtcagggagcaaatatacaaagtggcatctgtgaatctgtgttccaacatctcgggtcaaattcttgccagtcttgtcatgagtccaccaaaggttggagatgaatcctatgaatcatacagtgctgaaagagatggaatcctctcatctttagccaggcgtgcaaagacactggaagatgcattcaacaaattggaaggtgtaacatgcaacaaggcagaaggtgcaatgtatctgtttcccagaattgaccttcctgaaaaggcaatcaaagctgccgaagctgcaaaaaaagcacctgatgcatactactgccagcgcctnctcgctgctactgga

SEQ ID NO: 219938 - DNA, 406 bp, Gossypium hirsutum
gccaagagcagctcatctgttgagaagaactatgagttgcctgacggacaagtcattactattggagctgagagattccgttgcccggaagtcctcttccagccatctttcatcgggatggaagctgctggaatccatgaaactacctacaactctatcatgaagtgcgatgtggatatcaggaaggatctctacggtaacattgtgctcagtgggggttcaaccatgttccctggtattgcggaccgcatgagcaaggagatcactgctcttgctccaagcagcatgaagattaaggtcgttgcgccaccagagagaaagtacagtgtctggattggaggatctatcttggcatcactcagcaccttccaacagatgtggatttccaaaggtgagtatgatgaat

SEQ ID NO: 219939 - DNA, 380 bp, Gossypium hirsutum
ggtacactcgtcggacacctggagttcgatctccaaacagcctatgaggacaatataaagaaaattgtggatttcagtactgttgaaggtttttgggtctgttattgccacttggcccgtccttctactttgccaagcccaacagatttgcatttattcaaggagggaatccgtccactatgggaggactctgcaaactgcaatggtggcaagtggataattcggttcaaaaaggttgtttcaagtcgcttttgggaagatctggttcttgccttggttggtgatcaacttgattacggagataatgtttgtggtgtagtgctgagcattcgcttcaatgaagatatattgagcgtatggaatcgtaatgcgtcggatca

SEQ ID NO: 219940 - DNA, 376 bp, Gossypium hirsutum
  unsure (1)..(376): unsure at all n locations
cgcctcctagtttacagttctcaggttctttcgattcagccgtagccatggtgaacgtacgtaagaccaagaagacttattgcaagagcaaggagtgcatgaagcacacattgcacaaggttacacagtataagaagggtaaggatagtttggctgctcaagggaaacgccgttatgatcgcaaacaatccggttatggtggtcagaccaaaccagtgttccacaagaaggcaaaaaccaccaagaagattgtgctgaggctgcaatgccagggttgcaagcatgtgtcgcagcatccgatcaagaggtgcaagcactttgagattggtggagacaagaaagggaagggaacatctcttttctaaatgttgngttc

SEQ ID NO: 219941 - DNA, 309 bp, Gossypium hirsutum
gctttcatggccatggctgcttcaatcaagtaataggatggctagccaaccaggcatgagcggtgcgagacctccaacggtgaatatcaaaggacagcctgttaaccagaactctggttgctgctcttcttaaatgaaaatttagttttagttggtccatgtgatgatatttgtccttttgtgttatttgttgcatgtagttgggggaaaaaaaaactagtcttatttttatttcatttgatagtaaaagatggttctacatgatttttatattcttatctttttttgttatattaaatactcaattct

SEQ ID NO: 219942 - DNA, 393 bp, Gossypium hirsutum
aggagagaaatggcgagcggagggaaagtgtcttttaaagtcactcttacctctgagcctgggctccctttcaaagtgtttagcgtgcctgaagcagccccttttacagccgtcttgaaattcgcagccgaggaattcaaagtccctcctcaaaccagtgctatcatcaccaatgatggcgtgggaatcaatcctcagcaaagtgcaggaaatgtgttcctcaaacatggatcggaacttcgcttgattccccgtgacagggtgggagccttttgaaataacaaaaacttcatttgttatctctgagtgagaagactggttatgactttgtttggttatggatcccttgttttggtatgtatgtttaaacctttacttgatgtagaacatgac

SEQ ID NO: 219943 - DNA, 382 bp, Gossypium hirsutum
cacccacatcacgcaaaggttacccctaagttttgcaagcagtttgctcgtgtcggagacgtcataaacaaagctctcctagagtacaaagaagaagtaacaaatggttcgttccctggtccttcacacaccccatacaaaatgaatcccaaagacgtgaatggattctcgaaggagttgcagagattgggtttagatgatgcagcatcggcggcaaacgaagcagcagttgagcccgagaagatgaacatggtgaacaccggaagtaactaaattaaggccagatttcttcaccttttttttttacttcaatcaaattcatttaagaagcaaataatgccattctttttcggtattgcaaatttttggttaaaagcaattg

SEQ ID NO: 219944 - DNA, 382 bp, Gossypium hirsutum
ctcgacataaaacaatgatcagctcatcttggggtgctcctgcagccttcaccaaaggttgcaaccttcagcatgtagcagatggtctatacggtagacatttgtttgtgtacagttggcctgatggcgaattgaagcaaacaatggatcttggaaacactggtctcgtacccttagagataagattcctacatgatccctccaaagatacagggtatgtggggtgtgccttgtcaagtaacatggtccggtttttcaaaacccaagatggttcatggaatcacgaggtggcaatctcagtgcaaccattgaaggtacaaaactggattcttcctgaaatgcctgggctaataacagactttctaatctctcttgatgatcg

SEQ ID NO: 219945 - DNA, 380 bp, Gossypium hirsutum
  unsure (1)..(380): unsure at all n locations
cagagactgagacaaagaatcccataccaacagctgcatcctgagccaatggcgtcaacagttctaaggcgagcaacctcatccgttatcaagtcaagtcttctaacggaagcgtcaaggagaagctatgcctcggttgctgtggggactgacattctgtctgccgcatcccaagttagtctccagaaagctcgaagctgggatgaaggcgttacctccaatttctccactacttctgtcaatgacatcttcaagggcaagaaagttgtcatctttggactacctggagcatacacaggtgtttgttcacaacagcatgtgcctagttacaagaagaacatcgataagttcaaggctaaaagaatngattcagtcatttg

SEQ ID NO: 219946 - DNA, 384 bp, Gossypium hirsutum
  unsure (1)..(384): unsure at all n locations
gaacctgttgggcaagtggaaagaatccgtatattcaggtggtcagtttattcccgttgggggggtagcttactatgttactgcccctgcaagcttggcagatatggcagcaaatcccttccatgctctgttttatctagtgttcatgctttctgcctgtgccttgttttcgaaaacttggattgaagtttccggttcttcagccagggatgttgctaagcagctcaaggaacaacaaatggtgatgccaggacatagagattcaaatctacaaaaagaactaaaccgttacataccgaccgcagctgcatttggcggaatgtgcatcggtgcattaactgtcttagccgatttcatgggagcaatcngttcagttaccggaat

SEQ ID NO: 219947 - DNA, 401 bp, Gossypium hirsutum
gttgattccggtaccaagttatctaaaatacaatcaaggatatcaaaattgaaagaaaagcgtaagacacgattttggaccagagaaggagttctatgcattctatggtcattgttttgagaccaaccagaataagtacgtttacaaagtgtgtccatacaaacaagcttctcaagaggagggctacacatcaaccagtttggggaattgggaccaattcgaggaatcctacaggatgatggtattttctaatggagaaaattgctggaatggccctgatagaagtatgaaagtgaagttgagatgtggtttgaagaatgagatcactgatgttgacgaacccatccgatgcgaatacgtagcgatactgtccaccccagctgtttgtctggaagataagc

SEQ ID NO: 219948 - DNA, 344 bp, Gossypium hirsutum
acgcattaaggaagtggaggtcaatggaatcactgtgaagatcaaatattgtgacactggcatgctttataggcctcctcgctgctcacactgttcaatctgcaataactgtgtagaacgatttgatcaccactgtccttgggttgggcaatgtatcggactgcgaaattatcgattcttcttcatgtttgtcttctcaacaacccttctgtgtatatatgtttttgcattctgttgggtctacattaaaaggatcatggcatcagaggagacaacaatttggagagcaatgattaaaaccccagcttccattgttctaatagtttacactttcatcgcaatgt

SEQ ID NO: 219949 - DNA, 391 bp, Gossypium hirsutum
aaagaaaaaaaagcttcatccaccactctatacaatggaaaagattcagcacaaccgtgtggaagctaaaggactaaagcttcatgttgcccagattggaactggtccccaagtggtggcattcttgcatgggttcccggaaatttggtattcatggaggcaccagatggttgcggtggctaatgctggctatcgagctatttccattgattttaggggctatggactctcagagcatccatcagaaccagagaaggcaacctttaatgattttgttgatgatgtcgttgccgttctcgactctttgggcatcactaaggcgcatcttgttgccaaggattttggggcctttgtagcagccatggtgggcatacttcaccctgatagagtg

SEQ ID NO: 219950 - DNA, 397 bp, Gossypium hirsutum
gcatacactactagtacccactactagcaatggcttcctcaatgatctcatcggctgccagggccactgcctctccggcacaggctaacatggtcgctcctttcaccggtctcaagtctgcctctgctttcccagtcaccaggaaggccaacaacgacattacttctctcgcaagcaatggcggtagagtgcaatgcatgcaggtgtggcctcctactgggaagaagaagtttgagactctctcatacctccccgatcttacacccgtgcagttggctaaggaagtagattaccttcttcgctcaaaatgggttccttgcttggaattcgaattggaggagggattcgtgcaccgtaagtactcgagcttacccacgtactacgatggacgctactg

SEQ ID NO: 219951 - DNA, 403 bp, Gossypium hirsutum
gtttcatcgtgggggccaacattttggcaggaggtgccttcgatggagcctcaatgaaccgagctgtttcattcggaccagccttggttagctggacatgggacaaccactggatctactgggtcggaccccttatcggtggtgggctcgctggtctcatctacgagttcatcttcatcagcaacacccacgagcagctcccaaccaccgattattaagcctaatcagggtttaattgatttgtctgtcactttgaaaccggattttctccgatcacatttgagtctcctatctctttccttgtattttgtgtttaatttgtggccgtcgatcttgtttacttttttggtttttttcattcccatcctctatcatgatcatcatgaatggcagatgtttacaa

SEQ ID NO: 219952 - DNA, 381 bp, Gossypium hirsutum
atggcaaccatttcagctacctcatcaatctccattgcagcttctctttcatacaagccaggatggctcaagctcaccaccccaattgccattgggttgccaacaatggcgaagaaagtgaaagtgatgtgttctatgaaggaggaggaggaaaagaatagctctagcgttggcatgagtgctgcatcgctgttagctgcagcagtcatgtcaagctcaccggctatggctctggtggatgagagaatgtccaccgaaggaactggacttccctttgggttgagcaacaaccttcttgggtggatcttgtttggtttattcggcgtgatatgggctctttactttgtttacacttcatccctcgaagaagatgaggagtct

SEQ ID NO: 219953 - DNA, 392 bp, Gossypium hirsutum
ctgcatcagaggttttcccgatctttgctttcgactaattgaagaccttggctctgctaatcgccgcttgagatcttcaaacaggaagaaaatggggttcattatggaatttgcagagaatctggtgttgaggttaatggaggacccaaaagagagggatagaaaattcagagaacacgtttactctatgaaggatcgatgcgcaaaaaccaaggagatgtggagttatccactgcggccttatgggttttggacatttgagcgccacaatgctcagctccgttgggatcctcagattagccaagtccccggccgcagggatccttatgatgaccttcttcaagacagttatgcgtcttcctccaaacgaaactgaggaatcagaagccatt

SEQ ID NO: 219954 - DNA, 331 bp, Gossypium hirsutum
cggattgtaaccaacaatcctacccgatttttgacccgtcggagtcgtcgactcacagtgcggggacttgctactcaaggcagtgttctcttctacgacaatcggtttgccgtggcggcaaatgtctttaccagatgtcctacggggatggatcttacacaatcagggattacatgactgaaacagtgtcatttgggaactccagtgatatcaaaggcgctgctatgggttgtggccataccaactaatgcttatttgttgcaactaccgctttggttggactcgatggaggctccttgtctctaacatctcacattatagcgacgtcatt

SEQ ID NO: 219955 - DNA, 389 bp, Gossypium hirsutum
aaagagacaaggaatcttggggggattgatctcagagaaggtaataaagaaaatgggtgggaaaagcagcatggccatggctgcagtttttgtagttttggcttcaaccctaaccacgtatgcttctacaacttacactgtaggagactccactggttggcaagtccctaccagtaattctaatttatacgatgactgggctgacaataaaaccttcgttgtcggggatgatctcttgttcaactttattactggggaacatgatgttgcagaggtgaccgaacctggttacgacgcctgtaccaacaccgacaccatctcaaccgacaacaaaggacccgtaaaaattacgcttaaaaagacttgtgaccactacttcatttgcactt

SEQ ID NO: 219956 - DNA, 379 bp, Gossypium hirsutum
acaacaacaacaacagcaaccgactcggtgctctgtttgcaagaaacgggtcgggttgaccggaggcaagtgcaagtgcgtgattacgttttgcgggtcacacaggtacccggaaaatcatggatgcacgttcgatttcaagaagattgggcgagagaagattgcacgtgccaatcccgtggtcaaagcagagaagatcgtgaggatttgagaagaagaagatggaaagccgattgaccctttgacttttaatgagtaaaagaaaaaaagagaaatagaaatgtcaaactcgttaagattgcgacacgtgtttcagtgttggtccccatacctttaaaaattgggcttggataaaaatattttatcttataaaataagt

SEQ ID NO: 219957 - DNA, 427 bp, Gossypium hirsutum
tcccggtcgaccacgcgtccgccctcacctgtgaagtaaaaaaacccggccctgattggcaagaggtgactgaagtggttggtgcggtgactgatgaagtcaaagatgctttggtgaaaaacattaggagaagaatgaccccacaacctttgaagattcgggctgatattgaaatgaaatgtttccagtttgatggcgttcttcacatcaaggaggccatgcgcaaagctgaggctgctgggaatgatgattgtcctgttaaaatcaagcttgttgctcctccactttatgttcttaccactcaaactcttgacaaggagcaaggtataactatcctcagtaaagcaattgcagcttgcactgaagcaatagagcatcacaagggtaaacttgttgtcaaggagcagcctatagccgtgagcgaacg

SEQ ID NO: 219958 - DNA, 397 bp, Gossypium hirsutum
cggcaaccggtggagtcaagaagccgcatatgttctggccaggaactgtggcgttacgtgagatggggaagtatcagaagagcacggaacttttgatcaggaaactcccatttcagaggttggtaagagaaatcgcccaggatttcaaaacagatctgaggttccaaagcagcgctgttgctgctctccaggaggccgccgaagcttacttggttggactttttgaagacaccaatctttgtgctattcacgctaaaagggttactataatgcctaaggacatccaacttgctcgtcgcattaggggtgagagagcttagagttatttaagatttattgtactaattagatttccatgaatttgttgtaggatttaatatccaaaacgtggagatgt

SEQ ID NO: 219959 - DNA, 398 bp, Gossypium hirsutum
gtagtttacctagcagtagcaatgacggtttagatagactaaagggctttgacaaattcggtcacgagacatctcaaagtcaaactgcaatatcagacttggaaaaatatttagatgagcctgtctttcctcgtaactgcaatttcaatatattgaattggtggagagttcacactccaaggtatccaatcttgtcaatgatggcacgagatgttctcggaactcctatgtcaaccgtctcacaagagtcagcattccacgctggaggtagggtgctcgatagttgtagatgtccactgactcccgagactcgacaggctttgatatgcacacaagattggttacggatacaatcagatgtaccccgtccatcttcaagtcattatgctctacccctt

SEQ ID NO: 219960 - DNA, 402 bp, Gossypium hirsutum
cacttcttctcttatttgaactcaaagtccctgctaatattagaatcatgggtgtggtcagttatgactatgagaatacctccccagtcgcccctgccaggcttttcaaggcctttactgttgaagctccgaaagtttggcccacggctgcacctaatgcagtaaagagccttgaggttgaagctaatcctagctctggaagtatcgtaaaaatcaactttgttgaaggccttccattccaatatatgaagcaccagatcggaggacatgatgaaagtaatttttcatacagttacgatttaatcgaaggtgggcctttgggggataagcttgaaaaaattagctatgagaacaagtttgaggcaactgcaagtggaaggagtatttgcaagagctcaatga

SEQ ID NO: 219961 - DNA, 402 bp, Gossypium hirsutum
agaaaacgaaaaaaaagaagaagaaatacattcgttttctttttgaagtcgggtttgagttgttggggtgaaaaaaatgttgggagtatttagcagtgcgatagtgtctccgccggacgagctggtggcggccggttgccgaactccatcacctaagataacggcggacgctctggtgaaacggttccttgagacgaactcctccggcgtgtccatgcacatcggagaccatgtccaattcgcttattctcaccataaagagtctcctttacagcccaggtaaaaaaaaatcatatatggtattggctgttggatgatctcaatcgttgaaaattaattatgaatcaaacttcagttgatcatcgagtgctttcgaacgaacctaagaattactgtaatttg

SEQ ID NO: 219962 - DNA, 370 bp, Gossypium hirsutum
gcccaataaagggattcctaccgtctcctttcaccattctcaactggtcctttgtgagaagtgatcaaccgagattcgaaacttgctaccagattgccttggccatcaaggatgaagtggaggatcttgagaaggctggtatcaatgttatccaaatcgatgaggctgctttgagagaagggttgcctcttaggaagtccgagcatgccttctaccaaaagtgggctgtccactccttcaaaatcaccaactgtggtgtccaagacattacccagatccacacccacatgtgctactccaacttcaatgatatcatccactcgatcatcgacattgatgccgatgtcataaccattgaaaactcacgttc

SEQ ID NO: 219963 - DNA, 397 bp, Gossypium hirsutum
caaagctcaaagctttctcagctttttatatattcctacttattttctataaaaatcaaagtggggtctttccttactcaaagtgtcctcaaacttttccttgtcatctctttgtttcaaatctctttggccgttaggaagctgagtgaagtggtgcaagaccagcctcagctcttgacataccacaatggtccccttctttctggcaaaattactatcaatttgatttggtatggcaagttcaagccttccgagagggctattgtctctgattttgtcacctccctttcctccacggctccatcgcaaagcaaccggccttcggttgcccaatggtggaaaaccactgagaaatactaccacctcacctccaagaaatcttccctttccctgtctt

SEQ ID NO: 219964 - DNA, 328 bp, Gossypium hirsutum
tcgatcgaagcctacccgtggaaggaagctcattgctagcatattgaagaccattctttcttcagagacaatggacatccccgacggggttgatattaaagcgaatgccaatatgatcgatgttgaaggtgccagaggtaagcttatccgcaacttcaagcacctcaacctggattttaatgttatcaatgacgaagagagcggcaaactcaatctcaagatcgacgctcgctttggctctacaaaaactaccgccggcatgcgtactgctctcagccacaccgataatcttatcagcggcgtaaccaacggctaccgttacaagatg

SEQ ID NO: 219965 - DNA, 380 bp, Gossypium hirsutum
attaaaacccaacctggggaagtcgttaagcctgatcaattcaaagcaataaacgatgaaggaatggggatttatcagaggccatttatgagaagtaaactgtacattcagttcactgttgacttccctgactcgttgaccccggaccagtgcaaggcactagaggctgtgcttcctcccaaggcatcggttcagctgactgacatggagctggatgagtgcgaggaaacaaccctgcatgatgttaacattgaggaagtgatgcgtaggaaacagactcaagctcaacaagaagcttatgatgaagatgaggacatgcatggtggtgcgcagagagtacaatgcgctcagcaatgattaaaaaaagccgaatgttcgag

SEQ ID NO: 219966 - DNA, 377 bp, Gossypium hirsutum
attagaaccaagagatcatttgaagccttcttccttaaagcttatgcattggccgactctagcatggatttttcatgttcttcaacagttatctcattgcttgaaaatgccttgaaatgcccctcggataatcttcggaaaggtcaagctctgaacaatcttggaagtgtgtacgttgattgtggaaaattggacttagcagccgattgctacattaatgcccttaaaatacgacacaccagagcccatcaaggccttgcacgagtacattttctcagaaacaacaaggctgcagcatatgaggaaatgactaaactgattgaaaaggctaaaaacaatgcatctgcctacgaaaagaggtccgagtactgtgaccg

SEQ ID NO: 219967 - DNA, 390 bp, Gossypium hirsutum
tacttacaatgatatcatgtgtctttacacatattttggacagcacgagaaagtacctgatgtagtgagggagatgaaagagaacaacgtatccccggacaacttcagttacagaatctgcatcaattctctaggtgtgaggtctgatcttgagggaattgaagaaattttaacagaaatggaggatcaacctcatatcaagatggattggaacacgtatgctgttgttgccagtttctacataaaagcaggccttactgaaaaagccattgatgcactaaaaaaatccgaacagaagctagataataaagatggaacgggctacaatcatctaatatcgctctatacgagtttgggaaataaagccgaggtcttgagattatggggtct

SEQ ID NO: 219968 - DNA, 395 bp, Gossypium hirsutum
gctgatttcaggcctgaacccgatttccttagactcagcatcccgtttctggtcaacaacggtgggattgctctggttcaagcccggtggagatttgtgaatgctgacgaatgtttgttaacaagaatgcaagagatgtcattggattaccatttcacagtggaacaggaagttggatcagcaacacatgctttctttggttttaatgggacggctggtatatggagaattgcggccattaatgaggcaggtgggtggaaggatcggaccaccgtggaggacatggacctggcggtccgagcgagtctccggggatggaaattcgtttacctgggtgaccttcaggtgaaaagtgaacttcctagtactttcaaagcatttcgattccagcagca

SEQ ID NO: 219969 - DNA, 405 bp, Gossypium hirsutum
caatttctctcgttgatctttgttagagattagctttttaatttttcattatgggaaagatgaagagcggaatcaatggatttggaaggatcgggcgtttggttgcgagagttgctctccaaagcgatgatattgagctcgttgctgttaacgatcctttcatcaccactgaatacatgacgtacatgtttaagtacgacagtgttcacggtcaatggaagcatcatgagcttaaggtgaaggactcaaagacccttctctttggtgaaaagcctgtcacagttttcggtatcagaaaccctgaggaaatcccatgggctgaggctggagctgagtatgttgttgagtctactggtgtttttactgacaaggacaaggctgctgctcacttgaagggtggcgcga

SEQ ID NO: 219970 - DNA, 425 bp, Gossypium hirsutum
gggttataaggccaaacaaggttatgtggtttaccgtgtccgtgttaggaggggtggtcggaagaggcctgttcctaagggtatcgtgtatggtaagcccacaaaccagggtgtcacccaattgaagttccagcgcagcaagcggtctgttgctgaggagcgtgctggccgaaagttgggaggtctcagagttgttaactcgtactggatcaatgaggactctacttacaagtactttgaggttatcctggtggatgttgcacacaatgctatccgcaatgacccaagaattaactggatctgcaatccggttcacaagcacagggaacttcgaggacttacatctgctggtaagaaaaacaggggtctccatggaaagggtcatttgcaccacaagaaccgtccttctcgcagggcaacctgga

SEQ ID NO: 219971 - DNA, 351 bp, Gossypium hirsutum
  unsure (1)..(351): unsure at all n locations
ctgagagtgaactaaagcctgnaattgaccttctaggtcccgttgatgaaatattctttgagatctatgaccgatatgaaccagtcaacgaaccttctcttgacaattggttcatatcaacaagttatgatgctacaacacattttgaatcaactgtcagtgatgtacttaacaatgataccatgataactggaaaaggtcttggccctaagagggatttgaaggctgctaaggcttcggaaaaataattaccctgaaaccttgtatttggcaaaggtttggcctggttaaaccttctaacaacgttgaattgttcctgtgggatttatgtctataccaccatgttttttt

SEQ ID NO: 219972 - DNA, 404 bp, Gossypium hirsutum
acctggctggcctacggaccactttatttataaaggagagctccttaagctcaacctgggggacggttagagggctacctctccatcaaaaagcaagaatgtatggggcaaagtgaccatgcaaagtaagcctagttaaggcgactgtgctgggactgttactgcttactatatagtatcggacggtccaaattacaacggagccaacatgggagttcctagagattaccacaggggaaccttacctgattcagaccaaggagcacgtaaatggtgtcagcgacagagagcaaaggatgaaccttcgaggtgagcctaccacagactctgactcttattccatcctctggaaccagagccaagttgtgtttactagagtacgagaccccatttgattgcacacc

SEQ ID NO: 219973 - DNA, 401 bp, Gossypium hirsutum
ccctgatctcccactcaactcggatcacgactccctcgactcgtttagcgttttgggtggaataggtatacccgcctcgacgtcttaactcagtaactcgaattaaacgatggagccgatggatatcgtagggaagtcgaaagaggacgcttcgcttcccaaagcaactatgaccaaaattataaaggaaatgttaccgccagatgtacgcgttgcaagagatactcaagatcttttgattgagtgctgtgtagagtttatcaatctcatttcatcagaatccaatgaagtttgtaacagagaggagaagcggactatagcacccgagcatgtactcaaggctctagaggttcttgggtttggagaatacattgaggaggtctacgctgcttatgagcaac

SEQ ID NO: 219974 - DNA, 409 bp, Gossypium hirsutum
ctgcccttcatataaagctccgagctactgttggaaacatgacgaagacccctggtcctggggctcagtcagcacttagagcccttgctcgttcaggcatgaaaattggtcgaatagaggatgttactcccattcccactgatagtacccgtagaaagggtggcagacgtggaagaaggctctgattctttgctttatatcaattactcactcagctactactgctgtggtgcttggagttttctttgttaaacagttttctttatattcaagtgtgttttgctcggttctcttgctgcacatttagttttttggaatggattttagatcttttatctagacaggaaaaagttgtggaactatttaatgcagcttcaaagttaagcttttatattattgaggtttttat

SEQ ID NO: 219975 - DNA, 422 bp, Gossypium hirsutum
gagaaggttcctcggcaccatgctcattcattatttcatcagaagggttgcctgtgattctgccatacattaccaaacaaatactgtatgcttccccagcagatttcaagcatcttttgcaatataaatcaatcaaatttgctgactttgttgatgctgatttcggtcagaaggcagcagacctgatgttaggctgctgtgtgattgttttgagagaagaccatatccaagcagatgcattggcaatagccattggctgctggaaaggccggtcgagtttgagtgtgatggttacagcaatggactgccaagaactgctggaaaggctttcagcacgcatggagactgaaaagaatggaactttggcacccgaaagccttggcgtgctagataagaaacaagatatgagtggtgaaaatgga

SEQ ID NO: 219976 - DNA, 394 bp, Gossypium hirsutum
gctccgtgttcacaagcgagttattgacctattcagctcccctgacgtggtgaagcagaggacatctatcaccattgaacccggtgttgaggtagaagtcaccattgcagattcttaaatgtgccttacttttgctttttggcctcacatggtttttagtttatttgaaagagacttttgattgatgtgaccttctttgcttggatcaatctcaagcttggatgaatgttgtagggtttctatagttggtgtttttcccataatggaattaaaattctaatctgttgggtggctttatagtttctttcctttttgtaacctaaagattatgttgcgatattttgattttatgcattatttggcattaaggaatgaaatgagttgctttatgttc

SEQ ID NO: 219977 - DNA, 397 bp, Gossypium hirsutum
cttgtgcttggttacctcaacaatctggttattgtaatggcatttttgatacaggcaaatacagaagaggagctaccagagtatcttcttggaacatgccggctgaaccatcttgacgcatcaaaatctattacagtaaaagtatgaataattatttattctcaacctgatgtttactaggctacactaggctggttaagaagcttgggtgatgattgatgaaattgaagaataccaaaaatcatattattgcattatggcattgctgctgccgctgctgcttccacagatagaattgcattctttctttttcttttttttttttttaattatttttatcaaatggtcattatctacctaaccttttgtgctctgtacgtatcatcgtagtatttaa

SEQ ID NO: 219978 - DNA, 396 bp, Gossypium hirsutum
gcgagatcgtcgattcgaagatcattaactatcgtgagactggaagatccagaggcttgggcttcgttactttccgtgatgagaaatctatgaaagatgctattgaaggaatgaacggtcggagtctcgatggaaggaatataaccgccaacgaagcacaatctcgccgaagcggcggcggcggtggtggtggaggatttggaggaaacggtgggtacaaccgtggaggcggtggatatggtggtcgccgtgaaggtggatatggaggtggtggttacggaggtggacgccgtgatggtggtggatacggagacggtggatctcgttactcaagtggcggcagttcttgggcttatgttaaggcgtgctaagatttgagtgagcttcggctcttat

SEQ ID NO: 219979 - DNA, 417 bp, Gossypium hirsutum
gcagaacccttcattttttttctgccaccattggcacccaaagatgcaaattttcgcaaaagccttacgggggaaaaccttacccttaaaggtgaagtcttccaccacatcgacaatgtcaaagccaagatccaagacaaaggaagcattccacccgaccaaaagagccttattttttgccgaaagcaactctaggacgggcgcacctttaccgacttcaacattccgaaaggattcaccctccatctcgtgctccgtcttatgggaggtgcttataagagaaaaaagaagaacacctacaccacgcccaagaagatcaagcacaagaagaagaaggtcaagctcgctgtgctacagttctacaaggtggatgaatcgggtaaggttcaaaagctgaggaaagagtgtcctaatgct

SEQ ID NO: 219980 - DNA, 426 bp, Gossypium hirsutum
attttgttctgcaacatacgaaaaaaagattaagtttgaaacccggaaatgtcggacgaggaacaccggtttgaatccaaggccgacgccggtgcctccaaaacctacccacaacaggccggaaccattcgtaagaatggttacatcgtcataaaaaaccgtccctgcaaggttgttgaagtttcgacctccaagactgggaagcatggtcatgctaagtgtcactttgttggaattgacatcttcaccgccaagaagctggaagatattgttccctcttcccacaactgtgatgttccacatgttaatcgtactgactaccagttgatcgacatttctgaggatggatttgtgagtttgctgaccgaaagtggagacactaaggatgatctgaggctcccaactgatgagaacctgttgaaacaa

SEQ ID NO: 219981 - DNA, 394 bp, Gossypium hirsutum
ccggtgcccggcacaaaggtgtattttcatgggttgatttccaatccaggccaactttgaatggcgcatcctcgttgaggtaccttctggcaagactacctcctagggttcattctgtctactaccgggatgaaataggaaacatctcgtcctcacacctgcgtactgattcccgtaagtctgaactggaaattgaaccacggtatcctttatttggaggttggaaagcaacttttgtcatcggttatgggctaccattacaagacttcctttttgagacatctgatgacaggcgttatctcaactttacttttggatgcccccttcttgagacagtggttgacaagttaaccatcaaagttgtgttacccgagggttcaaaagacccttctgc

SEQ ID NO: 219982 - DNA, 353 bp, Gossypium hirsutum
  unsure (1)..(353): unsure at all n locations
agaaagaccggcccgagcgaggcgtggggggggtnccaaaatggttttgtcattttatgttttccgagccaagccaaccttgggaagaggatgcatcataaaggccttctttcaatactacctcctgaggtggaaatttgcctctaccgggatgaaataggaagcatttgaggctcacacctgcggactgattcccgnaagggtgaactggaaattgaaccacgggatgctttattttgaggttggaaagcaactcttgtcatcggttatgggctaccattacaagactgtctttttgagaacattgatgacaggcgatttcttaacatttcttttggatgcccccttcttga

SEQ ID NO: 219983 - DNA, 392 bp, Gossypium hirsutum
ctttgtagccaaaaaggaacaatgagccgttttaaagaaactttatccaacatttctgatgctgccaaacacatttccttcaccaagaaacacaagaaaattttcttggcactatttgcatctttagtcattgtcgctgctataatcggcattgttgctggagtgagctcacggaataactccgatgagtccgatacttcccatcatgccattgtgaaatcagcttgtagtggtacattctaccctgatttatgtttctcggctgttactaccgtccctgctggtactgccaaaaaggtgaggagccaaaaggatgttatcgaattgtctcttaacatcaccaccactgctgtcgaacacaattacttcaagattaagaagcttttggctcg

SEQ ID NO: 219984 - DNA, 410 bp, Gossypium hirsutum
gaaaaacctgaacccaagccaccgatgtattaaccacctaagaaggaaaagtccgaaccagagccacggggttatacacctccaaagaaagagaagcctgaaccaaaaccatcagtatatgaaccaccaaagaaggaaaagcctgagcctaagccaccagtttatacaccaccaaagaaagagaagcctgaacccaagccaccagtgtatgaaccaccaaagaaggaaaagcctgagcctaagccaccaggttatacaccaccaaagaaagagaagcttgaacctaagccaccaatgtatgaaccgccaaagaaggaaaagcccgagccaaagccaccagtttatgcacctccaaagaaagaaaaaccagaacccaaaccaccagtttatcaacctccgaagaagccacc

SEQ ID NO: 219985 - DNA, 336 bp, Gossypium hirsutum
ggtggatctggcatttttgaaggtgtctctggtcaggtcaagctccaccaaatcgtcttgcccgttaagcttttctacactttctatttgaagggaattggtgaactcccagaagagctgctttgcaaaccagttgacccacacccagctgttgaagccgttccggctgctaaggcttgcgagccacatgccgccattgcaaatttcactaattaaataaattatgaatcttatgtaattttaaataatttgcaaatccaatgatgttagtatttttattttcattttaatattttgtagtagagagtaaaattagaaataaatgtgttccttttt

SEQ ID NO: 219986 - DNA, 398 bp, Gossypium hirsutum
cccacgcgtccgcccacgcgtccggaaaatgggggaaaaaagtgaggatcaagcatagatggaaaacatgggagttctaggcaaggtggtggattaccttctattgttatcattcttcagcatcacattaacagctcagttggacatccccgagtccatcctcccccacgcctacaatcccttctatcaagtttataccacgttaacccaagattatttggtgcttgagcagcctgcttttttcaaggcacttatgacgttggaacttgtttaccaactccctctcgctttgcttaacatctatgggttgttatactctaagccctggttcaacaccacctgcctcctctttggtgcctctatcgttgcctctacgacagctatggtgggagacattc

SEQ ID NO: 219987 - DNA, 423 bp, Gossypium hirsutum
  unsure (1)..(423): unsure at all n locations
cgaacgacaacgaattgaagcacctcctcttccaagtatggaaaccatgcctccacctccgacatacgaggaagttaacggagtttatgcttcccaaacaaataacggttcaacagatagcatgggctactttttaggcgaggtaatgcatacgtataatggcgaatccgacgtggagctttctttgtcagttggtgacttcgtagttgttcgaaaggtgacgaacaacgggtgggccgagggagaatgcaaggggaaagcaggttggttcccttttggatacatcgaaagaagggaacgtgttcttgcaagcaaagtggcagaagttttctaagacatttctgcgtatcggtgtcggagaagacgattttgtacgttcatctttctcttccatatttgnttggtttgggcttatgtgtattt

SEQ ID NO: 219988 - DNA, 418 bp, Gossypium hirsutum
cagtgaacaggggatgggtccgacatcagctccaacgacggccacagctccatcggcggggacggctccgtcggcgggaaaggcgccatcaagtggttcggggaagtggtgcgtggctaaatcaaacgccagcgatgcggcgttgcaagcgaacatagattacgtgtgcagcagcggagtggattgtaagccgatccaatcggctggggcctgctttaaccccaataatgtgaggtcacatgcatcgtacgcaatgaatgcgtactatcaagccaatggtcgtcatgatttcaactgcgatttcaatcgtacgggtgtcatcacctctaccgatccaagtcatgcagcttgtaactattcagtgaatcaagggtcagggttaaaattggaaagttcagtggccgcaaatacaatgaga

SEQ ID NO: 219989 - DNA, 408 bp, Gossypium hirsutum
ctatcctcttgcctagcgggcaaggatttatctccgtggaaaagatgattcattcggatccgcatgaaagcccaactccattgcattgccagaatccatgttgtatatttgaaagaggttgacctccttgcttctctcatggtacaatcctcttcccgctgagccccctttctcctcggtccacagagacaaaatggaatgtaggactaggactggcgccaacagttaatcacggaagaaaggactcactgagccgggatcactaactaatactaatctaatctaactaatactaatctaatactaatagaatactaatctaatactctaatactaatagaatagaaaaaatagaatagaaaatactaatataatagaaagaactgtcttttctgtatactttccccg

SEQ ID NO: 219990 - DNA, 396 bp, Gossypium hirsutum
gtatatctgtcaatgatcttgtaattaaggctgctgcattggctctccgaaaggttcctgagtgcaatagttcatggacagatgactatattcgccagtataacaatgtgaatattaatgtagctgtgcagacagagaatggactttacgtccctgttatcagggatgctgataagaaaggtttgtcctcaattgctgaggaggtcaagaatttggcacaaaaagccaaagagaacagcttaaaaccagaagattacgagggaggcacatttacagtgtctaacttgggagggcccttcggtattaagcaattctgtgccatcattaatcctccacagtctggaattttagctgttgggtctgctgagaagagggttatccctggcttcggtcctg

SEQ ID NO: 219991 - DNA, 391 bp, Gossypium hirsutum
gtacgttgatgctattatgacaataccgatgggaaccctctttcccatgtgtggtgtgggtctggcattcaatcgggaattgattggccctgctatgtactttggactcatgggtgatggtcagcctattggtcgatacgatgatatgtgggctggctggtgtaccaaggtcatatgtgatcacctcggactgggagtgaagacaggattgccttacatttggcacagcaaagcgagcaacccgctcgtgaatcttaagaaagaatactaaggaatttactggcaagaagagctgatcccgttcttccagtctggtacccttcctaatgactgcacctcggttcagaaatgctacatcgatatctccaagcaggtcatggctaaactaggc

SEQ ID NO: 219992 - DNA, 398 bp, Gossypium hirsutum
atcgaatcttacaaagcatgggcagctttgtagctagtggaagaaaaacaagtgaaaggagctgaaataaccatgccgatattgagtttcgatcagatgggattaaaagacgatctcctccgtggaatctacaattacggctttgaaaagccgtcggctattcagcagagagccgttatgccgataatcaatggccgcgatgtgattgctcaagcccaatctggtaccggaaaaacttccatggttgctctcactgtttgtcaagtggtcgacaccgctagcagagaggttcaggcgttgatattgtcacctacaagagaattggcgtctcaaacagagaaagtgatacggacaattggcgatttcatgaatatacaagcacacgcatgtattggagg

SEQ ID NO: 219993 - DNA, 399 bp, Gossypium hirsutum
gataataaagcgtttgtctcagatctcagatgatggcccgtaccaagcaaaccgggcgtgggtcgactggtgggaaggctcctaggaagcaacttgctaccaaggccgcccgtaaatctgccccaaccactggtggtgtgaagaagcctcatcgataccgtcctggaactgttgctcttcgtgaaattcgaaagtaccagaagagtactgagcttcttatcaggaaattgcctttccagaggcttgttcgtgaaattgcccaggatttcaagactgatttgcgtttccagagccatgccgttcttgctcttcaggaagctgcagaagcataccttgtgggtctctttgaagacaccaacctgtgtgcgatccacgccaagcgtgttactataatgccca

SEQ ID NO: 219994 - DNA, 418 bp, Gossypium hirsutum
gaaaaaaaaaaaaccagacatggcttccaactctgttgcatccgctgctcttcttcttacgtagaactggctgttcttcactttggctagctctacctacgtgccttgcccaccaccaccaaagagccacaagcctacccacaaaagcccaccctcggcacctgaacagccaggcacttgccccagagatgcactgaaactaggcgtttgtgctgatttgttgggctcagtgcgcgttgttgttggaccgtcgaggaccaaatgctgctctctcatttcgggtttggctgatctcgatgctgctgattgcctttgcactgctattaaagctaatgtgttgggggttaacctaaacgttcctgtttcattggctttgctcctcaattcctgcgaaaagcaaatgcctgctggttacaaa

SEQ ID NO: 219995 - DNA, 425 bp, Gossypium hirsutum
gatgagtcttagtggcccctgcttaatctcttcattgaaaatggttgtgggaaatcattcaaaacaagaaagtgaaattctggaagaaagtatacgtaatttacagcttcttcttcgtccggaagatcattgctcatatggtcaccttttgcttttactgcgttgttcttccgctcacgattttgatccccgaagtttgggttcctatttggggagccgtctatattccgtcagtcattaccattctaaactctgtaggaactccaagatcaatccacctattgttttactggatcctgttcgagaacgtgatgtcgttgcaccggacaaaggcgacgtttatcggtctcctagaggcagggagagccaatgaatgggtcgtgaccgaaaaactcggtgatgctgtcaagaaagcagccgatgct

SEQ ID NO: 219996 - DNA, 291 bp, Gossypium hirsutum
cgaaaacatcgatgggggtttaacagtgttttgccccaccgaccctgttattaaggatgggatgcccaaatacaagaacttgacagcatccaagaaagcgtccctgctgttgtaccacagcgttcccgtgtatcagtccatgcaaatgctgaaatccaacaacgggattatgaacacattggccactgatggagcaaacaagtatgatttcaccattcaaaacgacggcgaggtggtgacattggagactaaagttatgactgcaaagattacagggactttgaaggatga

SEQ ID NO: 219997 - DNA, 315 bp, Gossypium hirsutum
ctcagaacagctcaaaaaagcttccaacattttgaagaaacaaagaatcaaacatgtcgaaggaagtgagtgaagaagggatgagccgaaaggactatgtggatcctccaccggcaccgctcatcgacgtggctgagatcaagctttggtctttttacagagctctcatcgccgaattcatcgctactctccttttcctatacgtcaccatagccaccgtcatcggccacaagaaacaacacgatgcatgcgatggtgttggtcttttgggtattgcttgggcttttggtggcatgattttcattcttgtttact

SEQ ID NO: 219998 - DNA, 404 bp, Gossypium hirsutum
atgcagtcctcttccgatcttgatcttcattcgcagttgaaggaattgattcctgaacaacaggagcgcctgaagaaactgagggcagaacatggaaaagtgcaacttgggaatattactgttgatatggtcattggtggaatgagaggaatgacagggttgctttgggaaacctcattacttgacccagatgagggaattcgctttaggggcttgtcaattcccgagtgtcaaaaactattaccagctgcaaagcctgatggagaacctttgcctgagggtcttttatggcttcttttgactggaaaggtgccaagcaaagctcaggttgatgctttatctcaagaattgcgtgaccgtgctgttgttccagattacgttttcaaggccattgatgctctacc

SEQ ID NO: 219999 - DNA, 401 bp, Gossypium hirsutum
gaaaaaaaaaaaaccagacatggcttccatttcttttgcatccgctgctcttcttcttacgttgaacttgttgttcttcactttggttagctctacctacgtgccttgcccaccaccaccaaagagccacaagcctacccacaaaaacccaccctcggcacctgaacagccaggcacttgccccagagatgcactgaaactaggcgtttgtgctgatttgttgggctcaaagcgcgttgttgttggaccgtcgaggaccaaatgctgctctctcatttcgggtttggctgatctcgatgctgctgtttgcctttgcactgctattaaaactaatgtgttgggggttaacctaaacgttcctgtttcatttgctttgctcctcaattcctgcgaaaagcaaa

SEQ ID NO: 220000 - DNA, 228 bp, Gossypium hirsutum
cccacgcgtgcggtttcttccatagccgcccctgtttatttaaaaaagagagagagaatggaggttgttgctgcatatttgttggctgttttggggggcaacacttccccttcagctgatgatcttaaggccattcttggctctgtcggagctgaagctgaagatgaaaggattcaacttcttttatctgcggtcaagggcaaagatataacagagcttattgcatcc

SEQ ID NO: 220001 - DNA, 385 bp, Gossypium hirsutum
gttctgggctccttggtgcggaccatgccttatgatcgatcccgtaataggtgaactaggacagcaatacgcaggaaaactcaagtgcttcaaactgaatacggacgatagcccctcgatcgcttcccaatatggaatccgaagcatcccgacactcatgatcttcttgaatggtgagaaaaaagatgcagttattggtgctgtgccaaaaactactctatcagcaagcatagagagattcttgtagatagcgattcataagaagtgatattgactgatggaatcatggaagtgtccagcactcatcacccacttggctttggttagatgctttatttctctctatgtgatgttgaaaattttcctacttttatgtcaaatttgg

SEQ ID NO: 220002 - DNA, 380 bp, Gossypium hirsutum
ctgatgacttgtttttgtaagagaggcatgttggatgaagctaagaaggtatatgaaggattggaaggtaatgggtgtaatccaaatgcggctacttttcggacgctggtgttttatttatgtttaaatggattgtatgagcaaggttataaggtgttcaaagagagtgtgaggttgcataagattcctgattttaacactttgaagcatttggtggagggattggtgatgaaaaagaagatcaaggatgcgaaagggttaatcaggacggtaaaagaagacgtttcctcccaactttttgatagcatggaagaagctcgaggaagaacttggtttggtttctggtaatgctgaagctcgtgaggctaaagaatcaacag

SEQ ID NO: 220003 - DNA, 395 bp, Gossypium hirsutum
accccgcattaccacactacgactcatccttatgggactggttacgtggagccctcgcgacggtcgaccgagattatgggatattaaacaaggttttccataacataactgatactcatgtcgctcatcatttgttttcgacgatgccgcattaccacgcaatggaagcaactaaggcaataaaaccaatattgggagagtattattcatttgatggtacaccagtttataaagcgatatttagagaggcaaaggagtgtatttacgttgaaccagacgaaggtgagcagagcagcaaaggtgtattttggtttagaaataagatctaactttgccgatagcgttgcggttgccgatggtgatgcctttaagaatgtgttaaatttgttacatta

SEQ ID NO: 220004 - DNA, 416 bp, Gossypium hirsutum
cgagtttgccgaactttatgttttcaaatggacatcacttctcattcctccaaccacagggcttattgtcaacctggtgggcattgtggctggcgtatcatatgctataaacagtggttaccaatcctggggtcctctttttggcaagcttttctttgccatctgggtgattgctcatttgtatcctttcttgaaaggtttggtgggtcgtcaaaatcgtacccctacaattgtcatcgtctggtctatacttcttgcttccatcttctcattgctgtgggtgcgtatcgacccctttacctcagaagctacaaaagctgccgctaatggtcaatgtggcatcaactgttagtttcattttcggatcattttattccggtaaatgctctctccttcaagttggctattgtgtatat

SEQ ID NO: 220005 - DNA, 195 bp, Gossypium hirsutum
ctagtgctgatatccttgttctgtctgctttagaaggcatcgtttcgttgggaggcccttgagcattcgtgtcaaaactggaagaagagacggtagaaggagcacagcagatgttgtggaggagtatcttccggaccacaaagagaccatctctggcgttctcgacaggtttgccgccatgggtattgacacccc

SEQ ID NO: 220006 - DNA, 392 bp, Gossypium hirsutum
  unsure (1)..(392): unsure at all n locations
tgacactacaaggatgaactactacaaggcttacctgactcaactgaaaaaggcagtcgacaacggagcaaacgttattggctactttgcatggtcattgctggacaattttgaatggagattaggctacacttcaaggtttggcattgtgtatgttgattactctaccctcaagaggtacccaaagatgtcagcttactggttcaaacagcttcttactcggaaaaaacattaagcaggcagagtttatgttacagtcatgtagagtaagtgctcatggaagaaaccaagtatggtgaggccattcctatgctntagtcctcccatagtatgttctttccttcctggcttaatcaataaaagcatgttaatgcttctcagttcatcgctct

SEQ ID NO: 220007 - DNA, 339 bp, Gossypium hirsutum
gaccacgcgtccgctttacttcaatccaatccatgtaaaggctttttcaagttggagtgaaaatggctgagaaagcaagtggaagaaaggaagaggtggcgaccagggattacaccatcaaccttcacaagcgcctccatggctgcacattcaagaagaaggctcccaatgctattaatgagatcaggaagtttgcagaaaaagcaatggggacaaaggatgtgagaagcgatgtcaaacttgaccaacacattttggacccgaggaatccaaaaaggttctaaaaagattaaggtccccattggtcccctgaaaaattattatgaaaaagccaaagaa

SEQ ID NO: 220008 - DNA, 396 bp, Gossypium hirsutum
agggaaaaaaaaatgggaagaggaaaattcaagggcaagcccactggccaccgccacttctgtactccagaagagctccgtgctggtacctcagctcggccccgtacatttaggaaggaagaagctgaagtagaggaagaagaagaacgagaagagtctgaagaggaaatagaagaagagcccgagaaacgaaaagggacccaagggcttattgagattgagaatccaaatttggctaaacaaaagaatgtcaaagccaaagatgttgatatggggaaaacaactgaactatcaaggcgtgaaagagaggagatagaaaagcaaaaagcacatgaacgatatatgaagctccaggagcaagggaaaactgagcaatcaagaaaagatttagagcgc

SEQ ID NO: 220009 - DNA, 399 bp, Gossypium hirsutum
aggaaatctgctgccgagaataccctcactgtctataaatctgctcaggacattgcagtaggtgagctagccccaactcatcctatccgtttaggattggctctgaacttttctgtcttctactatgagatcttgaactctcctgatcgtgcttgcagtcttgcgaaacaggcttttgatgaagccattgcagagctggatactcttggagaggattcatacaaggatagcactttgataatgcaacttctccgtgataacctcactttgtggacctcagacatgcaggatgatgggactgatgagatcaaagaagcttccaagcctgaggaagagaaacaaccgtgaagttcccagtctttgtggtagcattttacttctcttcttgtttttggatgg

SEQ ID NO: 220010 - DNA, 306 bp, Gossypium hirsutum
gcggaaaagtatggaataagtgggtttccaacattttaattcttccctaaaggtaacaaagctggcgaagactatgacggtggcagggatttagatgactttgtttctttcatcaacgagaaatgtgggaccagtcgtgatgcaaaagggcagttaacttcaacggctggtattttgtcaagtttggatgcattagtgaaagagtttgtggctgcttctgccgacgagaagaaagtagtcttctccaaaattgaagaggaagttgagaagctcaagggttctactgcgaggcatggaaagatatac

SEQ ID NO: 220011 - DNA, 413 bp, Gossypium hirsutum
cagccggcttgcttcaacccctgccagtcccagaaaggccatgggagagtttatccatgggttttattattggtttgcctaagtctgacgggtttgctagtattcttgtggtggtggacaggttttcaaagtatgcgacttttattccggcgaccaaagagtgccctgctgaggaagcagctcggttattccttagacacgtggtgaaatattggggagtgccactatctattatcagcgatcgagatggtcgatttactggtcggttctggacggagttgttcaagtcaatgggctcagaattgaacttctccacaagcatgcatccacaaaccgatgggcaaactgaacgagtaaatgcactgttggagacgtatcttcgacactatgtgagtgccacacaaaggaattgg

SEQ ID NO: 220012 - DNA, 275 bp, Gossypium hirsutum
  unsure (1)..(275): unsure at all n locations
aaattacaacttttnttttctaccccaaaggaaacaaaactgggccggtcgttttaaaaacagggctgtcccacactatggctctttcatcaaccanaaatgtcggaccagtcgtgatgcaaaaaggcacttaacttcaacggctggtattttgtcaagattcgatgcattaatgaaagagtttggggctgcttctgccgaccagaaaaaaatattcttctccaaaaatgaaaaagaaattgagaaacttaagggttctactgccaggcatggaa

SEQ ID NO: 220013 - DNA, 374 bp, Gossypium hirsutum
tatagttctggtctgctcaacactcttccttctctctaaatctaatactcagatccgcgagtgatggttgtcacagctcattagaatggagacctttctattcacatctgaatcagtgaatgagggtcaccccgacaagctctgcgaccagatctctgatgctgtgctggatgcttgccttgcccaggaccccgacagcaaggttgcctgtgaaacatgcaccaagaccaacatggtcatggtctttggagagattaccaccaaagccaatgtagactatgagaagattgttcgtgacacatgccgctctatcggatttgtttctgatgatgtgggtcttgatgctgacaactgcaaggtcctggtcaatattg

SEQ ID NO: 220014 - DNA, 419 bp, Gossypium hirsutum
ggaaaacagcaatggtgtctttgaagctgcagaagcggcttgccgctagcgtcctcaagtgcggtcgcggcaaggtctggctcgatcctaatgaaatcaacgaaatctccatggccaactccaggcagaacgttaggaaacttgtgaaggatgggttcatcatcaggaagcctactaagattcactcccgctctcgcgcacgtaggatgaaggaggccaagagaaagggaagacactctggatatggtaagaggaagggtaccagggaggcaaggttgccaacaaagattctttggatgaggagaatgcgggtactgaggcgattgcttcgtaagtacagggagtccaagaagattgacaagcacatttaccatgacatgtatatgaaggtcaagggtaatgtgtttaagaacaagcgt

SEQ ID NO: 220015 - DNA, 415 bp, Gossypium hirsutum
cttctttcaaccgcgcctaataaccgctcggatttttctcagacgtgaaaaaaatggggctggctttcaccaagctattcagccggctatttgccaaaaaggagatgcgtatactgatggttgggcttgatgctgctggtaaaaccaccattctttacaagctgaagttgggagagattgtcactaccattcccaccatcggtttcaatgttgagaccgttgaatacaagaacatcagcttcactgtttgggatgttggtggccaggacaagatccgaccattgtggagacactatttccaaaacatgcaaggacttattttcgtggttgatagcaatgatcgtgaccgtgtggttgaagctagagatgagttgcacaggatgttgaatgaggatgagttgaaggatgctgtgct

SEQ ID NO: 220016 - DNA, 370 bp, Gossypium hirsutum
  unsure (1)..(370): unsure at all n locations
gccagaagggcctanacctggtttcatggtggatggtgctacacttgaaactgttacgcccatcccatacgatgtcgttaatgatctcaagggcggttactaaatctactctgttttttgtttgcggtattgttttggtttccttttttttttttttggcaaaacatcagtggtgaactgaattaaacatttggaagtgctgttttctttagtatattttgaagaggtactgaatcttcagagattttaatgttatgatatcattttagagattatggatatgcctatgataaagtgtagtatttgtttatgcattgtgtttggtattatcattttgtcacagtccagtttaaaaccttactactttcat

SEQ ID NO: 220017 - DNA, 416 bp, Gossypium hirsutum
gaaaaggttcctttctctgaggccgacaggaccgaccagccggctagtttgtatgccgccacgcaagaaggcaggcgaagaaataacccacacttataatcatatctacgggctttcagttactggattaagatttttcaccgtgtacggtccatggggaaggcctgatatggcgtatttttcgtttacgagaaatattctgcaggggaagcccatcaccatttatcggggaaagaatcgggttgatttggcacgagattttacctacattgacgatatcgtgaaaggctgtttgggatcgttggatacatctgggaaaagcaccggttctggtgggaagaaaaaggggaacgctccatataggatttttaatttggggaatacttcgccggttaaggtgccggagctggtgaaca

SEQ ID NO: 220018 - DNA, 421 bp, Gossypium hirsutum
atttgctgctgcaacaagatggatgcaacaaccccaaagtactcaaaggcaaggtttgatgaaattgtcaaggaagtctcttcttatcttaagaaagttggttacaaccctgagaagatcccatttgtcccaatctctggttttgagggtgacaacatgatcgagagatctacaaacctcgattggtacaagggtcctactctccttgaggctcttgaccagatcaccgagcccaagaggccctcggataagccactccgtcttccacttcaggatgtctacaagattggtggtattggaactgtccctgttggtcgtgttgaaactggtgtcctcaaacccggtatggttgttacttttggtcctactggtctgaccactgaagttaagtctgttgagatgcaccatgaatcccttccgg

SEQ ID NO: 220019 - DNA, 410 bp, Gossypium hirsutum
gtttcttaattttcattcgatatcgaagatgtcgggaaggggaaagggaggtaagggacttggcaagggaggagcgaagcgccaccgtaaggtcctccgtgacaacatccagggcatcacgaagccggcgattcgacgtttggctcgtaggggaggagtgaaacgtatcagtggcttaatctacgaggaaacccgtggagtcctcaagatcttcttggagaacgtcattcgcgatgctgtcacctacaccgaacacgctaggagaaagacggtgaccgccatggatgtggtttatgcactgaagaggcagggcaggactttgtatggatttggcggttagatgatttaaggtttaagtttgtaattagaggagctttggtaatgtttagtcgaaataacagattgggtct

SEQ ID NO: 220020 - DNA, 383 bp, Gossypium hirsutum
gaaaaaatcaaacctttttcatcgtagagcatagctaaaccagaagaaaggggaaaatggacgcaattgactcagttttcgatccactgagagagttcgctaaggacagtgttcgtctcgtcaagagatgccacaagcccgatcgcaaagaatttaccaaggttgcgttccgaacagcgatcggattcgttgttatgggattcgtaggatttttcgtcaagctcatctttatccctattaacaacattattgttggatccggttaggccttgtcaacgtttgctgaaaatcggtagaatgtttaagttaagaggtacgtcatgagtttatgaagtaatttcaatttagacttgggtttgtctttaaattcagtttttgttgaa

SEQ ID NO: 220021 - DNA, 359 bp, Gossypium hirsutum
caaatgtctgtaacaacagctccagttacatcacaggggattcatcagacagatcctctgctagctctttcaacttggtgggtaccagtgaagggcaaaccacagacgatttagatggttgtaccctacttcaccttgcctgtgaaacgggtgacattggcatgattgaacttctattacaatatggagcaaatataaatgtaatggattcaagaggtcaaacaccacttcatcgatgtattctcaaaggcaaggctgcagttgctaaattacttcttaccaggggagcagatccgcaggtgttaaatagggaaaataaaacccctgttgagctatcagtggaatcaaattttgatgac

SEQ ID NO: 220022 - DNA, 263 bp, Gossypium hirsutum
gtcgaatataaaaacatcagtttcactgtctgggatgttggtggtcaagacaagattggggcgttgtggaggcattacttccaaaatacacaaggtcttatattctgggttgacagcaatgacagagaccgtgttgttgaggccagggatgaattgcatagaatgttgaatgaagatgaactgcgagatgctgtgttgcttgtttttgcaaacaagcaggatctttcaaatgcaatgaatgctgctgaaataactgacaagct

SEQ ID NO: 220023 - DNA, 337 bp, Gossypium hirsutum
aaaacgggccgaccgacgcgtacggacgaatataaaatcatcatactcttttttttttatgtccaaggacaccacaagatgggtcgtttgtttatacattacttccaaaatacacagactctcatattcttgattgacagcaatcacagagaccgacttgttgaggccagggatgaattgcatataatgttcaataaagataaactgctacatgctctgttgcttacttatgcaaacaaacaggatcttgcaaatgcactctatgctgctaaaataactcacattcttgccctccattcccttcgacaacattactagtatatccataatacttgtg

SEQ ID NO: 220024 - DNA, 320 bp, Gossypium hirsutum
ctctgacacacactgatctagacaaggaaaccgaggagataatcgctgatgtgctcggcgtagaaggtttcagacagacaattgctggtaatattcttgtagggagctactgtgccttttctaacagaggtggcttggtccatcctcatacatccattgaagacttggatgaactttcaacgcttcttcaggttccattggtagctggcaccatcaaccgtgggagcgaagtgatagccgccgggatgaccgtaaatgactggacagccttttgcgggtcagacaccactgcaacggagctttctgtgatagagagcgtg

SEQ ID NO: 220025 - DNA, 361 bp, Gossypium hirsutum
aaaatgtcttcaggttgcaattgcggatctagctgcagctgcggatctggctgcaattgcggtgagaactgctcaatgaaccttaaccttggatactcggagaagacaaccagcactcagaccatcatctccggagttgcgccagtgaagatgacctttgagggaccagagatgggcactactgaatcaggacatggatgcagctgtggatcaagctgcaaatgtaatccatgcacctgttgaagcttgatgaaagccatagattatgaaaaaagaaagcagcaaaataacaggcctctgtaatgatttattttcaaggatggatgcctgcaaggtctataattatgtctctctctgtctt

SEQ ID NO: 220026 - DNA, 411 bp, Gossypium hirsutum
gaggactacaacggccgcatcgtcggttacgtcctcgctaagatggaggacgaaagcaacgggtgccacggccacattacctctctcgccgtcctccgcactcaccgcaagcttggcctcgccactaagctcatgaacgccgcccaagccgccatggagcaggtgtttggagcagagtatgtgtcgctgcatgtgaggaagagtaacagggcagcgtttaatctgtatacccagacgttggggtataagattcatgatgtggaggccaagtattatgcagatggggaggatgcatatgacatgaggaagcagttgaaagaaaagacgaaccatcatcatggtcatcatcatcaccaccaccaccaccatcatcatggtggtggatgttgttcaagtgatgcaagaagtgga

SEQ ID NO: 220027 - DNA, 242 bp, Gossypium hirsutum
  unsure (1)..(242): unsure at all n locations
gcacgagtatctccccgaagatcttcagaaaatgcagacaccatttaggagctatcttcaagatatgcttgctcttgtgaaagaagagagagcagagcgagaagcattgngagctttgcctctgtatcagcgaaccattccttaagggttttcatgccgtatctcatagtcattgctgttgaaattgtgtttgatatcttattgcgatggatttgatagcgagtgactgaatttacaatctg

SEQ ID NO: 220028 - DNA, 329 bp, Gossypium hirsutum
cttgaaccttgcatggaagctcctttcggttgtgaagcaaagtaaaagaatgctggatccaggcatttacgcaaagctaatattggagcttggaaagaatcctgataaacacatccttgtagaagagttactgggtgatcttggagaaaaaagaataattgaatttgaattcacaaggactgtccagggatcatgaaaggttggattaaggcatagaaagttgaaaatggggagagcttgttttactggttcaagcaatcaaggcgtgaccccagtgtggtgatgtacacaacattgcttcatagtcgttattctgagaacaagtacat

SEQ ID NO: 220029 - DNA, 360 bp, Gossypium hirsutum
  unsure (1)..(360): unsure at all n locations
tgctgtcagacatgttcttttgagacagggggtgcttggtatcaaggtcaagatcatgcttgactgggatcctaagggtaagcaaggccctactactcccctacccgatctagtcacaatccaccctcccaaggaggatgaataaatcatgagagtagagcctgagccaactaatattgaggttccagttatggcttaaatactgttttggttgacatctttttgatttttggaagtatgtgagtttcttagttctatgtagctaaaagtttggcctcaaagaccccagcattttgtgggttcttctttntgtactctaatgtttctcctactatagntattacgtaattggtaattttc

SEQ ID NO: 220030 - DNA, 421 bp, Gossypium hirsutum
ctagatttaggggagatagggtcattatcgtcatttcacgctatgaatcggcgataacgggggcgggtcatatcaacggcaaaataagagaagaaaagagatgtacagaggagagagagccgccggtggttccaaaggggaggtaggttcggtggatcggaaacggatcaacgaagcgcttgataagcaactggaacgatcgtcgccgtcaacatcgagagcaatcaacggcaaggataagtcatcgcagtcccttcaaatggggaagcatccacctgatcattaccgtgactcttgttctgcttctctacctaaaccgaacgcctccggtgatgaatctgaaactgacagtgaagagtcggatgttagtggttccgacggggatgacacatcttggatctcatggttttgcaatctacgt

SEQ ID NO: 220031 - DNA, 345 bp, Gossypium hirsutum
  unsure (1)..(345): unsure at all n locations
aaaaaaggcaactagacttgagaaagaaaaacagtctcaaaatgcagcagaagtcaggcttcgggagcctcttgctctccctcattttccttcctctcatcttctccgacgccagaaaggaggctcccctcggaggatggagtccgatcaaagacaccaaggacccacacgtgataaagatcgcggaattcgccgtcgaggagtataacaagcagtcaaatgggagtttaaagttggttaaggtggtgaaaggcgagacccangtggtggccgggacaaactaccggttgattttgcaggcgaaggaaaggaccttcgataacacgtataangctgtggtgtggg

SEQ ID NO: 220032 - DNA, 297 bp, Gossypium hirsutum
caagagctcgatggcagcattttctcaaattatcaataatgaaggtgccaaatcgctgttcgggggggctggtgcaaacattcttcgtgcagttgcaggggctggcgtgcttgctggctatgacaagctgcaagtccttttccttgggaagaaatatggatctggtggcggctaatgtggaaggtgattctgctgccttaaagaatgatctagcgtcccaagttcgaataatttgggaaggacaaactgcttataatcgttctcgtacccagtaattaagaatttaatttgaaaaag

SEQ ID NO: 220033 - DNA, 408 bp, Gossypium hirsutum
atagtattttgtttttttgttttttacaaaaacatccttcctccatttcagaccaaggaagggaaagcaatgaagccagtctttaccattatatcggcattattacttgccgtcatcgccaccgtcaacagctgccctccgtcagacagggcggcgctgttagcattcagagcagctctccacgaaccatacttaggaatcttcgattcatggactggcacggattgttgccacaactggtacggcgttagctgcgacagtgagtcacaccgagttgccgacatcaacctccgtggtgagtccgaagaccccattttcgaacgagctcaccggaccggttatatgaccggttttatctcaccggaaatttgcaagttgacccgtctttcaagtattactatagctgat

SEQ ID NO: 220034 - DNA, 410 bp, Gossypium hirsutum
  unsure (1)..(410): unsure at all n locations
atgctgggcagttcccgtgtaatcgttatacacactacatgacatcctctactagcatagagcttaatcttgctaggagggaaatggtcatcctcggcactcaatacgccggggaaatgaagaagggtcttttcagtgttatgcattatctcatgcctatgcgtcaaatcctctcgttacattctggatgcaatatgggaaaagatggagatgttgccctcttctttggattgtcaggtacgggtaagaccactttgtctaccgatcacaacaggtatctgatcggtgatgacgagcattgttggagtgacaatggtgtgtcgaacatcgaangtggttgctatgccaagtgtattgatctttcaagggagaaggagcctgatatctggaatgccattaagtttggaact

SEQ ID NO: 220035 - DNA, 249 bp, Gossypium hirsutum
gtgctaaccacatctgctggcatcatggaccatgaagaagctagaaggaagaatgttggtgggaaagtacttggctttttctactgagtcaaatttttgatattttccttggttcttttttaattccactccatgtagaactggatacttaactgcaattttaattttgaatgggaagtaataataatgttttgggttataaggttggaaattatgaatggtgggttggccttaaaaaaaaaaataaaa

SEQ ID NO: 220036 - DNA, 416 bp, Gossypium hirsutum
gccatggttaggttggtatgctccgacaggaagagcggccaagttgtcttcaaaaaggagggatacaccgacaaaaccggaaaataccagattcgtgtatccgaggatcacttggatcagatctgtgatgcagttcttgtgaagagctcccagcttggttgtgccacaatgtcccccggtcgtgaacgtgcccgtgttatcttgaccaacttcaatggcatttcatccaccacccgttatgccaatgccatgggcttcatggttgacgagcctgaagcaggctgtgctgagatgatgaagatgtatcaagaagatgaagaagatgtctagtgtgttggtttggatttatttgcatatgaaatatgatgttgtctgctatttgttatgtgaattgctccgttatttctacgtttaga

SEQ ID NO: 220037 - DNA, 409 bp, Gossypium hirsutum
gatttttcttacaagtgcgctcggttggtgtattgaatggcttcaggcatattttcttgttcttgatgacatcatggacagctctcacacccggcgtggccagccttgttggtttagattgccgaaggttggtatgattgctgtaaatgacggtgttatacttcgcaatcacatcaccaggattctcaaaaatcactttcgtgggaaaccttactatgtggatctgctagatttatttaatgaggtggagtttcaaacagcttcaggacagatgatagatctgattacaacacttgaaggagaaaaggatctatccaaatactcattgcaacagcaccgtcgcattgttcagtacaagactgcctattattcattttatcttcctgttgcgtgtgcactggttatgtgt

SEQ ID NO: 220038 - DNA, 371 bp, Gossypium hirsutum
ctgaaaccctaatcctaatcccagattccttctgtctacatcgtttagcaaatggcaaccgaggacccggcagtcgtggcagaccccgcacccgagacggaggaggacaagactgctgagaccaaagctacttcaaaatccggcagagcaaagaaagccaaagaacccaaaaccaagaaagctgcagctcctaggaaaccacgggctgctcctactcatcctccttacgaagagatgatcaaagatgcgatcgttactttgaaagagaggacaggttcaagtcagtacgccattgctaagttcattgaagagaagcagaagaatctttctggaaatttcaagaagcttctgcttgtccatttgaagaaact

SEQ ID NO: 220039 - DNA, 380 bp, Gossypium hirsutum
ggccaacttcttggattagatgttggcagtgttcttgaagttaccaactgtttcccttgcgcgatccgcgaggaagatgaggagattgaagctgatggagctaattatcagcttgagatgatgagatgtctaagggaggttaatgttgataacaacactgttggatggtaccaatcaacgattttgggctcatatcagacagttgagctcattgagacttttatgaattatcaggagaatattaggaggtgtgtatgcattatctacgatccttcgaggtctaatcaaggtgtcttggctcttaaggctttgaagctatctgattcttttatggaactttaccgagctaatagctttactggagaaaagtgagggagaaa

SEQ ID NO: 220040 - DNA, 410 bp, Gossypium hirsutum
ggaaaccatgccttttaagagcataagaatggaagcgcaagatcattttaagcaggggggaggtgtttctatgtacaaaatagatggtaacaaattggacgatctagtatgcgtgagacattctgtaaactccaagggctaagaaatattacaggttgatgcccttctgtattctctttggtggtatgagtgggagaaaccgttccttatcaccaacaaatcatcaatgagatgatgagtggccgtttgggaatagcaatctgtcattttgagtttggtgaaatgttgtatggtacttctgaatgctgtcctgtgtgtgaagcattgcccatgcttccaatgtggaaaaggccatagaagacattttgctctgtggtcgcaaactatgattacttgctacagggtttctc

SEQ ID NO: 220041 - DNA, 393 bp, Gossypium hirsutum
ggagaaattgttgaaacatgtgttttggtcgaacggaccggaaacggagcatccgacggtggagaataaacagtgtgccggtaaggaatttttggtgttgatttctaggttgtttgtggtggaacttttccgacgttatgatacgtttgagattgaagttgggacatcgacgtttggggctgccattaccataaagtcgttaaataaagcaagcttttaagtatactggaatattcgtcaatgcaggggctttgtcaaatgtgtcatgttttttcttcaataaataatgtattatcgaatgttgaatttccgtttatgcaccatattttatataactaaaatatgtagccaattcttgtattatttgaataaaattggttaaattttactatt

SEQ ID NO: 220042 - DNA, 397 bp, Gossypium hirsutum
  unsure (1)..(397): unsure at all n locations
atggaattgatgatttaaggtctgtaagacctgatacaaatatgattagagagtgtgtggcagaaaacctgtcttcagagaatgaactcggtggtgctgtttgggatattttccggagggaggatgtacccaagttaattgagtacttacagaagcatcacaaagaattctatcacattagtaatcttcccgtgaattttgttattcatcctattcatgatcagaccctttatctcactgaaagacataaaaagcagcatgaagatcaaggttgttgcacccccccaccgcaaacattaatgtcaatagctattgtacgagaaattttaaaattcgatgggaattatattttatacttggttttgtaaaaaaataaanctataaataaaaaactaaa

SEQ ID NO: 220043 - DNA, 224 bp, Gossypium hirsutum
  unsure (1)..(224): unsure at all n locations
atcgaagagaagtatacatggaagatttatttggagagactattgaccctgacgagagggtatggattctggaagcatgtttccaaccttgaacgccgtgagagtcgtcgttaccttgagatgttttatgctcttaagtaccgcaagctggctgaatcagttccattggcagaggagtaaatttaagctgttaaataacattgggccggtttttcttggngaat

SEQ ID NO: 220044 - DNA, 406 bp, Gossypium hirsutum
  unsure (1)..(406): unsure at all n locations
ccgagtcgaaaacgaaaccctaaattcatttctccctcccccttcaccaccggcaggggaaaggaagtacaacccacgtgnctcctcctctcgccgtaagagccgcaaggcccatttcacggcactttcgtccgtccgccgagttttgatgagcgctccactctcgaccgatctgaggtccaaatacaacgtccggtccatgcctgttcgcaaggacgacgaggtccaagtcgttcgcggtacctacaaaggccgcgaagggaaagtcgtgcaagtgtaccgacgcaaatgggtgatccacattgagcgtatcacgcgggagaaagtgaacgggtcgaccgtcaacgtcggtatcaacccatcgaaggtcgtcatcaccaagctgagactctacaaagatcggaag

SEQ ID NO: 220045 - DNA, 411 bp, Gossypium hirsutum
gcaccaatgtggcttgtggcactgcccatttagacgatgctaaaaaagtagctgccgtgagctgatgcaactgtacttgttatgggcatagatcagagtcaagaaagggaaagctttgacagagttagccttcttttaccaggacaacaaccacttttaataactgaagttgcaaaagctgcaaagggacccgtgattctcgtcataatgtccggtggaggctttgacatatcgtttgcgaaaaacgatgataaaatcacaagcatcctttgggttggttaccccggcgaagccggtggagccgccattgccgatgtgatatttgggtattataatccaagtggaaggctaccaatgacatggtacccacaatcgtatgtcgataaggtcccgatgacaaacatgaacatg

SEQ ID NO: 220046 - DNA, 380 bp, Gossypium hirsutum
  unsure (1)..(380): unsure at all n locations
caattgccttgctccattggtagtggacattcacttcaagttaggcattgttgagggtgggatggccactgtccattcnattactgcaacccaaaaaaccgttgatggtccatcaatgaaggattggagaggtggtagagctgcctccttcaatatcattcccagcagcactggagctgccaaggctgttggcaaagttttgccagcattgaatggcaagctcactggaatggctttccgtgttcccactgttgatgtctctgtagttgacttaacagtgagacttgaaaaggctgctagttatgaagatattaaggctgccatcaagaaagaatctgaaaccaacttgaagggaattcttggttacgtggatgaagatt

SEQ ID NO: 220047 - DNA, 402 bp, Gossypium hirsutum
gctgcccagaaagtcgtcgaagtcaatgctcttgccaaggcattggctggtcagaaggatgaggccttcttcactgccaacgcatctgctcaggcttcaaggaagtcctccccgagagtgaccaatgaggctgttcaaaaggctgctgctgctttgaagggctctgaccaccgtcgtgctacaaatgttactgctagactcgatgcccagcagaaaaagcttaacctgccagtcctccccaccacaaccattggatccttccctcaaactttggagctcaagagagttcgtcgtgaattcaaggctaacaagatctcagaggatgattatgttaaagccattaaagaggaaattaagaaagttgttgaccttcaagaagagcttgacattgatgtcctggtt

SEQ ID NO: 220048 - DNA, 401 bp, Gossypium hirsutum
ggaaacaaaggccttcatcttagcactccttcgccccttatctcatcgcaatcatgatcgtgccagaaaagaaccgcagggagatatcaaagtacctctttcaagagggtgtttgctacgccaaaaaagattacaacttggcaaaacacccagaaatcgatgttccaaatcttcaagtaataaagctgatgcaaagcttcaaatccaaggaatacgttcgtgaaacttttgcttggatgcattattactggtaccttaccaacgatggcattgaatttttaaggacttaccttaatctcccctctgagattgttcctgctactttgaagaagcaaactaggcccggcggtggtcgtcccatgggtccttctgatagccgcccacgtggtccgccacgcttt

SEQ ID NO: 220049 - DNA, 411 bp, Gossypium hirsutum
gctgtccgggacgcattccggagactagtttgggtggcgaacgtgacatctctgggtgggttcgacacatgttactcggtcccaatcaatgcaccgaccataacatttatgttttcgggcatgaacgtgacactgccacaagagaacctactgctccacagcacagcaggcagcatcacatgtcttgcgatggcatcggcaccagcgctgaatgtgatcgccaatatgcagcagcagaaccatagggtggttttcgatgtgccaaattcaaggatgggggtcgcccgtgagcgatgttcgtaaaaagtgtggggtctttttcttctaacttttgggaaacagtgttggtgttgattaaaagcagaatatatctgattaataatgaaagtcaaatttttgtagttatatatt

SEQ ID NO: 220050 - DNA, 412 bp, Gossypium hirsutum
  unsure (1)..(412): unsure at all n locations
gcagaactatggggagaaagttctcattcattttgaagattttgcaaatcacaatgcatgtgatttgcttgctaaatatggcacaactcatctggttttcaatgacgatattcagggaacagcatctgtggtccttgctgggcttgttgctgcattgaaagtagttggcggaaccttggctgatcatagattcttattcctcggtgctggggaggctggtactggcatagcagaactcatagcacttgagatttcaaaacagacaaatatgccacttgaagaggctcgcaagaagatttcgcttgtggactccaagggactgattgttaaatcccgcattgactctcttcagcatttcaagaagccctgngctcatgatcatgaacccatcaagaaacttgttgatgctgtt

SEQ ID NO: 220051 - DNA, 400 bp, Gossypium hirsutum
gcaaacacaaagctttcaagcaacaagactgttagaaggattagggttcgtggtggaaaggtcaagtggcgtgctctcaggctcgacactggaaactactcgtggggaagtgaggctatgactcgtaagacccgaattttggatgtggtgtacaatgcatccaacaatgagttggttcgtactcaaactctggttaagagtgctattgttcaagttgatgctgcaccattcaagcagtggtatctccagcactatggtgtcgacattggtcgcaagaagaaaacagcagccaagaaagaaggagaggaaggtgaaactggcactgaggaggtgaagaagagcaaccatgtcttgaggaagctggagaaacgacaacagaatcgcaagctcgatccacata

SEQ ID NO: 220052 - DNA, 365 bp, Gossypium hirsutum
agactggccaacaaactactgatcgaattatggtggaacatataataagggaagagaacgggatggctgctcaagagatcctaaaactgactagcgagcttattgccgtccggcttccgatcatagagacttaaagggaatgtcctctagattagaaggaagcaacatctaatgtttgttctgctgcaccaagacatgccgatctaccaaaggtgctgcaggttcaaatgctatttgcttacaagaacggcaaggaatttgcatcaactgcatctgaactgacgccagattgctgagacaatcagcagttgatacaattgttatacatacgcgtggcttcacctgaagcaaaactgaagattctg

SEQ ID NO: 220053 - DNA, 418 bp, Gossypium hirsutum
aagaacatcattcaacctcgattcatggttcagcttttgcacaaagccagaagatcatcggtgccaaccaaaacatgttaattcttgaacattcggctaagaactgttccacaaaaacccaagtaaaagcccgtccggtagttggttctaagcttgtagcacaaggtgttcttcgtaaacccgggaatggctcagctcttggtcccaaggctccggttcaaccaccacctgaaatatggacaaggggaaatggccttgatgaagttgttgacatggcagatatgttgcaaatggaatcccaagattggttcctaggatttgtcgagaaattcttggatgccgatgtagacacatctgttctatccgacaacggtcaaatagccgggatgttgacacagctcaagagtgttaatgactg

SEQ ID NO: 220054 - DNA, 413 bp, Gossypium hirsutum
gcacaaactcaaacgtcttgtccagtctctaaattctttcttcatggatgtcaaatgccggggctgtttcaacataacaacagtgtttagccactctcaaacagtggtggtatgtgggaattgtcagactgttctttgtcaaccaacaggaggaagagctagactcactgaaggatgctctttcaggaagaagggtgattgatctcatattttgctattttatgattcacaaaaacaaaagaaagtaatctttggatcaaatatgggaatcatatgagtaatctttttcatgtgtttcagttatgacatatgtttgaagtttatttttgtagtaagtttgttcctaagctttgatacttgatgatggtattaatcaattatggattgtctttgtagtggatgaagtttatttt

SEQ ID NO: 220055 - DNA, 409 bp, Gossypium hirsutum
  unsure (1)..(409): unsure at all n locations
cttgctttancagcagtttcttccctttcatagttgctgaggatgatgtttgttgagagagccgaatgcttgagagtttactggagattactgacactgatgccgatgttggcagaatggaagccaaaaatgtagccatggacttcattcatgaagttggttggcttcttcatagaagtcaattgaagtctagattgggccagttggatcctagctcagaatccttttctctaaggcggttcaagtggcttatggagttctctatggaccatgaatggtgtgctgtagtgaagaaacttctaaatattcttcttgatggaacagtgggctctggggagcaccactctatctaccttgcattaacagagatgagtcttcttcacagagctgttaggaaaaattgtagacc

SEQ ID NO: 220056 - DNA, 307 bp, Gossypium hirsutum
ctggcattgcattaaatgacaattttgtttttcttgtcgcgtggtacgataacgaatgggggtgcagttctcgtgtgatcgacttgatccggcacatggcttctgcctaagtgagtgattttggtgaaccaaactcatttcataatggactttttaataatagcctcgttcttcagctttagcaaaatatggaagagatgctatgggaataataatagaaattgctcgggattctgggagtttctaattttacactgtaattgtgttctgtctgaaacacttgtaatatatataattacaaggaacc

SEQ ID NO: 220057 - DNA, 408 bp, Gossypium hirsutum
  unsure (1)..(408): unsure at all n locations
ggatgtcaatgctgctgttgccaccatcattaccaagagaactattcagttcgttgactggtgcccaactggattcaagtgtggtatcaactaccagccacccactgtcgttcctggtggtgatcttgctaaggtccagagagccgtttgcatgatttccaactcaaccagcgttgctgaggtgttctcccgcattgaccacaagtttgatctcatgtatgccaagcgtgcctttgttcactggtacgtgggtgagggtatggaagaaggagaattctcggaagctcgtgaggaccttgctgcacttgagaaggattatgaagaagtcggtgctgagtcangcgaaggtgatgaagaaagatgaaaatgagtactaaataagtaatgtttgagtggagggcttgcatt

SEQ ID NO: 220058 - DNA, 392 bp, Gossypium hirsutum
gcgaaagaaaaaaatgcgaccacctatggtcggcggaggttttaggggcggaagggacggtggtcgagggagaggaggtggccgaggaggctttggtcgtggtggaggacgtggtggcggtgggttccgtgatgaaggacctcctgctgaagttgtggaggtctctacctttgttcatgcatgtgaaggtgatgcagtgacaaagcttaccaatgagaaaataccttactttaatgctaatatttatctgcagaacaagacccaaatagggaaagttgatgaaatctttggtcccatcaacgaatcctatttttcaatcaaaatgttagaaggtattgtggcaacttcgtatgctccaggtgataagttttatatcgatccgagcaagcttt

SEQ ID NO: 220059 - DNA, 399 bp, Gossypium hirsutum
ctcggcgtcagcatttgagttagacgagtctgatatctacaacaacggtgtctggactgggtctgactcgcctgagttcaggtccaccagtcgagtggcgaagaagcagtccaacaagcgcggcggcggagggaattccgtcgtcggaggggcgccggcctccctgccggtcaacataccggactggtcgaagatcttgagggaagagtaccgagataataggaggagatcggagagcgacgataatgacgtggaagccgatgattggtcggaaggaggtgtcaggattccgcctcacgagtttttggcgaagcaaatggcgaggacgaggatcgcgtcgttctcggttcatgaaggggtagggaggactttgaaaggaagagatctgaggagggtcag

SEQ ID NO: 220060 - DNA, 414 bp, Gossypium hirsutum
aagagagagagatatatacataataaaaattacttttcaaaagaacacaactatggctcctgatagagaaggatcagatgcttcagtggaagccatggttgctcaagtcgaaaaacacccaatttcatcgatccttatcatcattgctatgcaaacagaagctttgccggtggtgaataagttccagttgattgaaaaccctcattcttcgtttccaaaaggggtcccttggatccattatcatggtgcatacaaggacatcataatcaatctagtttggcctggaaaagatttaacctttggggttgatagtgttggcacgatttctgcctctcttgtgacctatgcatctatccgagcattgcagccagacctaatcataaatgctggcactgccggcggctttaaggaaaa

SEQ ID NO: 220061 - DNA, 435 bp, Gossypium hirsutum
ggcgagccacgcgtgcgcttcaaaaagttgcaaggcaagccagatcttatcatcggaaactacagtgatggcaatgggggggcctccttgctcgcacataaattgggtgtcacacagtgcaccatcgcccatgctttggagaagacaaaatatcctgattcagatatctactggaagaagcttgaagacaaataccatttctcttgccaatttacagctgatctttttgcaatgaaccatacagatttcatcatcaccagtactttccaggaaattgcaggaagcaaggacactgttggtcaatacgagagccacactgctttcactcttcctggtctctaccgtgttgtacatggtatcgatgtgtttgatcccaaattcaacattgtttcccctggtgctgatatggagatatacttcccttacaccgaagag

SEQ ID NO: 220062 - DNA, 213 bp, Gossypium hirsutum
ttaaaaaactcctccatggactcaagggtggttcagccggtccatctcacttagagcacccgcctgatcatccctactgacggcgatactctccttgccttaatagaccgggtcgttcctcccgcacttttacttttaaaaaaataaagtgctctaaacaggcctacgcttgtatacattaacatcggataacaatataagatttcgatccta

SEQ ID NO: 220063 - DNA, 410 bp, Gossypium hirsutum
catcagtcaagaattaaaccatggcaacgtatgaagtcaaagttttgggttcctggccgggtccatttgcgatgaggcctaggattgcccttaacctcaaatccctcacctatgaatacattgaagagaagttatgggaaggcaaaagcgagcttcttcttcaatcaaaccctgtttacaagaaaataccagtcctcattcacggcgataacaagccaatctgcgaatctctcatcatcgtacaatacatcgacgaggcttggtcttccggtccttctattcttccttctgacccctgcgaacgtgctgtcgctcggttttgggctgcatatcttgacgacaagtggttcccagcggtgaaaagtataggagtcgctaaaggagaggaagcaaagaaagcagcaatagcg

SEQ ID NO: 220064 - DNA, 410 bp, Gossypium hirsutum
cacccatcgccaagatgcagatcttcgtcaaaaccctaacggggaagactataaccctagaggtcgagtcttccgacaccattgacaatgtcaaagctaagatccaagacaaggaaggcattccacctgaccaacaacgtcttatcttcgccggcaagcaactcgaagatggccgcaccttagccgactacaacatccagaaggaatccactctccaccttgtcctccgtctcaggggaggtgcgaagaagagaaagaagaagacctacaccaagcccaagaagatcaagcacaagaagaagaaggtcaagctcgccgtcctccagttttacaaggtggatgagtccggtaaggttcagagactgagaaaagagtgccctaatgcggaatgtggcgccgggaccttcatg

SEQ ID NO: 220065 - DNA, 383 bp, Gossypium hirsutum
gctcagggagaaccaagtctcactggtcattaaatcattatggacaccaaaagccgctcgggcgcccatgaatgcagtgctgattctggaaaggaccctaccaaggtggacaggcaagcaccttacataagcaggcaggctatcaagagcaatctggctaaggggcatgaccaaaggtgaattctgcagggttcttatactaacggtgtgcctgagcacttgtgtgtctttgtagacagctatggaactggaaagattactgacaaagaaatcctccaaaatgtgaaggagaacttccacttcaggcccagtatgatcaccatcaacctggatctcaagaggggtggcaatggccggttttttgagacagctgcctacggaca

SEQ ID NO: 220066 - DNA, 396 bp, Gossypium hirsutum
cgctcgcttccccatctacagggtttacattgggattgaggcagctgtaaccaatggctggcaaggttgagaagaagggagatgcaaaggcacaggccttgaaagctgcaaaagcagtgaaatctggagccacttttaagaagaaggccaagaagatccgaacaaaggttacgtttcacaggccaaggaccttgaagaaagataggaacccaaagtatccacgcattattgccccaccaaggaacaagcttgaccattaccagattctcaagtttcccctcacaactgagtcagccatgaagaagatcgaggacaataacactttagtatttattgttgacatccgtgcagacaagaagaagatcaaagatgctgtgaagaagatgtatgatattc

SEQ ID NO: 220067 - DNA, 410 bp, Gossypium hirsutum
gctctgtaaaaatcaagaaaagcagagatgttgtcaagttcaaggtccgctgctccaagggcttgtacaccctttgcgtgtctgatgctgagaaggctgacaagttgaagcagtctcttcctccaggtttgagcgtccaagacctgtgaaattaaaactgcccttagcttgtactaggcaatgaaaactagattttgacttttagtttattgcttgcatttcgaatcgttttgcaacgatcaaaagtttttataatggatttttatttggtgtttttttatggacgttagtaatgttattaaaaccctttatttattttagtattcgtgttctacatcttagtttggcacatattggataatcaaacatatgaaaaagaaaagaatcaatatattctgattcagtaaaaa

SEQ ID NO: 220068 - DNA, 401 bp, Gossypium hirsutum
agcgcatgtcactaagtacagttgtctttgttggaggcttgactccatgggaagagaaagtggtggagcgtgcgaaagcacttagagtacaacccggaacagaacccgatacagacattggtccggtgattagcaagcaggcaaaggaactcatatgcagattgatccaatcaagtgttgacagtggtgcaaaactagtagttgatggaagaaatattctggttccagggtatgagcatggtaacttcattggcccaacaatcttatccaatgtcaaggtcagcatggaatgttacaagaggaaacttgtggcccggttctcctgtgcatggaggcagacaacatagaagaggctatagacattgttaacaggaataaatatggcaatggagcttcaatat

SEQ ID NO: 220069 - DNA, 367 bp, Gossypium hirsutum
gttgctatatagcgagcgcgcgctctataggagacacacttacacacgcgcgcgtgcgaggcgatatatcttttatatagtgacctaaatacaaaatactgtgcgcggttttacaccacgtcgactgtgaaaacactgtggtgacacaactcaatatcgttgcggaacatatccctttttccagatgtggtaatatcgaaaaggcgcgcaccgatctcgcttttcaacacatgtgcacactctatgtggaatgtgacacgccctgtatcggcgcatataacgcgccgggtgtgttgggtacacgcacagtgacacctatacttttgagagcgctatagcgcgctccttttgctttctttcctttctt

SEQ ID NO: 220070 - DNA, 423 bp, Gossypium hirsutum
gtagagattaaggcttctcctaagcagtttcatgaaatgtttgcccacaaaccgcaccatgtgcaccatacttgttatgacaagattcaaggatgcgatttacatgaaggtgaatgggggaaagtcggtaccattgtccattggagttatgtgcatgatggaaaggctaaaaaggcaaaggaagtagtggaagcagtagaccctgataagaatttggtcactttcagagtgatcgaaggagatctaatggaagagtataagagctttgtaatcacgattcaagtttcgcccaagagcgagggtagtggcagcgtagtgcactggactttggaatacgagaagctgcacggtgggattgcgcatcctgagactctgctgcaattcgttcaagatatctctaaagacattgacgcccacctcacc

SEQ ID NO: 220071 - DNA, 310 bp, Gossypium hirsutum
cggacgcgtgggcggacgcgtgggcagcattttgctagcttgaaaccaggcgatgtgagttgaggtgaaagggcccattgaaaagctcacatactcacccaatatgaagaaacacattggcgtgattgcaggtgggacaggcataactccaatgcttgaggtgattgaggctatactaaagaaccctgatgacaagactcaggtgtcactgctttatgccaatgtctcccctgatgatatattgctcaagcagaagcttgatatacttgctgctagtcatacgaatattaaggtgctctacactgtagac

SEQ ID NO: 220072 - DNA, 309 bp, Gossypium hirsutum
catgaactcggttaaacaggttgaagagaatgttgccgctgcaacagaacttgcactatgcgggaaagatcatgaaactctagctgaggtggaagcaatactgaagccagtgaagaatcagacatggccgagcggaattcaacgaagctgagcaacaatatcgacccgtatttttattattgtatgcatatattctcccacatggaatgggggcaaccattctgttgttatgatactagtatttagatgacataaattttcgtccctgtccaagtaaacttgctactgtccgataacgagtatgattga

SEQ ID NO: 220073 - DNA, 407 bp, Gossypium hirsutum
  unsure (1)..(407): unsure at all n locations
gctgaggttctaatagagttgaaaccatatgtcgagcttgctgaaaaacttgggaggctggctgtccaattggtagcaggtgtaagtggtgtaaaaaatgtgaaagtgtcgnatgcttcctctagagctcctgatgaccttgacacaaggctgctccgtgcgatgatcaccaaggggcttattgagcctatttccagtgtttatgtgaacctagttaatgctgattacaccgctaaacaaaaatgactgcggattacggaggaacgcattgttatagatggttcacctgagtgtccactagagtccatccaagttcagattgccaacgtggaatcaaaatttgccggcgcgatatcagagttgggtgagattaaagtcgaaggacaagtgaaagatggaattcccca

SEQ ID NO: 220074 - DNA, 384 bp, Gossypium hirsutum
tgcggagttggtggtgttcttcttctgtctggtttgattgtgctcacctgtatagatcaagatgatgcaaggcataatttcggccataccggaggtttcatatgcccttttgttccacttctaccaattgtctgcattctcatcaatgtctacctgctcatcaatttgggggctgcaacatgggctagggtatcggtgtggcttttgataggggtggttgtatatgtgttctatggtcgatcccacagctctctgctggatgcagtctatgtgcctgcagctcatgcggatgaaatttatcgatcctcgggtgactcgttggtttaattccaccttgaatgcaggaaccattgtggaatttttgtcggacccaagggtgggggg

SEQ ID NO: 220075 - DNA, 406 bp, Gossypium hirsutum
gggatgggaactgtgttagaaatcattgtttttgctgagtccgctagtcagtttggtgaggtggttgttgacccgatcacaaaacagctattgcactacaccgaaaagcccgagacttttgtaagcgatttaattaactgtggagtttacgtctttactcctgatatctttactgccattcaagaagtctccacacaccgagaagaccaagctaatttacgccatttgacaagctttgaaacgctgcagtctccaacaagggctcttccccaagattttgttagattggatcaagatatcttgtccccttttgctggaaagaagcaattatatacgtacgaaactatggatttctgggaacagatcaagactccagggatgtctctaaaatgttctggtctttatc

SEQ ID NO: 220076 - DNA, 397 bp, Gossypium hirsutum
gtgttggaattattgtttaccgcggtctttactttggaatgtatgattctttgaagcctgttgttttggttggtggattgcaggatagtttcttggcaagtttcttgctgggttggggtatcacaataggtgctggactggcatcttatccaattgatacggtacgtagaagaatgatgatgacttctggagaagcagtgaaatacaagagctcgatggcagcattttctcaaatcatcaagaatgaaggtgccaaatcgctgttcaagggtgctggtgcaaacattcttcgtgcagttgcaggggctggtgtgcttgctggctatgacaagctgcaagtccttttccttgggaagaaatatggatctggtggcggctaatgtggaaggtgattctg

SEQ ID NO: 220077 - DNA, 387 bp, Gossypium hirsutum
ccgtgttttatttctcttcgtcggtatttaaaagtgctggagtaccatcggatgttgcagatgcattgataggagtagcaaatttaacaggatctattgttgccatgcttttaatggataaacttggaaggaagctgcttcttctgtggagcttctttggcatgactatgtcagtggtccttcaagttgctgcggcaaattcttacgtgtcaggctctggatctttatacctatcagttggtggcatgctaatgttcgtcttaacatttgcactgggagctggtcctgttccaggtcttctcctacctgaaattttccctaatcgaatccgggcaaaagctattgcgttctgtatgtcagtgcactgggtaatcaatttcttcggtg

SEQ ID NO: 220078 - DNA, 413 bp, Gossypium hirsutum
gcctcccccaacttcacaccagcaaagcaaaagcttcaccaatggggatcgatttagtcgcaggaggtaagagcaagaagacgaagaggacagcccccaaatccgatgatatttacctcaaactcctcgtcaagctttaccgtttccttgtaagaagaactgggagcaaattcaatgctgtgatattgaaacgcttgtttatgagcaaagttaacaagcctccactatctctctctaggcttattgaattcatgaagggaaaggaggataagattgctgtggtagtggggacagtgacagatgatattagggtttatgaggttcctgctttgaacgttactgctcttaggtttactgagactgctagagctaggattgagaaagctggtggagaatgcttgacttttgatcag

SEQ ID NO: 220079 - DNA, 400 bp, Gossypium hirsutum
cgaagctttagaggcacatcctagggtgaggcgcgtctattatccaggcttgccaagtcatgctgaacatgaaattgccaagcagcaaatgactggctttggtggtgtggtcagttttgaggtggatggagatttgatgaccaccatcaagtttgttgatgcattaaagataccatacattgctccatcatttggtggttgtgagagcatagtggatcagcctgctataatgtcctattgggatcttagccaagctgagaggcgcaagtatgggattgaggataacttggttcgtttcagcttcggagtggaagactttgaagatttgaagctgatgttctgcaagcactggagaccatataatggcgctaatctccgtcgtttgggtttgggtttaaat

SEQ ID NO: 220080 - DNA, 306 bp, Gossypium hirsutum
gttagggagcatgcgtactatttacagtactagaatggtagaccagattacctgaagaacgtatggaaagtcatcaattggaaatatgccagtgaagtgtacgagaaagaatgtgcttgagattgggcccttttcttagtgaatgaaagttaataatctcccttgtgacgaccttggatttgggtttttgcttgttcgattcaagcttctttcatgtgtagcaaaaaatgatacgtcattgcgtgagatgaatttcaatttaggaaatgcgataacgtcagtctcttgaaatatggtttaattttt

SEQ ID NO: 220081 - DNA, 405 bp, Gossypium hirsutum
acgaagaggaaaaatgggtacccgtcacgaaactcggccgcttagtcaaagccggcaagagcacatcccttgagcaaatctacctccattctctccctatcaaggagtaccaaatcatcgaccaactcgtcggcccttcactgaaagacgaggtcatgaagatcactccagttcagaaacaaactcgcgccggtcagcgtacgcgcttcaaggccttcgtcgtcgtcggtgacggaaatggacacgttggactcggtgtcaaatgtagcaaagaagttgcgacggctataagaggggcgatcatattggctaagttgtcagtgataccggttagaagaggttactggggaaataagatcggaaaaccccatactgttccatgcaaggttaccgggaaatgtgggt

SEQ ID NO: 220082 - DNA, 288 bp, Gossypium hirsutum
gttttataggaaccaagctaacctgctcttttctccaacgttgtacctcttctagagtgtgacccaaaaacaattgactggccagcgaaccacatcctcgggactgactaaaccctgacattccccaacttaatccccttgctgcacattctgctttacacagctatcgtatgagcgaataggtccgcgcccttcgctctttccaacaagtgctcaacctgcatggcaagtgatacccaccctgtagcgacgcatacatcacagaggaagatgtgtatacactcacca

SEQ ID NO: 220083 - DNA, 404 bp, Gossypium hirsutum
gttgacttatacgccacattgaagcagggatcagtgaagatctggtcagaagttcaggagggtaagtttgctttagacaaaggttggaaaattgagaaaataacagtgttgggattgagtggaagtgtagacacgtctggacttgaaattaatggaagtccagtagccaatggtgcttccaacatagaattgagttcaatgaaacagatgcatttgcaggatgttgaagatggggttggcaagaagaagtctttaatggtcgaactttcaggcttgaatttatatgttggaaagaactttgacatgtccatgaaaatgggggtacaaggttgatgattatggtgttatgtacttttttttttcccattttcattgttgatggtttactgtttgtcttaattggg

SEQ ID NO: 220084 - DNA, 385 bp, Gossypium hirsutum
aattgcttctaaggaatgtgccacgaaaggttcaattttctgaacttccacctggtttagggggggtgccattaagctatctcttttagttaatgaagcatacaaggatgcacaccaaaaaagtgtccaggccatgaaggaaagaatgagtgaccttgcacaaagcttaggtatgccacaaggtctcagtgagggattaaaacaacaatgatctctcaactaacacctggatggagcttagtgagggattgaagcaacaatgatctcttgactggcaccaggattagcttcagttttgcatacaaaccaatggtagaaattttcatttgtactttttactgcgaattcatgttgtgaatttccgttctccatagaactggcacac

SEQ ID NO: 220085 - DNA, 355 bp, Gossypium hirsutum
gcatttgggatgcttattgtatctggacttttataagtaaacatttattcattgttgttggttgtgattttaaggcccgggttaatttgggttattacaattattggtcaaaatatactcttattatgtattaattaataattacatcattttttaaatgataaacaaccattttttcatattgaacctatttacagagtctatgtgaacctagataatgctgattacaccgttaaacaaaaaagactgcggattacggatgaacgccttgtttttgatggttcacctgagtgttcactagattccatccaagttcacattgtcaacgtggaatcaaaatttgtcagcgcgatat

SEQ ID NO: 220086 - DNA, 398 bp, Gossypium hirsutum
attgcattaaatagatcatgaaatctttcctttctttttttgcattcctctcacttctcctgtttgtagacaccattgcagcagctaggaaagatgctggagagtactggggagctgtaacgaaagatcagcctatgcctgaggcactccaagagcttgttcggattgaggctgccgttgtcagccccgatgagaaaaccaagtgccatacatcaggtaatattgagcttaaggaagagaagattattgttaatgaggagttcgaaccaaggccaaacgtttcagcttatggtgatgacgctaatctaaaaggagataaatcatcatcttttgctgaagattttgaaccgagacctaaacgttcggcttacgggggcgatgatgcttgtcttaaaaga

SEQ ID NO: 220087 - DNA, 406 bp, Gossypium hirsutum
ccgcatcccaagtacaagaggcgtgttaggaagaagaagaagtttcaggctcacgacccaggtaaccaattcaaagttggcgattatgtgcagcttgagaagagccggcctattagcaagaccaagactttcattgcggtggctgtaccaagtaggaatgggaagcaggagaaggaggaggcaggggagcttgggattccattggagtctaaacagactcaagagcagccgcaggcttagtgttaagcccttcgcgtgggctccttttgttgttggtaaatttgtgatcttttgcaagggatttcactgtttcaaaaactgcttttccttaatgtaataattgtcgtttttcaagggtctggattgttttttgagtttgtcatgaaaaaaaaaaaaaaagggcggg

SEQ ID NO: 220088 - DNA, 410 bp, Gossypium hirsutum
tacttcttgaggctcaagggagacgtggaatgggagacgtgtgtaccagccggggactgtgcatggaagcagattgcagaacctgtgatgaagcaatacatggagactactgatggatcctacatcgaagataaggaaactgcccttgtctggtgttatgaggatgcagatccggattttggatcatgccaagctaaagaacttcttgatcatctcgaaagtgtgctggccaatgaacctgttacggtaaagagtgggcagaattttgtcgaggttaagccacaggtacagaaatatatttccaaatatggtacaatacttttcttttttatcagtccacattgagccggaaatcaacttatcgaatcagtgattgccaagcaaaatgagtatggttaggtctactgaaa

SEQ ID NO: 220089 - DNA, 384 bp, Gossypium hirsutum
  unsure (1)..(384): unsure at all n locations
caggtcgttgccgatgcttttgacatgataaacgcggacgacgggaaagcggttaaagaagatgagttcaagaaactattgacggagatcttaggaagcgtcatgctgcagttagaaggcaacccggtctcgatttcttcgaattctgtcgttcacgagcctctcgcatcgtcctcatcgttactgcaaccatcatcctagttgcatatcactaatattaagggtgacaaaagaaaaaagggacaataaattttggttaattttaagttaaaaaactcttagtagcttttaagttgaattatgntgcagttcactggtttgtattgtctaatgaaaatatattaccataatacatgcaaatacagtacaaaatacaatattttc

SEQ ID NO: 220090 - DNA, 392 bp, Gossypium hirsutum
  unsure (1)..(392): unsure at all n locations
atttgaagctgctttcaaaggaggtgtgcatgttggttcaattggtgctggtgggcgttatgacaatctgatcgggaattttggcacaaagcaggttccggccgttggcatgagtcttggaatcgaacgagtgttgaccataatggaagagaaagcacagaaccaggcagtccgagccacggaaacccaagttttggttgctgtcctgggggataaactcgctgtagctgcagaactggtcagtgagctttgggacgtagacatcaaagcagaatacaaggttcataaaaaggtgatgaagcacatcgaatatgccatagactcanagatcccttggatggtgatcgtgggcgagcgagagctgaatgaaaggatcgtaaaaattgaaaaca

SEQ ID NO: 220091 - DNA, 403 bp, Gossypium hirsutum
tgtgatgttccgcatgtcaatcgtactgactaccagttgattgacatttctgaggatggagttgtgagtttgctgactgagagtggagacactaaggatgatctgaggctcccaactgatgagaacttattgaaacagatcaaggatggttttgctgagggaaaagacctggttgtgtctgtgatgtctgcaatgggggaggagcagatctgtgctctgaaggacattggtcctaagtaatttgagattttattttcagacttttattgcaattttagattataactttttattttttttaagaactttaatagctttgtgtcttggaatttgggtttttttttattttttttattttaatatatctggatacgagaaaaacaccattgctgttatcttattg

SEQ ID NO: 220092 - DNA, 389 bp, Gossypium hirsutum
tgtgatgttccccatgtcaatcgttttgttttccaggtgattgacatttctgaggagggagttgtgagttaactgactgagagtggatacactaaggatgatctgaggctcccaactgatgagaacttattgaaacagatcaaggatggttttgctgatggaaaagacctggttgtgtctgtgatgtctgcaatgggggaggagcacatctgtgctctgaaggacattggtcctaagtaatttgagattttattttcagacttttattgcaattttagattataactttttattttttttaagaactttaatagcttagcgtcttgaaaaattgggttttttttaattttttctattttaacatatctggatacgaaaaaaacaccatt

SEQ ID NO: 220093 - DNA, 289 bp, Gossypium hirsutum
cgagaaaaaagtgtacgttttgcctaagctccttgatgagaaggtggctgctcttgaccttggaaagcttggggctaacctcaccaagctcaccaaggatcaagctaactacataatcttccccattgagggtccttacaagccttctcactacacgtactgaggatagaatacgagagatagagaatgctagagtcagactcaaaaaaggaaccataccacgggatgggttgatagtttgtttgtactaaaatttattgatgatttgtggatagagggttcgattttg

SEQ ID NO: 220094 - DNA, 395 bp, Gossypium hirsutum
gccttgtgcgtactgtctcagacagttaatgacactagggtattgcttggaggtggatggcctgagatggtaatggcaaaggaagtggatgagctagcacgcaagactcctgggaagaaatctcatgctattgaagctttctcaagggcacttgtaaccatcccgacaattattgctgacaatgcgggtctggacagtgcagatttggtggcccagcttcgtgcggagcaccacaaggagggatgcaatgcagggattgatgtcatctctggatctgtaggagatatggctgagctaggaatctctgaatccttcaaagtcaagcaagctgtattgctctctgcaactgaggctgctgagatgatacttagggtcgatgaaatcattacatgtgc

SEQ ID NO: 220095 - DNA, 409 bp, Gossypium hirsutum
  unsure (1)..(409): unsure at all n locations
ttaagttccagctgaagaaagttttatgcatgggagttgctgttgggaatgttgcaatggaggagaagcagatcttccaaaatgtgcaaatgagcgtcaatttccttgtttccttgttgaagaaaaattggcaaaatgtgaggtgcctctacttgaagagcaccatgggtccttcaaacaggatcttttgagttcatatttttaccttctgttatgtacggactgaaagtagtagtggggatttaatactaaaatcagtttttttcttctcttttacttagaatgtttaagtttatgttatgttctgttgttccctagaaatgttatgaatacgagacatttgaattttgatttgcttatcaactttggtttcacattatttgcttaatccacacaaaaatttnccttt

SEQ ID NO: 220096 - DNA, 344 bp, Gossypium hirsutum
gttggttgcatcttcatggagctcatgaataggaagcctctgtttccaggcaaagatcatgtacatcaaatgcgtttattaactgagctgctcggcacaccaactgaatccgatcttggatttctccggaacgaggatgcaaggagatatatcaggcagctcccagcacatccgcgccaatcactagcagaagttttcccacatgttcatccattggccattgatctcattgacagaatgttgacatttgatccgaccagaaggattactgttgaagaagcattggcacatccttacctcgaaagatacacgacatatctgatgaacggtctgccccgaccatt

SEQ ID NO: 220097 - DNA, 158 bp, Gossypium hirsutum
gtttggggaatggaaactgaactacctttttgctctcctcgaaaacggcgttcgttttttgagcctatttttaaagaactaaaaaaaaaaataaaaaaatggaaaacgaaatgttttatagctttaacaattttaaaagaaaaaactaaattgtttcg

SEQ ID NO: 220098 - DNA, 396 bp, Gossypium hirsutum
ccgtgttttatttctcttcgtcggtatttaaaagtgctggagtaccatcggatgttgcaaatgcattgataggagtagcaaatttaacaggatctattgttgccatgcttttaatggataaacttggaaggaagctgcttcttctgtggagcttctttggcatgactatgtcagtggtccttcaagttgctgcggcaaattcttacgtgtcaggctctggatctttatacctatcagttggtggcatgctaatgttcgtcttaacatttgcactgggagctggtcctgttccaggtctcctcctacctgaaattttccctaatcgaatccgggcaaaagctatggcgttctgtatgtcagtgcactgggtaatcaatttcttcgttggtttgctct

SEQ ID NO: 220099 - DNA, 414 bp, Gossypium hirsutum
aggacataccttaatctcccctctgagattgttcctgctactttgaagaagcggactagggccggtggtggtcgtcccatgggtccttctgatagccgcccacgtggtccgccacgctttggcgacggtgagaggcgattcggtgacagggatggataccgtggaggtccacgaggaggcggtgatttcggtgataagggtggtgcgcctgctgattatcacccttcattcaggggccctggttcaaggcctgcttttggtcgtggaggcggtggttatggtggtgccggttctgcaagcggcgcaggtcttccatgagttttgtcagtttaggttgaatggcacttcctagttcattttggggtgtgcttttttgcactcaaatgattgagattatctatgttcttttttccc

SEQ ID NO: 220100 - DNA, 394 bp, Gossypium hirsutum
caccattatcaaatttccagattttccaggaaaaagaaatcaaaaccacaaggtgaagaaggtaaaaaccagcagcggcaaaggcaataaaaggtgaagccaaagagagagagatatatacataataaaaaagattcttcaaaagaacacagctatggctcctcatggagaaggatcagatgcttcagtggaagccatggttgctcaagtcgaaaaacacccaatttcatcaatccttatcatcattgaagctttgccggtggtgaataagttccagttgattgaaaaccctcattcttcgtttccaaaaagggtcccttggatccattatcatggtgcatacaaggacatcataatcaatctagtgtggcccggaaaaagattaacctttggg

SEQ ID NO: 220101 - DNA, 335 bp, Gossypium hirsutum
aattactgttattttcttggatttcttttttttttttcagaaaccaaggagaaggaattagtgtgtaaaaccgagatctgagatatgggtttcttggtaacaaccctaatttttgctgcgattgggataattgcatctctttgtaccagaatctgctgcaaccgaggtccctctgcttatctgctccatctaacattggttatcacagcaactgtatgttgttggatgatgtcgtcaattgtatatcctgcacaaatgaaacctttctttgtccccatttagagagatgggttttgtagttcaatacgcgttctgtggcaccattattattgtgc

SEQ ID NO: 220102 - DNA, 375 bp, Gossypium hirsutum
cataatcatcctcacattcttcttctgcaaattgggaacacattctgcaaacttcctggtggacgcctgaagcctggagaaaatgagattgagggtctgaagaggaagctgaccagcaagcttggagctaattcacctgctcttgtgccagactggcagattggtgagtctgtggccatctggtggaggcccaattttgagacaatgatgtatccatattgccctccccacattacaaaacccaaggagtgcaagaagcttttcctcgtccacttgtctgagaaagagtactttgcagtaccgaaaaatctgaaacttcttgctgtaccattgtttgagctctacgataatgtgcagagatatgggccagtcata

SEQ ID NO: 220103 - DNA, 402 bp, Gossypium hirsutum
ggaaaattcgatcttactggaattcctccatccccaagaggaacccctcaaattgaagtcgcatttgaagtcgatgcaaatggcatcttaaacgtcaaggcagaagataagggcactggaaaatctgagaagatcactatcacaaacgataagggtcgtctgagccaggaggagattgagagaatggttcgtgaggcagaagaattcgcagaggaggacaagaaggtgaaggagaggattgatgctcgcaacagcctggagacctatatctacaacatgaaaaaccagattaatgataaggataagctcgctgacaagcttgaatccgatgagaaggagaaagttgaaaccgcagtgaaagaggcacttgagtggcttgatgacaaccagagtgccgagaag

SEQ ID NO: 220104 - DNA, 405 bp, Gossypium hirsutum
gttcttttggccccgcttgggtgaatataatatgtatgaaattacggatctggtggagggttacagaaaggtgatgatggaattggctgtggcataggctaatcttgcttagcagctgtggtacctgttgagtgagaatttggggttgtagcctgttatacaataaaaaagtgtattatgtgtgcaatgggctaaccttttgatctaaggctagcaattattctacatgcatcaaacctgacataatcaagggactgagggctcacactgatgctggaggaatcatctgactcttacaagatgacaaggaaagcggccttcagattgtgaaggatggtcagtggattgatgttcctcctatgaaacactgtcttgtcatctaccttggtgaccaacttgaggtaa

SEQ ID NO: 220105 - DNA, 394 bp, Gossypium hirsutum
gcttctttctagctatatccttatcagctttcaaagatggcaggaatcgcctttggtcgcggttgatgattccttcagtttggggactgtcaaggcctaccttgctgagtttatctcaactttggtgtttgttttcgccggcgttggctctgccattgcttacaacaagttgacaactgatgcagccctagatcccgatgggctagtcgccattgctgtttgccatggatttgctctctttgttgcagtggctatcggtgccaacatctcaggtggccatgtcaaccctgcagtcacttttgggttagctcttggtggccaaatcaccatactaactggcatcttttactggattgcccaacttcttggatccattgttgcttgcttcttgctc

SEQ ID NO: 220106 - DNA, 395 bp, Gossypium hirsutum
aagggaagctgtgaggaaaagtctcgtcctactgaagaatggtgagtctgccgataagcggttgttaccccttccaaagaaagcaactaagatactagttgctggcactcatgccgataacttgggctatcagtgtggaggctggaccattacatggcagggtcttggtggcaacgatctcacaactggtacgactatcctccaggctgtcaaaaatacagttgattcaagtactcaagttgtatacagtgagaacccggatgcagggtttgttaaatctggcgaattctcttatgccattgtggttgtgggagaaccgccgtacgcagaaacatatggtgacagcctgaatcttacaatatcagagccgggtcccaatactatttacaatgttt

SEQ ID NO: 220107 - DNA, 388 bp, Gossypium hirsutum
gtgacaagcagggattcccaatgaaacagggagtgttaactcctggtcgtgtccgtctcttgctccacagagggaccccttgcttccaaggatatggtaggcgcaacggagagaggaggaggaagtctgttcgaggatgcattgtgagtcaagatctctctgttctcaacttggtaattgtgaaaaagggtgaaaatgatcttcctgggctcactgatactgagaaaccaagaatgaggggtcccaagagggcatcaaagattcgtaaactcttcaatctctcaaaggaagatgatgtccggaagtacgtcaacacttaccgtcgatctttcacgacaaaatcaagaaagaaagccagtaaagctcccaagatccagagattggtcac

SEQ ID NO: 220108 - DNA, 272 bp, Gossypium hirsutum
gcgcgttgttgttggaccgtctttgaccatatgctgctcactcatttcgggtttggctggtctcgatgctgctgtttgcctttgcactgctattaaagctaatgagttgggggttaacctaaacgttcctgtttcattgtctttgctcctcaattcctgcgaaaagcaaatgcctgctggttacaaatgtgcttaagcaatgtttgggtttttcttttacgtgtactttttttttctgggcgtgttaaatttggtgttttgatatgtcaagg

SEQ ID NO: 220109 - DNA, 417 bp, Gossypium hirsutum
gtcgagaaggcagctagggaatctcaggctgaagctatcagaaaaattctcggccaagaggcaagtaggaagaaacgagaagataagataaaaaagaggcaagaagaaatggcacaggaaaaagctacaaattctatgatacttgcatcagacaccgtaagatggcttatggggccttcaggaacagttgtaacattccccaatgaggttggtttaccaagtatattcgatcctaagccttgcagttaccctccacctcgagagaaatgtgcagttccatcttgtacgaatccatacaagtaccgagattcaaaatcgaagcttcccctttgcagccttcaatgctacaagacaatgcatgaaaagatgtctgcccttactgcctggtagtgaaatgcactaccaaaacgtcatttc

SEQ ID NO: 220110 - DNA, 374 bp, Gossypium hirsutum
cttaacaatgccaaaggagcaactttggggatgctgtgaagaagcttggattatggggtctgtttacccgtggtcttcccctccgtattgtgatgattggaactctaactggagctcagtggggtatctatgatgctttcaaagtgtttgtgggactgccaactactggtggtgttgctcctgcacctgctgccgtggagcctgccaaggcatagaatgttggaaaacaagtaaacataggattgctggaatggtttgtcaagctggtggaaggatattcttttttgcgttgagaacatttttatcaagtcgctctgttttgaaaaaaactattggttttaagagaagaatgttttgatctcaatctcaaacta

SEQ ID NO: 220111 - DNA, 407 bp, Gossypium hirsutum
aagagaatgagaacagagtatggtaaactgaacaagatggagatgggcatatgggaatgctgtgaacttcttaacgacgtaatcgatgagagtgaccccgacttggatgaacctcagattgaacacttgctgcaaacagctgaggctatcagaaaagactatcctaatgaggactggatgcacctgactggccttatccatgaccttgggaaggtgcttcttcatcctggttttggggagcttcctcagtgggctgttgtaggtgacacatttcctgttggttgtgcttttgacaaatcaattgttcaccacaagtatttcgaggaaaatcctgactatcataactccgattacaacactaaatatggggtgtacttagagggatgtggacttaacaatgtgatgat

SEQ ID NO: 220112 - DNA, 379 bp, Gossypium hirsutum
  unsure (1)..(379): unsure at all n locations
aaaaccgggccacccacgcgtccgaagagaatanaacagattggttttcttttaaganggagatgggcatatgggggggcggtgaacttcttaacgacgtaatccattagagtgacccccacttggatgaacctcagattgaacacttgctgcaaacagctgaggctatcagaaaagactatcctaatgaggactggatgcacctgactggccttatccatgaccttgggaaggtgcttcttcatcctggttttggagagctttctcagtggtctcgtgtaaagcacacattccctgttggttgtgcttttgacaaatcaattgttcaccacaactatttcgaggaaaattctgactatcataactccgattacaacac

SEQ ID NO: 220113 - DNA, 332 bp, Gossypium hirsutum
ggagagaaccggagctactgtcgtcgccgccgccatggtgaagtttctgaaatccaacaaggccgtgatagtcctccaaggccgatacgctgggcgcaaagcggtgatcgttagatccttcgacgatggaacacgtgatcgcccctatggccactgtttggttgcagggataaagaagtacccgagcaaggtcatccgcaaggattccgccaagaaaacagcaaagaaatcgcgcgtcaagtgcttcgtcaagctcgtcaactaccagcacctgatgcccacccgctacaccctcgacgtagacttgaaagacgtggttaccgtcgatgcac

SEQ ID NO: 220114 - DNA, 354 bp, Gossypium hirsutum
tgttgagtctactggtgtttttactgacaaggacaaggctgctgctcacttgaggggtggcgcgaagaaagttatcatttctgctcccagtaaggatgctcccatgtttgttgagggtgtcaatgacaaggaatataagcctgaccttaacattgactccaatgctagttgcaccaccaactgtcttcccccattggctaatgtgatcaacgataaatttggcattgctgaaggtcttatgaccaccctccattctattactggtacacaaaaaactgttgatggtccttccattaaagacttgataagtgggtgaactgcttacttcaatatcattactaacagcacttgaac

SEQ ID NO: 220115 - DNA, 289 bp, Gossypium hirsutum
tgctcccgccgtatttcacttcccctctcttctctcttcttttccttccttccttccttccttctgtcaacaccactctctaatggcttcccttgctggttcatcaatctctatgcaacctcgccagaccctggctacaagcagggtttctgggttgaaattggtttcatttgtgaaccggggaagaagcagcctctcctttaggttgcgtccagatcgcttgcggatttcatgtgctgccaaaccagagacagtggataaggtatgtgaaatagtaaggaaacaacta

SEQ ID NO: 220116 - DNA, 407 bp, Gossypium hirsutum
gcaactagagcgaaagatgatttatgtccactgtgccctttcacttctggggtttttgtggcgctaatgatggcacagatcgaggtcttgagaaagaagggccactcgtactcagaaatcatcaatgagagtttgattgaagctgttgattccttgaaccccttcatgcatgctcgaggagtttctttcatggttgataactgttccacaaccgcacgattgggatcaagaaaatgggctccacgttttgattacaaccttactcaacaagcattcgtagcagtggattcaggtgctcccatcaaccaggacctgataagcaacttcttatctgatcctgttcatgaagctatcgaagtctgtgcaaagctaagacctactgttgatatatcagtgcccccagatgc

SEQ ID NO: 220117 - DNA, 409 bp, Gossypium hirsutum
cttctttttgcgccacttgcctgaatctaacatgtctgaaattcctgatctcgaagaagattacagaaaggtgatgaaggaatttgcagtggagttggagaagcttgcagagcaacttttggacctgttgtgtgagaatctggggttggagcctggttacctgaaaaaagtgttttatgggtccaaagggccaaccttcggtaccaaggttagcaattatcctccatgccccaaacctgacctaatcaagggactcagggctcacactgatgctggtggaatcatcttactcttccaagatgacaaggtcagcggccttcagcttctcaaggatggtcagtggattgatgttcctcctatgaaacactctattgtcatcaaccttggtgaccaacttgaggtaatcaca

SEQ ID NO: 220118 - DNA, 358 bp, Gossypium hirsutum
ctgatactgaaacattgagatctaatgggggacgaaaacaatcccaaaaagcctgatgtgggaatcttcccttacccagctcagggtcacatcaaccccatactccagttcgctaaacgcttgctatccaaaggcgtcaaatgccgccttgttaccactgtcttcctctccaacttctcattttccgacccatcttccacctctattgatatccacaccatcttcgaaggctttgaccaagggaggtattaacaagcttgtagctccgacgcctaccttgcaactttctggttcgttggccccaacagtttaacagcattaatcaaaaaacttactgaaattcacccttgtgatgccc

SEQ ID NO: 220119 - DNA, 336 bp, Gossypium hirsutum
gcgccttcagacacttaggaaaataaaacctatcaaggatcttaatgcaaagttgggcaagccgggccgggcagagataacactcaaagatgacctctccgaaagagaccgtatggacctctacaaaacatacttgttatattgtctgacaggtgaagtcaccaggattccttttggtgctcaaataaccacgaagaaggatgattcagagtatgttctactgaaccagcttggtgggatccttggtttgacgagtgaggagacagtagaagtccatcggagtttggcggagcaagcttttaagcaacaagctgaagtgaatttagctgatggaca

SEQ ID NO: 220120 - DNA, 212 bp, Gossypium hirsutum
gctaggtgtttgtgctgacctgcttggactggtaagcatagtggtgggagcacctccttcgagcaaatgctgtgctttgctccaaggcttggctgatttagaggctgccctttgcctttgcaccgccattaaagccaatgtgcttggggccaacctcaacatccctattacccttagcttactccttactgcatcatagaaagaaatccctc

SEQ ID NO: 220121 - DNA, 378 bp, Gossypium hirsutum
cagcaagagagccatggatgagtatacattagagatattcatgggaggcaagaacaccatggtgttgcacaacacatgtgaggattccctgttggctgctcccattatcctagatttggttctccttgctgagcttagcaccaggatccagttcaaggctgatggagagggcaagttccactctttccatcctgtggctacaatcctcagttacctcaccaaagcccctcttgttccaccaggcacaccggtggtgaacgcactgtccaagcagcgtgcaatgctggagaacatactaagggccagcattggcttggctcctgaaaacaacatgattttggaatacaagtgaagaagttgaggagagaaaaagtgaac

SEQ ID NO: 220122 - DNA, 351 bp, Gossypium hirsutum
ctggaaactaaacgagattttctctaccttcattgtgcttggaggttacttaacactaatgactgtgatattctactgggcaatgaaagacaccaatttcttctcgaacacatttaatgttatatcactgaagcatagtattgatggtgagagagaaatgatggcagatttataccttcaagttagtattgtgagtcatgccctcatttttgtcacaaggtctcgcagctggttctactatgaacaccctggacttatactactcagcgcctttctagatgctcagataacagacactttaatagctgtgtatgcagactgtgggtttgcatggattaaaagtataggttg

SEQ ID NO: 220123 - DNA, 252 bp, Gossypium hirsutum
gcgtcccattttcctcattttctttcacaccaagcaaagcgcggtaggtacatcctaacaacaatgcctaccaagatattagccctccttgcgcttcttgcccttttagtgagcgcaacaaatgcgtccattatcacacattgatcacttgcttctagtgccattattccacagttcctatcaccagttacttcaacgggcttcgaacatgcagtcgtgcaagcctacacgctacaactagcgcttgcggcg

SEQ ID NO: 220124 - DNA, 411 bp, Gossypium hirsutum
cccaaccaagaagagcagccgccgcagagcaaagggttcagagaggaaatggcagcaaaaaggaagacccctgttaagacccgaaacccagatcttatacgtggcgtaggcaagtattccaggtctaagatgtaccacaagcgcggcctttgggctatcaaggccaaacacggtggcgtcttcccccgccatgaccccaagcctaaagcacccgtcgcccccgagaaggctcccaaattttaccccgctgaagatgtcaagaagccgctacttaataagcgcaagcctaaacccaccaagctcagagcaagcattactccacggacagtcttgattgtgttggctggaagatttatggggaagagaattgttttcttgaagcaacttacttctgggcttcttttgggtact

SEQ ID NO: 220125 - DNA, 223 bp, Gossypium hirsutum
aaccaagtacatggttcattaagaggcacgtgtaagccattctttgctgcagttttcttgcaagttggttatgtaagcatggatatattatctaagactgcattaaacctggggatgagcaattacgtactcgttgtttaccgccatgccattgccaccctagttatggctcctttcgctgctttattcgacaagaaagtgaggcctaagatgaccatgacaa

SEQ ID NO: 220126 - DNA, 389 bp, Gossypium hirsutum
gcgctggaggtgttggatccgctgattcttctgcttctagaagaaattccaagcgacccggatacggtaagttcactcagcacgagcttccagcttgcaagccaatcctcacgccacgatgggtcatatcagcctttatgcttgttaacattgtcttcattcctattggagtggtctctctgtttgcttctcgagatgtcgtcgaaatcattgatcggtatgaaactgcatgtgtaccggacggctacaaaaatgataaggtcacattcatacaaagtaatttgaccaaacaatgcaacagaacattgacagttaagaagcgaatgaagaagcctatctatgtctactaccaactggacaatttctaccagaatcatcggatgtatgtg

SEQ ID NO: 220127 - DNA, 433 bp, Gossypium hirsutum
aaggagcttccaccctatgaccctgattggtactatgtcagagctgcttccatggctaggaaaatatacttgaggggaggtcttggtgttggtgcctttaggaggatctacggaggagctaagagaaatggaagtcgcccacgccatttctgcaagagcagtggatctgttgctcgtcacatacttcagcaattgcaggatgtcaacatcattgatattgatcctaaaggtggtaggagaatcacatcaaacggccaacgggatctggaccaagtagctggaaggattgcggttgctatctaagaaattttaactttctgtttttcatgttcctgagatttagtcgtttgaaaattgggttttcataagaagcttgtttaaacattttccgttttggtatattaagttctgaatttattttgattttgatttt

SEQ ID NO: 220128 - DNA, 372 bp, Gossypium hirsutum
gaaaacccggcccgacccacgcgtccgaaggagcttccaccctatgaccctgattgttactatgtcagagctgcttccatggctagggaaatatacttgaggggaggtcttggtgttggtgcctttaggaggatctacggaggagctaagagaaatggaagtcgcccacgccatttctgcaagagcagtggatctgttgctcgtcacatacttcagcaattgcaggatgtcaacatcattgatattgatcctaaaggtggtaggagaatcacatcaaacggccaacgggatctggaccaagtagctggaacgattgcggttgctatctacgaaattttaactgtctgtttttcatgttcctgaaatttagtc

SEQ ID NO: 220129 - DNA, 406 bp, Gossypium hirsutum
gtgcgttggataaagttgaaaaagaaatcaagaagcctcttatgagggatgacaagaaatgaatggctcttcttactgctgagtttgataagatcaataagaagcttgggatccggaaggaagacctgcccaagtatgaagaacaactggagctaaaaattgccaaggcgcaattggaggagctgaagaaggatgctcttgaagcaatggaaacacaaaagaagcgggaggaattcaaggatgaagcaatgcctgatgtgaagtcattggacatccggaacttcatctgaaactcgaaattcgcctttggtggttccagtttgagggtgaacaagtataactgttcaacgagtgcttaaaaacctttcttttcattttgctacaatatatgatattaataataatg

SEQ ID NO: 220130 - DNA, 262 bp, Gossypium hirsutum
cttctccagtgtccaaaaaagcttcattgtggcttggatcgaaaaccccatggctgctcttaagctagtttgtgctctagtgttgtgcatgttggtggttgagcccattgccacaaccaccataacatgcggcgatgtgacaagcaaagtggccggttgcttatcatacttgcagaacggagggaacgtgccgaaggcttgctgcgacgggatccggtccctgaacaacatggctcgaaccacccctgaccggcaaaccgtg

SEQ ID NO: 220131 - DNA, 262 bp, Gossypium hirsutum
ctctgctttcgccaaacaaacgcgagatttggggaggtatttcccttgtctatctgcctccgaatcaatggctttgccgaaccagcaaactgttgattatccgagcttcaagctcgttatcgtcggtgatggaggaactggaaaaactaccttcgtgaagaggcatctaactggagagtttgaaaagaaatacgagccaaccattggtgtggaggttcatcccttggacttcttcactaactgtggcaaaatccgtttctac

SEQ ID NO: 220132 - DNA, 429 bp, Gossypium hirsutum
gtaacttggccgttctatatcttccacaacacagaggcagctaaggtaacccatctctctctgcgttcctcgttgtctttcctccttcttttctttcttgttgatttggctcagtgaaaactcagtgagttggtgcgaagatgagtcgtggggcagcagcgggaccccaggggaagaagaaaggggcctcctttaccatcgactgttctaagccggttgaagataagatcatggacatagcctctctagaaaagttcctccaggaaaggatcaaggtcggtggcaaagccggtgctctcggcgattccgtcactgtcacccgcgacaagagcaaaatcactgtctcctccgactccaacttctctaagcggtatcttaagtacttgactaagaagtacttgaagaagcacaatgttcgggattggcttc

SEQ ID NO: 220133 - DNA, 400 bp, Gossypium hirsutum
gccttgcccaggaccctgacagcaaggttgcctgtgaaacatgcaccaagactaacatggtcatggtctttggagagattaccaccaaagccaacgtagactatgagaagattgttcgtgatacatgccgctccattggatttgtttctgatgatgttggtcttgatgctgacaattgcaaggtcttggttaacattgagcagcagagccctgatattgcccaaggtgtccacggacactttacaaagcgtccggaagagattggagccggtgaccagggtcatatgtttggttatgccactgatgaaacccctgaattcatgcctcttagccatgtccttgcaactaagctcggtgcacgtcttactgatgttaggaagaatggcacctgcccctggct

SEQ ID NO: 220134 - DNA, 310 bp, Gossypium hirsutum
taagacacctagagaggccattgaaggaacatatattgataagaaaagcccatgtactggcactgtttctattaaaggccgtatccttgccggtacttaccatactgcaaaaatggtaaggaccattatcgtccgaaggaactaccttcactgcatcaagaaataccaaacgaatatccagttctttggccttgattctcaacaaaaggttacatcatcctatgttgtggtcattgatcttggaggtgttggaagtcatgctgcatctatgcttctgagatcaggagttggcaagctcctattgctgggc

SEQ ID NO: 220135 - DNA, 363 bp, Gossypium hirsutum
gaagacacctaaaaaggccaatgaaggattatatatcgataataaaagcccacatactggcactgtttctattaaaggccgaatcctaaccgatccttaccatactgcaaaaatggtaaggaccattatcgtccgaaggaactaccttcactgcataaagaaataccgctcgaatatacaattttttggcctacattctcaacaaaaggttacatcatactatgttgtggtcattgatcgttgaagcattgccagacatgcagtatctatacatacgagatcaagagttggcatgctcctattgttgggctgtgaccagtttactgagaacactgcttatctgcggtctatagaacttaaact

SEQ ID NO: 220136 - DNA, 260 bp, Gossypium hirsutum
ggagagaagcctgtttcaatcgtccctcaagggaagctgtcacgaaaaaagacattgggtcttcccaaatcttggctttgcattgatggcggatctcaggtcagcatttctcaatgtgtattcccagctcaaatcggagctccttcaggatccttctttcgagtttaccgatgattctcgtcaatgggttgaacggatgctggactacaatgtgcctggagggaaactgcatcgtggactctctgtgattgatagctacc

SEQ ID NO: 220137 - DNA, 258 bp, Gossypium hirsutum
ctttgggctaccaatgaggttcgggccaaatgcaagttctggtacttcttgagaaagctgaagaaggttaagaagagcaatgggcaagtccttgccatcaatgagatttttgagaagaaccctaccaagatcaagaattatggtatttggctccgttatcaaagccgtactggttatcacaacatgtacaaggaataccgcgacactactttgaatggagctgttgaacagatgtacaccgagatggcttctcgtcac

SEQ ID NO: 220138 - DNA, 261 bp, Gossypium hirsutum
aaacccggtatggttgttacttttggtcctactgggctgaccactgaagttaagtctgttgagatgcaccatgaatccctcccggaagctttccctggtgacaatgttgggttcaacgttaagaacgttgctgttaaggatcttaaacgtggttttgttgcttcaaactccaaggatgatccggccaaggaagctgccaacttcacctcacaggttatcatcatgaaccaccctggccaaatcggaaatggttatgcccca

SEQ ID NO: 220139 - DNA, 335 bp, Gossypium hirsutum
  unsure (1)..(335): unsure at all n locations
nctgcttcgagcgatctaaaaccctaaattagaatgaattttacggcttcaaagcaaccggaaagttgcttgcttggccctgaatcggattcccaaaggacactgtacccatatgtgacaggaacatcaatcgtggctttaaagtataaagatgggattttgatggctgctgatatgggaggttcatatgggtccaccctgcggtacaagagtgtggagcgaatgaagcctattggcaagcattcccttctgggtgctagtggagaaatcagagatttccaagagattttgaagtatcttgacgagcttatcttatatgacaatatgtgggatga

SEQ ID NO: 220140 - DNA, 423 bp, Gossypium hirsutum
tattttttagggtttgctttataaaacccatttgcaaccctaccgttggttgatgaaagcggcaaagtcactgtgttaaagagaaacggcgcctccgcccaacaacaatggttcacgtctccttttaccgcaactatgggaagacatttaagaagcctcgtcgtccttatgaaaaggaacgattggatgctgagttgaggctggtgggagagtacgggctgcgatgcaagagggaactctggagagttcagtatgctttaagccgaatcagaaatgctgctagggatctattgaccctcgatgagaagaacccgcgtcggatctttgaaggtgaagctcttcttcgcaggatgaatcgatacggactcttggatgagagccagaacaagcttgattatgtattggcgttgacggtggagaact

SEQ ID NO: 220141 - DNA, 260 bp, Gossypium hirsutum
ggaagtataaacaaggtgagtctaatgctatagacatgaaggtgaaagatgacttgtgcgcgattgagaactatcacgaaccaccgcgggctgaggcactattggggtctacacgtgcgtggttatcacaccatgaccactggctgcagaggaatgactgcaggtgtgtgtatgaagcgagggacgtgttcatatatgatgccaagcagagagattattgccttgggctataaacattctgcgcagcatcagatgtgaca

SEQ ID NO: 220142 - DNA, 267 bp, Gossypium hirsutum
gaccggaacgggagggccgggccaacccacccgtccgaggaacacagctgaacactcaagaacaagccagaggggaccaacacctgcaagcaacccaacagcgaagaaaccaggtgacgaaaagaaaacggacggggcgaaagcccacaacgagaagaagccaaaaagccgcgaaaagccccaaaaggaaggcggagcagcggacggagacaagaacaggaagagggccaacaagagggccgagaccgacaagacctacataacaaa

SEQ ID NO: 220143 - DNA, 435 bp, Gossypium hirsutum
cagctttggtgatctgaatcatctaatatttgcaacaatgtctggagttacttgctgctgacgtgtgcctggccaactcaactccgatcttcaaaaactcgccgtaaatctcatcccattccctcgtcttcacttcttcatggtcgggtttgctccactcacttcaagaggctcccaacaataccaagctctaactgtccccgaactcactcaacaaatgtgggacgcaaagaacatgatgtgcgcagccgatcctcgacacggccggtacttaaccgcatcagctatgttccgtggtaaaatgagcaccaaggaagtcgatgaacaaatgctaaacgttcaaaacaagaactcatcctactttgttgaatggattcccaacaacgtgaaatcaaccgtgtgtgacatcccaccaaccggtctcaagatggcatc

SEQ ID NO: 220144 - DNA, 430 bp, Gossypium hirsutum
tagcaattgcagtcccaacaagtctgctagatcaatggagggttttacaacaagaacaaaggcatccgctcaacctttggagaacgccgacgagcttatcgcctccgtcgagactttcatctttgattgtgatggagttatatggaagggtgataaattaatagatggagtccctgaaactcttgatatgcttcggtcaaagggaaagagactggtttttgtcacgaataactcaaccaaatccaggaaacaatatggtaaaattttgagacacttggcctgaatgttaatgaggaggaaatttttgcttcttcatttgctgctgctgcatatttgaagtccattaatttcccaaaagataaaaaagtttatgtcattggtgaggatggcatcttaaaagagcttgagcttgcgggattccaataccttg

SEQ ID NO: 220145 - DNA, 351 bp, Gossypium hirsutum
tccaaaacactagctgagaaggctgcatgggaattttccaaggagaaaggtctggatgtggtggttgtgaatccgggcaccgtgatgggtcctaatatacctccaaaccttaatgctagcatggtaatgttgttacgccttctgcaaggctgcacagagacatatcaggactttttcattggatccgtccatttcaaagatgttgcgttagcacacattttggtatatgagaacacatcagcaaccggaaggcacatgtgcgttgaagctctatctcactatggtgacttcgtggccaaggttgctgaactttaccctgaatataatattcccagtttgccaaaggatact

SEQ ID NO: 220146 - DNA, 413 bp, Gossypium hirsutum
  unsure (1)..(413): unsure at all n locations
cacgaattggtcggctgcttgacttcacacaggatgtacgtgctgcaatggaggcttcaggaaaatctctaacatgtttcatggctgctacttcatccctggaagcagcacaaaatatcgagtgtattacttcagctagaaaggtgatggatttcagctaccaggatgtggatgaacatgcatgtttggttgagcaggcaatgcacgccataagtcgttctgatttatgcaatcccagaaattaagctaccttgtatatatattcgagttttatcagactataacccctcaacatgcattggagatgaaaggtggatggcttatacctgcattcgggaacgaacaaatatgtgagtggcccaataacctattgcctcagtggacatgtgtataaagngcgattgatttgcaaa

SEQ ID NO: 220147 - DNA, 355 bp, Gossypium hirsutum
cacaatgtaagaatcttgctaaaaggttgttggcggatttcgttttttttttttttttatgcgggaaagtgtaaaccttacaatttatcttgttttgattttgcataagatgcaatggagactattaagaatctcagatcatcagtcatgaatgatataagcaagtaacaaaatgtgaggtacttctctattacctgctcatactgcctttattgcagaggagtcagaaaccgacagtgaagaatcagacgttagtggttccgaaggagatgacacgtcttggatttcatggttttgcggtttgcgaggcaatgagttcttttgtgaagttgatgatgaatacatccaagatgac

SEQ ID NO: 220148 - DNA, 242 bp, Gossypium hirsutum
atgctattaaattcaatccacagaagtttccgtgggtctgctgacatggcacatgcccttcacccaaattacatggacaaacatgaggagaaccatcaccctaagttgcacgggggccttgttatcaaacacaatgcaaaccaacgttatgcgaccaatgcagtcacgtctttcatattccgggaaatagctatgaaacataaccttcctattcacgattttgtggtgcggaacgatacacc

SEQ ID NO: 220149 - DNA, 266 bp, Gossypium hirsutum
ctcttatcactttcaatatcttacaccaaaacatcgttttttttccactcaaaggaatggctacatctcagttaacagcatcatcaatgacagtatcagtaaggaatttggcttcatttgaaggattaaggccatcatccattgtgaaattctcttcctttggatctttaaagcctgggtctttgactcaaaggtcctttaagggtttggttgtaaaagcggctaccgttgttgctcccaagtacacctcgattaagcccttgggt

SEQ ID NO: 220150 - DNA, 352 bp, Gossypium hirsutum
aaaaatcctcgaaaaaagaactatgtcgtgggctttggtaaccatcatccaaagcatgtgtcaccatcgacgggcctctatccctgaaaataacatcaaatataactgtaaagggggatggaaatggagggatacgtcaaaaccaaaccccaacacacttgtgggagccatggtcgcaggacctgacaagcatgatgggttacgtgatgatcgcaccaactacaactataccgagccaactctagcatgcaacgcatggatggttgctgcactcaaggcattgactggtgacaaggccaccgcgactgacatgaatactattttttctgcagctccaccaatgtatgctaca

SEQ ID NO: 220151 - DNA, 334 bp, Gossypium hirsutum
ctagaaagtattttcagcagcttattaatgctgtggattactgccatagcaggggtgtgtaccatcgagacctcaagcctgagaatttgctgctagatggtaatggagttcttaaagtttcggattttggtttgagtgctttacctcagcaagttcgagaggatggattacttcacacaacatgtggaacaccaaactatgttgctccagaggtgatcgacaataaaggctatgatggagctaaggcagatttgtggtcatgtggtgtgattctctttgtcttaatggctggttacttgccttttgaggactccaattagtctctctgtataaa

SEQ ID NO: 220152 - DNA, 329 bp, Gossypium hirsutum
  unsure (1)..(329): unsure at all n locations
gcatatttgagtttcgctcagttttcattgaaaaccctagacctcccaacgaagtagcggggccgcagtttctctgtcgatatccgaaacaagaaatggctgtcacattcaacgacctgggtncngctgctggcttgaataatctggatgagtatctccttactcgcagctacatctctgggtaccaagcttcaaaggatgatattaccgtctacgcagctctatctggtgccccatcgtctagctatgtcaatgtttctcgatggtacaaacacattgatgcccttttgagaatctcaagtgtttctgaaaaaagctgtggtgtgact

SEQ ID NO: 220153 - DNA, 380 bp, Gossypium hirsutum
  unsure (1)..(380): unsure at all n locations
gcatatttgagtttcactcagttttcattttaaaccctagacctcccaacgagggggcggagccttattttctctgtcgatatccgaaacaagaaatggctgtcacattcaacgacctgggttctgctgctggcttgaagaaactggatgagtatctccttactcgcagctacatctctgggtactaagctttatatgatgatattaccgtctacgcagctctatctggtgccccatcgnctagctatgtcaatgtttctcgatggtacaaacacattgatgcccttttgagaatctcaggtgtttctgaagaatgctgtggtgtgactgttgaaggatttgatcccgctgacgctgttgccactccttcaattgctgat

SEQ ID NO: 220154 - DNA, 255 bp, Gossypium hirsutum
aaaaaaatgtcttcaggttgcaattgcggatggaggtgcagctgcggatctggctgcaattgcggtgagaactgctcaatgaaccttaaccttggatactcggagaagacaaccagcactcagaccatcatctccggagttgcgccagtgaagatgacctttgagggaccagagatcggcactactgaatcaggacatggatgcagctgtggatcaagctagcaatgtaatacacgcacctgttgaaaagcttga

SEQ ID NO: 220155 - DNA, 265 bp, Gossypium hirsutum
ctcacttcagcttgcgtttcttttcactgatggtggagatagcaccaggtgcgaagaacatgttcagtttcttgagggagtcagaggagattcctcaaaataatccaaagctcaaagctcatgctgtcaaggttttcaagatgacatgtgagtcagccatacaactgagagagaaaggggaagtggtagtggctgatactactttgaagtatttgggcactgtccatgtcaagagtggtgtcaaagacccccatttcgaggtggt

SEQ ID NO: 220156 - DNA, 428 bp, Gossypium hirsutum
cccacgcgtccggagagagagagggaggaaaagatgcagatattcgtgaaaacgctaaccggcagggccataactctcgaggtcgagagcagcgataccattgacaacgtcaaagccaagatccaagacaaagaaggaatcccaccggaccaacaacgtctcatcttcgccggaaaacagctcgaagatggccgtaccttggctgactacaacatccagaaagaatcaacacttcatcttgttctgaggttgagaggtggaattattgagccttctttgatggctttggctcgcaaatacaaccaagacaagatgatttgccgcaagtgttatgctcgtctgcatccaaaagccgtgaactgccgcaagaagaagtgtggtcacagcaatcaagtgaggccgaaagagaagatcaagtagataccgac

SEQ ID NO: 220157 - DNA, 423 bp, Gossypium hirsutum
caatgatcgtgaccgtgtggttgaagctagagatgatttgcacaggatgttgaatgaggatgagttgagggatgctgtgcttctagtatttgcaaacaagcaagatcttccaaatgctatgaatgctgctgagattaccgacaagcttggccttcattctctccgccagcgtcactggtatatccagagtacatgcgccacatctggtgaaggactgtacgagggactggactggctctcaaacaacattgcaaacaaggcatagatggcgtaattgacttgtcagtctcaaaaaatgccagccccttttggaattattgatgtttctacgtccgataaaatgttttggattttcatgttcttttgtttcttgcaaactttgtcatttgttcttgtagtttaagaataattgataaaattttc

SEQ ID NO: 220158 - DNA, 315 bp, Gossypium hirsutum
cgaagctgcttgttcttacgctgctttaattctctatgatgatggcattcccatcaccggtgagaaaattgcaacaattgttaaagctgcaaatgtctcggttgaatcttattggccaagctaggttgctaagcttttcgaaaagtgcaacattgaggatcttataaccaatgttggtgctggtggtgctggtgctccagttgccgcagctgcacctgttgctgctggtggtggtggtggagccgctactccacctcctgctgaggaaaagaagaaggatgaaccagatgaagagagtgatgacgatatgggatt

SEQ ID NO: 220159 - DNA, 407 bp, Gossypium hirsutum
ggagcttgcaaatttacccgagctctgttatctctatcttcaagaaaaccgtttcactgggcgaattccggccgcattgggcactttacaaaaccttcggcacatggatgtcggtaataaccatttggttgggaccattcgggagcttattcttattgaacgctgcttcccagttctacgaaatctatatttgaataacaactatttgaccggacgagttccggctcagctcgcaaatgtgacaaatttggagatattatacctttcatacaacaagatgtctggagtgataccaacggcactcgccgatattccgaagctaacatatttgtacttggatcataaccaattctcaggccgaattccgaatgcattctataagcatcctttcttgaaagaactgtata

SEQ ID NO: 220160 - DNA, 359 bp, Gossypium hirsutum
  unsure (1)..(359): unsure at all n locations
ccaagattgacaggcgatctggtaaggagcttgagaaggaacccaagttcttgaagaatggtgatgctggtatgattaagatgattcctaccaagcccatggttgtggagaccttctctgagtacccacccctgggtcgttttgctgtgagggacatgcgtcagaccgnggctgtgggtgttatcaagagtgtcgagaagaaggacccaaccggtgccaagttcaccaagtctgctgctaagaagaagtgaagaggccaaaaggttttagccgtgaagcagattgagtgttttatctttggttatatgtgggtngaaagttttgcctgttttatgtacgatttttaaaagttgagatgc

SEQ ID NO: 220161 - DNA, 364 bp, Gossypium hirsutum
acaaaaataacaagcaatactaataaggattttgaaaaagaaccaaaaaaacttgaaaaatggtgattctgatatgattaagatgattcctaccaagcccatggttgtggagaccttttctgattacccacccctgggtcgttttgctgtgagggacatgcgtcaaaccgtggctgtgggtgttatcaatagtgtcgagaagaatgacccaaccggtgccaagttcaccaagtctgctgctaagaagaaatgaagaggccaaaaggttttatctcataaccaaattgaagtgtttatctttgggtatatctggttttgaagttttgcctgttttatgtatggattttaaagtttgacatgcttt

SEQ ID NO: 220162 - DNA, 243 bp, Gossypium hirsutum
  unsure (1)..(243): unsure at all n locations
ngacttcttcagaaactatctttccctcaaaaatgggtactttcaggtttcaccagtaccaagtagttggaagggctcacccaacagagagcgatgagcatcccaagatctataggatgaagctctgggccaccaatgaggttcgggccaaatccaagttctggtacttcttgaggaagctgaagaaggttaagaagagcaatggtcaggtccttgccatcaatgagatatttgagaagaacc

SEQ ID NO: 220163 - DNA, 397 bp, Gossypium hirsutum
  unsure (1)..(397): unsure at all n locations
gggagacgttaaagagtactggattaacgacggagtttgggggtctatgaacattttgaaggacgagcatgacgaattgatttgcactcccctcaccataaaaaatcccacatgcgaagggctgaaaacatggaattctacaggtttggaccaacatgtgatccaaatgatatacttttgaacggtttcaaattgccagaactagacgtgaatgattgagtggtatttcaaaacatgggggcttatacttcatcacgtgagaacgatttcaatggctacaaaacctcagctattccaacttatatcctggttcttatgccacccgtaagacaagaaaaatatgcgggttgggctaattagcttgccaacttatatcttctngcaatcatgacacgat

SEQ ID NO: 220164 - DNA, 332 bp, Gossypium hirsutum
cgctgtcaaaaatggttttggtgttcatctaacattttcaacacatattacgtgtgttgagcaccaacgttgctggaaagctaaaaattatgtttgcttagacttacatcaagggtatcggaaggcgttttgctaacattgtttgcaagacggccgatgtcgatatgaacaagagggctggtgagttgactgcacaggaactggacaatctcatgaccattgttgccaaccacaggcagtttaaaattacagactggtttctgaataggcaaaaggattacaaggatggaaagtattcccaggttgcttctaatgctctcgacatgaaattg

SEQ ID NO: 220165 - DNA, 386 bp, Gossypium hirsutum
gaaaacccggcccgacgccacgcgtccggtctgacataaaaaatttatcttttcatcgaacatgtataacacatatacccggtgatcgtcaaattctaaacaaaatatctaaaaattatactaccatagacgaatttaaatgctatacggaaggcagacaagcgtaacacaagagagcaaagaccgacaatgtcaatataaacaataaggctgaagagttgactgcacacgaacttgacaatctcatgaccattgttgccaaccaccagcagttcaaaatctcagactggtttctaaataagcaaaaggatcacaacgatggaaagaattcccaagttgcttctaatgctctcaacatgaaaatgagaaaagacttggagcgtgtg

SEQ ID NO: 220166 - DNA, 421 bp, Gossypium hirsutum
caaaaaaagaaaaagtttgaaatccggatatgtcagacgaagaacaccgatttgaatccggggccgactccggagcctgcaaaacctacccacaacatgccggaaccatttgtaagaatggttacatcgtcataaaaaaccatccctgcaagggtgttgatgtttcgacctccaagactgggaagcatggtcatgctaagtgtcactttgttggaattgacatcttcactgccaagaagctggaagatattgttccctcttcccacaactgtgatgttccacatgttaatcgtactgactaccagttgatcgacatttctgaggatggatttgtgagtttgctgactgacagtggaaacactaatgatgatctgaggctcccaactgatgagaacctgttgaaacagatcaaggatggttt

SEQ ID NO: 220167 - DNA, 347 bp, Gossypium hirsutum
ggcgggattacccgctgagtttaagcgtattaatatgcggaggaaaagaaacttaccagggttcccctaataacggcgagcgaaccgggaaaagctcagcttgagaatcggtcgccatcggcgaccgaattgttttctggagaaacgtgctcagcgaccgaccgggcccaagtccactggaaaggggcgccagatagggtgagagcccacatgtgtccggaccctgtgagaacaagaggcgctgtctacgagtccggttgtttgggaatgcagacctaatcgggcggtaaaatccgtccaaggctaaatacggtcgagagaccgatcgcgaacaagtaccgcgaggg

SEQ ID NO: 220168 - DNA, 354 bp, Gossypium hirsutum
cgcgtacggacattgggtgccgcaacttatctctactctgtaatggctaaatcaaagaatcacacggctcacaaccaatctgacaaggctcacaagaatggaatccaagaaacccaagaggcaccgccacacttccaccaaagggatggatcctaagttcttgaggaaccaaaggtatgcaaggaaacacaacaagaagaatggagaatcagccaatgaagaagagtaggcttttagtggggtaaaagaaaattctagcctgggttagggttttctaattatggttgttttgtttgtttcaatggaaattaaggttttgtttttttcaacattagcactattttgatgattatc

SEQ ID NO: 220169 - DNA, 378 bp, Gossypium hirsutum
tgaaaaccggaaatgtcggacgaggagcatcatttcgagtccaaggccgacgccggcgcttgcaagacctaccctcagcaggccggcgccatccgcaagaacggttacatcgtcatcaaaaatcgcccctgcaaggttgttgaagtttccacctccaagaccgggaagcatggtcatgcaaagtgtcactttgttggaatcgatatcttcactgccaagaagctcgaagatattgttccttcttcccacaattgtgatgttccgcatgtcaatcgtactgactaccagttgattgacatttctgaggatggatttgtgagtttgctgactgatagtggagacactaaggatgatctgaggctcccaactgatgagaac

SEQ ID NO: 220170 - DNA, 310 bp, Gossypium hirsutum
  unsure (1)..(310): unsure at all n locations
tgtagatataggcacaattaggagttccttagttgtgttgtaggagccaaagataaaaaaatggtgaagatagcttttggtagcattggtgattcttttagtgttgggtctctcaaggcttatttggctgaattcattgctactttgctttttgtgtttgctggtgttggatcagctattgcttatgggaagctaacgtcggatgcagcactagacccaccaggcttggtggccatagcggtagctcatgcacttgcgttgtttgttggggtagccattgcagccaacatctcangtggtcatttgaacc

SEQ ID NO: 220171 - DNA, 388 bp, Gossypium hirsutum
  unsure (1)..(388): unsure at all n locations
cgtacgcccactcattctacccatttatttccncattttttttctactctgaaatgcccaaatcaaggaatggcacaaattacaaccgatcttgccaagctcacaaaaatttaatcaacaaacccaaaaagcacctccacacttccaccaaagggatggatcctaacttcttgaggaaccaaatgtatgcaaggaaacacaacaagaataatgtataatcatccaatcaataagagtaagcttttattgttgtaaaagaaaattctaacctcatttaaggttttctaattatccttagttttgtttgtttcaatgtaaaattatgttttgtttttttcaacattatcactattttgattaatatctttgttataaaatattttaaact

SEQ ID NO: 220172 - DNA, 277 bp, Gossypium hirsutum
aggtcaggcgggattacccgctgagtttaagcatatcaataagcggaggaaaagaaacttaccaggattcccctagtaacggcgagcgaaccgggaaaagcccagcttgagaatcggtcgccatcggcgtccgaattgtagtctggagaagcgtcctcagcgacggaccgggcccaagtcccctggaaaggggcgccggagagggtgagagccccgtcgtgcccggaccctgtcgcaccaagaggcgctgtctacgagtcgggttgtttgggaatgc

SEQ ID NO: 220173 - DNA, 357 bp, Gossypium hirsutum
  unsure (1)..(357): unsure at all n locations
gctttgagtatgaattgaaggagatttagttgaagagatgaatgtgagccatgcctcantccacccagtggaagatctaccagccgcggacggaggcgtangtataggcggcggcaacaacaacaacaacgaggtgcctagagtgaggatgaaggatattcaggggatgcctggaacggcaggagggctcgcgttgcggatttgtcagtttgtttctgcagttatgggactttgtattatggcaaccaccagtgattttccatctgttaccgccttttgctaccttgtagctgccactggcttgcagagtgtgtggagcatatcgcaggctatanatgacatttatgcccttttagt

SEQ ID NO: 220174 - DNA, 318 bp, Gossypium hirsutum
ggcgcaccggaatattgccacgccaacttcacaaaatatttcacgagcagtttctggtcggccgaacggttttcagggacattcaaagggaggaagccgtgctatttcaatacgggggtgatggtgatagatctggtgaaatggaggagggtgggatacacgaagcggatcgaaaggtggatggaaatccaaaaaaaccgatcggatctacgagctgggttcgttgccgccgttcctgttggtttttgcgggacgcgtggcacccatcgagcatagatggaaccagcatgggttgggtggtgacaacgtgaggggaag

SEQ ID NO: 220175 - DNA, 364 bp, Gossypium hirsutum
agaagaagaagaagatgtcgtggcaaacatatgtagatgagcacttgatgtgcgaaatcgatggcgatcatctctcctccgccgccatcgtcggccacgatggcagcatttgggcccagagctccaatttccctcagttcaaacaagaagagattaatgccatcatgaatgactttgctgaacctgggtcacttgctccaactggattgtaccttggtggcacaaaatatatggtgatccaaggcgaacccggatatgttattcgagggaagaagggatccggaggtattactattaaaaagtccaatatggctttgctcatcggaatctatgatgagccaatgactcccggccaatgcaatat

SEQ ID NO: 220176 - DNA, 336 bp, Gossypium hirsutum
  unsure (1)..(336): unsure at all n locations
tttctctttgcgcctttcttctctcggccgaaggtaagtcatggttaagcataacaatgtcgtgccaaatgggcacttcaagaaacactggcagaactatgtgaagacttggttcagtcagccagcacgaaaggctagaagaagaatttcaaggcaaaagaaggctgtgaggatctttccaaggccaactgctggaccccttcgccctattgtccatggccagactttgaagtataacatgaagttgagagctggaaagggtttcacccttgaagagcttaaggctgctggtatttcaaagaaacttgcaccgaccattggtatcgctgntgatca

SEQ ID NO: 220177 - DNA, 386 bp, Gossypium hirsutum
  unsure (1)..(386): unsure at all n locations
gcgaggaattcaagggctatgttttcaagatcatgggaggttgcgacaagcaaggattcgggatgaagcagggtgttgtgggtcctgctcgtgttcgtctcttgcttcatagaggtaccccatgcttccgtggatatggaagacgtaatggtgagcgtagaaggaagtctgttcgtggatgcattgttagccaagacctttctgttttgaacttggttattgtgaagaagggtgagaatgatttgccagggctaacggacactgaaaaacctaggatgagaggtccaaagaaggccttcaagattagaaagctctntaacctttcaaaggaagatgatgtccggaagtatgtcaacacttacaggaggactttcaccacaaaatct

SEQ ID NO: 220178 - DNA, 389 bp, Gossypium hirsutum
cctgaaaaaggcccaagctgaggctgaaggaaaagcccccgagtctaagaaaccaattgttgtgaaatatggactaaaccatgttacctaccttattgagcagaacaaggctcaattggtggttattgctcatgatgtggatccgatagagttggtggtgtggcttcctgctttgtgcagaaaagtggaagtgccttattgcatcgtcaaagggaaatcacgtttgggatcgattgtccacaagaaaactgcttcggtcctgtgcttgaccacagtcaagaacgaggataagttggacttcagtaaaatcctcgaggcaatcaaggcgaacttcaatgataagtacgacgagtacaggaagaagtggggaggtggtatcatgggatcca

SEQ ID NO: 220179 - DNA, 269 bp, Gossypium hirsutum
aaaagaggaaaaagaaaagacatgggtgttgtaatcattgacggatcgacggtgagagcctgtgtgactgacgaccagcaggtgacgaagagcgtggatgagcgtttctcagctcttgacctcaacaacgacggtgtcctctccaggtccgagcttcgcaaggccttcgagtctctgcgtctcctcgagtcccacttcggtgtcgacgtcgccactccccccgacgagctcactcagctttacaactccattttcgagaggttcgattg

SEQ ID NO: 220180 - DNA, 358 bp, Gossypium hirsutum
accatatgctcattggctggaaattttgatccttgggattccatcttttcttgggcctgcaattgctccgggacatatgatcacattttggctttggatagctttacggcaaatcgaagcaatagagacacacagtggatatgatttcccctgggcacccacaaggtttatcccattttatggtggtgctgattaccatgattaccatcattatgttggagaacaaagccagagcaactttgcttcagtttttacttattgtgattatatctatggcactgacaagggctatcgataccataagaaggtcctaaggaagttgaaagagcaatctaaagctaatggtgctcagaatggg

SEQ ID NO: 220181 - DNA, 355 bp, Gossypium hirsutum
catttacacccttttgtttgttaattgtccattttgattgacagtctaaaggagatgttgaaggagccaaggaatactatttgcaagccatacaaggtgaccctaggaatggtgaaaccatgtcacagtatgctaaattgatctgggattctcaccgtgaccatgataaagcttcacattattttgagctagcagttgaagctaatcctgaaaatagcaatattcttgcagcatatgctagcttcctttgggaaacagaaagaagatgaagacaataacacaaggcaagatcaaactcaggtttctcttcagaacagagctttgtctgcaataagctcataagtcattcattctg

SEQ ID NO: 220182 - DNA, 385 bp, Gossypium hirsutum
  unsure (1)..(385): unsure at all n locations
gtttgcttccgtcacaactcaaaaaccgtacacaaaatgggcaaggatctgagcgacgagcaaggctcatcaatgaaggaggcttgcactctcttcgacaccgacggtgacggcaagatcgctccatcggagctagggatcctaatgaggtctctcggcggtaaccccacccaagctcaactcaaagctattatcgctgaagagaagctcacggcgccctttgacttccctcgcttttttgatctcatgtccaagcatatgaaacctgagcccttcgataggcagctacgcgatgctntcaaggttctggataaggacaatactggctntgtctccgttgcagatctgagacatatactgactagcatcggagagaagctggagc

SEQ ID NO: 220183 - DNA, 380 bp, Gossypium hirsutum
atacacttactttggttgcagtcaagagaccattccagaatttgtcaagaaccccattatccctaagtatccagatattatgattgctaaacttggccctggacaggaaattgaactggaagcacatgctgttaaaggcattgggaaaacacatgcaaagtggtccccagtggccactgcttggtatcggatgcttcctgaggttgtattattggaagatatcgaagatgaccttgctgaagaactcaaaagcaaatgcccagttaatgtgtttgatatagaagatcttggaaaaagtaggagaagggcaactgtagcaaggccacgtgcgtgcacactttgcagagaatgcataagaagtgacgattgggaaaaacgtg

SEQ ID NO: 220184 - DNA, 401 bp, Gossypium hirsutum
ggcctcctactgggaagaagaagtttgagactctctcatacctccccgatcttacacccgtgcagttggctaaggaagtagattaccttcttcgctcaaaatgggttccttgcttggaattcgaattggaggagggattcgtgcaccgtaagtactcgagcttacccacgtactacgatggacgctactggaccatgtggaagctgcccatgttcgggtgcaccgactcggctcaggtgttggaggagcttgaggaatgcaagaaggcataccccaatgcattcattagaatcattggcttcgacaacgtgcgtcaagtgcagtgcattagtttcattgcctacaagcctccaggcttctaagctttttattaactttgtctctccatttgttgaatttga

SEQ ID NO: 220185 - DNA, 388 bp, Gossypium hirsutum
agaattgtcagccgaagaaggtgaattgtttgcctaatggtttcagctactacaagctagaaggagttgaccatttcatgagccagtacaacgaaggagaagggataaaggagagtgattgtgggaggaaatgcacctctgattgcaagtgtttggggtacttttaccacagggaaacatccaaatgttggatcgctaatgagttgaaaacccttgctaaaacctctaactcttcccatgttggttatataaaggcacccaacaagtgacgggaatcctattaagtatttgtactttttcctctgtattttccagtttctttattgtaagctaataagtatttgtaagtttgaattacaaattaaagttttatttaaaagtatcaatc

SEQ ID NO: 220186 - DNA, 386 bp, Gossypium hirsutum
gaatatgatgatatagcaatgaaatatctatcctatgtgctcttcttccttgttgcatgtgtttgtgtttactctcttatgtatgagcgccataagagctggtattcctggattctctcttcactcactagctgtgtatacatgtttggttttattatgatgtgccctcaacttttcataaactataagcttaagtctgtagctcatttaccctggaggcaaatgacttacaagttcctcaacaccatcattgatgatctctttgcattcgtcataaaaatgccaacacttcatcggctttctgtcttccgtgatgatcttatatttttaatctacctgtaccagagatgggtatatcctgtggataagaaacgtataaatgaatt

SEQ ID NO: 220187 - DNA, 364 bp, Gossypium hirsutum
ggtggaatcctgaatcttatttgggtcctgctgctttgcttcacgctaacagatggataagcgatagccgtgacgaatacgcaaaagagagattggatgccataaatgacgagtttaagttgtatcgttgccatacgatattgaattgtgctcgtgcttgcccgaagggtctgaacccaggaaaacagattacaaacatcaagcaccttcagctgactggtggtgcttaaagtttcaaacttcacaataaattgtttgtgtatttaaaaccagttaatctggatccttgaacaatttgtttcaagttaaggataccaataattgtgttctgtatgtagactatattttcatttgatataatgcc

SEQ ID NO: 220188 - DNA, 401 bp, Gossypium hirsutum
cacaatgctatccgcaatgacccaagaatcaactggatctgcaatccggttcacaaacacagggaactccgaggactgacctctgctggcaagaaatacaggggtcttcgtggcaaggggcacttgcaccacaaggctcgaccttcaaggagggcaacctggaagagaaacaacacactctcccttcgccgctaccgttgatcccctggaccgtacttggtgtttttgttactgctatcttggcttcattactattgtagggtttataagaattttgagacagttatattgtgtgtgggacatcttgaaaatcttctatgttagaggctattgagatttatgtgctcactgaaaatgtccaatgctattgtcatattgagattgtgttgttgatttttttt

SEQ ID NO: 220189 - DNA, 401 bp, Gossypium hirsutum
cactggcaaagttgatgaacttatcaaggacaagattgaggctcaaaaggaagtaaaggctaaagagcaggaagagaaggacgtgatcgcacaacagaacatgtatgcacagttgctacctcttgccttgcccgcaccgccaatgccaggcatgggaggttttgctccatcaccaccaccaccacccatgggaggaatgggaatgcctccaatgccagctttcggcatgccaccaatgggcagctattaagtcataacaggtctgttcaattgaaacattttaggttacggatcaatggggctctatatagctgcaatttcgaggctttcattctttttcccctctttctttttcatttgtctgatgagtgaagatcaaaatttggaataatgccattttt

SEQ ID NO: 220190 - DNA, 336 bp, Gossypium hirsutum
cgctaggcaagatatggtggtagttgaggtgccaaagctaggcaaagaagcagccaccaaggccattaaggagtggggccagcccaagtccaagatcacccaccttgtcttttgcaccactagcggtgtggacatgcctggggctgactaccagctcaccaagcttttaggcctccgcccctccgttaagcgcctcatgatgtaccaacaaggttgcttcgcaggggggacggtgctccgagtggctaaagacttagctgaaaacaacaaaggtgctcgtgtacttgttgtgtgctcggagattactgctgttacctttcgtggacctagtgacac

SEQ ID NO: 220191 - DNA, 400 bp, Gossypium hirsutum
catacatagacataactttaaattaatcatttttttctcgagccgtacgaggagaaaactgcttatacgtttctaggggggggggtattatttaactacatctatcccaatgagccgtttatcgaatcgttgcaattgatgttcgatcccgaagagagggaagagatcttcgaaaagtgggtttttatgatccgataaataatcaaacctatttaaatgttcccgccattctctatttccttgaaaaaggagctcaacccacagcaactgttcatgatattttaaagaaagcgggggtttttacagaacttactcttaatcaaacaaaattcacttaatgaaatccaaaaaagagggtgtggatgattcatatctagctttgtataaatttttctttatt

SEQ ID NO: 220192 - DNA, 392 bp, Gossypium hirsutum
atcatatctaagctgtatgaaaaacatgcatccggaaataccaaagtgggtattgacttggggggaggtgactccgaggatggtgtttgcaaagatgtgtcaaccctgaatatttgggatctttatgtcaccaagtttttcgctctcaaatatgctgctgatgctgcctgcactgttctacgggttgatcagattataatggcaaaaccagctggaggtcctggaaggagagagcagcctgcaggaatggatgaggactaagtcttctaatctgcaacatgatatgccattcctttctttttttctcatcagggctggttcggactttgttaggcatcttcggagatgctaaaaaccctttgaaacaaagttttgcttttgttttgaaaatt

SEQ ID NO: 220193 - DNA, 373 bp, Gossypium hirsutum
cctgaattggtgatgaaatctattgtaccagttgttatggctggtgttttgggtatttatggcttgattatcgctgtcattattagtactgggatcaatcctaaggccaaatcgtattaccttttcgatggttacgcccatctttcttctggtcttgcttgtggccttgctgggctttctgctggaatggcaattggaattgtcggcgatgctggtgtcagagctaacgcacagcagccaaagctttttgttggaatgatccttatcctcatctttgctgaagctttggctctttatggtcttattgtcggcattatcttgtcatctcgggctggacaatcccgagcagaataagataactcaagtgctgcat

SEQ ID NO: 220194 - DNA, 395 bp, Gossypium hirsutum
aaggaacccaagttcttgaagaacggtgatgctggtatgattaagatgattcctaccaaggccatggttgtggagaccttcgctgagtacccacccctgggtcgttttgctgtgagggacatgcgtcagaccgtggctgttggtgttatcaagagtgtcgagaagaaggacccaaccggtgccaaggtcaccaagtctgctgctaagaagaagtgaagaggccaaaaggttttagcggtgaagcagattgagtgtttttatctttggttatatgtggtttgaagtttttgcctgttttatgtaagatttttaaagtttgagatgctttggtttgccaaagcatcttagtcaagttttgtgtctgatcttgcggaactatactttgttttttctat

SEQ ID NO: 220195 - DNA, 395 bp, Gossypium hirsutum
gtttataatccattatacttacggatgtgactacaatttgaagggagaattaacgtatggaaagattggagaatggcgtttcgataagagatcgtaccttagtgggcctcctccaaggaacctctctttgccccctccaggtgttcctgaaagtgtggtgagacttgtgaagatggtgaacgaagctacagagaatattcccaattgggatacactaaatcgtggctgagatctgatcttactaatctgcgcatccattttgacgctggtatcaatctgctttccaactagagttatggacatgaaatacagaggtagctgagacagcagtatacatagagaaaagggtatgtttacaagttaaaggagggatatatcatttttttacacttata

SEQ ID NO: 220196 - DNA, 396 bp, Gossypium hirsutum
  unsure (1)..(396): unsure at all n locations
cttatggtcgagcaggtagtataagtgagggtttgcgcagtatcatgcagtctantcctggagaagttggcgttaatcgcgccttagtgaaccgagatagcttccagcgctacaatatggatggaattgctgagatattattagcacttcagaggatcgaacaagatgaagagttgacatatgagcaattacttgttctagagaccagcttgttccttaatggcctagacttttatgaccagcatagagacatgagactggatatagataatatgtcatatgaggaattactagccctagaagagaggatgggtaatgtgagcactgggctatcggaagaagcattgtcgaaatgcctcaaaaaaagcatctatgacacagcatcttcggagtttg

SEQ ID NO: 220197 - DNA, 375 bp, Gossypium hirsutum
  unsure (1)..(375): unsure at all n locations
aagagaagaaaggaacaatggagtggacacattggctcaccaaaaatggtcaggtgccaacttttatgatagatatctcaagacagttcaaggaggtatatcatccacagcagccatgggcaaaggggtgactgaggagcaattcaaggaaacatggactagaccaggtgcagggaacattggaagtgaaggcaatctggttgtggctaaggctagaatgtaagacaagcaaaaatgagctgaaggatggtctattttggacttgggagaataacccaattcttgaattttggaattgggacggaaaaaaaaaaagtggtaataaaatcatttgacaatggatcagtctgggtattntcgtttctttttggtttc

SEQ ID NO: 220198 - DNA, 387 bp, Gossypium hirsutum
cacttgcggaggctgcattccttattggtctggaaaagaacagcgatgttgtgcatatggctagctatgcaccactttttgtgaattccaatgacagacggtggaacccagatgcaatcgtcttcaactcctttcaggcgtatggaactcctagctactgggtgcaacgttttttcacagaatcaagtggagcaattcttcttaatgcaacactgcaaaaagattcctctaattcccttgttgcatctgcaattacttggaaaaattcagaggctggtcaaacctacataaggataaaggttgtaaactttgggagcaattcagtcaacctccaaatttctgttgatggattggatccaaattctgtaaagctgtctggatcaacaa

SEQ ID NO: 220199 - DNA, 379 bp, Gossypium hirsutum
ctcggggaaagatcgattcatcagtcttcttctctgagtagaggttttggatttgtaagcatttacaatgtcttcgtgctatgtcgcagcaaccactgactcaattgctctggccttagaagccaaaacaccatctgaagccatctcaatcctttaccgtgtactagaaaatcctgcatctgctcccgatgctctacggattaaagagcaggccataacaaatctatctgatcttcttagacaagagaaccgagcagaggagctcagaagccttctgacccaactgaggcccttttttgcactaattccaaaggcaaaaactgctaaaattgtccgtggtataattgatgatgtagctaagataccaggaacatcagat

SEQ ID NO: 220200 - DNA, 309 bp, Gossypium hirsutum
ctcaggaaaagatcgatccatcagaccatttctcttacaaaaggttttgaatttctaatcggtcggaatatatacaagctagctcggaccaaccactaactcaatacctctcaccttataaaccaaaacaccatctgaagccatatcaatcctctaccgtgtactataaaattctgcatatactacacatgctatacctattaaatagcatgccataacaaatctatctgatcttcttatacaagagaaccgaacagaagaactcagaatccttcttacccaacttatgccctattttgcactaattcc

SEQ ID NO: 220201 - DNA, 389 bp, Gossypium hirsutum
caagggtcccactctccttgaggctcttgaccagatcaatgagcccaagaggccttcagacaagccgctccggctcccactgcaggatgtctacaagattggcggcattggaactgtgcctgttggtcgtgttgagactggtgttcttaagcctggtatggtagtgacctttggcccctctggcctgaccactgaagttaagtctgttgagatgcaccatgaagccctctctgaggctctccctggtgacaatgttggattcaatgtcaagaacgttgctgttaaggatctcaagcgtggtttcgttgcttcaaactctaaggatgatcctgcaaaggaggctgccagcttcacctctcaggtcatcatcatgaaccaccctgggcaga

SEQ ID NO: 220202 - DNA, 156 bp, Gossypium hirsutum
acggatatctcggctctcgcatcgatgaagaacgtagcgaaatgcgatacttggtgtgaattgcagaatcccgtgaaccatcgagtctttgaacgcaagttgcgccccaagccattaggccgagggcacgtctgcctgggtgtcacgcatcgtcgc

SEQ ID NO: 220203 - DNA, 386 bp, Gossypium hirsutum
atcggaaggcgattcgctaacatcgtttgctagaaggctgatgtcgacatgaacaagagggctggtgaattgactgcacaggagttggacaatctcatgaccattgttgcaaaccccaggcagtttaaaatccctgactggtttttaaataggcagaaggattacaaggacgggaagtattcccaagtcgtgtctaatgctcttgacatgaagttgagggatgatttggagcgtttgaagaagatcaggaaccaccgtggtttgaggcactactggggccttcgcgtccgtggtcagcacaccaagactactggtcgcagagggaagactgtcggtgtgtctaagaagcgttgaaggcttcatatatattttggaaaaaatgatgt

SEQ ID NO: 220204 - DNA, 358 bp, Gossypium hirsutum
gttgtactctggtgaacctttgggtgataccaagcttcctctggtttatggtggtgattgtggtgacaggtattgccatatgggaagcctaaattcatcaaaagttgaaggcaaaatcgttgtttgtgataggggagggaatgctagagttgaaaaaggaggtgcagtgaagcttgccggtgggttaggaatgatactagaaaacactgccgacaatggtgaagaactcatttccgatgctcatcttatcccagctacaatggtgggtgaggcagctggtaataagatcctggaatacattaaaacaactcagtttcctacagctacaatttcgttccgaggaaccgtgattggccct

SEQ ID NO: 220205 - DNA, 381 bp, Gossypium hirsutum
ctattgctccccagttgaaaaggtaatccatccaattcatgaccaatcgttttacctcaccatggagcacaaaaggaaattgaaggaagaatttggagttgagccatggacattcgaacaaaaccttggagaggcagtttttattcctgctggatgtccgcaccaagttaggaatctgaagtcatgcaccaaagtcgctgtggactttgtatctccccagagtatcaaggaatgcctccgattaactgaggagttccgccaactaccaaagaaccatagagccagagaagacaaactcgagatcaacaaaatgataatttatggagtagaacgggcaattcgagagttatcagatctaatatcaaccccaaattgagcccc

SEQ ID NO: 220206 - DNA, 382 bp, Gossypium hirsutum
ctgctcaccgccataagcgagatcaaaagccagcagcgcagcagctaaaagagcagtcttttgacaattattcgccatgggtgaggttcacggatctctagctcgtgccgggaaggtgagaggccaaactcctaaagtggccaagcaagacaagaagaagaagccccgtggccgcgcttacaagcggatgcaatacaaccgacgcttcgtcacagcagtggttggatttggcaaaaagaggggacctaactcatctgagaagtaagagatctatgtaggtgaagaaggcaagaagccttgttgaaagctttgatggattttaagtctttgttttcttttgataatgtttttatgatattggtttcaaggattggattgaact

SEQ ID NO: 220207 - DNA, 391 bp, Gossypium hirsutum
ccttagagaagctatttcaaccattgtagctcagtccaaggagaagcagcgtaagtgtattgagactattgaactccagattgggttgaaaaactatgatccccaaaaagacaagcgtttcagtggttccgtgaagttgccacacattcctcgacctaaaatgaagatctgcatgcttggagatgcccagcatgttgaagaggcagagaagataggtttagattatatggatgttgaagcactgaagaagctaaacaagaacaagaagttggtcaaaaagcttgccaagaagtatcatgcttttttggcttctgaatctgttatcaagcagatccctcgtctcctgggtcctggtctcaacaaagccgggaaattcccaaccctttgtact

SEQ ID NO: 220208 - DNA, 382 bp, Gossypium hirsutum
tcaatatcctgatgtcaaccatgcaactgttatgactccatctggagaaaagccggttcgcgagcttgttaaggatgatgcgtggttgaatggagaattcataaccactgtccaacaacgtggtgctgcaatcatcaaagctaggaaactctcaagtgcactatctgctgctagtgctgcttgtgatcacattcgtgattgggtccttggaactcccgagggtacatgggtttccatgggggtttactctgatggttcatacaatgcaccagctggggtcatctattctttccctgtaacttgtaagaatggagaatggacaattgtccaacgactggcaattgatgaattctcgaggaagagttggacttgacccgacagg

SEQ ID NO: 220209 - DNA, 418 bp, Gossypium hirsutum
  unsure (1)..(418): unsure at all n locations
atttattctaagatcactgagttggagatggaagtgagcgagcattcgctagttataaatgccattcagccacttgaccagtcgaggcggtgctaccggatgattggaggtgtccttgttgagagaaccatcaaagaggttctccctgccgtgcaacgaaacaaagaagggcttgaggaagtaattgctcgtcttaacgagaccctggagaagaaaaagaaggaaattgctgatttcgagacaaaatacaaaattaggatcaaaaagtccgataatgactcgaaagatgaaagcaacaagaaggaaggctccgctcaaggagtcctttgtcgcccttgcaagtcgagtcagtaataggtatattccttcctatntccttncttatatgctcgaacttgctttttataaaccctaaatc

SEQ ID NO: 220210 - DNA, 424 bp, Gossypium hirsutum
ggaagggtctccgcgtaactgtcaaactcaccgtccagaaccgtcaggcgaaagtcactgtggtcccgtcggcggcggctcttgtaatcaaggcgttaaaggagccagagagggataggaaaaagaccaagaacatcaagcacaacgggaacattaacctcgacgacgtcatcgaaattgccaaggtaatgaggccgaggtcgatggctaaggatttgagagggacagtgaaggagattttgggcacgtgcgtctccgttgggtgtactgttgatggaaaagaccctaaggatctgcagcaggagatcgatgatggagatgttgatgttcctttggagtgagaaagcttgttcttctcgttttttacgtctatcctcatgcttgcctcttttagaaaaatgttcaatataaagattttgaacaa

SEQ ID NO: 220211 - DNA, 424 bp, Gossypium hirsutum
gcttattatcctttctttagaggtcatgctcatcatgacacaaaaagacgagagccttggttgtttggtgaacgaaataccgcacttatgagagatgccatacgaattcgatacaccttgcttccatacttctacacattattcagagaagcaaatgttagtggtgttcctgttgtacggccattatggatggagttcccatctgatgaagcagctttcagcaatgatgaagccttcatgggtgggaacagtcttttagtacaagggatctatactgcaagggctaaacatgcatcagtatatttgcctgggaaggaatcgtggtacgaccttagaacaggaactgcatataagggaggaaaggtccataaacttgaagtttcagaagagagcattcctgctttccaaagagctggcacaatat

SEQ ID NO: 220212 - DNA, 422 bp, Gossypium hirsutum
ccggtgttccaattattcttgttgggactaagcttgatcttcgagaagataagcagttcttcatagatcaccctggtgcggtgcccattaccacagcacagggtgaggaattgagaaagctaattggagcgcctttttacattgagtgtagttcaaaaacacaacagaatgtgaaagcggtctttgatgcggccatcaaagtagttctccagcctccaaagaagaagaagaaaaagaagagaaaggcacaaaaagcttgctcaatattgtgatcatgcaaagaagtgatattggtgccagataccatgaacaattagccatttaatctgttagtctctcaccatatctattatctcttctctctgagaaaatagctccttttggtatgttatctgaactgacagaactagggaactttctac

SEQ ID NO: 220213 - DNA, 356 bp, Gossypium hirsutum
  unsure (1)..(356): unsure at all n locations
caggaatattccnaacttattttttcaccttttaatgcagtcaaacataactgtggttggggagtttttattcgggttggagagtcttcaaaccacaatgccttcgatttgcttgctaaatatggcacaactcatctgggtttcaatgatgatattcaaggaacagcatctgtagtccttgcacggcttgccgctgcactaaaaataatctgtggaacctttgctgatcataaaattttaatcccttgtgcttgaaaagcttgcacttgcatttcaaaacttatagctcttgaaatttcaaaacagacaaacatgccactttaagaagctcgcaagaagatctctcttgtggactc

SEQ ID NO: 220214 - DNA, 359 bp, Gossypium hirsutum
  unsure (1)..(359): unsure at all n locations
accggccggaagaccacgcgtccggagcttganaagctatcaatctggggtggcatacgtattaggacactctcatataagagcaaaagtgaatgcaccatgcttgaagagatttatgatccatgtggcctatttattcttacgtaaaaactgcagggcacctgccgtggttctcaacattcctcagacatgtttgattgaggttggcatgaactattatctgtagaactactactttcttctcaaataattgtttctttttttagtttccaataagagatgttgaggaagttttagctgtgtctacaaattctttttgcaatatcttcttaaaacaaaattatagggaattatttttg

SEQ ID NO: 220215 - DNA, 417 bp, Gossypium hirsutum; identical to SEQ ID NO: 197962

SEQ ID NO: 220216 - DNA, 231 bp, Gossypium hirsutum
gccggccaaccctttattcccgatccaaaattctgtctttccgcagccgttttcgtttatggcgcgactgttccggctccagggcgtaacagaatacggacaatgccaatctattaggaggatggcaacaatccaaacacatcgttttcattttaccaaggatcatgaatgcagtttggatcagatgggttcgcggcagatattctggatactggtgtagggttatagata

SEQ ID NO: 220217 - DNA, 424 bp, Gossypium hirsutum
  unsure (1)..(424): unsure at all n locations
aaaagagcaatttttttgaggtggtagtttacaaaaccaaaatgaagatctgttgcattggagcgggttatgttggtgggcctacggtggctgtgatcgcgcttaaatgtccggatattgaagtggctgtcgttgatatctctgtacctaggatcgctgcctggaacagtgaccagctccctatctatgagcctggtcttgatggtgttgtgaaggagtgtcgtggcagaaaccttttcttcagcactgatgtagagaaacatgtgcgtgaggctgatatagtctttgtttctgtcaacactcccaccaagactcggnggctcggagctggcaaagctgcagaccttacatattgngaaagtgctgcccgcatgatcgcggacgtatcgaaatctgacaagattgttgttgagaaatcaacagt

SEQ ID NO: 220218 - DNA, 411 bp, Gossypium hirsutum
  unsure (1)..(411): unsure at all n locations
caggaatatgccgaacttatgcacgaattcatgaatgcagtcaagcagaactatggggaagaagttctcattcagtttgaagattttgcaaaccacaatgccttcgatttgcttgctaaatatggcacaactcatctggttttcaatgatgatattcaaggaacagcatctgtggtccttgcagggcttgttgctgcactaaaagtagtcggtggaaccttggctgatcatagatttttattccttggtgctggagaggctggcactggcatcgcagaacttatagctcttgaaatttcaaaacagacaaacatgccacttgaagaagctcgcaagaagatttcgcttgtggactccaagggattgatnngtaaatctcgtattgactcacttcagcatttcaaaaagccc

SEQ ID NO: 220219 - DNA, 423 bp, Gossypium hirsutum
catctgcaattcagcaaagaggaattgtacccttttgcaagggacttgatgtaattcaacaagcacaatccggaacaggaaaaactgcaactttttgctctggaattctacagcagcttgactacagcttagttcagtgccaagcattggtccttgcaccaacccgtgaactagcacaacaaattgagaaggtcatgcgggcattaggtgattaccttggtgtcaaggttcatgcttgtgtaggtgggaccagtgtccgtgaagatcaacggattctctccagtggggttcatgtggttgttggtacacctggccgtgtatttgacatgttgaggagacaatctctccgccctgatcatataaagatgtttgttttggatgaagctgatgaaatgctctcaagaggcttcaaggatcagatct

SEQ ID NO: 220220 - DNA, 416 bp, Gossypium hirsutum
  unsure (1)..(416): unsure at all n locations
cccacgcgtccggaaagaactagttgaggtcccattggagaggaaacagaagaacactagggcctggccttaccatggttgggttggaccatgcgagcaggtttctgtgttgtatgaaggcttcggagtcggagatgcctccaactatgactctgttaaaagctttgctcaacttatgtggcctaatggtcacccacgctttactgagaccatacataccctaacgacgcanatggaggagctgaacaagttaatttggttaatgctaactgatagttacggattacgggaggattcactgaaaatgaactacacaacgttggtgcggatgatgaaatacctggcccctccaccaggggaaaataagagaggactctttgctcatactgataaaccagttagcacacttatttgtg

SEQ ID NO: 220221 - DNA, 428 bp, Gossypium hirsutum
gtccgtcaccgttaggatggtgccggctcctagaggtgctggtattgtggctgctagggttcccaaaaaggtgcttcagtttgctgggattgaagatgtcttcacttcttcaaggggttcaaccaaaactcttggaaactttgtcaaggccacctttgaatgtcttctgaaaacatatggtttcttgacaccggatttctggagagagactcgtttcacaaggtctccattccaggagtatactgatctgttgggaaagccatcgaagacccttgtactggaagatgtcgagagagttgatatctgattgaagatcaacagggtcattacttattagtaagttgggcgtgtttctaggtcctttctatgttgcaatctttaattgtgtcttgcttggtttgattttgtcatgagattaaatcagtaat

SEQ ID NO: 220222 - DNA, 423 bp, Gossypium hirsutum
aaagagcaatgcattcatctgtttgaagaactgaataagtacaggtctttgccaaaaataacaagggaagaatttgagttaatatttgatgagctggatgatagtcatgacttcaagatcaacttggatgaatttactgatctttgcaatgccattggtctaagatttcaaaaggaggatgttccatctttgtttgaaagatttcaaatctatcgttcgcctttctctgaaaatttgaaagcctttgttcggggtcccaaatttggatacataatatccttcattctcatattgaatctgtttgcagttatcattgagacaacgcttgatattgcaaacaactctggtcagaaggtgtggcaggaggttgagtttgtctttggctggatatatgtactggaaatggcactgaaagtatattca

SEQ ID NO: 220223 - DNA, 416 bp, Gossypium hirsutum
ccagatgggaaaacaatagaagcagatgctgctcatggtactgttacacggcatttgagagttcaccaaaagggtggtgagaccagcacgaacagcatagcatctatctttgcttggacacgtgggcttgcacacagggcaaaattggatgacaatcctaaactcttagatttcattgagaaactagaggcagcttgtattgcaactgtggaatctggaaagatgaccaaagatcttgcactaatcattcacggctctaagcttgctagggacaagtacctgaatactgaagagttcattgatgctgttgcagcagatctaaaagcaagactttgttaagtataaatttgaacatggtaactactcctaaccatcaaagttcgttgtgcttgttttgcccccttcaccttgtatag

SEQ ID NO: 220224 - DNA, 401 bp, Gossypium hirsutum
gagaaactaggtgtgaaacaatggcgtcctcggatcttattggcaagctcgagactgatgtcgagatcgatatttctcccgaaaagttccaccatatgtggtgccacaggccgcaccatgtccaccacactagctctgaaaaagtacaaggatgcgatttacatgaaggtgaatttggaactcccggcgtcgttatctgctggagatatgtgcatgatggaaaggctaaaactgcaaagcaggtagttgaagttatggaccatgagaaaaagtcaataactttcaaaatgcttgaaagagatctgatggaggaatacaaaagcttcgtgattacaatccaaacttcccccaagagcgacggtaaaggcagtatagtgcactggactctggattatgaaaag

SEQ ID NO: 220225 - DNA, 401 bp, Gossypium hirsutum
  unsure (1)..(401): unsure at all n locations
ccttcgatggtctggctgcttcgaagacttctactcaggaacacatttcagccccgaaagaaaaagctgtggatgttggagatgttgacagccattcctcaggggcacaaagcgattccatcgtgaaacctgttgtttccgttaacattgagcccgagcaaaagctggtgcagcaagacatagtagacatgtacatgaaaagcatgcagcaatttaccgagtcattggctaagatgaaactgcctctggacatcgacagtggaccgaccaaatcggagaattcaagtaccactgatcagaaaatacaggcatcgaanaacaccagctcccgagtgttctacggaagcagggcttttttctaagcttcctgatcctctattcaaaggaagacacacaggtga

SEQ ID NO: 220226 - DNA, 339 bp, Gossypium hirsutum
gtgacactctcccagcatttatacagtcccaaaatcattctaatttagcccatcgagtctctcatcctcatttctgctttctcttcaatcttgatggctctctttctctcacttcttctcattcttttgactccttcaaccaatgcggactggccaccttctcctggttactggccaagctctaaatttaggcctatgagctttcacaaaggctttaaaaatctctggggtccttcccatcaaagtgttcaccacaatgcattaaccatctggcttgacaaaacttcaggaagtggattcaagtcagttcgtgcatttcgatccggttacttcagtgcc

SEQ ID NO: 220227 - DNA, 341 bp, Gossypium hirsutum
accacgcgtccgaagatgcttgcctgctcgacccaacatctgtgggtaaccctgactgtgggctcagactcgcaagtcgctgaggtgaaaccagccctgagcaacatggttgctgctgccaagctgctccgcacccaactcgccagcgccaagtgataggctcccgagatattggaaatccgaatcccataccattccagagagattaaaaagaaaaatggcaaagaagtttcttctatcttatcatttgaaataactctgtgttgatgaaatatttgttacatgcccttggcgtccctttgatttccttatttttgggtgttcttttctctaaagatcat

SEQ ID NO: 220228 - DNA, 421 bp, Gossypium hirsutum
cccacccgtccgaattttaactaacctcccccaaacaaaaccttaacggttacagctttggaattcaggcctttcgaccatggcggatgttgaaacggaggtggcggcggctggagtgcccaagaagcgaacattcaagaagtttagcttcagaggtgttgatttggatgctctccttgatatgtccactgatgagcttgtcaagctctttcctgcccgtgctcgcagaaggttccggaggggtctcaagagaaagcccatggctttaatcaagaaacttcgcaaggcgaaaagggacgctccaccaggtgagaagccagaaccagtcagaacccacctccgaaatatgatcatagtacccgaaatgattggtagcattatcggtgtgtacaatggcaagacattcaatcaggttgagatc

SEQ ID NO: 220229 - DNA, 389 bp, Gossypium hirsutum
caagaagccgcttcttaacaagcgcaaacctaaacccaccaaactcagagcaagcattacaccagggactgtgttgattttgttggctggaaggtttatggggaagagagttgttttcttgaagcaacttacttctgggctccttttggtcaccggaccattcaagatcaacggtgttcctttaaggcgtgttaaccaatcctatgtcattgctacttccaccaaggttgacatctcaggggttaacgtagacaagtttgatgacaagtactttgccaaggaagtagagaagaggaagaagaagactgagggagagtttttcgaggctgaaaaagaggataagaaaaaactgcctgaagacaagaaagaagaccagaaagcagtcgacg

SEQ ID NO: 220230 - DNA, 421 bp, Gossypium hirsutum
gccgccgatttgcttttgttaccatgaaaaccgtggaggatgctaatgcggcaatcgagaaactaaatggcactcaaattggagggcgggagatcaaggtaaacatcaccgaaaagcctctggcacaagtggatttgtctctccttcaggcggaggattcccagttcattgatagcccgcataaagtttatgtgggaaaccttgcgaagacagtaacttcagagacactaaagaagtttttttctgagaaagggaaggtaatgagcgccaaggtttcacgggtcccggggtcctccaaatcaaggggatttgggtttgtatcattctctttagatgaggaagttgaagctgccatcaattcttttaacaatgctatgttggagggggaagaaattcgtgtaaacaaggcataaaatgcgga

SEQ ID NO: 220231 - DNA, 432 bp, Gossypium hirsutum
gaggcactcggcaaagatgacattaattcacttaaagctaggaagcttattgttgcacagacatggaaaggttattcagtgaaaaaagggccaaactatgcccctacaagaaagaaagttgctactgatctgactcgagagaatctacagaggggtgactggaaggaactagagttcaaagagtataacttcaatgctaaaggaccacctgctgaagctggccatcttcatccattactcaaggtgaaacaacaattaaagaacatatttcttcagctgggttttgaggagatgccaacaaataattttgtcgaaagcagcttctggaactttgatgcattgttccagccacaacaacaccctgcacgtgattcacatgatacattctttctggaagttccatctactacaaaggaactgcctgaagattat

SEQ ID NO: 220232 - DNA, 271 bp, Gossypium hirsutum
attttattatgttcaatacttctttcagattttcgcacaacacaccagcggcatgggattcatattactacattattatttttgagaggtttttccctcataactcttcaagattgactgtccctgcaggaactattttttcatgcatcacatctaaaactttttagtgttacacttccttgaaaaacaacctttacccttcaagccagactgccttgatggttcatctctcaacttattacgcaaatactcccctcaacaacaaaccatc

SEQ ID NO: 220233 - DNA, 310 bp, Gossypium hirsutum
ggtttattcgagctttctggcattccaccagcacccagaggcgttccccaaattacagtttgcttcgacattgatgctaatggtatcttgaatgtctctgctgaggacaagactactggccagaagaacaagattacgatcacaaacgacaagggtcggttgtctaaggaagaatcgagaagatggttcaagaagcggagaagtacaagtccgaggatgaggagcacaagaagaaggttgaagccaagaacgcattggagaattatgcctacaacatgaggaacactgtcaaggatgagaagattggttc

SEQ ID NO: 220234 - DNA, 430 bp, Gossypium hirsutum
aacgccccccttttatttagggttttggattccttaatctttatcttcgaccaatcaacgatgactggcaaagccaagccaaagaggcacacagccaaggaaatagcggcgaaaatcgacgccgccacaaccaataaaggcggcggcaaggccggatttgctgaccgttcgggtgtggagaaaggtggacatgctaagtacgagtgtcctcattgcaaaataacagctccagatttgaagtcgatgcagattcatcatgatgccaagcaccccaaggttccctttgaagagtcaaagcttgtgaatctacatgctgttcatgtggttgagacttccaagcctcgtcctggtgttaggggcagccttaaaaagtgataaaaaaccccaaaaaatgtgtttttcgtcaagctttggtgttttgtgatgtttc

SEQ ID NO: 220235 - DNA, 362 bp, Gossypium hirsutum
cctccactttgtttgtggcttctgatcaatttggtaaggttcctctctattggggaatcaccgccgacggatatgtggcctgtgctgataatgctgaattgctgaaaggtgcctgtggcaaatctcttgcttctttccctcaaggctgtttctactccacagcagtaggaggattaagaagctatgagaatcctaagaacaagatcactgcagtgcctgctgaagaagaggagatatggggtgctaaattcaaagtggaagggccagctgttgttgctgccacagagaaaccctttgctttctccttctaaatctatggatccatggaattataagagctgcaaatgcatagcatatggatc

SEQ ID NO: 220236 - DNA, 415 bp, Gossypium hirsutum
tgcaaattacaattatgggatagagtgtcttttcagattttatagttatggtctagagaggaaatatcgagatgatctttataacgattttgaacaacttacccttgatttctatcataagggcaatctttatggccttgaaaaatactgggcattccatcacttccgagatcagaaagaaccgataaagaaacatcccgaactggataggttactgagggaagaataccggcgattggaagatttccgtaccaaagagaagaatactattagcacaagagaggagcgccattgatgagtgacgtaattgatccctagtgttattgaaccccaattttgacaagcaactctgatgactggatcagagagtaggaaggagttcaaggtctatatgaattatgatttggtttatgaa

SEQ ID NO: 220237 - DNA, 434 bp, Gossypium hirsutum
ggtggatctgatgagttttccgaagatggatgatcagatggcggtacaagaggttgcatcgcaaggcttgaagggcatggaacacctgatccgtctcctttctcaccagtccaaaaacgtcgactgcaccgacctcgccgatctcaccgtctctaaattcaaaaaggtcatttcacttctcaacagaaccggtcacgctcggttcagacgcgggccgattcaacccctttcttcctcatcttccccctcgacatcatcctctgcttctctgtctgttccgaattctcaaaacaatctaactctaacttctgctgcgatctcaacgccggcgaacataaatacggcgctggtcggtacttcggttatcagtccttctagcttcgttcaatcgcagccgcagagtttgactctggactttacaaaacctaatttgt

SEQ ID NO: 220238 - DNA, 339 bp, Gossypium hirsutum
cccacgcgtccgcggatctcgatgtgtcaatccaccaatcatctacggtgatgttagccgccccaagccaatgactgttttctggtcatctactgcacaaagcatgactgcacgcccaatgaagggaatgcttactgggcccgttaccatcctcaactggtcctttgtcagaaatgatcagccccggtttgagacttgctaccagattgccttggccatcaaggacgaagtggaggatcttgagaaggccggtatcaatgttatccaaattgacgaggctgctttgagagaggggttgcctcttaaaaagtcggagcacgccttctacttgaaatgggc

SEQ ID NO: 220239 - DNA, 432 bp, Gossypium hirsutum
ctcccagcagctgataaaaagaagattgaagatgctattgaacaagccattcaatggctagacagcaaccaactcgccgaagccgatgaatttgaagacaagatgaaggagttggagagtatttgcaaccccatcattgctaagatgtaccaaggtgccggcggtgacatgggtggtggcatggatgaggatgttccggctggtggaagtggtgctggtcctaagattgaggaagttgactaaatcattgattttcttcacctgagttctctattggtctcttatgtttattgggatttaaactgcttggttttagtggttgggttctaatcggattgaaatgaacttttatagggtttgttccttttttgggatactctatcagtagcacctgtgattgttgtgttttggaaaacaagtcccttttggact

SEQ ID NO: 220240 - DNA, 418 bp, Gossypium hirsutum
gcacactgatgtcgcagttctcctcgataatgaagctatctacgatatttgccgaagatcgcttgatattgagaggcctgcttacactaatctcaacaggctggtctctcaggttatttcttccttgactgcatctttgagatttgatggtgctttgaatgtggatgtgaatgagtttcagaccaatttagtcccataccctagaatccatttcatgttgtcttcatatgcaccagtgatttcagcggaaaaggcttaccatgagcaactatcagtggcagaaatcacaagcagtgcatttgaaccagcttcaatgatggccaaatgtgatccacgccatgggaaatacatggcttgttgcttgatgtacagaagagatgtggtgcctaaagatgtgaatgctgcagtggcaacaatc

SEQ ID NO: 220241 - DNA, 405 bp, Gossypium hirsutum
cttaagcaaagaacttatgtatcagcaagttcttcgtcggtttgctcattttaatgctatacaactaagtgagccagctcctttgcaagagttaatcatgttggccctgaaggaggaggacttggacctagaaagcaatgaaaatgatgagctcaaaaagaagattgcagaaatgaatacacagctgcttaagcaaaagtctgaaatgttggaggagtatttctgcatttttattgattcagatgggaatttatctagactgccaattctacttgaccagtacactccagacatggatcgtgttcctgaatttgtgctatgtttgggcaatgatgttgagtgggaagaagaaaaaaattgtttgcaatcacttgcagctgctcttgggaatttttatgctatgca

SEQ ID NO: 220242 - DNA, 432 bp, Gossypium hirsutum
ggcccatgctgcccgacatgtgaccgataagatgatgttcaatgcttctttcatatttgggcacaccacaccaactacaaaagaggcatattactacaggatgatttttgagaggtttttccctcagaactcggcaagattgactgtccctggaggagctagtgtggcatgcagcacagctaaagctgttgagtgggacgctgcctggaaaaacaaccttgacccttcaggccgggctgccttgggggttcatctctcagcttatgacgcagagactcccctcagcaacaagccatccaaggttattgatagtataccacggatggactttcctggagttgccatacagagttaatgcctgcctactggaagacaacagaatgtatgaattatttaataaaatgagtaggagctgtggcatgtccaaatgta

SEQ ID NO: 220243 - DNA, 388 bp, Gossypium hirsutum
gaacgaaccagcaacttttactggttctgaggttagaatgatcaatgatgatgttcctctggcgcaatttgctgttgcttttgagggagcttcttggacagatccagattccattgcgctcatggttatgcaggcaatgttgggttcatggagcaaaaatgctgggggtggaaaacacatgggctctgagctggtacaaagagtcggcattaatgaaattgcagaaagcatgatggctttcaacaccaactataaagatactggtcttttcggtgtctatgctgttgccaagcctgattgtttggatgatttggcttatgctattatgtacgagacaaccaagctagcctatcgtgtttcggaagctgatgtcattcgtgctcgtaat

SEQ ID NO: 220244 - DNA, 427 bp, Gossypium hirsutum
ctcactgtcctgcttctgctatgcgaatgctcggatttgcacgaataagggagatgctcagcgctggcatcactgtctccttgggcacagatggggcaccatctaataatagaatgagcattgttgatgagatgtacctagcttctctgattaacaaaggacgggaagtgtatgaaaacggagcaactgatcccacagccttccctgctgaaacacttctcaaaatggtgacaattaatggtgcaaaatcagtactctgggacaatgaaatagggtcgcttgagattggtaaaaaggctgacatggttgttatcaaccctttctcatggtctatggttcctattcatgattgcatctccaaccttgtatattgcatgcgaactgagaacattgtctctgtaatgtgcaatggtcggtggattatgag

SEQ ID NO: 220245 - DNA, 427 bp, Gossypium hirsutum
aaagtatcaagattgcagcaggcgaatcatgaggccgaatctcgattaaagcttgtttttgacgagaatatgaagcttgcaaaggagcgtgattcattggcaatgaccgcaaagaaacttagccgtgatttatctaagttggagacttttaagcggcaattgatgcaatcgctgagtgatgataattcatctcaggctgaaactgttgatattgggacctgtgaccagtcagtccctaaagcctatccggacaaggatgatggggcgagtgactacatgtcgcttcgttcttccaatggttcgacggacttgggaagcacaactgatgaagcttcaagatatgctggacaaagattttctataactccatatatcacaccgcggctgacacctactggaactccaaaagttatatccacaaatgggt

SEQ ID NO: 220246 - DNA, 414 bp, Gossypium hirsutum
gtgctaccgagtttgcattgtcgggaatatataccgtaaagagtgatgtgtatagcttcggggtggtgatgttggagctggtaactggtcggaaaccactagacagttcaagggtgagatcagaacagtcacttgtccgatgggccactccacaactacacgatatcgatgcccttgcaaaaatggttgatcctacactcaatggcatgtatcctgcaaaatctctgtcgcgttttgccgacatcattgctctatgtgttcagccggaacccgagtttcgacctcccatgtctgaagtcgtgcaagcgttagtgaggttagtacaaaaggcaagtgttgtgaaacggcgaccaagcgatgaatcgggattcgggtataagactccagatcatgaggcaggggacttttcattct

SEQ ID NO: 220247 - DNA, 423 bp, Gossypium hirsutum
aaattttatagttttgttcgtggaaagaacagagattcagagatgagtaagcttcagagtgatgcccttagagaagctatttcaaccattgtagctcagtccaaggagaagcagcgtaagtttactgagactattgaactccagattgggttgaaaaactatgatccccaaaaagacaagcgtttcagtggttctgtgaagttgccacacattcctcgccctaaaatgaagatctgcatgcttggagatgcccagcatgttgaagaggcagagaagataggtttggattatatggatgttgaagcactgaagaagctaaacaagaacaaaaagttggtcaaaaagcttgccaagaagtatcatgcttttttggcttctgaatctgtcatcaagcagatccctcgtctcctgggtcctggtctc

SEQ ID NO: 220248 - DNA, 407 bp, Gossypium hirsutum
ggaaattaaatttctttaattttttctctttgtcgacctaagtctcttttatttgcttctttcaccatgaccaagcagcaggcgaactggtctccttacgacaacaatggaggatcttgcgttgcgatcgctggagctgattactgtgttatcgccgccgatactcgaatgtcaaccggttacaatatactgacccgagagtactccaaaatctgtaaacttgcagataaatgtgtcatggcatcctcaggatttcaagctgacgtgagggctttacaaaagcaactggcagctaggcacttgatttatcagcatcagcacaacaagcaaatgagctgccctgcaatggctcaattgctttccaacacactttattacaaagcgtttctttccttattattctttta

SEQ ID NO: 220249 - DNA, 371 bp, Gossypium hirsutum
tttaatcttctcttcctacacttttaatccttatcttcgctaacacccttacgggcaataccataaacctcgaggtccaaagactcaacccgacctactacgttaagccgaaaatcctatactaccacgggataccaccaaaccaacatcttctcatgtttgcctcaaaacaactgaacgacctccgcaccttgaaccattacaacatacaaaaccattccacccttcatcttattatgcgtctacttgcatatcttcaaatcttcacctaaacgctaaacctctagtccataactctaaaactctaacgctattaaacccttgacagcctaaatgccataatccgacaccatgaatgcatcccaccatac

SEQ ID NO: 220250 - DNA, 254 bp, Gossypium hirsutum
tggcatttcatgtatcagcttttcggatgccaatggcactactgacgtttagggtctttagctaagacgtcggatgattatgttcttacctgttcaatgtcataattgtcacttttcggctcccggaagggatcccaccaaaccaacaacgtctcatcttcgccggaaaacagctcgaaaagggccgccccttagacgatcacaacttacatacggaggcctccctccatctagctcttcttttacgtgaccta

SEQ ID NO: 220251 - DNA, 375 bp, Gossypium hirsutum
gggatgcagatttttgtcaagactttgaccggcaaaacaatcaccttggaggttgaaagctccgataccattgagaatgttaaggcaaagattcaggataaggaaggaatcccacctgatcagcaaaggctcatctttgccggcaaacaattggaagatgggaggactttggctgattataacattcagaaagagtctacacttcaccttgttcttcgtctccgtggtggccactgattattctaacacaaccatcttgccttggtttcaagttttaaagtgctcgtgtgtctttctaacttggatttctgggtcttgtcccctttgtaatacttttacttctcctctggaataaaaaagttggttttcttttcc

SEQ ID NO: 220252 - DNA, 379 bp, Gossypium hirsutum
  unsure (1)..(379): unsure at all n locations
gctaaactcccagcagctgataaaaagaagattgaagatgctattgaacgggccattcaatggggtagacaggggccaactcgccgaatccgatgaatttgaagacaagatgaaggagttggagagtatttgcaaccccatcattgctaagatgtaccaaggtgccggcggtgacatgggtggtggcatggatgaggatgttccggctggtggaagtggtgctggncctaagattgaggaagttgactaaatcattgattttcttcacctgggttctctattgttctcttatgttttttgggatttaaactgtttggttttggtgttttggttcctaaatcgattgaaatgaactttttatagggtttgtccctttttt

SEQ ID NO: 220253 - DNA, 393 bp, Gossypium hirsutum
tgttaactccgctaccaatgctcttaggcgaatgcagggctttcctttttacgacaaggaaatgagaatacaatatgcaaagactaaatctgacataatagcaaaagcagatggcacttttgtcccccgagagaagcgaaagaggcatgacgaaaagggagggaaaaaacggaaagaacaacttgatcctaatcaagctgcagcaggtttgaatccatcttatgcgggtgcttacggtgcaacacctcctctatcacaaataccctacctgggtgctagacctatagtcccagaagcacctgcaccaccaaataacattctatttgttcagaatcttcctcatgatgcaactgcgatgatgctgcaaatgctcttcaaccaataccctggttt

SEQ ID NO: 220254 - DNA, 388 bp, Gossypium hirsutum
ggagagaaccggagctactgtcgtcgccgccgccatggtgaagtttctgaaatccaacaaggccgtgatagtcctccaaggccgatacgctgggcgcaaagcggtgatcgttagatccttcgacgatggaacacgtgatcgcccctatggccactgtttggttgcagggataaagaagtacccgagcaaggtcatccgcaaggattccgccaagaaaacagcaaagaaatcgcgcgtcaagtgcttcgtcaagctcgtcaactaccagcacctgatgcccacccgctacaccctcgacgtagacttgaaagacgtggttaccgtcgatgcacttcagaccaaggacaagaaagtggctgcttgcaaggcgaccaaggagaggttcgaa

SEQ ID NO: 220255 - DNA, 378 bp, Gossypium hirsutum
ggagagaaccggagctactgttttctccgtttacatggtgaagtttctcaaagccaacagggccgtgatagtggtgcaagggctatactctgggcgcaaagcggcgatcgttatatccttcgacgataggaacacgtgatcgcccctatggccactgtttggttgcagggataaacaagtacccgagcaaggtcattcgcaaggattccgcccagaaaacagcaaaaaaatcgcgcgtaaagtgcttcgtcaagctcgtcaactaccatcacctgatgcccacccgatacaccctcgacgtagacttgaaagacgtggttaccgtcgatgcacttcataccaaggacaagaaagtggctgattgcaaggcgaccaaag

SEQ ID NO: 220256 - DNA, 309 bp, Gossypium hirsutum
gagaagtctaagcctgaagacaagaaagaagagcctccggcggcggttgtcacggtagtgttgaaggtttacatgcattgtgaagcttgtgcaatggaaatcaggaaacgtattcaaagaatgaaaggggtggaatcagctgaaccggatctaaagagctcagaggtgacagtgaaaggagtgtttgaaccgccaaaactggtggagtacgtctacagaagaaccgggaagacggcggtgatagtgaaactagaggcggagacaccgaagacggaagaagaaaaagccaaagatgccaacaaggacgag

SEQ ID NO: 220257 - DNA, 410 bp, Gossypium hirsutum
cgagattcgatcatccccgtcgattatagcataatccagatcgttatggggctccgttctccggtggattccgacttccactgggcatatcatcgcctccgagaaacgccttctctctctcgtcaagactctgtatgtgcaagaactcgtgaatataggctcaggtccgcctggttctaaggttaggtggtttcgttcttcaagtaacgagccgaggttcataaacacagttacctttgatagcaaggagggttctcccacccttgttatggtacacggatatgctgcttctcaaggtttctttttcaagaattttgattatcttgccaatcgtttcaaggctattgctattgatcagcttggttggggtggatcaagtaagcctgactttacatgcaaaagcactgaag

SEQ ID NO: 220258 - DNA, 304 bp, Gossypium hirsutum
  unsure (1)..(304): unsure at all n locations
aaggcaagcctgaagacaanaaaaaattttcttcgcggtttttgtcacggtagtgtgggaggtttacatgggttgttttgcttgtacaatggaaatcaataaacttattcaaagaatgaaaggggtggaatcagcttaaccggatctaaagagctcataggtgacactgaaaggagtgtttgaacctccaaaactggtgtaattcgtctacagaagaacctgtaagactgccgtgatagacaaactatacgcggacacacctaacactgaagaagaaaaagccaaagatgccaactacgaccag

SEQ ID NO: 220259 - DNA, 380 bp, Gossypium hirsutum
gctcaatctctccttttagctcagaacgctcttcacgctgtgtagaaatgccgttcaaaaggtgcgttgagatcgggagagtgggtctcgttaactacagcaaagactacggcaagctcgtcgtcatcgtcgatgttgttgaccagaacagagctctagttgatgccccagatatggtgaggggccaaatgaactttaagaggcttcaattgactgatttcaaaattgacattcctcgtgttccaaagaagaagacactgattgaagcaatggaaaaagctgatgttaaaaacaagtgggagaatagctcatggggtaaacagctgattgttcaaaagaagagagcatctctcaatgacttcgacagattcaagatcatg

SEQ ID NO: 220260 - DNA, 356 bp, Gossypium hirsutum
  unsure (1)..(356): unsure at all n locations
caaagctctctctctctattctctttggcttatctatcgctttgatttcgcatccttgctgggcactcgatggcaaatcgatggttgaggcctgaggtgtatccgctgtttgcggccgtaggtgttgctgtcggaatctgcgggtttcagttggtgcgcaatatctgcatcaaccctgaagtcagggtaaccaaggagaacagggctgctggggttttggacaactttgctgagggagaaaaatattctgaacatttcttgagaaaatatgtccgcaacaagacgccagaaatcatgcccagtatcaacagcttcttcactgacccaaagtgaggcttcactcttgctntatgctg

SEQ ID NO: 220261 - DNA, 410 bp, Gossypium hirsutum
caagtccaagcctctttcttgtgttccggtgcatgtcgaacatgccgagctcaaaactattggggggaggtatttcataccaaacagatgaccaaggtctgagagaagctttcagcaaatatggtgaagttgttgaagcaagaataatcgtggatcgagagacgggtaggtctagaggatttggctttgtcacctacacaagttctgaggatgcttcaagtgcacttcaggccttggatggacagactctccatggccgtcaagtaagagtaaactatgcaactgagagagctcctcgtaactttggaggtggcggctacggtggtggtggctacggtggtggtggctacagtggtggtggctacggcggtggaggctatggaagtggtggcggtggatatggaggcggt

SEQ ID NO: 220262 - DNA, 289 bp, Gossypium hirsutum
ggggccgctgcctcaacttctgtgagagtttaatggggagggtacaatgtgaggactagggcaagttaagctgaggctttggctcctatcactttcattgctggaggaagttggttaagctctacaggctttcctttcgctcttgggttgtaataattttaaagattgtattgtcaatgtacccacctacctacttcattgtttggtttgagatttgctttgcggccgtgtatctgttaaattattactaaattaatagtagtaataagcgaatgccaaggctttcttc

SEQ ID NO: 220263 - DNA, 432 bp, Gossypium hirsutum
  unsure (1)..(432): unsure at all n locations
ccangcgtncgggtgagttctgcaacatagacaagtttttcttttcagtcgatacatgtcatcgtaaggaagggactccgggtcaggctggtctggtccgttactgcgaaagctcgaccagctgggccattgagaagcttttaaccatcgaccccatcaaccactcgctaagctacgagatcgtcgaaaataacatagggttcaaaggctacgtcgccaccctgaatgtgttggcggttgaaggcgatgggtgcaagatcgaatggtcgtttatatctgacccaattgaaggtatgaagttggaagattttgtttcttatttggataatacactgctattcatggcgaagaaactggaagatgctgtccgggctcaaatctagatgttgaaaattgttggtttttgttgtgtgttttagaaagttatgtgtt

SEQ ID NO: 220264 - DNA, 390 bp, Gossypium hirsutum
aaagaaattaaagaaccaatcatgaagcttgacaccagcggactagaatcggctgcgcctgtctcgggtgctcccagtgaacttgttgatgggttttcggctgctccgtcgttcgatctcccaaacactactgattttgatgggtttcaaaaagaagctatccagatggtaaaacctgctaagggtaccaccacgcttgctttcatctttaaggaaggtgtcatggttgccgctgattctagagctagcatgggaggctatatctcttcacagtcagtgaagaaaattattgaaatcaatccttacatgcttggaacaatggctggaggagctgctgactgccagttttggcacagaaatttaggcatcaagtgccggctacatgaatta

SEQ ID NO: 220265 - DNA, 312 bp, Gossypium hirsutum
gaaaacccaaccattcttgatgatgaagcataattaagggaagtgttgaaatttgcaaatgcatgtggagccatcacgacgaccaaaaagggagcaatccctgcactaccaaccgaggccgatgcccttgccttaatcaatggagcttagattttaagcaacttgaataatttgcacattgttttgcctcccgtgattatcctttcatttcaaagagttctcaatttatccccctatgatatgcgaccttcgatcccgcaacgcccaactgctcgtgctgtaatgacggaaaagactttgtgtttttaagcg

SEQ ID NO: 220266 - DNA, 390 bp, Gossypium hirsutum
aagaaatggcaagagcaggagggataacgaacgccgttaacgtagggatagcagtccaagccgattgggagaatcgcgaattcatctctcacatttccctcaatgttcgtcgcctctttgaatttctcctccaattcgaggctacaacgaagagcaaattagcatccttgaacgagaaactggacaccctggaacgtcgtttggagcttcttgaagttcaagttggaactgcgtccgctaacccttctcttttcagtacgtgattcatatttaaaagttgtatttgtttccatatctttgtcgtgattttgttcctctcctagttttcgacgttgtaggaaaacaaagttttcttctttttctgtttgtctatataataaccttggcgat

SEQ ID NO: 220267 - DNA, 424 bp, Gossypium hirsutum
ggtctacattgaagctgaaatacagcatcgtttcagagacggacgaaactggaacatataacattgtggttgaagatgaccacgaagaccaaatttgctacgcaacacttgttagcagccccattcccagctgcagcattgtggaccctagacgtaataaggccacagctattctgacccgtagcaatggtgccatatccaaccttcactatacaaatgcaatgggattcctccaggatacggtagcggatggttgccaagaactgctcctcaagttgctgcaggatgatgaataaataatttacatgatcttcacgatttagcttcttttaatttttccttgactttaggacgcaattcataatgatgatgttgttgatcgatctatgttcacctgccatttttttgatgatcggttttatat

SEQ ID NO: 220268 - DNA, 419 bp, Gossypium hirsutum
gcctgaggaacttgaaccatttgctaagaagtgtttcttttatggctgccattgactatatagggtctgagagaagggatgtttgcatgccatcccatggtggaaatatgggccacgctattcagggacagagagcgttttcaggacacaaaaagtatataactccaaataaaagacatatgcttccttattttctgaactcctcaatgcccgaagcagagttcaacaggatcataaaagaattacaccatgaatctttgggacaaccagaactcatgaccagcaaagctggaagggatgtaaccaagtatccggttccagaatgtatgtgcaatgatgcacattcccacttcatttgatacagagagcttgcaacccgatagctaacattgcaagagtctttatcgagaatccaaatt

SEQ ID NO: 220269 - DNA, 415 bp, Gossypium hirsutum
  unsure (1)..(415): unsure at all n locations
gnggaaaggggcttttggcggcaaaaacaactttcgctaacaaggacaaggacaaagataaggacaagaagcgcgcggtttctcgttcatctcgtgccggaattcaattcccagtgggccgaatccaccgtcacctaaagactaggacttccgcaaatgggagagttggtgccacagctgctgtttacttggcctccatccttgagtacctaactgcagaggttcttgaattggctgggaatgcaagcaaggatctgaaagtgaagagaatcaccccgagacatctgcagcttgctattaggggtgatgaagagcttgacactcttatcaagggtactattgctggaggtggtgtcatccctcacattcacaagtcccttatcaacaaaaccaccaaggattagaatgtttgagt

SEQ ID NO: 220270 - DNA, 386 bp, Gossypium hirsutum
  unsure (1)..(386): unsure at all n locations
catttttcaaacttgggttatggcatcacatggagggtggttgtgaccagcatgatggcaaacgtaatggacctggaagtcncaagcctnaccaatgtccatctcagtgcacaaggaggtgtagccagacacagtaccataaaccatgcatgttcttctgtcagaaatgttgcaggacatgcctttgtgttcctccagggtattatgggaacaaacaagtttgcccttgctacaacaactggaaaaccaaggaaggaggccccaaatgcccttaaattactcaaaagaagacccctttttttttacattattatccctataaatttcctatttgaaattcaagtcatttaagcataaggttgcactgtaatactaactatatattt

SEQ ID NO: 220271 - DNA, 414 bp, Gossypium hirsutum
caaaatctctctttctcgtcaatatggcagctaatggcgttgtttctgacaagagcttgatcggcagcttcggtgagatgctgatcgattttgtccccactgtctccggtgtttctctagccgaagctcccggcttcctcaaagcccctggcggtgctccggctaacgtggccattgctgttgctagactcggaggcaaagcgtcatttgtcggaaaacttggggacgacgagttcggtcatatgctggccgatattctcaagcaaaacagtgtctccggtgacgggatcttgtttgaccaaggcgctagaactgctcttgccttcgttacgttacgcgccgacggagagcgtgagttcatgttctataggaatcctagcgccgacatgctgttgaagccggaggagttgaacg

SEQ ID NO: 220272 - DNA, 412 bp, Gossypium hirsutum
gactggttttatgggagctatgatatcgaactcggcattggtcctccggcacatattctcggggaagggcatgaaggggaaaggcgttcatgcgatgaactactacgcctgactatctttggtgtctcttgtaattctcacacctttagcaattgctgtagacggaccgcagatgtgggctgcatgacgggaaacggccttatcccaaattggaccacagcttatctggagggtagcggcccaaagtatttcctatcatctctacaaccaggtctgatacatgtcccttgatgagacatctaccttgacatttagcgatggcaacaccatgaaacgtatatcagggatagtctcttacatcatcatcttccacacgcctgtgcagccaatcaatgctgtatgagctgccatt

SEQ ID NO: 220273 - DNA, 388 bp, Gossypium hirsutum
agcgtatttccaagctaaagaagaacggctgctcgtatatgattatttcccaaatggcagcctcttctctcttattcatggaacaagaaccaatggtggtggaaagcctcttcattggacttcttgtcttaaaattgcagaggatttagcttctggattactttacattcaccaaaatccaggcttaactcatgggaatttaaaatcctcgaacgttttattaggccccgacttcgaatcatgccttacggattatggtctcacgttattccgagaccccgagtcaccagaagagccaagtgcggccacttttttctatagggcacccgaatgtcgggacatccgaaaatcatcgactcagccggccgatgtttatagcttcggcgtt

SEQ ID NO: 220274 - DNA, 389 bp, Gossypium hirsutum
caaagcctggcccaaatgctagtaatgatgagcggaggaaattcattaagtccaagtatgaacttcaagaatttttgaagcccagcttgcggatcacatcagggaaggattcttcttcttcttctactcaatcgaacatttctggaaagattttggatactatcctatcaaattcgacacagaaggaaggcatggttgaatttattgggttactgaaggtcaaagtagtaaaaggcacaaatttagctgtccgggatatgatgacgagtgatccttatgttgtcctgactcttgggaagcagactgttcagtcgactgtaatatcaagcaacttgaatccagtctggaatgaggaattaatgttatcggttcctagcaactatgggcct

SEQ ID NO: 220275 - DNA, 404 bp, Gossypium hirsutum
  unsure (1)..(404): unsure at all n locations
catgaacaagctccagaccaagaaaccatggtcactctctttctcatttggacgtgcccttcagcagagcactctcaaggcctgggctggaaaggaggaaaacgtgaagaaagcacaagatgctttccttgttaggtgcaaggctaactcggaggccaccttgggtacatacaagggtgatgcaaagattagtgagggtgctgcagagagccttcatgttaaggactacaaatactaagaatttagtcttgtggtctgtgtatcagagaaattttctgtattgatgatagacgtttagtgctgtttttggaggttgtccgtttcttctcatggaatgtaggttgtgaaatcagactcaaataagctnggggggccctagttctcgctgagtgttcatgggtttt

SEQ ID NO: 220276 - DNA, 386 bp, Gossypium hirsutum
cttcgttttcctccgcggctccatttctcgttccctcaatatcaaagtaggaatgaaggtgggcgccgcttacttgctcgccggactcggaggaaacgcttccccttccgccgatgacttgaaggttattctcggatcagttggtgctgaggctgatgatgataggatagagttgctattatccgaagttaaaggcaaagatattaccgagctaattgctagtggaagggagaagttggcttccgttccttctggtggtggtgctgttgcggttgccgctcctgcaggtggtggtggtggtgctgcacctgcagccgaggccaataaagaagagaaggtcgaggagaaagaagattccgactatgatatggggtttaggccttttg

SEQ ID NO: 220277 - DNA, 396 bp, Gossypium hirsutum
gaaacgaattgtgaagttgaatgaaggatttgatctattttttgaaagagagcttgaaattgttggaagcataaaacatcgatgccttgtaaacttgcgaggatattgtaattcacctgcatcaaagctgttaatctatgattatctagcaggtggtagccttgatgaagctcttcatggtgaggctccttaaaactatttttattcaaaagcagttctcatttcctggtttgcctccatgtttctcacaactcaaaagtagtgcaagcaaaaaaaacaagcactaaatgagggggctcgaaatcagcagctgcagctttcacttgttcatttcattaaattctttatgcggatcgaagttggaaggtccatctgaactgttcaatggaagtagat

SEQ ID NO: 220278 - DNA, 416 bp, Gossypium hirsutum
  unsure (1)..(416): unsure at all n locations
aagaaatagaattcgaagcattcaatggagagaaatcttctaaacccgagaccttaaacgcgtgccacataatttcattgtcggaaggcttcnatttatctccgttgttcgaagagaaaaagagggaagagaaagaggagttgaggttcgccacgacgaggccggcaagcagcgtgatatcgaggctcgaagaggtggccaaatcggggaagttcagcgtcaaaaagagcgagtgtaaggtgaggttgcagggtcaagaatgtgggaggaaaggtaaacttgccattgctgccgatatatttgcggtgacgccgtcgttcttggtggtggaagttaaaaaggaccatggcgacacattcgagtacaatcagttttgcagtaaagagctccggccggcgcttaaagacatcctatgg

SEQ ID NO: 220279 - DNA, 423 bp, Gossypium hirsutum
ggaaaaccctaaaatctgatggtattgccgggctttatcgtggtttcaacatttcatgtgttggaatcattgttgaccgtggtctatattttggaatgtacgactctctgaagccagtgcttttgactggaagcatgcaggatagtttcttcgctagctttgctcttggttggctcatcacaaatggtgctggccttgcatcttacccaattgacactgttcgtagaagaatgatgatgacttctggtgaagctgtcaaatacaagagctcgctcgatgccttctctcagatcttgaaaaacgaaggtgccaagtctctattcaagggtgctggagctaacatccttcgtgccattgccggtgcgggtgtgctcgctggatacgacaagttgcagctcattgttttcggaaaagagtacggat

SEQ ID NO: 220280 - DNA, 391 bp, Gossypium hirsutum
ctgatgcaaggaccttggtccaacaagcatggaatgaagcggccgagtttcggttcagatgtggatatgagatgcctgttgatgtattgtctaaatggattgctgacaaatcacaggtttatactcaacatgcttatatgagacctcttggagttgttgctatggttttgggtattgatgaagagaagggaccccaactctacaagtgtgatccagcgggccacttttacggtcacaaggcaactagtgctggatcgaaagaacaagaggcaattaatttcttggaaaagaagatgaagaatgacccagcttttacttacgaggaaacggtgcagacggccatttctgctctgcaatctgttcttcaggaggatttcaaggctactgagat

SEQ ID NO: 220281 - DNA, 370 bp, Gossypium hirsutum
caaatctattgattatcggggctcgaacctgcccagcggagggacaaatgatggtgcattgtggatagatttgccaggagataataatggaagagataatgttaagaaaggaaacttggagagtgcagagctatatgttcatgtcaaaccagcagtgggtggaacatttacggatattgtgatgtggatattttgtcccttcaatggaccggccaatctcaagatcgggttaatgaacatacagatgaacaaacttgggcaacatgtaagtgactgggaacacttcactctccggataagcaacttcacaggggaactgtggcaagtttacttctcacagcatagcggtggtgagtgggttgatgctttc

SEQ ID NO: 220282 - DNA, 307 bp, Gossypium hirsutum
  unsure (1)..(307): unsure at all n locations
aatttattgtttttaaattttagcaaaaagggacaaatatgtgtncatgaaactattcctaaggcacttgccctaaattatcaaattatcttcctaaacaaacactactgccttcaaaaatcatattgaacagctccacatccaatacccttacaaccttatatcattaaccaaattcaatgtcccattgtcccatatcattatttctaatgattattacatttttctccctattaaattcaaaccatcccctctcattcaacttcatactattcaatatccaacacttccaattactacctctact

SEQ ID NO: 220283 - DNA, 363 bp, Gossypium hirsutum
  unsure (1)..(363): unsure at all n locations
ccgggncgagccacgcgtacgggaaagacgaaccaaccgaacgnacncccgctttcaaccgcagattcaacatataatgtcaggtaaacataattggaccgccgcgatattacaaagtctacaactctaaaaccccagcgctacccactggaatcatccaggaaacattcttctctagctatgctcctgaatagctaatcacaaatggcccagccctctcatcaaacccaactcacactgaacggagaataataatcaccacttatcgtgacactaacaactacaagagctcgctctacgcccactgtcacagctacaaaaaccaacgcgccaactctctatccaagggagctcgagctaaca

SEQ ID NO: 220284 - DNA, 419 bp, Gossypium hirsutum
  unsure (1)..(419): unsure at all n locations
gttgctcatgaattcattatagacttgagaggttttaagaatactgctggaatagagcctgaagatgttgccaaacgtcttatggactatggattccatgctcctacaatgtcgtggcctgttccgggaacgctcatgattgaacctactgaaagtgaaagcaaggcagagctggaccgattctgtgatactcttatctccattagggaagaaattgctgaaatcgagaatggaaaggctgatatccacaacaatgttcttaagggagctcctcatccaccatctttgcttatggcagatgcatggacaaagccgtattctcgggaatacgctgccttccctgcttcctggcttcgaactgctaagttctggcctactacaggacgtgtngacaacgtatatggtgatcgcaacgtcat

SEQ ID NO: 220285 - DNA, 412 bp, Gossypium hirsutum
aaaaaagcatggcaaagagtgatgggaaggtgaaagtaatgggaagatggcagtgcccatttgcgatgagggcaaggatcgcccttaacatcaagtctgtcaactatgagttggttgaggcgaggccatgggatggccaaagccaggtccttcacgaatcaaagtcaaacccagtcatggttcatggtgataagtccatctgtgagtctctcaatattgtcgaatacatcgacgagatttggccttatgctccctccattgttccttctgatcctcttgaacgtgtcactgctcggttctgggctggctatcttaaagaccagtggtttccttccttgaaagctattggtactgctgaaggagaggatacaaggaaagcagcaataaggcaagtggagaaagggttagtact

SEQ ID NO: 220286 - DNA, 411 bp, Gossypium hirsutum
aaaaaatccctctcttctcagctgctggtcttccccataatgaaatcgctgctcagatttggggtcaggctggtttggtgaaacgtttggagaagactggagatctgcttgaggatggtgaagaagataattttgcaattgtgtttgcggctatgggtgtaaacatggagactgcacagtttttcaaacgtgactttgaggaaaatggctcaatggagagggtgacccttttcctaaacctggctaatgatcccacaattgaacgtattattactcctcgtatagctctcactactgcagaatacttggcatatgaatgcgggaagcatgttcttgtgatccttacagacatgagttcttatgctgatgctctccgtgaggtgtctgctgcccgagaagaagtacctggaa

SEQ ID NO: 220287 - DNA, 374 bp, Gossypium hirsutum
aaaaagagccttctctacttttatgctaaccttttccataacgaaatatggggttaaatatgtgggaagacgggaaagatcaaacgtccatataatactttaaatctgattgaggaggggcaataacataatattgccaatgccatcgcctttatgagtgtaaacataaccactgcacagtttatcaaacttgactcttacgataatgtctcaatatagaggaatacctctaccctaaacctccttaatcatcctacatttgaacttattatcacttctaacatagctctcactactgcagaatactttacatatgaatccactaatcacgtacttgtgatcctatcatacatgataactatgctaatcctcta

SEQ ID NO: 220288 - DNA, 419 bp, Gossypium hirsutum
  unsure (1)..(419): unsure at all n locations
aattaattcaaaagcatttcctaatggctcttcgttcgtcaatcaccagaagaaccctaacattgggcctaaattgcacgatgctgctgcctctgtctcgatcattgcagactttctccctccccgatcttccttacgactatggcgctcttgagcccgccattagtggagagatcatgcaactccatcaccaaaaacaccatcaaacttacatcactaactataacaaggctttagagcagctccatgaggctattcagaaaggtgattcttccaccgtcgttaagttgcaaagcgccatcaagttcaacggcggaggtcacgtcaaccactccattttttggaagaaccttgcccctattcgtgaaggaggaggtgaacctccaaaagcttccttgggttgggctatngacacacac

SEQ ID NO: 220289 - DNA, 393 bp, Gossypium hirsutum
atgataccaaagtagacgtgttttcatttgctctgatcttacaggagatgattgaaggctacccaccattttctgctaagcaagacaatgaagttcctaaggtatatgcagcaagggagcgtccacctttcaaagctccagctaagcattatgcccatgggctcaaagagttaattgaggaatgttggaatgagaaacctgccaagcgacctacattcagacagattataaccagacttgaatctattcacaacagtttcagtcatagaaagcgttggaaggttagaccactaaaatgctttcagaatctggaggcaatgctgaagaaagatcattctagtccaagcagccgtagcagttcatctcgatctactaacagcatatgaatgaatg

SEQ ID NO: 220290 - DNA, 428 bp, Gossypium hirsutum
  unsure (1)..(428): unsure at all n locations
cgcgtncgaatgattcaaaagcatttcctaatggctcttcgttcgtcaatcaccagaagaaccctaacggtgggcctaaatggcacgatggtgctgcctctgtctcgatcattgcagactttctccctccccgatcttccttacgactatggcgctcttgagcccgccattagtggagagatcatgcaactccatcaccaaaaacaccatcaaacttacatcactaactataacaaggctttagagcagctccatgaggctattcagaaaggtgattcttccaccgtcgttaagttgcaaagcgccatcaagttcaacggcggaggtcacgtcaaccactccattttttggaagaaccttgcccctattcgtgaaggaggaggtgaacctccaaaagcttccttgggttgggctattgacacacactt

SEQ ID NO: 220291 - DNA, 407 bp, Gossypium hirsutum
gcttaagaggttcccaatgccctatgctttgtacttgatgggagtatctattttggctggctgctggggacagtatttcgtgagaaaactaataacaatccttaggagagcttcacttattgtgttcatcctatctggtgtcatctttgcaagtgctctcaccatgggtataaatttattaaagctcaatgattctgcattcttaaattttagcattacagaaggactaagttaataattttacttttttttccttttagttggtggaaactgataattgtttttattcatgtatattaaacaggagtcattggcattgagagaagcattctaatgattcacaaccatgagttcatggggtttttaaattgttgcagcagtcaatgatcgttgactaagtaagaatg

SEQ ID NO: 220292 - DNA, 429 bp, Gossypium hirsutum
  unsure (1)..(429): unsure at all n locations
cgcgtncgnaaggacgaaaagattggtgccaaactcccatcaactgataaaaagaagatcgaagatgctatggaacaagccatgcaatgggtggacagcaaccaactcgccgaatccgatgaatttgaagacaagatgaaggagttggagagtatttgcaaccccatcattgctaagatgtaccagggtgccggcggtgacatgggtggtggcatggatgaggatgttccggctggtggaagtggtgctggtcctaagattgaggaagttgactaaaacattgattttcttcatctggtttctctattgtgttctcgtatgttttttgggatttaaaccgtttggttccttttttgggatactctatcagtagcacctgtgattggtgtgttttggaaacaggtcccttttgaatgttatgaaatgctc

SEQ ID NO: 220293 - DNA, 360 bp, Gossypium hirsutum
  unsure (1)..(360): unsure at all n locations
ggaactaaaggagaccttgcaggaaataattggacaggggaagcaggttaagctggaacagaggatcgatcctagtattcttggtgggcttgtcgtanagtttgagcaaaaggtatttgacatgtccattaagactagggcacgacagatggagaggttcttgcgtgagcctatcaactttggttccctctgaaggatgttataaccgccaagtgaccatttcagtttccttgtgcaccaattgggttattccgagaactgcaaagaataattaatggtctttttgttttgcctctgttttcttctactcttgacattatatgatggaatgcatccattcacaataaaagaaactttctc

SEQ ID NO: 220294 - DNA, 391 bp, Gossypium hirsutum
gtcagaccgtggcagttggtgttataaagaatgttgagaagaaggacccatccggtgccaaggtcaccaagtgtgctgctaagaagaagtgaaccgtgctggttaaatctaatgaagtttccgcagatggagtattttattatcataataatagtttgatagactttatcatttatgatatagttggtcttttgcttggttttgcatgttatagtgtgttgccattgttgtctggtaactgttctcagtattgggtgcttgacagacggtggcatatctatgggtggtctctagcgttacctggttttgtttaatttactactgtatcttgtcattgtcaagaggtgcccccttggttttccaaggtggcttgaaacttttgtttatgatt

SEQ ID NO: 220295 - DNA, 392 bp, Gossypium hirsutum
gtgagtttgctgactgagagtggagacactaatgatgatctgaggctcccaactgatgagaagttattgaaacagatcaaggatggttttgctgagggaaaagacctggttgtgtctgtgatgtctgcaatgggggaggagcagatctgtgctctgaaggacattggtcctaagtaatttgagattttattttcagacttttattgcaatcttagattataactttttattttttttaagaactttaatagctttgtgtcttggaatttgggtttttttttattttttttattttaatatatctggatacgagaaaaacaccattgctgttatcttattgttgtgatatgattctctcttttactacttcaaggttttgttcttgggttttc

SEQ ID NO: 220296 - DNA, 421 bp, Gossypium hirsutum
gtgagttcaaatttaagcatgtgaaaaaggcagtagcatcttcatgtcaaattttctataggattttcccccccttttttaaacagatgaattcaagtaatggaaatggatccatgtcgactgctagctcaagcggtgcttggaacggtagagatcaattccctgctggtttgcgtgttctcgttgttgacgatgatcaaacatgtcttatggtctttgaaaaaatgctaaaaacctgcttatatcaagttacgaaatgcaacaaagctgagactgcattgtcggtgctacgtgagcacaaaaacgagtttgatatcgttatcagtgatgtccatatgccagacatggacggattcgaacttctcaagcatattaattcggagatggatctccctgttatcctgatatcggcagatgctag

SEQ ID NO: 220297 - DNA, 423 bp, Gossypium hirsutum
ctggagtgtgaaggcaatcagaagaaagaccactggaaccggtaggatgaggtatctgcgcgatgtccctcgcaggttcaagactggtttcagagaaggtactgaagcagcaccgaggaagaaggttgcagcagcttctgcttgaggtattacaaggttgttttggatgaagccttctttttttaggaaaacttttacgagaacatttttcttgaggggtgtcattacattgaatgctttagctgtttttagtttatgattatggagttgcattaaattttgaacaaggatgaatgctttagtttttctctagtttatttttgaggagttgcttcaaattttgaacgaggatggacaaggctattgttggttgacacttagttacttgatacatttttttgggatgaaagtaatgtatgttct

SEQ ID NO: 220298 - DNA, 424 bp, Gossypium hirsutum
ggtcaataagatatacaggaaagagctcactctggcattcctcctgcttacagcttcggttaggagcctgttatcggcacagggagtacatttctacttcctcctcttccagggggtgacttttctcctagtcggtctagatttaataggagagcagatgagctaatgctgcatggaagcttgaaagaaagcaaaatgtgctaagactctctccatttccactgacaaaacctggtttctggctgtgcagtcgaagtttttctcctcaggaaattgtttaacggtaccatcctggtgctcaataaccaaagtttcattctctacgtcagcattgaatgccgaattgaaggtttttattcgtcagtaactctactttctgtcttcacagtttctatctactttctaatatctttatatatatatt

SEQ ID NO: 220299 - DNA, 424 bp, Gossypium hirsutum
aaaaatattttcgctagattctttaatccattaagatatcatgggcaaaggtccaggtctgtacactgaaatcggcaagaaagccagagaccttctttacaaggatttctaagacaaatggctttatatctccaatgtggggaggtgttattgtttggaatccccaaggctgtttaaaggattcagaattcaagcccagtgccaagaacataattcccatacaggaccttgagaatatgtttgaagtattcattgggcaattccggcaactatttggtttcaaatctttgaatgtttacacgaatgcatcaggcgattggaaccttctgcctagtgaaagaggttttaccgagtgggaattggacgtcttgtcatggcaacacacgtgttttaatcttcattcatgtgctacgacacttggatc

SEQ ID NO: 220300 - DNA, 422 bp, Gossypium hirsutum
aaacacaattcatagaaagtaaaactccgtctccatgtccagctccgatcccaacaaggtgggttccaaagccgacaaaggaggaaggctaagtcttacaaggtggagtgcagattggaaaagtgctactcttttatatgaacaagctgcaaatggatttcgagtttcaaaggattatgagaaagcaaagttggcattcgagaaagcttccaaaggacaagaaatgctagcttctccctgggatgctgctaaacacatggagtctgctgctgctttagcaaaggaactacgcaactggactgaggttatcgacttttacagaaaggcatctgagctatacatgcagtgtgacagaccacagcctgcatctgattcacttgccaaggctgcccgtgctttggaggatgctttgcctgatgatg

SEQ ID NO: 220301 - DNA, 408 bp, Gossypium hirsutum
ctctttgcgcctttcttctctcagccgcagcactgatattgcaggtaagtcatggttaaggataacaatgtcgtgccaaatgggcacttcaagaaacactggcagaactatgtgaagacttggttcaatcagccagcacgaaaggctagaagacgaattgccaggcaaaagaaggctgtgaggatctttccaaggccaactgctggaccccttcgccctattgtccatggccagactttgaagtataacatgaagttgagagctggaaagggtttcaccctcgaagagcttaaggctgctggtatttcaaagaaacttgcaccgaccattggtatcgctgttgatcaccgccgtaagaacaaatcacttgaaggtcttcaagccaatgttcagaggcttaagacctac

SEQ ID NO: 220302 - DNA, 285 bp, Gossypium hirsutum
gctttctggaattgccaattccatggaaactgttttgaagggcttgaaagatgggttgtcggctttgcatgttccttacgcttatggttttgcaattatacttctgactgtgcttgttaaggctgctacttttcctttgactaggaagcaggtagagtctgcaatggccatgcgatcattacagcctcaaataaaggctattcagcagcggtatgctggagatcaggagagaattcagcttgaaactgctcgactatataaactggcagggataaacccattagc

SEQ ID NO: 220303 - DNA, 404 bp, Gossypium hirsutum
cttcttttgccgctcctgaacggcatgaacattccgtttctttgcctaatagatcgtggcggctctcttcctcctcgtccttgccgcttagggcctggaacttagttccttccgattcaaaaccggatcgctttgaagttagagccaaggcggcggagagtgcaagtgaaggcgagaagtcaggaagcctggtcaagatatcggagcttggtttgttgtttggtttgtggtacctcttcaatatctacttcaatatctacaacaaacaggttcttaaggtcttccattaccctgtaactatcagtgcagttcagtttgcagttgggacgataattgtttccctaatgtggacgtttaacttgtataagaggccgaaagttagtggtgaacagctagtagcaatt

SEQ ID NO: 220304 - DNA, 322 bp, Gossypium hirsutum
tccctccaaagctccaattcaccgccaaccatgccttcacacaagacattcatgatcaagaagaagttggccaagaagatgaggcagaataggcctatcccttactggatccgtatgcgcactgataacaccatcaggtacaatgcgaagcgtaggcattggcgccgcaccaagctagggttctaagcaccatgagcttatttgggttcaagcttttcttttttcccaagtttatttgcagacattttgatgtggggtttaatataggaaactaccaaggatgaaggattcttaaattaaagattttgatgagatttttggc

SEQ ID NO: 220305 - DNA, 424 bp, Gossypium hirsutum
atcaaaccctaatattttgttcctttatttgagaattcttctcttcttctatcatcaggtgtctcctaccatcgtccatgtcttctctctctcgtctctgcaaatcaattgtgtttttcttcccttctcccaccgccgtgtccgctggtttttcctggatctgacccgtatccgacacggaaattatggtgtctggtttaataaatgcaaaccctattgtgtacgagaagaaagagcggcgggttcgtaacgaagcagctgtacctgatgaatacgctgttgaacctattgaccaactagaaatatttgatcatattagagatataaaggaccctgaacatccctattctttggaagagcttaaagtaataactgaagatgctattgaagttgataacgagcgaagttatgttagggtcacatt

SEQ ID NO: 220306 - DNA, 423 bp, Gossypium hirsutum
gtaaaatagacgtatattgggacctttcttcagctaaattcggatccgggcctgaacctttccaagggttttatgttggtgttgttgctaataagcaaatggttttgcttcttggggacatgagtaaagaagcttgtaagaaaactggtgcaactcatatcccttgtaatgccagtttagtggctaagaaagagcttgtttttgggaagagggtatttggtaccaaggcgcagttttgcgataatggtcgaattcatgatctgataattgaatgtgacgcggtttgtatgaacgatccttgccttataattcgtgtggatggaaaggctttgatgcaagtgaagcggctgcggtggaagttcagagggaaccataccattttggtcgatggaatggctgtagaagtttactgggatgtgcata

SEQ ID NO: 220307 - DNA, 284 bp, Gossypium hirsutum
  unsure (1)..(284): unsure at all n locations
gatgacggttcaaacatagaagcatttgatgccaacactggagttgatgcgcggtgtggctgggaaggatatangatggttaagatctattacaaacttgccagttctgctcaagggagtacttactcatgaagatgcaataaaggctgttgaagtaggggttgatgggattgttgtctcaaatcatggagctcgccagctagattatgctccacccactatttctgttctagaagaggtggttagtgcagttaaaggaaagattcctgttttatttgatggag

SEQ ID NO: 220308 - DNA, 421 bp, Gossypium hirsutum
tcctccaccaggggagtatgagagaggactttttgctcatactgataaaccagtcagtacacttatttgtgaggatcaagtttcaggattggaaattgaggtcaacgacggccaatggatcaagttgaccaatctatctccttcttcttttgtttttatagttggagatcctctcaaggcatggagtaatgggaggttgaaatcagtaaatcacagagtgatgatgagcggagacaaagatcgatactctatagcagcctttgtcattccaaatgagggtactataatcaggacacccgaagagcttatagatgaccaacatcctcggcttttcaaggacttcgatttcatggatttcttcctttttgccttttccgacccagcaaagcacatcgacaacggtgagttgctccatgtcttt

SEQ ID NO: 220309 - DNA, 409 bp, Gossypium hirsutum
gaacattaaaacatagcccaactcttcgttttcttcaagcggaaaacagaaaactgaggctttcccttctcaaatggcaccgagggagaaaacggcggccgtcaagggtactgggaataataacgaggttcatttcagaggagtaaggaagcgtccatgggggcgttacgctgctgagatcagagatccagggaagaagagccgtgtttggctaggaacctttgatacggccgaggaagcagccagagcctacgacgccgccgctagggaatttcgcggcgccaaggccaagactaattttccggtcccttgtgagaatctcagcaaaggtaataactgtaaaagtaatggtaacaacaaccaccatagccctagccagagtagcaccgtggaatcctcgagccgtgag

SEQ ID NO: 220310 - DNA, 332 bp, Gossypium hirsutum
acctgtttcttccaagtgctgaatattccaaccaagattaacaagggtactgtctaaaggatcacccctgtcgagcttatggagaaaggcgtaaaggttggttcttctgaggctgcacttcttgccaagctaggaatcaagcccttctcatacggtcttgtcgtcctatctgcttacgacaatggctcagtctttagccctgaggtcctggatctcactgacgaagatctgattgagaaatttgctaccggtgtctccatggtcaccgcattgtctcttgccatctcatacccaactcttgctgcttcaccacacatgttcatcaatgcata

SEQ ID NO: 220311 - DNA, 418 bp, Gossypium hirsutum
  unsure (1)..(418): unsure at all n locations
aagcagactggcaggaagctggcgttgagtataatgagtccatggatggtaatgaagaagcctctgacaggcaccatgaagatggaggcttgcgcgggactgcacaggattggatggaagagtcttacaatcaagaacctgttactatcagaagaacagatacattttattttcctgatgatgataatgtacacagcatggaactgagggaactgttaagcaggagaagtgtgtctactcttcttcatagtggtttccgtgagagtcttgaccagttgatacaatcatacgtggaaaggcaaaatcatgctcctgttgactgggagttggaaggaacatctccttctcctgcatctcttgagcaagacctagaacagcaaagtggggatcagaatgatggccacggngatgctgagac

SEQ ID NO: 220312 - DNA, 417 bp, Gossypium hirsutum
aagaaaactccatggctaaacttgttgctactttcttcttggctctcattgccatctccatggttcaaactttggttatggcatcacatggacatggtggtcaccattatgataacaaacgttatggacctggaagtctcaagccttaccaatgtccatctcagtgcacaaggaggtgtagccagacacagtaccataaaccatgcatgttcttctgtcagaaatgttgcaggacatgcctttgtgttcctccagggtattatgggaacaaacaagtttgcccttgctacaacaactggaaaaccaaggaaggaggccccaaatgcccttaaattactcaaaagaagacccttttttttcttttttacattattatccctataaatttcctatttgaaattcaagtcattgaagcat

SEQ ID NO: 220313 - DNA, 422 bp, Gossypium hirsutum
acgatggtcaatctgggaagccctgttcaaatagctctatccgttctagaagttcaggtcaaaatggggatagctatgctgggaattcgcctgatctgcttccacccacaaatcggttatctggtcaaactgctgttaaagatgactcatggtctaacagggtgaaaaagagagagttattgttggaggatgtagttggtggtacttctttgtcaagcaatgcaaaaggtaagaggagtgagagagacagagaaggaaagggacatggtagagaggttttatctagaaatgggactaataagattgggcgaccagtgtccaatgttaaggggggaaggaaatcaaaagcaaagcctaagcagaaaactactcaactatctgtttctgtaaatggccttcttgagaagatgcctgagcaaccc

SEQ ID NO: 220314 - DNA, 286 bp, Gossypium hirsutum
cccactcgtccgggctaaccctgatggtcgtaagataccgcggctcatcgggggggggattgctaactacactgatgtcgctgctcctttcaacggaatcattcgatcattgagagaaaaggaagccaatttaaaagcagcacgaatgcacatctatgttccaagaggtggcccaaactatcaaactggtttggcatggatgcgtgctcttggggaggaactaggagtaccccttgaggtttacgggcctgatgccacgatgactggcatatgcaagcaagctata

SEQ ID NO: 220315 - DNA, 419 bp, Gossypium hirsutum
tgtgtagccaaacgctcccttactttgattctatcgtcgattcaaagcagctttcttatcgatggcgtctacatttttggcactacccaaaaccttcacttcaaacaagcctaccttcccttctctttcaacccacaaacttctcgggactcgaagaaattcacttagaatcaatgctgtggccactaaatgggaacccaccaaggttgttcctcaagctgacagagttcttatccgtctccaagaattacctgagaaatcagctggtggagttttgttgcccaaatcagctgtcaagtttgagaggtacctgatgggggagatagtttcggtcggtgccgaagtaaaacgtggaaactggaaagaaggttcttttctcagatataaatgcttatgaggtggatttgggaacagatact

SEQ ID NO: 220316 - DNA, 279 bp, Gossypium hirsutum
  unsure (1)..(279): unsure at all n locations
atcctattcttctcctctgccgccagcttttttcccgcaggggcatgaagatcggtgggaaangcnnatgccacacttctcatatctactccatccgtcaaagcattgctaaggccctcgtctctttctaccagaagtacgtcgatgagcaaagcaagaaggagattaaggatatcttagtcgggtacgataggactttgctggtggctgatccgaggaggtgcgagcccaataaattcggtggaagatgtgctagggcaaggttccagaagagttacc

SEQ ID NO: 220317 - DNA, 414 bp, Gossypium hirsutum
gagagataccttcgcttaagaataggcttctaaagcttcctgactctgacaaaatatccattgcttttcccgatgatggtgcttggaaaagatttcataaacagctgcaacattttccaactattgtttgtaataaagttcggataggggaccaacgaatcgtacgcatcaaagagggagatgctacaggacggcatgtggtgattgttgaagattaggttcaatcaggtggcactctgattgaatgccagaaagtattagcatccaatggagctacaaaaataagtgcatatgtgacgcatggaattttccctaaaagctcgtggcatcgctttgtacatgataatggagggcaacctgagaaagggctaacctatctctggatcactgattcatgccctcacacagtgaaag

SEQ ID NO: 220318 - DNA, 378 bp, Gossypium hirsutum
aaacagcattggcatcttctgtaggcttgtaattgtaacttcccatatgtcaatatagaagaagctttttcaaagattggaggggatcacaatacacaatgcgcacagattttcaatgtatttgaggattcatacaaatcacccttgatcatcattatccttgatgacatagaaagactactggagtatgttactattgagccccgtttttcaaatttaatttctcacacattgttgtttcttctcaaacgtcttccacctaatgggaaaaaacttcttgtgataaatacaactaattatgtaagttttttaaattcaatttacacttattatactttttatttcacctaccatcttccttcatttaatacatataat

SEQ ID NO: 220319 - DNA, 417 bp, Gossypium hirsutum
aaacagcattggcagctactgttggcattgacagtgatttcccatatgtcaagatagtctgagctgaatcaatgattggtctgcatgagagtacaaaatgcgcacagattgtcaaggtatttgaggatgcatacaagtcacccttgagcatcattatccttgatgacatagaaaggctactggagtatgttgctattgggccccgtttttcaaatttaatttctcagacattgttggtccttctcaaacgtcttccacctaaggggaaaaaacttctggtgataggtacaactagtgaggtgggtttcttagattcagttggcatttgtgatgctttttctgtcacctaccatcttccttcattgaagacagatgatgcaaagaaggtgttggaacaactgaatgtatttgctgaag

SEQ ID NO: 220320 - DNA, 383 bp, Gossypium hirsutum
ctcacttgcgggactaatcggcgcgtgctgtcgcgtcacttggctactctggctttacctagtcgtcatgttcctcctcatcgtgctcggcatcgtcttcaccatctttgctttcgcggtgacgaataaaggtgctggagaagctttgtctgggaaagggtacaaggaataccgacttggtgattactccaactggttacagaagagagtcactagccagaagaactggaataagattaagagcttgttggctgatagtaaagtctgtactgatttccacgataagtatctgaatacttctgcctcggagttttcccagacgcatttgtcttccgttcagtctggttgcttgtagccatcaaacgactgccaattcatgtatg

SEQ ID NO: 220321 - DNA, 286 bp, Gossypium hirsutum
  unsure (1)..(286): unsure at all n locations
cgtatctggttttaattttctttgcatcttccctctcaggtggcttcactgatagggggggtctggatcnttgtactttacatcctaataacagacgaactgaacttaaatttgagcatcattttgattaaaacaaaccaaatgaagaggaaaagatgcattcttttgggtacagattaaatgatttgctaacatttgccgttactattctagcgctaatgttcgccatcacatgtctctcggacaacttcaacactccctctccctctgcagagatcaagattat

SEQ ID NO: 220322 - DNA, 284 bp, Gossypium hirsutum
aaccttcttcgttttcctccgcggctccatttctccttcgctgaatatcagagggaggatgaacgtggtccccacttacttgctcgccggactcggaggaaacgcttccccttgcgccgatgacttcaaagttcttctcggatcactcggagctgacgctgatgatgataggatagagttgttattatccgaacttaagggcaaacatattactgagctaattgctagtggaaggcagaaggtagcttccggcccttacgctggtggtgctgttgcggttgcct

SEQ ID NO: 220323 - DNA, 420 bp, Gossypium hirsutum
gatgaaagggaaggaaggagtttgggaagaaatagtgaaggagaaccagttgcagaagacgagtttgcaggaggtgggaaatgtggtggtttacagatgcgatgctttcggctccgttgccgatgccgctgctcagtatgaataagagcaaggagcatgggtttttggggtttaggaattctcagaattcgtttgttacttggattgataagatgaaggcttacaagattgtgccttgatctcattcaatctcttgttccaatttgtctcctgggttttcaaaacttttgttattgtacctctaaaataagcacataaggtaagctattatggcggtggaatgtggaaccgtaagatgttagacacactggctgaccttcaaatgttgtctccctgtatttgtttatgatgcattgtatt

SEQ ID NO: 220324 - DNA, 423 bp, Gossypium hirsutum
aattttctcccttactaacaacaaaaaccctgaaatgtcggacgacgatcatcatttcgaatccaaggctgatgccggcgcctccaaaacctatcctcagcaagccggtactatccgtaagaacggctatatcgtcattaaaggccgtccctgcaaggttgtggaagtttccacctccaagacggggaagcacggtcatgctaagtgtcacttcgttgggatcgatatcttcactggcaagaagttggaagatattgttccctcctcccataactgtgatgttccgcatgtcaatcgtactgactaccaattgattgacatttctgaggatggatttgtgagcttgctgactgatagtggtgatactaaggacgatctcaggctcccaactgatgagaacttgttgaaacagatcaaggatgg

SEQ ID NO: 220325 - DNA, 391 bp, Gossypium hirsutum
cttcctcggtctctccggcctcgccaccgatgctcaaaccttgtatcaaaggcttgtctttcggcacaaactgtatcagctaagagaagaaagagacatgaaacctgagacttttgctaaccttgtttctgcgattctttacgagaaaaggtttggtccatacttctgccaacctgtaattgctggattaggagatgaagacaagcccttcatttgcaccatggattccatcggagccaaggagcttgcgaaagattttgttgtagctggcactgcctcggagtctctctatggtgcctgtgaatcaatgttcaaggagggcatggaacctgaggaattgtttgagacggtttcccaagctctcctttcatcagtagatcgcgactgtctg

SEQ ID NO: 220326 - DNA, 421 bp, Gossypium hirsutum
cccacgcgtccgtatgatctgtgtggttacaaaagggaatttaagctaactttcatctgagcaggttgctatgcctgatggggtccctttagctccttttgtcaattttcttcttgttctaagctgcattgcctataacctcggaaccagcagtggtacatctgtgcttgaaatagttgttgcttttgagaaagcttctggaaagaaaatccccattaaactatgccctagaaggctaggagatgctacagctgtttatgcttccactgaaaaagctgaaaaagaacttggttgcaaagcaaaatatggtatagcagagatgtgcagagatcagtggaagtgggcaagcaacaatcatggggataccagtcaaagacttaggctttaactaaatactaattttcttccccagtcttttaaa

SEQ ID NO: 220327 - DNA, 284 bp, Gossypium hirsutum
  unsure (1)..(284): unsure at all n locations
gctaaagttgtttctatcaatgattatgaggattttccggtgggtgaccagaaggcggtgagaaaggcantcgctaatcaaccggtgagcgttgccattgaggcaggaggaaggagtttccagttatatcaatcaggtatatttgatggaaaatgtggaacacaactagaccacggtgtcactgctgttggatatggcacagagaaaggtaaagactatcggattgtaaagaactcatggggaagcagctgggcagaagcaggctatctcaggatggcatggaa

SEQ ID NO: 220328 - DNA, 420 bp, Gossypium hirsutum
cagggaaccatcccaactgaacttgggaacttgaagagcctcattagtttggacctatatgacaacaacatctcagggaccatgcctccttcactagggaaattgaagtctcttgtatttttacagcttaatgacaacaaattaactggacctatccctagggaacttgtcggtatttcaagcctcaaagttgttgatgtctcaaacaatgacttgtgtggaacgattcctaccagtggaccgtttgagcacattcctttgaacaactttgagaaaaatccccgactggaaggtcctgagctgctggggcttgcaagctatgacacaaactgctcgtaaagggcatgttgacgctataaagctttgaattagatatgaatccgcatgaagtaatatgtaaatctgtataccagctcgact

SEQ ID NO: 220329 - DNA, 246 bp, Gossypium hirsutum
gtttgctttgtatattgaagtttcctttctccattttctgtggatccaaacaagaggggggtcttcattaatactcttaccgtcctgacgatcactctccaggtctaaagctccaatacgatcgacatcgtgacagccaaaatccaaaataatgaatgcatccctccagaccaacatcgtctgatcttctcccgttaacagctagtatactggcggaccttggccgattacaacatccataaggag

SEQ ID NO: 220330 - DNA, 285 bp, Gossypium hirsutum
aacagatcggagcatatcctgatgttgaaaaggctaagggcagccaaggagtccgacggggaaaaggaaaaatgaggaatcggaggtacatttcccgtaaaggtcctttgattgtttacggaactgagggagctaagcttgttaaagccttccgtaacattcctggagtggaggttgccaacgtggagaggcttaatctgttgaaactggcacctggtggtcaccttggaaggttcattatttggaccaaatcggcttacgagaagctggatacgatttacgggt

SEQ ID NO: 220331 - DNA, 416 bp, Gossypium hirsutum
aaaagatgcagatattcgtgaaaaccctaaccggcaagaccataactctcgaggtcgagagcagcgataccattgacaacgtgaaagccaagatccaagacaaagaaggaatcccaccggaccaacaacgtctcatcttcgccggaaaacagctcgaagatggccgtaccttggctgactacaacatccagaaagaatcaacacttcatcttgttctgaggttgagaggtggaattatcgagccttctttgatggctttggctcgcaaatacaaccaagacaagatgatttgccgcaagtgttatgctcgtcttcatccaagagccgtgaactgccgcaagaagaagtgtggtcacagcaatcagttgaggccgaagaagaagatcaagtagatactgactggtgttatcctgtct

SEQ ID NO: 220332 - DNA, 416 bp, Gossypium hirsutum
cccacgcgtccgaaaggaacagagcagcagctgcagccatggttctcaagacggagctttgccgatttagtggtgccaagatataccctgggaaaggcatcagatttgttcgtggagattctcaggttttcctcttttccaattcgaaatgcaagaggtacttccacaaccgtttgaagccttcaaaacttacatggacagccatgtataggaagcagcataagaaggatattgcccaagaggccgtgaagaagagaagacgtgcagccaagaagccttactcccgatccattgttggtgccaccttagaggttatccagaagaagagaagtgagaaacccgaagtccgtgatgctgccagggaagctgctctccgagaaatcaaggaaagaatcaagaaaactaatgatgaaaag

SEQ ID NO: 220333 - DNA, 421 bp, Gossypium hirsutum
catcgctcatcactctttgaggaaccaaacaagctatttattgaaagtacgctgtgaatcgcccaaacatgagccgacatccgatagtgaaatgggctcagagattggatgacgtcttcataactattgagcttcctgatgctcaggacgtgaagcttaaactagatcccgaaggaaaattcttcttctctgccaaaagtggagcggacaaaatcccctatgaagttgatttggatctgcatgacaaagttgacgttgatggaagcaaggctagtgttggaaatagaaatatctgttaccttgtgaaaaaggccgagagcaagtggtggagcagattactgaagcaggaagggagacctcctgtgttcttgaaagttgattgggatcgatgggttgatgaagatgaggacgatgtggacac

SEQ ID NO: 220334 - DNA, 285 bp, Gossypium hirsutum
  unsure (1)..(285): unsure at all n locations
ctcctctcaatactcttctcaaatgcatcttgagcatcggttttccgtcctgtcataggtgtatccgataacgtgccaatagagatgctcaagatgcatttgagaagagtattgagaggaggttaaggagaaagatcaagaacagggaatccgctgcacgatcacgagctaggaagcaggcttaccacaatgagctggttaacaaggtttcacgattagaagaggataatctaaagctcanaagagagaaggaatttgatacaaaatctcagtgtgaaacatctg

SEQ ID NO: 220335 - DNA, 338 bp, Gossypium hirsutum
cccacgcttccggcaccaccagagagaaagttcagtttctggatcggaggatctatcttgggatcagctcatcaccttccagaggatggggatttccaagggtgagtatgatgagtcgggtccatccattgtccacaggaagtgcttctaaatttacaagtcatttaatggtgagttacattttctgttacttggcttttcgtgtcgcgtgtcaagtgaactcaaggtcgggttgatgtgggaaatggattattgaaagagggttgtactttgatcttgatgtaatattagcctttcattctgctgtgattcgtgatgcccgcttgtgtcactgtgat

SEQ ID NO: 220336 - DNA, 388 bp, Gossypium hirsutum
ctcaagcatacggtgagccatggtactgggataaccgctatgcccatgaatcagctccttttgattggtaccaaaaataccgtgccttagcatctcttattcacctttatgtgccccaccgccatgaacgcattctcgttgtcggctgtggcaactcagtgtttagtgaagacatggtgaacgatgggtacgaggatgttgttaacgttgatatatcatctgtggttattgaagctatgcaaaccaagtactctaattgtcagcagctaaaatatattaaattggatgtacgagatatgagtccttttcaagctggttcctttgcagcagttattgataaagggacccttgattctatcttgtgtgggaataattctagacagaatgc

SEQ ID NO: 220337 - DNA, 386 bp, Gossypium hirsutum
agaagataataaagcgtttgtctcagatctcagaagatggcccgtaccaagcaaaccgcccgtaagtcgactggtgggaaggctcctaggaagcaacttgctaccaaggccgcccgtaaatctgccccaaccactggtggtgtgaagaagcctcatcgataccgtcctggaactgttgctcttcgtgaaattcgaaagtaccagaagagtactgagcttcttatcaggaaattgcctttccagaggcttgttcgtgaaattgcccaggatttcaagactgatttgcgtttccagagccatgccgttcttgctcttcaagaagctgcagaagcataccttgtgggtctctttgaagacaccaacctgtgtgcgatccacgccaagcg

SEQ ID NO: 220338 - DNA, 387 bp, Gossypium hirsutum
caatacaagatcgctgtctccgaggatcatttggatgagatctgcgacgctgttctcgttaagagctcgcagccggagtgcgctgaaatgtcaccgggacgtgaacgtgcacgcgtggtcttgaccaacttcaacggcatttcatccaacacccgttttgccaacgcaatggggttcatggccaacaaggttgaagctggctgtgctgaggtaatgaaggtgtacctggaggaggatgattagagtggcggtctgtgaagtctaatttacttactagtttggcatatatgaatatgaacatgaatacgacatgcgtgctgttttctctgaattctattgaatttctaatataaaatatgcgatttcttctgtcaggatctttgtatt

SEQ ID NO: 220339 - DNA, 363 bp, Gossypium hirsutum
tatgaatgctggattgggaggatctgctgcagctctcaactctcccaaattgagggttatgaatgtgatgcctaccataacagagaaagataccctgagtgtcatatatgagcgaggattaattgtcatctatcatgactggtgtgaggctctctacacatacccaaggacgtatgatatcattcatgcacatggtctattcagcttgtacaaggacaaatgtaatttggaagatattctataggagattgaccgaattcttcgtccataaggagcggctatattccttgatgaagatgatgttctaattaaagtgaagaagataacagctagtatgaggtgggacactcagatagcggacca

SEQ ID NO: 220340 - DNA, 426 bp, Gossypium hirsutum
  unsure (1)..(426): unsure at all n locations
tcagttttcattgaaaaccctagacctcccatcgaagtttcagagccgcagtttctctgtcggtatcctagacaagaaatgggtgtcacattcaacnacctgggttctgctgctggcttgaagaagctggatgagtatctccttactcgcagctacatctctgggtaccaagcttcaaaggatgatattaccgtctacgcagctctatctggtgccccatcgtctagctatgtcaatgtttctcgatggtacaaacacattgatgcccttttgagaatctcaggtgtttctgaagaaggctgtggtgtgactgttgagggatttgctcccgctgaggctgttgccactccttcagttgctgattccaaggctgcagctgctgaggatgacgacgacgatgatgtaaatctgttcggtgaagagact

SEQ ID NO: 220341 - DNA, 373 bp, Gossypium hirsutum
cggacgcgtgggcttgggagctatatgtggggctggtgtggttaaagggttcatggggaagacaaggtatggtgctttgggtggtggagctaactctgtgaatcatggctacaccaagggagatgggcttggtgctgaaattgttggtacctttgttcttgtttacactgtgttctcagccactgatgccaagcgcagtgccagagactctcacgtccctattttggcaccattgccaattgggttcgcagtgttcttggtacacttagccaccatcccaatcacaggaactggtattaacccatctcgtagccttggtgcggccatcattttcaacaaggacaagggttgggatgacctttggtttttctgg

SEQ ID NO: 220342 - DNA, 325 bp, Gossypium hirsutum
gctacttctgatcctcagatttataagaaaggaccggcgttcgggatgccgggtgttcatgtgaatgggatggatgtattgaaagtgagggaagtggctaaggaagcaattggcagagctaggagaggagaaggtccaacattggtggaatgtgagacatataggtttagaggacattcattggctgaccctgatgagcttcgtgaccctgctgagaaagctcactatgctgccagagatcccatcacagcactgaaaaaatacctcattgagaacagtctggccagtgaagcagacttgaaagctatagataaaaagattgatg

SEQ ID NO: 220343 - DNA, 386 bp, Gossypium hirsutum
cccacgcgtccgcttgttctcttctacattcagcaaaggggggctctgagatcacataccaaaatggtgaaagccgttgccgtccttagcagcaatgaaggtgttagcggaactgttttcttctcccaagaaggagatggtccaactaccgtgactgggaacctttctggtcttaaggccggactccatggcttccatgttcatgcccttggggacataactaacgggtgcatgtcaactggaccccattttaatcctgctggcaaagagcatggtgctcccgaagatgagaaccgccatgctggtgatctaggaaatgtcactgttggtgatgatggctgtgctagcttctccatcaccgacaaacagattccactcataggccc

SEQ ID NO: 220344 - DNA, 387 bp, Gossypium hirsutum
aatggctgcaacccgggccctctgcaagggagatttccagaaagccttcgacgtcattaattctcttgatgtttggaagctccttaggaatagagagagcgtgcttgaaatgctgaaagctaatatcaaggaagaggctctgaggacttacctttttacctactgttcttcctatgatacactatgcctggaccagctcaccaaaatgtttgacctctcatatgcccagattcatagcatggttagcagaatgtgggtaaagaacaactccatgccagcttggacccagccacacgatgcattatctttcatgatggtgaatactcaaaggttcaagccttggcattccaattgacaaaaaagctttcaatacttgctgagagttat

SEQ ID NO: 220345 - DNA, 311 bp, Gossypium hirsutum
actaaatgaaaaatcttactgatctttaattttccttcaccaccacaccctaaccgttacaggtgcggggccttctggaaaagtggcagctcatttccctccactataaacacgaactacagtacctcataaccacctcatcaagataagaaccactaccattcacctgatcgtcaagttattaccatccgcgctcaacgtctaacatgcccagaagcgcatttccaaccatcacacatctatatggaaacttccaacatccatgagactacataccctgctataattatagtgcaacgatgatatcataa

SEQ ID NO: 220346 - DNA, 390 bp, Gossypium hirsutum
atacaagctacgttggatttatgaaggatggagcagagtggttggttaaacacactgacataaaacttattggaattgattacttatctgttgctgcctttgatgatttgattccatctcatatagttttcctagaagaccgggatatcattcttgtggaaggtttaaaactcgataacgttcaacctggaatatattcagtccattgcttaccattaagattgcttggtgctgaaggatcaccaacaagatgcattctcatcaaatgatgttgttgtccttggcatgttgtttggaaagaggaaatgggcgggtgacattaagggtggtgtttgattggaacaaggcaaataacgggtttatgagttagaacttgacgctgttaggaat

SEQ ID NO: 220347 - DNA, 393 bp, Gossypium hirsutum
cggacgcgtgggcttgaaatgggctgtccactcctttaggatcactaactgtggtgtccaggacactaggcagatccacacccacatgtgctactccaacttcaatgacattatccactctatcatcgacatggatgccgatgtgatcaccatcgagaactcacgttccgatgagaaactcctgtctgtcttccgcgaaggggtgaagtatggagccggaattggccctggtgtttatgatatccactctccaagaataccatcgaccgaagagatcgccgataggatcaacaagatgcttgcggtgctcgagaccaacatcttgtgggttaaccctgactgtggactcaagactcgcaagtatgcagaggtgaaaccggcactcaacaacat

SEQ ID NO: 220348 - DNA, 323 bp, Gossypium hirsutum
acggacacattagctttaaatgggctttccattccttttttatcactatctctgctacccaggacactaggcagatttacaacagggtgtgctactccaacttcaatgacattatccactctatcatcgacatgtatgccaatatgatcaccatctagaactaacgttcctatgagaaactactgtctgacttacacgaatgggtgaaatatgcacccagaattgcccctagtgttcatgatatccactcttcaataataccatctacccaaaagatcttctataagatcaacatgatgcttgcggttctcgaaaccaacatc

SEQ ID NO: 220349 - DNA, 344 bp, Gossypium hirsutum
cagatgtggagatacctgagtttaatgtttcatacaaacctcaaaagatcagtcccaaatttcaatctactgtccggcacttgctgcatcaaaagatacgtgattcatacatgcacccccagtttgtttcagatgtgatgaagcctcttctcattgagcaattaatggatcaggaagtggttaatctctctggaggagagttgcaaagagttgcattatgcttatgtcttggaaagccagcagatatttatctgatagatgaaccaagtgcttatctggactccgagcagcgtattgttgcttctaaagtcataaagaggtttatcctccatgcaaagaaaact

SEQ ID NO: 220350 - DNA, 392 bp, Gossypium hirsutum
caatacaagatcgctgtctccgaggatcatttggatgagatctgcgacgctgttctcgttaagagctcgcagccggagtgcgctgaaatgtcaccgggacgtgaacgtgcacgcgtggtcttgaccaacttcaacggcatttcatccaacacccgttttgccaacgcaatggggttcatggccaacaaggttgaagctggctgtgctgaggtaatgaaggtgtacctggaggaggatgattagagtggcggtctgtgaagtctaatttacttactagtttggcatatatgaatatgaacatgaatacgacatgcgtgctgttttctctgaattctattgaatttctaatataaaatatgcgatttcttctggcaggatcttggtatttttta

SEQ ID NO: 220351 - DNA, 354 bp, Gossypium hirsutum
cccacgcgtccggcaccaccagagagaaagtacagtgtctggatcggaggatctatcttggcatcactcagcaccttccagcagatgtggatttccaagggtgagtatgatgagtcgggtccatccattgtccacaggaagtgcttctaaatttacaagtcatttaatggtgagttacattttctgttagttggcttttcgtgtcgtgtgtcaagtgaactcaaggtcgggttgatgtgggaaatggattattgaaagagggttgtactttgatcttgatgtaatattagcctttcattctgctgtgatttgtgatgcccgctggtgtcactgtgatagagatgatgggtcttt

SEQ ID NO: 220352 - DNA, 391 bp, Gossypium hirsutum
gggctgtctttcaccaagctattcagccggctatttgccaaaaaggagatgcgtatactgatggttgggcttgatgctgctggtaaaaccaccattctttacaagctgaagttgggagagattgtcactaccattcccaccatcggtttcaatgttgagaccgttgaatacaagaacatcagcttcactgtttgggatgttggtggccaggacaagatccgaccattgtggagacactatttccaaaacatgcaaggacttattttcgtggttgatagcaatgatcgtgaccgtgtggttgaagctagagatgagttgcacaggatgttgaatgaggatgagttgagggatgctgtgcttctagtatttgcaaacaagcaagatcttccaa

SEQ ID NO: 220353 - DNA, 391 bp, Gossypium hirsutum
gtctgagatgggcaggacttggcctaatccagtctacccaacaaccatgccctgaaatcctagagcaaagaggatcctatctcgaggcaggtacaccatttatattttataatgcagacaccaaccattctgtactccgcctatccaccgctgtaaacataaacttcactcccatcaagaccaaactctgccgaacaacatccgtgtagaagattgacaattataatgattcacccgataaatggtgcatgacaaccgacggggctagagggaaccctgtctccaacactttgaccagttggtttaaaataaagaatgttggcattatgggttataagtctaagaattgtccttcagtatgtgaatcatgcacaacattatgcagaaaaat

SEQ ID NO: 220354 - DNA, 392 bp, Gossypium hirsutum
gttaatatactacaagcaaagccatctgagatgccttacgagaaagaggaattgttgaatgctgccgtatgtcgtgttgatgccctagaagcagagctgattgctaccaagcaggcactttacaatgctttgatgagacatgaagaattgcttgctgaaattgaccgtcaagagaaagccaattttctgaaactgcagaaaaagaagttttgctggtgatgcttttgctgctgatggagagcttacaaaaaccactaatctatcgtcaatctgtttccacttcactggttaacatatcaactcctatatcgatctttgggagggtataagtctttaaccaacgtatttgccattccgagtacaaatcattctgcacagaaatgcacaaaaac

SEQ ID NO: 220355 - DNA, 397 bp, Gossypium hirsutum
gatacatctgggccatcactgaacatcctcatcaagctaatggctgttgaatctcttgtctgtgctccgtgctttgctacacatggtgggctgctttttaagatattttaagtgaagacaaacatcggctactagtctaccatttccgattcctgtctgttattctcttataattttcatttttaagtatatttaggtcgtagcacattttgactctagagatcatttcctctttaaagtcgtattggtagtaaaagtttaccctttgtaacgacattgttgttattgttgatgatgatgatgattacggtcaatctaggaaaaagagtgaaacttgaaaccacattgttactattattacttgtttgttcaatgaaaaaatgtatttttgctttca

SEQ ID NO: 220356 - DNA, 431 bp, Gossypium hirsutum
ccagaatggagcccgagtgcaatcaaatcggctttaatgaccactgcctacacccaagacaacaccaaggcgactctcagggatgctgcggacggatcgttgtcaaacccatgggcacatggggctggccatgtcgatccccaaaaagctctttcaccaggcctaatatacgacatctcgaccgacgaatacatcacattcttgtgctcactcggctacaccgtcgaccatgtcaagaccatagtgaaacgccccaacgttacatgttcgaagaaattcaaggaccctggtgaactcaattacccatcgttttcagtcatgtttgggggaaaaagggttgttcgatacactcgtgaattaacaaacgtcggccctgcaagatccatgtacaaagtcacagtaaatggaccatcgacagtagggatctcagt

SEQ ID NO: 220357 - DNA, 314 bp, Gossypium hirsutum
acagcagcaggatcaacttcccaagtatgccacacctgttctcttgtcagctgatgtgaggaagaaggctgaagcacttgacaggttttgcaggccaataatgatgaaacctaaaccggctaaaccagccacgcctgaagcaccggcaaccccaccacatcctggaagtgaggctcaaccacagggtgcaaacagcccgaaagcaagccctaaccgcaatggtgaccccagtgaaaatgtgccggcaggaagtggtgaggcacctccagcatccgtagaaccaatggaaactgacaaagcggagactacgagtg

SEQ ID NO: 220358 - DNA, 370 bp, Gossypium hirsutum
gttggattttcaagagatgggtttgctaccagtcccactatgcgaaaattgcatctcatatgggtgaccgcacgcatgcagagtcgaagtatacaagtaccctgcttggagtgacgtgatcgaaatagaaacatggtgccaaaatgagggaagaatcggaaccagaagggattggatcctgaaggatgtcgctactggtgaagttataggaagagctacaagcaagtgggtgatgatgaacgaggacacgagacggttgcagaaagttagcgatgatgtcaaagaaaaatatctggccttctgtcaacaagaacctcaattaccgtttccggaggagaacattagaagttggaaaaaaatttttaaataa

SEQ ID NO: 220359 - DNA, 429 bp, Gossypium hirsutum
gcgggagctgatctgattgttactcaactgttttatgatactgatatctttctcaaatttgtcaatgattgtcgccaaattggaattacatgtcccatcgtgcctggtattatgcccattaataactacaagggtttcgtgcgaatgactggcttttgcaaaactaatataccggatgaggtcactgctgccttagagcctatcaaggacaatgatgaagcagtcaaatcctatggaatccacctcggaacagaaatgtgccgcaagattttagctcatgggattaagacgttgcacctttatacattaaacatggagaaatctgcattagctatactaatgaaccttggactgattgaagagtccaaaatttctaggtctttaccttggagacgccctgcaaatgtcttccgtgttaaggaagatgtt

SEQ ID NO: 220360 - DNA, 349 bp, Gossypium hirsutum
ctcttgattctgccaaggatctgaaagcaagagagaaggaacttaaagcaaaagaggctgaactgaataagcgtgaacaggaattgagaagaaaagaggatgcaatagcacgagctggaattgtaatagaggacaaaaattggccaccgtattttcctattatccatcatgatattgcaaatgaaataccagtccacctacaaaagattcagtatgttgctttcacaacattgttaggtttggttctttgtctcacttggaatgtggtagctgttactacagcctggatcaaaggagaaggtccaacattttggtttcttgccattatatatttcatatctgggggtcc

SEQ ID NO: 220361 - DNA, 424 bp, Gossypium hirsutum
accggaaagactggctttcactggttgctgtgcatagtgattgttggttgctttccgtgtctttctactttggagctcggcttaatcgcaatgaaaggaagcgcttatttagcatgataaacgatcttccaactgtctttgaagttgtaactggaaggaagcccataaaagacaagcccacagtagaaagtggaagcaaatcacgaaacagcacgaagagatcaatcgatggacagccaagaagcaatcctaagttagttgatgaaaattatgaggaggatgaagaagagcagggcgacaccttttgcgggatttgtggtggaggatataattctgatgagttttggatcggttgtgacaactgtgaacggtggtaccatggaaagtgcgtgaagataacaccagccaaagccgaattgattaa

SEQ ID NO: 220362 - DNA, 345 bp, Gossypium hirsutum
gagcttctaacttcacgccgggcatgatctatatcaatctcgcctttaatagatcaggacagtgtaggtgccaaatgactgcggcgtatggtcattcctgacgtgatgatcctgatttcacttctgagattgttaagcatcttaatcccaaatcctacaatactacttactaccatggccataatgtcatgacagtacgcatctaccaattcgttgtattctacattctttacttattagggggtaatatattttcccacccatgtattgcttgtcatgtatatattctcgtaagagatttctgcctactcattcaactcataatattctcctccattattgacg

SEQ ID NO: 220363 - DNA, 371 bp, Gossypium hirsutum
gtcagcatctgttaacaacaattgctatgcattatcagctgtaaaggctggatttcttaagcacattctccaaagttcacagaagctttacaaggatataaaagaaaccgttgaaagttttcaggaattatcgttggaatacactttcggctgggaatctgaaaaatctttccccaaggtacttggtgacgtgatggagtcacttgctggagctatttttgttgattcaggatacaataaggaaatcgtattccagagtataaggccactgttggagcccatgattactccggagactctgacggttcaccctgtcaaagagctatatgagctgtgtcaaaaggagcattatgaactaaaaaaacccattg

SEQ ID NO: 220364 - DNA, 309 bp, Gossypium hirsutum
gtttgagatggggggcttgccctatgcaggtctaccaaacaaccatgcccggaaatcgtcgttcaaagacgatccgatttcgacaaaggtacaccggtgatattttctaatgcagacaccaacgatactgtagtccgcctatccaccgatgtaaacatagagttcactcccatcaggaccaaactctgccgaacaacaacggtgtggaagattgacaattatgatgattcagccgggaaatggtgggtgacaaccgatggggttagagggaaccctggtcccaacactttgaccagttgggtaaaatag

SEQ ID NO: 220365 - DNA, 270 bp, Gossypium hirsutum
gagatgctggtatgattaaaatgttttcctccaagcccatggttgccgataccttgtttgagtccccacccttgggccgggttgctgtgatggacatactttaaacctgagccgttggcgttataaagaatgttgagaaaaaggacccatccagtaccaagagtaccaatctttgctgataagaagaaatgaaccgtgctatgtgaaatactcttgattgttccgcaaatggaatattttactatcagtttaataggttgacagacttta

SEQ ID NO: 220366 - DNA, 296 bp, Gossypium hirsutum
gcagccgttgcttggtttatgaactcattccaaatggcagtgttgaatcgcacttgcatggagttgataaggaatctgcaccccttgactgggatgcccggatcaagatagccctcggtgctgctcgtggactagcttatctccatgaagattcaagcccacgtgtcatacatcgggattttaagtcaagcaacattttgttggagcatgatttcacgccaaaagtgtctgactttggtttggctcgaactgctatggatgaggaaggcaggcatatatcggccccgtgtcatggg

SEQ ID NO: 220367 - DNA, 431 bp, Gossypium hirsutum
ggaagagctaccttttttttctccttttccaccgccgtcgatctcgatccttatcctcgttgtcaaacaagctcaaaaaagatggccaacgctgcatcgggaatggctgtgcatgatgattgcaagttgaagttcttggagctcaagacaaaaagaacccaccgcttcattgttttcaaaatcgaggagaagcaaaagcaagttattgtggagaagcttggtgaaccaaccgaaagctacgaggattttactaaatgtctccccgctgatgaatgtcgatatgctgtgtacgattttgattttctaacggccgagaacgtcccgaagagcagaatctttttcatcgcatggtctcccgacacgtcaaggatcaggagcaagatgatttacgccagctccaaagacagattcaagcgagaactggacggaat

SEQ ID NO: 220368 - DNA, 278 bp, Gossypium hirsutum
accaaatctccagtagtattgaaagaggagccaaatggttggttaatacaatcaaagggaaagtacaaaagccattaccagagctggtaaaggagtatgatttgccaataggcatcttcccttgtgatgccaccaactataagtcagaagaaagttcaagggatgtactttgatgcccaatattggctatggttcagacaagaagacccgacactatcttccaaatggctttaagaagtttgtcgtgcacaatgttggagagcttgaactgttaatga

SEQ ID NO: 220369 - DNA, 420 bp, Gossypium hirsutum
gtgggaactttggactctgtgaggagaaccaatgcgttgcttgcccgtcaacaaacggattactcggttggagccagaattgtcagccgaagaaggtgaattgtaggccgaatggtttcagctactacaagctagaaggagttgaccatttcatgagccagtacaacgaaggagaagggataaaggagagtgattgtgggaggaaatgcacctctgattgcaagtgtttggggtacttttaccacagggaaacatccaaatgttggatcgctaatgagttgaaaacccttgctaaaacctctaactcttcccatgttggttatataaaggcacccaacaagtgacgggaatcctattaagtatttgtactttttcctctgtattttccagtttctttattgtaagctaataagtatttgt

SEQ ID NO: 220370 - DNA, 391 bp, Gossypium hirsutum
ggattacaaggacgggaagtattcccaagtcgtgtctaatgctcttgacatgaagttgagggatgatttggagcgtttgaagaagatcaggaaccaccgtggtctgaggcactactggggccttcgtgtccgtggtcagcacaccaagactactggtcgcagagggaagactgtcggtgtgtctaagaagcgttgaaagcttcatatatattttggaaaaaattatgtagtcttgcagagtgttcatatctttgaatgtaagcactatttgcaggaagacaaattttggatgtgattttttttgttgtttctagacaaggggtaagactagtagtgttgggtctttatcggttgctattaggaatacttgcgttactgaatttaattgggt

SEQ ID NO: 220371 - DNA, 376 bp, Gossypium hirsutum
tctaaacccgattcaaatcctttacccccaaagccaaaatttgagcctcttaaggcacacgagatgtcagacggtcgagtgcaattcagaaaggtttcggttccacctcataggtattcacctctcaagaaatactgggtggatatctatactcctgtttatgaacaaatgaagatcgacatccgtatgaatctcaaagctcggaaagtcgaactgaaaacacgacaagacacgcccgacattagtaacctacaaaaatgtgcagattttgtccaagctttcatgttgggtttcgatgttccggatgccattgctcttttgagattagacgagttatatgtcgagtcgtttgaaatcaatgatgtgaaaacactta

SEQ ID NO: 220372 - DNA, 390 bp, Gossypium hirsutum
aaatcgtgtcatgctttttaggacagcacttgctttaatggagttatatggccctgcactggttacaactaaagatgcaggagatgctgttaccttgttacagtcattggctggctcaacattcgacagcagccaacttgtattgacagcttgtatgggttatcaaaatgtaaatgagaaaagactacatgatttaagagagaagcatcgatcagctgtaatagctgcagttgaggaaagatcaaaggggcttcaagcttggagggattctcagggcctagcatctaagctatataattttaagcaggatcctaagtccatgattatggaaacaaataagacaaaagcaaatggggatctctctcattctgagtctggttccacaaactc

SEQ ID NO: 220373 - DNA, 423 bp, Gossypium hirsutum
ctttggtttgttcccaattcagacgatgtatagtagcaatggatgggattcgtatgcgtgggcattcgaggcttctgagtctgtaattgagatctcgatacataatccgggtgtggaggaagatgctgcttgtggccctcttattgattccatcgcattgaagaccttgtaccctccaaaacgcacccgagtaaatctactaaagaacggaaatttcgaagaaggtccttacatcttcgcaggaccaatatccgaaggtgtcataattccaccccacattgaagatgatcacagtccattacctggttggattatcgactccctcaaagccgttaagtacatcgacagcgaccacttcaccgtccccaaaggcaagcgagcaattgaactcatcgccggtaaagaaagttccctctcacaagt

SEQ ID NO: 220374 - DNA, 393 bp, Gossypium hirsutum
gagaccgcatggagctcaagcagccatgggagcttacaagtacgtgtcagagctatggaggaagaagcaatccgatgttatgaggttcttgcagagagtgaggtgttgggagtaccgccaacacccgtccattgtgcgagttaaccacccaactcgtcctgacaaggctcgtcgcttgggatacaaagccaagcagggttatgttgtctatcgtgtccgtgtgagacggggtggaaggaagagaccagtacctaagggtattgtgtatgggaaacccacaaaccagggtgtcactcatctgaaatttcagcgcatcaagcgatcagttgcagaggatcgagctggtcgaaagcttggaggccttatggtcgtaaactcatattggatcaacga

SEQ ID NO: 220375 - DNA, 379 bp, Gossypium hirsutum
gcagaaaggtgttgttgatggtgttgaagccaatttccctacagcttttcatggattttgcatgcgtcacttgagtgaaagttttagaaaagagttcaataataccatgcttgtcaaccttttatgggaagccgctcatgccttgactgtaattgaatttgaggcaaagattcttgagattgaagagatatcacaagatgctgcatattggatccggcgaatcccacctcgtttgtgggcaacagcctatttcgaaggcacgagatttgggcatctaacagcaaacatagttgaatcactgaattcttggattttagaagcttcagggcttccaataattcagatgatggaatgcattaggagacagcttatgacatgg

SEQ ID NO: 220376 - DNA, 284 bp, Gossypium hirsutum
aaaccctgcattttcaaccaaaaaattcaaaaaaaaaattctaaataagtgatggggtttccggcaaatggctcatcggacaaaccattgaagttcctgatctacggtcgaaccggttggatcggtggtttgttaggcaaactctgcgaatcccagggaatcgattacgagtacggctccggccgtttggagaaccggatttcacttgagtccgacatagccaacgtgaaaccgacccatgtattcaatgccggcggtgtcaccggtcgtccgaacgtcgattg

SEQ ID NO: 220377 - DNA, 332 bp, Gossypium hirsutum
tttagttttctcttcctccaattaagatgcagatcttcgttaagaccctgaccggcaagaccatcaccctcgaagtcgagagttccgacacgatcgacaacgttaaggcgaaaatccaagacaaggaagggatcccaccagaccaacaacgtctcatcttcgccggaaaacagctcgaagatggccggaccttggccgattacaacatccagaaggagtccaccctccatctcgtcctccgtctacgtggtggcatgcagatcttcgtcaaaaccctgaccggcaagaccataactttggaagtcgaaagctctgacaccattgacaacgtc

SEQ ID NO: 220378 - DNA, 387 bp, Gossypium hirsutum
ggcaattgatgcttttcctaccctggttgattttgtcatggaaatcctatccaaacttgtgagtaaacagatctggagaatgccgaaattgtgggttggattcttgaagtgtgtggttcagacacaacctcattcctttcctgttttattacagttgcctccgccacagcttgaaagtacactgaataaatatggtagtctcagaagttcccttgctgcttacgcaagccagccaactataaaaggttcactgcctagagcaacgcttgcggttctcggtcttgcgaatgagtcgcatatgcagcagcagcaaccacatatgtcaaatttgcattcttcggacacttcttcagttcagggggcaacatcaacataagaattcaaaga

SEQ ID NO: 220379 - DNA, 402 bp, Gossypium hirsutum
  unsure (1)..(402): unsure at all n locations
cccacgcgtccgcactccgaaaaattggaatctcttcagtgtaaacattgctatggctggaacaggcatataccaactaacacgaaaaataaaacatgattacttttcggaggcagagccagccgttgcatctgaatgatgacgaaatcttctgaaatcctttgtttttaatggaacaaattatcagttatcttgccttgtttttctgttaattaaaagttacactttggccctatggctttgaattattcaagcatgttgtgttgtggaaaaattggaacttgatgatgatgattgtagagccatcaactgatactgaactgagcaacagaatcccaaaaatttttaataatgcttttgttccctcnnaaaaaaaaaaaaaaaaaaaaaaaaaaacaaaaa

SEQ ID NO: 220380 - DNA, 370 bp, Gossypium hirsutum
aagggatggatgaaatggagttcacagaagctgagagcaacatgaatgatttgggttcagagtaccaacaataccaggacgccactgcagaagacgaggagtatgaggaatatgaggaatacgaggaagaggcttaaaggatgctccttgttctttttatcatgtacggcattcggttgtgcaatctctgctttgctggtttccagcatctgaatcgcttattgctgctatctttgcgatttacagactagtattgctgctttgttttttatcaataattctcagcagtcaggttcgtttctctcacaaatttagcttacaaatgtgggagcaaatgttaggctgcgaatctatttattaaagtatgcct

SEQ ID NO: 220381 - DNA, 400 bp, Gossypium hirsutum
aaataagagctcaggttagagcaaatccgtattgctacaaaggacggcttcgtttgaacacagccaatgaacttctaaacaccagcctggaaattgaacaaagactccatgaggtttcattaccatttctagttctacatggaggggaagataaagtaacagacaaagcagtgagccagcaattgtacaatgatgcagcaagttcggacaagagtttcaagttgtatcctgggatgtggcatggcctgttgtatggtgaattaccggaaaacatcgagattgtgtctgcagatactattggttggctgaaccagaggagtgagttcgggaactcgaggttggagagagaattgaaacttcaagatgatgagattttgatcttgaaacacaagtgaactta

SEQ ID NO: 220382 - DNA, 374 bp, Gossypium hirsutum
gtgtcaatgagaaggaatataagcctgaccttaacattgtctccaatgctagttgcaccaccaactgtcttgccccattggctaaggtgatcaacgataaatttggcattgttgagggtcttatgaccaccgtccattctattactgctacacaaaagactgttgatggtccttccatgaaggactggagaggtggtagagctgcttccttcaatatcattcctagcagcactggagctgccaaggctgtcggcaaagttttgccagcactgaatggcaagctgactggaatggctttccgtgttcccactgttgatgtctctgtggttgacctcactgtgagacttgagaagaaggctacatatgatgaaatt

SEQ ID NO: 220383 - DNA, 371 bp, Gossypium hirsutum
  unsure (1)..(371): unsure at all n locations
gcgtacggccctcctcacctctgggtttagcctcgtctacccaaattctttnggcaacagaatccaggggatnttgaaacttgggttagacattgatgaagattcatgatatgctgatgccgactctgagatgccaccattcgatgatgctgatgccgagggcagcaagatggatgaagttgactaagctttttaacatgtttgtgaagagattcatttggtagtctcattttagcttttaatataatattctggaaaaatggtcaatgctgtgttttctttgaatggtaaatgaatctttagtgctcgtaaatggaatctaattcattgccttatgcttttttcaaataataattattatattttataat

SEQ ID NO: 220384 - DNA, 387 bp, Gossypium hirsutum
tttttctaaaccattaatcaacatgatgaaagctgctggttgggaccttgatgctgccgctgactcaattgagcccaatgttgtttatgcgaagagagctcacaagaaatatgcatttgagtcccacatttaccagaggatgttcagtgggtttcaacaggagaacttctccattaaattggataatgttacagtcaataaagagagcttcttccagcaatatctggctctgagggagatggatccattggacatgttgggccagaatcctgattccttattcgggaaattttcccagagcaagtacctgatggttgttcatccaaagatggaagcttcattctttggaaatttagaccagcgtaattatgtaacaggaggtgggca

SEQ ID NO: 220385 - DNA, 405 bp, Gossypium hirsutum
ccttcttcaacttgcggagtttgacattaagaaggaggctgcatgggccatctcgaatgccacctctggaggatctcatgagcagattcaattccttgtgagccaaggttgcattaagccactctgtgacctactaatctgtccagatccacgaattgtgacggtgtgcctggaggggcttgagaacattctgaaggttggtgaggctgataaggaaatgggaatgaacggtggaatcaatctatatgcacaaatgatagatgagtgcgatgggttggataaaattgaaaacctgcaaactcatgacaaccatgagatatacgagaaggctgtgaagatcttggagagatactgggctgaagaggaggaagatgaacagaatatccaagatggtgggaatgaaaa

SEQ ID NO: 220386 - DNA, 403 bp, Gossypium hirsutum
cgccatttttggttccagcaacttggatttggaagaatggtgagagtcagcgttttgaacgacgcactcaagagcatgtataatgcagaaaagaggggcaaacgacaggttatgatcaggccttcctcaaaagtcatcatcaaattccttttggtcatgcaaaagcatggttacattggagagtttgagtatgttgatgatcacagagctggcaagattgtggttgaactcaatgggagactcaacaagtgtggggtgattagtcctcgtttcgatgtcggtgtcaaagagatcgagggttggaccgctaggctacttccttccagacagtttgggtatattgtgcttaccacatctgctggcatcatggaccacgaagaagctagaagaaagaatgttggtg

SEQ ID NO: 220387 - DNA, 398 bp, Gossypium hirsutum
tgcagctcctgattatgtagcaacaggtcatctgactgcgagaagtgacgtgtacagttttggtgttgttcttcttgaaatgttaaccggcaagcgagcagtagacaagaaccgaccatctagagaacataatttagttgactgggctaagccttaccttactagcaaacgtaagtttttccaaattatggatgttcgtatcaaaggccaatacacacctgaagcggcattaaaagctgcgtatcttgcggtgcaatgcctatctacggaaccgaaggttagaccgaaaatgaccgcggtagtgaaagcactagagcaacttcaagactccggtgtcgacaaaggggtccatcataatgcagcagctcatagttctcgtccgaattcgaagtatgctc

SEQ ID NO: 220388 - DNA, 387 bp, Gossypium hirsutum
cttacagttgcttttcggcgcaacaagtcatagggatagagaactggaatcttgtggatgcgagaaatgtggcgcccgaagagttgaatacaaaggaaaaaagggacttaatcgtgggaagttcaatggcgtattggacgactctggcgcccaatgatgaagactatagcgggtctatagcaaaggcaatagcatcggggtcagggtacgttgtgaaggggattttgtggtgtggcgatgtcactgttgacaggttgaaatggggcaatgagttcttgagtaagaggataaagtcaggttcaacctctgagatctctccagaggccctgagaaggatgaaaagggttaagaaggtaacaaagatgtcagataaagtggccactggaa

SEQ ID NO: 220389 - DNA, 345 bp, Gossypium hirsutum
  unsure (1)..(345): unsure at all n locations
accggccctcctcacctctgggtttagncctcgatgtacccaaatacttttggcaacagaatccagaggatgttgaaacttgggttgagcattgatgaggatgcangagatgctgatgccgactctgagatgccaccattcgaggatgctgatgccgagggcagcaagatggaggaagttgactaagctttttaacatgtttgtgaagagttcatttggtagtctcatttttagcttttaatataatattctggaaaattggtcaatgctgtgttttctttgtaatggtaaatgaatctttagtgctcgtaaatggaatctagtccactgccgtatgcttttatc

SEQ ID NO: 220390 - DNA, 400 bp, Gossypium hirsutum
ctgagattgatcccatctgtgcccttcaggctcttatggaaggacttcaggttttgaccctagaagacgttgtctccgaggctgatatcttcgtcaccacaaccggtaacaaggacatcatcatggttgatcacatgaggaagatgaagaacaatgccattgtttgcaacattggtcactttgacaatgaaatcgatatgctcggtcttgagacctatcctggtgttaaacgcatcaccattaagcctcaaaccgataggtgggtcttccctgaaaccaaaactggcatcattgtgttggctgaaggacgtctgatgaacttgggatgtgccactggacacccaagttttgtcatgtcctgctcgttcactaaccaggtgattgcccagctcgagctatg

SEQ ID NO: 220391 - DNA, 388 bp, Gossypium hirsutum
ccaaaaacttacttcgtctcaaggactgcttttcaaatctctctgaatttgatgatgtccgaggccaccctggttttgatagacaaggaaccatatttaagcgacttataaaagatcagaatatgcactccgaccttgaggagggtatcagacggttggtactttgttccggaaaggtgtactatgagcttgatgatgagcgaaagaagaacaatgctaccgacattgctatctgtcgtgtggaacagctttgcccattcccttatgacctaatccaacgagagcttaagcgatatccaaacgcatagattgtttggtgccatgaagaaccgatgaacatgggtgcatacaactacatcgcccctcgtcttgccacttcaatgactgc

SEQ ID NO: 220392 - DNA, 394 bp, Gossypium hirsutum
  unsure (1)..(394): unsure at all n locations
gacccactcgtactccaaaaacttacttcgtttcaaggactgcatatcaaatttctctgaatttgatgatntccgagtcctcggtaatttttatagacaatgaaccacatttaatcaacttataaaatatcataatatgcactcctacctttaagattgtatcatacgattgttacttttttccaaaaatgtatactattaacctttttattaacgaaataaaaacaattctacctacatttctatttttcgtttgtaacaacttttcccattcccttattacctaatccaactagagcttaatctatattcaaactcatatattttttttttccattaaaaaccgattaacatggttttcatacaacttacatctccccctcattttccaatt

SEQ ID NO: 220393 - DNA, 289 bp, Gossypium hirsutum
ggggccggtgcctcaacttctgcgagagtgaaatggggagggtacaaggtgatcactagtgcaagtgaagctcaagcttttactcctggcaagttcattgctggaggaagttggttaagctctacaggctttcctttcgctcttgggttgtaataattttaaagattgtattgtcaatgtagccacctacctacttcattgtttggtttgagatttgctttgcggccgtgtatctgttaaattattactaaattaatagtagtaataagcgaatgccaaagctttcttc

SEQ ID NO: 220394 - DNA, 410 bp, Gossypium hirsutum
gtttctataaacaaagagaaactaggtgtgaaacaatggcgtcctcggatcttattggcaagctcgagactgatgtcgagatcgatatttctcccgaaaagttccaccatatgtggtgccacaggccgcaccatgtccaccacactagctctgaaaaagtacaaggatgcgatttacatgaaggtgaatttggaactcccggcgtcgttatctgctggagatatgtgcatgatggaaaggctaaaactgcaaagcaggtagttgaagttatggaccatgagaaaaagtcaataactttcaaaatgcttgaaggagatctgatggaggaatacaaaagcttcgtgattacaatccaaacttcccccaagagcgacggtaaaggcagtatagtgcactggactctggattat

SEQ ID NO: 220395 - DNA, 396 bp, Gossypium hirsutum
ggcaactcagctggcactgtcactgcttattatctgtcatctcaagggccaacccatgatgagatagactttgaattcttagggaatctgagcggtgacccttacattttacacaccaatgtctttacacaaggcaaaggcaacagagaacaacagttctatctttggtttgaccctacaagaaacttccacacctattccatcatttggaaaccccaacacatcattttcttggtggataacacccccattagagtcttcaaaaatgctgaatccattggtgtaccattccccaagagccaacccatgaggatttactctagtttatggaatgctgatgattgggccacaaggggtggattagtgaaaactgattgggcaaaagcacctttcaca

SEQ ID NO: 220396 - DNA, 396 bp, Gossypium hirsutum
tcttcacaaaaaagaaaagaaaaattacagtgaaaatggcaacccttaaagttccagctcatgtacctgccccttctgaggatgctgagcaacttcgtaaagcttttgaaggatggggtacaaatgagcaattgattatcgacattttggctcacaggaatgcagctcagcgcaatttgattcgtaaaacttatcgtgaagcttatggggaagatctccttaagtctttggatgaggaactttcaagtgactttgagcgagctgtggtgctgtttactttggaccctgcagagcgtgatgcatttctggctcatgaagctacaaagaggttcacatcaagccattgggttctcatggaaattgcttgcactaggtcttcacatgaactgttcaatg

SEQ ID NO: 220397 - DNA, 396 bp, Gossypium hirsutum
ccaaaaacttacttcgtcacaaggactgcaaatcaaatctctctgaatttgatgatgtccaaggccaccctggttttgataaacaaggaaccagatttaagcgacttataaaagatcagaatatgcactccgaccttgaggagggtatcagacggttggtactttgttccggaaaggtgtactatgagcttgatgatgagcgaaagaagaacaatgctaccgacattgctatctgtcgtgtggaacagctttgcccattcccttatgacctaatccaacgagagcttaagcgatatccaaacgcagagattgtttggtgccaggaagaaccgatgaacatgggtgcatacaactacatcgcccctcgtcttgccactgcaatgactgctttgggta

SEQ ID NO: 220398 - DNA, 297 bp, Gossypium hirsutum
gaaaaaaaaaaaatggaaggcagtgtgggttatgacaatgatctgaatctcaaggcaactgaactcagattagggttgcctggaacagaaccagtttccattgttagacgcaacaagagatcattgcaacaagtagctgatgatgattgtggagtaaatggctgcaaatctgatgatcaaaatgaaactggtcctcctccttccaaagcacaaatcgtgggttggccaccgatccggtcttatagaaagaaccatattcagaccaagaaaaatgagtctgagggtggtgggatttat

SEQ ID NO: 220399 - DNA, 397 bp, Gossypium hirsutum
gactcactcaccctcaacagtttatacgatgaagcagcgtatagagcttctcagcagcctgtatacgggactgcagcaccagaacccgtttgaggtacaagatccatttgcggtatcaaataacattgcaacccctacagtagttcaaatggcagcaatgggtcagcagcagaacaacccttttggttcataccaacccacctatccgcagccgcatttggtgatgagcccatcaaatccttttggtgatgcagggttgggggcatttccagctaaccaaatggttccatttgctcaaccacatgcgaataatccatttggtggaagcacaggcctattgtagcgttaaatacgaagagttgatgggtgtgtattttggatgggagatgagaagagt

SEQ ID NO: 220400 - DNA, 396 bp, Gossypium hirsutum
gtcggatgctcttcaggaggcaatgttggcagtggcatccagcattcggcggctggctgaggcaatggatcaaagtaaaagtacaatcaatccctctgaattgctacaggctgttttggagattgatggtctggaagaagctaaacagatgtatgcattcgagtatttgaatgccgaccctatcaaagctagggcattcatgacatataatgttcggatgaggaagatgtatttgtttcgtcagttttggtggtggaaatgaatgacaggtgctgaatttcgaaaaccttttggtatatgatctatattagatgttgacaaattgaaccttatttcattgatcattagaaatgaatgtacagatttcatatgtaaagaaacaatctgggagctatg

SEQ ID NO: 220401 - DNA, 315 bp, Gossypium hirsutum
gcagccgttacccaaatttaaggatggattcacaaattaagtttgctgtggtggtgaaaattatgggaaggacgggatcgagaggtcaggtgactcaagtgagagtcaagtttttggatgatcagaaccgttttattatgaggaacgtgaagggaccggtcagggagggagatattctcaccttgctcgagtctgagagggaagctaggaggctccgttgataacttcctcttatctccgttttgttacgttattaatggatgagttgtttttaaagtataatcattatgtttaaatgaactaagttggtttttg

SEQ ID NO: 220402 - DNA, 395 bp, Gossypium hirsutum
ggtgtttatcgttcgtggacgtataaaacgtatccaaagccttagcaaaggcgtggttgccacaagtttaatcgagccaggaggcttcctaggtgacgaattgttgtcatggtgtcttcgccgaccatttattgaccgtcttccagcctcgtccgcaacatttgtttgtgtagagccgattgaagcattcagtctcgactcaaaccatctcaaatacatcacagatcacttcaggtacaaatttgccaatgagagacttaaaagaacagcaagatactattcatcgaattggcggacatgggcagccgtgaatatacaacttggctggcggcgttacagaacgaggactcgaggtccgatgatttctgctgccgaaaacggcaacagcagtgacc

SEQ ID NO: 220403 - DNA, 395 bp, Gossypium hirsutum
gttcgccggtgctggcggcgctttgggtcatccgccgccggattccccgacccttgattggtcggagcaggtctatatctggtctctcgccctcctcaaaatgctcaagcatggaagagctggagttcccatggaagttatgggtttgatgttgggagagtttgttgatgagtacactgtgcgtgtcgtggatgtctttgcaatgccacagagtggtaccggtgttagtgtcgaagctgtggatcatgttttccaaacgaatatgcttgacatgctcaaacaaactggaaggccagagatggttgtgggttggtaccattcacatccaggattcggctgctggctttctggtgtcgacataaacacacagcagagttttgaagctttgaatcaaa

SEQ ID NO: 220404 - DNA, 404 bp, Gossypium hirsutum
gccacgcgtccggttcgaccgcgaaccggtgacttttaacggtatgaccacttgtttgggtaccaaaacattggatatacgggttcaaactctaacatataactaagaaaaacaaagatgaaaaaaacaaaaaatgaagctgcaaaaaaaaaaagaagattggaatacacagattctgactttgttgtgatcggcgaagctgtaactcaaatgattggacgactcaaatggatgccccttcttgtactgagtgcaaaactttgtccttcaagtattgaaggcgcattctttgccttgctcatgtcgattgataactttggacttctatcatcctcatggggaggaggcttgctgcttcacacgttgaatgttactcgaaccaaattcggaaatctttggctggc

SEQ ID NO: 220405 - DNA, 399 bp, Gossypium hirsutum
cgctctcatcattttccttctgctaccttctctcaacccaaacacatatttcccaggaaaaagaaaaagcttgagcgaacaagaaaatggccgatcagcttaccgacgatcagatctctgaattcaaggaggcctttagcctgttcgacaaggatggagatggttgcattactaccaaggagttgggaactgtgatgcgatcacttgggcagaaccccactgaggcagaactgcaagatatgattaatgaagtcgatgctgatggaaatgggaccattgattttcctgaattccttaacctgatggcaagaaaaatgaaggatacagactctgaggaggagcttaaagaggcattcaaggtgtttgacaaggatcagaatgggttcatttctgcagccg

SEQ ID NO: 220406 - DNA, 408 bp, Gossypium hirsutum
tacattttctcatttggtgcagttggtgcactcttgggggcaatactctaccaaaatatattgaaggatcatccttttcgagacttgcttttctggattcagttattctatggtttggcagggatgttagatctgatattggtgctgcgaataaacttgaagtttggaataccggattctgtctttgttgtgatcggcgaagctgtaactcaaatgattggacgactcaaatggatgccccttcttgtactgagtgcaaagctttgtccttcaggtattgaaggcacattctttgccttgctcatgtcgattgataactttggacttctatcatcctcatggggaggaggcttgctgcttcacacgttgaatgttactcgaaccaaattcggaaatctttggctggcg

SEQ ID NO: 220407 - DNA, 390 bp, Gossypium hirsutum
gttcgccggtgctggcggcgctttgggtcatccgccgccggattccccgacccttgattcttcggagcaggtctatatctgctctctcgccctcctcaaaatgctcaagcatggaagagctggagttcccatggaagttatgggtttgatgttgggagagtttgttgatgagtacactgtgcgtgtcgtggatgtctttgcaatgccacagagtggtaccggtgttagtgtcgaagctgtggatcatgttttccaaacgaatatgcttgacatgctcaaacaaactggaaggccagagatggatgtgggttggtaccattcacatccaggattcggctgctggctttctggtgtcgacataaacacacagcagagttttgaagctttgaa

SEQ ID NO: 220408 - DNA, 404 bp, Gossypium hirsutum
gtttggtgccactgtgaatgtagctaaacccaaaaagggtcaatccgttgcaatatttggactacgtgctgtcggtcttggtgctgctgaaggagcaagagtttctggggcttccaggatcattggtgtcgatttgaaccctagcagattcgaactagccaagaacttcggtgttacggagtttgtgaatccgaaagatcacaacaaacctgttcaagaggtcattgctgagatgacgggtggaggagtcgaccgcagtgttgaatgtaccgggagcatccaggccatgatttctgcatttgaatgtgtccacgatggttggggagttgcagtgcttgtgggggttcccaacaaagacgatgcattcaaaactcatccagtgaatctactgaatgaaaggactc

SEQ ID NO: 220409 - DNA, 393 bp, Gossypium hirsutum
acccgcacgcgtccgaaggagtcattgctaacggagcaagtctagtggtgggatggacgtctagtcatatctagacggggaagaggattttatatcactctaacgtgctgacattgggacaccggagattggagaacagcatactgtgaacagcaacatcagcagctttagtagcgatggatacacttatctgaagaaatccacgtttgtgaaggtgaaaatggatggaaccccaataggaaggaaggtcgatctgaatgcccatgaatcgtatgaaaagttagcgaaaacgttggaagatatgtttctcgaaaccgccccgggtgtcaatccatctggatcaacggcgctgcagcttgatatgcagaacaggatgacaagacactcgagact

SEQ ID NO: 220410 - DNA, 404 bp, Gossypium hirsutum
agagaactgctgaatctgttgctgttgctgctaacggatctagtcaagttgtggggtggcctcctatcagagcttatagaatgaatagcatggttaatcaagcaaaagtgctgacaatggagaaccgcaaaaaggagacctcgatggtcgagaacagcagcatcggcggctatcgtaacgatggtaacactaagctgaagaaatccacgtttgtgaaggtgaatatggatggaaccccaataggaaggaaggtcgatctgaatgcccatgaatcgtatgaaaagttagcgaaaacgttggaagatatgtttctcgaaaccgccccgagtgtcaatccatctggatcaacggcgctgcagcttgatatgttgaacaagatgacaagacactcgagactgctggat

SEQ ID NO: 220411 - DNA, 405 bp, Gossypium hirsutum
  unsure (1)..(405): unsure at all n locations
cttcccggagatggtccctttgttcggattcattggtaggctagaagagcagaagggttcanatgttttggcagaagctattccggaattagttgctgaaaattgccagatttgtttcctttggggcgcaaaaaaggactggtgaagcagattgagcagctggagatccaataccctgacaacgttagagcagtagccaaattcaatgtcccattggcccatatgattattgctggtgctgattacattttggtccctagtagattcgaaccatgcggtctcattcagctgcatgctatgcgatatggaacagttccgatagttgcctctactggtggacttggtgacacagtcaaggaaggattcacagggttcccaatgggagctttcaatgttgaatgtgat

SEQ ID NO: 220412 - DNA, 399 bp, Gossypium hirsutum
ggagcagtgcctaggatcaaagagtctaagctctctctcctcacatacggcaaacttaacaatgtgcctgaagctgtttgcatgcaacatttgatggggattgatggagtgatagttgattttgttcaagagatctcgcatgcagtggatgacatgattatcaagcctttaaatgagggattaagagaaggggacgaggagactgggaccaagtcaaagctgcagttctcacagcaggagctctcttttctcttaaagctaattccagagttgatacagcactaacttgtccctaccactacagtttttttgtttttttaccaactttaccttcttttttaatattttggggctgtcttgctggataccttcgaagaagtcaaggtgacatttttatgt

SEQ ID NO: 220413 - DNA, 413 bp, Gossypium hirsutum
cttctggatgcacagcctgtgttgcaataattcgaaacaagcaactagttgttgctaatgctggtgattcccgttgtgtaatatctagaaaggggcaggcatataatttgtctaaagatcacaagccagaccttgaactggagaaagataggattctgaaagccggtggttttattcaagtcggacgtgtcaatggaagtttaaacttggccagggctattggagatgcggagttcaaacagaacaaaagtttacctgctgaaaggcaaattgtaacagctaatccagacatcaacactgttgagatctgcgatgacgatgagtttcttgttttagcttgtgatgggatttgggactgtatgtcaagtcaacaactagtggattatgtacgagagcagttgaactctgaaact

SEQ ID NO: 220414 - DNA, 364 bp, Gossypium hirsutum
gcaaagtactcgaggcaatcaaggcaaacttcaatgacaagtacgacgagtacaggaagaagtggggtggcggcatgatgggctccaagtcacaagcccgaaccaaagcgaaggagaagcttcttgcaaaggaagctgcacagaggatgacatagaggaattaatagaccttttgccgcagttcgtgtttttgattaaatagtcttttgtagtaaggtacgatcgattttcgactcgggtttactctcttttccggaggaacattcatatacttttgtggttgaactttctaaatgcctagtttgttgtttgtgctgaagttttgtgattttctaatgaattgtcaatcaatgtttttattttt

SEQ ID NO: 220415 - DNA, 342 bp, Gossypium hirsutum
cgagtctgttttccttgttaccctcgggattgcactgcttgttctcttcggtttatggcgtcacggtgaatttcagcggggctccaagaaaactaagagagctccaaaggtggaagtcggaaccaggactactgatacctcattggacgagtggcttcagggaactgcttacactcagtcagcttccaaatcgaagaaaaagaagtagatggggcagtgcttgcaggctaattgcaaactcatttcttggcattttggaaagtttaagtgagggcacaaatagtttgagaattaggcccagggaaaatggcatacctttgctattgtagtatgtgaaagatt

SEQ ID NO: 220416 - DNA, 283 bp, Gossypium hirsutum
ctttcctcacatgacgccaacgacaaaagaagcatagtaggtacaggatgatttgggagagattcttccctcacaactcggctagattgacagtccctggaggagctagcgtggcatgcagcactgctaaagctgttgagtgggatgttgcctggaagaacaaccttgatccttcagggagggctgccctgggagtccacctctcggcttacgatgcagaggctcctctcatcagcaacgtgccatccaaggttatcgatagtataccacggatggtggaagt

SEQ ID NO: 220417 - DNA, 285 bp, Gossypium hirsutum
tgaagttgagggaccaggtggttttgtttggaatgggggaccaaacgcgatgtgggaggcagtgaaatatatgcaaagttgggagagcttagaaagtttattaaagaagcaggttatgttactgacactagctttgctttgcaagatacggatgaagaacaaaaggagcataatctttggaaccacagtgagagacttgcccttgcatttggattaattaatactccaaatggttcaactattaaagttttcaagaaccttcgtgtttgtggtgattgtcattct

SEQ ID NO: 220418 - DNA, 402 bp, Gossypium hirsutum
  unsure (1)..(402): unsure at all n locations
cagatatcagttcctgagatcacaaacgctgtgtttgagccctcaagcatgatggctaagtgcgatccaaggcatggcaagtacatggcttgctgcctgatgtatcgaggagatgtggtgcccaaggatgtgaatgctgctgtcgctaccatcaaaacgaagaggaccgtgcagtttgttgactggtgcccaactggtttcaaatgcggtattaactatcagcccccagctgttgtccctggaggtgatcttgctaaggtgcagcgagctgtttgtatgataagcaataacacagcagtggcagaggtgtttgcacgcattgaccacaagtttgatctgatgtactcgaagagagcttttgtgcattggtatngtggagagggcatggaagaaggtgaattc

SEQ ID NO: 220419 - DNA, 371 bp, Gossypium hirsutum
tcgaatatatcaattctctgagatcacatacccttttttttgatccctcaagcatgatggctaactgcgatccaatgcatggcaagtgggtggcttgcttcctgatgtatcgaggagatgtggtgcccaaggatgtgaatgctgctgtcgctaccatcaaaacgaataggaccgtgcagtttgttgactggggcccaactggttttaaatgcggtattaactatcatcccccatcttgttgccctggaggagatcttgctaaagcccaacgagcttgttgtatgataagcaataacacatattggcagaagtgtttgcacgcattggccacaagtttgatctgatgtacttcaagagagcttttgtgcatt

SEQ ID NO: 220420 - DNA, 282 bp, Gossypium hirsutum
acaatatgtacaaggaataccgagacacaaccctcaggggggctgtagaacagaggtgcacccagatggcgtctcttcatagggtgaggtttccttgtattcaaatcatcaagacagctaccatcccagcaaaactttgcaagagggacagcaccaagcagttccacaactccaaaatcaaattcccactggtattcaagaaggtcaggccaccaactaggaagctcaagacgacatacaaggcaaccaaacccaacttgtttatgtagttatttttcatgg

SEQ ID NO: 220421 - DNA, 282 bp, Gossypium hirsutum
aagcgtttgtctcatatctcagaagatggcccgtacgaggcaaaccggccgtaaggggactggtgggaaggctcctaggaagcaacttgctaccaaggccgcccgtaaatctgccccaaccactggtggtgtgaagaagcctcatcgataccgtcctggaactgttgctcttcgtgaaattcgaaagtaccagaagagtactgagcttcttatcaggaaattgcctttccagaggcttgttcgtgaaattgcccaggatttcaagactgatttgcgtttcca

SEQ ID NO: 220422 - DNA, 385 bp, Gossypium hirsutum
gtggacaacccagtgctgaaagctgagcaagatgcacagattggaaaaggctcccgtggagatgtaactatactgccaacccttgtgataaacaacagacagtatagagggaagttggacagaggagctgttctcaaggcaatttgtgcaggttttcaagagaccacagagccagcaatttgcttaactgaagatatacaaactaacgagtgcttagaaaacaatggtggttgctggcaggacaaaagtgccaacataactgcatgcagggataccttccggggaagagtgtgcgaatgcccgttagttaatggtgtgaagttttctggagatggttatacacattgtgaagcttctgcggctttacgctgtgaaatcaacaatg

SEQ ID NO: 220423 - DNA, 395 bp, Gossypium hirsutum
caaatgatggcattgagttcttaaggacttacctgaaccttccttctgagattgttcctgctactttgaagaaacaagctaaacctgctggtcgtcccatgggccctcccggtgactgtccacgcggcccaccacgctttggtgacggtgagaggagatttggtgacagagatggctatcgcggtggtcctcgaggaggcggtgattttggtgataaaggaggagctccagctgattatcagccttcattcaggggccctggaacacggcctgcttttggtcgtggaggtggtggttatggtggtgctggacctgctggtcttccttgagagatgatttttcatgatggataattttgtcagtttaggtttgttatcatatggagttcatagaag

SEQ ID NO: 220424 - DNA, 284 bp, Gossypium hirsutum
ttaagaacttgcatgccaatgggatagaggtcttcctgggagtggtttttacccatagtgctgaaggtggagccctgcaaggacttgatgatttatcctattatcacaatagtgttgaagatttagaagctagaaatgctttgaattgtaactatcccgttgttcaacagtttattttagatagccttcggcagtgggtgactgaattccacattgatggtttctgtttcatcaatgcttcatgtctgttgagaggggttcgtggtgaacgcttgtctcgtcct

SEQ ID NO: 220425 - DNA, 257 bp, Gossypium hirsutum
  unsure (1)..(257): unsure at all n locations
gggaaacaatggttcgcattacggggtatgaaggtgaaagctgatagggatgagtcttccccttatgccgccatgcttgcagcacaagatgtttctcaacgctgcaaggagttgggtattacagcccttcatataaagcttcgagctactggagggaacaaaaccaagacacctggtcctggtgcccagtcagcacttagagccctcgctcgntctggcatgaaaattggacgcatagaggatgtcaaccccatttc

SEQ ID NO: 220426 - DNA, 394 bp, Gossypium hirsutum
cttgaatttgtttgcttggggcttgtaaagaaggagaagaaaaagatggcagatgatagtacagctacctgcatagatatcctcttagccatcattttgcctcctctcggtgtcttcctcaagtttggttgccaggtggagttctggatatgtcttgtactcaccctgtttgggtacatccctggtattatttatgctatctatgccatcaccaagtagtcctctaatcccgtccttctcatctgtggagatttggagtaggattctggttttgtttgaatatgtgtcggttatagtattttatttcaattaatattttgtctgttaatttgatggtgatgtaaagcttgttgttatgttatgatgatgatttatattgtggggaggggggggg

SEQ ID NO: 220427 - DNA, 399 bp, Gossypium hirsutum
aaaagcccctcaaaacagatcatccaattagatggaggagcaggatcgatcctctcaaccccgtcctccacatgtcctcatctgccccctcccattacagggccatataaacaccatgattaagctggctgaactgctacctatcgccggcttcaagctcactttcctcaactcccaccacaaccataaacgcttggtcaagttcaacaatattgctgcccattttgaaagatacccagggttcgaattcaagaccataaccgatggtctccctcttgatcatcctaggtcagggagctggttccttgatatgtttgaagaaaccatggaacctaagatgaagcaaagtttgagagaggtacttgtgaatagcagcccaccagtagattgcgtaattgc

SEQ ID NO: 220428 - DNA, 387 bp, Gossypium hirsutum
ggtttccccccaggcttcctgagttgcatgcctctgattattttgatgctacagcatatgactcaaattttaattctgttgattcttttgttccgttaggaagcaggtcttgatgcccagactcgggggctactcatcacgtgtgccaaaatgcttcagatttacagggctctgctccgtatacaggtaattcttcttttttaatggggaatggagtctctactaaaatttcatttgtttggagtacaactattcctacgaaggcaaaattattacatctatcgaatgtgctatgtgtgccgagtattcgaaaaaatttattatctgtgtctaattttgctacagataacaatgtgttttttgaatttcacccctcgtattgtgtga

SEQ ID NO: 220429 - DNA, 395 bp, Gossypium hirsutum
catgaagaggagtaatgacaagcaattaaaaatagagcatgaattgtgtgaaagggttaaggcatggcttgcagatgaaaaagatgttcgccttggggactggaaagcagctgatattgagatattgaatacttttcaattgcttagtgccaagccggttgtttatttggttaacatgactgagaaagattaccaaaggaaaaagaacaagttcttaccaaagattcatgcttgggtgcaagaacacggtggtgaacctatcattcctttcagtggtgtgtttgagagaaaccttgctgatatggaacctgcagatgctgcaaagtattgtgaggaaaacaaggtgcaaagtgctcttccaaagatcatcaagactggtttctctactattaatc

SEQ ID NO: 220430 - DNA, 395 bp, Gossypium hirsutum
tgatttctttgagatcaaggctgttaaggaaattgagccatcattgaagaggcaacttatcatatccactgttctcatgactattggaattggggttgttagttgggtagctcttccatcttcctttaccattttcaactttggagatcagaaagttgtcaagaactggcaactactcttatgtgttgctgttggtctttgggctggtctaattattggttttgtaaccgagtactataccagtaacgcatacagccctgtacaagatgttgctgattcctgcagaactggagcagcaactaatgttattttcggccttgcattgggttacaagtcttgcattattcctatatttgctattgcagtcagtatttttgttagttttagctttgctg

SEQ ID NO: 220431 - DNA, 279 bp, Gossypium hirsutum
gtttttatacattttaaaaaccaaatcggatggtgcggggtctggattctgatggctggcatttgtggatctatttggctttgtcaagctttctttggcttcagctattatgttatgcttggagttttggtacttaatgatgcttatagtcataacaggtcacctgtcaaaccctttggtacctgttgatgccatctccatttgcatgaacataaatggatgggatgcaatgattgcaatcgggttcaatgctgctataagtgtgagagtatcaaacga

SEQ ID NO: 220432 - DNA, 389 bp, Gossypium hirsutum
gttattttggttttaagaagccagcaactgatgatccagtgaaaactaataaaatcccaaggcaaattccagaacaggcttggtacatgaacccagccttctccatcctaattgggggtatacttcaattcggggctgttttcattgagctctttttcatcctcacttcaatatggttgcatcagttctattacatattggcttcctcttcattgtctttgtcattcttattatcacttgtgccgagatcacagtcgtactctgctacttccagctatgcagtgaggattacctatggtggtggagatcatacttgacttcgggttcttcagcattttacttattccactatgctgccttctacttctttacaaagcttgagatcacaa

SEQ ID NO: 220433 - DNA, 400 bp, Gossypium hirsutum
ctaaacacccctacaagtacaagtctccacccccaccacctccagtttacaagtataagtctgcaccacctccacctccgtcaggacccaagcacccttacaagtacaagtccccaccacctccaccaccatcaccaccaaagcatccttacaaatacaagtccccaccacctccaccaccatcaccaccaaagcatccttacaaatacaagtctccaccaccaccaccatcaccacctaagcatccctacaagtacaagtccccaccaccaccaccaccatcaccacctaagcatccttacaagtacaagtccccacccccaccgtcaccacccaagcacccctacaagtacaagtcacccccaccacccccaccatcaccccccaagcacccttacaa

SEQ ID NO: 220434 - DNA, 281 bp, Gossypium hirsutum
cttggttccagtactggagggcgaaaaattatccctgagggtcttgggggagcagtggatcgttgaaagctttgctcaaggtggaaggacagtcatcacatctcgggtttatccgacgaaagcaatctatggagctgctaagctgttcttattcaacaatgctactgaggccagtgtcagtgcctcacttaggatctggcaaatgaactctgctttcattcgaccttatccaaacgataaggagtcccaataggaccgaatagaagttaatccaaaagtca

SEQ ID NO: 220435 - DNA, 399 bp, Gossypium hirsutum
ggaaaaagcatggccgcaaagcccggttcagctccggtaacgtattcgccgaatcttggccaaaaaactcgcccccctattttcaaagacaacgatctcgattgggtccgacctgatggccgtggcttccaccagtgccgaccagcatttttcaggacaggtgcagtaaattctgcttccggatctgcttatgcagagcttgggagtaccaaggtcattttatctgtatttgggccaagagaaagtaagaaagcaatgatgtacagtgatactgggagattaaattgtaatttcagctatacaacatttgccactccagttcgaggacagggatcggatcacaaagagttttcgtcaatgcttcataaagctttggaaggtgcaataatgttggaaaca

SEQ ID NO: 220436 - DNA, 394 bp, Gossypium hirsutum
gttagcagccggacaaagtagcactattactggcacttatgctgggcagtttatcatgggagggttcttgaacttgaaggtgaaaaaatggctaagagcattgatcactaggagttttgctattgttcctactatgatagttgctcttgttttcgatacttctgaggcagcgctagatgtcttaaacgaatggcttaatgtgcttcaatcgattcaaatcccctttgctcttatcccactactttgtttggtttctaaggagcaaatcatgggtactttcaaaattggctctgtgctcaagacaattgcatggctcgtggctgtactggtgatattgatcaacgggtaccttttatttgacttcttctctaacgaagtcactggcgtaatgttc

SEQ ID NO: 220437 - DNA, 259 bp, Gossypium hirsutum
  unsure (1)..(259): unsure at all n locations
cttcaatctgcactcgtttcaaatctttatttcatggccganttgctgtagcgggagtgcattggtaacttctttgcgaacctgttgggcaagtggaaagaatccgaatattcaggtggtcagtttattcccgttggtggtctagcttactatgttactgcccctgcaagcttggcagatatggcagcaaatcccttccatgctctgttttatctagtgttcatgctttctgcctgtgcctttgtttcgaaaacttgga

SEQ ID NO: 220438 - DNA, 287 bp, Gossypium hirsutum
  unsure (1)..(287): unsure at all n locations
aaacaatggatgtggtgaagaacttggacatccaaaggtgcatgggagaggggggcgagatancttccttcccatctttctttcaacctaagaagggggagaacaccagcgctttttacactctgaaagaagatgggacggtgcatgtgcttaatgagacttttgttaatggcaagaaagattccatagaaggcaccgcctacaaggctgatcccaagagtgacgaatccaagctcaaagtcaaattctacgttcctcctttcttgcctatcattcctgttactggg

SEQ ID NO: 220439 - DNA, 341 bp, Gossypium hirsutum
  unsure (1)..(341): unsure at all n locations
gccaacacctgggttgtaagcggttctcctcaaacaaagaaattgcaagatattctccctggaatcatcaaccagttgggacctgataacttggacaacttgaggaaattggcagagcaattccagaagcaggcacctgctgccggttctggtgacggtaccggtgcagccactactcangaagaggacgatgaggaggtaccagatcttgtacctggcgagacctttgaagctgcagcagaaggccaagctgctaaatagagtttttatctntaattntcttttgttatatgtttttgatgaatttaactatttgtttctttttccaaaatttctctatc

SEQ ID NO: 220440 - DNA, 375 bp, Gossypium hirsutum
tctaaacccgagtcaaatcctttaccctcttttccaaaatttgagcctcttaaggcacacgagatgtcagacgggcgagggcgattcataaaggtttcggttccacctcataggtattcacctctcaagaaatactgggtggatatctatactcctgtttatgaacaaatgaatatcgacatccgtatgaatctcaaagctcggatagtcgaactgaaaacactacaagacacgcccgacattagtaacctacaaaaatgtgcagattttgtccaagctttcatgttgggtttcgatgttccggatgccattgctcttttgagattagactagttatattgtcgagttcgttgaaaatcaacgatgtcaaaacac

SEQ ID NO: 220441 - DNA, 212 bp, Gossypium hirsutum
  unsure (1)..(212): unsure at all n locations
ccggggcgggccacgcgtacacaagggatccaacccnnaaaaggcaaattttttaaccggaggtacatttctcnaaaaggtccgtttattatttatggaacgtggggcccaaaactttttaaaaccttccgtaacatccctcgattccaggttgccaatgtctaaattctcaatctgcttaaactctctccttttgttcactctttactttt

SEQ ID NO: 220442 - DNA, 286 bp, Gossypium hirsutum
gacagcccaaggcttgaccgatcctaaccaaaacacgggcgttgtgatccagaggtgggggataggtgccacctctgatttacagcctgttcgtaaaaacttcccaacatatcttgggaggccctggaaggaatactcgaggactgtggtaatgcaatcaacaatcagtgacgtgattcaacctgctggctggcacgagtggagcgggagtttcgccctgaaaacactgttttatgccgagtaccagaacactggggccggtgcctcaacttctgcgagagtgaaa

SEQ ID NO: 220443 - DNA, 282 bp, Gossypium hirsutum
  unsure (1)..(282): unsure at all n locations
atttgatcgtatatatggcggaggattcaaaatcctgaggtataaaaccggggcggggcgtatattgtttttgtaaatctcnaaaataactccatacaaaaaagctcgttgacgttgacggtcctccatccgtggagctcctccgtcgacgagttgtctcatattccatcgccttgtggagcagcgtcactgcttttacctcttgggactggccatgagacgaacatttattatttacgctttctttagatctcgtagttttttttttctgatctaattaat

SEQ ID NO: 220444 - DNA, 315 bp, Gossypium hirsutum
cgagactccttacaatcctccacaatcggccccgtctcactatccatcatcctatcaaggttcggagactccttacaatcctccccagtcagctcctccgacaacaagctatccatcaacaaccgctcaatactcttcaagtagcagaaacgggaaaatcgcggaaccttcaccacctccttctgagaaataccaatacgacagcaattaccaaccgccgccggagaaaatcgccgaggcacacaaggctgctcggtttgcggttggggccttagcatttgatgaagtgtcgacggcagtcgagcacttaaagaa

SEQ ID NO: 220445 - DNA, 298 bp, Gossypium hirsutum
gatccggccaaggaagctgccaacttcacctcacaggttatcatcatgaaccaccctggccaaagcggaaatggttatgccccagtcctcgactgccacacctctcacattgctgtcaaattttctgagctgttgaccaagattgacagaacaatctggcagggaactcaaaaaggacccaagttcttgaagaacggtgatgcaggtatggtaaagatgattcccaccaaacccatggtggttgagactttctccgaatacccaccactcggacgttttgctgtccgtgacatgcgcc

SEQ ID NO: 220446 - DNA, 293 bp, Gossypium hirsutum
gcagaacatatgcagaattgcgaatgccgtacgtgtgctgtcaactttaggtttcagtatcgaggcagatttgatcttggagacagttgagttgagcagcacagtgaaaattgacatacatgacatgctaggctcagagtttcatgttttggttgcggaaagggaagctgagcggagaagcttggtgggaaagcggaaaagatgatgtgatattcaactggcagcagttatctttcaagggaacatcgcttatttggttccatgccaggaaaatggtgaacctagtgcaaaat

SEQ ID NO: 220447 - DNA, 307 bp, Gossypium hirsutum
cccacgcgtccggttaccttcggctctaccccgcctctgcataggtctgttatattttgattggagatcccgatcgaaaatctttgtgatcttcaaagatgggagaaagaaaagtactgaacaaatattacccgccggacttcgatccgtcgaagcttccgagggcccggcggccgaagaatcaacagatgaaggttcgtatgatgcttccgatgagcatacgttgtaatacctgcggaaactatatttataaaggcaccaagttcaattcacgcaaagaagatgttatcggcgagacatatttggg

SEQ ID NO: 220448 - DNA, 189 bp, Gossypium hirsutum
  unsure (1)..(189): unsure at all n locations
ctactaattcattatcgttttaaaccgagctgntacccgtcgagagcttatttacgcggaaagggaaagtacangcttgcgttaacggggtttcccgatgagttttacgatactgagtgggatttgataattattttttctacttgaggatacataccggaggctttatggtagatttctaaatttttc

SEQ ID NO: 220449 - DNA, 314 bp, Gossypium hirsutum
gctcggaaaccaaactcatggcagaaaaacatggtgacagcccgaggcaggaccgaccctaacgaaaacacgggcattgtgatccagaaatgtaggataggtgccacttctgatttacagcctgttcgtaaaaacttcccaacatatcttggcaggccctggaaggagtactcgaggactgtggtaatgcaatcaacaatcagtgacgtgattcaacctgctggttggcacgagtggagcgggagtttcgccctgaaaacactgttttatgccgagtaccagaacaccggggctggtgcctcaacttctgcgag

SEQ ID NO: 220450 - DNA, 303 bp, Gossypium hirsutum
gtgtgaggatttttattgctgatatcatttatcacttattcgacgcaattcaaagcatatatggatggtcttaaagaggagagaaagagggaagcagcggatgaagcagtcttcccttgtgttttgaagattttacctaactgcattttcaacaagaaggatccaattgtcttgggggtggatatccttgaaggcattttaagggttgggacgccaatttgtattcctcaaagagaattcattgatattggtcgaatagcttcgattgagaataaccatagaccagttgattctgccaagaaa

SEQ ID NO: 220451 - DNA, 310 bp, Gossypium hirsutum
ccttccaaacattggaattttccttaaccttgacctaaagaaggcgcttgaattgaaggcggtcacaatctctgtggatgattacatttaagcccttttggaggaaattaagaaagttgttgacctttacgaagagcttgacattgatgtcttggttcatggagagcctgagagaaacgatatggttgagtactttggtgagcagttgtctggttttgcattcactgttaatggatgggtgcaatcttacggatctcgatgtgtcaagccaccaatcatctacggtgatgttagccgccccaagccaatg

SEQ ID NO: 220452 - DNA, 303 bp, Gossypium hirsutum
aagaggggaaaggttccatgtgaacggcacttgcacatgggttggtcgatcctaagagacgggggaagcccgtccgacagcgcgtccagcgcgagcttcgaaagggaatcgggttaaaattcctgaaccgggacgcggcggctgacggcaacgttagggagtccggagacgtcggcgggggcctcgggaagagttatcttttctgtttaacggcctgcccaccctggaaacggctcagccggaggtagggtccagcggccggaagagcaccgcacgtcgcgtggtgtccggtgcgcccccggc

SEQ ID NO: 220453 - DNA, 318 bp, Gossypium hirsutum
cattctactcgattaggaagaagtccaatttctctggaatcatggattgttgctctcaattacaacattcaaaaagtgagatgaagagtcacttagccttggcaatgctaggagtttcagagtttgaggatgacaatcacctttattgtcggtgaaacatggaatcgattttcatccatggaaattttcacccacacccttttctttgttgcttgcttgaccagaaagttttaggcattagaagaaaaagaaaaagaaaaagtgttgaagtgtaaataggaaaaaggggtctgatgaaagctggtttgtatgtacata

SEQ ID NO: 220454 - DNA, 357 bp, Gossypium hirsutum
gaccgggcccgaaatcccggggcgaaccaagccgtccgttaaaataaggggaatgtgccaatgggcttaacctagtcaatggcgaccattggttcacccccagtgatgccatgctgttcccttctcaatggccttgtcgacctcgaagccgctgcatgcctttgcaccgctatcagagctaacattttaggcatcaaccttaacatcccagtttcccttagcttgctcctcaacgtttgttcaaggaacgttcctactggcttccaatgctaaaccatcactgttccctacactttttatcgtctttcttatggtgtttgtgtttgattttagaaagttattatttacagagtgttt

SEQ ID NO: 220455 - DNA, 284 bp, Gossypium hirsutum
aaaaattttaaaaaaattttttaaaaacaaaaaaaaaaaaaacccgccatttttacgcccgccggcctaaaaaatccaaacttacttacacttccattcaaccttataactcttttataacctcacctaaattaaattcactcaccctttttttacaaccctttaacttcaaaaaccctttctttacccaatttaattcccttccaaaaaatccccttttctccaactatcttaataacaaaaaatcccccaccaatcgcccttcccaacatatctccaaccta

SEQ ID NO: 220456 - DNA, 325 bp, Gossypium hirsutum
caaggccgtgaccaagtttacttcatcttgaaaaggctatttggtgatctgtagttgggggtggggttaggaggctgctttttaaattagatcggtgtggtttttatgtttatttttctgaaatttccgcatatttattttgatatatggtttgtattagcgagatggatctactcgatcctgatatggctattgtagaaattaatgctattaacgacaacttaatttcttggagcttgtttttggctagtttttaaatttatttttttcttagataatttcgattaaaattaaaaattttagtttcatcaaattctttactaaa

SEQ ID NO: 220457 - DNA, 299 bp, Gossypium hirsutum
aaacccctaattttaactccgcctcagatatccccgtctccacaggcatggctaccaagcaggcaaatactggcctctttgtaggactgaacaagggccatgttgtaaccaagaaggagttggcaccacgcccctctaatcggaaaggaaaaacgagcaaaagagtccatttcgtgaggaacttgatcagggaagttgctggttttgcaccgtatgagaagaggatcaccgagcttttgaaggtcggtaaggacaagcgagctctcaaggtagctaaaagaaagttgggaactcacaaa

SEQ ID NO: 220458 - DNA, 237 bp, Gossypium hirsutum
gctcttaagtaccgcaagctggctgaatcagttccattggcagaggagtaaatttaagctgtggaataacattgggccggtttttcttggagaataatattctgttttgtaatttcaattggagaagctcttttgtatttcatcttgtcttttccttttccttttttcgccggcattgtttgaacatggggttgtgcgcccgtcaattccagttaaatatggtgacttttgtttttc

SEQ ID NO: 220459 - DNA, 171 bp, Gossypium hirsutum
  unsure (1)..(171): unsure at all n locations
taacatttnnccaatttttcttanaaaataatattctgttttgtaatttcaattggagaacctcttttttatttcatcttctcttttccttttccttttttccccaacattgtttcaacattncgttntacacccntcaattccacttaaatatcgtgacttttgtttttc

SEQ ID NO: 220460 - DNA, 303 bp, Gossypium hirsutum
aactacatctatttcaattaaactttcacctaccattagcatgggaaactaacatcgcagggggaacaactcccatcaatgtcttcaaacaaatttacacaagcttaaaacttattaacccaaacttgctgcttttccaaaacaagctctcatcttttaggctagctattcaatatctaaccagcttgccactaccacccaagtgcagggataatacatccctatttattttgagaatcctctaacagagcttttatagatcacaaatgtcatcaactcattcaaagcctatcacactcttcc

SEQ ID NO: 220461 - DNA, 320 bp, Gossypium hirsutum
ctcttagcaaagacttcagccacccacgcagcccctttaccgggccaaacaatgggacgcgtgcgtacgaagactgtgaagaaatcgtctcgtcaggtaatcgagaggtactactctcgcatgacgcttgatttccacaccaacaaaaaggttatcgaagaagtagctattatcccatccaagaggctccggaacaagattgctgggttctcaacccatttgatgaaacggatccagaagggtccggttcgtggcatttctctgaagcttcaggaagaagagcgtgagcgtcgtatggattttgtccccgatgtatcggc

SEQ ID NO: 220462 - DNA, 312 bp, Gossypium hirsutum
gccaccaccactgcaaattcagatttgcctccaactcacccagtgagacttggcctggctttgaacttctctgttttctactatgagatattaaattctgctgagagggcttgccatctggctaaacaagcttttgatgaggctattgctgagcttgatagccttaatgaagaatcttacaaggatagcaccctaattatgcagcttctcagggataatctcaccttgtggacctcagatctgccggaggaaggaggtgagcaatcgaaagtagatgagcctcaggcagagagttaattcgatggaagagca

SEQ ID NO: 220463 - DNA, 311 bp, Gossypium hirsutum
gtccaccatcattttactaggcgttcctttcctgctaccaggtctctctccactccagtcggaacttcatctcattccaccaggcttttatatgctaagatggatggtaccaggaggagctgaagcagattttggccgctttgacgaagacggttattcgcaaggtttatattatgttctctggaagtttacccccggttgctgctgataatcaagagataatggatttggtcgactcatctgcacctgtcccaccatggttgagcgaggaggatcttgcagaatatggttctttatacgagaaaagtgga

SEQ ID NO: 220464 - DNA, 317 bp, Gossypium hirsutum
ccaactacaaatgaaccatattactacaggatgattggggagaggtttttccctcagaactcggctagattgactgtccccggaggagctagtgtggcatgcagcacagctaaagctgttgagtgggacgctgcctggaaaaacaaccttgacccttcgggccgggctgccttgggggttcatctctctgcttatgacgcagagactcccctcagcaacaagccatccaaggttattgatagtataccacggatggactttcctggagttgccatacagagttaatgcctgcctactggaagacaacagaatgtatg

SEQ ID NO: 220465 - DNA, 317 bp, Gossypium hirsutum
  unsure (1)..(317): unsure at all n locations
gtgctttgggtacatggtttccaagaagaaatacatctatacgattgatgatgactgctttggtgctaaagatccatctggcaaagacatcaatgcattggaacagcacatacagaacctactgagtccatccactccatttttctttaacactctttatgacccataccgatccggtgctgacttcgttcgtggctaccctttcagtctccgtgagggtgttcccactgccgtctcacacggtctctggctcaacatcccggattatgatgctcccacacagcttgtcaagccactcgagaggaacaccangtatg

SEQ ID NO: 220466 - DNA, 344 bp, Gossypium hirsutum
gcccgaatttccgggtcggcccaagccttccgcaagccttaaattggtttttgcatctctcgtttaatttctcggggattaatggcgggtcggggtgagactctcggatccggagcctcgaagaaggcaacatcaaggagtagcaaggctgggcttcagtttccggtgggtcgtattgctcggttccttaaagctgggaaatatgctgagcgggtcggagctggagctccggtttacctcgccgccgttcttgaatatcttgccgctgagtttcttgagctagccgggaatgcagccagggacaacaagaaaacccgaatcgtgccacgtcacatccaacttgc

SEQ ID NO: 220467 - DNA, 337 bp, Gossypium hirsutum
attttaatgggcatgacctttgcttacagcacataagcagcagggacagtggaaccgaattcgtgacaagtggagggggatcaaaggcatggaggggagacgtgagttggtggaatccacaagaactgaaattttatcatgatggacaaggtttcatgtcagtggaaatgactcccactgaagttagcattaaattctatgacgtttttggtaatgttttgcacaattggagcagttccaagcaactttcttttgctatctaagccaacgttttaagcctttaaaacaccttccattgcctgaccaaagagctggcatatcagaagcaggggaaatg

SEQ ID NO: 220468 - DNA, 320 bp, Gossypium hirsutum
ccatattggtcatcacctaattcagatggcacaacggagaccgggatgtaccgattcggttcggttggacaggacacacaattgctattgtgggacttggaaatggatgaaattgtggtgccattacgtcgatgccctcccggagggtctcctacttacagcaccgggagccagtcttcccattgggacaatgtatccccattgggtaccctgcaacctgcctcgagcattcgagatgttccaaaaatttcgccagtggttgctcatcgcgtacacactgaacccctctcgggtttgatttttacccaggaatctgtact

SEQ ID NO: 220469 - DNA, 320 bp, Gossypium hirsutum
cccaagtcttcgttgtacagctcttgaagcatgtgcacatcccgtctttgatgagcttcgagaacctaacgctcgcctaccaaatgggcgacctttaccaccaatattcaactttaaacaggaattatctggggcttcaccggagctcataaataagttgattcctgatcacgtgaaacggcaaataggacttcaacatttcatgcatccgcctgggacatgagacttcaaaaccgttttcaaattcgatgtctgtagtttgatgcgtgacacaaaaagaattactatctttggattatcatcagttgatttgaggccta

SEQ ID NO: 220470 - DNA, 312 bp, Gossypium hirsutum
cccatattcatcttgttttcgtaaagaagcttgttcacatgggggggatactcagggaagggggccgaatcatcaatttcaaaaagtgcaacaattatccattaccattccaaatggtcatgaatcctgtgacattcatcaggaaatgattaaaaactctaatgcttattatcacatactaaaacttccatatcaacacttgatgcttgcttctggtgctcttaatgatgctactgccaacaaatatgacttctaaacattgattccagcctctcaaacttacacagagttagtgtcatgctcaaattgtac

SEQ ID NO: 220471 - DNA, 317 bp, Gossypium hirsutum
accatgtggaagctgcccatgttcgggtgcaccgactcggctcaggtgttggaggagcttgaggaatgcaagaaggcataccccaatgcattcattagaatcattggcttcgacaacgtgcgtcaagtgcagtgcattagtttcattgcctacaagcctccaggcttctaagctttttattaactttgtctctccatttgtttgaatttgtactcagaaaaaatcatgttctttacttttgcttttccttttctttgagttattggcctttgtttctcgatttccgggttttaatcctgagaactaatgaataaaaa

SEQ ID NO: 220472 - DNA, 309 bp, Gossypium hirsutum
tcggatctaagcttcgtgcgattgcagaaaaacataacttcatgatatttgaagaccgtagatttgcagacatcggtaacacagtaacaatgcagtatgaagggggtatcttccgtattttggaatgggctgatattgttaatgctcatataatctctggtcctggaattgttgatggtttgaaattgaagggtctgcttcgtggtagggggctgttgctacttgctgaaatgagctctgctggtaaccttgccacgggagactacacagctgctgccgtaaaaattgccgaacaacactccgattttg

SEQ ID NO: 220473 - DNA, 311 bp, Gossypium hirsutum
ttccaacccaattcaactcacaaatttcaaagttgtaaattccgaaacgggtgaaatcctcccacttggctccaagggcattataaaggtcaggggaccgccagtgatgaaaggttattataagaatccattggctacgaggcaagccctagacgaagatggttggttaaatactggtgatataggttggattgctcctcatcattcggtagggcgaagtcgtcgatgtggaggtgtgatagttttcgaaggacgtgccaaggacactattgttctttcttctggtgaaaatattgaacctttagagattg

SEQ ID NO: 220474 - DNA, 317 bp, Gossypium hirsutum
cttccgcggcggttaacgccttttaattcggccgagtcaacccacaaaaggatagcgttgttgagatcggtgactcaatccctctatttcactctaatcttgccttgttgccttcccttgagatcgccctcatcatgatagaggagcattatggatctaagggcttgggaattgtgggttatttccatgcaaatgagagatttgatgatgcatagctaggcattgttgcaaagaatataggtgaccatatttgccggtacttccctcaagctgccattttcttgatggataacaaaatgcttgaagctttgcccatg

SEQ ID NO: 220475 - DNA, 325 bp, Gossypium hirsutum
cagttcgcgaattttacttgtaatcaagcgttactcgaggtttgcgaagggtgtaataggctgcatataatcgatttcgatgttggttatggtggacaatgggcttctttgatgcaagaacttgttttaagaaatggtggtgcaccttctatgaaaattactgcctttgcttcaccttcaagtcatgatgatatcgaactcggtttcacaatcgaaaaccttaagcattatgctagtgaaatcaacatggattttgatatcgaaatcatgagccttgaggccttgaattcgggttcttggccgttgcctttgcacttgggcgaaa

SEQ ID NO: 220476 - DNA, 336 bp, Gossypium hirsutum
attcacctatgatgttgaataccaggagagtgatgtgaagtgggcatctaggtgggatgcatatcttttaatgaatgatgaccaaatacactggttctcaattgtcaattctttgatgattgttctcttcctttcgggaatggtagcaatgatcatgctaaggacactataccgtgacatttctaggtataacgaacttgagactcaggaagaagcccaagaagagacaggatggaagcttgtccatggggatgttttcaggcctccatctaattctgatctactctgtgtctatgttggcacttgtgttcaatttttggcatggtacttgttacc

SEQ ID NO: 220477 - DNA, 341 bp, Gossypium hirsutum
ccggggaggaccaccctcttgcttttggtggtccaagaaatcataggaactgagggtgctcgtctgtccgatgctgaccaaactcaaagctccactgtaaacgaagatgctcggtgtaggaagctcggtttacaagttgtttctagtctcagttcagagctcaccaatgtgaagaaagctgcagcaatggattccgaggtacttaacagcgatgtcttgaagctttctagaggcattgaaaacatcagcgacgttctaagattaaatgaaaaaatggcattggatgagagcctggagaagttttccgaatcaatgaacaagttcatgaaaatggccgagga

SEQ ID NO: 220478 - DNA, 312 bp, Gossypium hirsutum
aaaaaaggcaatcatgctatccttactgccattgaagtctttcaggttatagttgctgaatccgaaacttcttctgaagaagttagggctttgcagtcattgaagaaatcattggggctgcctaatcgttttgggtggaatggagacccatgtgttcccaaggagcatccatggagtggagcagactgtcattttgataaatctggcagaaagtggttcattgacggccttggtctcgacaatcaaggtctgaggggttccttgactaatgaaatatccaaactacatcacctgcagagcataaacttgagc

SEQ ID NO: 220479 - DNA, 310 bp, Gossypium hirsutum
  unsure (1)..(310): unsure at all n locations
gtttatttgatatttccccctcatggccgccgctgatgtcgaggtccggtgcttcgtcggagggctcgcatgggccaccgacgaccgggccctcgaagaagccttcagtgcgtttggtgaaatcgtcgaatcgaagatcattaatgatcgtgagactggaagatcccgaggctttggattcgttactttccgtgacgagaaagctatgagggacgcgatcgaaggaatgaacggtcaaaatcttgatggaaggaacatcaccgtcaacgaagcccaatcgcgcanaagtggaggcggtggcggaggattt

SEQ ID NO: 220480 - DNA, 292 bp, Gossypium hirsutum
gtcaaatgtcaaggctgcttcaacataacaaccgtattgagccactctcaaactgtggtggtgtgtggaaactgccagacggttctgtgccagccgaccggcggtagagctagactcaccgagggctgctctttcaggaaaaagggtgactaaatccgatccagcggcaacgattcgaggaagaggttttttttgtatgatcccactctggttatctttttgatgtggtaaaatttgtctcaaatcttcgaagtagaattaaggattttagaatgactattatgtgctattg

SEQ ID NO: 220481 - DNA, 244 bp, Gossypium hirsutum
ggggggtatcagtaaggaattggaatgtaataatattgattcatataggaggaaaaggttctctattgattcaaatgctgtacctatgggatagggatagagaaagaggaaaaaccgaagatttcacatagtgcttttgatcgaaaaatcaatctgatttatttcgtacccctcgctcaatgagaaaatgggtcagattctataggatcaaacctatgggacttagggaatgatggaagggaat

SEQ ID NO: 220482 - DNA, 294 bp, Gossypium hirsutum
aagggctcaggttgcatatgagaggaagattcagcttaacaagcttagggtaaaagccgaggggacggctgaagagaaactcggctctcaactcgacatccttgccccagttaagtactgaatttctagtggctagctagtttcatagaattttgttaaaggttattggtttcactatttagttccttttgagatgtggaggttaaaatttttgatgaatcttgggttgtccctttttcttaatgaactttttggtgtaggatcattcaaatataattcatatatgccttttat

SEQ ID NO: 220483 - DNA, 354 bp, Gossypium hirsutum
  unsure (1)..(354): unsure at all n locations
cgnntccgcagaaaaaagttgggaaaggggcttggtttggtcaagagagaagggtcttttggcacctacaaagagataaagatgttatacatatgagccactgtgcgaattcaaggggcttgtaaccatatttattcgtggaggaaacaagatgatgatagaggagacaaagcgcaatatccatgatgcactttgtgtggccaggaatctaattcgcaacaattttatcgtctatggtggtggcgcaactgagatttcttgctcaattgcttgtgaagcagcggcagataaatatccaagagttgagcagtatgcaatccgagcattcgcggatgctttagatgctgtccccat

SEQ ID NO: 220484 - DNA, 394 bp, Gossypium hirsutum
cagaaaagttgggaagggctggtttggtcagagagaggtcttttggcactacaaaagataaagtgttatacattgagcactgtgcgaattcaagggctgtaaccatatttattcgtggaggaaacaagatgatgatagaggagacaaagcgcagtatccatgatgcactttgtgtggccaggaatctaattcgcaacaattttatcgtctatggtggtggcgcagctgagatttcttgctcaattgctgttgaggcagcggcagataaatatccaggagttgagcagtatgcaatccgagcattcgcggatgctttagatgctgtccccatggctctggccgaaaatagtgggctccaacccattgagacgctatcagcagtgaaatctcaaca

SEQ ID NO: 220485 - DNA, 419 bp, Gossypium hirsutum
  unsure (1)..(419): unsure at all n locations
ggaaanccgcggcgaccttgcgtccgcagaaaagttgggaatggctggttagttcacaatgaggtctaccggcactacaaaagatacggtgttatacattgagcactgtcccaatacaagggctgtaaccatatttattcgtggaggaaacaatatgattattgaggagacaaagcgcactatccatgatgcacttcgtgtggccaggaatctaattcgcaacaattttatcgtctatagtggaggcgcaactgatatttcttgctcaattgctgttgaggcaacggcagataaatatccaggagttgagcagcctgcaatccgagcattcccggatgctatagatgctgtccccatggctctggccgaaaatagtgggctccaacccattgagacgctctcagcagtgaaatctcaac

SEQ ID NO: 220486 - DNA, 356 bp, Gossypium hirsutum
acgggttgatcttctttcaacctctcctaataaccgctcggatttttctcaggggggagaaaaatggggctgtctttcaccaagctattcagccggttatttgccaaaaaggagatgcgtatactgatggttgggcttgatgctgctggttaaaccaccattctatacaagcttaagttgcgagagatagctactaccatgaacaccatcggctctatgaaagaaccgtgctatactatgactatatcttcactgtttgggatgatcgtcgccaatacaagatccgaccattgtggagacactaatttcaaaacatgcaacgacttattttcgtgggagatatcaatgatcgatac

SEQ ID NO: 220487 - DNA, 401 bp, Gossypium hirsutum
cacaactggccgccctcgtcgttgtggttttctcgatttaattgctctcaagttctgttgtgagattaacggcttttcttctctaaacctcaccaaattggatgttttatctgatcttccggaaattaaattaggcgttgcttataaacatgttgatggtacaccggtggaatcgttcccagctgatcttcagcttctcgaacagttgaaggtcgaatactaagttttgcctggatggcaatccgatatttcttctatcagaaattattcggatcttccgaaagctgcacgacaatatgtcaagaggatagaggaacttgttggtgtgcctatccattacatcagtgtcggacctggtcgtgatgctctcatatacaaataaataatcacttttttttttt

SEQ ID NO: 220488 - DNA, 257 bp, Gossypium hirsutum
cccacgcgtccgcaatgccaagaattgacagtgaaggggtgatgtgtggtgccaatttcatggccgatgctcagtcgagaacaagtaggatgccccgagttggtagcgaagccaattgggcactgcgaggctccaaagcttgaataattcaatactaaatgacccacattttattatttgtgttttttttttttggggggggtgtttatttcctcgtttatgaaattgtaaaatgccttgtaaaaggcatgtttgat

SEQ ID NO: 220489 - DNA, 301 bp, Gossypium hirsutum
gggaaatgcatatgcacaggttgctattagcactgatgatgtatacaaaagcggcgaggttgtggaacatgttatacaagagcttgggggaaaggttactcgtaaaccggggccaattcctgggatcaacactaaaattacctctttcctagatcctgatggctggaaaactgttctggttgacaatgaggactttctgaaggaactcaagtaggcactaagaaagagtaatgctactatatgaataaatcagtatcttgttgtgtaagcgagcagatatgtctgttaaaatatggtgttt

SEQ ID NO: 220490 - DNA, 394 bp, Gossypium hirsutum
cttttgcttgatgtaactcctttgtcacttggtattgagacactaggtggaatatgcactaggctaatcaaccggaacacaaccattccaacaaagaaaagtcaggtgttctctactgcagctgataaccagactcaagtaggtatcaaggtgcttcaaggtgagcgtgaaatggctgctgacaacaagcttttgggtgagttcgacttggtaggcattccccctgctcctagaggtatgcctcagattgaggttacatttgacattgatgccaatggtattgtcactgtttcggccaaggataaggccaccggtaaagaacagcaaattacgatacgttcctctggtggtctctcggaggatgagattgagaagatggtcaaagaagctgagt

SEQ ID NO: 220491 - DNA, 389 bp, Gossypium hirsutum
caaatcttttctgactgtgagcgttataaatataaatgcaaatatgagtgtaatgtttgtacttgcgatcatacacatgatatatttcatacattccacatatattatatggaatatggagatagataaaatgtcatgtgagtcactcaacagaatagaaataacaattccatcattattagatcgattcgaaggattcgatgaagaatgaaaaaagaatgggattattttgagaaatgggaaattcaaaatgcttggggatgaaaatggcgaaatgtctacaatacctgggcagaatcagatacaatttgaaggaattagtgggttcatggatcggagcttaacagatgaactgtataagtttacaaaaattgaagatacagatcaag

SEQ ID NO: 220492 - DNA, 352 bp, Gossypium hirsutum
gagtgttttggttgttaaccactatgcggttatggtatcatgtcgttgcaactacgcagaatcaagattgtttttcaagcagccaacaagttggagaccacgagtttcaagggatcttatgatctctgtagcatctgagatgtcaggacaatattctggacccaatgaaggaatcactccgcttccagttcaggttttaactcttcaggcttcaaatttgtctgatgaagatctaactatgacagttcttgctccaacatccttaacctcacctccatctgtggtgtccttgagttcttctccaacaacaccaatgagcccatttgttggtttctctgagcttgcaaggaaa

SEQ ID NO: 220493 - DNA, 269 bp, Gossypium hirsutum
  unsure (1)..(269): unsure at all n locations
gaggccctcctacttgctaagttcaaattctttggtcttcaaaagattattgtcagcaggtagtggggtttcacaaaattcaaccgaactgattcttttaaatataagtcagagaataacattgtccttgatggagttaatgctaagcttcttggatgtcatggacctctagctaattattagccaagaagagcattcctacatgctgccagataagatctgaccatactgtaaatcctgaactagctggctgnctcgatatttatctc

SEQ ID NO: 220494 - DNA, 396 bp, Gossypium hirsutum
cataaatgaggacatcttccgcgacatgagcgatttgcttgtgaaatacaatccgggtcataagaaagtcccggttcttcttcacaaccggaaaccaattgtcgagtctcttgttatacttgaatacattgaggaaacttggaagcataatccctatttgccacaagatccttatgacaaagctaccgctcgattctggatcaagttcatcgacgaaaagtgctttcctaccctttggctagctgcatggagcgccgagaatgagcgagaaaaagtgacgaatgaagcttgcgagtatctgaaaacgcttgaaagtgcgcttaatggaaagaaattctttggtggagaaaccattggaatggtagatattgttgctagctctgttgggtatttcat

SEQ ID NO: 220495 - DNA, 396 bp, Gossypium hirsutum
ggagaggtacggctttgacggaccatttactattaaccctctcatctttgacagcgcttactttaaggagcttttgtccggagagaacgaaggccttcttcaactaccaactgacaaagttctcctgtcagatcctgttttccgtccattggttgaaaaatatgctgccgatgaggatgccttctttgctgactacaccgaagctcacctgaagctctctgagctaggatttgctgatgcataagctgatggttgcggaatagaatgaagccaacaacatttgcctccacaaaatgaatgtattgggttttgtcatctctcagtagattatgggcagttgttgcttgatgaatatgggtatttgcagttttattttgttgaacatgttgaattgag

SEQ ID NO: 220496 - DNA, 390 bp, Gossypium hirsutum
agattgagcgtgagagacgtcgtcgttttgctcaagctcaggctgaatatgagaaggcgaagaagcaggagcaatcatcctccagtcgaaaacctggaggcatgcctggtgggtttccaggtggaatgcctgggggttttcctggaggtatgcccggaggtatgcctggaggtatgcctggaggcatgccgggtggcatgcctggtggcatgccgggtggcatgcctggtggcatgccgggtggcatgcctggaaatgttgattttagcaagatattgagtgatcccgaattgatggcagcatttagtgatccagaagtcatggctgctcttcaagatgtaatgaagaatcctgctaatcttgcaaagcatcaagcaaatcccaaggtgg

SEQ ID NO: 220497 - DNA, 388 bp, Gossypium hirsutum
gttggatataagtggggtacaaacttatgtgataaatagtgccagggttctattcttgaatgaaaggcctcaaccaaaatctgggaaattaggagtttctcatttatgtgaaatctgtggaagaacactcttggacccttttcgtttttgctcattgggttgtaagcttgtaggaataaagaggaatattgggaatgcaagttttaacatagaagaagaaggcataataatatcgaaggaagaagaagaagaagaaatgcgtgaagggtcacaacgagacattaacccttcgacgcctcccccacctccttcaaatgcaaggcgaagaaaaggaattcctcaccgagcaccgtttgggtcctagaacccaactactatcaactatttt

SEQ ID NO: 220498 - DNA, 396 bp, Gossypium hirsutum
gctttacagaagctaaagaaatcttggttggtgggaagacagacgcctggaagatggcatcatctgaatcagattctctcaacagatgggctgaaaaatcccgtttccgcatcggcgactctctcgtgtggaaatatgatggtggcaaagactcagtgctgcaagtgactaaggaggcttatgcaagctgcaatacctcaaactcaattgcagagtacaaggatgggaacaccaaggttaagcttgataggtcagggccattttacttcagtggagcaaagggtcactgcgagcaaggccaaaagttgcacgttgttgtattgtctcaaaagcataggtacactggaatctccccagcaccttctccggcagaaattgagggtcctgccattgctc

SEQ ID NO: 220499 - DNA, 400 bp, Gossypium hirsutum
acttccctcaggtttcatgttggttccttatgcagccttctttgtcccatctgggggacggggtaccggtggtggcaccgttgccaaggacgcaatcggaaatgatgtaattgccgaagaatggctcaagactcatggccctggggaccgaaccctgactcaaggattgaagggagacccaacctacctagtggtagagaaggacagaactcttgcaacatatggtataaatgctgtgtgcacacaccttgggtgtgttgttccgtggaatcaagccgagaacaagttcatatgcccctgccatggatcccaatacaacgatcaaggaagagttgtgagaggacctgcccccttgtccttggcattggcacacgctggtgttgaagacgggaaggtagta

SEQ ID NO: 220500 - DNA, 421 bp, Gossypium hirsutum
gataaatttacgtcccaagatctacatcgataacaaacagcatggtccactactcgttcagagcgcagattaactagagtaggcatatagtctccatgatgctctgcaaactgtgatagtgatctctgagggttactgtgaattccagagcgtaccgtgcaaattgattaaatcgggatgtcataataagtagttaggattcgagctagtgctttgcaatatattgtatgcactcttgacccacaatcaactccttggagttcccgtggaatcaagccgagaacaagttcatatgcccctgccatggatcccaatacaacgatcaatgaagagttgtgagaagacctgcccccttgtccttggcattggcacacgctggtgttgaaaacgggaaagtagtatttgttccatgggtggaaac

SEQ ID NO: 220501 - DNA, 394 bp, Gossypium hirsutum
gaacaactgagcaagttaaggctgcactagctgcctgcaatgatttgaagttggatggccttgtaattattggaggtgtaacatcaaacacagatgctgctcaacttgctgaaacatttgctgaagctaaatgtccaacaatggtggttggtgttcctgttacactgaatggagacctcaagaatcaatttgttgaaaccaatgttggttttgatactatatgcaaggtcaattcccaactcatcagtaatgtctgcactgatgctctctctgcggagaagtactattattttatccgtcttatgggaaggaaggcatcacatgttgccctggaatgcaccctccaatctcatcccaatatggtaattcttggtgaagaagtggctgcatcaaa

SEQ ID NO: 220502 - DNA, 389 bp, Gossypium hirsutum
atttctcaaagaatacatggccgtcgatgatgttgtaggaactgaattgcacactggtgggaaccgattcacaggcttgttatccagctccggtttgctggtaaagcacaaagctttaaaggcatactttggtgataaaaagccagatgttggcctcggaagttcaagcctccatgaccatcactttatctccctttgcaaggaagcctatgtggtgcacaaggaagatggtagaaacaatcaaagttgtttgatgccaagggacaagtacccgaagccacttatatttcatgatgggagactagctttcttgccaacaccatttgcaacactttgcatgttcttgtggcttccatttgggatagttctcgctatatttaggattctgg

SEQ ID NO: 220503 - DNA, 385 bp, Gossypium hirsutum
atttatcaaagaatacatgtttgtcttttatgtcgtaagaactgaattgggcacgggggggaaccgattcacatgcttgttatccagctccggtttgctggcaaagcacaaagctttgaaggcatactttggttataaaaagccgcatgttggcctcagaagttcaagcctgcatgaccatcactttatctccctttgcaaggaagcctatgtggtgcacaaggaagatggtagtaacaatcaaagttgtttgatgccaacggacaagtacccgaagctacttatatttcatgatgggagactagctttattgtcaacaccatttgcaacactctgcatgttcttgtggcttccatttgggatagttctcgctatatttaagatt

SEQ ID NO: 220504 - DNA, 311 bp, Gossypium hirsutum
accgatccaatcaatcgcttcaactatctcaccaaacacatatccaatggctccgatcgctgtcggcgacgtgttaccggacggactctctcctacttcgacgccgatgataagctccagcaggtgtccgtacattccctggctgcggaaaaaggtatcatctttggcgttccgggcctttacccctacttgcagcttgagcatgttcctggattcatcgaaaaacagggtgagctgaaatcagggcgttgatgaaatatttgcattagcgtgaatgatcccttggatgaagcatggaccaaaacttaccc

SEQ ID NO: 220505 - DNA, 371 bp, Gossypium hirsutum
gttgctgataatgaatggcttgccaattaactagctaaagaaacatgggggaagcggaaggatgctgaaaaggcatcatttgaggaggcggagaaaaagagagaggcggaggaattatacgatgtccctctttacttcactgctgcagatgaagacaattcctcacatgctgactggaacgagtctttatcaccatactaacatctacgatcaggacctggaacaagcacataatgagctctaggcactgtaatatgtcgatgacaaatcgatttgaagataaatacatctaaatattttactacagtttatttaaaaaacaaacctagtacataggagatgtcagttacagaaaaaatgaattgaatgct

SEQ ID NO: 220506 - DNA, 342 bp, Gossypium hirsutum
gacaattcggccatgcctagttgaactaagtgaggatccagatgttgatgtcaggtgtttcgccacccaagctctacaatcaagtgatcagcaaatgatgatgtctagctagaaccctacattacttgtatcacacttctacatcctttcctttttcctttttaaatttattttaccttaaagcttttgttttgtttttttccttattttaattgtatatctttttttcagattgaaacactcctttgctatatatgtaatttttctaaaattggggaaaaaaaaaaaaataaaccaaaaaaaaaaaaaaaaaaaaaaaaaactaacaaaaaacaaaataaa

SEQ ID NO: 220507 - DNA, 391 bp, Gossypium hirsutum
ccacgcgtccgaatgaacaaaccgaaaacatgaaacagatcctagatttactgtcaactcctattggatctgcggctggtgttgacgaggatgaattggaagcaaaactcgaagagcttgaaggtgctgagtaagaagaacagcttgtccagcctgcatcaacagctcctgcagcaccaattcatgtgcctgctggaaggcaaccggctcgttctattcctcaaaagcacacatccgatgtagatgcactcgccacattgcaggctgagatggctaattaaggcttacagtatagaactgatttttttttttgcggtgcctacagaaaatagacggcctatttgtattacttaaagaacgcattttatgttttacagacaatttcaaaaat

SEQ ID NO: 220508 - DNA, 294 bp, Gossypium hirsutum
aagggctcaggttgcatatgagaggaagaagcagctgaacaagcttagggtaaaagccgagaagactgcagaagagaaactcggctctcaactcgacatccttgccccagttaagtactgaatttctagtggctagctagtttcatagaattttgttaaaggttattggtttcactatttagttccttttgagatgtggaggttaaaatttttgttgaatcttgggttgtccctttttcttaatgaactttttggtgtaggatcattcaaatataattcatatatgccttttat

SEQ ID NO: 220509 - DNA, 385 bp, Gossypium hirsutum
cccacgcgtccgggaggggcataaaataattctagtggccacagatttggttggagggggaattgacattgaacgtgttaacattgtcatcaactacgatatgccagattctgctgatacatacctgcacagggttggtagggctggtaggtttggtaccaagggtctcgcaattacatttgtttcatctgcttcagattctgatgtgctcaatcaggtccaggataggttcgaggtggatataaaggagcttcctgagcagattgatacatctacatacatgccatcataatgaagttgcttacagtcggcaatactggagtcacgcctaaattagcggggttttcggaggccatgtggcttctgactgctgtttaaaagagtg

SEQ ID NO: 220510 - DNA, 390 bp, Gossypium hirsutum
tttcaatctttgttacacaaattatcttcaaagcttgaaaatgaagaaagtggtgctgaaattggattttcacgacaacaaatgcagacagaaagccatgaaaacagcctctggtctttcaggggttgaatcagttgccctggacaaggaccaaaaactcacactcacgggagacgttgatccagtcgtggcagtaaggaaactaaggaaggtatgttacactgaaatagtctcggtcggaccggcgaaagagccggagaagaagaaagatgagcccaagaaagacgaaccgaaaaaaccggcggatacgagcaaagatccgcccaaaggcgcggtggtacagtacgtttatcacccctcaatgccccagtactacccgccggtacccga

SEQ ID NO: 220511 - DNA, 391 bp, Gossypium hirsutum
ccaaaaaacacttcaaccctctagccatgacattcaagcgtcggaatgggggccggaacaaacatggccgaggccatgtcaagttcatccgctgctctaactgcggcaaatgttgccctaaagataagtcaatcaagaggtttcttgtgaggaacatcgtggagcaagctgctgtcagggatgtccaggaagcctgcgtctatgacacgtacactctgcccaagctgtatgtgaagatgcaatactgtgtttcatgtgcgatccatacccatgttgatagggtccggtcccgcactgacaggaggaaacgtgacccacctcagcgcttcattagacgcagggatgatatgccaaagcctggtcagcctgttcaggctcctcgacctggtgt

SEQ ID NO: 220512 - DNA, 273 bp, Gossypium hirsutum
gggggacccacgcgtcccgtaaatcgctagcgattattatagtgtatccattcttacccacacgaaaatgcgagggcgtggctattttataacgtcacctaacttcaattcacctgccgtctctctacaacttcacaactcacaaaaccctgtctgtacccaacttaatagatttgatacacatccaccttttgacagctgacgaaatagcccccaatcctgaacctatcgttcttcccaacacaagaacaaactttatggctaatgggacac

SEQ ID NO: 220513 - DNA, 357 bp, Gossypium hirsutum
cattatgctgatgttcctcacaaaagtctaacagatgagaacgctggctagaactggggtccgttcaaaagaaatgggttcaaatttcccggaggaggaactatgttccctcaaagttccaattcctttattgattagcttgcctctgtcattccaattacagaccgttttgtcataacaacatttgattcttgttgtggagttgccaattggggtgcctacattcttaacagaaatgttctggctatttcttttgcacctctggacaatcattaagcacaagttcagtttgcactggaaccaggtgtgccttctgtaattggtgttcttggatccaataatgtttcatatccaaca

SEQ ID NO: 220514 - DNA, 391 bp, Gossypium hirsutum
aagagatgcggtttcacgatccaccatacaggtatatcctaaatcatggagtgctatttacatggctcttgataatgttggaatgtggaatgtgagaagtgagttttgggcaaggcaatatcttgggcagcaattttacttgagagtttatacacctgtgaactcactcagggatgaatatctcattccaaagaatgctttgctttgtggcagagcccaaggaagaagcacaaggcctctttgaaacatttccagtagccgaaattgttgagaatcaaccattagtcaattataaaatatgcctcaattcttttcattttttgtttcaccagaatctgtatttggttttgtatctaaagaaatgaaaataattgtattaaattagaacatt

SEQ ID NO: 220515 - DNA, 397 bp, Gossypium hirsutum
gcagggccaatgtaccaggctgggaccttgagtgggaacccattggcgatgacaggcgggatacagacccttaagcggttgaaagagccaggaacatacgaatacttggataagatcaccggacaacttgttcaaggcattttagatgctggaaaaaagacaggacacgcaatctgtggggggtatatcaatgggatgtttggatttttcttcacagaaggacctgtttacaactttgacgatgcaaagaagagtgatacggcaaaatttgccaggttttataggggaatgctggaggaaggtgtatacttggcaccttcacagttcgaagctggatttacaagcttggcacatactcaggaagacatccaaaagaccattgcagcagctgagaaag

SEQ ID NO: 220516 - DNA, 343 bp, Gossypium hirsutum
agaagatgctggcaaaccctccagagagagctgggacagtaaactggttaatacatgcgggtgttgaaattttggtgctaagatgtctgacgtcatccaaagaaagtgcaaaaatgtgattagcaagcttcagaggagaatagataaggagggtcaacatatagtaccacttttgacggacttgtggaagagaattgaagactctggttacacaggtggaagtggaagcaatcagttggatttccggaagattgatcagcggtgtgacagattagagtacagtggagttatggagcttgtttcagagatgcaactagttttaaaaagtgccattcatttttac

SEQ ID NO: 220517 - DNA, 397 bp, Gossypium hirsutum
gcagggccaatgtaccaggctgggactttgagtttgaacccattggcgatgacaggcggggggcagacccttaagcggttgaaagagccaggaacatacgaatacttggataagatcaccggacaacttgttcaaggcattttagatgctggaaaaaagacaggacacgcaatctgtggggggtatatcaatgggatgtttggatttttcttcacagaaggacctgtttacaactttgacgatgcaaagaagagtgatacggcaaaatttgccaggttttataggggaatgctggaggaaggtgtatacttggcaccttcacagttcgaagctggatttacaagcttggcacatactcaggaagacatccaaaagaccattgcagcagctgagaaag

SEQ ID NO: 220518 - DNA, 398 bp, Gossypium hirsutum
gtcgaagttgcggcatatcctttttagtactccctactgtaaagatgaacaaggagaggctcatgaaaatggccggtgcagtccgcaccggcgggaagggtagcatgagaagaaagaagaaggctgtccacaagacaactaccacagacgacaaacggttacaaagcaccctcaagagaataggagtcaatgctattcccgcaatcgaggaagtcaacatcttcaaggacgatgttgttatccagtttattaatcccaaagttcaagcatctattgctgccaacacctgggttgtaagcggttctcctcaaacaaagaaattgcaagatattctccccggaatcatcaaccagttgggacctgataacttggacaacttgaggaaattggcagagcaa

SEQ ID NO: 220519 - DNA, 414 bp, Gossypium hirsutum
gctgagtgtcatattccgtttcaaattgattcatccaccaacgatgaagagacctgcctggagggtggcgtttattctgtcgatggagatgggaccgtaccagttctaagtgccggttttatgtgcgccaaagcttggcacggtaaaaccaaattcaatccttctggaatccgaacataccttatggaataccgtcactctcctccgacaaccttactggaaggacgcggcactctaagctgtgctcacgtcgatataatgagaaattttgcattaatcgaggatgttataaggatcgcggctggggcttcgggtgaagaactgggaggaaatcgagttcattcaaatatcttcaaatggtccgagaagatcaacttgcaattataagcctgcactgatacatacatactctcc

SEQ ID NO: 220520 - DNA, 389 bp, Gossypium hirsutum
caaaaatgctgcatgtgagggttccttcaagtccttttgcctcctgaatgcatggggtgatctcatgatgcttccatctgagatgcttgcggataggtccacaggaaaagagccccaagttcagcgtatccctcatcatcagggttcttaacgattttgtaccttatgagttcaaccctaatccagcttcacaggccgtttttgaagcattggaaaaggatctttctgagggtggggaagagtctatcacaaactatccatgtatggctactgctattgtctattagccaccttccgcaacttccataaccaacattataggaagccaagtcatggaaaggagtaagtcattggtacttagaaaatcatacactagtgatgatgagctt

SEQ ID NO: 220521 - DNA, 423 bp, Gossypium hirsutum
  unsure (1)..(423): unsure at all n locations
ccaaaagggtggtgagaccagcacgaacagcatagcatctatctttgcttggacgcgtgggcttgcacacagggcaaaattggatgacaatcctaaactcttggatttcactgagaaactagaggcagcttgtattggaactgtggaatctggaaagatgaccaaagatcttgcactaatcattcacggctctaagcttgctagggacaagtacctgaatactgaggagttcattgatgctgttgcagcagatctaaaagcaagactttcttaagcataaatttgaaaatggtcgaaaatggaagggggtggttttgcgggtttgcaggaaaaataataataaaaagcatcantggaggtggcgtggatgaggtgaggatggcggttgtcaatagatgaatttaatcaccattttatgagata

SEQ ID NO: 220522 - DNA, 354 bp, Gossypium hirsutum
  unsure (1)..(354): unsure at all n locations
tgtggttttgcaggccgtggctatgtacaaatcaaaggaccccaagacatcagatgaagaggaaatgctagagaatttgtttgattgcttgtgttgtttattgatgccattggagaacaaggagaggttcgttaaggccgaaggagtggagttgatgatcattattatgaagcagaagaaatctgcctatgcctctgccatcagggcacttgatttttccatgaccaagtatccccctgcttgcgagcgatttgtggatgttctgggattgaagactgccttcgctgctttcatgggtaagatacctataagtaagaagaacangaaggaaaggtaccaagaggagttggaaga

SEQ ID NO: 220523 - DNA, 395 bp, Gossypium hirsutum
cccacgcgtccgattacaaatatgttatttcccagtatgtggaagggtctagtagccatttttatggccggaattctcgccggatcagtgtcggtaaaggctcaaatggtggctgatatagtaacagacgagttctttgatgggattttgaatcaagcagatgccagttgcgaagggaggaatttttattcaagggctgcatttcttgaagctctcagttcttttactcaatttggtacagctgatgatactaggcgtgaggttgctgctttctttgctcatgtcacccatgaaactggacatttttgctacatagaagagataaatggtgcaaccagggactactgtgatgagaccaacacccagtatccatgcaaccctgataaaggctacta

SEQ ID NO: 220524 - DNA, 328 bp, Gossypium hirsutum
agaagaggtacgccgttgcctcggcaatcgccgcttctgctgttccttcactcgtgatggcacgtggtcaccgtatcgagtctgttccggagatgcctctggtcatatcggatgctgcggagagtgtggaaaagacctcggctgcaattaaaggttttgaaacaggtcggagcatatccggatgtggaaaaggctaaggacagccaagggatccgacccggaaaagggaaaatgaggaaccgtaggtacatttctcgtaaaggtcctttgattgtttacggaactgaaggggcaaagcttgttaaagccttccgtacatccctgagtc

SEQ ID NO: 220525 - DNA, 359 bp, Gossypium hirsutum
catcattcaatccagttacagctctcaatcttctcatttcaatcaacttgtacggaaaaggaggcaaccaagaaatcaactgagattcatgagaaaccggtgtttgttgcatcgaggctaaaggaagaagctattgcacaattaaggttggcgatggcagaaaaagcttatgctgaagaggcaagaaagcaagcaagaaggcaggttgagttagcttagcacgagttggccaaggcaaagagaatcatgcaacaagcacaagctgaatcagcaaaggctcaagctttaaagaaccatgcagtcaagcaaatcaactccactattttttaagtcacttgccatgcttgtagacaccgatt

SEQ ID NO: 220526 - DNA, 395 bp, Gossypium hirsutum
cccacgcgtccgaacggcgagcgtctcggcacttaccgtggccataacggcgctgtttggacttgcgatgtctcaagggattcgatgaggcttataactggaagtgctgatcaaacggtgaagttatggaatgttcagaagggaactcaattatatacgtttaattttggttcaccggcgaggtcggtagagtttgccattggggataaacttgctgtcattaccacggatcccttcatggaattgacatccgctattcatgttaaacgcattgccggagattcaaccgaacaaaccgaggaatctgtgcttgtcatcaagggtcctcaaggtagaataaatagagctgtttggggacccctcaataggactatcattagtgctggagaagatgc

SEQ ID NO: 220527 - DNA, 418 bp, Gossypium hirsutum
cccacgcgtccgtttggatctatcattgcaatcaagggagaaaaagaaaaaaaaaccaagcgatgtttttatttgattggttttatggggttcttgcatctttgggtttgtggcaaaaagaagccaagattttgtttttaggacttgacaatgctggcaagaccactcttcttcacatgttgaaagatgagagattagttcaacatcaaccaacccagcacccaacatctgaggaattgagtataggcaaaatcaagttcaaagcttttgatttgggtggtcaccaaatcgctcgccgtgtctggaaggattactatgctaaggttgatgcagtggtatatttggtggatgcatacgacaaggaaagatttgcagagtcgaaaagggaattagatgcgctgctttcagatgaagcatt

SEQ ID NO: 220528 - DNA, 355 bp, Gossypium hirsutum
gccacgctttcgtatcaatctatcattgctttttatggataaaaacaaaaaaaaaccaaaccgtgcttttgtttgattggaattatgacgatctcacatctgtgtgtttgtggcaaatagaaaccaagattatgtctctaggacttgacaatgctcacgagaccactctacttgacatgtagaaagactagagcttagttcaacattagccatcccagcacccaacatatgtggaattgagtataggcaaagaaaaatacaaagcttttgatttgagacggcacctattcagtaaccaagattggaaggattactatgctaaggttggtgcttttatatatttcctggatgcata

SEQ ID NO: 220529 - DNA, 330 bp, Gossypium hirsutum
ggcacttgacaacgtaggaatgtggaacttaaggtcggagttttgggcaagacagtatctgggacaacagttttatttgcgagtatacaccacctcaacttcgctaagggatgaatatccgatccctaagaatgcactactctgcggtagggcaagtggccgacacacccgacccctctaacccagcatataataaaatctccaggtttgggtttaggattgaatagcagagttttggcattaatgttgctagtgtgaattatggaggaacttttatgcttttaaccttaaattaatagacctcaactcgaggtcgcattttttttttct

SEQ ID NO: 220530 - DNA, 233 bp, Gossypium hirsutum
  unsure (1)..(233): unsure at all n locations
gacagtttacaacctatgtatcttttactttacttcggagttntaggcaagacagtgtgtcgaacaacattaatatttgcgagtatacaccacctcaacttcactaagggataaatatccgatccctaataatgcactactctgcagtatggcaagttgcctacacacccgacccctataacccaccatataataaaatcttcacacttttttttcatgattgaatagcaaat

SEQ ID NO: 220531 - DNA, 391 bp, Gossypium hirsutum
atttgcctccaactcacccaattagacttggcctggctttgaacttctcagttttctactatgagatattaaattctcccgagagggcttgtcatctggctaaacaagcatttgatgaggctattgctgagcttgatagccttaatgaagaatcttacaaggatagcacccttatcatgcagcttcttagggacaacctcaccttgtggacctcggatctgccagaggaaggaggtgagcaatcaaaagcagatgaacctcaggctgagagttaattggatgaaagagtattcttttaagactgggcttgtcgagataggaaaggggcttgctgctagagtgacctgctttcaactcatggtagtagtaccaggatttgttacctatgaca

SEQ ID NO: 220532 - DNA, 407 bp, Gossypium hirsutum
cccttctctccgtttcttccttcccgacggagattcatcaagtgagccaatgctattattccccaaaagaacatatcagcctagtaccatcaggcgcaagagaaatcatggattttttgcccgcaaggcaacgaagggcggtagaagagtcattgctcgaagaatagcaaagggtcgttcaagaattaccgcttagaatctggattttcagtgatgcgttcatcagaatcaaaatccggaagctgccttaaatagggtacaactaaacaaaattcgtatcaacttttttggttaattcaataagctctggctattctaaagacactctttggaggaatttttttctttcttcaaatagaattatgttcacttttagatttctttttgatacataaaacttgcaagaa

SEQ ID NO: 220533 - DNA, 391 bp, Gossypium hirsutum
gcaaaattatttcgtgcaaggtcatgcgtgaccctagtggagttagtaaaggctctgggtttgttgcattttctacacctgaagaagcatcacgagcccttgctgagatgaatcataaattggttgttagcaaaccactttatgttgcacttgctcaaaagcaagaagagagaagagcaaggctacaggctcagttttcacaaatgagacctcttgctatcccctcggttgctcctcatatgcccatgtaccctgctggtgcaccaggtcttggccaacaatttttatatgggcaagcaccctccactatcattccttaaacctggtttgggtattaacaaccacttggttcttgaatgaaggcccgggggccttctgtaccaaaattctt

SEQ ID NO: 220534 - DNA, 258 bp, Gossypium hirsutum
gatcaagattatgatgcaaacgattctaaatctcacgagggaatggacttgacaagggtgtgaactagggcactaattgcgaaatatggactcgatgatacacactgtggacttcattggtcatgcattgtcacttcacagagatgaccgttacctgtatgaacctgcattggatactgttaaaaggatgaagctttatgcggagtctcttgcccgttttcaaggtggatctccatacatatatccactgtatggatt

SEQ ID NO: 220535 - DNA, 323 bp, Gossypium hirsutum
  unsure (1)..(323): unsure at all n locations
cttgtggtttgccgacattcgcaacttgcaatggtggacctgccgagattatcgttcatggtaaatccggcttcaacattgatccttaccacggcgaccaagctgctgagatccttgtcgacttctttgagaaatgcaagacagatccatcttactggaccaagatctccgagggaggtttgaaacgtatcgaagagaagtacacatggaaaatttactctgagagactattaaccttgaccggtgtctacaggttctggaagcatgtgttcaacctctaccgcctcgagagccgtcgntaccttgagatgttttatgctctt

SEQ ID NO: 220536 - DNA, 367 bp, Gossypium hirsutum
actgcccaaagcatgactaaacgcccaatgaagggaatgcttacgggccctgtcaccattctcaactggtcctttgtcagaaatgatcaaccgagattcgaaacttgctaccagattgccttggccatcaaggatgaattggaggatcttgaaaaagctggtttcaatgttatccaaatcgatgaggctgctttgaaagaagggttgcctcttaggaagtccgagcatgccttctaccaaaaatgggctgcccactccttcagaatcaccaactgtggtgtccaagactctacccatatccacacccacatgtgctactccaacttcaatgatatcatccactcgatcattgacatggatgccgatg

SEQ ID NO: 220537 - DNA, 347 bp, Gossypium hirsutum
atgagattgaagaaggcttgtctcatcgtggatttcaggttttgaggctaaatacttacacaactgtacctgttgatcatgttgaccatattgtcttggagaaggcccaatctgcgccggttgttgctgttgcttcaccttctgcggttcgatcttgggtcaatctcatttcagagcctgattcttggagcaatgcagtggcctgtattggagagacaactgcctccgctgcaaaaagattaggattgagaaatgtgtatttcccgatgcagcctggacttgatggatgggttggtagcatccttgaagccttaagggctcatgacaaattttaggattgaaagata

SEQ ID NO: 220538 - DNA, 338 bp, Gossypium hirsutum
actacgcgtacgctaagtcgaatcgtggagtgtagcagaatgcaagcaaaatgaggaccatggtttcttcagagacaatggacatccctgatggggttgatatacaaggtgaaggccaagatgatcgatgctgaatgtaccaggggtaaactcatcctgaacttcaagcaccttaacctcgattttcatcttatcaaggacgaggagagcgtgctaacgcaatctcaggatcgaggcttggattgactctagaaagactatctccgccatccgtactgctgtcagacacgttgagaatctcatcaccggcattaccaatggctaccgttacaagatta

SEQ ID NO: 220539 - DNA, 364 bp, Gossypium hirsutum
tggcccaactagtggacagggtaggggtgttttcacccttgccaaagacacaatctgaaatgatgtaattgcctaagaatggctcaagactcattgccctggggaccgaaccctgactcaaggattgaagggagacccaacctacctaattgtagagaaggacaaaactcttgcaacatatgttataaatgctatgtgcacacacattgtgtgtgttgttccgtggaatcaaaccgagaacaagttcatattctcctgccatagatcccaatacaacgatcaatgattaattttgagaggacctgccccccttttctttggcatttgcacacacttgttttgaagacaggaaggtaaatttttt

SEQ ID NO: 220540 - DNA, 420 bp, Gossypium hirsutum
ggtgaacgtacctaagacgaagaagacttattgcaagagcaaggagtgcaggaagcacactgtgcacaaggttacacagtataagaagggtaaggatagtttggctgctcaagggaagcgacgttacgatcgcaaacaatcaggttatggtggtcagaccaaaccagtcttccacaagaaggcaaagaccaccaagaagattgtgctaaggctgcaatgccagggttgcaagcatgtctcacagcatccgatcaagaggtgcaagcactttgaaattggtggagacaagaaggggaagggaacatcacttttctagatgtgatgatattcatgtcaaattttatgttatgggtttttacttggaacttaacgcagaatggagttttgttaagtttggtattagtattctaatgttgtttt

SEQ ID NO: 220541 - DNA, 165 bp, Gossypium hirsutum
  unsure (1)..(165): unsure at all n locations
gcccgacccacgcgtacgggtttacgtacctaanactaacaattcttattgcaagagcaaggagtgcatgaagcagactgtgcacattgttacacagtataaaaaggataatgatagtttggctgctcaagggaagcgacgttactaacgcaaacaatcaggtta

SEQ ID NO: 220542 - DNA, 409 bp, Gossypium hirsutum
gatacaagtcagaaatctccaccagcagtgccctctttgttcggagaggatgtcgaattcgtaggggtggaattagaaggtacagagaaggcaatggaacaagctttaaaagaaggaatagttggggaagctggaccgttaaagaggaacattattccaaaggtaccacagaaggagaattcggacgacgatggggctggaatgaaggagttcaatgatgcaaactattggaaggttgatcaagaggtcgctgttttagagtaatggtggttgagtcgaaagtaagatcgacatcacagttttgttcgctctgagggctgaagcagcaaaactcacatgtatttggttcttctcgttgccctgatttaaggtaagggcttctcaatattatttatgttagtctttatgg

SEQ ID NO: 220543 - DNA, 392 bp, Gossypium hirsutum
ctcttcatctggtcctgcgtcttcgaggtgggatgcagatcttcgtcaagactttgaccggtgagacgattactttagaagtggagagctcggatacgattgataacgtgaaagcgaagattcaggacaaagaaggaattccaccagatcagcaaaggttgatttttgctgggaaacaactggaagacggaaggactttggctgattacaatattcaaaaggagtccactcttcaccttgttcttcgtcttcgtggtgggttctaagccttaaggtctcccttaatgtgggttttctggttttacgtgaaggactgtgccctgtaatggccttttaaataatttctagtctttgtttaccggttgcatctatgtatggtttctctttgaaaa

SEQ ID NO: 220544 - DNA, 386 bp, Gossypium hirsutum
acagcgtagaaaaatcagttctctaattgagaaagcaaggatagagaaagggcacgaagttctcgacattgggtgcggttggggaagcttagctattgaaactgtgaaaagaacaggatgcaaatatactggcatcactctatcagaacagcaactgaaatatgctcaagaaaaagtgaaggaagctggactccaggataacatcaaaatacttctctgtgactatcgccagttacctaaggaacaccaatttgacagaatcatatctgtagagatggtagaacatgttggtgaagaatatattgaggagttttacagatgctgtgaccaattactgaaagaagatgggctctttgttcttcagttcatatctatcccagaagagc

SEQ ID NO: 220545 - DNA, 409 bp, Gossypium hirsutum
tcttagccggtacttgccacagtgccaagatggtcaggacaatcattgttcgacggaactagccttcattatatcaagaaataccaaaggtatgagaagcgccattcaaacatccccgctcatatttcaccatgcttccgtgtgaaggaaggggatcatgtcattattgggcaatgcaggccgttgtcgaagaccgtgaggttcaatgttttgaaagtgattccagcaggatcttccggtggtgggaagaaagctttcaccggaatgtaagcttttctatggtagtccatggttataggaaccaatagagaagataatcaaagaaattaagttcttaaactgcatttagctttgaggatattttactgttagaattgttttctttttttgggttattttcttggtttga

SEQ ID NO: 220546 - DNA, 410 bp, Gossypium hirsutum
gcttgacgttcccctttgctcccttcttccataagccaaaagtttgagttaagaacaatggcttatgctacaatgaagccgaccaaacctggtttggaggagtcccaggagcagattcacaagatcaggatcactctctcctccaagaatgtgaaaaaccttgagaaagtttgtgctgatttggttcgtggtgccaaggataagagactgagggttaaggggccagtgagaatgcccaccaaggttcttcacatcacaacgaggaagtctccctgtggtgaaggaacaaacacatgggatagatttgagctccgtgttcacaagcgagttattgatcttttcagctcccctgatgtggtcaagcagatcacctctatcaccattgaacctggtgttgaggtggaggttac

SEQ ID NO: 220547 - DNA, 406 bp, Gossypium hirsutum
ctgacatggttaacaaatactattatctcgtgtccagcttttatgagtttggggggggtggatctttccattatgctcccagatggaatggggagtctctcaaagaaagcataaagcggcatgaacattttcttgctttacaacttgggttgaagcctggacacaaggtgttggatgttggatgtggaattggtggaccacttagagaaattgctcgattcagttccacatcggtcactgggataaacaacaatgaatatcaaataacaagagggaaggaattaaaccgcattgctggagtggaaaagacttgcaactttgtgaaggctgacttcatgaagatgccatttcctgacagcgcctttgatgcagtttacgcaattgaagctacttgccatgctccgga

SEQ ID NO: 220548 - DNA, 409 bp, Gossypium hirsutum
atgactccctgaagccagtgcttctcactggttatctgcaggatagtttctttgctagctttgctcttggttggctcatcacaaatggtgctggtcttgcatcgtacccaattgatactgtgcgtagaagaatgatgatgacctctggtgaagcagtgaagtacaagagctcactcgatgcattttctcagatcttgaaaaatgagggagccaagtctttattcaagggtgctggagctaatatccttcgtgctattgctggtgctggtgtgcttgccggatatgacaagttgcagctcattgtgttcggaaagaagtacggatctggtggtgcttaatatctctttttcattttttacttgtttatgtttagatggtgatgaaaaagctcactacccagaaatttatt

SEQ ID NO: 220549 - DNA, 340 bp, Gossypium hirsutum
gcggagcaaagcaagaaggagattaaggatatttttttcaggttctataagactttgctggtggctgatccggggaggtgcgaaccgaaaaaattcagtgggagaggggctatggcaagggtccagaaaagttacccctgaagaaattttacggtttgttttcagaaaactcagtttttgaaccttttttttcaagatttgatatggatatgaagttggttgtgattaattaactgttcctgctgtcagaaatttaaatgtttgtggtgtattaaacttaatgtagacattgtgattgaatctatacatgtgctatgcaaagatgattgtaggctctttt

SEQ ID NO: 220550 - DNA, 327 bp, Gossypium hirsutum
gtcatggacactcccacccctctcttctccttgctttgtttcttcctcttctccctcttcttaggtgaggagcaacatgttgttgaagggtcaagggtgtggacctttggtttcagacccaagatgttgtttgtgttcggggattcctacgctgatacagggaacaacaggaaagctttggcaagttcctggaaacttccttatggaattacattccctgggaaacctgctggccgtttctctgatggtcgtgttttgactgatttcatcgcttggtacttggggattaagacaccggtgccctacagatacaagaaagaactgggt

SEQ ID NO: 220551 - DNA, 423 bp, Gossypium hirsutum
  unsure (1)..(423): unsure at all n locations
tttaaatcagagttacttaatgtcaaccccccagacaaattcttcaatccctaaaaccccatttccagtttggacccctgaaaaccttaatctctcccgatacttctcggactcttctcctgattttttcaaaccatccttcatggaaaccgaaccggtgccggttccagagaatgttgtccccgttaagtcagaagaagattttgatgctgcacttagcaaaactaaagacgaatctgtgccggctgttttctatttcactgctacatggtgtgctccatgccgattcatcggtcctgtcatggacgagttagctcggagaactcctgaagtaacagtttataagatggatatcgatgaggaaggccttgcaagaaaactgaaagagctaaatattacagctgtgccaactgntcaatactt

SEQ ID NO: 220552 - DNA, 265 bp, Gossypium hirsutum
accgccataagcgaaatcaaaagccagcagcgctgcagcttaaagagcagtcgtttgacaattattcgccatgggtaaggttcacggatctctagctcgtgctggtaaggtgagaggccaaactcctaaagtggccaagcaagacaagaagaagaagccccgtggccgcgcttacaagcggatgcaatacaaccgccgcttcgtcaccgcagtggttggatttggcaaaaagaggggacctaactcatctgagaagtaagagatc

SEQ ID NO: 220553 - DNA, 354 bp, Gossypium hirsutum
caaaaataaagaagatcagctatcggaaaatgtctacgtcaccgtccgtcaccgaactccaggtggagaactttacgttccctccgacggtgaagcctcctggttccaccaaaaccctgttccttggtggagcaggggagagaggattggaaatccaagggaagttcataaagttcaccgcaattggagtttacctggaagatagcgccgtgaattgcctcggcgttaagtggaagggtaagagcgcggtggagttaacggaatccgatgagtttttcagagacgtggttacaggtgattttgagaagttcatacgggtgacaatgatattgccattaacgggtcaacaatact

SEQ ID NO: 220554 - DNA, 382 bp, Gossypium hirsutum
  unsure (1)..(382): unsure at all n locations
acgaccgcgataagcgaaatcaaaagccagcagtttctgtatctttaagagcattcgtttgacaaggattcgccgggggttaggttcacagatctctaactcctgctggtaaggtgagaggccaaactcctaaagtggtctcacttgacaagaagaagaagccccgtggccgctcttacaagcggattcaatacttccggagcttcttcacagcagatgttggatgttgcaaaaagagtggacctaactcatcttagaaagaagagagcgatgnaagtgaattatattttttacgccttgaagaaagcaccgatggattttaagtcatcgcaatcttaagagaacgcttgtatgatactggtttcaaggcttggattgaact

SEQ ID NO: 220555 - DNA, 415 bp, Gossypium hirsutum
  unsure (1)..(415): unsure at all n locations
cccacgcgtncgggaaaatnnnnnacctgttctgcacgctgatattttcagtagttgttttggggactaccatcaaaatgttgcgcagcatactcgaagtgctgatggagagtacgcctcgagagatcgatgcaacaaagctggaaacagggctattgcaaatgggggatgttgttgccattcatgagctgcatatatgggccattacagtggggaaagtcctcttggcttgccatgtcaaaatccgacccgaagctgatgcagacatcgtcttagacaacgtaatcgaatatatcagaagggagtataatatcagtcatgttaccattcagattgagcgttaaaatggtagacaataatttagagcatgcatggacctcattactctacatatatttatagttgccataaatac

SEQ ID NO: 220556 - DNA, 359 bp, Gossypium hirsutum
gttttggttgttgctaaccctgccaacaccaatgcattgatcctgaaggaatttgcaccttcaatccctgcaaagaacattacctgtttgacaaggctggatcataacagggcactaggtcaaatctcagagaaactaaatgtccaagtttctgatgttaagaatgtgattatttggggtaatcattcatcatctcaatatcctgatgtcaaccatgcaactgttatgactccatctggagaaaagccggttcgcgagcttgttaaggatgatgcatggttgaatggagaattcataaccactgtccaacaacgtggtgctgcaatcatcaaagctaggaaactctcaagtgcactatc

SEQ ID NO: 220557 - DNA, 412 bp, Gossypium hirsutum
tcgactaaccgaagcagaagcaaagcaaaaaaagaaaagggcaaaaaatggctgtgcaattcaatcccatggcttctcaaactaagaaactcccttcatatgctcttccacccatggcaagtcttagatctcccaaggtttctatggtctccactcttccacctcgctccaaaggggttgaagatctgaaacggcctttcatggctccaaagctggtacaccagtcttcccacaccatgccacctgagaagattgagatctttaaatctttggatgattgggctagggataacattctgattcatcttaaacaagttgataaatgttggcaacccaaggattttcttcccgatccttcgtccgatggatttgaagatcaagttagagaacttagagaacgggcaaaggagat

SEQ ID NO: 220558 - DNA, 338 bp, Gossypium hirsutum
  unsure (1)..(338): unsure at all n locations
gcgtccgaaccaccactctcacattaaatattgttagtgaaacaatggcgtcttcagctctgataagtaagctngaggcagatgtagagataaggcttctcctaagcagttgcatgaaatggttgcccacanaccgcaccatgtgcaccatacttgttatgacaagattcaaggatgcgatttacatgaaggtgaatggnggaaagtcggtaccattgtccattggagttatgtgcatgatggaaaggctaaaaaggcaaaggaagtagtggaagcagtagaccctgataagaaattggcactttcagagtgatcgaaggagatctaatggaagagta

SEQ ID NO: 220559 - DNA, 260 bp, Gossypium hirsutum
  unsure (1)..(260): unsure at all n locations
gacttccaccatgttccaggctagtggcgccgctcctggttcctctggctacatcaacatcactgatcttaaaggcggaaaagtcggcttcggcgctgaaaacaacgatggaaatatcgatgctgtttacgttaagtccgttgcagagattccttacaacatctctgtcttacaaatcagtcaggttntgaattcagctgaagctgaagcctcaacggcggagccaagcaagcttaatctaacagagataatgtcaaagc

SEQ ID NO: 220560 - DNA, 387 bp, Gossypium hirsutum
  unsure (1)..(387): unsure at all n locations
gaccacgcgtncggcagaacagaaggcanatgctgagaaatcaactggagcagagtcttctgctgctgctaatactggaaaagggaaatcatctagtgagaaggatggagaagccatgcaggttgatagccctccagagaagaaatccgaccctgagccatcatttgagattntgaccaacccagcaagagtggttcctgcgcggagaagttcataagtttttaaagacagtcgatatgtcctgtgaagtggaccattgattgtctttaagactggcctataaccaggcttttaaaatcacaatacgatccgtggataaaagtgagaaaatatagctgcgtgtataactacctacatagctatctttacattaataaagcaattttc

SEQ ID NO: 220561 - DNA, 228 bp, Gossypium hirsutum
  unsure (1)..(228): unsure at all n locations
tcggcngtgcactgactacagagacccaccacatcatcaacagggaagtcatcgatgcattgtgtccaaagggtgttctcatcaacatcgggagaggccctcatgttgatgaacccgagctggtttctgcattggttgaacaccgattaggaggtgcagggcttgatgtgtttgaacatgaacccgaagtaccggaagagctttgggctgatatgggtctctacctat

SEQ ID NO: 220562 - DNA, 254 bp, Gossypium hirsutum
  unsure (1)..(254): unsure at all n locations
caaacgccgacgaanatggctttcgagggattagttctccgcggaccatgcgagcccacactgacatggtcacagccatcgccactcccatcgacaactccgatatgatcgtcacttcctctcgcgacaagtccatcatctcttggcactngaccaaagacgaaaagacctacggtgtcgctcgccgccgtctcaccggccattcgcaccttgttcaagacgttgttctctcttctgactcccagttcgctctc

SEQ ID NO: 220563 - DNA, 272 bp, Gossypium hirsutum
  unsure (1)..(272): unsure at all n locations
gaccacgcgtccgcttcctgccacatgagttgantttgtccgagaaggaagaacctgtcaaaaaagagcctgagactcaattggcagcaagcaagtccaagaagtcccaagcttcttcttgagtgaacaaagtttgaaactttatcaagtcagttaatgtagtgatgtctggtctttggatttcatacactatttttgagtttttgacattagatgtgttggatggtttatttaaagcatgtttatcaaagtgctgatatgttttgaattgt

SEQ ID NO: 220564 - DNA, 353 bp, Gossypium hirsutum
tcgatctcgatccttatcctcgttttcaaacaagctcgaaaaagatggccaacgctgcatcgggaatggctgtgcatgatgattgcaagttgaagttcttggagctcaaggcaaaaagaacccaccgcttcattgtttcaaaattgggagaacaaaacaagtattgggaaagctgggaacaccaaagttgagttactaagttccgtgtaatgcattctggacattgatttacgcgacgccaacaattttatatgctcacctagtagaaagaacccctcaatatacaactgtgataggatgagacacactgatgctaggtaacgcacgacgcttagtcacgagtctctctcgtg

SEQ ID NO: 220565 - DNA, 353 bp, Gossypium hirsutum
  unsure (1)..(353): unsure at all n locations
gaccacgcgtccgttttntttttttttttntttttttataaatatcccagaaacagaacagcaattatcattaagaactttctccaaaatcactaacaaaacctcccaaaaaggcacaaaacagaatattaaacctaaggataacttcaataataattaaaaaaaaactagtaaaaagttccaacaagaagagtggtgcttagtcaacttcttccatcttgctgccttcagcatcagcatcctctaatgggggcatatcagcatcagcttcaccttcacctgcatcctcgtcaatgctcaagccgagtttcagcatcctgtggattctgttgccaaaggtgttaggctcatca

SEQ ID NO: 220566 - DNA, 405 bp, Gossypium hirsutum
  unsure (1)..(405): unsure at all n locations
atntcttcaagagttctcaagggccattactctcctctctgagaacaatcctctcactggtagcaagggtgagatcaggaagcaatgcaatcttgcaaacaagctgtactaatatgcctcgccaaagagaaagccgagagtggccgaataaaatggttgtttacttgtttcttttccaagagacaagtttgttaatgtgcagtgagtaatggtgcaatggtactagttngatacgatcgacccattgcatttttttntagcataagccaggttgccttctcttgatgttggtcatgggcgtagtggatgtagggatggatgtaatgtatgtatgtaaggatggtgtngactgtgtatgatgcatgannattcaaagattaaaagntatgatgattcatgcataaa

SEQ ID NO: 220567 - DNA, 374 bp, Gossypium hirsutum
  unsure (1)..(374): unsure at all n locations
ctgattccgttctcacaataccctcgctttcctcattctttatattctattgtctccaaagggtaggcggttacacccgccgagaaagggcgggcggatattgctccggcggagaagaggccaaaggcggagaataagatctcaaaagaaggcggcgcagataagaagaagaaggctaagaagagcgtcgagacttacaagatttacatcttcaaggtattgaaacaggttcatcctgatatcgggatctcgagcagagcgatggggataatgaacagtttcatcaacgatatctntgagaaattggctcaagaagcatcgagattggctaggtataataagaagccgacgatacatctagggagatccaaacc

SEQ ID NO: 220568 - DNA, 296 bp, Gossypium hirsutum
  unsure (1)..(296): unsure at all n locations
cgaccacgcgttcgggaaaaatctntacagaggcataaggcaacggccgtggggcatatgggcggccgagattcgcgaccctcgaaaaggggttcgtgttagtgggcactttcaacactgccgaggaagcggcccgcgcctacgaccgtgaagctcgcaaaatcaggggcaagaaagccaaggtcaatttccccaacgaagacgactccttctccaccccgtacaatctgaaccgttccacgcccaattcgaacccttgcgtttatcaacagcatataaacagtaactatggattc

SEQ ID NO: 220569 - DNA, 334 bp, Gossypium hirsutum
  unsure (1)..(334): unsure at all n locations
cgtccgcagcaatgagcanagggaaacgataatgttacctggttgtgattataaccatnggcttatcgttatggagttccctaaagaccctgctccaacaagagaacaaatgattgagacctatcttaacactcttgctactgtgcttggcagcatggaagaagcaaagaagaacatgtacgcttntagcaccactacatatacgggattccaatgtaccgtttcggaagaaacctcggaaaagttcaagggattgcccggngttctntggggtttaccggattcatacatagacgtcaaaaacaaagattatggaggtgataaatatgtcaac

SEQ ID NO: 220570 - DNA, 401 bp, Gossypium hirsutum
  unsure (1)..(401): unsure at all n locations
attcctcaaggagttctcagggccattactctcctctctgagaacaatcctctcactggtagtatgggtgagatcaggaagcaatgcaatcttgcaaacaagcttcactaaaatgcctcgccaaagagaaagccgagagtggccgaataaaatggttgtttacttgtttcttttccaagagacaagtttgttaatgtgcagtgagtaatggtgcaatggtacctagttgatacgatcgacccattgcatttttttntagcataagccaggttgccttctcttgatgttggtcatgggcgtagtggatgtagggatggatgtaatgtatgtatgtaaggatggtgtngactgtgtatgatgcatgaatttcaaagaattaaaagttatgatgattcatgcat

SEQ ID NO: 220571 - DNA, 383 bp, Gossypium hirsutum
  unsure (1)..(383): unsure at all n locations
gcgtccgtcgagtctttcttcattctgatccgtctcanaaaccctcgtttccccattcctatatcctatggctccaaaggttggggagaacccgccgagaaaaaaccggcggaaaaggctccggcggagaagaggccaaaggcggagaagaagatctcaaaagaaggcggcgcagataagaagaagaaggctaagaagagcgtcgagacttacaagatttacatcttcaaggtattgaaacaggttcatcctgatatcgggatctcgagcaaagcgatggggataatgaacagtttcatcaacgatatctntgagaaattggctcaagaagcatcgagattggctaggtataataagaagccgacgattacatctagggagat

SEQ ID NO: 220572 - DNA, 387 bp, Gossypium hirsutum
  unsure (1)..(387): unsure at all n locations
gagcctcctacactcgactgtgcgaagccggttgaggataagatcatggacatcgcttctntggagaagttccttcaggaaaggatcaaggttggtggcaaagctggtgctctaggtgactccgtcactgtcacccgcgacaagacccgtatcacggttacctctgactccaacttctctaagcggtaccttaaatactngactaagaagtacttgaagaagcacaatgtccgggattggcttcgggtgattgcttccaacaacggaccgtaatgttatgaactccgctacttcaatattgctgagaatgaaggggaagaggaagaatgagcaatcagttcaagtacttttctctngtacctatctggttaatagttctgaggaaac

SEQ ID NO: 220573 - DNA, 255 bp, Gossypium hirsutum
  unsure (1)..(255): unsure at all n locations
agttgcagttgcctcaactgaggttgctgctgccatnggtgagccaatggacatcaacgcatccttgcctcttgtgattaggaagtccaaagctcatggtgggctggcacgtggtttacacgaagctgccaaggcaattgataagcacaatgcacatctntgtgttttagctgatgattgtgaccagccagattatgttaaactggtcaaggcactctgtgctgatcacaatgttaaagtgctacgtgcacctag

SEQ ID NO: 220574 - DNA, 146 bp, Gossypium hirsutum
aaaggatcaaggttgctggcaaagctggtgctctaggtgactgcgtcactgtcacccgcgacaagacccatatcacgggtacctctgactccaacttcactaagcggtacctgaaataccacactaagaactacttgaagaagcac

SEQ ID NO: 220575 - DNA, 313 bp, Gossypium hirsutum
  unsure (1)..(313): unsure at all n locations
tctctctctacatgttttttgttgctcatgctgaaggttcgctaacgccaaggcccttcaacaacaagattactggctgctttgtctntggagattcgacggtagatcctgngaacaacaactacgtaaagaccctgtttaggggcaattntcctccttatggaaagngatttagagaccacgtgccgaccggaaggtttactaacgggaagctntccaccgatctcattgtttcttaatgtaggcataaaagaatattgccaccatatttggatcccaaccttagcattgaggagctgatgacaggagttag

SEQ ID NO: 220576 - DNA, 335 bp, Gossypium hirsutum
acgcgtccgctcaagtttaccgttaagtccttaaagtcgactattctggaggaatatcttcctatccacttattgtattgcaggtaactaagttcaaatgcggtggagttagtcttggagtagggattcaacatactttaggagatggcgcagcggctcttcatttcatcaatagttgggctgacacttcacggggcttgacgcctgccattgtaccattcattgatcgaactcttcttcgtgctcgggacccaccaacgcctaagctccaccatgttgaatatgacccttcaccggcattgaagtctgcattaaaatctcaatcagatgatcat

SEQ ID NO: 220577 - DNA, 291 bp, Gossypium hirsutum
  unsure (1)..(291): unsure at all n locations
aaagaattcgctcaagccgagtagtccgggaagctatctctgcgttcaatgtctcgtctgatgggaagttccttgcagttggaactcngaggagacctttttatcatagattctgccaatatgcgggttcagatgatggttaaaaaagctcaccttggtttggttacagcattgacgttctcccctgattcaagggccttggtttctgcatcactggactcaagtgctaggttgaccccaatcaaggacaagacgagtagtggtggaatgacatggatgatcatattaatg

SEQ ID NO: 220578 - DNA, 287 bp, Gossypium hirsutum
  unsure (1)..(287): unsure at all n locations
cctaactctgctatcaganagtgtgctcgagttcaattgatcaagtatggttaaaagatagccgcattcgttccaaacgacggttgtgtgaatgacatcgaagaaaatgatgaggtgttgattgctcggattggacgaaagggtcatgccgtcggtgatattcccggtgttagattcaacgttgtgaaggtgtctggtgtttcattattggcacttttcaaagagaagaaggagaagcctagatcctaagtttgcaacaatgaggatattctttatgatgttttcat

SEQ ID NO: 220579 - DNA, 387 bp, Gossypium hirsutum
  unsure (1)..(387): unsure at all n locations
gaccacgcgtccgccgacatcttcaatggccagtccttggtccgtaaccgccaacgcgacacctctttttgctttgccggagcgccgcgcggcgccgtgaagaacgatttccgaggcttgctgttgaaccaatgtatgaacgcttccggtttatgccgggtcgttgattgcgccggtacccgttgctccaacggcacatcggcgatcctcgaaaccattttggattctcgattttgcttgcaacccagaggcgacagtttcactcgtaggtcaattntcgactgcatggtcaccggttccatcctcgtcttcttctggcaccgaacggcttatctcagtaccaatggtttaccgaatgatccaaagtnactcgtttatcaccggaca

SEQ ID NO: 220580 - DNA, 388 bp, Gossypium hirsutum
cgaccacgcgtccgcccagcgtccgaaggaatcactgcactggcccttagcagcatgaagatcaaggtggttgcacttcccgagagaaaatacagtgtctggattggaggatccattttagcatctcttagcaccttccagcagatgtggatttccaagggcgagtatgatgaatcaggcccagctatcgttcaccggagtgctttaattgaatgtatcgaagccacattttcagcattgctggtagtcagtgtgacattagcttgtttataatgagaagtatggttcagctgttataattagttaatcaatcttgctgtgtgagatactaatgtgcttattggtgcacttattgtcatgaactcctaaatctgtggatagatattat

SEQ ID NO: 220581 - DNA, 407 bp, Gossypium hirsutum
  unsure (1)..(407): unsure at all n locations
cataccttcctgtcattgagtctcttggattctctagctacttgagggctgcaacatcaggacaagctntcccacagtgtgtgtttgatcactgngatatgatgtcatcagacctcatggaacctggctctcangcagcagcccatgtcgccgaaatccgcaagaggaaaggattgaaggaacagatgaccccactttccgagtacgaggacatactgtaagctaagagagagtaactgtgattgtgcggcataaccttcgctgcaattaaagtttggtttctgtctgggtatatnntggtagcatggatgctntttcacccatatgatgtaccgtcgtttttagaccgttgtgtntngatgatgatcatgatgtactacaatcgacattacgttgaactttttata

SEQ ID NO: 220582 - DNA, 306 bp, Gossypium hirsutum
  unsure (1)..(306): unsure at all n locations
gtgtgctcgagttcaattgatcaagaatggaaaaaagatcgccgcattcgttccaaacgacggttgtttaaattacatcgaagaaaatgatgaggtgttgattgctcggattggacgaaagggtcatgccgtcggtgatattcccggtgttagattcaaggttgtgaaggtgtctggtgtttcattattggcacttttcaaagagaagaaggagaagcctagatcctaagtttgcaacaatgaggatatctnttatgatgttttcatagttntttttgggatcgaatntaaagcaatgtgtttctc

SEQ ID NO: 220583 - DNA, 426 bp, Gossypium hirsutum
  unsure (1)..(426): unsure at all n locations
acgcgtccgcctctatttcttaacaaacatcaactccagagatcgccaaacatgctaggaactgagcatgatttgaacttcaaagagaccgagctgtgtctcggcctgcctggtggaagtggtggaggaggaggagctgccgccgccggtggtggtggtggtggtaaaaatgaagtggaaagttccccaaagaccaccgggaaaagaggctactccgagactgttgatttgaagcttaatcttcagtctaaagaaggttgcatggatctgaatcagaacctagaaaatggttcaaaagaaaagaatcatctcactgcanaaccaccagccaaggcacaagtattgggttggccaccagtttcgatcttataggaagaacattatggctaaccagaagaacaacagtgacgaaattagtgacagagc

SEQ ID NO: 220584 - DNA, 296 bp, Gossypium hirsutum
  unsure (1)..(296): unsure at all n locations
tccttcagcgtatggttgaatggtcgattgccttctgcttatcaccgcttgatgatgaagggaaacgagaccaggtatagcatcggatngtttgcaaggccgagaggagggtacctagtaaaggttcccaaagagcttgttgatgacaaaaatccgatgctcttaaacccttgatctgaaaattttgaaattactccccaactgtcagggctactaacacctaaactatcaggcaaattgcatataacgggcttttagaataacagttcactacatatgcatacgctaagtgaaag

SEQ ID NO: 220585 - DNA, 281 bp, Gossypium hirsutum
agatgattcattcggatccgcatgaaagcccaactccattgcattgccagaatccatgttgtatatttgaaagagggtgacctccttgcttctctcatggtacaatcctcttcccgctgagccccctttctcctcggtccacagagacaaaatggaatgtaggactaggactggcgccaacagttaatcacggaagaaaggactcactgagccggatcactaactaatactaatctaatctaactaatactaatctaatactaatagaatactaatctaat

SEQ ID NO: 220586 - DNA, 459 bp, Gossypium hirsutum
  unsure (1)..(459): unsure at all n locations
gagggtggcagacattctcccttcttcgcaggttatagacctcagttctacatgaggaccactgatgtcactggaagggtggcttccattatgaatgataaggatgaggagtctaagatggttatgcctggtgaccgtgtaaagatggtagttgagcttatcatgcctgtggcttgtgagcaagggatgcggttngctattagagaaggagggaagacagttggagccggcgttattcagtctattattgagtgatcttaggatactttggcgtngcaggatatngtatntgctgtgcagtgatgtcaaagaaccttcatatgccaaatgtcaaggtcatgcaattagtttcgtcaccatttatagaacctctntcattccaatgtcatnnatttggaagtttgtatttcttttgcttcagactcatgtctaatctagttggatgggtaatatcatgtc

SEQ ID NO: 220587 - DNA, 209 bp, Gossypium hirsutum
  unsure (1)..(209): unsure at all n locations
tctgaggaactacaaccggtgttagaggcttatcagatgcaggccaatggaacctngttgttccctgctattaatgtcaatgactctgtcaccaagagcaagttcgataactngtatggatgccgtcactctcttcccgatgggttgatgagagctaccgatgtcatgattgctggtaagggtcgctgtgtctgtggttatggtgatgt

SEQ ID NO: 220588 - DNA, 398 bp, Gossypium hirsutum
  unsure (1)..(398): unsure at all n locations
cgtcaccacgcgtccgatagaatggccctcactggcactgtttcaatctcgggtcgtatcnttagccgtacttgccatagtgccaagatggtcaggacaatcattgttcgacggaactaccgtcattatatcaagaaataccaaaggtatgagaagcgccattcaaacatccccgcacatatttcaccatgcttccgtgtgaaggaaggggatcatgtcattattgggcaatgcangccgttgtcgaagaccgtgaggttcaatgttttgaaagtgattccagcaggatcttccggtggtgggaagaaagctntcaccggaatgtaagctnttctatggtagtccatggttataggaaccaatagagaagataatcaaagaaattaagttcttaaact

SEQ ID NO: 220589 - DNA, 307 bp, Gossypium hirsutum
cccacgcgtgcgataatactctctgaagatgttgatcctggcaccagattgatagatgcactctagatgatgaagcagggtgtgagacgacttcttgttccaaagagcaaggtatggaaaggcatgagcaagcgattctcaattctttataatgggaaatggctcaagaacattgataactgtagcggaacaacctgattgctatgcaacccccttctcttatctgctgcgttaatgctgaaagtttgctgtcttaagaaaacatgatcattctatcggtgcttgggcactactctttcctctctta

SEQ ID NO: 220590 - DNA, 243 bp, Gossypium hirsutum
  unsure (1)..(243): unsure at all n locations
gtacaagtctccgccaccaccacctccatcctcacccaagcacccttacaagtacaagtctccaccacctccaccgccatcaccacccaagtacccttacaagcacccgcgaccaaagcaccaactccagcaccagcaccaccaactaaagcaccaactcccccatataagcccncagttcctacacctncagttaagccaccaacaactccagcaccgtcttacaagccaccaagtccacca

SEQ ID NO: 220591 - DNA, 401 bp, Gossypium hirsutum
  unsure (1)..(401): unsure at all n locations
ataagctagcttccaagctgaccggagctggtggcggaggttgcgtgctaacactcttgccaacccatatatcaggagaagtcatcgataagctagtggaagagctcggatcattcggtttccagtgtttctcagccggaattggtggtaaaggtgttcaaatttccttcgattattcttcctaattttccgtccccatatnttagtcgtaataagactctcttcgaataacaacatgaagcacattatatcgatgttatagttatttcccttccctttcgttttctgtacacttcactttcggattagccgttttctagttaaaccagaacgaagaanaactactgctacagaaaacaatgttgtagctgtttctatttctccttgtacattagtttact

SEQ ID NO: 220592 - DNA, 259 bp, Gossypium hirsutum
  unsure (1)..(259): unsure at all n locations
tctctggagtgtacttcgagccncaatattcacttggtagaaagatgttgacanaagtgatagcaatggcatccattgtagatgatacatatgactcatatgcaacatatgaagagctcattccctatacanatgcaattgagaggtgggatatcaaatgtatagatgaaattcccgaatacatganaccaagctacaaggctctattagatgttatgaagaaatggacaatggtggtgacatggaacaatatcggtca

SEQ ID NO: 220593 - DNA, 200 bp, Gossypium hirsutum
  unsure (1)..(200): unsure at all n locations
acagcaatggcatccattgtaaatgagacatcggactcatattcaacatatgangagctgattccctatacaaatgcaattgataggtgggatatcaaatgtatagatcaaattcccgtatcatcataccaactacaaagctcttatatgttataaaaatgtcatgtcctacatgaacaattccatcattcaaatcatat

SEQ ID NO: 220594 - DNA, 265 bp, Gossypium hirsutum
  unsure (1)..(265): unsure at all n locations
ctcaatgtcaattttatccttaaacgcttagaannaaaaaaacaactaanaagatggcgaggagaccggacgaggaatacgattacttgtttaaggtagtactaatcggcgattctggcgttggaaaatcttaattgctttctcgatttactcggaacgaggtttgcttagaatctaaatctaccatcggcgtcgaattcgccacccgcactctccaagttgaagggaggactgtgaaagctcagatatgggacactgctggtca

SEQ ID NO: 220595 - DNA, 466 bp, Gossypium hirsutum
  unsure (1)..(466): unsure at all n locations
gtttactcgaaaagatccctctccaacaatggcttctaatcccaaggtcttcttcgacatgactcgtcggtggccaaccagctggtcggattgtgatggagctctgtgccgattgcactccccggactgctgagaacttccgtgctctctgcaccggcgagaaaggggtaggccgtagcggcaaacctctccactacaaaggctcatccttccaccgggtgatccccaatttcatgtgtcaaggaggcgactntaccgccggaaacggtaccggaggtgaatccatctatggagccaagttcgcggacgagaacttcatcaagaagcacacgggacctggcatcctttccatggcgaacgctggacccggaacaaacggatctcaattcttcatctgcacgaccaagacggagtggctggacggaaagcacgtggtgttcggacaggtagttgaaggcatggatgt

SEQ ID NO: 220596 - DNA, 412 bp, Gossypium hirsutum
  unsure (1)..(412): unsure at all n locations
gcaaagaagctggaattgcagatggnggaagatcgngacgatagctngcaatcgaaggaacatatcgaagcgagcttattgagcaaacacatagctgcaatgagacgagaaagggcaatggcttattcatttactcatcagcaaacttggaagaatggttcgaaatccatgaatccgttattcatggatatgaacaatccgacatggngttggagttggttagaacgatggatggccgctcgaccatgggaaggacatggcgtgacgggaaaagaaccgaacaacgaccagtcatcggtaaagaatgcacatttcgaaggagaaatcagcaaagcttaacgctcgtactcaactcaattggataataaacaatccccgaaatcaagccaaaagccaaaccgaacatcaagtc

SEQ ID NO: 220597 - DNA, 104 bp, Gossypium hirsutum
  unsure (1)..(104): unsure at all n locations
cttctggcaaaggcaactgctggtgaatctggtgtgcctntcctctctatgtctggatcagantttatggaatatgttgttggagttgggccgtcaagagtgag

SEQ ID NO: 220598 - DNA, 432 bp, Gossypium hirsutum
  unsure (1)..(432): unsure at all n locations
caagatggtaggtcaagaatntaccaaaagtggctcggcgtttgcatttcctcgggactctccattggcaatcgatatgtcaactgcaattctagcactcgctgagaatggtgatctgcagcgaatacatgacaagtggctgatgcanagcacctgcagtttagagagtacagagatagaaacaaaccaacttaatctatccagcttctggggtctgttccttaattgtggcgttgcttgcatcattgcccttttcatatattttctgcagatattgcagcagctacctcctgctcctgaatctgcttcaattcctggtcaagatagctcacattctcgacggctgcggaggttnttgtcactaatggatgagaaagaagagcaatcaagtaagatggtactggatgactggaaaaggctntactctaacac

SEQ ID NO: 220599 - DNA, 258 bp, Gossypium hirsutum
  unsure (1)..(258): unsure at all n locations
gaccacgcgtccgcaaggcggaaccaactccatcatcagcctataactcgaagatgcctacggcgggtccgtcgagatcagcaacctggaaacatggggtgggttaatggagccaggacacgactatttcgagaggggtaacttggacattntctccggtaggggtcgttgcttggatgctcctgtatgttccatgaactngacctcgatgggtgggtcggccatggaggactgaactactggagtacatgacagctc

SEQ ID NO: 220600 - DNA, 266 bp, Gossypium hirsutum
ctttgatcatgctattggtatcaacgtacctcgatcgcgattccttccagtgaaggcaacttcagatttgcttcttgttcagtctgacctttacaccttagttgatggatttgttatccggaataaagatagagcgaatcctacaaacccatccatagaattggggcctgaattcaagaaggttggtaacttcttaagtcgattcaagtcaatcccgagcatcattgagcttgatagccttaacgtgactggtgatgtttggtttg

SEQ ID NO: 220601 - DNA, 368 bp, Gossypium hirsutum
cttgtcaagagatgccacaagcccgatcgaaaagaatttacgaaggtggcgtttcgtacagcgatcggattcgtggttatgggattcgtagggtttttcgtcaagctcatcttcatccccattaacaacattattgttggatctggttaggaagcatgagaatcagtaccaagtttcagactgtaggcaaaagatagaagttagaagtggatgcaattgactgagaggtacatcatctgatttcatgaactaattcaaacttagacatggaaatttctagttttctttatattcaatatgtttgagattatttttgttttagcattgtaatagaatcttgttgaaataaacacaatcattctgacctc

SEQ ID NO: 220602 - DNA, 338 bp, Gossypium hirsutum
acgcgtccagaacatatgagagtggctcatcggaaactaatgctgcactggaatttgctgtaaattcacttgaagttgaaaacgttttcatcattggtcatagctgctgtggtggcattcgtgccctcatgagtatgcaagataaagcggaatcaagtagctttatccggagttgggttattgtcggaaagaatgcaaaactaagtacaaaggctgctgcttcaaacctcagttttgaccagcaatgcacacactgcgagaaggaatcaatcaacaattcattgttgaacctgcttacttatccatggatagaaaaaaaagtgaagaaagggatgctt

SEQ ID NO: 220603 - DNA, 327 bp, Gossypium hirsutum
ctcagtttttattgaaaaccctagacctttcaacgaagtagcagagccgcagtgtctctgtcaaatatccgaaacaagaatggctgtcacattcaacgatctgggttctgctgctggcttgaagaagctggatgagtatctccttacacgcagttacatctctggataccaagcttcaaaggatgatattaccgtctacgcagctctatctggtgccccatcatctagctacgtcaatgtttctcgatggtacaaacacattgatgcccttttgagaatctcaggtgtttctgaagaaggctgtggtgtgactgtagacggatttgc

SEQ ID NO: 220604 - DNA, 342 bp, Gossypium hirsutum
ccggaacattgtaaacgtggaccagctgatggagattggtttcatagtgtactcaattggcaagccacttgatgcatggctcaaggacatgcctgcagtggcataaatgatgcatgcagaggttatcgatgcgcgtcaatgtcagtttgattctttactacctatctttttgacaagttttattgtttccttgctttcccttccccatggtagccaagcatttgaaggcagtaaacggctcttcgttgtgccacacattgtattcaataatatttaccatctactctgttgtttgttagaaaacttgatattatttttggatttcatctaatttcatattca

SEQ ID NO: 220605 - DNA, 395 bp, Gossypium hirsutum
gtcacatcagagtcggaaggcaggtggttaacatcccatcctttatggtgagggttgactcccagaaacatatcgacttctctctgataagtccgttcggaggtggccgtcctggaagagtgaagagaaagaatcagagagcagctgccaagaaggccgctggtggagatggcgatgaagaggaagacgagtaaaccttaagctagtattggcaatagggcactcctaaaagagcctctgatgggaacttaccatttcctacattattagacatggtttgagttttgtttcaagaccttttatgtagtggatgttcgcatttgtatttgtctcggattttatgttacattgagcaattttgttattttgagattaaaattgttaaaatataattc

SEQ ID NO: 220606 - DNA, 325 bp, Gossypium hirsutum
cgctccttaaaacactcttagaaggagtttaaatgactgagaagcagcttggagaggtatttagaaagtttggagtggaaaaattcgatcctagaaatgaaccatttgatccacacaggcacaatgcggtattccaaataccggataattccaagcctcctggcacggttgctcatgttttgaaggcaggttacatgctctatgatcgagttattcgaccggctgaggttggtgttactcaagcaacggatgatggtgcaaccgagaataacacaggtgacaaagtctctgatgtttgattgtaagttaagttgagttattaatg

SEQ ID NO: 220607 - DNA, 342 bp, Gossypium hirsutum
ctaagtgagaattctaggtggtggaaggatttagactttcaaagaaagttgccatacgcaagagatagagtggttgaaggctatttttggatctcaggagtgtactttgagccccaatattctcttggtagaaagatgttgacaaaagtgatagcaatggcatctattgtagatgatacatatgactcatatgcaacatatgaagagctcattccctatacaaatgcaattgagaagtgggatatcaaatgcatagatgaacttcctgaatacatgaaaccgagctacaaagcactattagatgtttatgaagaaatggaacaactggtggctgagcatggg

SEQ ID NO: 220608 - DNA, 372 bp, Gossypium hirsutum
gtcaggcgggattacccgctgagtttaagcatatcaataagcggaggaaaagaaacttactaggggatgcttaaattttgacggcacccccaacctacacatgttatttgcttttctggattttgtcactgatctgatgtttttttttaatgcttaaaacatgtctgaatttgagaatttttaatctttagtaaaacaaaccaaattttccataaaaggaaaagaacagtaccagagattttcaggatctgattttgtatttgttttataatattctaagtaaagcttgtacaaaaatgaaattggataacttcaaatttggacaaggtggacggtctaaattaatttaaatttttaaatatttcatatggt

SEQ ID NO: 220609 - DNA, 271 bp, Gossypium hirsutum
ctagaggtaccgcgtatgcgaggcacgagatgagttgtacaagatgttgaatgaggatgaactgagaggtgctgatttgctcgtatttgtcgacaaccaggaccgtcgcactgcagtgaatgctggcgtaataaccgatatgctagaacatcattctattcgctagcgccacgtggatattcagagtacgtgtgcaacctgtggagaaggtctctattagggcacagattggatatccaataacattgttcgtgacgcatgacaaaggatc

SEQ ID NO: 220610 - DNA, 354 bp, Gossypium hirsutum
catatttggaggttttgcttctcaaccttgggagaggcatggtgatttctatggggacatgaagacttttctctttcagctctacccaaaggcatctattttcaggccaactggagcaaacagtaatttgcaatggtgtgctgtgaacttcagttccgagaccatccctaatggcattggttttggaggacgcataaatcactttggcatgtttctctcagcaagctttgatcaagggcataccttttcctgtaccacttttaatagcccttgcctctcgaagaccgccaaaatctgcccagaagttatagaattgctgggagttgttagaaaaggactggaacaagaaacaac

SEQ ID NO: 220611 - DNA, 387 bp, Gossypium hirsutum
cctctcccaattttttcttcactttgaggtttgagcagatcggatggcaccaaagaaagataaggcccctccaccttcttccaagccagcaaagtctggtggtggcaagcaaaagaagaagaagtggagcaagggaaagcaaaaggagaaggtgaacaacatggtgttgtttgaccaggctacttatgataagcttttatctgaggctcctaaatataagctcatcactccctcaattttgtctgatcgtatgaggattaatggatcccttgctaggaaggctataagggaattgatggcaagaggatcgattcgtttggtgtctgcccattcaagccagcagatttacactagggcaaccaacacctagatgttttgttatagttt

SEQ ID NO: 220612 - DNA, 292 bp, Gossypium hirsutum
aactttgttaagcttgtgacttgttatgataacgaatggggttacagttcccgtgttatggacttgatccgacacatgtctaaggcttaagtgagtgagtgattgtgctttgtgtatccaagctttagcaatttttaatttagaagagatgttatgagagaataaacgaattgtacggagcatatttttgtgtgaagaagggttgtttcagttttattacccaagtacttgaatgtttcaagtttcattgcaaaaaaaaaaaatacaaaaaaaaaaaaaaaaaaaaaataat

SEQ ID NO: 220613 - DNA, 336 bp, Gossypium hirsutum
gggccaaattaagaccggagctcatgcaggtctgagcgttagccaagtacaatcagcttctgcgaattgaggaggagcttggtgcggaagctgtctatgccggagctagcttccgtgctccagttgcaccctattaagatgcttgtttagatgataatgtgctgagactggatgcgtgcggcagagcttcagtggtttgttgagaccctaaaacatatttcaataattttgatagcaattttgtacttgtgttcagaattatatcgatctccgtgttatttttgttggactttgcctgcatatatgctcgctatattcataaatacatgatgcttg

SEQ ID NO: 220614 - DNA, 310 bp, Gossypium hirsutum
  unsure (1)..(310): unsure at all n locations
acccacgcgtccggctgatcagtcacttattgctttttaggtttttcactnccactgcaagctcaggtgggccggcaacttacccaattagacttggcctggctttgaacttctcagttttctactatgagatattaaattctcccgagagggcttgtcatctggctaaacaagcatttgatgaggctattgctgagcttgatagccttaatgaagaatcttacaaggatagcacccttatcatgcagcttcttagggacaacctcaccttgtggaccttggatctgccatatgaaggaggtgagcaatc

SEQ ID NO: 220615 - DNA, 380 bp, Gossypium hirsutum
ctagagaagtcaaccaatgttactaggcctatgaacactccattaagctcaagaagcttgagggtagaaaataccttgaatcccaaatcaaatccacaaaagaaattaaggcaacaagatccttatggtattttcaatatggaagggtctattccaagggacattggtccttataagaaccttgccatattcacatcaagctctatggacccgaaatgcatttcgagttcaagttctattcctttacttaaaaagctaagggtcttgatgagcaatctccagaaagtggatttaagggcattaacttaccagcagaaattagcattttggatcaacatgtacaatgcctgtattatgcatgtatagtatggaaatgaagc

SEQ ID NO: 220616 - DNA, 355 bp, Gossypium hirsutum
gaaatgggaccatcgatttccctgaatttctcaacctgatggcaaggaaaatgaaagatactgattctgaggaggaacttaaagaagctttcagggtgttcgataaggatcagaacggtttcatatctgctgccgagcttcgtcacgttatgacaaatcttggcgagaagcttaccgacgaggaagtcgatgagatgatccgtgaagccgatgttgatggtgacggccagatcaactacgatgaattcgtcaaagtcatgatggccaagtaaggatctctccaaccaaaaaaaaaaaaaaacagagtagataaagttgcagagatttcaatctcgtaattggtcgtgggtcgtcg

SEQ ID NO: 220617 - DNA, 378 bp, Gossypium hirsutum
gaaagaagctaggataatcatagtccaaatattccaaggccttgtatacttgaacaaaagagcacaaaagattattcattatgatctgaagcctggcaatgttctctttgatgagttaggtgtagcaaaagtgactgattttggtcttagcaaaatagtagaagatgatgttggatcccagggtatggaacttacatcccagggagctggaacatattggtacttgcccccggaatgctttgagctcagtagaacgcctctgatttcatcgaaggtggatgtttggtcagctggtgttctactttaccaaatgctttttggtaaacgcccctttgggcacgaccaaacgcaagaacgaatattgcgtgaggacacaat

SEQ ID NO: 220618 - DNA, 360 bp, Gossypium hirsutum
  unsure (1)..(360): unsure at all n locations
gtttttcagtagtaaagagcaaaaaacagtttggaaaccaatggaagggaaagaagaagatgttagattgggagctaacaagttctcagagaggcagcctattgggacagcagctcagtcccaagatgataaagattacactgagccaccaccagcacccttgtttgagcctagtgagttgacctcatggtctttttaccgagctgggatcgctgagttcgttgctactttccttttcttgtatatctcggtattgaccgtgatgggagttgttaaggacaaaaccaagtgtacaactgttgggattcaagggattgcttgngcttttggtggtatgatctttgctcttgtttactgcac

SEQ ID NO: 220619 - DNA, 278 bp, Gossypium hirsutum
  unsure (1)..(278): unsure at all n locations
gggccgacccacgcgtgcggtttttcagtattaaagtgcaatttacagttgttaaaccaacggaagggaaacagcaaggtgttatattgggagctaacaagttctcacaaaggcantctattgggacagcagctcagtcccaagatgatatagattacactgagccaccaccatcactcttgtttgagcctagtgagttgacctcatggtttttttaccgagctgggatcgcttaattcgttgctactttcctttttttgtatatctcggtattgacc

SEQ ID NO: 220620 - DNA, 362 bp, Gossypium hirsutum
attggaaaagccctaatttgacagctctctcagtctctcattttgcctgaaaaccatgtcgaggagaaaggttagggagcccaaggaggagaatactacccttgggccggctgtacgagacggcgaacatgttttcggggtggctcacatttttgcttcatttaatgacacatttattcatgtaacagatttgtctggaagggaaacaatggttcgcattacgggtggtatgaacgtgaaagctgatagggatgagtcttccccttatgccgccatgcttgcagcacaagatgtttctcaacgctgcaagggagtgggtattacagcccttcatataaagcttcgagctactggagggaaca

SEQ ID NO: 220621 - DNA, 317 bp, Gossypium hirsutum
gggaaggctgccaaggatccaaacaagccaaagaggcctgctagtgccttctttgttttcatggaggagttccgtgagcaatacaagaaggatcaccctaaaaacaaatccgttgcggctgtcggcaaagctggtggagataaatggaagagcttgtctgaagctgaaaaggcaccttatgtagctaaggcagaaaagcggaaggttgagtatgaaaagaacatgaaggcctacaataagagacaggctgagggtcccaaaaacgaagatgttgagtctgacaaatcagtgtctgaggtgaatgatgaggatgatga

SEQ ID NO: 220622 - DNA, 341 bp, Gossypium hirsutum
gattagagttgggggttttcgggtttattttttggttgaatcaatagtaagcaaaagaaagaaatggcaaccgttaatgggtaccaaggaaacactccagtggccactagcactggatcgaaacatcctgcctccactgctaaaactgctgatgctcaatctgttcttaaaaggttgcaatccgagttgatggctttgatgatgggtggagattctgggatatcagcattcccagaagaagacaacatattttgcttggaaggaacaataacaggaagcacagacacagtgtttgaaggaacagaatacaagctatctctttccttctccaatgattaccc

SEQ ID NO: 220623 - DNA, 334 bp, Gossypium hirsutum
aaacgaatatctcgaaattggatatgtaaaaacaaataatcaaaaatttctgattatacagaaaaaaagatcgagaaaaaagacgaggccaaaagagaaaaatacaaaagagaagagaaaatgaggatagaaatagcagaagcttgggatagtcttttacttgctcaagtaataaggggctccgtgttaataacccaatcaattcttagaaaatatattatattaccttcactgataatagttaaaaacattgcccgtatgttattatttcaatttcctgagtggtctgaggatttaacggatcggaatcgagaaatgcatgtaaatgcactat

SEQ ID NO: 220624 - DNA, 366 bp, Gossypium hirsutum
atttgcttaaaggagagcacaaagaccctgaatttctcaagctccagccttttggaacagttcctgtcactcaagatggagattatgttttatatgaatcccgtgcaatcataagatactatgcagaaaaatacaaatcacaagggactgatctactgggaaagacagtagaggaaaggggtcaagtggaaaattggctagaggttgaggcacacaatttcaacccaccaatttacgccttgaccctacatttgatgtttgcttccaagatggggttccctcctgatgaaaatttgatcaaggaaagcgaggaaaagctaggcaaagttctggatatttatgaggagaggctgtcaaaagacaagt

SEQ ID NO: 220625 - DNA, 348 bp, Gossypium hirsutum
aaggttggggtgtccctccaaacaccctggctgaatattcacttaatcaatttggaaacatggatttctacgacatttccttaattgacgggtttaacatccccatggtgtttggtccaactaatggcggttgtcacaacattcggtgcacagcagacctcaagggacaatgcccgaatgagttaagggctcctggtgggtgcaataacccatgcacagtgttcaaaaccaatgagtattgttgcactcaagggtacggaacctgtggtccgacctatttctcaaggtttttcaaggaccggtgccatgattcatacagttatcctcaggatgatccttcaagcacct

SEQ ID NO: 220626 - DNA, 344 bp, Gossypium hirsutum
cgcagagttatactgcccattatattccctgccttggagcaaaatgggcataaccattggaaccaggttgtacagagcttgacgcttaatgttcgcaagattttttctgataccgatcctgagctattcgaggaatgcttgaacaagtttcaagaaaatacagaaaagcgggaagagatcaaaacaaaacacgaagcggcctggaagcgcatagaagagattgcggtatcaaatgctgcaaatggtgaagcagttcttgttcctcatgtcgtagcttcagaaacatcatgagtacccttggtgatttgactggactctagtcaagtgtctatttcttttatcgt

SEQ ID NO: 220627 - DNA, 371 bp, Gossypium hirsutum
tgccatcgagaaccctcaggacatcattgttcaatctgcaaggccatatggtcagagagctgtactgaagtttgcacaatacactggttgtcatgcaattgctggaaggcacactcctggtaccttcactaaccagctccagacatcgttcagtgagcctcgtcttcttatcctcacagatcccaggactgaccaccagcccatcaaggaagcagctctcggaaacattccaaccattgctttttgtgatactgactcaccaatgcgatatgttgacattggtatccctgccaataacaagggaaagcacagcattggttgccttttctggcttgtagctatgatggttcttcagatgcgtggaacaattg

SEQ ID NO: 220628 - DNA, 401 bp, Gossypium hirsutum
  unsure (1)..(401): unsure at all n locations
gccaagatcttttggcgcactgttcgcggattgattcctcataagattaaggttttgaggcttcagaaggggcacaagtactgcttgttgggccgcttgtcatctgaggttggatggaaccattatgacacaatcagggagctggagaagaagaggaaggaaagggctcacgttgcatatgagaggaagaagcagctgaacaagcttagggtaaaagccgagaagactgtagaagagaaactcggctctcaactcgacatccttgccccagttaagtactgaatttctagtggctagctaagttcatacaattttgttaaaggttattggnttcactatttaattccgtttgagatgtggagtttaaaattttttgtgaatctctggttgtcccttttttt

SEQ ID NO: 220629 - DNA, 336 bp, Gossypium hirsutum
  unsure (1)..(336): unsure at all n locations
tcgaaaaggattcaaaccccttttcccttagcaaaaatgaagtacaacccacgggtctgctcctttcttcncaagagccgcaaggcccatttcacggcaccctcgtcggtccgccgtgtgttgatgagcgccccactctcatccgatttgaggtccaagtacaacgtccggtccatgccagtgcgcaaggacgacgaggtccaagtggttcgtgggacttacaaaggccgggaagggaaagttgttcaagtctaccgtcgcaaatgggtgatccacatcgagcgcatcacccgggagaaagttaacgggtcgaccgtcaacgttgggattaaccca

SEQ ID NO: 220630 - DNA, 373 bp, Gossypium hirsutum
cgacctttctatagccgatcgatcactaccttcccccctcccagaatgttgcgtccggcagcgatgctattgacctgtcgatccattttgacagcaagggctcgacccttctccactgatctgccagcggcaccctctgcggatgccacattcacggaggcgtggactaaagtgatccccaacatggaccctcctaaaactcctctctctttcatgcaacctcgtcctcccactccttcctccattccttccaagcttactgacaatttcgtccttccttatgcttctgagttggccaccaaagaagttgacatggttatagtaccagccacaactgggcagatgggtgttctttcaagacatgtaacaacaa

SEQ ID NO: 220631 - DNA, 393 bp, Gossypium hirsutum
gcttcacaaaactcatcatcttcaggtttccaggatttcttgcccgtgatggctgacaagcgtcgggggggatggcttgataggggaactgtgcaatgggttcaacctgttgatggatagagaaaaaggggtcattactttcgacagcttgaagaagaattcggccccgttggggttacaggacttgacagatgacgatttgaagtgtatgatggaagaaggtgattttgatggcgatggggctcttaatcagatggagttttgtgtgttgatgttcaagttgagccctgagttgatggaagcatctcggtttttgtttgaagaagcttttcaacatgaattcaaggattttcattgattggtcttgtttcatccataaattgtcgtttaatg

SEQ ID NO: 220632 - DNA, 303 bp, Gossypium hirsutum
  unsure (1)..(303): unsure at all n locations
ggagtgattgaaaattttcttggagaatgtgattcgtgatgctgtgactaataccgagcacccgacnaggaagaccgttaccgctatggatgttgtttatgccttgaaaaggcagggcaggactctctatggttttggaggttaagtttaggatcattcttaagttcgtaactgtaatgcctttagatcttgactctagatctatatcgttatgtacttgtttgtgtactctgagtgatgttataatgatttgtaaccttaagattgatcgtataattntcatttgcaaagctttctttgggc

SEQ ID NO: 220633 - DNA, 352 bp, Gossypium hirsutum
gccattttcctggatgcagggctaaacttttggtttttatgcttttaaaattaaaagaacgggtgcatttgtggtttgaaaatgagatacttgggaggcaaaatattttgtttagtgtgtcagaattgtgtttagtttttttccttcaagttgaaatgttttatttttggtgtttttaatcttgtcgtttatttgcttttaagatctagggacgtaccaagcttagctggactcaagctcaagcgtctcgttcagtcccccaattctttcttcatggatgtcaaatgccaaggctgcttcaacataacaactgtgtttagccactctcaaactgtggtggtatgtggtaact

SEQ ID NO: 220634 - DNA, 365 bp, Gossypium hirsutum
ccaaagagctggcacaatagtgccaagaaaagaccggttccgtagaagctccacacaaatggtgcatgatccttacacactggtaatagctctgaacagttcccaagcagctgaaggtgaactctatgttgatgatggaaaaagctatgacttcaaacatggggcatacatccatcgccgctttgtgttctcgaatgggcatctaacatcctctcccgttggcaactctaggttttcgtctgactgcattatcgagcgggttattcttcttggatttacccctggggctaaaactgctcttgtcgaaccaggaaatcagaaagctgaaatcgaacttggtccacttcggttcgggggacaacatg

SEQ ID NO: 220635 - DNA, 365 bp, Gossypium hirsutum
gcttgctcattttgctttgttctttaatcatgggcaatgttgctgtgccgggtctggcacgtttgttcacgaacgtgtttacgatgaattcatagagaaagcaaaggcacgtgcattgaagcgtgttgttggtgatcctttcaggaagggtgtcgagcaaggtcctcagattgacacggagcagtttgagaaagttttaagatacataagagcaggcatcgaaagcaacgcaacccttgaatgcggaggtgacagacttggaacgaaaggatactttgtccaaccaaccgttttctcaaacgttatggatgatatgctgatagcaaaagacgaaatcttcggtccagtacaatctatcctaaagt

SEQ ID NO: 220636 - DNA, 380 bp, Gossypium hirsutum
taatctcaagagtgtgagggaattgatttacaaaataggttttgggaagttgaacaaacagagaggtgctttgacagacaatgcaatcgtggagcaagctctgggcaagtttggcatcatctgtgtggaagatctcatccatgagatcatgactgtgggacctcattttaaggaggccaacaatttcctctggcccttcaagctcaaggcacctttgggaggtctgaagaagaagagaaaccactatgttgaaggaggagacgctggcaatcgtgagaattacatcaatgagctaattcggagaatgaattagacgttggctttatttgttaattcagtatttttggtttgttttgaaggatcctgatatgatttctttt

SEQ ID NO: 220637 - DNA, 422 bp, Gossypium hirsutum
gagagaagcagggaaacaagggaagagtttgttgagaaaaaccaaagatggcaaaatgctggctggaatgttgaaactgatgattcattttgtacattggctgaaaccttccagaaagttgatccttctttaggtttcaatattgaattgaaatttgatgaccatattgtttaccaacaagaccatctcatccatgtcctccaagtcatcttgcaggtggtatctgagtatgctaaagataggcccataatcttctctagctttcaccctgatgctgctcaactgattaagaaattgcagaacacttaccctgttttcttcttaacgaacggcgggactcaagtttactatgatgtaagaagaaactccctggaggaggccataaaggtgtgcatggaaggaggtttacaagggattgtttt

SEQ ID NO: 220638 - DNA, 420 bp, Gossypium hirsutum
  unsure (1)..(420): unsure at all n locations
tacgattttggttgtgtggaaaaaaaaaattgactcccttgacaacgtggtaaatcctccgaaagacttctccaaggacagcgtccgcctcntcaagcgttgtcacaaacccgatcgtaaagagttcacgaaggtggctttccgtacagcgatcggtttcgtagtgatgggattcgtcggattcttcgtcaagctcatctttattcctattaacaacatcatcgttggctccgcttaggaattgcaggctcgtagaaattggtgggggatatgaccagttggcgtagttgcagattctcatagaaaatgaatgttagaatgcagcagttgggggctgtccctcttcccttctcattttacattttattagttgaaccaatagtcttgaatctaaagtaaactctcttggaatttctttga

SEQ ID NO: 220639 - DNA, 238 bp, Gossypium hirsutum
  unsure (1)..(238): unsure at all n locations
ccaaaggatgttttttttatatcctttgatgaaccttccatgaaggctcagaattatggggtttgagtgaaaaaaaatantgccattgctaaataagcaaataatcataattgtggtttttacggggaaatggttcaataaggtatgttttatttcaatgttgggttttaatgtattatttgaaagttttcatttaagtcattagacttataaaattgtagtcgtttgactttttctg

SEQ ID NO: 220640 - DNA, 394 bp, Gossypium hirsutum
  unsure (1)..(394): unsure at all n locations
atccgtttcgactagtggtagtgtcggctctccttcgagccggagtgagctagctgtggcgacgcctgctagtgagaacacttttttaaggttgaaccatctcgatattcacggagatgatgctggatctcaaggtgctgttggtagtaaaaagaaaaagagaggtcaacgtgcagttggtggtgataagagtggcagaggactccgtcaatttagcatgaaagtttgtgaaaaagtggagagcaagggaagaaccacgtacaatgaggtggcagatgaacttgttgctgagtttactgatccaggcaataacatagcatcaccagatcagcggcagtatgatgagaaaaacnattcgcgaagggttatgatgcccctgatgtactaatggcga

SEQ ID NO: 220641 - DNA, 389 bp, Gossypium hirsutum
  unsure (1)..(389): unsure at all n locations
ggtaaaaccactggattttctttcttcctaccaaccttcaaaagtttcaaggttaatggcgcctcagagaaacctaattaattanttaacatcaaantcttcacaaatttattaccccttatgacagcaggggtgtgtggtaatactattaatanngacaaactgcatgctatcatatcatcacacacattttatgatcttctatccgaatctggcttgctgtgtgtggattatgagaagcaagtgatacgtctattgttggaacctgctcaaaaatttttctctaaggcttattgctttgagttcattacaagatttccttgattaagtaaatgtattatatcttttattaccaagattcacttgattaagaaaatgcattcttgttt

SEQ ID NO: 220642 - DNA, 377 bp, Gossypium hirsutum
gatggctgttgcacttggtggaaggattgccgaagaagtaattttcggggaggaaaatgtgacaacaggagcatcgaatgactttatgcaagtctcacgagtggcaaggcagatggttgaaagatttggattcagcaaaaagattggacaagttgccattggtggaggtggtggcaatcctttcttaggtcaacagatgtcatcacaaaaagactattccatggcaacagcagatgtggtggatgcagaagtaagggatttagtagagactgcatacacaagggcaaagcagataatcacaactcacattgacattctccacaagcttgctcaacttctgatggagaaagaaactgttgatggagaagagttcatga

SEQ ID NO: 220643 - DNA, 423 bp, Gossypium hirsutum
  unsure (1)..(423): unsure at all n locations
cccacgcgtccgcccacccgtccggcaaatgttaatcatcctggttctcataataatactagcccgtccattgctgccgtagtagcaacaatgaactggcctgaagctaatcgttatgcagcaagggttcgaccccagatccatcgcaaagaacagatcctagagttcggtgaaatgtgtttggagcttgtcgaatcttatgctcgtctaaataatgttaaaccagaaaaaattgtgctcttccgtgatggggttagtgagggtcagtttgatatggttcttaatgaagagttaatggatctcaagagtgcattccagagaatcaattattttcctacaatcacccttattgttgctcaaaagcgacaccaaactcgtttttttcccgagggaaagggggatggnggtcccacgggtaatatt

SEQ ID NO: 220644 - DNA, 334 bp, Gossypium hirsutum
gtttgagaccctcaagcaccgtgcggaagaattttgtggacaggaccatggcaatgaaggcgcccatgctgctttagttagcaccattgctcgttctttccacaacatgccttatcttgtagtggcatccccttgttcgttgactgccatgaataacaatggcttctactattgcaatgaggaagattacaatgctgctgtcgattctggggctagtgaggacgagcagtggtcctattgctacgcctgaggcagtgttctactatttgctttattgcatggtttgccagtccttgaatgtctagttattttagttttttgttccctttttaat

SEQ ID NO: 220645 - DNA, 339 bp, Gossypium hirsutum
  unsure (1)..(339): unsure at all n locations
cacgagccgtagtgcgccgtttgcatcaggaagaaatggcggtccctttgctgtctaagaagatggtgaagaagcgtgtcaagaagttcaagaggccccaaagtgaccgcaagatctccgtcaagacaaactggcgaaggcctaaaggtatcgactcccgtgttaggaggaagttcaagggatgcactttgatgcccaatattggttatgggtccgacaagaagactcgccactatctttccaatgggtttaagaaatttgtcgtgcataacgtccaagagctggagcttctcatggtgcacaacangacatactgtgctgagatagctcatgatgttt

SEQ ID NO: 220646 - DNA, 365 bp, Gossypium hirsutum
  unsure (1)..(365): unsure at all n locations
gaagagaagatggagcaaacattcatcatgatcaagtctgatggggtccaaagaggcctgggtggggaaatcattggcagatttgagaagaaaggcttctatttgaaagggttgaagctcatcagtgtggatcgatcttttgccgagaagcactatgctgacctgtctgcaaagcccttctttaatgggctcgtagagtacattatctccggtccggtcgttgctatgatttgggaaggtaagaatgttgttaccacaggtcgcaagattatcggagccacaaacccagctgaatccgctccgggaacaatccgtggtgactttgcaatngacattgggaggaatgtgatccatgggagtgattc

SEQ ID NO: 220647 - DNA, 295 bp, Gossypium hirsutum
gcccctttcattaccatcaaaatcactccatttttttttatcactgaaaaatgtcttgcggggggggaaactgtggctgcggtactggctgcaagtgtggcagtggctgtggaggatgcaagatgtatccagacctgaacgctgccgagatgaccacaactgagactctggttcttggtgtagcaccccagaaagcacactttgagggagctgagatggaattcggggctgagaacggctgcaagtgtggagacaactgcacctgcaacccttgcaattgtaaatgattagagac

SEQ ID NO: 220648 - DNA, 402 bp, Gossypium hirsutum
  unsure (1)..(402): unsure at all n locations
ggtagaaaagcttgatgaagaggaataaaatgagaatcctttgaactatcatagtgagaagcttgccattgccttcggtttgttgaaaacaaaagcaggggacactttcaggataacgaaaaatcttcgagtttgcagagattgccaccatgctagcaaacttatctcaaaggtttttgatcgtgagatcgttgttagggaccggaatcggtttcaccatttcaaagatggggagtgttcctgcaaggattactggtagtactaggtggtgtgcttgtggctgttaacttangtgttaacagtgtgtgtatatatattgtatcaatctgattcgatctancccgatacttatatgttaaaaaaaactcatttgaattttatatggagtattatttatatatc

SEQ ID NO: 220649 - DNA, 367 bp, Gossypium hirsutum
gggattttaagcttaaaaccctaaccctagtaatttattcggaattcatcgctggggctgggtgacctcattcaaaatgcctcgccgtagctctggaaggtctgcttctcgccctgcccctcgtcctgctcctgctcgcaaccctccacctcaaccagctcatcatgctcctcctccagctcctgctcagagtggaagtggtggatccttgctcggaggcataggctctaccatagctcagggcatggcatttggtactggaagtgctgtagctcacagggctgtggatgctgtgatgggtcctcgtactattcaacatgaaactgtggtttccgaggctgcagctgcccctgcaccagcaactact

SEQ ID NO: 220650 - DNA, 392 bp, Gossypium hirsutum
  unsure (1)..(392): unsure at all n locations
gcttagggttttaggagctgaaaactgaggaagagacagcgatgatggctacatcgggacgggtttggaaggtgcggcggattgttagaagcggcgaaggctttctctgcttccttcgcttattcgtcttcttcttcttccagtggaaatggaagggggcttatgcgggtgatacctgtctctccacagctgggcaagttccttggagcctccgaagcttctcgcaccgacgccattaaaaggatttgggactacatcaagctccacaatctccagaaccctgcaaacaagaaggagattatttgtgatgagaagttgaagacgatattcgccgggaaagagtctgtcggaatgttagagatcagcaaatatctctccccacattntctgaa

SEQ ID NO: 220651 - DNA, 315 bp, Gossypium hirsutum
aactggaaaaactaccttcgggaataggcatctaactggagagtttgaaaagaagggccagccaaccattggtgtggaggttcatcccttgcacttcttaactaactgtggcaaaatccgtttctactgctgggatactgctggacaggagaagttcggtggtctcagagatggttactacatccatgggcaatgcgccggaattatgtttgatgtaactgcccggttgacatacaagaatgttccaacatgtcatcgggatctttgcacagtgtgtgagaatattcctattgttctatgttgaaacaaggttga

SEQ ID NO: 220652 - DNA, 321 bp, Gossypium hirsutum
  unsure (1)..(321): unsure at all n locations
ggtgcaagagcttgggaggttctcggtggttgagtataacaggcggagccaagggcgggtgcgtgtcagtttggccaatggtgggccgtcgacggcgttggttttctctcaagtggtgggagctgagaaacaggtggttgctgggatcaagtattatctcaagattaaagccatgcaaggtggggtaaccaagacctttgagtcagtggttttggttaaaccttgggttcaatccaaggacttgcttaatttttccccttctactcattaaaaagagaagtctntttccctttgtatcttaattaataaagcgattgaata

SEQ ID NO: 220653 - DNA, 384 bp, Gossypium hirsutum
  unsure (1)..(384): unsure at all n locations
gctgtgggtccaataaaagatggtgatgcttttgttacttttaacttccgagcaaatcgagtggtgatgctcgcaaaggcactcgagtatcaaaatttcgacaaatttgatcgcgtaaaggttcctaaaattcgttatgctggaatgctccaatatgatggtgagttgaagcttccaggccgctaccttgtttctccccccgagattgacagaacatccggcgaatatttggtgcacaatggtgtacgtacttttgcgtgcagtgagacagttaaatttggccatgtcacattcttcntgaatggaaatcgctccggctatttcaaccctgaaatggaagaatatgtggaaatcccaagtgacgttggcattacattcaatgtt

SEQ ID NO: 220654 - DNA, 381 bp, Gossypium hirsutum
  unsure (1)..(381): unsure at all n locations
tgcctcttanaaagtcggagcacgccttctacttgaaatgggctgtccactccttgagaaggaccaactgtggtgtacaggacactacccagatccacactcatatgtgctactccaacttcaatgacatcatccactcaattatcgacatggatgctgatgtgataaccatcgagaactcacgttcagatgaaaagctcctttctgtattccgtgaaggagtgaagtatggtgctggaatcggccctggtgtctatgacatccactctcccagaataccatcaaccgaagagattgctgaccgaattaacaagatgcttgctgtgcttgagacaaacatcttgtgggttaacccagactgtggtctcaagactcgcaagt

SEQ ID NO: 220655 - DNA, 323 bp, Gossypium hirsutum
gttatgggattgcaagaaaatcttcttaggtgcatttatgcttatggttttgagaagcccgctgcaattcagcaaagaggaattgtacccttttgcaagggacttgatgtaattcaacaagcacaatccggaacaggaaactgcaactttttgctctggaattctacagcagcttgactacagcttagttcagtgccaagcattggtccttgcaccgacccgtgaactagcacaacaaattgagaaggtcatgcgggcattaggtgattaccttggtgtcaaggttcatgcttgtgtaggtgggaccagtgttcgtgaagatc

SEQ ID NO: 220656 - DNA, 359 bp, Gossypium hirsutum
aaagaaagtattctctgagatgggttcttccttaatctacaaggtgggaacaatgattgagaacggagagcagccctagttgctgatgagattgcaaaggaagcagaattcttctcctttgggactaacgatcttacacaaatgacatttgggtatagtcgagatgatgttggcaaatttctccccatatacttgtccaaaggcattatacaaaatgacccatttgaggtacttgatcagaaaggtgtaggccaactcatcaaaatggccaccgaaaagggtcgccaagctaggcctagtttgaaggttggaatttgtggagagcatggaggggaaccttcttctgtagcattctttgc

SEQ ID NO: 220657 - DNA, 322 bp, Gossypium hirsutum
tccaacggttaataaccgacattttttaaacgttggttcaagaatcttcaaggctggcgcgcggtaccaggaaacccaccattacctcccgtgagattcagactgccgtaagattggtcctacctggggagttggccaagcatgctgtttcagaaggtaccaaggcggttacaaagttcaccagttcttagtttccaaaaatctaaaatacaaaaaaaaaaaaatctgggaaatatggttttgttgtaaaaatcattagctttttgtaggtcttcctgttatttgcagagcttaaatggaaatttaatcatattttgaattt

SEQ ID NO: 220658 - DNA, 425 bp, Gossypium hirsutum
  unsure (1)..(425): unsure at all n locations
gtccgctcttatggttacttatccttcaacacatggagtgtatgaagaaggcatggatgagatatgtaagattattcatgacaatggaggtcaagtttacatggatggggctaacatgaatgcccaggtcggtttgacaagtccgggttttattggagccgatgtttgccatctgaatctccacaaaaccttctgcattccacacggaggtggtggacctggcatgggacctattggtgtcaagaagcatttggcaccatttttgccttcacaccctgtggtacctacaggaggtatcccagccccagaaaaatcagaccctcttggtaccatttncgctgcaccttngggctctgcacttatcctgccgatatcttacacttacatagccatgatgggatctaagggactcactgatgctttaa

SEQ ID NO: 220659 - DNA, 389 bp, Gossypium hirsutum
gccacgcgtccgacactttcagtatgtctgctttaaaatcctccttttttttggggataatcaaatcaactgcacggcgacccattccttgttgcctgcagcttcatctttcaagcccatcaaaaacccttgtttacctcaaacccacaagcttttcacatcaaactccaacactttctcagctcccaagcgaggtttcacttgcaaaagccaggctattccatctgataactcagctccggaaaaagttcaagaactacatgtgtatgagttgaatgagagagatcgtgggagtccagcttaccttcgtttgagtcagaaatctgtgaactcactgggtgatcttgtcccttttagcaacaaaatatataagggagatttggagaaac

SEQ ID NO: 220660 - DNA, 403 bp, Gossypium hirsutum
  unsure (1)..(403): unsure at all n locations
gagctttgggacgtanacatcaaagcagatttcattgttcataaaaaggtgatgaagcacgtcgaggatgccatagactcaaagatcccttggatggtgatcgtgggcgagcgagagctgaatgaagggatcgtaaaattgaaaaacatcgaaaccaccaacgaggaagtgattcctagaagtaatcttgttggtgaactacagcaacgattgaagttgaacccatgaaaaaggggtcaatgctcttctattctcaacaaaggtagagattctcaaatatttttgtctgaacatacaaatttactttagtaattgntgtattgcaaataaatccatgtactcatgcttttgatttttttttatttacccataattatatttaaggggtttatacattttattt

SEQ ID NO: 220661 - DNA, 332 bp, Gossypium hirsutum
cgcttctggaagagcattggtttgggcttttagactcctcgtgaagctattgaaggggccggcattgacaagaaatgcccgtttgccggcactgtttcgatcaggggtcgtatcttagctggtacttgccatagtgctaagatgattaggacaatcattgttcgacggaattaccttcattatatcaagaaataccaaaggtatgagaagaggcattcgaacatacctgcacatatttctccatgcttccgtgtgaaggaaggggatcatgtcattattgggcaatgcaggccattgtcaaaaaccgtgaggttcaatgttttgaaagtgat

SEQ ID NO: 220662 - DNA, 391 bp, Gossypium hirsutum
  unsure (1)..(391): unsure at all n locations
aaacacttctccagtgaccaaaaaagcttctttgtctcttctatcgaaaaccccatggccgctcttaatctagtttgtgctctagtgttgtgcatgttggtggttgagcccattgccacaaccaccataacatgcggcgatgtgacaagcaaagtggccggttgcttatcatacttgcagaacggagggaacgtgccgaaggcttgctgcgacgggatccggtccctgaacaacatggctcgaaccacccctgaccgccaaaccgtgtgtgggtgcttgcaagctgccgctaangctgtcaaaattaaaggcaacttggctgagaccctcccagccaaatgtagtgtcaacatcccttacaagatcaacactttcactaactgcaaaaatg

SEQ ID NO: 220663 - DNA, 243 bp, Gossypium hirsutum
  unsure (1)..(243): unsure at all n locations
tttctctgcgatcttaactttcttctttgctttatttggtccattgttaggagccatgactggggctttgataggacaagaaaccgagagtggtttcgttcgaggggctgcggtcggngctatatccggagccgttttctccatcgaagtcttcgaatcatctcttcttctttggcaatctgacgaatccgggatcttatgtnttgcttacttgattgatgtcattgcaagccttttaagtgg

SEQ ID NO: 220664 - DNA, 331 bp, Gossypium hirsutum
agatggtgaaggggaggatgttgttttggttcttatggagaagagtaaggatcgaggttagattgtaaattgggcaccacaagaggcagtcttgaaccacccggccattggcgggttctttacgcataatggatggaactcgactttagagagcgttgtcgcaggggtgcctatgatttgctggcctcagtttgctgaccaacacgtcaatagtagggttgtgagtgtggtgtggaaaatagggttggatatgaaggatgtatgtgatagcaagatagtggagaaaatggtaaatgatgtgatggtggatcgaaaggaggagtttgcaaaa

SEQ ID NO: 220665 - DNA, 443 bp, Gossypium hirsutum
aaaacccgggccgacgcacgcgtccgcttttccaaacaatcaaaagattcatataccttctcttttcgaccatggcagtatcaagagtgtcttttgctttgagccttgccattttctcaatctgggccgttgatgcagctcaccaccatgcgacagcgccgtccccttcttcttcttcttcatcctcctcttcctccactgtggactgctcgactctgatactgaacatggcggattgtttgtcgttcgtgtcaagtgggagcgaggtgtcgaaaccggaaggaagttgctgttctggattgaaaaccgtgttgaaaacgggccctgagtgtttatgtgaggcatttaagagcagtgcttcaatgggtgtttcattgaatgtcactaaggcctccactttgcctgctgcttgtaaagtttctgctccttcttctactaactgc

SEQ ID NO: 220666 - DNA, 313 bp, Gossypium hirsutum
atggatttgaagcatctaacaagatcttggttctgatggccaccaatcggattgatgtcggggatcaagctcttcttaggccaggacgaattgacaggaagattgaatttccaaatcctaatgaggagtctcgtttcgacatcttaaaaatacattctagaagaatgaatttgatgagagggattgatctaaagaagattgctgagaagatgaacggtgcttctggtgcagagcttaaggctgtgtgcacagaatcaggaatgtttgctttgatggaaaggagagtccacgtaacacaagaagtatttgagat

SEQ ID NO: 220667 - DNA, 387 bp, Gossypium hirsutum
gtgatggactctgggatgttgtgagtgacatggaggtgacaaacatcatcagagacacggggaaagagccggcattgtgctcgaaaaggttggcaacggaagctgcaaaacgtggcagtaaagataacatcacagtcattgttgtgttcctttgtccagtatccacagcagagagagtttactaagggtgtttttgattgttttttgtgaattcaattcgcttgaaataaagatgaattaaatcgtccatgttatgagcaacagcatttggcctttaggagctggttttgcttctaaaatattcatttaatattgatatatttattcgggcgatactttattctgaaataataaaattgattttaggtcaaaaaaaaaaaaataaaa

SEQ ID NO: 220668 - DNA, 413 bp, Gossypium hirsutum
ggagagaatacaaggttgatgcaactgttggaaagcctcgtgtgaatttcagggagactatgactcaacgtgctgagtttgattatctacataagaagcaatctggaggacagggtcaatatggacgagtgtgtgggtatgttgaaccacttccgcctgggtctccaattaagtttgaatttgagaacatgattgttggacaagctataccatcaaattttattcctgcgattgagaagggtttcaaagaagctgcaaattcaggttcattaattggacatccagttgaaaatatccgggttgttataactgacggtgcttctcatgcggtagattctagtgagcttgcatttaagttggcttctatctatgctttcagacagtgttatagtgctgctaggcctgtgatattg

SEQ ID NO: 220669 - DNA, 420 bp, Gossypium hirsutum
aaaaaattcttctctctgcttacaactcctgataattatcttcaaattttggaatatagaaatggaaggagtgggctccaccaggctgggccgagcttccgctaggtacggtggttcaacggcggtgttcaatggaccggtgaggaagtggaagaagaagtgggttcacgtgtcgccttcatccaccgctaaactctctcagtccaacgggaacggttccgccgcctccagcatccttctttgtaggtggaccccactctcctttgctgattccgggtcctccgccgtcgatggcgaggacgaggagcaacccccaaagcgcaagtaccgctatacccctgttgctgtgttagaggaagagcgtagaagggcagctgctgcgaaacaggttgaaaatgaagctaggacagatgagaataa

SEQ ID NO: 220670 - DNA, 385 bp, Gossypium hirsutum
gatgaggaagtcgacgagatgatccgcgaatccgttgttgatggtgatgggcagatcagctacgaggagttcgtcaaagtcatgatggccaagtaaaggacctctccaactataaccaggattaaaaaatggggtttaaaaaaaaggaagaaagtaacagggcagataagtttgctaaaatatctattaatgaataggacatcaatgtttttaagttacaagcttttgttggatggttctttgtttcatgtttgcatttttttgtggaccggaccttagtattatgcttgtttgctctgcttttttgttcagtagtgctgggttgttagtgtcaatatttttatgctttgtgctttctttcgaacaaactggaagattcgatgtt

SEQ ID NO: 220671 - DNA, 405 bp, Gossypium hirsutum
caggaagagaaacaaggaaagaaaaaacgaaacagatgggaatcagattcatattaatggggaacaagcaagggcagactcgtcttgcccaatattatgaatggctcaccctcgaagaacgacgtgccctcgaaggcgagatcgtccgcaagtgcttggcccgcaacgagcaacagtgttcatttgttgagcatcggaattacaaaattgtatacaggcgttacgcttcgctgtttttcttagttggagttgacaatgatgaaaatgagcttgcaatattggaatttatacatctcttggttgaaaccatggaccgccattttggcaatgtgtgtgagctagatatcatgttccacttagagaaggcacatttcatgctggaggaaatggttatgaacggttcta

SEQ ID NO: 220672 - DNA, 355 bp, Gossypium hirsutum
agcttgtgtcagctaccaaggaaggtcttaaacttgatgagagtgaggatgagaagaaaaagaaggaagctttgaaggaaaagtttgagggtctttgcaaggtcatcaaggatgtgctgggtgacaaggttgaaaaggttgtggtttctgatcgtgtggttgactcaccttgttgtttagtgactggcgagtatgggtggactgcaaacatggagagaatcatgaaggcccaggctttgagggataacagcatggctggttacatgtcaagcaagaagacgatggagatcaacccggagaaccccatcatggaagagctgagaaagagagccgatgcagacaagaatgataaatc

SEQ ID NO: 220673 - DNA, 399 bp, Gossypium hirsutum
  unsure (1)..(399): unsure at all n locations
gaacagagcagcagcagcagccatggttctcaagacggagctttgccgatttagtggtgccgagatataccctgggaaaggcatcagatttgttcgtggagattctcaggttttcctcttttccaattcgaaatgcaagaggtacttccacaaccgtctgaagccctcaaaacttacatggacagccatgtataggaagcagcataagaaggatattgcccaagaggccgtgaagaagagaagacgtgcagcaaagaagccttactcccgatccattgttggtgccaccttagaggttatccagaagaagagaagtgagaaacccgaagtccgtgatgctgccagggaagctgctctccgagaaatcaaggaaagaatcaagaaaactaangatgaaaa

SEQ ID NO: 220674 - DNA, 399 bp, Gossypium hirsutum
gcgaccctctttttcctctaccaggtgattttagctttgtgttagctcctttaagcgatccggcaagatgcaaaacgaagagggtcaaaacatggatctttacatccccaggaagtgttccgccactaacaggctcatcacctctaaggatcatgcttccgttcaaatcaacgtgggacacttggatgagcttggcagatacactggcacattctccacttttgctctttgtggatttgtccgcgcccagggtgatgctgacagtgctcttgacaggctttggcagaagaagaaagctgaagttcgacagcagtagttggatacctttttaccctagtctatctccgagcttgggaaagaacaatctcatggcagcgactattatgttctaggtttttc

SEQ ID NO: 220675 - DNA, 423 bp, Gossypium hirsutum
ccagaccttatgtgaagaaaatggccaagagccaagactatttcttcaaggagttctcaagggccattactctcctctctgagaacaatcctctcactggtagcaagggtgagatcaggaagcaatgcaatcttgcaaacaagcttcactaaaatgcctcgccaaagagaaagccgagtgtggccgaataaaatgtttgtttactcagtttcttttccaagagacgagtttgttaatgtgcaggtgagtaatggtgcaatggtactggtttgtaacgatcgatccattgcatttttcttttagcataagccaggttgccttctcttgatgttggtcatgggcttggtggatgtaaggatggatgtaatatatgtatgtaaagaatggtgtgactgtgtatgatgcatgaatttcaatgattta

SEQ ID NO: 220676 - DNA, 408 bp, Gossypium hirsutum
aaaagatttgatcttttagtgaagttttatgagggaaaatccaaatcaaagaagaaagaggcgaagaccttccttaaagtgtccgattcattactggactgacccataagtgaaaaaaagagggaccccaatataataacctctttgtctttggtggtttagccattgaagaaacgaagcagaagagaaaaagaaaattaacagagttggaagaaagaatgttcgcagcggagaatggactcaaaggggacccgaggctacaagccatatctgacgccattagagtggttcctcacttcccaaaaccagggattatgttccaagacataacaactttgttgctggatcacaaagcgttcaaagataccgtcgacatatttgtcgatcgctacagagacatggatatat

SEQ ID NO: 220677 - DNA, 404 bp, Gossypium hirsutum
cttggcaggttatccaaatctgagtccggtagttgaggaaggaatatgtcaggttttggcgcatatgtggttggactctgagatctatgctgcggcgggaagtgatgcagcttcatcgtcatcctcgtcatctgcatcttcttcttcatcatcatcaccatcatcatcctcttccacatcatcaaagaaaggaaagcgctcggattttgagaagaaacttggcggcttttttaagcaccagattgagtcagattcatccacagcgtatggagagggattcaggcaaggtaatcaagcagtgaacaagtacggtcttaaaaggacccttgatcatattcggatgacaggaagcttccctttttgattcacgaatctttcttttcacataattcgagaaccagatt

SEQ ID NO: 220678 - DNA, 338 bp, Gossypium hirsutum
  unsure (1)..(338): unsure at all n locations
atcggtggntcagcccgctggtcnggattgtgatggagccttttcgcagattgcacatcctcgcactgcggagaacttccgtgccctctgtactggcgagaaaggcgtcggccgcagcggtaagcccctccactacaaaagctcttctttccatcgtgtgatccctaactttatgtgccaaggaggtgacttcaccgccggaaacggtaccggaggtgaatccatctacggatcaaagttcgctgacgagaacttcatcaagaagcacactggtcccggtattctctcaatggctaacgctggaccgggaactaacggatctcagttcttcatttgca

SEQ ID NO: 220679 - DNA, 394 bp, Gossypium hirsutum
ccgagttaccaacacccctgacgttttgactgaggacgtggcggatttggcgatcggtgggatgttggcggtgttgaggaagctctgtgagagtgatcggtttgtgaggagtggcaagtggaagagagggcaatatgtgttgactactaagtttactggaaaaagagttggcattattgggctgggaagaattggcatggcaattgctacgagagctgaagcatttagctgccctattagttactactctagaacagagaaaccagagatcaaatacaaatactatccaagcgttgttgagctggctgccaactgcgatatcttggttgttgcttgtgcactgactacagagacccaccacatcatcaacagggaagtcatcgatgcattgggt

SEQ ID NO: 220680 - DNA, 406 bp, Gossypium hirsutum
gagagaatcatgaaggcccaggctttgagggataacagcatggctggttacatgtcaagcaggaagacaatggagatcaacccggagaaccccatcatggaagagctgagaaagagagccgatgcagagaagaatgataaatctgtgaaggaccttgttctccttctcttcgagactgctctcctcacctctggcttcagccttgatgagcctaacacctttggcaacagaatccacaggatgctgaaactcggcttgagcattgacgaggatgcaggtgaaggtgaagctgatgctgatatgcccccattagaggatgctgatgctgaaggcagcaagatggaagaagttgactaagcaccactcttcttgttggaactttttactagtttttttttaattatta

SEQ ID NO: 220681 - DNA, 406 bp, Gossypium hirsutum
  unsure (1)..(406): unsure at all n locations
ggaattnccgggctcacccactcgccctgaggtgatggatcttaccgaggatgacctgtttgataaatttgctagtggacgtctccatgggtactggattgtctcttgccatctcatacccaacatttgcagctgtaccacacatgttcatcaatggctacaagaatgtcttggctgttgcagtagcaacagagtattctttccgtcaggccgataaagtgaaagagtatttgacggatccaagcaaatttgccgtttctactgcccctgttgctgctgctggtggagctgctccggctgctgctgtccctgcaaaggagaaaaaaccagacccacaataagagtctgatgatgatatgggattcagtctctttgactaagtttgtctttattagtataaaaattc

SEQ ID NO: 220682 - DNA, 350 bp, Gossypium hirsutum
gcttgcgcctcgtttccaactgcccagttcttaactttagcggcaaagagagaaatttcggcgccagggccgcgccatgggtcgcatgcacagctgcggcaagggtatttctgcctcagctctaccttataagagaactccaccaagctggctcaagatctcttctcaagatgtcgaggagaacatttgcaaatttgcaaaaaagggcttgaccccatctcagatcggtgtcattcttcgtgactctcatggcattgctcaggttaagagcgttactggaagcaaaatcttgcgtatcctcaaggctcacggtcttgcccctgaaattcccgaggatttgtaccacctta

SEQ ID NO: 220683 - DNA, 344 bp, Gossypium hirsutum
ggccgacgccacggcgtgcgaatgatctcacctaggataacccgttttatttttatgctagttggcaattacatggcgactaggatagtttctagccatctcatacccaacataagcagctgtaccacacatgttcatcaatggctacaaaaatgtcttggctgatgcagttgcaacagactattctttccgtcaggccgataaacataaagagtatatgaccgatccaaacaaattttccgattctactgtccctgatgctgacttctatggtactgctactgctgctgctgtccctgcaaaggataaaaaaccacaaccaaaaaaagagtctgatgattata

SEQ ID NO: 220684 - DNA, 413 bp, Gossypium hirsutum
  unsure (1)..(413): unsure at all n locations
cagctagcaacaaaggccgcgcgtaagtccgttccggcgaccggtggagtgaagaagcctcgccgtttcaggccaggaactgttgctttgagagagatccgtaagtatcagaagagcactgagctgttgatcaggaagcttcctttccagaggttggtgagggaaatcgcgcaagatttcaagaccgatctgaggttccaaagcagcgccgtcgctgctcttcaagaagcggcggaggcttatctcgtcggactgtttgaagacactaatttgtgtgcaatacatgccaagagagttacaatcatgcctaaggatatccaacttgctaggaggattagaggtgagagagcttangttgcttgtatttgctcgatcgattttaaaattcagaaagacctagatcttggatttag

SEQ ID NO: 220685 - DNA, 414 bp, Gossypium hirsutum
  unsure (1)..(414): unsure at all n locations
gatctacaggatgttttaatcgcagtaggagttaccattctgcatagaaaacccatgtcaggggatccgggagccccattattgggttcctctgcatttccaatcttcataatttatagcgtcgagttgcctgtcaagtgtgaccccagcaagaagcacatgattttaagccgcaggcaattaaatgcggaagctctggcaagttcaacaggagccaaagcagtaagcaattcttgggttttgagctccatatctgcatgcaaattgagtcttggcgaataatgatacagattatagaacgtccctttccttgtatgtctaagcagttctataatttgtatcttatgtttaaatatggcttattccagcaataggttttatattttatcgatagctntggctgcaagtatgatc

SEQ ID NO: 220686 - DNA, 400 bp, Gossypium hirsutum
gcgattgattccttcatttaatcgcattttggttgagaaaataatccctccttctaaaagcaacgctgggatcttgcttcctgagaagacccccaagttgaactctggaaaagtggtagcagttggaccaggagctcaagacagagatgggaagcatatcccagttaatctgaaggaaggagatacagttcttttgcctgaatatggtggcactgaagtcaagcttggtgaaaaagagtatcacctatacagagatgatgacatcttgggaacccttcatgactgatttttgcggctgtgggactggagaatttgattctcattcaaatatgtctctgttcttgaaagaaacaaatatttaccttggacttgtgactctatcagtaattttacatgttta

SEQ ID NO: 220687 - DNA, 413 bp, Gossypium hirsutum
gggaaatatcgattccgaggatcgagtcaaaattttgaaatttttattcaatatagttatagctaatcccaacaatcaaacaattagaaaaaaatctattggaataaaagaaataagtaaaaaagttcctcgatggtcatacaaattaatcgacgatttagaacaacaggagggagaaaacgaggaaaatgtaacagcagagcatgaaattcgttcaagaaaatccaagcgcgtcgtgatttttactaataaccaggcaaacgccgatacttatactaataccaaggatgctaatgatcctgatcaaacagacgaagtggctttgatacgctattcgcaacaatcggattttcggcgcgacataataaagggttccatgcgtgcccaaaggcgtaaaacaattacttgggagc

SEQ ID NO: 220688 - DNA, 364 bp, Gossypium hirsutum
acttaatggtggtgactttccatatgtttcttgtgatggtggcagattgttcgaagctaaagatgttgtatttgaatgtggtccaaattgtggctgtaggcctgagtgcgttaaccgttcatctcagcagggactaaaataccagcttgaggtctatcgcactaaagaaaaaggatgggcagttagatctttggactttatttcttctggcgcaccagtttgcgagtatgttggcatcctaaggaagaatgatgaattagaagatatttcagaaaatgactacatatttgagattgattgctggcacactatgaaagggattggaggaagagagagacgcctatgtgacgtttctctttctatg

SEQ ID NO: 220689 - DNA, 403 bp, Gossypium hirsutum
gagcaatcaatgttgtttgctcatcaccttatgcttctgcaagggtaaagagccaactgaaaagagtagctcgaccaatgtactcgaatcctcctgttcatggggcaagaattgtcgccaacattgttggggattcagctctcttcaaggaatggaatgctgagatggaaatgatggcagggagaatcaagaatgtgagacataaattgtttgatagtctttcttccaaagataaaagtgggaaggattggtctttcgttcttaagcagaccgggatgttttctttcacaggcttaaacaaagctcagtgcgataatatgacaaacaagtggcatgtttatatgaccaaggatggaaggatatcacttgcaggattatctttggctaagtgtgaatatctagc

SEQ ID NO: 220690 - DNA, 387 bp, Gossypium hirsutum
ccgtttcccaactgtccaaggaattgttcgccgaggtctgaaaatagaggccttgattcagttcatcttggaacaaggggcatccaaaaatctcaatcttatggaatgggacaaactttggacccttaataagaagatcattgatcctgtttgtcctaggcatacagcagtgattgaagaacgacgtttgttattgaccttaactaatggtcctgataagccatttgttcgcattatccctaggcataagaaatatgatggtgctggagagaaggcaactacatacacaaagaggatatggttagactatgctgatgcagagtgcatctcagtggatggaggaggaaccttaatggattggggaaatgccatcgtgaaagaaatcat

SEQ ID NO: 220691 - DNA, 402 bp, Gossypium hirsutum
cccacgcgtccgggctgaccgagtagtcactgttagccatggatattcttgggagcttaaaactgcagaaggtggttggggtttgcacaggatcataaacgaaaatgattggaagttgaggggaatagtcaatggaatcgatacaaaggaatggaatccacaatacgatattcacctcaaatccgatggttatactaactactccttggaaacactgcaaaccggtaaacctaaatgcaaggccgcgctacaaaaggagctcgggttgccagttcgcgaagatgtcccactgctcggctttatcgggagactagatcaacaaaaaggtgttgatctaattgccgaggcaattccctggatgataggccaagatgtgcaattagtcatgttaggcaccggcag

SEQ ID NO: 220692 - DNA, 353 bp, Gossypium hirsutum
aattaagggaatgacctttgttatccagggttttggtaatgttgggtcttgggcatcaaggctcatacatgagaagggtggtaaggttattgcagtgagtgacataactggcgctcttaagaacccaaacggaattgatataccagaactgttaaagcataaagaagctactggaagtttgaaaagcttcaatggtggagattccatggatccaaatgaactgcttgtacatgaatgtgacgttctcatcccgtgtgccttaggtggagtccttaacagggaaaatgctgcatatgtgaaggcaaagtttataatagaggcagcaaaccatcctacagatccagacgcatatg

SEQ ID NO: 220693 - DNA, 394 bp, Gossypium hirsutum
agcgctacagagaagaggaagaagagatggctgtgagcgcaacggtgatcggagcacttctgggactgggcacccaaatgtactccaacgctctccgcaagctcccttatatgcgacatccgtgggagcacctgttggggatgggtctgggagccgtgttcgttaaccagcttgtgaattgggacgctcagctccaacgggaccttgacagtatgctcgaaaaggccaaggctgccaacgagcgccgctactttgatggagatgatgattaatgctttccccctatcatcagataagatattcatgcgccaagctactgtggtcataaaccggttcagattgtgagtggatgattttggacttgttgttttggaaacttcttttgctttttctt

SEQ ID NO: 220694 - DNA, 387 bp, Gossypium hirsutum
aacggaaagtttgggcctgcgctccttactattatctaaagcgtccttgggaatagacgggtgggaaagaggaaatcaagagcaaagcctgctcctaagaagcggatggataagcgtgacactgtggtcatattccctttttgtaaccatggaaccagtgttgagtgccgacttgatatgaagaacttgattggagaatcctctagcagaatatgccaagaaagctttagcactgttataacagctttgactgaaccaatagacatatacagtgaatggattgatgaatgtgaacgtgttaacaaccttgaaaaaaaagacgatggggatcatgatgaaagctatgtgcctagaaaacgggtttcgacatctgtatgggactagcag

SEQ ID NO: 220695 - DNA, 389 bp, Gossypium hirsutum
aatggaaacaactgtggtgagcttgtaaaataagaagatattgatggatttcttgggggtggtgcttctttgaaggggcctgagtttgctacaattgtcaactctgtaacaaccaaaaaggttgttgcttaaatatatgtaaagtggattctggtcaatgaataaaaggacgaagagaagctgtttcaggttgaagcttcatggtgatgtatgagttccagtgttatccagtggggttttgattgcttattgagttccttttccccaaaataacacgaaaaagtatgttcgttctcatgtgctatagatcaatttctttaaactgcttgtggaaatatatatagcttattcacatatagaaaaaaaaaaaaaaacttaaacaggggctc

SEQ ID NO: 220696 - DNA, 282 bp, Gossypium hirsutum
gctatccatgaaacccaaagctggaaagaatttgcggaaggctgccaaggatccaaacaaggcaaagaggcctgctaatgcctactctgatatcaaggaggagttacgatagcaatacaagaagtgatcaccctaaaaacaaatccgttgcggctgtcggcaaagctggtggagataaaaggaagagcttgtctgaagctgaaaaggcaccttatgtagctaaggcagaaaaacggaaggttgagtattaaaagaacatgaaagtctacaataagagacaag

SEQ ID NO: 220697 - DNA, 391 bp, Gossypium hirsutum
gttcgcaggggaataagacttgtgacccgattcaacccggaaagaaatgcttcaaaccggattcattgttttggcacgcgagctacgcgtttagttcttattggtcacaatacaggaagactggcgccacctgttattttaacggcttggctactcagacggctaaagatccaagttttggtcactgtaagtttccaagtgttactctttgatgaatacccaatcacaaattgaatcgaattttatttatttgtagtaagacagacctaaaaattattctaaagttagtaaaaaattttaaatattgtataaggggtgattacgatttcttcaaattgtatgatctcattcattaaatgaattaataaatttattataattttatcttgct

SEQ ID NO: 220698 - DNA, 326 bp, Gossypium hirsutum
gggagatccatgtgactattattgctacaggcttctcacagtcatttcagaagacattatgaactgaccccaaggctgcaaaacagaatgacaaagttgcagggggacaagaaagaaaggggatacccttacccctcaaaccatcttccccttcaactgttccgtccggatcatctcaacgaaagctattcttttaatttccctgatctcttctttctacctgctttttgctgttagatgtgtaaagatcttgaagctcatgagtctttagttgccatttgttttatatgattgtgcgcctcttcaataattaacgagtttttgag

SEQ ID NO: 220699 - DNA, 406 bp, Gossypium hirsutum
cccacgcgtccgcgaatcatgggtgttttaagtggattaattgctgtcggaaaatggttcgagcaaatctgtaactggagaaacccgcttacgacgattttaatccatatcctttttatcatcttagtcctttatcccgagctgatacttccaacaatctttctttaccttttcttaattggaatatggaactatcggtggagaccacgacaccctcctcatatggatactcggctttcacatgctgatgcagctcatcctgatgaactagacgaagagttcgatactttcccaacttctcgaccttccgatatcgtacggatgaggtacgatcgtttaagaagtatagctgggagagttcaaactgtgatcggtgacctcgcaactcaaggggaacgatttcagt

SEQ ID NO: 220700 - DNA, 338 bp, Gossypium hirsutum
gaaaaagcggcgaaagatgatgaagaaaatggctgctgcagccaaggatctgccaagtgagtacggtgaaaatgcagaagaagaaagtagtggtgcttcttctgttccagttcccatgccagatttggtgttgcctgcttcttttgattctgataatccaactcatcgctatcgttcccttgattcctccaacccatggcttgttaggcctgttctagatacacatggttgggatcatgatgttggttacgaaggtattaatgtcgaaagactgtttgttgcaaaagagaaatttcctatttcattttctggccagattacaaaggacaaaagggatg

SEQ ID NO: 220701 - DNA, 323 bp, Gossypium hirsutum
ctgtcaccaatacttcctctcatatataaacaaaccccctttttactcattttttcctctcaattctcacttcctttacctccgttcttttgccgtcgtattttttttccagagatttgttcttttcgcttctttcgttatggggaagatcaagatcggaatcaacggatttggaaggatcgggcgtttggttgccagagttgctctccaaagtgaagatgttgagctcgttgctgttaacgatcctttcatcaccaccgattacatgacctacatgtttaagtatgacagtgttcacggtcaatggaagcaccatgagctta

SEQ ID NO: 220702 - DNA, 410 bp, Gossypium hirsutum
gcggtgtcaccaatacttcctctcatatataattttaccttttttttactcattttttcctctcaattggacttcctttacctccgttcttttgccgtcgtattttttttccagagatttgttcttttcgcttctttcgttatggggaagatcaagatcggaatcaacggatttggaaggatcgggcgtttggttgccagagttgctctccaaagtgaagatgttgagctcgttgctgttaacgatcctttcatcaccaccgattacatgacctacatgtttaagtatgacagtgttcacggtcaatggaagcaccatgagcttaaggtgaaggactcaaaaacccttctctttggtgaaaagcctgtcactgttttcggcatcagaaaccctgaagaaatcccttgggg

SEQ ID NO: 220703 - DNA, 404 bp, Gossypium hirsutum
gaaagatacacctatatcattggttgaagatccattcgaccaagatgactggagctcatgggcttcgcttcagtcttccatcgatatccaactcgttggagatgatttgttagtcacaaatccaaagaggatatcggaagctattcaaaagaaggcttgcaatgccttgcttcttaaggttaaccagattggaacagttaccgaatctattcaagcagcacttgactcaaaagctgcaggatggggagtgatggtcagccaccgaagtggtgaaacagaggataacttcatcgctgacctttctgttggtttagctagtggccagatcaagactggagctccttgtagaagtgagaggttggccaagtacaaccagcttcttcgcattgaagacgaactcggaa

SEQ ID NO: 220704 - DNA, 410 bp, Gossypium hirsutum
agtcccgaaatctctgtatatttcaacatgcctaaaaccttctcaaaattatcttcctctactttcttctttcactttactttgctcttcttctctgcaacctctagtggttccttctccaacattttgtctcccaaaaagttcggtctcaagcgagagaagctcacccatcttcacttctacttccatgacatagttagctcacgaaacccaaccgctatccctgtcgccagctccgcctcgaccaacaaatcccatactggctttggcgttgtcatgatggccgatgaccctttgacggccgcacccgaccccaactccaagctcgtgggaaaagcgcaagggatttacgcatcagcagcgcaagacgaagtcggtttattaatggtaatgaacttggctttcatgga

SEQ ID NO: 220705 - DNA, 405 bp, Gossypium hirsutum
accaacgaatttttactttaattttacatttttaacacaatcccaaaatctacgcaatctggtcactggtctcactgcacttctcctttctagtccggaatccttagcggtctcccgcaccacaccttctcgaaagaaaaagcgccggcaaaacgcagcaagaagcttccatatggtggaaaatactgccattgaatatgaggctgacgaaacctttcaccagtacttgattacagttaagccttcacaaaacaatgcgaaaaaatatgtgattctgttatgatacccgatgaacttcacattggctggccccacacacactactgatttcagtgaccagtatgaagaatttacgaatctaaacaccaagacaataggtgtttataaagacagaggaacctgtca

SEQ ID NO: 220706 - DNA, 402 bp, Gossypium hirsutum
tgaagattgtgaacagctaagaaaagccttttcaggatggggaactaatgagggcttaatcatagatatattgggtcacagaaatgccgagcaacgaaacttgattcgaaaaacctacgctgaaacctatggagaggatctcctcaaggcactagacaaggagctctcgaatgactttgagaggctggttttgctttgggctcttgatcctgctgaacgtgatgcccttttggctaatgaagccaccaaaaggtggacttcaagcaatcaggtccttatggaaatagcttgcacaaggtctgccaaccaactgcttcacgcaaggcaggcttatcatgctcgttataagaagtcgcttgaagaggatgttgctgatcacacgactggcgacttccgtaagct

SEQ ID NO: 220707 - DNA, 405 bp, Gossypium hirsutum
cttcgacattttcacgcgctcacactggtcttgcgtctcttatttccattcaaaggggtttgaagataaaccagtgaagttaatctcatgttgaagatcttcaagaagaaaacatctcccaaagatgctttgcggacgagcaagagagaaatggcggttgcaacacgaggcgttgaacgggagattgcgtctcttcaactggaggaaaaaaaattggtggcagagattaagaagacggccaaaactggaaatgaggctgctacgagaattttagctcgccaacttgtacgactgcgtcaacagataactaatttgcaggggagtcgtgcccaaattagaggtgtcgcaactcatacacaggcattatatgccagtacctcgatttctactggaatgaaaggagca

SEQ ID NO: 220708 - DNA, 311 bp, Gossypium hirsutum
gagcaaaccagggtgctacccagcctaaacccgagcaagagagtatactccagcatgcacagcagcagattgctttgcagaggctaattttgcaaccacaaggtgtgccgacaaaggttgtgtgtttgactcaagcacttaatgttgatgatctcagagatgatgatgagtacgaggacattgtggaagatatgagacaagagggtggaaaatatggtgcattggtgaatattgtcatcccacgcccaaatccgaatggagaacctgccccaggtgtcgggaaggtatttctggaatactcggatgttgaa

SEQ ID NO: 220709 - DNA, 375 bp, Gossypium hirsutum
ctttcctttggcacatagaaaaccggtttaccatcctcttcatttcttgtttggctgtttaagtctttctgaattatcttttaacgtgaaatcttactgctatgttgctcaaatttttcgttttttcttgaagtatccatgtccggtgctcatattttgactcatatgtgtacatgggtatgtggatatgaccttctactaatcccgtcctggccaaatgtagttagtggtgttggttgtttaccaatatcacagtattcgtttgttgcatttattcttatccttgctgcagggtgcattactaccaaggagctgggaaccgtgatgcgatcacttgggcagaacccaactgaagcagaacttcaagatatgatt

SEQ ID NO: 220710 - DNA, 407 bp, Gossypium hirsutum
tacacagcatgctcttgacccgttgaccacagtgaaggctcgactgaacaactacggcagagcaagtggtcttatccagcatgagtggcgcccaaaatccctcttcactatctctggagacgtggacaccagagcaattgaaaagagtgctaaagtcgggctggccttggcactcaagccgtagggaaaggtaatatcattgtttgaatgaagggagggctttacttttgattggtgaaaccggaagtctggaagactggggagagtaataatgtgctttgacggatttttcatgatcttggattaaaaaaataattgtgattggcgaactgaaattggcaatttgttatgttaaattcgctagggcgtacgttgttttttttttttttagaaaaacaaggcttcat

SEQ ID NO: 220711 - DNA, 310 bp, Gossypium hirsutum
cactagtctgtcacttgttgatacttgctcttgcattactcttcttgtggtcaaatgctgctaccttcatccacaagtctccacctcgcatccctgaagttcaaatccccaaggacccagttttagagtttgcccaagcgcttaggtttgagattaaccggggtttcgccgtcctgcgggatattgcatcaagaagagatcttaagaagttcctctctgtgatcgctggcttgtgggtcttgtctattgtgggaagttggtgcaacttcttgacactgttctacatagtattcgtactactacacaccct

SEQ ID NO: 220712 - DNA, 407 bp, Gossypium hirsutum
ccttacaatagtgttctgtccactcattcctttcttgagcacacagatgtggccgtgctcttggacaatgaagcaatttacgacatatgccggagatccctcgatatcgagaggccaacttacaccaatttgaacaggctgatttctcaaaccatatcgtccttgacgacttctttaaggtttgatggagccattaatgtagacattacagagttccaaaccaatcttgtgccatatcctcggatccatttcatgctctcttcttatgcgcctgttatctcagctgagaaagcataccatgaacagatatcagttcctgagatcacaaacgctgtgtttgagccctcaagcatgatggctaagtgcgatccaaggcatggcaagtacatggcttgctgcctgatgta

SEQ ID NO: 220713 - DNA, 228 bp, Gossypium hirsutum
gaaaagacacacattaacaggtggtttttataccacgtttattcacataaaacaaccactactgtccaccagatttacacaccccagatatagacaatcgcaagattaaaaggttcgtaaaagaaacagatgatataaacatgaagtcatacaagtatgctttaattcttaacaaactcaatgcttaacattaacaatttatcaccatagatattgccttgatatatt

SEQ ID NO: 220714 - DNA, 419 bp, Gossypium hirsutum
agacaactgacagttacactttgagaatgttttgcatcgggttcactaagagacgaccaaaccaggttaaaaggacttgttatgcacagtccagccagattagacagatacgccaaaaaatgagaggataatgactgctcaggcaacatcctgtgatttgaaggaattggttcaaaagttcattcctgagatgattggaaaagaaattgaaaaggcaacatctagcatctatcctttgcagaatgttttcattcgcaaagtcaaaatcttgaaggctcccaagtttgatcttggaaagttgatggaggttcacggtgattactctgaagatgttggtgtgaaattagagaggccagctgatgagacaatggctgagtctactccagaagttgttggagcttgaacttattaatgctttt

SEQ ID NO: 220715 - DNA, 421 bp, Gossypium hirsutum
cccacgcgtccgaaattctttgctcttctttactcagttcactgaaaccgtaaggagaagatcggagagaaaatatggcggccggcgatcgcaccgttttgcagtttaactcaccgtcatcggcggcctgtcagcgaaagttcaccctctcgtcatatttaacatctgcgattgctacgtcaggcgtcccgaccaagccgagcgcgtcatcggcacgcttctcggctccgtcctccctgacggaaccgttgatatccgtaactcctatgcagttcctcacacggagtccgctgaacaggttgctttggatattgaataccatcataatatgttagtctcccaccaaaaagtgaatcctaaagaagtcattgttggatggtattctaccgggctaggagtcacaggcggcagtgcattgatc

SEQ ID NO: 220716 - DNA, 427 bp, Gossypium hirsutum
cttcgggttaaggaccccaaagattttgtcaatttttattttcttgaggttttatttaccagagatgtatcccacattgcttaggattctgtttttggacaatgatattgttgtgcaaaaggatttgacagggtgtggaagattgatatggatgggaaagtgaatggggcggtggagacttgctttgggtctttccataggtacgcgcagtatatgaatttctcgcatcctttgatcaaacagaagtttaatcccaaggcgtgtgcttgggcttatgggatgaatttcttcgatttggacgcttggaggagggaaaaatgtactgaggaatatcattactggcagaatctgaatgaaaaccggaccttgtggaaattaggaacattgcctcccggtttaatcacattttattccacgacgaaaccac

SEQ ID NO: 220717 - DNA, 388 bp, Gossypium hirsutum
  unsure (1)..(388): unsure at all n locations
tttgtggctgagcccattgatgtccggtccatgtcttttgtaaggacacatgaatatttggcaccgaaaattgtgtccggtgagggccatggtancctgtggattggtggacattggggatctttatgtatgaactgttttatggggtaacaccgttcaagggcgtggaccatgagctaaccttagccaacattgtggctcgagcccttgagttccctaaagaacccatgattccagcagcggctaaagatcttatttcccagctgttggggaaggatcctccaaggcgtttagggtccacaatgggtgcatcagccattaagcaccacccattcttccaaggggtcaattgggcattgctaagatgcacgaccccaccatatgtacc

SEQ ID NO: 220718 - DNA, 432 bp, Gossypium hirsutum
  unsure (1)..(432): unsure at all n locations
cttttagttgcctcgatttcaagtgtatcataatgggtaaggaaaagactcacattaacattgtggtcatcggccacgtcgattctgggaaatcaaccaccactggccacctgatttacaagcttggnggtttgacaagcgtgtgattgaaaggttcgagaaagaagctgctgagatgaacaagaggtcattcaagtatgcttgggtgcttgacaagctcaaggctgagcgtgagcgtggtatcaccattgatattgccttgtggaaatttgagaccaccaaatactactgcactgtgattgatgcacctggacaccgtgactttatcaagaatatgattactggtacgtcacaggctgactgtgctgttttgattattgattccaccactggtgggtttgaggcttgtatctcaaaggatggtcagactcg

SEQ ID NO: 220719 - DNA, 403 bp, Gossypium hirsutum
cgagctggtcagcaggctaatagcctttcttatttctatgaagtttgcaaaggattggaacttgctaggaacttccagtttcctgttcttcgggagccaccgcaatcttttcttgctaccatggagagtacattagagaagcgccacgtgtggtttctgttccaacagaacctgtgcttcaattaacatacagacctgaggaaggtccttctgaagatactaaatcattcaatgatgaacctgaaccatctgctcctgctgatgatgttgcagtttccagtgtcgagactgctcctcctccccctcttgtgcctcagaccaagttggacactgacgacttactgggattgaatgatgctgctcctaatgcctcggcaattgaggaaagtaacgctttaacact

SEQ ID NO: 220720 - DNA, 404 bp, Gossypium hirsutum
aagatcaaatcaagttccttgccaaattttttttcgctgatgtatccaaccagatccagcggatggtgagattcatccgccaggaaccggaggaaaaggctaacgagatctctgtttccgctgaaaggagttcaacatcgagaagcttcaattggtggaagcggagaagaagaagattaggcaggagtacgagaagaaggagaagcaagttgaaatccgaaagataattgagtattcgatgcagcttaatgcatctaggatcaaggtccttcaggctcaagatgatgtggttaatgcaatgaaagaatcagcatccaaggaccttcttaatgtgagccatgatcaccatgtttacaaaaggcttttgaaagatctaattgttcagagtttagttagactgaaag

SEQ ID NO: 220721 - DNA, 344 bp, Gossypium hirsutum
  unsure (1)..(344): unsure at all n locations
gcaacagtagatatcccttttgatacatttttatgaggatcacgtaatcaggattgagagaggaatgttaaggaacttcgggccatggtagctgatctgaataggtgggtacaggaattttgatnnnnaatgaggcagtggcaagagctggagttgtgctggaagagaaaaattggccaccttttttttttatcattcatcatgatattgccaatgaaattccaattcatctacatagattgcagtgtgttgcgttttcaacatatttaggattggttctatgccttctatggaatatcatagctggtactacagcatggattataagataaggtgttaggatc

SEQ ID NO: 220722 - DNA, 402 bp, Gossypium hirsutum
gttttcttctgatattttggccaccatggacaagtacagcaacgatgtggcgggttgtgtcatcgagaaggccaaaaggatgtgcagagagcaaggtgatcctgaggttaaagtagaggtgatatagagagcggtgatccaagggacgtgatttgccaggttgccgacaagatcaatgctgatgtgcttgttatgggaagccatggctatggcctgattaagagggcattcttggggagtgtaagcaatcactgtgcacaaaacgtgaagtgccctgttttgattgttaagaagcccagatgttcgtcttctgcaagtggaaccaaatgattggaatttcggtttacatagtcatactttgctttatttacgtacaaatttcactttagtgggtatgtttct

SEQ ID NO: 220723 - DNA, 411 bp, Gossypium hirsutum
gatttcatgggtggtgctgagatcatcaagtcagaccccgttgtgtccttccgtgagactgtccttgagaggtcttgcaggactgtgatgagcaagtctcctaacaagcacaaccgtctgtacaggaagctcgacccttggaggaaggtcttgctgaggccattgacgaaggtcgtattggtccaagagatgatcccaaggttcgttccaagattttggccgaggagtatggttgggacaaagatcttgctaagaagatttggtgttttggccctgagacaactggtcctaacatggtggttgatatgtgtaaaggagttcaataccttaatgaaatcaaggactctgtagttgcggggttccagtgggcatcaaaggaaggtgcgatggctgaggagaacatgaggggta

SEQ ID NO: 220724 - DNA, 425 bp, Gossypium hirsutum
  unsure (1)..(425): unsure at all n locations
gaatgggtggtagcttcgaacaatggcttccaagtgttttcttgaaggaaagatttaagaccttcaatgcttgttttgaggacatatataggattcaaacaggttggaaggtcccagatcctcaacttcgtgagagcttcgaatttccatatcagagaaagtaattccagcttatcgctccttcatggngaggttcgggagtcagctagagagtggaaggcattctggaaaatacattaagtatacaccagaggatttagaaaactatctattggatttgtttgaaggctcacctcttgttcttcaccatatgagaagaaagagtacataggatacaaagtttctcaatgcaggtatggcccttccgctcatcgaggactaatcagagcaagagttntacctatatatgtattttttttaatcag

SEQ ID NO: 220725 - DNA, 422 bp, Gossypium hirsutum
  unsure (1)..(422): unsure at all n locations
gaagattgaagacaacaacactttggtttttattgttgacattcgtgctgataagaagaagattaaagatgctgtcaagaagatgtatgatattcaggccaagaaagttaacaccttgatcaggcctgtggaacaaagaaagcatacgttaggttgacacccgaatacgatgccttggacgttgcaaacaaaattggtattatctaagctagttagtagctaccttgttgagcatttattttccttttctttgcaaagagaaattatttcgagacattgagcaggcatttttatttttattagcacttaaaagtttgtaatattgcattgttgttgccaattagccatctctggttcaacttaagacagaaggtgatttttgatttacatgctntggggcattttgttaaaaatggttcact

SEQ ID NO: 220726 - DNA, 416 bp, Gossypium hirsutum
gttaagaccgactggactcaagctcctttcactgcctcttacaggaacttcaatgccgatgcttgtgtgtggtccaatggggcttcttcgtgtaaatcgaatgcttcaccatcttctgcatcgaaaacagtgcatggttctctcaagaaatggattcagctaagcaacaaaggttgaaatgggtgcaaaagaactacatgatatacaactactgcaatgatgctaagagatttcctcaaggtctacctccagagtgcaatatgtcttaaaaaacttgacaagcctattagatcaaattgttttagagattaatattcaattatattcttttattatttgttctttattcaaaaccaggtcatgattcttttatcttttgaaatttcccatcactctgtatgtgataagttattatg

SEQ ID NO: 220727 - DNA, 416 bp, Gossypium hirsutum
ggcaaagatattaatcttaacgagtgcccaagattgaagcttcgacaacaatgcatcaagtatgtcggaccccaagagagggtaaagtatgagtacattgttgttgaaggaaagatgatccataaacaaccagaaacgtactcgatacaatcgaaggattgaaagaagggaaatggatattcgttatgagcacctcgaagaaattgtacgccggcaagaagaagaaaggaatgtttcatcattcgagtttcttagccggaggagcgacgttagccgctggtaggctggtggttgaacacggagatcttaagtccatttctgcgtatagcggacattatcggccgacagatgatagtcttgacagttttctatcgtttcttaaagagaacggagtgaacctcaatgaagttgagata

SEQ ID NO: 220728 - DNA, 413 bp, Gossypium hirsutum
agatcatgttggcttacaatctctccccatctttcaattgggatgcatcgggaatgaccgatgaacagatgagagacttcattccaagaatagccaagcttggtttctgttggcagttcataacgtagctggtttccatgctgatgcattggtgaccgacacatttgcgagagatttcgccaggagggggatgctagcgtatgtggagaagatccaaagagaagaaaggaacaatggagtggacacattggctcaccaaaaatggtcaggtgccaacttttatgatagatatctcaagacagttcaaggaggtatatcatccacagcagccatgggcaaaggggtgactgaggagcaattcaaggaaacatggactagaccaggtgcagggaacattggaagtgaaggcaatc

SEQ ID NO: 220729 - DNA, 414 bp, Gossypium hirsutum
  unsure (1)..(414): unsure at all n locations
gcaagaaccttctcaaaggttcatggctgggagactgatgatgttgcagagatagccctgaagatttcacagtggccaaaagcttctggaacatacaagaggactactgttattactcagggtgcanatccgtaattgttgccgaggatgggaaagtgaagcaattccctgttattttgttacccaaggaaaagcttgttgatacaaatggtgcaggtgatgcctttgttggaggctttctttcacaattggttcaagggaagtccattgaggattgcgtaagggctggttgctatgcatccaacgttatcatccaaaggtctggatgcacatacccagaaaagcctgaatttaaataaagctattccactttcctgatctcctctccactgttgntttcaagtttctgattgt

SEQ ID NO: 220730 - DNA, 418 bp, Gossypium hirsutum
gagaaagaaaaattcgaagagagagaaaaaaaatgtttggatacgatcgcgtaagccactcgagtgccaacaaggcggatgagatagatttagaatcaggggagactttgtacccgggactcagctacgcgagaaccaactccggtggggttttatccgcaaggtgtacggcatcttggcggcgcagctggttctaaccaccgtggtctccgccttcgtggttctttctgctccggtcaacgagctccttcgtggaaattctggcctcttgctcttcctctgtttaatccccttcgtcttgttatggcccttgcacgtctatcaccaaaagcaccctgtgaacttggttatcctcggcctcttcaccgtgtcattgagtctcacacttggtgtgagctgtgcaaatactgatggaaga

SEQ ID NO: 220731 - DNA, 420 bp, Gossypium hirsutum
  unsure (1)..(420): unsure at all n locations
gtcaagtggcgtgctctcaggctcgacactgtaaactactcgtggggaagtgaggctatgactcgtaagacccgaattttggatgtggtgtacaatgcatccaacaatgagttggttcgtactcaaactcggttaagagtgctattgttcaagttgatgctgcaccattcaagcagtggtatctccagcactatggtgtcgacattggtcgcaagaagaaaacagcagccaagaaagaaggagaggaaggtgaaactggcactgaggaggtgaagaagagcaaccatgtcttgaggaagctggagaaacgacaacagaatcgcaagctcgatccacatatcgaggatcaatttgcaagtggtcgnttgttggcttgtatctcttcaaagcctggtcagtgtggccgcgctgatgggtata

SEQ ID NO: 220732 - DNA, 415 bp, Gossypium hirsutum
cgatttggtacggggggattccgccattttgccgccggagtttatcgaggaaactaaagaccggtgtttcatggcaagctggtgcccgcaagaggaagtactgaaccatagcgcggtggccgggttctgacgcacagcgggtggaattcgactgtggaaagcatttcgagtggggtggcgatggtttcttggccgttcttcgcggagcaacaaacgaattgttggttcgcttgtaatgaatggggtatcggcatggaaatcgacaacgatgtgaaaagggagaaagtggagaagctggtgagggagttgatggaaggaaggaaaggggaggagatgagggaaaacgtcatggaatggaagagaaaagctgaaagagctgcgtgtttggatggaccgtccttgttgaatttggata

SEQ ID NO: 220733 - DNA, 422 bp, Gossypium hirsutum
caagataggggtgactcagggcgtggtatgaaagggaagcttaacaatttgatgattcagcttcggaagaattgcaaccatccagatctcctagaagctgcctttgatggatcatatttttatccactgtagagcagattgtcgaacagtgtgggaaatttcaattgcttgaacggttgttgactcggttatttgagcgtaaacacaaggttctcatctttagccagtggacaaaggttctggatataatggattactattttagtgaaaagggatttaatgtttgtaggattgatggtagtgtgaaattagaagaaaggagaagacagatccaggagttcaatgatgtgaacagtgactataggatatttattctcagcacaagggcaggaggtctgggtatcaacctgactgcagctgat

SEQ ID NO: 220734 - DNA, 425 bp, Gossypium hirsutum
tttctgaacctgatagtgttgtggcctcagatgtgtcaaaattggaggattctgcaagccatgctgagaatgtatcaggaaagccaaacttgatggagttcagatcattttcatcttctgatggagcgcagagggcccggtcttattttcttctgtggctgtctcatcagatgcatccctcaagaaaactcctgcttcaaatgctaaatctgaaaggattaataaggggaagttcgcaccatctggtgggaagttggcaaaaatcgaggaaaatgttttcaatgatgatacaacaaaaacaagttctgaaggtgttgaacctcgtagatctaatcgcaggattcagccaacatcaagacttttggaagggctacaaagctcgttggccatctcgaaaattccttcgggttcattcgacaaaagtc

SEQ ID NO: 220735 - DNA, 398 bp, Gossypium hirsutum
ctaccatggaagctaaagcaaagaaccagcaccgagatccgtaaaagggtttacgtctgccctgaaccatcatgcgtccaccataacccagctcgagccctaggtgatctcaccgggatcaagaacatttttgtcgtaaacatggtgagaagaaatggaaatgcgataaatgctccaagaaatacgctgttcaatctgattggaaagctcattcaaaaacctgtggcacaaaggaatataaatgtgactgtggcaccattttctccagaagagacagttttataacgcatagggctttttgtgatgccctaacagaagaaaacaacaaagcaagccgaggacttataaacgtgggatcaaatttacaaggccaagttgttgctgcagatcagctcatc

SEQ ID NO: 220736 - DNA, 424 bp, Gossypium hirsutum
cacgcgtccgtcatccctggctgaatcccagtattacatataaaacccagactaaacaaaaacagagattgaaccatcatgtcacggcgatcgtcaggaacatggttgaggttatgcctcgtaatatttgctagttcagcactggcagtatgtggacctgctctttattggagattcaagaaaactctcagattcgtcgattccaaatcctcttgtcctccttgtatctgtgattgtcctcctcctctttccctcctcaagattgcccctgggttggccaatctctcagtcacagattgtggaagcaacgaccccgatctcaagaaagagatggagaagcaatttgtggaccttttaaccgaagagttgaagttgcaagaagctgtcgccgaagagcacactcaccatatgaacattacctttg

SEQ ID NO: 220737 - DNA, 446 bp, Gossypium hirsutum
  unsure (1)..(446): unsure at all n locations
cggggccgccccacccgtccgtcctcctcgtttttcctattctccaagtggctaggtggtcaatctgaaccggaggcaaatgtggcagaacctgttgaaaaaggggaccttggaatggttggtgaggaacctcaggatttcggttctgggattttgactcggctccaggagttgaaactctctgtctttttccctaaaaacagtgccaaatttatatcagcccggagaagagactgaactccttgttgggggggaaaatgttggtgagtcacctgtgaatgtcattgcaatcacagccagtgttcatcttccttttgatcatcgnatgctngttcaaaatctatcagcacaggcctttaacaatgcatccgtacccccttcaaagcaagctactttcccttacatatttgcgggtagcaagtacttgcagcctggaacttttgatc

SEQ ID NO: 220738 - DNA, 417 bp, Gossypium hirsutum
gttagtgagtttcttagtttccctagaagttaagcatggctcaaattaagaggatggagtgccaactcgagatcaagtcctcagctgataagttctttgatgcctacaagaccaaagcccagcttatccaaaaatggccaatcaagtcgttagagatgtaaaacttgttgagggtagtggttgggattccgagggttcggttagacaatggtattttgttgccggaggtaagcttgagacttgtaaggaaatgatggaaaaggtgaatgataaagacaggactattgtttacaaattggtggaaggtgaaatcatgaaagctttcaaaagctggaactccatcctcaacgtgatgccgataggggagggaagtttggtgaaatggactatggaatttgaaaagcaaaatgatgatgt

SEQ ID NO: 220739 - DNA, 423 bp, Gossypium hirsutum
ctttggaatccccaacgtataatcttctctgttgacggtacacccattagagagttcaaaaacatggaatcatttggtgtcccgtttcctaagaaccagccgatgagaatttactctagcttgtggatgctgatgattgggccacaaggggtggtttggttaagaccgactggactcaagctcctttcactgcctcttacaggaacttcaatgccgatgcttgtgtgtggtccaatggggcttcttcgtgtaaatcgaatgcttcaccatcttctgcatcgacaaacagtgcatggttctctcaagaaatggattcagctaagcaacaaaggttgaaatgggtgcaaaagaactacatgatatacaactactgcaatgatgctaagagatttcctcaaggtctacctccagagtgcaatatgt

SEQ ID NO: 220740 - DNA, 246 bp, Gossypium hirsutum
cccagggttcttggtccacttaccaacaatcccaatcactggaactggcattaacccggctcgtagtcttggtgcagccatcatcttcaacaaggacaagggctgggatgaccattggattttctgggtggcaccattcattggtgcagcactagcagcactctaccacgttgttgtgatcagagccattcctttcaaatcaaagtgattaggtcaagatcaagagtcatgattgtatgattatga

SEQ ID NO: 220741 - DNA, 418 bp, Gossypium hirsutum
gagagactgagtctgttgttcaaaggtcatggcatctggtatggaaatcaaggaggtggatggatatagtgtcggcaattgcgtcaaagttgaactgggattatgactctgttcacattgtgagaggggagaaggcgaggaacagggacctgtggcctaatcttgcccaagatacctcacctgatgcccttatctcaaccttgcagaataagattgaagatgggaggaatgtttatattgcaacaaatgaacctgatacatccttctttgatcctcttaaagacaaatattcaactcactttcttgatgaatataaggatctttgggatgagaacagtgagtggtattcagaaacaaaaaaccttaacaacggagtaccagttgaatttgacggttacatgaaggtctctgtcgatac

SEQ ID NO: 220742 - DNA, 384 bp, Gossypium hirsutum
cgaccgtgcattgttcttggtacatttatcaacattttctatctttggaactggcattaacccgggggggagtcttggtgcagccatcatcttcaacaaagacaagggctgggatgaccattggattgtctgggtgggaccattcattggtgcaacactagcagcactctaccacgttgttgtgatcagagccattcctttcaaattaaagtgattacgtcaagatcaagagtcacgattgtttgattatgagctcaagttaaaccaaatctaaaacatggaagaagagaatccctacaaccctattaagtttctttgatttgtttgatgcttgtgttttctattgtaagaaaattattcttatgcctatgttttttatttatt

SEQ ID NO: 220743 - DNA, 418 bp, Gossypium hirsutum
cccacgcgtccgcctgaatattattacaaaatccaagttgtcgtaacaatcacgcgagaatatatacagttttaaattttatcaaatatataaatcggatctctctgtcgttgaaaagaaatttcagaaatctgtaaacagggagaaatggcgagtggtggaaaagtgtctttcaaagtcactcttacatccgatccaaagctccctttcaaagtgtttagcgttcctgaagcagccccatttacggctgttttgaaattcgcagccgaggaattcaaagtccgtccccaaaccagcgctatcatcaccaacgatggtgtgggaatcaatcctcagcaaagtgcaggaaatgtctttctcaaacacggttcggagcttcgcctgattccccgtgacagggtgggagccttttgaatgc

SEQ ID NO: 220744 - DNA, 432 bp, Gossypium hirsutum
  unsure (1)..(432): unsure at all n locations
cacgcgtccgnccactcgttcgcctgattatttttacatattcttttttgtcgtaacaatcacgcgagaatgtaggcagttttaaattttatcaaatatataaatcggatctctctgtcgttgaaaagaaatttcagaaatctgtaaacagggagaaatggcgagtggtggaaaagtgtctttcaaagtcactcttacatccgatccaaagctccctttcaaagtgtttagcgttcctgaagcagccccatttacggctgttttgaaattcgcagccgaggaattcaaagtccgttcccaaacccacgctatcatcaccaacgatggtgtgggaatcaatccttaacaaattgcaagaaatgtcttttttaaaccctgttcggagctttgtcctgtttcccgtgaaaggggggagcctttttaatgcttaaa

SEQ ID NO: 220745 - DNA, 388 bp, Gossypium hirsutum
ttctgattcttttaatttgtttttgtatttcatgtagtttaagttgaattagggaaataggggaggtaaggttgaatttatttataattagggcactctgattctgttctgagttcatttaggaccttcgacttctgttttaaatcctattctgattttcttttttggcttagaagttttctagtttgaagattagggcttttgggaattatacagtaattatctaagatctggcttttccgtgttatgtttggtagttaatgagaaaatgtaacttttttatattttttaattgtcttctgaaattattcatatctttgcagagatggcccgtaccaagcagacagcccgtaagtcgactggtgggaaaggctccaggaagcaactt

SEQ ID NO: 220746 - DNA, 413 bp, Gossypium hirsutum
gtgccttgaacgtggatgtaacagaattccagaccaacttggtcccttacccaagaatacacttcatgctttcttcatacgctccagtcatctccgctgagaaggcttaccatgagcagctatcagttgctgaaatcaccaatagtgcctttgagccctcatctatgatggccaagtgtgatcctcgccatggcaagtatatggcttgctgtttgatgtaccgtggtgatgttgtgcccaaggatgtcaatgctgctgttgccaccatcaagaccaagagaactattcaattcgttgactggtgcccaactggattcaagtgtggtatcaactaccagccaccgactgtcgttcctggtggtgatcttgctaaggtccagagagccgtttgcatgatttccaactcaaccagc

SEQ ID NO: 220747 - DNA, 425 bp, Gossypium hirsutum
caagctttgaggtttttttaggttgctcttggaacatttagcagccaaccaaaaatggttctccaaaacgatatcgatttgttgaatcctccagcagagcttgagaagaagaagcacaaactcaaacgtcttgtccagtctccaaattctttcttcatggatgtcaaatgccaaggctgtttcaacataacaatagtgtttagccactctcaaacagtggtggtatgtggtaattgtcagactgttctttgtcaaccaacaggaggaagagctagactcaccgagggatgctctttcaggaagaagggtgattgatctcatattttgctattttatgattcacaaaaacaaaaagaagtaatctttggatcaaatatgggaatcatatgagtaatctttttcatgtgtttcaggtatgacatatg

SEQ ID NO: 220748 - DNA, 347 bp, Gossypium hirsutum
gaagaaaccatgccgaataacaaggtaattgtaggaaagaacaggaagagaggaaagaatgaagctgacgatgagaagcgtgaacttgtgttcaaggaagacgggcaagagtatgcccaagtgcttcgtatgctaggcaatggccggtgtgaagccatgtgcatagatggtactaagcgcctttgccatatccgaggaaagatgcacaagaaggtttggattgcagctggtgatataattcttgttgggcttcgcgactatcaggatgataaggctgatgtgatccttaagtacatgcccgatgaagcaaggctcttaaaggcatacggtgagcttccagagaacac

SEQ ID NO: 220749 - DNA, 408 bp, Gossypium hirsutum
gagcaaccgagcagctggatgcagcacaagaagcaaacaccgaaatggaggcagagttgcggagactgaaggtgcagctggatcagtggagaaaggcagctgaggcagctactgccatgctttcatccgggaacaaagggaaacattcagacaagacaaaatctgttgacaacaactataaccctggaaatggctcgccgaactcggaagacatggatgatgattcaccaaagaagaagaatggaaacatgttaaaaaagattggtgtgttatggaagaaaggtcagaagtagcagcaaatgcatcagaggttgcaatgcatatataatataatatatatttctgctctaaaaagtaaacttgaaatggctgtggatggtttcaagttatgaaaaagtaccttccttt

SEQ ID NO: 220750 - DNA, 356 bp, Gossypium hirsutum
gcgcaggttggagtaggagatacatccggaggcagtactacacccaatgatcattattgctggatgcgccctgaggacattgattacccgcgccctgtctatgaatgtcacagctgctccgatcttgctgctgaaatggctgctgctttggctgctgcttccattgttttcaaagacaacaaggcgtactctcaaaagcttgtccatggtgcacggacagtctttcagtttgccagggatcaaagaggcagatatagtgctggtggttctgaccctgccctcttttataactcctccagttactgggatgagtttgtttggggtggagcttgggtatactacgccactgggaattc

SEQ ID NO: 220751 - DNA, 411 bp, Gossypium hirsutum
cacatgaggaagatgaagaacaatgccattgtttgcaacattggtcactttgacaatgaaatcgatatgctcggtcttgagacctatcctggtgttaaacgcatcaccattaagcctcaaaccgataggtgggtcttccctgaaaccaaaaccggcatcattgtgttggctgaaggacgtctgatgaacttgggatgtgccactggacacccaagttttgtcatgtcctgctcgttcactaaccaggtgattgcccagctcgaactatggaaggagaaggcaactggaaaatatgagaagaaggtttacgtattgccaaagcacctcgacgagaaaagtgctgcacttcacctcggcaagctcggagctaagctcactaagctcactaaagatcaagctgattacattagt

SEQ ID NO: 220752 - DNA, 402 bp, Gossypium hirsutum
cgcacatgatgaagatgaattacattgccattttttttttcatcggccactttgacaatgaaggggggatgcttggtcttgagacctatcctggcgttaaacgcgtcaccattaagccttaaaccgatcggtgggtcttgcctgaaaccaaaaccggcatcattgtgttggctgaaggacgtctgatgaacttgggatgtgccactggtcacccacggtttgtcatgtcctgctcgttcactaaccaggtgattgaccatctcgaactatggaaggagaacgcaactggaaaatatgacaagaacgtggacgtattgccaaagcaccctttccgagaaagttgctgcacttcaccttggttagcttctagcttagcttacttaactcactaaagatcaagct

SEQ ID NO: 220753 - DNA, 422 bp, Gossypium hirsutum
aaattcttaaaatcttcaaggaccattccatcaagacatgcatccttgatgactttgaattttacgaggctcgtcaaaagatgatccaggagaggaaggctaagcatcagctgttacaaaaacaagttctgagtagggaacctaaaggagaaaacccagcaatggcaaaggagacattggaaaaacctgtcgaggcagccttgacagaacgaacggttgcatcaacagcagaagcagtaaatgcaacgaacggagacgcaaaacccattgaagagaaaggatcagttgctacaactgaagacagctctcaatgaaaccaggttgttttcgatagtcggctttggtagaaatgggataggattgtactttttgattggttaattctagttgctagatagtgtgatcatatcatttttagctta

SEQ ID NO: 220754 - DNA, 363 bp, Gossypium hirsutum
gttgatggagggcctgcagctaaggcactcaaaccaaaattcaatgtcttctcaaagactgtgacagctcatacaggggtggaagtaccagaatttgatattaaggttctagttgctgctgctgtagccttcaagggtgttgggggtatcctttttatctttggcagcactatcggtgcttatcttctggctctgcaacaggtaattgttactaccatattgtacgacttctacaactatgacacggaaaagaaagaatttgggctactcttttcaaagttctcacagaacttggcattgctgggggcattactcttcttcatcggcatgaagaactcaatccccagcagacaactcaagaaa

SEQ ID NO: 220755 - DNA, 391 bp, Gossypium hirsutum
gctccttcagctcccatggcaaactcaatggtccttgtttcattgatggctttaggcctcttgatggcattttcaacgacgactcaagttgaagcagccgccagggcattttttgtatttggcgattctctggttgataatggcaacaacaattacttagcaacaactgctcgagccgattcaccaccttacggcattgacactcctacccgtcgccccactggccgattctcaaatggcaaaaatattcctgattttatcagtgacgcacttgggtcagagccaacattgccatacttgagccctgaactcaggggagaaaagctgcttgttgtgccaactttgcttctgccgtgtggaatcctcatgacactgcattcaattataacat

SEQ ID NO: 220756 - DNA, 362 bp, Gossypium hirsutum
gaaaccgccttccctgattggtttgttgcttttcagttgaataaggctacccccgggttgcaaaagatgtactccttcaacggcacagccttggagatgaatggtgttaacaatactatattcatgcaaggtctgcccggattaaactatatcgttgcagaaaccgatgcagctaaccctcagaaagatcctagggtgcccggaaaacaacagacagttatctcattcaccaagaaaactaccccttccattaacattgctgcaggtgatggattcccctctaaagtgttctttaatggcgaggagtgtgcactcccttcaatgctgccaacaaacagcggtaatcgaagggctcaatgact

SEQ ID NO: 220757 - DNA, 317 bp, Gossypium hirsutum
attgtctacgaggggaagccttcagtggattgtattgcaaacgctcctcagtccttgttaactggcatgaatctgttcctatctcatctggacatcacttttaggcgggacccaaccaattaccgaccgagaatcaacaaactggactcaaccaaggatagagagcaaaagtctgctgggtcatattattacctagatgattgatcgacacatctactggcagttgtcaattgtgatgagatgaacaacaagacgtgaatgttgggtattcccgggatctctgagtggagcagtgatggtatgttgataagctgaga

SEQ ID NO: 220758 - DNA, 419 bp, Gossypium hirsutum
tcaactcacacggacgggagggagacgagaaaaggaagacaacgatggtgtctttgaagttacagaagcggctcgccgctagcgtcctgaagtgtggccgtggcaaggtttggcttgatcctaatgaaatcaatgaaatctccatggccaactccaggcagaatgttaggaaacttgttaaggatggttttgtcatccggaagcctaccaagattcactcccgatctcgtgcacgcagaatgaaagaggccaagagaaagggtcgtcattctggctatggtaagaggaagggtaccagggaggcaagattgcctacaaagatcctttggatgaggagaatgcgagtactaaggcgtttgcttcgtaagtacaaggaatccaagaagattgacaagcacatgtaccatgacatgtacatg

SEQ ID NO: 220759 - DNA, 384 bp, Gossypium hirsutum
gggaaagtcgttgggtaaaatctgactggaagaaagatgagaacatggctggggaatggaattacacttctggaaaatggaatggagatcttaatgacaaaggtattcaaactagtgaagactacaggttttatgctatttcagctgagttcccagaagttaacaacaagggaaagactctagtcttccaattttctgtgaagcacgagcagaagcttgactgtggtggtggctacatgaagttgctcagtggtgatgttgaccagaagaaatttggcggtgacaccccgtacagcatcatgtttggccctgatatttgcggctacagcaccaaaaaagtacatgccattcttacatacaatgggacaaatcacttgatcaaaa

SEQ ID NO: 220760 - DNA, 360 bp, Gossypium hirsutum
atctccccgaggtttacattgttagttggaatgaccacttttttgtcctaaagggggacgcgagaagcttactatattattgacacgttaggagagaggctttatgagggatgcaatcaagcatacatcttgaaatttgaccgcaatactgtaattcacaagctaccaaatgtagctcaatcatcaggtgataagtcaacgggtgatcaacaggtcaatgggaaggagggttgtgttgcaggggctgtagtaaccaaacctgagaaatcaatcaagagtgaggacagtgaggaggttgtttgccagggtaagaagtcctgcaaggaatacataaagagctttttggctgctatacctatt

SEQ ID NO: 220761 - DNA, 327 bp, Gossypium hirsutum
atctcaactggcatgacctccaaatttgtttatacacccctttcgccaggacggaggacgggccattttataaccaagaaggaactttttccacattcatctaacataaacggaaaaactaccacaagagtccattttgtgaccaacttgataaggcgaagttgctcattttgcaccttatgaaaagaggattacggaacttttcaaggttggtaatgacaaccaaaactctcaacgtatctaatagaaaatttgaaactcacaataaagccaaaaataaccctgaggatatgtccagtgttctcctcaagattaagtctcatcatc

SEQ ID NO: 220762 - DNA, 151 bp, Gossypium hirsutum
  unsure (1)..(151): unsure at all n locations
acgcatgcatgcggcgncgttgcttttttatagtctcacctaaatacaaatcactggccgtcgcttaacaacgtcgcgactggtaaaaccctgccgttacccaactcaaccgccttactgcacatccccctctcaccagctgacctaataa

SEQ ID NO: 220763 - DNA, 343 bp, Gossypium hirsutum
gcactttctaatctttagaatccacaactagtttcaaatggcacccaaagccgagaagaagccagccgagaaaaagccagctgaggagaaaaaggccgagaaggccccagctgagaaaaaaccaagagccgagaagaagctccctaaagaagccggggacaagaagaagaagcgaagcaagaagagcattgaaacctacaagatctacatcttcaaggtgctgaagcaggtccatcctgatatcggcatttccagcaaagccatgggtattatgaacagcttcatcaacgacatcttcgagaagctggctcaagaatcttcgaggctcgcacgctataacaag

SEQ ID NO: 220764 - DNA, 348 bp, Gossypium hirsutum
catcgtgatattaaaaagtgaaaacattctgtttgttttggatggaaagagagttgatgggagccctgttgtgaagctctgtgattttgatagagcagtacctcttaggtcttccctgcatacatgttgtattgctcatttagggatacctcctccagatgtttgtgttggaacacctcgttggatggctcctgaggttctaggcgcaatgcataagcgtagtccttatgggctggaggtggacatttggtcatttggatgcctgctttatgaattgttgactctcgaagttccgtattctgggttatctgagcttcacattcatgaacttattcagatgggtgagcg

SEQ ID NO: 220765 - DNA, 352 bp, Gossypium hirsutum
gctgcgcctaccatcaaacctattatacctatattatatgtagactgctgcccagccgtattaacgtgtggtattggctatgatgcacgaactgcttgtactggtggtgcaattagtaaggatcatagaggcggtcgcttcataaccaaccgctccaactaatgtatggtgttgtacgacatcgaccacatgtttgatctcatgtatgccaagcgtgcctttgttcactggtacgtgggtgagggtatggaagaaggaaaattctcggaagctcgtgaggaccttgctgcacttgaaaaggattatgaaggggccggcgctgagtcaggccaaggtgattacgaaggtgaag

SEQ ID NO: 220766 - DNA, 401 bp, Gossypium hirsutum
gcggagcctgcctactcttaccctttttcagagctttgatagaggaagagcagctcacctaatccatcatgggtcactctaatgtctggaactctcaccccaaaacctacggccctggctctcgcgcctgccgtgtgtgcgggaacccccacgccatcatcaggaaatatggactcatgtgttgcaggcagtgcttccgtagcaatgccaaggaaattggattcattaagtaccgctgaagaatttatgttgggaagaactttgttagagtatgagcctttggtaatgtgattattgaattagaaggataatgtttattggtttcagtctggacatctaaaagggttggtgaactaaggatactttgttgtttctcaatcaagaatcatactgtttttttt

SEQ ID NO: 220767 - DNA, 316 bp, Gossypium hirsutum
aacgatcctttcatcaccactgaatacatgacctacatgtttaagtacgacagtgttcacggtcaatggaagcatcatgagcttaaggtgaaggactcaaagacccttctctttggtgaaaagcctgtcacagttttcggtatcagaaaccctgaggaaatcccatgggctgaggctggagctgagtatgttgttgagtctactggtgtttttactgacaaggacaaggctgctgctcacttgaagggtggcgcgaagaaggttatcatttctgctcccagtaaggatgctcccatgtttgttgtgggtgtcaatg

SEQ ID NO: 220768 - DNA, 408 bp, Gossypium hirsutum
cagattcatctagttgtaccaatggtcttttctggttgacacgagcaatggatttcctcgtagaattgttccgcaacttacttgcacatccagattggactatgactgaatcttgtaccgactcctatggcaaaaccctgaaaaagttccatggctggattgctagttccgctttcacggttgcattgaagttggctccagataggaagaagttcatggaagtgatagctgggactggagatgttaatgctgacatggagaaattttgttcgactttccccccatttcttgaggagaatcacaaatatctggccaagtttggcttggatgatatgaaggcatgatgggataagtttaatgaatagaggagagactacctacctatatttactcccgtgttcgaacttt

SEQ ID NO: 220769 - DNA, 413 bp, Gossypium hirsutum
aaaaaaactctctgaaatggcgatgaaaattttcagcgttttcttctttgctctcctcttcgctcgcatctcctttccttcaagttgctaggtgtcaatcagaagcagaggcagatgttgcagaagctgttgaaggaggtgatctcggtattgttggggaggatgttcaggattttggtgatcctaattacagttcagctcctgaagttaaaactgtttgcgttttccccaaaaatagcgccaaattggttctggctggagaacagactgagctccttggtgggatggaaaatattggggagtcacctgtgaatgtcattgctatcaaagccagtgttcatctcccttttgatcaccgtatgcttgttcaaaatcttacagcagtggctttcaacaatgcaactgtaccccct

SEQ ID NO: 220770 - DNA, 395 bp, Gossypium hirsutum
ctacactgacatggttaacaaatactatgatcttgttaccagcttttatgagtttggatggggtgaatctttccattttgctcccagatggaaaggggagtctctcaaagaaagcataaagcggcatgaacattttcttgctttacaacttgggttgaagcctggacacaaggtgttggatgttggatgtggaattggtggaccacttagagaaattgctcgattcagttccacatcggtcactgggataaacaacaatgaatatcaaataacaagagggaaggaattaaaccgcattgctggagtggaaaagacttgcaactttgtgaaggctgacttcatgaagatggcatttcctgacagcacctttgacgcaatttatgcaattgaagcta

SEQ ID NO: 220771 - DNA, 312 bp, Gossypium hirsutum
ggccgaccgacgcgtacgatacacacacattgaaatcaaaaactatgatcttagcaccagcttctatgatctgggatggggtgaatcttatcatcttgctcccatatggaaaaggcagactctcaaacaaagcataacacaacctgaacatttacttgctctacaacttgggctgaagcctgtacacaatgtgttagatcttaaatatagaatatgtcgaccacttaaaaaaatttctctattcaacaacacaatcgtcaatgggattaacaaccatgaatttcatcattccactagggaaggaattaaacc

SEQ ID NO: 220772 - DNA, 368 bp, Gossypium hirsutum
gcttctctggactcttgagcggccagcaaaaatccaatccagatttctacaattggaaccggattaaggttaggtactgcgatggatcatcgttcaccggggatgctgttgatcgagctaataatctctttttcaaaggaaacagcatatgggaatttatcattgctgatctactagcaaaaggaatgagaaatgctaaaaatgctattctttctggctgttccgctggaggattggcttcgatattgcactgtgacaggtttcgagctctccttcccgcttctactaaagtaaagtgcatttcagatgctggcttcttcctccatgcgcaagatgtctcgggagggaagcacatagaagaattctat

SEQ ID NO: 220773 - DNA, 384 bp, Gossypium hirsutum
accggtttcaccagctatgggtatcgacttggtcgtcggcggcaagagcaagaagacgaagagaactgctcccaagtctgatgatatatatctcaagctccttgtcaagctttaccgttttctggtaagaaggactggcagcaaattcaatgcggtgatcttgaagcggctatttatgagcaaaaccaacaagcctcctttatctctttctaggttgattcaattcatgaagggcaaggaggataagattgctgtggtagtcggggctgtcaccgatgacattcgtgtgtatgaagttcctgcgctgaaggttactgcgttaaggttcactgaaacggccagggcaaggattgagaaagctggtggggaatgtttaacatttga

SEQ ID NO: 220774 - DNA, 366 bp, Gossypium hirsutum
attcatttgcaggttgggtttgatgagctcgggggaacagacgagttttccactgaagatttggcggacagattggcgaaagttcaagtcatcttctctgaaggcgaatcgtcatcgaaacccagaacacaaaccaaaaggagtgtccgacagagctcgaacccagactcgtccgattcggattaactgtgggttgtctcggtttgtaagctttctttacctgtttcagtggaaatcaataggatttatcatcattccgtgtttaaatactttaaaagcaaatgaagagaatattgtttgttgtatgaatgagatcatttaatcatctcgatatttatatatatgtgctcaatctaattttgctgg

SEQ ID NO: 220775 - DNA, 383 bp, Gossypium hirsutum
ccgaaggctggttcaatccacccttcagttcttcgacatggctcaacctgcctggggaaagatcggtatatacagaggcggaattgtgcccgttttgttccaaaggtagcgtcctccataacatttccttgcccttattatttttcattactctttattaaacgtcttggccttcttacaatacagggttccttgcaagaagcatggtggagtgaggttcacgatcaatggaagagactatttctagcttggtatgattagcaatgttggtggcgcaagatctatccagtctgtgtccattaagggatccaaaactgtgttgatggcattgtcaaggaactggggagctaactggcaatccaaccccgatcttaatggccaat

SEQ ID NO: 220776 - DNA, 391 bp, Gossypium hirsutum
tgcatcgaatggaatgcatggcacaggaacctgtgctctttgaggacatcttatgtcagataattgatatgattaagccggaggctgagagctatatcacattgcgtgacctgaagggctctaaactttctggaagtgttttcaatatccttttcaatcttaacaaattcatggcctttgaaactcgtgatccattcctcatacgtcaggagcgtgagaatcctacattgacggagtgggaccgttttgcacatagagaatatattaggctttcaatggaagatgatgttgaagatgcctctaatggaagtgcagaagtttgggatgaatcacttgaggctcccttctaagttgaataggatgctcagagaagagctcaacacacttatat

SEQ ID NO: 220777 - DNA, 376 bp, Gossypium hirsutum
caccgacggccgctccgcccgggctcgcgccccgggttttgcggcgaccgccgcgccctcctactcatcggggcctggcccttgccccgacggccgggtataggtcgcgcgcttaagccgggaacatcactctcttgcgcggcattctttactggatcgcccaactcctaggctcaaccgtcgcttgcctgttgcttaagttcgctaccggcgacctggctgtacccgcttttgggttgtcatcaggtgtgggcgtgtctaacgcattggttttcgaaatcgtgatgaccttcggattggtgtacacagtgtacgccacagccgttgatcccaaaaagggaagcttgggaacaatcgcaccattggcaattgggtt

SEQ ID NO: 220778 - DNA, 417 bp, Gossypium hirsutum
aagaaagacaaagcccctcctccttcatccaagcctgcaaagtctggaggtggcaagcagaagaagaagaagtggagcaagggaaagcaaaaggagaaggtgaataacatggtgctgtttgatcaggctacgtatgacaagcttctctctgaagctcctaaatacaagctcatcactccctctatcctatctgatcgtatgaggataaatggatcacttgcaaggaaggctattagggaactgatggcaagaggatcgattaggttggtgtctgcccattcaagccagcagatttacactagggctacaaatacctagatggttcgttgtatttttgcttagttccatgcaatagtgctgttggttgttgagttgacttctaagtgaaattatttacttgctggcgctttttttttt

SEQ ID NO: 220779 - DNA, 367 bp, Gossypium hirsutum
gaaaagggtagccgatactacaccaagaatttccgtggggcagtcgatgctttccatgtcagtaccgtggacacaactggcgccggtgactcctttgttggtgcattgctatgcaagattgttgaaaacccaaccattcttgaggatgaagcaaaattaagggaagtgttgaaatttgcaaatgcatgtggagccatcacgacgaccaaaaagggagcaatccctgcactaccaaccgaggccgatgcccttgccttaatcaatggagcttagattttaagcaacttgaataatttgcacattgttttgccttccgtgattatcctttcatttcaaagagttctcaatttattccccttttgatatg

SEQ ID NO: 220780 - DNA, 336 bp, Gossypium hirsutum
ctcaatatcaaaaaggattgaggatttacgggacaatgagccgcaaccaccacctggaggagttgattgaagggttgagtcgaatgtgggaagtaatgtctgaatgtcataggcgtcagtttcaaatcatctcagttgcatacaagaatggcatcatgagaatctctgtgctgtcagaatcacatcggcatgtcaccgctcatctcgaacatgaactaagcttgctgtgttcgagttttacaaagtggattggtgccctgaaagcttatctgaaagccataaacagtgggctcagtaaatgtgttaccattggaaaatcttggaaaagatcaaaga

SEQ ID NO: 220781 - DNA, 382 bp, Gossypium hirsutum
ctttggaaagtcagcgacgggccgacatggcattacttgaggctaagaagatagcatcacagtaccaaaaggaagcagacaagtgcaattcaggtatggaaacatgtgaagaagcaagggagaaagccgaagcagcactggtagctcagaagaaattgacagcaatgtgggaaacacgagctcgtcaaaaagggtggagagaaggggttgccaaatctcatacagactcgtaaggtaacattcaagctgtccaaatgacccgtcattgcctcgtaaaagaatttcaaacaagaattccagagtcaatcctataggtagtcttaagtatagttacccttgttttctacggagccaaacatcgtcatccattaaaaagcccaaa

SEQ ID NO: 220782 - DNA, 421 bp, Gossypium hirsutum
  unsure (1)..(421): unsure at all n locations
cctagagctcttagaaggttgagaacttcttgcgagagggcgaaaagaactctttcgtccaccgcgcaaaccaccattgaaatagattcgttatacgaaggtatcgacttttactcaaccataacccgagccagatttgaggagctcaacatggatctattcagaaagtgtatggaaccagttgagaaatgcttaagggatgccaagatggacaagagcagtgtccatgatgtcgtcctcgttggtggttccactagaattcccaaagttcaacaactattgcaggatttcttcaatggtaaagagctttgcaaaagcatcaaccctgacgaagctgtcgcgtacggtgccgcagtccaagccgcaattttaagcggcgaaggcaatgaaaaggtacaagacctnctgcttttagatgtca

SEQ ID NO: 220783 - DNA, 407 bp, Gossypium hirsutum
  unsure (1)..(407): unsure at all n locations
ctcattaatgaagtggagaaaatgtttgatttcaagggagagcttcgccccagtggtaaatggtccgttgttttcactgatgatgagggtgatatgatgcttgttggcgatgatccatggatggatttttgcaagatggtgagaaagatcttcatatattcaagcgaagaggtgaagaagattagtccaagatgcaaatttgcagtgtcgtctttggagggtgaagggactgctgtaaccattgattcagagcataaatctgaaacatgaaataataaagtttgaagacccttcttatttacgttacatatatatattgntttatttntggtttccttggtagattatactctgattagaacagtgaatgaaatgctgcattgaagaaaaagtacacagttgatgca

SEQ ID NO: 220784 - DNA, 385 bp, Gossypium hirsutum
aaagcaccaaaaaaagcaacaccctctccttcacgggttttcaacctcgccatggctacacgagactccgatgtccccatggtacccgtcggcgagtcttccaacagctccgccgcttcctcttccactaagaaacccaagcgtttcgagatcaaaaagtggagcgccgttgccctttgggcttgggatattgttgtggataattgtgcaatttgcaggaatcacatcatggatctctgtatcgaatgccaagcaaaccaagccagcgccaccagtgaggaatgcactgttgcttggggggtctgcaaccatgcatttcactttcactgtatcagtcgatggttgaagactcgtcaagtgtgtccattggataatagtgagtggg

SEQ ID NO: 220785 - DNA, 384 bp, Gossypium hirsutum
cgggggattatggaaagaaatcaaagctcgtgttcaccatctatccttcgcctcaggtctgaactgcagttgaggagccttacaatagtggtctgtccactcattcccttcttgagcacacagatgtggccgagctcttggacaatgaagcaatttacgacatatgccggagatccctcgatatcgagaggccaacttacaccaatttgaaccggctgatttgtcaaaccatatcgtccttgacgacttctttaaagcttgatggagccattaatgtagacattacagagttccaaaccaatcttgtgccatattctcggatccatttcatgctctcttcttatgcgcctgctatctcaactgagaaagcataccatcgacaga

SEQ ID NO: 220786 - DNA, 423 bp, Gossypium hirsutum
gttatcagttgctttttcttagtgcacgtgcaatagcccaggcatatatcaccagacaatttttagtcaaccttaagcaggatggtaaggcattaccagatgggccaattgttatatcccctgatggactttttccatccctatatcgagaagttattagaagagctcctcatgagttcaagattgcttgcttagaggagattaaggcattgtttccatctgattgcaatccattctatgctggtttcgggaatagagacaccgatgaaatcagctacgttaaggttggaatcccgataggaaaaatcttcattattaacccaaagggtgaggttgccgtgaaccgtcgtgttgacacaaaatcttatacatctcttcacgctcttgttcatggcatgttcccaccgactacctcctccgagc

SEQ ID NO: 220787 - DNA, 433 bp, Gossypium hirsutum
gtgatgtgaagtgggcatcgagatgggatgcatatcttttaatgagtgacgaccaaatacactggttttcaattgtcaattctctgatgattgttctcttcctttccggcatggtagcaatgattatgttaaggacactttaccgtgatatttctaagtacaatgaacttgagacccaggaagaagcccaagaagagacaggatggaagcttgtacatggggacgttttcaggcctccatctaattctgacctgctctgtgtctatgttggcaccggtattcaatttttgggcatggtactagttaccatgatctttgctgtttttggatttctttccccctccaaccgaggtggtctgatgacagctatgctcctgctttgggtcttcatgggcatttttgctggctatgcctcttcacgtctatacaaaat

SEQ ID NO: 220788 - DNA, 375 bp, Gossypium hirsutum
  unsure (1)..(375): unsure at all n locations
tcagattctatttggatgtgttgctcagtacacaattatgccaacttttgctatggttattagcaaaactttggggctttcaccatctctttctgttggtttgattttgctaggttgttgtcctggtggtgctgcatccactgtggtgacctttattgcacgaggagacgtttcgttatcgacggtaatgacggtttgcactactcttggtgcagtgatcctcacacctcttttgactgtgattctagcaggaacatatgttcctgttgatgctattggactntccatcagcaccctgcangtggttgtggctccggttttgctcggttcttacctacaaagcacattttctttggtgtgaaaatgattacacca

SEQ ID NO: 220789 - DNA, 394 bp, Gossypium hirsutum
  unsure (1)..(394): unsure at all n locations
ggcgtgtcaagcgtcgaagtttgtggcaaagaacggaactgcttactacaagcaattgttggagcagaataagcaatatattcaggagccaccaacagtggagaagtgcaatgagctgtctaagcagctgttttatactcgacttgccagtatccctggccgtaacgaggcattctggaaggagcttgattatgtcaagaatctgtggaagaataggcaagaactgaaggttgaagatgctggtattgctgcattgttaggactggaatgctttgcatggttttgtgctggtgagatagggggaaagggttntacttttactggttactatccctaaagaaaaacagctagtataaagcagggagtctgatggatgtgtatgccttttattatc

SEQ ID NO: 220790 - DNA, 194 bp, Gossypium hirsutum
atagcactaataaccaactcatcgcttcggattatctggatccaaagaatcagtcaagatatgatatattggtcatatcattatagcaactgaattttttttgcattaagtaaaagacaaaaccaatctgattatgaatagatcgaaattgtgaagcaaaataaaaagtatgtggataaatagaaggatgagag

SEQ ID NO: 220791 - DNA, 324 bp, Gossypium hirsutum
ggccgacccacgcgtacgtagtgctgacacacctgttaccgcttttgtttttacccacccacacaaccagtcgcgggcggatatttccgtggtgaggccgaagcacccatcctttgagcgagctcaccggaccgacattacgactgggtttatcaatccagaaatatgcaaactaactctcctctctatgctgactatcgctgtgtggaaagggattacaggcgagattcctaaatgcatgaccatcctactatttgttcgcatccttgatttgatcggttacaagctttttcgtataaattcctgctgatttcagcaagttga

SEQ ID NO: 220792 - DNA, 405 bp, Gossypium hirsutum
cattctcattctctctccactgaactcttgctaaacggtatcgttttagtcagtctttcatcaatggcgaaagaaccagttcgcgtcctcgttactggagctgcaggacaaatcgggtatgctcttgtacccatgattgctaggggagtcatgttgggtgctgaccagcccgtgatccttcacatgcttgatatcccacctgctgcggaggctttgaatggtgtcaaaatggagttggtggatgctgcatttcctcttctaaagggtgttgttgctacaactgatgctgttgaggcatgcactggagtcaatgttgctgtcatggttggtggtttcccaaggaaggaaggaatggagaggaaagatgttatgtcaaagaatgtgtctatttacaagtctcaggct

SEQ ID NO: 220793 - DNA, 362 bp, Gossypium hirsutum
acccttccggcaggacagggctgaaaaaaatgaaagaggcctaacaatggacctggaaggtacctttaggatccatccaaaaaggtagatttcaatcacttgatcagggtctggcacgtgaatatcggatttcccttgcctggatctccaaatcggtctctaatgatttcactgagggtgttcgggctaggttagtggacaaggattttgctcccaagtggtaccccgcaagcctggaagaggttagtaaagacatggttgagtactactttacgccactcggggaattagagcctgaactggtgctgccaacttcactaagagaaccttacatctaaggaagatatctttgtaggggaagc

SEQ ID NO: 220794 - DNA, 317 bp, Gossypium hirsutum
ggaaactataggagctctgctgaatgtgttatgtgtggtcttttgccaaagtctccctcagccacatccagcagaacagatggtggtcttgtatggatcagtgaatggaatgctctgcagcaccctgttgcctctgcatttttagctgctctttacagtgattacctgcctaccttacaaaactgaaaaaataacctgtggtgaccattcattcaaaccgtcggatcttagaaagtttgccaaatcacaggctgattatgtattgggcaaaacccctttgaaaatgagctttttgttggggtatgggggataagtac

SEQ ID NO: 220795 - DNA, 391 bp, Gossypium hirsutum
  unsure (1)..(391): unsure at all n locations
gggctgtccactcctttaggatcacttactgtggtgtccaggacactactcanatgcgcacccacatgtgctactccggcttcaatgacattatccactctatcatcgacatggatgccgatgtgatcaccatcgagaactcacgttccgatgagaaactcctgtctgtcttccgcgaaggggtgaagtatggagccggaataggccctggtgtttatgatatccactctccaagaataccatcgaccgaagagatcgccgataggatcaacaagatgcttgcggagctcgagaccaacatcttgtgggataaccctgactgtggactcaagacttgcaagtgtgcagaggtgaaaccgggactcaacaacatggttgctgccgctaagtt

SEQ ID NO: 220796 - DNA, 362 bp, Gossypium hirsutum
atgcttgctacaaggctttgaatgatttctttgtcatgctagaaggtactcttttgaagcctaacatggagacccctggttgcgactccccaaaggttgccccagaggttattgctgagtacactgtccgtgccttgcagcgtaccgtccctgctgcagtccctgctattgtgttcttgtctggtgggcaaagctaggaggaggctactcttaaccttgatgccatgaacaagctccagaccaagaaaccatggtcactctcattctcatttggacgtgccctttatcagagcactctcaaggcctgtgctggaaaggatgaaaactgtgaagaaagcacaagatgctttccttgataagtg

SEQ ID NO: 220797 - DNA, 429 bp, Gossypium hirsutum
gccgtcgggaagaacaagaggatttccaagtgaaagaagggaggaaagaagaaggcagcggatccttttgctaagaaggattggtacgatatcaaggctccttcagttttcactaccagaaatgtggggaaaactctcgtctcccgtactcagggtaccaagattgcttctgaaggactcaaacaccgtgtgtttgaggttttccttgctgatcttcaaggtggtgatgaggatcatgcttacagaaagattcgtttgagagctgaagatgttcaaggaaaaaatgttttgaccaacttttggggaatgaattttacaactgacaggctgaggtctttggtccgtaaatggcaaaccctgattgaagctcatgttgatgtgaagacaactgacaattacactttgagaatgttctgcattggattcact

SEQ ID NO: 220798 - DNA, 376 bp, Gossypium hirsutum
gatttccctcattctcctccgaaaggctactttctgaccaagatttttcatccaaatattgcacccaatggtgaaatttgtgtaaacacactaaaaaaggattggaatccaagtcttggattacgacatgtactcattatagttaggtgtttattgattgagccatatccagaatctgcactaaatgaacaggctggcaagatgctgcttgaaaattatgacgagtatgcccggcatgccaggctttatactggaatccatgcgaaaccaaaaccgaagttcaaatcaggagctatttgcgagtcaactacagcattaaacgtggagcagcataacacctcggttctgaatatcgagcagaaaaatgcagcaagtg

SEQ ID NO: 220799 - DNA, 441 bp, Gossypium hirsutum
ggccgaccacgcgtccggccgtctttaagaacaataggatttccattttttataagggaggaaagaagaaggcagcggatggttttgctaagaaggatgggtgcgatatcaaggctccttcagttttcactaccagaaatgtggggaaaactctcgtctcccgtactcagggtaccaagattgcttctgaaggactcaaacaccgtgtgtttgaggttttccttgctgatcttcaaggtggtgatgaggatcatgcttacataaagatttcgttgagagctgaatatgttcattgaaaaaatgtttagaccaactatttggggaatgatttttactattgacatgctttatgtttttggtccttaaaaggcaaaaccttgttgaaacttcatgtttatgtgataactactgacaattacaccttatatattgttcttcatt

SEQ ID NO: 220800 - DNA, 429 bp, Gossypium hirsutum
cccacgcgtccgcagaaatgcctcagaaatgctcactacttgaaagaccgactgcacgaggctgggatcagtgctatgctaaatgaactcagcagtacggttgtgtttgagcggccccgggatgaggagtttgttcgtaggtggcaacttgcttgtgaagggaatatagcacatgtggtggtgatgcctaatgtgacaatcgaaaaactggatttcttcttgaatgaattagttgaaaaacggtcgacttggtatcaagggaatgttcaacctccttgtattgcagcagagatagggaaagcgaattgcgtttgtgctctgcacaagtgaaaaaaaatatcagtctatgattcgggaattcctctattttcatgcaacttgtcatttgggtttaatgaaatatagattatattcataagtttttcgttt

SEQ ID NO: 220801 - DNA, 382 bp, Gossypium hirsutum
gcgtccggacgggctaggagccatggagttggccatgtgttcttgggcagactgggtagcatcgaaagtcgttcctcaaaagaaacgtgtcttttttgttacaatgtcaccaacacatttctggagtcaagagtgggaaccaggaagtgaaggaaattgctataaccaaatgaggcccatcactttggagggctactggggaagtggttcggacttgcctactatgcgcatggtggataaagtgctttctggtttgggttcgaaggtatctgtcatcaacattactcagctcttagaatattgaaaagatggtcacccttttatctataaaaaattttggagacacttgacccccagcaattggctaaccctgcaagctact

SEQ ID NO: 220802 - DNA, 417 bp, Gossypium hirsutum
  unsure (1)..(417): unsure at all n locations
accgaaggatactatgcgcttgggtaaatgaatccgatagtatggaagatgatctaaagaaaggatggtctggacttcagtcgattccgaggcagatttggcttgacctaaatggcaagcaactagtgcagtggccagttgaagaactcaatagtctacgtggcaatgaagtctatgtttatgacaagcagctcgaaagcgggtcggtttttgaagtttcgggcatcactgcttcgcaggccgatatcgaaataatgtttgaattgcccaaactagaagaggccgagttcatagacaccagtttggttgatccccaactaatctgtgacaaacaagatgcatctgtgaccggaaaattcggaccattcggtttattagctttggcaacanaagacttgactgaacaaactgcgattt

SEQ ID NO: 220803 - DNA, 416 bp, Gossypium hirsutum
catttcccctaaattccgtcttttttcttcaaattccccacaaatggccgtcactttctcagatctccacaccgaatctggccttaaatcccttaacgacttcctcaccggcaaatcttacatctctggggataagctgactaaggatgacataaaagtttatgctgctgttttgaaaaatcctggtgattcatttcccaatgtgagccaatggtataactgtgtgtcttcccatctcgctgctagcttccctgggaaagctgttggcgtttcacttgctggcaaagctgatccagctcaatctgctgaagctaagtctcctgctgcggatgacgacgatgatgacttggatctgtttggtgatgaaacggaggaggataagaaggcagcagaggaaagagaagcactaaaaagtc

SEQ ID NO: 220804 - DNA, 427 bp, Gossypium hirsutum
  unsure (1)..(427): unsure at all n locations
ctttttgactcagcgattagatgcctacctggaatttcaggctgcaaattctaccttaatgaaaagctatggtcttgttcacgaagattgtataacaaagatgaggttgatgtcattggttgatcttggctctaatgaatctggacaaattccatatgccctcatcaaggatgctcttaggatcaatgatgatgaggtggaattgtggattgttaaggctataactgctaagttaatcgactgtaaaatggatcagatgaaccaggttgtgattgtaagccgctgtactgagcgcatttttggacagcatcagtggcattctcttcggttgaaactagcaacatggaggggtaatgttgctagcctcatcagcaccatccaagctaacaaggttgtggaagaaagctcacaagctatgcangggatg

SEQ ID NO: 220805 - DNA, 268 bp, Gossypium hirsutum
tggaaaggttcttgacctcagtgtggatttgagtgctgctagtgctgcggaagaataattaccctgaagcatggtatttgccaatgtttgtgcttgtttaagcttcttaacagtgttgaatgttgctggtgggatttatgtctattacaccatgtttttttttactactcaagacactatatttaatgatttgatgatatttaaacgtttgttggagctctgtgtttttagatgaaatacatgaaaacgtctctgctaagcctatttt

SEQ ID NO: 220806 - DNA, 391 bp, Gossypium hirsutum
ataggaacccttttttcggtctgccttttttttgctttcaaaactggataaattctcgttgctaagcgtatctcgcttgatattttagagggcgaactggcgaaacataagtcttacgccgaatatctgcttcaacagctatttcgtgcgaagaatatacatttaagggagggggaaacttttaagggagtagtagaaaatcatttggtttttgaagagcccttaaaagagcaaattgatgggctctatcaaatctgttgtgatctcattctaaatggggccaacagtagctactttctaaaaattgtggaattttatggatccacgcttggtatgtagccaagcccaagataaaaggaacgaggggaagaatcgacacggaatccataac

SEQ ID NO: 220807 - DNA, 437 bp, Gossypium hirsutum
gtccggtgaaattggccagaaatctttgggcatgttgattggagtcatggcaataccttaacagagggtgggggaatccactaaagatggcatgaactggaaaaatgatggtaactggcaacgaaacgatagcgagaagaatggatattatcaggagtttaaacaggagaataagggatggaattctacttctggtggacaaacctcctctggtgtaaattataattcttataactcaaattcttgggatgattgggacacaaaagacaataggaaggaacatactacaaaagtgactgcttctcatagcaatgatggttgggctggttgggatgaccccaaggatgatggatatgatagtttctataatggtgcatctgataaaaatgccgttggtcgtaatggaaaatcagatgccgcatggactggtggaggct

SEQ ID NO: 220808 - DNA, 424 bp, Gossypium hirsutum
agactttgagcaaagcagcctcatttcatttctccaatatggctagagggttgaagaaacatttgaagaggctcaatgcccccaggcattggatgcttgacaagcttggtggtgcttttgcacccaagccatcgtctggtccccacaagtccagggaatgcttgccattgatccttattttgcgaaaccgattgaagtatgctctcacctatagagaagtcattgctattcttatgcagaggcatgttatggttgatgggaaggttaggacggataagacctatccagctggtttcatggatgttgtgtccattcctaaaacaaatgaggactttcgtctactttacgacaccaaaggccgatttcgtctccatgccatcactggcgatgaaaccaagttcaagctctgcaaggttcgatctgt

SEQ ID NO: 220809 - DNA, 430 bp, Gossypium hirsutum
taggaaaggaccaaaagggtttaatctgctgtgcacgttgtagatcaccacccaaactgtaacaatggccgtcggtaagaacaagaggatttccaagggaaagaagggaggaaagaagaaagcagctgatccatttgcgaagaaggattggtatgatatcaaggctccatcagtttttacgagcagaaatgttgggaagactcttgttacccgtactcagggtaccaagattgcttcagaaggactcaaacacagagtgtttgaggtttcactgggtgatcttcaaggaggtgatgaggatcatgcttacagaaagattcgtttgagagctgaagatgttcaaggaaaaaatgttttgaccaacttctggggaatgaattttacgactgacaagctgaagtctttggttcgtaaatggcaaactctgatc

SEQ ID NO: 220810 - DNA, 442 bp, Gossypium hirsutum
  unsure (1)..(442): unsure at all n locations
cggttatttcttcgtcgcagtcacacagnttcataaagagcattttgtcaaaagaaaaaatcccgatggttttcccgagaaaatctttgccgggcaaagaaaaaaaaaggaaaaatggagttatgccctacaattaagaacatccttcttttggattccgaagggaaacgtatagctgttaagtattactcagatgactggccaacgaatgctgctaaggaagcttttgagaaagctgtgtttaccaaaacccagaagactaatgctcgaactgaagctgagataacaatgtttgacaactatattgttgtatacaagttcgttcaagaccttcactttttcgttactggaggtgaaaatgaaaacgagatcatcttggccacagtgctccagggattttttgatgctgttggactcctccttagaggcactgaggacaaaa

SEQ ID NO: 220811 - DNA, 432 bp, Gossypium hirsutum
  unsure (1)..(432): unsure at all n locations
ctttcttctcttctttcaactcaaagaaaactcccaagtaatattagaatcatgggtgttgtcacttataactatgagtctacctctccagtcgcccctgccaggcttttcaaagctttttctcttgaagctgacaaggtttggcccaaggctgctcctcaggcagtcaagagcgttgaggttgaagctaatcctggccctggaagtatcgtaaagatcaactttgctgaaggccttccattccaatatatgaagcaccagattggaggacatgacgacaagaatttgtcatacagttatagtttgatcgaaggtggacctttgggggacaagcttgagaaaatcagctatgacaacaagtttgaggcagctgcaggtggaggaagcctttgcaagagctcgatgaaattttacacntgtggcgactatgtg

SEQ ID NO: 220812 - DNA, 357 bp, Gossypium hirsutum
  unsure (1)..(357): unsure at all n locations
gtgaggaagtacctaattccaaggtggggtctcttgttcgggtgggtttggtggaccctatggtggtggtggttcaacccggcaccactggtctggaccaatcacagaccttttttttccaggtgctcaatattcccaccaagattaacaaaggtactgttgaaattatcactcccgttgagcttataaagaagggtgacagggttggttcttctgaggctgcacttcttgccaagctcggaattaggccattctcatacggtncttgttgtctggtctggttatgacaatgngtcagtctttagccctgaggtgcttgaccctactgaggatgacctgattgagaaattcgctact

SEQ ID NO: 220813 - DNA, 451 bp, Gossypium hirsutum
gccgcccaacccgtccgttgagctaaagagaaacgtggttgaagcttcattagttggtaacacaaatgttgaaagttctgacagcacagcaatctcagttcaagatgatgctttcgaaaaggagatgatggggctaaccggggggttccccggtggtgaaaagggattgaaaaagttcattgaggaaaacccaccaccggcgaagcaatcagtttccgattcggtaagtattgctaggcttgggaagccaaaatcaccggagttgccactgttaatgccgggaatgatcgcgattgttaagaacccgaacaaccccttctacatgtactgcggcattgtgcagcggatcactgatgggaaagcaggggttcttttcgaaggtggaaactgggatagattgatcacgtttcgactggacgagcttgaacgcagagaaaaaagcccttcaatg

SEQ ID NO: 220814 - DNA, 425 bp, Gossypium hirsutum
gttgctgggcattttcaacgattgcatttgttgaaggcataaataaaatcgccaccggcgaactaatctctttgtcagagcaagagctagtagattgtgaccgatcctacgacgctggttgcgatggaggcctaatggattatgccttccaattcattattgacaacggtggcattgactctgaacaagactatccttaccttggtgctgataataaccaatgcgatccaacgaggaagaatgctaaggttgtcagcattgatgggtacgaggatgttgttcaatatgatgagaaagcattgaagaaggctgtatcacatcaacctgtgagtgtcgccattgaagctagtggcagagctttccaactctacgaatcgggagttttcagcggtgaatgcgggtcagcattagaccacggcgtgatt

SEQ ID NO: 220815 - DNA, 417 bp, Gossypium hirsutum
ggaaggtcctgattttatcccatctcgtgttagtacatatctcttgtgtgagtgcgggtatgctatcatcaactctccaccttgtccttcgtttgcgcggcgggatgcaaatcttcgttaagacgcttaccggaaagacgatcactctcgaggtcgagagctctgacacgatcgacaacgtgaaagccaaaatccaagacaaggaaggcatcccgccagaccagcaacgtctcatcttcgccggaaagcaactcgaggacgggcggactttagccgattacaatatccagaaggaatcgactcttcatctggttctacgtcttcgaggtgggatgcagatcttcgtcaagactttgaccggtaagaccattactttagaagtggagagctcggatacgattgataacgtgaaagcga

SEQ ID NO: 220816 - DNA, 432 bp, Gossypium hirsutum
tgttaagcagatctggagctatatcaaatcccagaaccttcagaatcctgctaacaagaaggagatcttttgtgatgagaagcttaagaccatttttgatggaaaagaaaaagttggtttcctagagatcgggaaaatgctatcccgccattttgtgaagtccagctgacctctattttcatgtttaaccactggttgccctaccaacatcaagctagctcttgttattctgaactgaactttttttatgtatgttcatgttttgcctttcattttgcgagctaaactctcttgtagccttgcaactgaggaaatgttcccagctggacttgtgtaaaaattctgtagggactagggagtgaaaaagtaacattttcatttggtttcctgattttcatttgtactggtttatggaaactggatctttgatca

SEQ ID NO: 220817 - DNA, 430 bp, Gossypium hirsutum
ctttactacatatttgccagcgtgtggggtcataggatctacaccatatacagcatcctgtttattgtctttatcattctcttgattgtcactgcttttatcactgtggctttgacttattttcaacttgctgctgaagaccatgagtggtggtggaggtccttcctttgtggtgggtctaccgggctgttcatatacacctactgtttgtattattacaatgcacggtcagacatgtcaggcttcatgcaaacttcgttcttctttgggtacatggcctgcatttgctatggcttcttcctcatgcttggggctattggcttccgtgcatctctgctctttgttcgacacatttaccgttcaatcaagtgtgagtaggaagttggatggtctttcctgttcacaagaagtaagcatacttttgcttatc

SEQ ID NO: 220818 - DNA, 209 bp, Gossypium hirsutum
catatttttttttacatattttctcttcgcatttttttataagaccgacaccaaatacatcgggctgtttattttctttatcatgctggggacatacacttcttttatcactgtctctttgacttattttcaactttcttctgataaccatgattggattgtgatgtcctttctatgtttattctctactcgtctgttcatattcacct

SEQ ID NO: 220819 - DNA, 398 bp, Gossypium hirsutum
tcgtccacgcgttgcgttgggggacatgggtagtctgaatggaacactgttgaattcttgtccaattcatcatcctgatcctggaagtaggctatggggtgacccagtggaacttgcaagtggagacacaataacagttggcacaacctcaaacatttatgtccatatttcatcccacaatgagcgtctggtcccttttggagttggtatgacttcagaccctatgtcattgcgtcgaggaggaaagaagcttccaatggaagatgtttgctattatcattggcctcttcctggcattaatcagtttggagtttttggtatctgtgatggccagccaccgcagtggtgaaacggaggatacttttattgctgatctttcagtcggtttggccacgggc

SEQ ID NO: 220820 - DNA, 456 bp, Gossypium hirsutum
ccaacgtccagctccccggtatgtacaacaaggaagagaacccccgtgtccccattatcgtcactggtaacgatttctccacactgtatgctcctctcatccgtgacggtcgtatggagaaattttactgggcaccaactagggacgaccgtgtcggtgtttgcaaaggtattttcaggaccgacggcatcccagatgaagacattgttaagctcgtcgacaccttccccggccaatccatcgatttcttcggtgccttgagggctcgggtttacgatgacgaagtgaggaaatggatcagtgatgtcggagttgcaggcgtagggaagaagttagtgaactcaagggacggacctccaacatttgagcaaccgaaaatgaccattgaaaagctattggaatatggaaacatgcttgttgctgagcaagagaatgttaagagagtccaattggctg

SEQ ID NO: 220821 - DNA, 400 bp, Gossypium hirsutum
cccacgcgtccggttttccaatagttcgtaacaatggcggtctcacttcaagctgcagctaccctgatgcaaccaatcaaggttgctgcaccatcaaggaccaatgtgccgctcaggtcctcccagagcgtttctaaggccttcggtttggagcctgttggtgctaggcttacctgctctttgcaaactgacctcaaggacttggctctgaagtgtgttgacgctaccaagctcgctggtttcgctcttgctacatctgctcttgttgtctcgggagcaagcgctgaaggagtttcaaagcggctaacctacgctgaaatccaaagcaagacatacatggaagtcaaaggaacaggaactgctaaccagtgcccaaccatcgatggtggtgtcgactctt

SEQ ID NO: 220822 - DNA, 405 bp, Gossypium hirsutum
tggagatggcacaagcaatggcatcaatggctggtttacgtggctcttcacaggctgtcctggacggcagccttcaactcagtggccaaacccgcttcaacattcctagcaacaaccgagtggctgtgggtaggtctggtttcactgtcagagctcatcagacaccggccgagcctgagactggacgcagagccatgttgggtcttgttgctgctggtttggccactggctcctttgttcaagctgtgcttgccgatgccagaagcatcaaggttggcccacctccccctccctctggtggactgcctggaactctgaactctgatgagccaagagaccttgttctgccatacaaagacaggttcttcctccaaccagttactccagctcaggcagcacagagag

SEQ ID NO: 220823 - DNA, 462 bp, Gossypium hirsutum
ctcaaattcagttaaaaatttcacccttgttttcttcagtctctctctcagccatggctgcagccatctccaccgtcgctgccgctgccgccgccaaccgagctctgggagtgtcagtcccaacctcagctttcatggggaagaaagtgagctcaagattcaacagcaccaggcaggttccttcgggaagttttaaggtgatggcggcggagaaagagatagacgaagagacacagaccgaaaaggaccgatggaaagggttggcttacgatatttcggacgaccaacaggacattactcgagggaaagggatggtggattccttgttccaagctcccatgaatgatggaactcactatgctgtcatgagttcctatgaatacctcagccaaggtcttaaaacgtacaatttggacaacaacatggatggtttctacattgctcctgcattcatggacaagc

SEQ ID NO: 220824 - DNA, 431 bp, Gossypium hirsutum
ggccgccctttttttttttttttgtaaaaaaaaaagttgattggaacaaataaagtgaaacatttaagacaagaacaaagtggagattttataacacaaaaatagaggatgcaaatccacttaaaacacaaaaggaaaacaacattcaattaagacacaaaggggggatttcctttgtttgtgcccaatatagatttttttcttcccttagagcttaatttcccatttagaaagctcctctcttgatagcatcgtcattagcatttccaagggcagcttcactcaaatatttgtcagccaattgaaccctcttcacattctcttgctcagcaacaagcatgtatccatattccaacagcttctcaatggtcatcttcggttgctcgaaagatggtggcccttccctcgagttcacgagctttttcccgaca

SEQ ID NO: 220825 - DNA, 372 bp, Gossypium hirsutum
aagacaagaacaaagtggagattttataacacaaaaatagaggatgcaaatccacttaaaacacaaaaggaaaacaacattcaattaagacacaaaggggggatttcctttgtttgtgcccaatatagatttttttcttcccttagagcttaatttcccatttagaaagctcctctcttgatagcatcgtcattagcatttccaagggcagcttcactcaaatatttgtcagccaattgaaccctcttcacattctcttgctcagcaacaagcatgtatccatattccaacagcttctcaatggtcatcttcggttgctcgaaagatggtggcccttccctcgagttcacgagctttttcccgacaccattg

SEQ ID NO: 220826 - DNA, 456 bp, Gossypium hirsutum
  unsure (1)..(456): unsure at all n locations
cccacgcgtccgcccacgcgtccgatcggctaccattgccactgcctctccggcacaggctaacatggtcgctcctttcaccggcctcaagtctgcctctgctttcccagtcatcaggaaggccaacaacgacattacttctctcgcaagcaatggcggcagagtgcaatgcatgcaggtgtggcctcctactggaaagaagaagttcgagactctctcatacctccccgatcttacacccgtgcagttggctaaggaagtagattaccttcttcgctcaaaatgggttccttgcttggaattcgaattagaggagggattcgtgcaccgtaaatactcgagcctacccacgtactacgatggacgctactggaccatgtggaagctgcctatgttcgggtgcaccgactcggctcaagtattgaaggagctngaggaatgcaagaaggaataccc

SEQ ID NO: 220827 - DNA, 385 bp, Gossypium hirsutum
ccacgcgtccgtttctcccctgcagctccttcgcagctatgcgccggcaagagtggcatgttctgcccatcacgagcgtttcttgtgaaaccaacgagaacccatatggtcaaaaacgaaaagggaatgaggatcacatgccaggccactagcatccctgctgatagagtgccagacatgggcaagaggcagctcatgaatctgcttctgttgggggctatttcacttccctcaggtttcatgttggttccttatgcagccttctttgtcccatctgggggacggggtaccggtggtggcaccgttgccaaggacgcaatcggaaatgatgtaattgccgaagaatggctcaagactcatggccctggggaccgaaccctgactc

SEQ ID NO: 220828 - DNA, 423 bp, Gossypium hirsutum
cttctttgctttcttggattaaccagctggggtaggggaaaaaaataatgaaaagggtttcctttgtggccttggtgtggggggcactcgcggggggggctgttttcgggtgaaagtcgcacgggggaagcagtgacatgtaatcccgtggagcttgccccctgctcgccggcgcttacgtcgtcctcgcctccatcaagcgcttgttgcagcaagctgaaggcgcagcagccatgcctctgtggatacattaagaacccatctcttaaacagtatgtcaacagtcctaacgctaaaaaggttgcttcgacttgtggagtcccatatcctaagtgttaaatgttgcttaatggtgtatctactatctactggcagcaaataagtgattctttttgctgtcaagtactgttctgaataaaagaa

SEQ ID NO: 220829 - DNA, 423 bp, Gossypium hirsutum
cccacgcgtccgagacgtgtgttgatgctaccaagctcgctggtttcgctcttgctacatctgctcttgttgtctcgggagcaagcgctgaaggagttccaaagcggctaacctacgatgaaatccaaagcaagacatacatggaagtcaaaggaacaggaactgctaaccagtgcccaaccatcgatggtggtgtcgactcttttgccttcaagcctggcaaatactacgccaagaagttctgcttggagcccacttccttcactgtcaaggctgagggtgttaacaagaatgcccctcctgagttccaaaacaccaagctcatgacccgtttaacctacacccttgacgaaatcgagggccctttcgaggtatccaccgatggcaccgtcaaattcgaggagaaagatgggattgattatg

SEQ ID NO: 220830 - DNA, 458 bp, Gossypium hirsutum
tcggaccaacccttccgcccacccgtccgggaagactctttggtttaactgtaccatatagtcctagtaagcagtattagcaatggcctcctccatgatctcatcggcaaccattgccaccgtgaactgctcctccccggcacaggccaacatggtggcccccttcaccggcctcaagtctgcctctgctttcccagtcactaggaaggccaacaacgacatcacttctcttgcaagcaatggtgggagagtgcaatgcatgcaggtgtggcctcctcttgggaagaagaagttcgagacactctcatacctccccgatcttacacccgtacagttggctaaggaagtagattaccttcttcgctctaaatggattccttgcttggaattcgaattagaggagggattcgtgcaccgtaagtactcgagcttacccacgtactacgatggacgctact

SEQ ID NO: 220831 - DNA, 445 bp, Gossypium hirsutum
aaaggagtcagatggaggtggaacgagtccaagccattgtttcttcatctctagctaaagacaatatcccactagagtttgttcgacccgaagatgaacaacctgcaattacaacatttcatggtctcatccctgacatccctgttatcgatttcaaccaccctgatcaggatcatatcatccatttgattgccaacgctagcagggattgggggatattccaggttgtgaaccacgggataccctttcatctaattcaaaaactgcaacaagttggaaaggagttctttgatctccctcaggaagagaaagaagtgtatgctaagccacccggtgcactcacccttgaaggctatggaagcaagatcgggaaagatgttaatggaaagaagaactgggctgatcacctttttcataagatatggcctgcttcatgcattaacca

SEQ ID NO: 220832 - DNA, 450 bp, Gossypium hirsutum
cccacgcgtccgcccacgcgtccggaaatataccagaaaatcaaaaagaagaagaaaagagatccccatgatgtctcttacaatcccaactaatctctcaaaatcaattttgaagccaaagctggagacccaagtgatccccaaggcttcatccagatcattgattgtatgctcctccagcaatccttcctcctccgacaaatcggcttcatcactccaggccttctcagcggctctcgctctttcttccatccttctttcggctccactccctgctgttgcggacattgcggggctcactccttgcaaagagtccaagcaattcgccaagcgcgagaagcagcagatcaagaagctggaatcctcgttgaagctttacgcccccgatagcgcaccggctctcgccatcaaagccaccatcgagaaaaccaagagacggttcgacaacta

SEQ ID NO: 220833 - DNA, 409 bp, Gossypium hirsutum
tactattacacttccggaaaaaaatcatggccaccgtcacgacgcaagcctctgccgctgttttccggccatgtgcatcgaaaacacggttccttactggttcttccggtaagttaaaccgagacgtttcatttaaaccagtggcttctacatcgactagctcattcaaagttgaagcaaagaaaggggagtggttacctggtcttccttcaccagcttacctcaatggcagtcttccaggtgataatggctttgatcctcttggattggctgaggaccctgagaacttaagatggtatgtacaagctgagcttgtgaatggacgttgggctatgttgggtgttgcagggatgcttctgcccgaagttttcactaagattgggataatcaatgctcctcaatggtacga

SEQ ID NO: 220834 - DNA, 453 bp, Gossypium hirsutum
gaagaattttgttggattatccgttgttgatggttttatagcatgtggctcagaaacaaatgaggtttatgcatactataggtcactgcctatgccaataacttctcataaatttgggtccattgatcccatttctgggaaagacacagatgatgacaacgggctgtttgtatcaagtgtttgctggagagggaaatcagacatggttgttgctgcaaattctagtggatgtattaaagtattgcagatggtttaaggagaaggttaattgcttagagtcatcaattactggcgtcatttggttgccaagttttattctcgaggcttattcttaagcattgaagccatcttgggttcaggcaaatatgtcatacatggatgacttggtctgctcggtggctcattataatagggctggctttgattcatagaaaaatatatacagagtagagt

SEQ ID NO: 220835 - DNA, 419 bp, Gossypium hirsutum
cccacgcgtccggaagaagatgacgagttcatcagcaaccttaagcttctcttcattttcttcaacctcagccctatctttatctaaagtcagattcaaatttccctccttttcacgaacctcctctctctcatctcgcgccaagccattcaccgcttcttcttccaccaccacccacaacatctcaggagaaattcgccattgcagtttgagtaggaggagagggctggcttttactgcaacgctaccggttcttcttcctctgcatgaatttgtagactctgttgccgctaaggcagttgagtcaggttcaggtcaaagcgagtatatgcgtataaaggaagagataattaaagtagtaacaaagggaaaggctgctggtgttcttcgtttggtatttcatgatgctggaacctatg

SEQ ID NO: 220836 - DNA, 359 bp, Gossypium hirsutum
cccacgcgtccgtccacccttggcatcttcgctgccgatgtcaagcctgttggcactgatggcatctctgttgatggcaaggttatcaaggttgtttctgaccgcaaccctgccaacctcccatggggggacctaggaatagatctagtcatcgaaggaaccggtgtgtttgtcgatagagaaggtgcaagtaagcacattctagcatgagccaagaaagtgctgattactgccccatgtaagggtgacatccccacctatgttgttggagtgaatgctgacacctacaacccagatgagcctatcatcagcaatgcttcttgcaccaccaattgccttgctcctttcgtcaaggttct

SEQ ID NO: 220837 - DNA, 296 bp, Gossypium hirsutum
cccacgcgtccgttcaaagttaactacttgtgtgcagacaaaaatggcttttgctgggtttttcttgttgggtttactttcaatggtctcagctgttcatggatatggtggtggatggactaatgctcatgctactttctatggtgggagtgatgcttcaagcacaatgggtggtgcttgtggttatgggaacctgtatagccagggatatgggacaaacaccgcagctttgagcacagctctgttcaacaatgggcttagctgtgggtcttgctatgagattaagtgtgtgaatg

SEQ ID NO: 220838 - DNA, 464 bp, Gossypium hirsutum
cccacgcgtccgagccactcaaaagttaaaaaaccttctgttttgttagcgtagcaaatagcaatacaaccatggctttggctcccaccacttatccctcctatctctgctctaacacttgctcacccttacacagagccactcaacctctcctttcttcaaccaggcatgtaggagttagattcaacagcaagtgttcagcgtctttctgcagtggcaaggagcagctaaagccatggattttggtagcgaaagcatcggaaggtgagtcccaaaccacagagcaggaagagcagcagtacgaggagtatgaggtagagattgagcagccttatgggctcaaattcagaaaaggcagagatggtgggacttacattgatgctattcagcctggtggagctgctgacaaggctggtgttttcaccgttggggacaaagtacttgccaccagtgcagtgtttgga

SEQ ID NO: 220839 - DNA, 428 bp, Gossypium hirsutum
ataagccctccctccttttccaacctctccttcttctttgaaatttagctgaaatggctactgcaacaatgagcttcaatttggtgggagcatttaggggtctttctctagcatcaagctcgacgtcgtcctttatgaaaggagaagtgggttccattcacaaaacggcagtcgtttcgttcccgaggaagtctccgttccctttgacgatcgaatcggcgcacaaaaaaggagccggtagtactaaaaacggtcgcgattcaaagggtcaacgactcggcgtcaaaatctacggcgaccaggtcgccaagcccggcgctattatcgttaggcaacatggaaccaagtttcatccagggaaaaatgtggggcttggcaaggatcacacaatcttttcattgattgatggacttgtgaaattcgagaag

SEQ ID NO: 220840 - DNA, 372 bp, Gossypium hirsutum
cccacgcgtccgcacccccaacgtaaaacagcgtcactctgagagatttttagagagaaaaaaaaaagtggcaagagaaatggcaaaattcccagtgatcaacttggagaaactgaatggtgagagagcagtaaccatggatctaatcaaagatgcctgcgagaattggggcttctttgaggtattgaaccatgggattccctatgattttatggacagagtggaaagcttgacgaaagagcattacaagaaatgcatggagcaaaggtttaaggaactggtggcaagcaaggcccttgagggtctccaggctgaggttactgatatggactgggaaagtactttctatttgcgccatctccctgaatcaaa

SEQ ID NO: 220841 - DNA, 450 bp, Gossypium hirsutum
cccacgcgtccgtgcttttattgcagtcgttttgcgcttgttcttccctacacgtttcccagattggctggaacttcctggagcattgatacttctaatagtggtggcaccgagcttattttcaagcacaataaggaacgactggattggtgtggtgatatgcctaggcatagcttgttatctacttcaggagcacatcagagcatcgggtgggtttcgaaattcattcaccaaagccaatggaatatccaacacaattggcataattattctgttggtttaccctgcttgggctttggtcactgacatcctctagattcagctgagctcagcttctggattgtgtgtgttttagtttcgtcaagttcatgatttgttttttctgcaccattaatttgttgagacttaccaaaattcattgttattgttgttccataacacttgtttact

SEQ ID NO: 220842 - DNA, 412 bp, Gossypium hirsutum
cccacgcgtccggtttcattgaaggcaggactctcagactactctttcgaaccagctccaccatcacccccaaaaaacaaagcaaattgtagaagatggcaacacaagcacttgtatcatcgtctcttacctactcagtggagactgcaaggcagattcttggagctaaacgacaaattgggtcttcaaggaaaggatcctttgttgttaaggcagcttcgactccacccgttaagcaaggagctgatagacctttatggtttgcatctaaacaaagcctttcatacttggatggcagccttccaggtgattatggatttgaccccttgggactctcagaccctgaaggtccaggagggttcatcgagcctaaatggctagcctacggtgagatcatcaacgggcgttatgc

SEQ ID NO: 220843 - DNA, 281 bp, Gossypium hirsutum
cggacgcgtgggcggacgcgtgggctcaatgttcgggttcttcgttcaggccatcgtgaccggaaagggaccattggagaacttggctgaccaccttgctgacccagtcaacaacaatgcttgggcctatgccaccaactttgtccccggaaagtgaacttagagagtgagaagggatttgtcttgtttatgtttttatttgttggtgtgaatttaaatttgttgcacaatcaatgaaagtataatgtgaattttgtgtgctcaatttttttgactgttcc

SEQ ID NO: 220844 - DNA, 439 bp, Gossypium hirsutum
cccacgcgtccgcccacgcgtccgcccacgcgtccgcacagatcacactcgatggatttatgattcagtttaacaagaattcattcggtctggcagctgctggacctcttcaggttcccccattggcacctggagcatcagcaagaacattgctgcccatggtattgttccagaatacgtctactggtcctccaaacactcttctgcaggttgctgttaaaaatagtcagcaaccagtctggtacttcaatgacaaaatcttgttgcacgtgttctttaccgaggatgggagaatggagcgaactagttttcttgagacatggaggtcactacccgattcaaatgaggtcttgaaagaattcccaggcatcatggtgactagtgctgaagcaacccttgatcgactagctgcatcaaacatgttctttatagcgaagcg

SEQ ID NO: 220845 - DNA, 432 bp, Gossypium hirsutum
cactactagtacccactactagcaatggcttcctcaatgatctcatcggctaccattgccactgcctctccggcacaggctaacatggtcgctcctttcaccggcctcaagtctgcctctgctttcccagtcatcaggaaggccaacaacgacattacttctctcgcaagcaatggcggcagagtgcaatgcatgcaggtgtggcctcctactggaaagaagaagttcgagactctctcatacctccccgatcttacacccgtgcagttggctaaggaagtagattaccttcttcgctcaaaatgggttccttgcttggaattcgaattagaggagggattcgtgcaccgtaaatactcgagcctacccacgtactacgatggacgctactggaccatgtggaagctgcctatgttcgggtgcacccgactc

SEQ ID NO: 220846 - DNA, 427 bp, Gossypium hirsutum
ttagcttacactcctattccccactactagcaatggcttcctcaatgatctaatcggctaccattgccactgcctctccggcacaggctaacatggtcgctcctttcaccggcctcaagtctgcctctgctttcccagtcaccaggaaggccaacaacgacattacttctctcgcaagcaatggcggcagagtgcaatgcatgcaggtgtggcctcctactggaaagaagaagttcgagactctctcatacctccccgatcttacacccgtgcagttggctaaggaagtggattaccttcttcgctcaaaatgggttccttgcttggaattcgaattagaggagggattcgtgcaccgtaaatactcgagcctacccacgtactacgatggacgctactggaccatgtggaagctgcctatgttcgg

SEQ ID NO: 220847 - DNA, 423 bp, Gossypium hirsutum
cccacgcgtccgcccacgcgtccgaggttggaccgttagatgcaactagaaacttattggatgctgcagattaaagcggtgaggagtgttataaagtgtgaagtttcatctcttgggttctccttcaatttatatataaacacctatagagtgaagacatttgtgactcttaaaagaaattaaccatggcaacgagtgatgccgaagtgaaagttttgggcacatgggcgagtccattcgtgatgagggtaaggattgccatgaacatcaagtctgtggcctatgaatttcatcaagagaggttatgggaaggcaaaagcgagcttctcctcaaatcaaacccagttcacagaaaggtccctgtcctcattcatggtgatgacaccatctgtgagtctctcattattgtccaatacatcgatg

SEQ ID NO: 220848 - DNA, 332 bp, Gossypium hirsutum
ggaaaagttttcagaataggacatcttgttatacctaaacgagttgcaactgctgggttgtttagctggtgtggagatgatattgaaagatgttggatacccagttaagcttggaagtggagttgctgctgcatctgcttatctgcaaaataacatcccaatgatcccttcaaggatttgatgaagaatattgcaattaattagtccatgtaaacttttttttaaatttatttatttgctccatcataaatttgtaaaaatatactttgatatgtttctctattatactctctctatctaagtcttttattttaaaaaaaaaaaattataat

SEQ ID NO: 220849 - DNA, 458 bp, Gossypium hirsutum
gatagaaagagcttcttcactttgacaacaatactcactttctcttacagagattgagagaaaatcacaaacacacatttatatagcacagtgatcatcatggctcttcacttgtcttgggttttcgtttttggtattctaggcaacgctgtttcattcatggtttccttggctccactgccaacattttaccaaatattcaagaagaaaacatcggaaggtttccagtcgattccctacgtggtttcgctcttcagtgcgatgctttggatttactatgcactgcttaagaaagatgccattttcctcattaccatcaacactttctgcgttttcattcaaactttttacattgttacttacttttactacggcccaaagaaagaaaagatcgtcacggtgaagcttatgcttctcttcaacgttttcgggttcggagttatctttctcgcaactta

SEQ ID NO: 220850 - DNA, 454 bp, Gossypium hirsutum
  unsure (1)..(454): unsure at all n locations
ctcaaattcagttaacaatttcacagttgttttcttcagtctctctctcagccatggctgcagccatctccaccgtcgctgccgctgccgccgccaaccgagctctgggagtgtcagtcccaacctcagctttcatggggaagaaagtgagctcaagattcaacagcaccaggcaggttccttcgggaagttttaaggtgatggcggcggagaaagagatagacgaagagacacagaccgaaaaggaccgatggaaagggttggcttacgatatttcggacgaccaacaggacattactcgagggaaagggatggtggattccttgttccaagctcccatgaatgatggaactcactatgctgtcatgagttcctatgaatacctcagccaaggtcttaaaacgtacaanttggacaacaacatggatgggttctacattgctcctgcattcat

SEQ ID NO: 220851 - DNA, 426 bp, Gossypium hirsutum
cccacgcgtccggttttcgatttttgtattaagagtcgccctttggtgtttttctaattcaatcagtgaggtgaagaaaaatgtcttgctgtggtggaaactgcggttgcggctccggttgcaagtgcggcggcggcggcggctgcggctgcggcggttgcaagatgtaccctgagatgaactttgctgagcaaaccacaactgagacacttgttcttggcgtggcaccccggaaagtgaactttgatggagctgaaatggaaactggggctgaaaatggctgcaaatgtggagataactgcacttgcaacccttgcaattgtaaatgaggggaaaaaaaaaaccgaagcatattatggaagctgatctaaataatatatgatgtatttgggtttttattattagaataaagcagccatggttcat

SEQ ID NO: 220852 - DNA, 146 bp, Gossypium hirsutum
cccttccggaagtcaacgggctagataacccttaaggcccaaggaagctgattggcgggttccctcgcgggtgcaccgccgaccgaccttgatcttctgagaagggttcgagtgagagcatgcctgtcgggacccgaaagatggtg

SEQ ID NO: 220853 - DNA, 445 bp, Gossypium hirsutum
ctttgtgtttcaattcaagatggctactttgtctaggtttgttgtcaaagattgcaattttcataaacatcatgccgtgtgcagaacatcatcgtctttggttccttccagaacgctacggagagctcatctggatgttagagctggcatttctttgcctgagaatggaaaaggttttgcaattcaacgtaagccaagtggtccccttgtttctcttgcagctttcctcgataactcctgcttcaaggggtccccaagttatctgcaatgctgctgccaatgtatccggagatattcctacaccaagtgggatgagcaagtatgagagaataattgaaactttgacaactcttttccctgtgtgggttattttgggaactattatcggcatatacaagccagctgcggtaacatggtttgagacagatcttttcactggtggact

SEQ ID NO: 220854 - DNA, 458 bp, Gossypium hirsutum
cccacgcgtccgctctatcaaacccacgccataactgaaacaaccttgaaccttccttttctccatatacataacccaaaaccttttccctgtaaaattttcttcatggggtttcctgctagttacgccgaagttaccttacccaaacccttgcttttcgcactttcattactttgtttcatcggaaatctaatttccgcccttttaaaccgcctcggactctccgatttcatcgaatcggacatggtttggcccgaaaaccggacccgaacattcgagactaccaccgtacccgctcttctctttccggttataaagttcgaggagctcgtcgtcgacccaccggagaactgtgccgtttgcttgaacgagttcgaaagaggggaagagatcaggtgcttgaaaaactgtagacacgttttccacagggcatgtttggacccgtggatggatcatga

SEQ ID NO: 220855 - DNA, 446 bp, Gossypium hirsutum
  unsure (1)..(446): unsure at all n locations
ctatagcatacactactagtacccactactagcaatggcttcctcaatgatctcatcggctaccattgccactgcctctccggcacaggctaacatggtcgctcctttcaccggcctcaagtctgcctctgctttcccagtcaccaggaaggccaacaacgacattacttctctcgcaagcaatggcggcagagtgcaatgcatgcaggtgtggcctcctactggaaagaagaagttcgagactctctcatacctccccgatcttacacccgtgcagttggctaaggaagtggattaccttcttcgctcaaaatgggttccttgcttggaattcgaattagaggaaggattcgtgcaccgtaaatactcgagcctacccacgtactacgatggacgctactggaccatgtggaagctgnctatgttcgggtgcaccgactccgctc

SEQ ID NO: 220856 - DNA, 372 bp, Gossypium hirsutum
cccacgcgtccgagagaatgttaagagagtccaattggctgacaaatacttgagtgaagctgccctcggtgaagctaatgaagattccatcaatagaggaactttctatggcaaagcagcacaacaagttggggttccagttcccgaagggtgcactgatccaaatgctgataactttgatccaacggctagaagtgatgatggaacttgcacttacaaattctagacctcgtattatagtagtattgggttgaaaaagaaaaccctttttctattttatgtaatgatgtgagattgttccaaaactatcgtttgccttttgttgttccaattatatgattttgctttctcaattcttaatattttctcttc

SEQ ID NO: 220857 - DNA, 421 bp, Gossypium hirsutum
  unsure (1)..(421): unsure at all n locations
taaaggtgacctatttcaggtcaagcaactgctcaacgaaggtgtggttgtaaatgtggctgcatggggccccaaatcccaaggtgtcaccccactccatcttgctgctgagggtggccaccttgaagttatggatgaactgcttgaacgtggtgctaatattgatgcaagaactaaaggtgcttgtgggtggacgccacttcacacagcagctaaagaacgaaagagggaagcagtgaagttcctgatagagaatggggcatttttgccagatgacatcaatgattgtagatttaatccaccgctccattactgccctggcccttgatgggcatatgaggagatgaagcgtcttcaaagagatggctcttcttcagcaggggagacatcttatagctctgaaaatngatattcaatcata

SEQ ID NO: 220858 - DNA, 406 bp, Gossypium hirsutum
cccacgcgtccgaaaaaaaaccccaaacagacaatagcctaggacaggaggatctctcagggtttaggtgatggcttcaaagcggatcttgaaggagctcaaggatctccagaaagatcctcctacctcttgcagcgcaggccctgttgctgaagacatgtttcattggcaagcaactattatgggtcctcctgacagtccttatgctggtggagtgtttctagtcaccattcatttccctccggactatccatttaaaccaccaaaggttgcattcaggacaaaggtctttcacccaaatattaacagcaacggtagcatttgccttgatattttgaaggagcagtggagccctgccctcaccatatccaaggtattgctatctatctgctcactattgacggat

SEQ ID NO: 220859 - DNA, 444 bp, Gossypium hirsutum
gtgacccttcttgttgatcaggttaagacattcaaacctcaattggttgctgttagaaacgagtctttggtaaatgaactaaaagaggctttggctgatatggagcaaaagcctgaggttattcctggggaatcaggtgttatagaggttgctcgccatccagatgctgtcagtgtagttacagggatagtaggctgtgcgggattgaagcctacagttgctgcaatagaagcaggcaaagatattgctttggccaataaagagaccctgatcgctggtggcccctttgtccttcctcttgctcacaaacataaagtaaaaattcttcctgctgattctgaacattctgccatatttcagtgtattcagggattaccagagggtgcacttcggcgtattattttgactgcatctggtggggctttcagggattggcctgttgat

SEQ ID NO: 220860 - DNA, 313 bp, Gossypium hirsutum
  unsure (1)..(313): unsure at all n locations
gaagtttttcatgaccgggttcaacgttcaagggttccctaccatcttagtatttggtgctgacanagacagcccagttccttacgagggtgctagaaccgcctctgctattgaatcatttgctctagagcaactagaaactaatgtcggaccggctgaagtgacagagctgactggcccagatgtgatggcggagaaatgtagttcagctgccatatgcttcgttgctttcttgcctgacattctanactcgaaggctgaaggaaggaacaagtacttggacatgttattgtcagttgcagagaaatttaaa

SEQ ID NO: 220861 - DNA, 428 bp, Gossypium hirsutum
gatcccttggcggcaataatgtccacggctttggtctccggcttctgcctcacttccaactccacctgtccttctaactcactccggcaacccacattgcggcggccgtctatcgtcgccaacctcaactcttccacttctcctcctactctcattcgaaatcaacccgttttcgcagcacctactcctttgctcactccttccaattggaaagaaaacatgggagaccagtcatacgaggaagccattgaagctctcaagaaactgctcaatgagaaaggagaattgaagagtgcagcgacggcaaaggtagagcaagtgacagctgagttgaagactgctgcttcttccgatgagtctgttgaccgcttgaaacaaggcttcatttacttcaagactgaaaaatacgaaaagaatcctgctctgta

SEQ ID NO: 220862 - DNA, 394 bp, Gossypium hirsutum
gaagaagccccccttcaacagattctctgaaattacgagtgctggagggaagacggtgtggggagaccctgcagatgttggcaaggttgttgcaggggcaacctttgatgtggtgttggataacaatggcaaggacttggacactgtcaggccggtggtagattgggcaaagagctctggagtgaagcaattcttgttcatcagtagtgcaggaatctataagccaaccgacgagcctcctcatgttgaaggggatgttgttaaagctgatgctggccatgttggagtcgagaaatatgttgcagaagttttcagtagttgggctgtattccggccacaatacatgattggatccggtaacaacaaagactgcgaggagtggttctttgatcga

SEQ ID NO: 220863 - DNA, 422 bp, Gossypium hirsutum
cccacgcgtccgctcaacattcccatttccaatctccagctcccaaggtaaatatgccgatcagaaacatagcggttggccggcccgaagaggctactcaccccgatgctctcaaggctgctttggctgagttcatctcaaccttgatcttcgttttcgctggatcgggctcaggaatggcctttaacaagttgactgacaacggagcaaccaccccggctggtctcgtagccgccgctctagctcatggcttcggtcttttcgtcgctgtctccgttggcgccaacatctcatgtggccacgtcaaccctgccgtcaccttcggtgcttttgttggcgggaacatcactctcttgcgcggcattctttactggatcgcccaactcctaggctcaaccgtcgcttgcctgttgcttaagttc

SEQ ID NO: 220864 - DNA, 446 bp, Gossypium hirsutum
aggaccccttgcttcactgtcaaagctgttcaatccgacaagtcaacatttcaagtaatccaacccatcaacggcgaccccttcattggaagcctggagactccaatcacctcaagccccttaattgcatggtacctttccaacctcccagcctataggacggcagtgaacccacttctgaggggaatcgaagtgggtctggctcacggcttcctcctggttggtccattcgtaaaggccggccctctaaggaacactgcggtggcgggtcaagctgggtccttagccgctgccggtttggttgtgatcctcagcatttgcttgacgattatggtgttgcgtcgttcaaagaaggtgagccatcgatagcaccgagcctaaccctgactgggaggaagaaagagccagaccagttgcaaacggcggatggatgggctaagttcact

SEQ ID NO: 220865 - DNA, 415 bp, Gossypium hirsutum
caaaaatgaccattgaaaagctattggaatatggaaacatgcttgttgctgagcaagagaatgttaagagagtccaattggctgacaaatacttgagtgaagctgccctcggtgaagctaatgaagattccatcaatagaggaactttctatggcaaagcagcacaacaagttggggttccagttcccgaagggtgcactgatccaaatgctgataactttgatccaacggctagaagtgatgatggaacttgcacttacaaattctagacctcgtattatagtagtattgggttgaaaaagaaaaccctttttctattttatgtaatgatgtgagattgttccaaaactatcgtttgccttttgttgttccaattatatgattttgctttctcaattcttaatattttctcttc

SEQ ID NO: 220866 - DNA, 441 bp, Gossypium hirsutum
  unsure (1)..(441): unsure at all n locations
cccacgcgtccgacactctcaaattcagtttacaatttcacagttgttttcttcagtctctctctcagccatggctgcagccatctccaccgtcgctgccgctgccgccgccaaccgagctctgggagtgtcagtcccaacctcagctttcatggggaagaaagtgagctcaagattcaacagcaccaggcaggttccttcgggaagttttaaggtgatggcggcggagaaagagatagacgaagagacacagaccgaaaaggaccgatggaaagggttggcttacgatatttcggacgaccaacaggacattactcgagggaaagggatggtggatntcctgttccaagctcccatgaatgatggaactcactatgctgtcatgagttcctatgaatacctcagccaaggtcttaaaacgtacaatttgacaacaacatg

SEQ ID NO: 220867 - DNA, 345 bp, Gossypium hirsutum
attccccaaaatttgtttcagtaatggctgcctcagttatggcttcttcagttaccctcaagccttcattcaatgttgagaaacctggtgtaagaggggttccttcccttgctaggtccccttcttctttcaaggttgaagccagtggtggcaagaagatcaagaccgacaagccttacggaatcaatggtggtatgagcttgagggatggtgttgatgcctctggaaagaaaggtaagggaaagggtgtttaccaatatgttgacaaatatggtgctaacgtcgatgggtacagtcctatctacaacaccaacgactggtctcccagtggtgatgtttatgttg

SEQ ID NO: 220868 - DNA, 411 bp, Gossypium hirsutum
ctgaagcaatggcagtttgctcagcatacaccacccagtccctcaattcaacttgttcaatctccacaccagcgaaaacccatttaggttttcaccaaaaggaagtagttttctataggagaagcagcaagagaggtggcagcggcagcggcagcagcagcggcccatgcgtgataacatgctcggccggtgattcacaaactgttgtgattggtttggccgcagactcaggatgtgggaagagtaccttcatgaggaggctaacaagtgtgtttggtggtgcagccgagccaccgaagggaggcaatcctgattcaaacacactcattagcgatatgaccactgtgatatgcttagatgattaccattcactcgacagaactggaaggaaagagaaaggggtgacagcac

SEQ ID NO: 220869 - DNA, 363 bp, Gossypium hirsutum
caaatatctcatacaaggaattaaattgaatcaatggctcaaaccatgttgctcatgtctagccatgcagtgagcttgaagagagatcaccctttactccatttccaagctcaagggctcaagcctaaacctgtctctcatctcttcttcaatccattgtctaacggtgtccatacttcatccaaagctttcaccactttagctatctttaaatcaaagaccaaagcagctcccaagagggttgagccaaagtcaaagccaaaggttgaagatgggatctttggcacctctggagggattggttttaccaagcaaaatgagctctttgtgggacgtgttgccatgcttggttttgctgcatca

SEQ ID NO: 220870 - DNA, 408 bp, Gossypium hirsutum
cccacgcgtccgcaaagcccacactctcaaattcagataacaatttcacagttgttttcttcactctctctctcagccatggctgcagccatctccaccgtcgccgccgctgccgccgccaaccgagctctgggagtgtcagtcccaacctcagctttcatggggaagaaagtgagctcgagattcaacaacaccaggcaggttccttcgggaagttttaaggtgatggcggccgaaaaagagatagacgaagagacacagaccgaaaaggaccgatggaaagggttggcttacgatatttcggacgaccaacaagacattactcgagggaaagggatggtggattccttgttccaagctcccatgaatgatggaactcactatgctgtcatgagttcctatgaatac

SEQ ID NO: 220871 - DNA, 404 bp, Gossypium hirsutum
ggcaactttcctctggtcaggagagccttttaagtaccatcgtttttgctgggatgcttctcggagccaatacatggggccttttatcagataactacgggaggaggaaaggttttcttactatatctatggtaacttttggagctggattactgagcacattctctccaaactatttaacgcttgttgttcttcgaggtttggttggttttggccttggtggctcatctgtattcttatcctggtttctagagtttattccagcttctaatagaggcatgtggatggtagtgttttctactttctggacatttggatcaatttttgaggctgctcttgcatggattgtcatgcccaggttaaactggaggtgggtacttgcattttcggctgtgccatctttt

SEQ ID NO: 220872 - DNA, 404 bp, Gossypium hirsutum
atttcccctacgctctcactaaaacaactctctcttctttgttttccaatagttcgtaacaatgtcggtctcacttcaagctgcagctaccctgatgcaaccaatcaaggttgctgcaccatcaaggaccaatgtgctgctcaggtcctcccagagcgtttctaaggccttcggtttggagcctgttggtgctaggctcacctgctctttgcaaactgacctcaaggacttggctcagacgtgtgttgatgctaccaagctcgctggtttcgctcttgctacatctgctcttgttgtctcgggagcaagcgctgaaggagttccaaagcggctaacctacgatgaaatccaaagcaagacatacatggaagtcaaaggaacaggaactgctaaccagtgcccaa

SEQ ID NO: 220873 - DNA, 404 bp, Gossypium hirsutum
ctttctttttattgtggtctccagagcttctctgttacatcgtttattttctctcaagaactgaagaaaaaatccgaatagattaaaacttaagaaagatcaaaagatgtttggaagagcacctaagaagagtaataacaccaggtactatgagattctgggtgtttcgaataacgcttcccaggatgatttgaagaaagcttataaaaaagccgccattaaaaaccatccagacaaaggcggtgatcctgaaaaatttaaagagttggcgcaagcttatgaggtattgagcgatcctgagaaacgtgagatatatgatcagtatggtgaggatgcactcaaggaaggaatgggtggtggtgccggtgctcatgacccgtttgacatcttctcctccttctttg

SEQ ID NO: 220874 - DNA, 410 bp, Gossypium hirsutum
cgtggagagccttttttttgtgtagcgattctcagttagtcttttctttaagcttacagcttctctccagagttttataatgggtaaggagaaggttcacatcaaccttgttgtcattggccatgtcgactctggcaagtcgaccactactggtcatttgatctacaagctaggtggtattgacaagcgtgtgattgagaggttcgagaaggaggctgctgaaatgaacaaaaggtcattcaagtatgcttgggtgcttgacaagcttaaggctgagcgtgaacgtggtatcaccattgatattgccctgtggaagtttgagaccaccaaatactattgcaccgttattgatgcacctggacaccgtgactttatcaagaacatgattaccggtacctcacaggctgact

SEQ ID NO: 220875 - DNA, 415 bp, Gossypium hirsutum
cccacgcgtccgctcttctcagtccctctgcagcaatttctcttcgactcaagttgaatcgttcaagtgccgtatctgcaaatacaccctccaaaatttgttgtacttttcctggaaatggaagatgtcaaaggttaagtttcaagaccaaagctgcgggttcagttgaaggaaatgtactggacaaagaatcggctagtatcagtgacaagatagattatggagttgttggtattcaccatgttggaattctatgtgaaaaccttgaaagatcgcttgaattttatcagaatattttaggtcttgaaataaatgaggctaggccacatgataagcttccatacagaggtgcttggttgtgggtgggttctgagatgatacatttgatggaacttccaaatccagaccccttaat

SEQ ID NO: 220876 - DNA, 396 bp, Gossypium hirsutum
gtcaaagggtgttactccaaaattcagctaggctccttttggacccaggctgtctgaattacttggcgttcatgttgacgaggctgatgactgcattggtccacaagtagaaaagttagttgctgcacttcctgaacgtggtgttcttcttcttgaaaatgttagattctacaaggaagaggaaaagaatgaacctgtatttgcagagaagcttgcttcgttagctgatctctttgtcaatgatgcatttgggactgcacatcgagcacatgcatcaacagaaggtgttacaaaattcttgaaaccatcagctgctggtttgcttttacagaaggaactagactaccttgttggtgctgtttcaagccccaaaaggacttttgctgccattgtggg

SEQ ID NO: 220877 - DNA, 404 bp, Gossypium hirsutum
gaaaaatcatacgatcaaagatcgtctttctcgtctggatttctccgattatcatacataaaactcttcgattaagtgatcactgggttcgattttgttagacaagatcggccgattaggatttcaggggattagagaagatggagtctcacgatgagacagggtgccaagccccagaaggccccattctttgtatcaacaactgtggcttcttcggcagtgcagctaccatgaatatgtgctccaagtgtcacaaagcgatgatcctgaagcaggaacaggcgcaacttgcagcatcatcaatcggaagcatcgtgaatggcagctcaactgggaacggtaaggaaccagccgtggctactgctttggatgtacaatctggaaacgccgacaccaaaatggtc

SEQ ID NO: 220878 - DNA, 415 bp, Gossypium hirsutum
ctaccttaacacaagttacaaactcaaaaaccccaagttctcactttcaaaaaacttcccacattcaccatgtctgacaggtgcggcaactgtgactgcgctgaccgcagccaatgcacgaagggaaacagcaacaccatgatcattgagactgagaagagctacatcaacactgctgtgatggatgctccagctgagaacgatggcaagtgcaagtgcggtactggctgcagctgcacagactgcacctgtggccactaagccaacatacaatggtcatgcttcaggtcatggcatatatagggatctaaataatgaatttaaggttgaataatttgtctgttgtagtttgtgtggtgacttatatctgtcagttaacccttgtatcctttactatgatgtaatggctatgctt

SEQ ID NO: 220879 - DNA, 411 bp, Gossypium hirsutum
ctcaaaagagtctgtcatttcccttacttcctcaaaccagaagccatggccagcatgataatggcttcctcaaagcctgtaatctccattgctgcttcatcatccttcttttccaaacccaaactcaaacaaatcccacaactttccctcccaaaactccccaccccaaagttcttgaaaacccaacaaatcccctcactctcctccaccactctcaaatctatctccctcttcacagtcaccactttatcctttgccccaccttctcttgctgcagaaatagaaaaggccgctcttttcgatttcaacttaaccctccccatcatgatggtccagttcttgttcctcatgtttgctcttgacaaggtctactttaccccactcgggaaattcatggatgagagagatgct

SEQ ID NO: 220880 - DNA, 396 bp, Gossypium hirsutum
ggcaaaaaagccatgtcaaagctggtggtgttgcagccaacaaagcagcctcccatctccctcctctcttcctctctttcccacttcaatggcaccaagctctgccaaatccagtacaaaagaaaggtatatcagccaaaaggtgcattgcatgttgcagcatccagcaccaagaagattctcataatgggtggcactaggttcattggtgtgtttttatcaagactccttgtaaaagagggtcatcaggttactttgtttactagaggtaaagcaccagttactcaacaattgcctggtgaatcagacagtgactacgctgagtttaaatccaagattttgcatttgaaaggagatagaatggacttcgattttgtgaaatccagtctttctgca

SEQ ID NO: 220881 - DNA, 405 bp, Gossypium hirsutum
ctcttgggctcttgttacttaacctagggctgctctttattttccttttctctctgttcttttgtccctttgctttacttctttttgcttccatgtcgtttagaggattcagtcggccaaatgctacatcaggcatgggcgttgctgatcagaccaaggatactttcttggagctgaaaaggaagaaagtttatcggtatgtgatatataggatcgatgagaagaaaagggaggttgtggttgagaaaactggtgcccctgctgagacctatgatgacttcgctgcatctctgcctgaaactgattgccgatatgccgtctacgactttgattttgttacttctgagaattgtcaaaagagcaagattttcttcattgcatggtgcccttcatcctctcgaatcc

SEQ ID NO: 220882 - DNA, 401 bp, Gossypium hirsutum
cggacgcgtgggtgagaactgagcctctgcttcatgtctttcttgtttcatttccaggccaaggccatgtaaaccctcttcttagattcggcaagcgcctcgcttccaagggtttgcttgtcacactatctacacccaaaggcttcggcaaacagatggctaaagccaacaacatcactgacgaccagcttatccctgtgggcgatggctttctccgatttgaatcgttccaggatggttgggacgacgacgacccgagacgcgcacacctcgaccaatacatgcaccaactggagctcgcaagcaaaccagcgatttcagcgatgataaagagatacgccgagcaaaaccgccccgtttcttgcttcatcaacaaccctttcattccttgggcatctgat

SEQ ID NO: 220883 - DNA, 372 bp, Gossypium hirsutum
gcggatgcgggattaacatgttggtttcacccgaggcacgagtcgttcgttgttccgagtgccacacccttaccaatcttgtcccaatgaatgctcgaccgggccgaaccaggtataatgggccgccgagaatgcatgaaaatccatacgggaacggcccaagcccgcaacatccacaatatccacaaccgcgaccatccttatctccagttccgatttacgggagaaaacgagcacttctttgtggtgtgaattaccatggaaagagttataaactcaaaggaagtatcaatgatgtcaagagtatgaagtaccttcttgtggagacattaggatttcccaatgattccattctaatgctcacagaaaatg

SEQ ID NO: 220884 - DNA, 402 bp, Gossypium hirsutum
aaaatcagttgcttcacaatggcctctacaaccatggctctttcttccccatcattcgccggtaaggcagtgaagttctccccttccacccctgaaatccggggaactggccgtgtttccatgaggaaaaccaccaagcctgttccttctggtagcccatggtacggtcctgaccgagttttgtacttgggtccactttccggtgagccaccatcttacttgaccggtgagttccctggtgactatggttgggacactgctggactctcagctgatcccgagacctttgctaggaaccgtgagctcgaagtcattcactgcagatgggccatgttgggagctcttgggtgtgttttccctgagctgttggctaggaacggtgtcaagttcggtgaagctgta

SEQ ID NO: 220885 - DNA, 404 bp, Gossypium hirsutum
cccacgcgtccgcccacgcgtccgcccacgcgtccggaacatagtccctggtatcaaggttgacaagggtcttgttccactggctggttcaaacaacgagtcatggtgccaaggtcttgatggcctcgctccacgttcagctgcatactaccaacaaggagctcgttttgcaaaatggcgtactgtggtaagcattcccaatggaccaaccgaacttgctgtgaaggaagcagcctggggacttgctcgctatgccgccatctctcaggacaatggattggttccaattgttgagccagagatcttgcttgatggtgatcacggaattgacaggactttcgaagtagccaaaaaggtatgggctgaggttttcttctatcttgcccagaacaatgtgatgtttc

SEQ ID NO: 220886 - DNA, 399 bp, Gossypium hirsutum
gtttcaatggcaaccctcaaagttccagttcacgttccttctccttctgaggatgctgagcaacttcggaaagcttttgaaggctggggtacgaacgagcaattgattatcgacatattggctcacaggaatgcagcacagcgcaattcaattcggaaagtttatggtgaagcttatggggaagatcttctcaagtgtttggagaaggaacttacaagtgatttcgagcgggctgtgctgctttttacgttggaccctgcagagcgagatgctcatctggctaatgaagctacaaagaagttcacatcaagcaattggattctcatggagatagcttgcagtaggtcttcgcatgaactactcaatgtgaaaaaggcgtatcatgctcgttataagaaa

SEQ ID NO: 220887 - DNA, 406 bp, Gossypium hirsutum
cccacgcgtccggcttccgctactctcctcaagtcttcacctattatcgacaagtccgagtggattaagggccaaaacctccgccacccttcggtttgttttgtacggtcacaccctacatcggccgcctttgccgtccgtgctagttcatatgccgatgagcttgttaagaccgcgaaaactgttgcatctccaggtcgtggtattttggccatggatgaatcaaatgctacatgtgggaaacggcttgcctcgattggtctcgagaataccgaggcaaaccggcaagcttaccgtacccttctcgtgtctgcccctggcctcggtgactacatctcgggagctatccttttcgaggagactctctaccaatctaccatcgatgggaaaaagatggtcgatgttc

SEQ ID NO: 220888 - DNA, 396 bp, Gossypium hirsutum
gccacgcgtccgacctacgctatcactaaaacaactctgtcttctttgttttgcaataatgcctaacaatgtcggtctaacttcaagctgcacataccctgatgcaaccaatcaatggtgctgcaccatcaaggaccaatgtgctgctcatgttctcccaaagcgtatctaaagccttctgtttggagcctgttaggtgctaagctcacctgctctttgcaaactgacctcaaggacttggctcagacgtgtgtcgatgctaccaagctagctggtttagctcttgctacatgtgctcttgatgtctccacagcaagcactggatgagttccaaaacggcttacctacgatgaaattcaaagcaagacatacatggaagtttaatgaacatgaact

SEQ ID NO: 220889 - DNA, 392 bp, Gossypium hirsutum
gggttttaaattttgccttctttcagagcttccattgacgagcagctaaatcaacaatgggtcactctaacgtatggaactctcacccgaaaacctacggccctggatctcgcgcctgccgtgtgtgcggcaacccccatgccattattaggaagtatgggctcatgtgttgcagacagtgcttccgtagcaatgccaaggaaatcggattcatcaagtaccgctgaagaatttatatggtctgaattaggaaggactttgtttaagcacgaatcattggtgtggagttttctaatttatcggtactagaagacaacgttttggtttttggttaatttagtatgaacttgaactaaaaatactttctcctttctcaatcaagtaatcatatt

SEQ ID NO: 220890 - DNA, 368 bp, Gossypium hirsutum
cccacgcgtccgattttgttttctctccctccaattaagatgcagatcttcgttaagaccctgaccggcaagaccatcaccctcgaagtcgagagttccgacacgatcgacaacgttaaggcgaaaatccaagacaaggaagggatcccaccagaccaacaacgtctgatcttcgccggaaaacagctcgaagatggccggaccttggccgattacaacatccagaaggagtccaccctccatctcgtcctccgtctacgtggtggcatgcagatcttcgtcaaaaccctgaccggcaagaccataactttggaagtcgaaagctctgacaccattgacaacgtcaaggcaaagatccaagacaagga

SEQ ID NO: 220891 - DNA, 415 bp, Gossypium hirsutum
gttagctttagcatacactactagtacccactactagcaatggcttcctcaatgatctcatcggctaccattgccactgcctctccggcacaggctaacatggtcacccctttcaccggcctcaagtctgcctctgctttcccagtcaccaggaaggccaacaacgacattacttctctcgcaagcaatggcggcagagtgcaatgcatgcaggtgtggcctcctactggaaagaagaagttcgagactctctcatacctccccgatcttacacccgtgcagttggctaaggaagtagattaccttcttcgctcaaaatgggttccttgcttggagttcgaattggaggagggattcgtgcaccgtaagtactcgagcttacccacgtactacgatggacgctactggaccatgt

SEQ ID NO: 220892 - DNA, 408 bp, Gossypium hirsutum
cccacgcgtccgcccacgcgtccgcccacgcgttcggccacccaacaatatgggaggaatgacaccgaatcaaggatggtccggtaacatgcctggaaatgctccaaacttccaaactggccccaactatggaaacgctcctggaaatgcgcagaacttccaacctggtcctggtcctaactatggaaacacaccttaccaaggtgctacacccaatgctcaatatcaccagaataactatcctccaaatgttggtggaggaaacatgcctggtgggaactaccaatcttaaatctttgttctaatatgaattcagagaccattgtagcttttaggcattgttgtagataaagataatatgcctagacttatggttattggctactaaagaattgctattgaatatgt

SEQ ID NO: 220893 - DNA, 403 bp, Gossypium hirsutum
gcagcatccgccaagaaagtcccacccacgtcggagcctactcatcatagacttataattttctcttcttcttttggtaaaaaatctaaaagaaagaaagggatatggaagggaactctggcggcggcggcggagcagacagaggaggaggcggcggcggagaaagaggaggaaacgatgtggagctggtttgcaaaacacttcaggtagaacacaagctgttctacttcgatctcaaggagaacccacgcgggcgttatcttaaaatctcggaaaagacatcggctaccaggtcaaccatcatcgtcccttcttccggcatctcctggttcctcgatcttttcaattactacgtcaactccgacgaccacgacctcttcagcaaggaattgcagcttgacac

SEQ ID NO: 220894 - DNA, 408 bp, Gossypium hirsutum
cccacgcgtccgaagaaataaaaacagtttcatttccattctaagtttgtgtttttgatttgccttttgtgggtttttttttataaaaaagttcagcaaaaatgtttattgagaattttaaggtggagagccccaatgtgaagtacacagagaatgaaattcagtctgtttacaactatgaaactacagagcttgttcatgagaacaaaaatggaacctatcaatgggttgttaaacccaaaactgtcaaatatgaattcaagactgatatccatgtccctaaattgggggtgatgcttgtgggatggggaggaaacaatggttcaaccctcaccggtggtgttatagctaacaaagaaggtatctcttgggctactaaggacaaggtacaacaagctaattactttg

SEQ ID NO: 220895 - DNA, 413 bp, Gossypium hirsutum
ctcttctctgcccttcgtagaataatactataaaaacctcattaaccctttatactcaaaagtctcaaacttttttttctctctctgtcgctgactgatcatcaaagttgaccatgaagaagctctaccgcagaggcacggttcatccatcacctctgagcacaaccgatcatctgtctttccttccggccaccatcttgaccctcgtggctgctctttccccggaagacagggaagtcttggcctatctcatctcttgtgctaacaacgatttcagcaacttctcaacccaccggaaaaacacccagaaacacccgactaaaagaagcatcagcttcagcagcggcagcgatcatgaccatccacctctttttacctgtgattgtttcaggtgctatatgagctactgggtc

SEQ ID NO: 220896 - DNA, 389 bp, Gossypium hirsutum
  unsure (1)..(389): unsure at all n locations
gtgggcttgttctaacgtctcatttacttgtcttacttaaaggaaagatattttcaagggatcgggtactttcacgagatgaggtactccatatcaatcttcaaatttgacttcgccaatgcaagggcaggaaagggagtacaaactagacgatcttgatatcaaagaccacgaaattgacatatatcttgatctacatacaatcaccaatacatcaccgtacacagagctggacaccatctcacttgccaaagctagaggtctctttcatcatctatgtcttctgcacatgtgtgtggtaccaaagagtcatgtgaggcctgcaatctnatgaattctgacccagcaccactttcttgccgagcatatattgggacttgacccttaca

SEQ ID NO: 220897 - DNA, 405 bp, Gossypium hirsutum
ttagctatagcatacactactagtacccactactagcaatggcttcctcaatgatctcatcggctaccattgccactgcctctccggcacaggctaacatggtcgctcctttcaccggtctcaagtctgcctctgctttcccagtcaccaggaaggccaacaacgacattacttctctcgcaagcaatggcggtagagtgcaatgcatgcaggtgtggcctcctactgggaagaagaagtttgagactctctcatacctccccgatcttacacccgtgcagttggctaaggaagtagattaccttcttcgctcaaaatgggttccttgcttggaattcgaattggaggagggattcgtgcaccgtaagtactcgagcttacccacgtactacgatggacgctact

SEQ ID NO: 220898 - DNA, 408 bp, Gossypium hirsutum
cttgcttgggtcgaatagtacacgacagcgacgccgagtcgaagctggacgacgacgtttccaccatattcaactctctcaacttacaaggcagcatcgaaaacggcgacgtttccggcatagccagtaaagatttcggcgggctttattcggttaagcccttgtatctaattagaccatcgggagccgaggatatatctcgggtcgttaaggccgccgccgggactccccacctgacggttgcggctaggggtaacggccactcaatcaacggtcaggcgatggccgacggtggttacgtgatagacatgcgttccactggggaaaaccatttcaagctcttgaccgtcaatggctccccttgcatcgacgtctccggcggggcattatgggaagacgtcttgagac

SEQ ID NO: 220899 - DNA, 413 bp, Gossypium hirsutum
  unsure (1)..(413): unsure at all n locations
cccacgcgtccgcccacgcgtccgcccacgcgtncggcctactaccagcagggtgctcgtttcgccaaatggcgtactgttgtgagcattccaaatggtccatctgccttggcagtgaaagaagcagcttggggacttgctcgctatgccgccatttctcaagacagtggactggtcccgattgtggagccggaaatcttgcttgatggtgaccatggaattgataggactttcgaagtagcgcagaaggtttgggctgaggttttcttctaccttgctgagaacaatgtcatgtttgagggcatccttctcaagcccagcatggtcactcctggtgctgaatgcaaagacaaggccaccccacagcaagttgctgattacaccctcaagctcctccacaggagaatcccccc

SEQ ID NO: 220900 - DNA, 408 bp, Gossypium hirsutum
ctcggctttgttgcaaaaaatcaatctgtcatggcaaccatctcggctaccaccacccctgcagctcttgttcacaagacattgcccaggattgcatccccagtccccattgggtcgccaacaatgggaaagagggggaaggtgatgatgatgtgtagcatggagaagaagagtgagaatgggtcaaacatggggatgagtgcatcattgctggcagcagcctgtgcagcaaccatgtcaagcccagccattgctctggtggacgagagaatgtccactgaaggaacaggacttccctttggtttgagcaacaacctcctcgggtggatcctgtttggtgtgttcggcctgatctgggctctttacttcatctatacttcctccctggaagaggatgaggagtctggg

SEQ ID NO: 220901 - DNA, 412 bp, Gossypium hirsutum
aacgaataacatctggaccgccatggaagcgaaccatgctaaacaaagccacaacggcaattcaaccttcgatgatcattcaatcctccactctaatctctcagttgataccgcccttccttttccccttatggtccctcgcgtcatcgccttgtgcaaggatctgtttcggaaatgggctaagttgaacgattcttgcttctccgtcgacactgtatcaagcggcatcacgaatcttctgctgaaggtttctgtcaaggaagaaaatggagaatatgtgtctgtaacagttagactgtatggacccaacactgaatatgtcatcaatcgggaacgtgagttacaggcgatcaaatacctctcggctgcaggatttggtgccaagttgcttggtgtatttggaaatgggatg

SEQ ID NO: 220902 - DNA, 375 bp, Gossypium hirsutum
  unsure (1)..(375): unsure at all n locations
aagggcttcactccacaaagctctttgctttatccccttccaaagatggaccgcttctctcttctcttcctcctcctttcctccgtcgntgcttcggccgtcgtctccgacgttaatagcgatgacgatcctctcatccgtcaagttgtttccgatggtggtgtcgaggaggactccgatgaccatctccttaatgcggagcaccacttcacgctgttcaaatccaagtatgggaaaacctacgcatcccaggaggagcacgattaccgactgggagtcttcaaggctaacctgcgtcgggccaagcgtcatcaggtcctggaccccagtggcgtcccatgcgtcacaaagttttccgatttaactctatcggag

SEQ ID NO: 220903 - DNA, 409 bp, Gossypium hirsutum
cggatccttgcatcttccgaagaaatgaatgcgtctctgagaggaagacacgcaaactgcaagagcactgccgccgattatgcagccgtcaacgccggcgatgtcaaactacgcgcctccatgactgacgccaggattgtcaacggtcccagcttgaacggtttaacttttgccattaaaaaacccggtttctaccgttacgtcccccaaaagttaatgaacacatttaggtttgcgaagaatccattgaagctaagttacggtcgcaagagagaggacaaacggacggtggtcgacggggctctggtgttcaattccggtagccaggtgtcggcttcttacatgattggtacgaggaactgtaagctcaagtatagttacttgcatggtggtgttacgacattggagc

SEQ ID NO: 220904 - DNA, 410 bp, Gossypium hirsutum
aagcaaagcaaaaggcaaaaaagccatgtcaaagctggtggtgttgcagccaacaaagcagcctcccatctccctcctctcttcctctctttcccacttcaatggcaccaagctctgccaaatccagtacaaaagaaaggtatatcagccaaaaggtgcattgcatgttgcagcatccagcaccaagaagattctcataatgggtggcactaggttcattggtgtgtttttatcaagactccttgtaaaagagggtcatcaggttactttgtttactagaggtaaagcaccagttactcaacaattgcctggtgaatcagacagtgactacgctgagtttaaatccaagattttgcatttgaaaggagatagaatggacttcgattttgtgaaatccagtctttctgcag

SEQ ID NO: 220905 - DNA, 411 bp, Gossypium hirsutum
cccacgcgtccgcaaagcccacactctcaaattcagataacaatttcacagttgttttcttcactctctctctcagccatggctgcagccatctccaccgtcgccgccgctgccgccgccaaccgagctctgggagtgtcagtcccaacctcagctttcatggggaagaaagtgagctcgagattcaacaacaccaggcaggttccttcgggaagttttaaggtgatggcggccgaaaaagagatagacgaagagacacagaccgaaaaggaccgatggaaagggttggcttacgatatttcggacgaccaacaagacattactcgagggaaagggatggtggattccttgttccaagctcccatgaatgatggaactcactatgctgtcatgagttcctatgaatacatc

SEQ ID NO: 220906 - DNA, 404 bp, Gossypium hirsutum
ttgaaagactgcaatatcaagatagcttttggccggttctcaccaaattccaaaggctaccgtgatttggacctctttattcagcaaaaggatggcaaaaagtttgtggatcctgagaagcaaaatgggctatgctctcgtttgaaggtggaaatgcttcacccattgcgtttcatcatcgcaaaccgggggcctgatacagaacttctggttgctaatccagttgagttatctggaaaggggagaccaagagttttctatgatgttacactagctttaaaggctcttggaatttgcatattttcggctgaaattggaagatattcgagttcagatcgagaatgggaagtctacagattccttttggatgagaactgcggattccaattattgagtacgttagc

SEQ ID NO: 220907 - DNA, 405 bp, Gossypium hirsutum
cccacgcgtccggccggagaaccagccaagttgatcaggcaaaggtaccgtgaggccgccgacattatcaagaaagggaaaatgtgttcctctttatcaacgatctcgacgctggagccggtcgtatgggaggaaccacacaatacacagtgaacaaccaaatggtgaacgccacactcatgaacatcgctgataaccccaccaacgttcagctccccggtatgtacaacaaggaagagaaccctcgtgttccgatcattgtcaccggtaacgatttctcgacgctgtacgcgccgctcatccgtgacggtcgtatggagaagttttactgggcacccaccagggaagataggatcggtgtttgcacaggtattttcaggaccgacaatgttcccgttgatgaca

SEQ ID NO: 220908 - DNA, 407 bp, Gossypium hirsutum
  unsure (1)..(407): unsure at all n locations
cccacgcgtccgcccacgcgtccgcccacgcgtccgcaaaattggaggtatggggcaaatgaagaagtttgggtttgtgttgttggtgttaagtgcgtcagtagtagagcaaatagaggggaaagggtatgagaagccgctcaactgtggccaccttgaatgtgctccatacacacttattcatagccagcctgaattcgagattagaagttattcaaaggctacgtgggtggctactacccccatctcctctccctcctacacatttgctgtttcaattggcttcaaaattctctttgcttacatccggggcaacaatgatgcagcagtgaaaatgaatatgacagcaccagttttggttaatatacattcaaggacaggacatctncagaattcaacctatgtag

SEQ ID NO: 220909 - DNA, 383 bp, Gossypium hirsutum
gcaagagcaacttgtttttccaaagggaaattcaataccaagtgtcaaggctgtgacattccataaaacgagtaccttcagtgttgatgttcaatattctgatgtgagtgatttgcaggccccggcaaagatcagtacatacatgattggtcctttcccaacattaagaaaaaaaccaaaattgaaggtcaaagttcgtttgaatttgcatggaattgtgtctgttgagtcagctacactcttggaagaggaagaagttgaagttccagtttcaaaagagccggcaaaagaagatgctaagatggagacagatgaaaagcctaatgatacttctgcccctggtgccaacgagacagatgttaatatgcaagatgccaagggta

SEQ ID NO: 220910 - DNA, 405 bp, Gossypium hirsutum
gcccggccttttttcaaaatctcgtcgattaattcgtacgttcgcctcgattgaacattccggcgccgccaattttgattttcttgagtttcttcgacacacttcagatccgtttaatcgccatcagggctagtttgcttcaatttgttgtaacttgagggttgttgaaaagaaaaacaaaggtgttatctgggtgccccagatgagaagaactcatgttattgacagtagaaggaggagggttcttcagttcttcagtgtctgggtatagcaagggcttggcccttcttctcttgggtcagaaacacgaggacaagcccatgagagtttcgccgtggaatcattaccagttggtggaccaagaatctgaacctgacctgaatcaactggcttccatcaagaacc

SEQ ID NO: 220911 - DNA, 394 bp, Gossypium hirsutum
cccacgcgtccgccttatcccagtcactgagtctcaacaccaagtcatcatcactcatggctatcgaggcttggtttatggatgaaagcaaagaagaccaaaggcttcctcatcgacgcaaccccaacgaacctgtttcgttggagcacttggcagagctgggagtgttgtattggcatttgaaccccgaggattatgagaacgatgaagagttgaagaagattagagaagccagaggttataattacatggatttgcttgatttatgccctgagaaagttgccaactatgaggagaaactgaggaacttttacaccgagcacatccatgccgacgaagagatacgctactgcttggaaggcagcgggtattttgatgttagggacaaggatga

SEQ ID NO: 220912 - DNA, 367 bp, Gossypium hirsutum
ccgaccagacccgaaaaaatggtccagacaaaccagtctggttccggcaatgatttcaagctcgtcggattctcgaatttcgtccggtcaaatccaaaatccgatcggttcaccgtcaaacgtttccaccacatcgagttttggtgtaccgacgccactaacgtcgctcgccgtttttcatggggtctcggtatgcaatttgtagctaaatcggatttatccaccggaaatttgacccatgcttcttatctcctccgttcccgtgacctgaacttccttttcactgccccctattccccttctattgccgttgctcaaaacctctcccctcaatccaccgcttcgatcccttcttttgatcattcac

SEQ ID NO: 220913 - DNA, 368 bp, Gossypium hirsutum
aacaaaatcaactgcttcacaatggcctctacaaccatggctctttcttccccatcattcgccggtaaggcagtgaagttctccccttccacccctgaaatccagggaactggccgtgtttccatgaggaaaaccaccaagcctgttccttctggtagcccatggtacggtcctgaccgagttttgtacttgggtccactttccggtgagccaccatcttacttgaccggtgagttccctggtgactatggttgggacactgctggactctcagctgatcccgagacctttgctaggaaccgtgagctcgaagtcattcacttgagaatggccatgttgggagctcttgggtgtgttttccctgagct

SEQ ID NO: 220914 - DNA, 406 bp, Gossypium hirsutum
gtgacggccaaagctttcccttcctctttctctgaaattgtttcaaaaaatttccccttttcgattcaatcatgagtaacgaatatgattatctgttcaagcttctgcttatcggcgattcctccgtcggaaaatcctgcttgcttctcagatttgctgatgattcttatgtggatagctacatcagtaccatcggtgttgatttcaaaatcagaacagtggagttggacggcaagacaatcaagctgcaaatttgggatactgctggacaggagcgttttcggactattactagcagctactaccgaggagctcatgggataatagtcgtctatgatgttaccgagatggagagcttcaacaatgtcaagcagtggttgaacgagattgacagatatgctaatga

SEQ ID NO: 220915 - DNA, 389 bp, Gossypium hirsutum
ggattcgtgcaccgtaagtactcgagcttacccacgtactacgatggacgctactggaccatgtggaagctgcccatgttcgggtgcaccgactcggctcaagtgttggaggagcttgaggaatgcaagaaggcataccccaatgcattcattagaatcattggcttcgacaacgtgcgtcaagtgcagtgcattagtttcattgcctacaagcctccaggcttctaagctttttattaactttgtctctccatttgtttgaatttgtactcagaaaaaatcatgttctttacttttgcttttccttttctttgagttattggcctttgtttctcgatttccgggttttaatcctgagaactaatgaataaaaagttggttttcttccc

SEQ ID NO: 220916 - DNA, 406 bp, Gossypium hirsutum
cccacgcgtccgtcacacacaactcctccacttccccatcacaaaaaatatattcttcacttcacatctttttggcaatcaattttgtaagcaagtatggctaaggacgttgaggttggtggtgagttccaagccaaggactaccatgatcctccaccagctccattggtggacggggaggagttgacaaagtggtcattttatagggctgtaatagccgagtttattgccacgctcttatttttatacatcactgtgttgacagtgatcggatacaagagtcaggttgaccctgataagggcagtgacgaatgtggtggtgttggcattcttggcattgcttgggcttttggtgggatgatctttatccttgtttactgcactgctggtatctctggaggacaca

SEQ ID NO: 220917 - DNA, 332 bp, Gossypium hirsutum
gaactatggccgagcggtgcgaagccttaggaaactcatggtggaagccctctgcgatactggcaagcaaattgtaacattttcttgaccatagggacgattgactactcgaaccgtctattggctgcttcaaaacagaaataacttgagactcgcagagccccatggggcgctgtatttgatgaagccaatgattaaaggcatccggggcgcagagctctcgacctattctcaaactctaaataagtcagaccgcgggcttggatgacattatccttccacaagatgaaaaacggcctgtgctccttcgtttgccaattaaactgtttggt

SEQ ID NO: 220918 - DNA, 398 bp, Gossypium hirsutum
cccacgcgtccgcttcccttcttaaaccacacagataagactatactcaatcatttactacactctctgtctcaatggccaccaagacccatacggatccagagaaaccaaatgccgagggcaccgccgagaacgaagacacgagtccggtggaggaggttgccttggtggtgccggaaaccgacgaccctactctccctgtcctgacctttcgtgcctggttcctcggtttggtatcatgtgtgctcttaatctttctcaacactttcttcacttaccgtacgcagccgctcaccatctccgcaatcctcatgcaaatctcggtcttgcccattggcaagttcatggccaggactctaccaaccacccagtacagccttctcgggtggcacttcagc

SEQ ID NO: 220919 - DNA, 343 bp, Gossypium hirsutum
gtgtaggataagtgggagctctcgggcgaaattgaaataccactacttttaacgttattttacttattccgtgaatcggaggcggggcacggcccctctttttggacccaaggccggcttcggccggccgatccgggcggaagacattgtcaggtggggagtttggctggggcggcacatctgttaaaagataacgcacgtgtcctaagatgagctcaacgagaacagaaatctcgtgtggaacacaacgggaaagctcgcttgattctgatttacaggacggatacgaaccgggaaagcgtggcctatccgacctttagaccgttcgaatttgaagctagag

SEQ ID NO: 220920 - DNA, 413 bp, Gossypium hirsutum
gaactctgttcaatggccgtgcaggcgatggaaccgtcagtgttcttgtggcaacttttttgttcgtaattcccaacaagaagcgaaagggagagaaattgatggactggaacgaatgcaagaagctgccatggaacattattttgttactaggggctggtttcgccatagccgacggagtccagtcaagcggactcgctgatcaattatccaaaactctagattttctcgaagaggctccgtatttagctattgcccccgcggtgtgtttaatctgtgccataattaccgagtttataacatcaaatgatgctactgctacccttgtgcttccacttttgattcaaatggcaaaaaccatgcatgttcacccattactccttatggtccctggagcagtgggatcacaattt

SEQ ID NO: 220921 - DNA, 409 bp, Gossypium hirsutum
cccacgcgtccgcccacgcgtccgatctgtccatctttcagtaagagaaaggaaatggagtttagttcagaggctaaccagcgcattgccaggctcgcagcccatctccaacctcaggttctcttctatatggaggaaagttctattttgaggcgagctgactgtagagcgaaaggagggtcaccagggttcaaagttgctatcttaggagcagctggaggcattggccagcctcttgcaatgttaatgaagatgaatcctctcgtctcggttcttcatctttacgatgttgtgaactctcctggtgtcacagctgacctcagtcacatggatactggtgctgtggttcgtggtttcctagggcagccgcagcttgagagtgcgttgaccggcatggaccttgtgatca

SEQ ID NO: 220922 - DNA, 408 bp, Gossypium hirsutum
gcacaggcaccatcgggaagcgtctctcgagcatcaacgtcgagaacatcgagtccaatcgccaagccctccgcgagctccttttcacctctcccaacgcattatcctgcctctccggtgtcattcttttcgaggaaacactttaccagaaaacctctgacgggaaacccttcgttgaaatcctcgaagagaacaatgtcattccaggtatcaaggtcgataagggcaccgttgagatagccggcaccaatggcgagaccactactcaagggttcgactccttgggtgcgcgttgtcagcaatactataaagctggtgcgcgtttcgccaaatggcgtgcagtgctcaagatcggtcccaacgagccatccgagttggctatccagcagaacgcgcaggggttggctc

SEQ ID NO: 220923 - DNA, 402 bp, Gossypium hirsutum
cttctccaatggcgactcagctgaagagcagctttaggtcgtctgttacaagaggactggtagtccccaggggcatttcgggatccccgtttaaagtatcttccggaaagaccaggaccccttgcttcactgtcaaagctgttcaatccgacaagtcaacatttcaagtaatccaacccatcaacggcgaccccttcattggaagcctggagactccaatcacctcaagccccttaattgcatggtacctttccaacctcccagcctataggacggcagtgaacccacttctgaggggaatcgaagtgggtctggctcacggcttcctcctggttggtccattcgtaaaggccggccctctaaggaacactgcggtggcgggtcaagctgggtccttagccg

SEQ ID NO: 220924 - DNA, 405 bp, Gossypium hirsutum
cccacgcgtccggaaaaatggcttctgcttccgctactctcctcaagtcttcacctattatcgacaagtccgagtggattaagggtcaaaacctccgccacccttcggtttgttttgtacagtgcaaccctacatcggccgcctttaccgtccgtgctagttcatatgccgatgagcttgttaagaccgcgaaaactgttgcatctccaggtcgtggtattttggccatggatgaatcaaatgctacatgtgggaaacggcttgcctcgattggtctcgagaataccgaggcaaaccggcaagcttaccgtacccttctcgtgtctgcccctggcctcggtgactacatctcgggagctatccttttcgaggagactctctaccaatctaccatcgatgggaaaa

SEQ ID NO: 220925 - DNA, 391 bp, Gossypium hirsutum
cccacgcgtccggctctctcttcctgtcttcgtctacttcgcctctttctctatggatccctacaagcaccgtccatcaagtgctttcaattcaccattctggactaccaattctggcgctccagtttggaataacaattcatcacttactgttggacccagaggtccgattctccttgaggactatcatctggtggaaaagcttgccaactttgacagggagcggattccagaacgtgttgtccatgctaggggagcaagcgcaaagggtttcttcgaggttacccatgacatttctcacgttacatgtgctgattttctgcgagcacctggagttcaaacccctgttatcttgagattttcaactgtcatccatgagcgtggaagccct

SEQ ID NO: 220926 - DNA, 407 bp, Gossypium hirsutum
tccacgcgtccgcccacgcgtccggaaaaactcggcaaacgccataattaaagattttgttgttttgctctcgatctctccgcccaaatcttgtagacgccaagcagataaattttgtgattactcttttctttctcagatcccttcgaaagcgattcttcttcttctttttattctttttaaattgaattgaagttgctgattcgaaatgagtacggccgaccttctcagcatcgagcctttagagctcaagtttccttttgaactgaggaagcagatctcgtgtgctcttcaattgtcgaataaaactgataattatgtagctttcaaggtgaaaacgacaaatccaaagaagtactgcgttcgtcccaatacggggggtcgtttgcctcgatccacatgcgatg

SEQ ID NO: 220927 - DNA, 391 bp, Gossypium hirsutum
ggaaagaatatgttagcagtttttgagaaatcgattgccaagagccccgatgctcttaaagtttctggtgattctgaagcagcttcagccctcaacaagggcttcttggctacccattttgccactctccatcctggttcagtcactgtcaatcttggttcttctggtttcatggcttactctcttgataaacaaaacccacttctccccaggctctttgcagttgtggatgacattttctgcttgtttcaaggccacattgagaatgttgctgttcttaagcaacaatatgggttgaacaaaactgcaaatgagggtatcattgttattgaagcttacaggacgcttcgagacagaggtccataccctcctgaccaggttgtaagagata

SEQ ID NO: 220928 - DNA, 374 bp, Gossypium hirsutum
gttctttggagaagtggtcgtagttttggaggttttgattcggcaaacagggttggtgcggaggcaaggaaaggagactttaacatcttcaggaccaagtcgactctcagtaagcagaattccctattgcctacaagaaaagagaaagaaatggagactcaaagagccgaaggtgccactggccttaacgagcctgttaacaaaagtgttcctgttggaagatacttcgatgctcttagaggacctgaattagaccaagtcaaggactctgaggacattctccttccaaaagatgagatatggccttttctccttcgtttcccaattaattgctttggtatttgtcttggacttagcagccaagctgttctatg

SEQ ID NO: 220929 - DNA, 324 bp, Gossypium hirsutum
gagaaagcaaaatcatataattggaacaacaaaaggcaaacgatagttttggaacaatctcacatcattacataaaatagaaaaagggttttctttttcaacccaatactactataatacaagggtaaaattggtaagtgcaagttccatcatcacttctagccgttggatcaaagttatcagcatttggatcagtgcatccttcgggaactggaaccccaacttgttgtgctgctttgccatagaaagttcctctgttgatagaatcttcattagcttcaccaagggcagcttcactcaagtatttgtcagccaattggactc

SEQ ID NO: 220930 - DNA, 403 bp, Gossypium hirsutum
gcgtctgtctgttttactccacaaccactatcactaccattatggcttcggctactgtttctgtagccaaacccaaccttcagattcaggcaaaaggaaagggtgttggttttgcagatttctcaggcctacacaactcctctactagccttccctttgccaggaaaacctctgatgacttccattcactcgttgcttttcagacatctgctctaggaagcaataatggcgggtacaggaaagggatggcagaggcaaagctaaaggtggctataaatgggtttggtaggattggcaggaatttcttaagatgctggcatggccgtaaggactccccacttgatgtcattgccatcaatgacactggtggtgttaagcaggcttctcaccttctcaaatatga

SEQ ID NO: 220931 - DNA, 402 bp, Gossypium hirsutum
cccacgcgtccgcccacgcgtccgcggacgcgtggggtttaaaggcattcttacaccctacttctcttctgtctttctctttttcagctaaatcccacttgttgaatagtagaacatggaagggaagatgagctggacggtggcggatgcggtggactacaagggtttccctgctgacaggtcgaaaaccggaggttgggttccggctgcactcattctagggattgagatctgtgagaggctttcaacaatgggaattgcagttaaccttgtgacatacttggttggtgtaatgcatttgccaagttcaacttcagccaatgttgtgacagatttcatggggacatctttcctcttgtgtttgcttggaggcttccttgctgattcattccttggcagata

SEQ ID NO: 220932 - DNA, 409 bp, Gossypium hirsutum
aaaccaagtcaacctaaagccttaggcaccatggcaacctctgctatccaacaatctgctttcgttggccagaccgctttgaagcagtccaatgagctcttacgcaaagtcggagctttcgatggtggtcgtgttaccatgcgcagaactgtgaaaagtgcccctaccagcatctggtacggccctgaccgcccaaagtacttgggtccattctcagaccaaatcccatcatacctgacaggtgaattccctggtgactatgggtgggacactgctgggttatcagctgacccagagacatttgctaagaaccgtgagcttgaagtgatccactgcagatgggcaatgcttggtgcccttggttgtgtcttccctgaaattctttcaaagaatggagttaagttcggag

SEQ ID NO: 220933 - DNA, 358 bp, Gossypium hirsutum
tttaaaagaaccggttcctcaatttctctaatcctaactttcttccccatcaaacacaccttcgattttcccaaggttgtagaagatggcagaaggtgaggatattcagccacttgtttgtgacaatggaactggaatggttaaggctggatttgctggggatgatgctccccgagccgtattccctagcatcgttggtcggccacgtcacaccggtgtgatggttggcatgggccagaaagatgcatatgttggtgatgaagctcaatcaaagagaggtattctgactttgaaataccctattgagcatggtgttgcgagcaactgagatgatatggaaaagatttggcatcatacc

SEQ ID NO: 220934 - DNA, 276 bp, Gossypium hirsutum
  unsure (1)..(276): unsure at all n locations
atatttagctatagcatacactactagtacccactactagcaatggcttcctgaatgatctcatcggctaccattgccactgcctctccggcacaggctaacatggtcgctcctttcaccggtctcaagtctgcctctgctttcccagtcaccaggaaggccaacaacgacattacttctctcgcaagcaatggcggtagagtgcaatgcatgcaggtgtggcctcctactgagaagaagaagtttgagactctctcatacctncccgatcttaca

SEQ ID NO: 220935 - DNA, 333 bp, Gossypium hirsutum
ccgtccggccggtcggaccacgcgtccgaacacagcaaaaaagaaaaatggctaattcagcggaggaagagaaccaacaagaagcttttggttgggctgctactgataattctggaatcctctcccctttcaatttttccagaagggaaaatggtgatgatgatgtcactttaaaaattctttactgtggagtgtgccattcagacctacatactttgagaaatgaatggggtttcaccttttaccctgttgttcctgggcatgaaatttcaggtgttgtgaccaaagtggggaagaatgtgacaaaattcaatattggcgaccgggttgggg

SEQ ID NO: 220936 - DNA, 375 bp, Gossypium hirsutum
ctgagagtctctctcagatcagaactagagtgtttacattctggtaagaggttgagttggccatggctggagcttcctccaattcactatcaatctcaccctcatccaccctcgtggatgccaaagctcctcgtcaaccaactgctgcatccccacaatgtgtcactcttcctactcttcctcccccacccgttcagtcccagagtcgtccctggaagaccactgcctactgtcgcaagattgctcgaaatgtgatggctatggccactggtgagactttggccacgcgtgaagctccaaccgaagttaccccaactgagctgacagagtttatcaacaaaatacaagaaacatgggataaagttgaggacaagt

SEQ ID NO: 220937 - DNA, 348 bp, Gossypium hirsutum
gaaaaatatgatggtcggagaaactcaccgtcttaatccgacggtccatgttccaggatggcctaacctcgacgatgatcaaacggccgagatttactctccactcaactacaatgcagccgatagtcacttcaacaacaacggcggcaacccggttcatttccatgaagcgttagcagcgttacaacgttacttgccgtcgaacgaaccggactttgtctacccagattccgatcttccggttctcgaaaacgcggattctccggtcgacgcttactcgtgcgatcatttcaggatgttcgagttcaaatccggaagtgtccacgtggccgagcccatgactggacc

SEQ ID NO: 220938 - DNA, 388 bp, Gossypium hirsutum
  unsure (1)..(388): unsure at all n locations
cccacgcgtttcggagaaagcactgttttacgcaaaaccataggcctctgctttctcgtagtcatagacttcaccatgttttatgacataagtctgagtagggttaagaggtcacatcccttcgccaatccttccatcttctgcggtgatggtgccatccctgttgcatccctctggactaactgtgcgtgcaagctcatatgccgatgagcttgtcaagactgctaaagctattgcttctcctggccgtggaattttggccatggatgagtccaacgctacctgtgggaaacgtttggcctcaatcgggctagaaaacacagaggctaaccgncttgcctacaggacgttgcttgtttagctcctggccttggcaggtcatttttgt

SEQ ID NO: 220939 - DNA, 212 bp, Gossypium hirsutum
gttccatgtgaacggcacttgctcatgggttagtcgatcctaagagacgggggaagcccgtccgacagcgcgtccagcgcgagcttcgaaagggaatcgggttaaaattcctgaaccgggacgcggcggctgacggcaacgttagggagtccggagacgtcggcgggggcctcgggaagagttatcttttctgtttaacggcctgcccaccc

SEQ ID NO: 220940 - DNA, 390 bp, Gossypium hirsutum
agaagactcttttagcatttcaccgcaaagatggagataacaaatgtgagcgagtatcaagaaattgcgaagcaaaagttgccaaagatggtgtatgactactacgcatctggtgctgaggaccaatggacattgcatgagaatagatttgctttcaccaagatactgtttcgtcctcgtattctcattgatgtaaacaagatagacatgaccacaactgtgttgggtttcaagatatcaatgcctatcatgattgccccaactgccatgcaaaaaatggctcatcctgaaggggagtatgcaacagctagggctgcatctgctgctggaactatcatgacattatcctcatgggcaacttctagtgttgaggaggttgcttcgacagga

SEQ ID NO: 220941 - DNA, 398 bp, Gossypium hirsutum
agacaatagactaggacaggaggtttctctcagggtttaggtgatggcttcgaagcggatcttgaaggagctcaaggatctccagaaagatcctcctacctcttgcagcgcaagccctgttgctgaagacatgtttcattggcaagcaactattatgggtcctcctgacagtccatatgctggtggagtgtttctagtcaccattcatttccctccggactatccatttaaaccaccaaaggttgcattcaggacaaaggtctttcacccaaatattaacagcaacggtagcatttgccttgatattttgaaggagcagtggagccctgccctcaccatatccaaggtattgctatctatctgctcactcttgacggatccgaatcctgatgacccat

SEQ ID NO: 220942 - DNA, 285 bp, Gossypium hirsutum
cggacgcgtgggctcttttgtataactgtagcatatagtactagtaagcagtgatagcaatggcctcctccatgatctcatcggcaaccattgccaccgtgaactgctcctccccggcacaggccaacatggtggcccccttcaccggcctcaagtctgcctctgctttcccagtcactaggaaggccaacaacgacatcacttctcttgcaagcaatggtgggagagtgcaatgcatgcaggtgtggcctcctctagagaagaagaagttcgagacactctcat

SEQ ID NO: 220943 - DNA, 388 bp, Gossypium hirsutum
cccacgcgtccggtgctagatactatgtagggaatgagtacatcgacatggcagagacattgtgtcagaagcgtgctttggaagcattcaagttagatcctgaaaaatggggagtaaatgtgcagcccctttctggttctccttccaattttcaagtttacactgcactcttaaagcctcatgacagaattatggcacttgatcttccccatggtggccatctctctcatggttatcagacggacaccaaaaagatatctgctgtgtccatattttttgagacaatgccatatcggttgaatgaaaacactggctatatcgactatgatcagttggagaagagtgcaactcttttcaggccaaaattaatagttgctggtgccagtgc

SEQ ID NO: 220944 - DNA, 375 bp, Gossypium hirsutum
gtttcctttctcgattttctatttagccaaacaagatgcagatcttcgttaagactgtaaccggcaagacgatcactctcgaggtcgagagctccgatacgatcgacaacgtgaaggccaaaatccaagataaggaaggcatccctccagaccagcagcgtctgatcttcgccggaaaacagctcgaagacggccggaccttggccgattacaacatccaaaaggagtcaactctccacctcgtcctccgtctgcgcggtgggatgcaaatcttcgtgaaaaccttgactggcaagacaatcactctcgaagtcgagagctccgacacgatcgacaacgttaaagcgaagatccaagacaaggaagcattccccc

SEQ ID NO: 220945 - DNA, 390 bp, Gossypium hirsutum
gatttgcagagcacagaaagttccaagactgggccaaaccaggttcgatggggaaacaatatttcttggggttcgagaagtaccttggagggtctggtgagccggcataccctggaggaccactgtttaacccacttggttttgggaaagatgagaagtcattgaaggatttgaagctgaaagaagtgaagaatgggagattggcaatgttggcaatcttgggttacttcatacaagggctcgtgacaggtgtaggaccataccagaacctgttggatcacttggctgaccctttcaataacaatgtcttgactaacctcaagttccattagatgaaagtgcctatatttgttccatggaactaccctccccccccctccggctaaaagc

SEQ ID NO: 220946 - DNA, 349 bp, Gossypium hirsutum
tcttgcaccaaccacgcatctcacaatccaatggcatgatcattcatcattattcgccgtcgcttgcgccatggtttcaaacatgatagcctaccctgcagagtggtgtgcaagagctcaaaagcacggaagatgattggaaagccttggtgtcccgtaggttaggctctcactgtactcattggtgctgccgctgttggctctaaggtttctcctgctgatgctgcctatggtgaagctgcaaatgtatttggaaagccaaaaacagacacagacttcatgccatacagtggggatggattcaagctctcgataccatcgaaatggaacccaagcaaagaggtggagt

SEQ ID NO: 220947 - DNA, 376 bp, Gossypium hirsutum
cccacgcgtccgcgatactcaacggtgttttgtgattaaaaaaactaccaagagtgtggcaaaacaagatggcttccctgcatgaaccatggctagtggagaacgggttgaaggggtctagcaaggagattcgccatggcaggactgcacacaacatgtcgtcttcgtcgttgcggaaaaaatcggacctgacgcttgtttccaaggttcggtatgcaatgcttaggcagttcctcgccaatcttcaagaggtcatattagggaccaagctcttcgttctcttcccagctattccattggccattggtgctgagtgttatggatttggaagaccctgggtgtttgcattaagtttacttggacttacaccattggc

SEQ ID NO: 220948 - DNA, 269 bp, Gossypium hirsutum
  unsure (1)..(269): unsure at all n locations
cccacgcgtccgaaaccccttccatcgtttatcatggcttcctcaactgtctgccctgcagctccttggcagctatgctccagcaagagtggcatgttctgcccatcacgagcgtttcttgtgaaaccagcgaggacccatatggtcaaaaacgaaaagggaatgaggatcacatgccaggccactagcatccctgctgatagagtgccagacatgggcaagaggcagctcatgaatctgcttctgttgggggctatntcactcccctc

SEQ ID NO: 220949 - DNA, 371 bp, Gossypium hirsutum
aaacagtgaggggagtagggagtgtcgagttatcggacgacggttttttttcaacacgaaaaaaaaaatggataacttttacgcaccagggaagaaccatctcttcgttccgggtccggttaacataccggaacccgttattcgagccatgaaccggaacaacgaggattaccgttccccggctattccggcgatgacaaaaacccttctcgaagatgtcaagaagatattcaagactacgaccgggactccttttatgatcccaacaacaggaaccggtgcatgggagagtgcacttactaatacgttatcccccggtgaccgaatcgtatcgttcctcattggacaattcagtcttctttggatcgatc

SEQ ID NO: 220950 - DNA, 325 bp, Gossypium hirsutum
  unsure (1)..(325): unsure at all n locations
ctcccaatactttcataacattttacgaacttcactctccagtctccaatggcgggtgccgtctccaccatcggtgctgtcaaccgagcaccgttgagtttgaatggatcaaggtgccggagcttctgctccaagctcagctttcatggggaacagcttgaagaaagtgagcgctaggttcaacaacaacggcaaggctccagtgggaagtttcatgattgtggctgccaaagaaatcgacgaagacacacagaccgaccaggaccgatggaagggtcttgcttatgatatctncgatgaccaacatgacattaccagagggaaa

SEQ ID NO: 220951 - DNA, 301 bp, Gossypium hirsutum
cccacgcgtccgcaaaaagaaaattggcttctgcttccgctactctcctcaagtctgcacctattaccaatctaccatcgatgggaaaaagatggtcgatgttcttgttgagcaaaagattgtccctggtatcaaagttgacaagggtttggttccactccctggttccaacaacgagtcatggtgccaaggtcttgacggtctttcatcccgcacagctgcctactaccagcagggtgctcgtttcgccaaatggcgtaccgttgtgagcattccaaatgttccatctgccttggcagtt

SEQ ID NO: 220952 - DNA, 402 bp, Gossypium hirsutum
cccacgcgtccgagagatgctgccataaaggagaaacttgccagtgtgaaggacacgtctgaggaagtgaagcaacttgaagaacaagcagcggctattatgagagctgcaagggctgagattgcagccgctttgaacaagatgaagaaggagactcagttggaagttgaggagaaactggctgaagggaggaagaaagttgaggttgaattgcaggaggctttggctaatttggagaatcaaaaagaagagactatcaagtcacttgattcccagattgctgctctcagtcaggatattgtcaagaaggtgcttcctctctaaaatcccacttcatatttggtttaattttgagtcaataatgtttatatagttttgaaaccatctgtgtatttaatatga

SEQ ID NO: 220953 - DNA, 276 bp, Gossypium hirsutum
  unsure (1)..(276): unsure at all n locations
agcatggtaatctanngtttgttttaaaaaagaaaatagcaatcataggaggcttttatactgaggaagattcaccanctatntccgtcttgcataattccttcatggggtcactgcttcctcctgcttgcatgcctgtccactttctttctaccaatttttccaaatcaacaaccctttgtctgttaccccattcttttttataccatgccaccatcttgtccatgtcatcttccatttccattgtcaatgtatatcctattcttcattatacat

SEQ ID NO: 220954 - DNA, 360 bp, Gossypium hirsutum
ctgagagataagaaaaagcactgttaatagcaaaaccatggcctctgcttctgtcctcaagacttcaccagttttagacaagtctgagtgggttaagggtcacacccttcgccaaccttccacttctgtggtgaggtgccaccctgttgcaccctccggactaactgtgcgtgcaagctcatatgccgatgagcttgtcaagactgctaaagctattgcttctcctggccgtggaattttggccatggatgagtccaacgctacctgtgggaaacgtttggcctcaatcgggctagaaaacacggaggctaaccgccaagcctacaggacgttgcttgttcagctcctggccttggtcag

SEQ ID NO: 220955 - DNA, 264 bp, Gossypium hirsutum
ctttgaaggccgaataggggaaaggtttccatgtgaacggcacttgcacatgggttagtcgatcctaagagacgggggaagcccgtccgtcagcgcgtccagcgcgagcttcgaaagggaatcgggttaaaattcctgaaccgggacgcggcggctgacggcaacgttagggagtccggagacgtcggcgggggcctcgggaagagttatcttttctggttaacggcctgcccaccctggtaacggcttatccggaggtagggt

SEQ ID NO: 220956 - DNA, 331 bp, Gossypium hirsutum
  unsure (1)..(331): unsure at all n locations
ctttaccatggcttcacacaaagtaacactgataactccgtcggtaaccaagcaaggcgactgctcggacggcgactatatcctggaccgtgccgaggaagtaggaatggatctcccgtactcgtgcagggctggggcttgctcttcgtgtgcgggactgatcaaacaaggcaccgtcgaccaatcggacaatagcttccttgatgatgaattgattgatgcaggcttcgtcctaacttgtgttgccatccctaagagtgatgctatcattgagacacacaaagaggaggacctagtatcttaaaaggtgtcataaggatttgtatntttc

SEQ ID NO: 220957 - DNA, 404 bp, Gossypium hirsutum
ggaatgaccgggcggacggacgcgtccgctcttttgtataactgtaccatattgttctagtaagcagcaatagcaatggggtaggccatgatctcatcggcgaccattgccaccctgaactgctccttcaaggctcaggccaacatggtgtcccctttcaccatcctcaaatctgcctctgctttcccagtcactaggaaggccaacaacgacatcacttctcttgcaagcaatggtgggagagtgcaatgcatgcaggtgtggcctcctcttgggaagaagaagttcgagacactctcatacctccccgatcttacacccgtacagttggctaaggaagtagattaccttcttcgctctaaatggattccttgcttggaattcgaattaaaggaaggattcgt

SEQ ID NO: 220958 - DNA, 348 bp, Gossypium hirsutum
cttcattataaaaaaagaaaagatttgtcatggctgctgttactgctgcagtgttgttccttctaccaagtggacctctctccctgctagaacctctcttgtctttcctgataggatcaccttcaagaaggtgcccgtttactacagagatgtttgcagtggggggagagtggtttctgtcagggcccatgttacaactgaagctcctgccaaagttgtaaaggaatccaagaaaaacgatgaaggtgctgaggttcacaagttcatgcctatcatccgcgacattggtagatgcctccttaacactaagatcactggcgatgatgcttctggagagacttggcacat

SEQ ID NO: 220959 - DNA, 391 bp, Gossypium hirsutum
cggacgcgtccgcccacgcgtcctctataaaccacttgtacctaccgtggcggatcggctctgtcaatcaaaccagcaaatacaacatcctttcccttctcttttaatctttcttgtcttctctttcacctcgctttgttgtccatcagttgaggattcttgtcaacaaataacgcatggcagaggaagaacccaagaaggttgaaaccgtaaccccctcggagcaaccacctcccgaagcccccaaagacgttgcggaggaaaaatcggtaatcccacctgctacctctgaagaaaaacctgctgagtccgccgcactccaaaaggcggtggaaccgactgaggaaaagagcacggagagtactgtggaccgagatgctgtgcttgctag

SEQ ID NO: 220960 - DNA, 391 bp, Gossypium hirsutum
caaaagggtcttttcttcaacaccattgttgagctgagagaaaaacagagaaaaattagagaattctctctatatatacatatacatatagagagagacagttcaaacttcaaagatctagtagattggtaataaaaaaaagaatgttgggacaaaagcaaagtgaagaagcaatagtgtcgaattataacgaaagtgaacatcatgttgagaatagagatgaagagaaagaagaagaaaaccagtcattgtttaatgttaagaatctactttggcatggtggttctgcctgggatgcttggttcagctgtgcttctaatcaagtagcacaagtgttgttgactctaccatattcattttctcaattgggcatgctatctgggattctgct

SEQ ID NO: 220961 - DNA, 414 bp, Gossypium hirsutum
  unsure (1)..(414): unsure at all n locations
cggaanggccggggggacccacgcgtccgctttttcattggaagcttcttttttaaagagagatcagtgatatttgggggagggtgaaaagatggactatgtgtacggaccaggaaagaaccatctctttgttccagggccggttaacatcccggaaccagttcttcgagccatgaacaggaacaatgaggattaccgttcccctgccattcctgccatgacaaaaactcttcttcaagatgtcaagaaaattttcaagactactactggaactccctttttgattccaactacaggaactggtgcatgggagagtgcactcactaataccctgtcccctggagatcgaactgtatcttttctaattggacaattcaatctgctgtggattgatcaacaacaacgcctcaactt

SEQ ID NO: 220962 - DNA, 372 bp, Gossypium hirsutum
ctatatctaaagggttctttagattttcttaccagttccttctattaagaaaatgggctcccacattgttggatatccccgtatgggaccaaagagagagcttaagtttgctttggaatccttctgggataagaagagcagtgccgaggatttgcaaaaggttgctgctgatctcaggtcatccatctggaaacagatgtctgatgctgggatcaagtacatccccagcaatgctttctcttactatgaccaggtgctcgatgccacatccatgctcggagctgttccacctagatacggctggagtggtggtgagatcggatttgacacttacttctccatggccagaggaaatgcctctgtccctgcaat

SEQ ID NO: 220963 - DNA, 389 bp, Gossypium hirsutum
gccaacaccaggcttccatctaatatcctctcactctttccccactcaatgctgttagaagagactggaagtgactgaatcctctggacttcgatccagctcatgcgtcacctttgccaagaatgttagagatacttcctttttcgacgtgctggctgcccaacttactcccaagagtgaaggtgtaccatcagcatctgttaggggagaaacagttgccaaactgaaggttgcaatcaatggatttggacgcattggcaggaacttcctcagatgctggcatggcaagaaggactcacccctcgaggttgttgttgtaaatgacagaggtggtgtcaagaatgcttcacacttgctgaaatatgacttcatgctgggaactttcaaag

SEQ ID NO: 220964 - DNA, 385 bp, Gossypium hirsutum
ctgaaacaagagaatctgcagctcattctgttcgcactcgtacatcatcacctgctgacccttcaggtgactctggttcctcaccgatgctcagtgggcagcctatatacgacaaaccggcttccctgagcaaatctgctgattctgagttgctgcctccagcaccctgggacactgctgcaggaaaccttccaccaccgccttcgaagtttaatcagagacagcagttctttgaacaacaacatggttatcctggtggttcttctaactccagtaacggatcaggttcctcctatgatggcttggttggacaaactcaaaatctttcccttaactcaacgaccccaaccaaacaagaaaaaccagaagatgctctcttcaaaga

SEQ ID NO: 220965 - DNA, 338 bp, Gossypium hirsutum
cgatgatggtctcgctgagaccctttaatggggtctttccgtatccatcaaagcattcattggttcatagaaacaggcagacagctctaaggggtaccatttacatgagtgctcaaacacaagcagttccttccagaacccagaggataatggagagcatttcagttagtggtgaggttggtggtgctggtggtgcatactcctataatgccttgaagaggttggacggaatttggtcaagcatttgctctactcagactgttcagcaagcacctcagcaggtagtttcaagctttcctggtgtgtctagccattctgttcttgctgaaaaacaatta

SEQ ID NO: 220966 - DNA, 354 bp, Gossypium hirsutum
attggcactcttatttgcgtatccctttgtttaatcctataaacatgagaattttgtatttttttttcttattttatggcttgggacttactcctcgctttttcgaattctatcaagatttcacccctacaattaattattcgttgggacaataatccatgggaaggattaatttgaggatgaggaattatcacaccgactcgctttcttccttccccttcttagttcaagagaaccccttatttctcatttattgtttaaaggagtattgcaacgaatgaggtattttgccattgacatgaaacctgccccctaattctaataagaattattattattgggaattttcaattg

SEQ ID NO: 220967 - DNA, 384 bp, Gossypium hirsutum
cccacgcgtccgcccacgcgtccgtcaagccttgcacaatggccaccatgacctctgccgctgtcgctatcccatctttcaccggccttaaagccggtgcaaccgcagctaaagttagctccacagccaaggttgcagcctctccagtcccaagggtcagcatcaaggcctccctcaaagacgtcggtgttgctgttgcggcaactgctgcaagcgcaatccttgccaacaatgccatggccattgaagtcttgctcggcagtgacgatgggggtctggctttcattcccaaagaattcagcgtaagcccaggggagaagattgtgtcaagaacaatgccggattcccacacaatgttgtgttcgatgaggacgaaatcccaag

SEQ ID NO: 220968 - DNA, 375 bp, Gossypium hirsutum
ggctactgtttctgtagccatacccaaccttcagattcaggcaaaaggaaagggtgttggttttgcagatttctcaggcctacacaactcctctactagccttccctttgccaggaaaacctctgatgacttccattcactcgttgcttttcagacatctgctctaggaagcaataatggcgggtacaggaaagggatggcagaggcaaagctaaaggtggctataaatgggtttggtaggattggcaggaatttcttaagatgctggcatggccgtaaggactccccacttgatgtcattgccatcaatgacactggtggtggtaagcaggcttctcaccttctcaaatatgattccacccttggcatcttcgc

SEQ ID NO: 220969 - DNA, 385 bp, Gossypium hirsutum
gaaaaagcaaaaccatggcctctgcttctctcctcaagacttcaccagttttagacgagtctgagtgggttaagggtcacacccttcgccaaccttccacttctgtggtgaggtgccaccctgttgcaccctccggactaactgtgcgtgcaagctcatatgccgatgagcttgtcaagactgctaaagctattgcttctcctggccgtggaattttggccatggatgagtccaacgctacctgtgggaaacgtttggcctcaatcgggctagaaaacacggaggctaaccgccaagcctacaggacgttgcttgtttcagctcctggccttggtcagtacatctcaagtgccatcctctttgaggaaaccctctatcaaaccac

SEQ ID NO: 220970 - DNA, 410 bp, Gossypium hirsutum
  unsure (1)..(410): unsure at all n locations
gcgtccgtccacgcgtcgcgtacagtaacaaatattcacagttgttttncttcagntctctctctcggcaggtggcttgcagccatctgcgaccgtctctgccgctgcccgccgccaacccgagctctgaggagtgtcatgtcccaatcctcagnctttcatggtggaatgaaagtgaagctcaaagattcatacagcaccatggcaggtttccttcgggaaagttttaagagtgatgagcggcgtgagaaagagatagacgaagagacacagaccgaaaaggaccgatggaaagggttggcttacgatatttcggacgaccaacaggacattactcgagggaaagggatggtggattccctgttccaagctcccatgaatgatggtactcactttgctgtcatgagttc

SEQ ID NO: 220971 - DNA, 294 bp, Gossypium hirsutum
attccagggcgagggcaccaccacgtgccgtcgtggcagcattgtttcatccgtttatgggaccaccaccaggcctgggtggacagtgacattggttctacgctcataaggttcgggaccactactggtgatgtctccctcaccttagggctacgccatgctggaaacatgcccgagaatacttcttctttctcagctagagacgttggggggctgttaaattgaaaatacatattccacagtaatagctaaaacaattttcatttccaaaaaagataaagaaacatctatatc

SEQ ID NO: 220972 - DNA, 379 bp, Gossypium hirsutum
ggcagccatgaactccatcgttttgtcatgcaactatgctatctcaggcagtgggctaaatgccaagatcccctcagtgccttcagttgcttccccagttttgcctggtggttacaagttgccagtgatcagagctcaacaacagggtaaagtttcaggttccaaagaatcaagtggcaatgaaggaagaagagctgctatgctgtatttggcagctacccttttcaccacagcggctgcttcttctgcaaatgctggggtcattgatgattaccttgaaaagagcaaagctaacaaggagttgaatgacaagaagaggttggccacaagtggagcaaactttgcaagagcatacactgttcaatttggcacctgcaag

SEQ ID NO: 220973 - DNA, 377 bp, Gossypium hirsutum
ttcctctctccggtccctcacttcactttacgatggattggcaagggcaaaagttagcggagcagataatgcagataatgctgttggtttttgcagtgactgcattcgttgccggttatgtattgggatcgtttcagatgatggttctcgtatatgccggtagtgtgacactcactggattgattacaattccaaattggcctttcttcaaccgccatccactcaattggttggatcccagcgaagctgagaagcatcccaagccacaagtgactgtgatttcgaaaaagaaaggctccaagaagtaaggtcattcgatttgatcttagcatcgttagagttttctaggggactgaattgatgttttcatcttttat

SEQ ID NO: 220974 - DNA, 280 bp, Gossypium hirsutum
gaaggatgctcaggaagtgctgctcatccgatcaaaggccaactttcttgctcaggtcgggaagtacacccccagaggcgagtcatagcttgccaagcaaggaatgtttgtcaagggttatgtctattagcatgtttgtatcttcaacagctctatgaatttcctgcactgaaaatttaattgaaagagcagaacactgatctttcattataaactccttggttttcccctttttttccctcttaataattatgttaaagcataagaattagaccaatcc

SEQ ID NO: 220975 - DNA, 362 bp, Gossypium hirsutum
cccacgcgtccgcccacgcgtccgtccacgcgtacgcttatattgcctgaggaggttctaccccgtggaaacgctctttaatggaactttagctttagccggtcgtgaccaacaaaccaccggattcgcttggtgggccgggaatgcccggcttatcaatttatccggtaaactattgggggctcatgtagcccatgccggattaatcgtattctgggccggagcaatgaacctatttgaagtggctcattttgtcccagaaaaacccatgtacgaacaaggattaattttacttccccacctagctactctaggctggggggtaggtcctggcggagaaattatagacaccttttcatact

SEQ ID NO: 220976 - DNA, 376 bp, Gossypium hirsutum
tagcaattgtcctcaaatatctcatacaaggaattaaattgaatgaatggctcaaaccatgttgctcatgtctagccatgcagtgagcttgaagagagatcaccctttactccatttccaagctcaaggactcaagcctaaacctgcctctcatctcttcttcaatccattgtctaatggtgtccatacttcacccaaagctttcaccactttagctgtctttaaatcaaagaccaaagcagctcccaagagggttgagccaaagccaaaggttgaagatgggatctttggcacctctggagggattggttttaccaagcaaaatgagctctttgtgggacgtgttgccatgcttggttttgctgcatcattgcta

SEQ ID NO: 220977 - DNA, 371 bp, Gossypium hirsutum
gagaaattgcagacaggaaaatggaatgtatacagatctgctcgctctccgttgaagctagtatcgcgatttcccaatcatcctgatattggtacattgcacgacaattttttactcgccgttgatttctttggagataacaattatctcggtacaagaattcgagtcgatggaacggttggagagtataagtggatgacataccgagaagctgctacagctcgaacagccattggttgcggcctaatacatcatggaatactaaagggctcttgtattggattatatttcatcaatagaccagaatggatcattgttgatcatgcttgctctgcgtattcccttatatcagttcctttatatgacactct

SEQ ID NO: 220978 - DNA, 392 bp, Gossypium hirsutum
cccacgcgtccggctctcaggcattaccatggcaacctctgctatccaacaatgtgctttcgctggccaaacagctttgaagcagtccaatgagctcgtctgcaagatcggtgccgtcggtggtggtcgcgtttccatgcgtagaaccgtcaaaagtgctccaaccagcatctggtatggccctgaccgcccaaagtacttgggtccattctctgaccaaatcccatcatacctgaccggtgaattccctggggactacgggtgggatactgctggattatcagctgacccagagacatttgccaagaaccgtgagcttgaggtgatccactgtaggtgggctatgcttggtgcccttggctgtgttttccctgaaattctttcaaagaatg

SEQ ID NO: 220979 - DNA, 174 bp, Gossypium hirsutum
tcggtacactactattacactgccggttaaaaatcatgtccaccgtcacgactcaagcctctgccgctgttttccggccatgtgcatcgaaaacacggtttcttactggatcttccggtaagttaaaccgagacgttttatttaaaccagtgtctgctacatcaactagctcat

SEQ ID NO: 220980 - DNA, 382 bp, Gossypium hirsutum
ggagtttagttcagaggctaaccatcgcattgccaggctcgcagcccatctccggcctcagatggaggaaagttctattttgaggcgagctgactgtagagcgaaaggagggtcaccagggttcaaagttgctatcttaggagcagctggaggcattggccagcctcttgcaatgttaatgaagatgaatcctctcgtctcggttcttcatctttacgatgttgtgaactctcctggtgtcacagctgacctcagtcacatggatactggtgctgtggttcgtggtttcctagggcagccgcagcttgagagtgcgttgaccggcatggaccttgtgatcatacctgctggtgttccaaggaagcctggaatgacaagggat

SEQ ID NO: 220981 - DNA, 356 bp, Gossypium hirsutum
aaacttaatcatggctcggttgacgttcgtgacctccatcatccttctgctatgctccgttgccgctggatcaactttcgacgactccaaccccatccagatggtatccgatggcctcaccggcttcgaatcctccgttcttcgtgtcatcggtcacactcgccatgctctctccttcgcccgttttgcatacaagcatgggaagaggtatgaaaacgtggaggagatgaagctacggtttcagattttcgaagacaacttggatttaatcagatccactaacaagaagggacctggcctatactcttgctgtcaatcagtttactgattggagctgggaaagagtccagaaacac

SEQ ID NO: 220982 - DNA, 377 bp, Gossypium hirsutum
aaaaaacaaaaacaaaaaaaacttctattttatctcttttaatgaaaaaaatgggtgaaaatcttatgcatgctttacaatataacagctacggcggaggcgctgctggtttgaagcatgttgaagttccgatccccactccaaataaaggtgaaattttgcttaaactggaggcaactagtctaaacccagttgactggaaaatacagaaagggatgctgcgcccatttttacctagaaaattcccctacatacctgctactgatgtagcgggagaagtcgtaaaagttggaccgggagtcacaaattacaaagctggggataaagttgtgtctatgctccatcattttactggaggtggactagctgaatatgct

SEQ ID NO: 220983 - DNA, 378 bp, Gossypium hirsutum
cggacgcgtgggcgtactcctggttcgtagctcaacagagagttgaggccctagcacgtaccagtgataatggacaggaacggtcggagagctccgcagcgtggattggccacatcaacaggacactaagccgtttttaaggcgttgagggagctgatacgactatgttgacagtggcagatccaggttctgactgtcttcatctaatcttaccagaactggattcgtcccaaggtggaggttagtttttacgtcagataatcagacagagcgctcaagtatagaagccattcagtctctacagttatgcatgataatatcttgtgttggggattcaacaaagctttccacattggtgcaagacgtgttcaacgaacc

SEQ ID NO: 220984 - DNA, 389 bp, Gossypium hirsutum
gtcccacattcaggaaaactggatgtattctggacttcttttcgcaccatcccggaggcttgcgcatgttcaccttcttttcgcaccatcggtgttccacaggattataggcacatggatggctctggtgttcatacctacacactaatcaacaaggctgggaagtcacactatgtgaaattccattggaaacccacttgtggtgtaaaatctttgttggaggatgaagccataagagtaggtggtgcgaatcacagtcatgccacacaagatctttatgactcgattgcagccggaaactaccctgaatggaaactgttcattcaaataatggatcctcttcatgaggataggtttgattttgacccacttgatgtaaccaagacatg

SEQ ID NO: 220985 - DNA, 378 bp, Gossypium hirsutum
cccacgcgtccgaagttaacgaaatataaagaagaagaaatacaatgggtttctttttgaagtcgggttttagtttttggggtgaaaaaaaatgttgggagtatttagcagtgcgatagtgtctccgccggacgagctggtggcggccggttgccgaactccatcacctaagataacggcggacgctctggtgaaacggttccttgagacgaactcctccggcgtgtccatgcacatcggagaccatgtccaattcgcttattctcaccataaagagtctcctttacagcccagatcatttgctgtgaaagacgaaatcttctgcttgtttgagggagcccttgataacttggggagtttaaagcagcaatatggtct

SEQ ID NO: 220986 - DNA, 376 bp, Gossypium hirsutum
gctttcatcaactgtttttgccttacctcctcttcttcctccacgagcacctcgtgtttttccggtcgtcgacgacctacattgcggccttcggtcgtcgctagccttaactcttctccttctcctccgactcttatccaagaccgcccggttttcgctgcccctgttcctttgctcaccccgagagaagagatgggaaacaagtcctacgacgaagccattgaagctctcaagaaacttctcagtgagaaaggagaactgaaagctgaagcagctgcaagggtagatcaaataacagcagagttaaacacaacatcagctgacggcaaaccatctgactcttctgttgagagactgaaagaaggcttcgtttact

SEQ ID NO: 220987 - DNA, 375 bp, Gossypium hirsutum
gcctggccaaaaggttctagatgtttgctgtggcattggtggaggtgacatttgtatggctgaggaatttgatgttcatgttgtgggcatcgacctctccgtaaacatgatatcctttgctcttgaacgagctactggactgaaatgctcagtggaatttgaagttgctgattgccccaagaaggtttatccggacaacagttttgatgttatctacagccgtgacactattctacacattcatgacaaacctgcactgtttagatctttctacaaatggttgaagccaggaggcaaactcctcataagtgattactgtaaaagttccaagactccatccacggagtttgctgcgtatatcaagcagagaggcta

SEQ ID NO: 220988 - DNA, 386 bp, Gossypium hirsutum
  unsure (1)..(386): unsure at all n locations
ttgtcctcaaatatctcatacaagtttattaaatttaattaatggctcaaaccagtgttgctcgtgtctagccatgcagtgagcttgaanagagatcaccctttactccatttccaagctcaaggactcaagcctaaacctgcctctcatctcttcttcaatccattgtctaatggtgtccatacttcacccaaagctttcaccactttagctgtctttaaatcaaagaccaaagcagctcccaagagggttgagccaaagccaaaggttgaagatgggatctttggcacctctggagggattggttttaccaagcaaaatgagctctttgtgggacgtgttgccatgcttggttttgctgcatcattgctaggcgaaacaataac

SEQ ID NO: 220989 - DNA, 383 bp, Gossypium hirsutum
cccacgcgtccgctactttcccttttccttacttaccactgaaaacaatgaaggggtccaagcatgaggctttcacactctctttcaccctgcttctcatgctgctgggtttggcatccagtgatgtgaaccaagacaaagcggaatgcactgatcagctagtcgggcttgctccatgtcttccatacgttggtggacaggccaaagcccccaccctggattgttgcggtgggctgaaacaagtgttggttaagagcaagaaatgcctgtgtgtgttgattaaagatagagatgaccccagtcttggcctcaacatcaatgctagtcttgctgcaaccctccctcacacttgtcatgacactgttaacattacggaatgcatc

SEQ ID NO: 220990 - DNA, 373 bp, Gossypium hirsutum
ctttctcttgctctctttagagtatatttcttttgcaatcctttgtagagctcggggatccattgtcaccatgtcttgctcaaatctgacaatgtgggtgtcctcaaaaccctctctttctgacacttcttcactctctttccgttctttcatcagcccttttcagctcccatctcagagctcaacccccggtaacccttccaggtcctcatctgtaaccccagttcactgtggtcttcgtgagcttagagaccgtattgattcagtaaagaacacgcagaagatcactgaagccatgaaacttgtggctgctgctaaagttaggagagcacaagaagctgttgtcaatggcagacctttctctgagtccctg

SEQ ID NO: 220991 - DNA, 378 bp, Gossypium hirsutum
cttactccctcaaactttaagccatttccagcatgataatggcttgctcaaaggctgtaatctccattgctgcttcatcatccttcttttacaaacccaaactcaaacaaatcccacaactttccctcccaaaactccccactccaaagttcttgaaaacccaacaaatcccctcactctcgtccaccactctcaaatctatctacctcttcacagtcaccactttatccttttccccaccttctgttgcttcaaaaatagaaaaagcctgtcttttcgatttcaacttaaccctccccatcatgatggtccagctcttgttcctcatgtttgctcttgacaaggtctactttaccccactcgggaaattcatggatg

SEQ ID NO: 220992 - DNA, 376 bp, Gossypium hirsutum
cccacgcgtccgcccactcgtccgtccacgcgtccggtttctctcgatctagcggtctcgcgtgcgccctgtggctctcttcaaccctcgcatatctcttcaagatctgatctgatctgacaaaaaaatgttcgggagagcaccaaagaaaagcgataatactaaatactatgagatattgggagtgcccaaaaccgcttcccaagatgatttgaagaaggcttatagaaaagctgcaattaagaatcatcctgataaaggcggtgatcctgaaaagtttaaagagttggctcaagcttatgaggtgctgagtgacccagagaagcgtgagatatatgatcagtatggcgaggacgcccttaaagaaagaatgggt

SEQ ID NO: 220993 - DNA, 375 bp, Gossypium hirsutum
gcggaggaaaagaaacttaccaggattcccctagtaacggcgagcgaaccggggaaagcccagcttgagaatcggtcgccatcggcgtccgaattgtagtctggagaagcgtcctcagcgacggaccgggcccaagtcccctggaaaggggcgccggagagggtgagagccccgtcgtgcccggaccctgtcgcaccaagaggcgctgtctacgagtcgggttgtttgggaatgcagccctaatcgggcggtaaattccgtccaaggctaaatacgggcgagagaccgatagcgaacaagtaccgcgagggaaagatgaaaaggactttgaaaagagagtcaaagagtgcttgaaattgtcgggagggaagcgga

SEQ ID NO: 220994 - DNA, 384 bp, Gossypium hirsutum
gaagtatggtgctggaatcggcccttgtgtgtatgacatccactctcccagaagaccatcaagcgaagagattgctgaccgaattaacaagatgcttgctgtgcttgagaccaacatcttgtgggttaacccagactgtggtctcaagactcgcaagtatgccgaggtgaagccagccctgaacaacatggttgcagcggccaagctgctccgcacccaacttgcgagtgccaagtgagaggcatatctgaggtcggacatcatcctttatatcgaagatggtccagaggaaatttgtcttaaatcatttgaataactgtgtgttggaagtatttgttaggcgtatcatatgcccctcttttaggccaattgttttcctttttc

SEQ ID NO: 220995 - DNA, 368 bp, Gossypium hirsutum
cccacgcgtccgaatttagagaggttaaattagataaagaaaaatggttctctggtaaaaatttccgtttgtttcctgagcaaatctcgggaaggaataccctttttttccccctgttgttaactcgttgtgattgtgaagctttctttaagagaatcctagttaactcgacgcgtttacccggaaagaggtgaagatgtcaactcctgcaaggaagagactgatgagggattttaagaggttgcagcaagatcctcctgcatgaattagtggcgcacctcaagataacaacattatgctttggaatgctgatatatttggacctgatgacaccccatgggatggaggtacgtttaagctgacttttt

SEQ ID NO: 220996 - DNA, 369 bp, Gossypium hirsutum
cggacacgtgggcttacacatggttcggagctgagcagagagtggatgccgaggcacgtatcggtgataatggacggaaaccggcggtgggctcggcagcggggattggcgacatcagcgggacacgaagccggtgtaaaggcgttgagggagctggtcgaactatgttgccagtgggggatccaggttctgactgtcttcgccttctcttacgagaactggattcgtcccaaggtggaggttgattttttgatgagtttgtttgagagagcgttgaagtctgaagtggagtcactttctagaggaggcattcgaatatctgtaataggggattcaacaaagctttccacatcgctgcaaaagttgatc

SEQ ID NO: 220997 - DNA, 376 bp, Gossypium hirsutum
aaccaaaaagaaaaatggcttctgtttccgctactctcctcaagtcttcacctattatcgacgagtccgagtggattaagggtcaaaacctccgccacccttcggtttgttttgtacagtgcaaccctacatcggccgcctttaccgtccgtgctagttcatatgccgatgagcttgttaagaccgcgaaaactgttgcatctccaggtcgtggtattttggccatggatgaatcaaatgctacatgtgggaaacggcttgcctcgattggtctcgagaataccgaggcaaaccggcaagcttaccgtacccttctcgtgtctgcccctggcctcggtgactacatctcgggagctatccttttcgaggagactct

SEQ ID NO: 220998 - DNA, 387 bp, Gossypium hirsutum
cccacgcgtccggtttggcctcaatcgggctagaaaacacggaggctaaccggcgaagcctacgaggacgttgcttgtttcagctcctggccttggtcagtacatctcaggtgccatcctctttgaggaaaccctctatcaaaccacaattgatggcaagaagatggttgatgttcttgttgagcagaacatagtccctggtatcaaggttgacaagggtcttgttccactggctggttcaaacaacgagtcatggtgccaaggtcttgatggcctcgctccacgttcagctgcatactaccaacaaggagctcgttttgcaaaatggcgtactgtggtaagcattcccaatggaccaaccgaacttgctgtgaaggaagcagcctg

SEQ ID NO: 220999 - DNA, 382 bp, Gossypium hirsutum
tttcaattgaagtgtggaacccaaatgggaaatacagagttattagcaccaaggctatgcctggaactcgatggatcaacctcttaatcgagcaagattgccgtgtcgaaatatgtactgagaagaaaacaattttgtccgttgaggatatcatttctttgattggcaataagtgcgatggggtgattggacagttgactgaagactggggggagactttatttgcagctttaagcagagcaggaggcaaagcatttagtaacatggctgttggttacaacaatgttgatgttaatgctgccaacaagtatggtgttgctgttggtaacactcctggtgtactcacagaaacaacggcagagctagcggcttctctttcttt

SEQ ID NO: 221000 - DNA, 378 bp, Gossypium hirsutum
cccacgcgtccgcgaaaatatgaaatgattgataaacaagtttcaggggaatcgacaattaacagaagagagatacaaacaacagggaacaataagcacccaatcatgaaaccaaagtgatcccaccccgcatagaacccttgttaatggatcacatgaaactcatcgaaaagaccagaaatcttaaaattctgaagtgggcagctgctcatgtgtgtcgggggcgatgaagaagacttcatagacgatggctgcaatggcagagccgacaaagggaccgagccagtagacccagtggttgtcccatgtccagctgacaacggctggtccaaaggagactgcagggttcatggaagctccatcaaaggcaccaccagc

SEQ ID NO: 221001 - DNA, 381 bp, Gossypium hirsutum
cccacgcgtccggggttgcaatggtacaagcaatggcatcgatgactggtttacgtggctctgcacaagctgcgttggaaggtagtctccaactcagcggccaaactcggttgaacgttgctagcaccaacaggttggctgtggctagacccggttttaccgttagagctcaacaggtccctgccgagcctgaaactggacgcagagctgtgctgggtcttgttgctgctggtttggctactggctcctttgttcaagctgtgcttgctgatgcacgaagcatcaaggttggcccgccttcacacgccttcggtggattgcccggaactttgaattccgatgagccaagagaccttgatctgccctacaaagatcggtttt

SEQ ID NO: 221002 - DNA, 379 bp, Gossypium hirsutum
cccacgcgtccgcattatcaactgtttcacaatggcctctacagcgatggctcgttcttccccatcattcgccggtaaggcagtgaagttctccccttccacccctgaaatccagggaactggccgtgtttccatgaggaaaaccaccaagcctgttccttctggtagcccatggtacggtcctgaccgagttttgtacttgggtccactttccggtgagccaccatcttacttgaccggtgagttccctggtgactatggttgggacactgctggactctcagctgatcccgagacctttgctaggaaccgtgagctcgaagtcattcactgcagatgggccatgttgggagctcttgggtgtgttttccctgagctg

SEQ ID NO: 221003 - DNA, 380 bp, Gossypium hirsutum
gtgaaaagaaattttttagaaaaaaaaatccatcaccgatctaaggtccccaagttctgttcaaatggccggcgaaattttgatctgaaaatctaaaaatgtcgtccacattcagcggcgatgaaactgctcctttttttggcttcctcggtgccgctgctgccctcgttttctcctgtatgggagctgcgtatgggacggctaagagcggtgttggtgtggcgtcgatgggagtgatgaggccggagctggtgatgaaatcgatcgttcccgttgttatggctggcgttttgggtatttatggtttgattattgcggttattatcagtactgggattaacccaaaggctaaatcttattaccttttcgatggctatgct

SEQ ID NO: 221004 - DNA, 298 bp, Gossypium hirsutum
  unsure (1)..(298): unsure at all n locations
cccacgcgtccgcccacgcgtccgatcgggttaaaattcctgaaccgggacgcggcggctgacggcaacgttagggagtccggagacttcngctgaggcctcgggaagagttatcttttctgtttaacggcctgcccaccctggaaacggctcatccggaggtagggtccaacggtcggaagagcaccgcacgtcgcgtggtgtccggtgcgcccccggcggccctttgaaattcggaggaccgagtgccgttcgcgcccggtcgtacttataaccgcatcaagtcttcaaggtgaac

SEQ ID NO: 221005 - DNA, 184 bp, Gossypium hirsutum
tggagcccttagcgagttctatcgggtaaagccaatgctttctgggatcgggggggcaactcccttgacctatgctaaaactttaaataggtaggacggtgtcgttcacattcaggggcgatgaaactgctcctttttttggcttactcggtgccgttgcttgccttgttttcttctgtatggg

SEQ ID NO: 221006 - DNA, 386 bp, Gossypium hirsutum
gtttgtgaggaaagtaatgaattttttttttcaaagttcaagttgattctaagagtttctagttagtgcattaaaatatgaagttgaagatatgtcatgccagccagtattgctggtgaagttcttcagttggttctatatgatttggggagggctagccccatgtcaaagcataagcaaaagcaacagatacgtgaaatgataaaatcaagaggttgaataacggttatattatatgacaggtccaattctccttgaagactatcatttggtggagaagctagctaatttcgatagagaacgcatacctgaacgtgttgttcatgctagaggagccagtgcgaaagggttcttctaggtcactcatgatatattctaactcacat

SEQ ID NO: 221007 - DNA, 377 bp, Gossypium hirsutum
gctacccatctccctattctcaatggcaatggcaacccaagcctgggtcttcgggccatcaaccctctgcaccccaaaatccggcgaccgcatcgccgccgtgttacggaaacaaccaccgttcctaaccgtccctagcttcaagtccccaaaaagcatcatcgccccacgcaccatcaaagcccaagcaaccgaagagaaagccgagacaaccgccacaaaggaagcaccagtcggtttcaccccaccagagctggacccaaacaccccatcaccgatcttcggcggcagcaccggcgggcttttacgcaaagcacaattggaagagttttacgtcatcacatgggagtcacccaaggaacaaatcttcgagatgc

SEQ ID NO: 221008 - DNA, 383 bp, Gossypium hirsutum
cttagccaaggccttttcacatactacttggacaacaacatggatggattctgcgattgccccagctttcatggacaagcttgttgttcacatcaccaagaacttcatgacccttcctaacattaaggttcctcttatcttgggtgtttggggaggcaaaggtcaaggaaaatctttccaatgtgagcttgtctttgccaagatgggaatcaaccccattatgatgagtgccggagaattggaaagtgggaacgccggagaaccagccaagttgatcaggcaaaggtaccgtgaggccgccgacattatcaagaaagggaaaatgtgttgcctcttcatcaacgatctcgacgctggagccggtcgtatgggaggaaccacac

SEQ ID NO: 221009 - DNA, 382 bp, Gossypium hirsutum
caggatcgaagagataagattatattgaaaaactaaacataatagagcccctgggacttgcttcattgatttgccctctcaaagcccaagaaaaatggcttctgcttccgctactctcctcaagtcttcacctattatcgacaagtccgagtggattaagggccaaaacctccgccacccttcggtttgttttgtacggtcacaccctacatcggccgcctttgccgtccgtgctagttcatatgccgatgagcttgttaagaccgcgaaaactgttgcatctccaggtcgtggtattttggccatggatgaatcaaatgctacatgtgggaaacggcttgcctcgattggtctcgagaataccgaggcaaaccggcaagct

SEQ ID NO: 221010 - DNA, 390 bp, Gossypium hirsutum
gaagccatggccagcatgataatttcttcctcaaagcctgtaatctccattggtgcttcatgatccttcttttccaaacccaaactcaaacaaatcccacaactttccctcccaaaactccccactccaaagttcttgaaaacccaacaaatcccctcactctcgtccaccactctcaaatctatctccctcttcacagtcaccactttatcctttgccccaccttctgttgctgcagaaatagaaaaggccgctcttttcgatttcaacttaaccctccccatcatgatggtccagttcttgttcctcatgtttgctcttgacaaggtctactttaccccactcgggaaattcatggatgagagagatgctgccataaaggagaaactt

SEQ ID NO: 221011 - DNA, 394 bp, Gossypium hirsutum
gcgcagtttccgaatcttttacagctcgtaaactcgttgaattgactcatggcttgcgccgttgggtccgttgctaagaagaaaaccgctggctccaagaagcctaaatcagctccttcacaccctccatttcttgagatgatttcagatgcaatcgtttcgttgaaagagaggacaggatcgagccaatatgcgattgcgaaattcattgaagagaagcataagcaattaccggcgaatttccgcaaagtcttacttgttcagacgaggaagtttgttgcttccggaaagctcgtaaaagtgaaagcctcttttaagctgccttcggcttatgccgcagctaagaaaccagccgccgtagctaagaaacctgccgccgcgaagcctaaatctg

SEQ ID NO: 221012 - DNA, 377 bp, Gossypium hirsutum
cccacgcgtccggcagatcttcgttaaaaccctaacggggaaaaccataacccgtgaggtcgagtcttctgacaccatcgacaatgtcaaagccaagatccaagacaaggaaggcatccctcccgatcaacaacgccttatcttcgccgggaagcagcttgaagacggccgcaccttagccgactacaatatccagaaggaatccactcttcacctcgtcctccgcctccgaggtggtgccaagaagaggaagaagaagacctacaccaagcccaagaagatcaagcacaagaagaagaaggtcaagctcgccgtgctccagttttacaaggtggacgagtcgggtaaggttcagaggctgagaaaagagtgtccca

SEQ ID NO: 221013 - DNA, 378 bp, Gossypium hirsutum
gtcgtatcagaagtttttctcttcttctctgaaattcccttgctatggttctgtggaagaaatttttttgagatggcccgtacgaagcaaactgctcgtaaatccaccggcggcaaggctccaaggaagcagcttgccactaaggctgctcgcaagtcggcaccgacaaccggaggcgtgaaaaagcctcaccgatatcgccctggaactgtagctctgcgtgaaatccggaagtaccagaaaagtactgaactcctcatcaggaaactgcctttccaaaggctcgttcgtgaaattgcccaagactttaagaccgatctgcgtttccagagccatgctgttttggcgttgcaagaggcggcagaggcataccttgtt

SEQ ID NO: 221014 - DNA, 267 bp, Gossypium hirsutum
ggagtttagttcagtgtctaaccttcgcattgccaggctcgcaggccatcttcgacctcagatggaggaaagttctattttgaggcgagctgactgtagagcgaaaggagggtcaccagggttcaaagttgctatcttaggagcagctggaggcattggccagccttttgcaatgttaatgaagatgaattctctcgtctcgggtcttcatctttacgatgttgtgaactctcctggtgtcacagctgacctcagtcacattgatac

SEQ ID NO: 221015 - DNA, 373 bp, Gossypium hirsutum
gcgtcttgatttccctgtaatccatcatattcagtttccaaatgggactcacaggggtgacttagggattaatgctggcaccaatgctggagcccttctggtggatggactcggagatggtatattgttggaagcaccagaccaagattttgatttcctcagaaacacttctttcaacttactccagggctgtagaatgaggaataccaagacggagtatgtttcatgcccatcttgcggcagaacattgtttgaccttcaagaaataagtgcacaaatacgagaaaagacgtcacacttgcctggtgtttcgattgcaattatgggttgcatcgttaatggtccgggggaaatggctgatgcagatttcgga

SEQ ID NO: 221016 - DNA, 295 bp, Gossypium hirsutum
cccacgcgtccgggaaagtaagtatccgaagcgaaaggatttgagagaaagaagggaaagacgtctgatagaaaaatggataaagcaatcaacagacaacaagttttgcttaatcatttacaaccctcttctgagtctcatcaatcacctgctgctattctatttccttccaactgcgcggcgggggatagcgctgcttatcaccggacggctgcttttggggatgatgttgtgattgtcgcggcatttctcacttgaatttgcagagcaaaacgtgtaggcttcaaaaattcac

SEQ ID NO: 221017 - DNA, 391 bp, Gossypium hirsutum
cccacgcgtccgggtctcacttcaagctgcagctaccctgatgcaaccaatcaaggttgctgcaccatcaaggaccaatgtgctgctcaggtcctcccagagcgtttctaaggccttcggtttggagcctgttggtgctaggctcacctgctctttgcaaactgacctcaaggacttggctcagacgtgtgttgatgctaccaagctcgctggtttcgctcttgctacatctgctcttgttgtctcgggagcaagcgctgaaggagttccaaagcggctaacctacgatgaaatccaaagcaagacatacatggaagtcaaaggaacaggaactgctaaccagtgcccaaccatcgatggtggtgtcgactcttttgccttcaagcctggc

SEQ ID NO: 221018 - DNA, 372 bp, Gossypium hirsutum
  unsure (1)..(372): unsure at all n locations
ggaacccaaggccagaagactcttttagcatttcaccgcaaagagggagataagaaatgtgagcgagtatcaagaaattgcgaagcaaaagttgccaaagatggtgtatgactactacgcatctggtgctgaggaccaatggacattgcatgagaataagattgctntcaccaagatactgtttcgtcctcgtattctcattgatgtaaacaagatagacatgaccacaactgtgttgggtttcaagatatcaatgcctatcatgattgccccaactgccatgcaaaaaatggctcatcctgaaggggagtatgcaacagctagggctgcatctgctgctggaactatcatgacattatcctcatgggcaac

SEQ ID NO: 221019 - DNA, 379 bp, Gossypium hirsutum
cgaacttcccaaaaccaaaccccaactctctgcttatggatcctctcctatgctcggcgagcggggggcactttcatgaacagcggcagtcactgccgattcttctaagcttagatacccacacgcgtgccctttcccaactcactcctcaaccaccacctgtgcctttttctcctcaattccctctaaactaacccctacccacctctcctcttgcttcctccctcctttcctcactaccgtcgccaccacttccgtattccctcgccgtcgcggttctttcaccgtcaaagctgcccgtggcaaattcgaacgcaaaaagccccacgtcaacatcggcaccatcggccatgtcgaccacggcaaaaccaccttaact

SEQ ID NO: 221020 - DNA, 369 bp, Gossypium hirsutum
gaaaaattctcttcctttttttttattccttcctttttcctttcatccaatcgagcaaattcagagcttacaaaagaaaaatggccggaatcggacctttaactcaagactgggagcccgtcgttattcggaaaaagcccccaaacgctgccaccaagaaggatgagaaagtcgttaacgccgcccgtcgagccggtgccgagatcgaatccgtcaagaaatcgaatgctgggacgaacaaggcagcatcgagtagcactactttgaatacaaggaaacttgatgaggaaactgaaaatcttgctcatgaacgagtgccaactgaactgaagaaagccatcatgcatgctcgaatggagaagaaactca

SEQ ID NO: 221021 - DNA, 332 bp, Gossypium hirsutum
  unsure (1)..(332): unsure at all n locations
gcgcccacgcgtncgtccacgcgtncggttcaaattgcttatgaagcaagaaaacagtgtccagatggagagaatttggattaccaatgaaattatccataacccaactgttaataagcgattagaggagatggaagttaaaaatattcctatcgaggaagggaagaaacggtttgatgtagtggataagaaggatgtcgtggttttgcctgcttttggagctgcagttgatgagatgttggttttgaatgacaaaaatgtgcaaattgttgatacaacttgtccttgggtaactaaggtatggaacgtaatatagaagcacaagaaagggg

SEQ ID NO: 221022 - DNA, 342 bp, Gossypium hirsutum
  unsure (1)..(342): unsure at all n locations
gttagtcgatcctaagagaccgggtaagcccgttcaacagcgcaagtaatgcgtgcaaataaagggtatagccataaaattgacacacaagtgatccccaaggcttcatccagatcattgattgcatgctcctccagcaatccttcctactgcgacaaatttgctttataactccaggccttcttagcggctgttgctctttctttcatgcttatttcggctccactccctgctggtgcggacattgcggggctcactccttgcaaagagtccaagcaattcgccaagcgcgagaagcagcanatcaagaagctggaatcctcgttgaagctttacgccccc

SEQ ID NO: 221023 - DNA, 373 bp, Gossypium hirsutum
acgcccacgcgtccgtcagggtcatatgtttggttatgccactgatgaaaccccggaattcatgcctcttagccatgtccttgcaactaagctcggtgcacgtcttactgatgttaggaagaatggcacctgcccctggctaaggcctgatggtaaaacccaggtcactgtggagtactacaatgaccgggggggcaatggttcaagttcggggccccactgccctaatctccacccaacatgatgggactgtaacaaacgatgaaatcgcttgctgacctcaaggagcatgtcatcaagcctgtcatccctgagaagtaccttgatgagaagacaatctttcaccttaacccatctggccgttttgtaatcg

SEQ ID NO: 221024 - DNA, 378 bp, Gossypium hirsutum
  unsure (1)..(378): unsure at all n locations
cccacgcgtncgcaactgcttcacattggcctctacaaccatggctctttcttccgcatcattcgccggtaaggcagtgaagttctccccttccacccctgaaatccagggaactggccgtgtttccatgaggaaaaccaccaagcctgttccttctggtagcccatggtacggtcctgaccgagttttgtacttgggtccactttccggtgagccaccatcttacttgaccggtgagttccctggtgactatggttgggacactgctggactctcagctgatcccgagacctttgctaggaaccgtgagctcgaagtcattcactgcagatgggccatgttgggagctcttgggtgtgttttccctgagctgttggc

SEQ ID NO: 221025 - DNA, 364 bp, Gossypium hirsutum
gtcgacggcttccatcaacggttggtgccttacctcctcttcttcctccaccaccacctcctctttttccgctcgtcgacgacctacattgcggccttcggtcgtcgctagccttaactcttctccttctcctccgactcttatccaagaccgcccggttttcgctgcccctgttcctttgctcaccccgagagaagagatgggaaacaagtcctacgacgaagccattgaagctctcaagaaacttctcagtgagaaaggagaactgaaagctgaagcagctgcaagggtagatcaaataacagcagagttaaacacaacatcagctgacggcaaaccatctgactcttctgttgagagactg

SEQ ID NO: 221026 - DNA, 324 bp, Gossypium hirsutum
ggaccgggacggacaggccgggccgacgcgtccgcccacgcgtccgcccacgcgtccggttcatcacatcatctacatttccctccactggttctctcttctatattttcccaagattattttctctttcctttttttcctccctattttttttctcgggaaaaaaagactttttttccggtatacccagatcttgtttagttccaagctttaggttgtcatcgttttctcgaggttttaaactatgggtatctcttgaatttgtgaagcaaagggagaaatattggttaaaaactagtagcagtgtattgaatcaagttttac

SEQ ID NO: 221027 - DNA, 372 bp, Gossypium hirsutum
tccgcccacccttccggggaaataccatcgttttgcatttgcaaagcctttcactgactcaaaaataacaagccttgaggaggacgatggaaatatactcaaactctactcgttttgctcttgcttgcaatacatcatcaaaaatcattgaacctattcagagtagatgtgcccttgttcgattttcaaggttatctgatcaggagattcttggccgtctcatggtggtagtagatgcagagcaggtaccgtatgttccggaaggtcttgaagccatcattttcacagctgatggtgatatgagacaggcgttgaaccaacttgcaggctacatacagtggattccgttttgtcaatcaagaaaatgttttc

SEQ ID NO: 221028 - DNA, 397 bp, Gossypium hirsutum
ccgtgagccccaacccggctcctgtgttttactttttcgatcccatgaatatcggtcttcctggtcttagttatctgccgcctgccaacgcggtggcgcctcctcctcctcctactgccggttcgccgtatttggaggatccgagtaagaagatccggaagccttacactattaccaagtccagagaaagctggactgatcaggagcgcgataagtttctcgaagctcttcaattatttgatcgtgattggaagaagattgaagcatttgttgggtccaagacagtaatccagatccgtagccatgcacaaaagtatttcctaaaggctcaaaaaaatggggcaactgaacatgtacctccccctcggccaaaaaggaaagcagctcatccgtaccc

SEQ ID NO: 221029 - DNA, 376 bp, Gossypium hirsutum
cccacgcgtccggcagaatcctccactttctcatcctaatctccctcccggctgcttgattcgctgtagccgatgacgacaatctatccgcgtaccaagctcttcaacagtacgacttcccagtaggcatccttcccaatggcgtggttgggtatgaattgaacagggaaacgggcgagttttcagcttatttgagtggaacctgcaagtttgacattgactcataccaactcagttacgaatccaccataaaaggagtgatctccccaggcaggataacaaatttgaagggagtgagcgttaagatttctcttcttctggcttaacatcgttgaagtgatacataatggggaccagatggagttctccgttggga

SEQ ID NO: 221030 - DNA, 333 bp, Gossypium hirsutum
caccattgttccaagtttgttgtaaaccaagctagaaccagcagccaacatggcctcattagcagcctccaccgctgccgcctcccttggcgtctctgaaatgctcggtaaccctctgaatttcagtggtggagctaggtcatcggctccaacaccatccaactcatccattttcaagaccgttgctcttttctccaagaagaaggccgctcctccaaagcccaaggctgctgctgtcgccccggccgatgaagagctggctaagtggtacggtccggacagaaagattttcttgcctgaaagtctgttagacagatcggagatcccagagta

SEQ ID NO: 221031 - DNA, 385 bp, Gossypium hirsutum
gttttaccatctgctgtatcagctagggtgagtattgaggctggatcaacatttgggtgggcgaagattgttggatccaaggggaaggctattggaattgaccggttcggggcaagtgcaccagcaggcaaaatatacaaggagtttggcttgactcccgaggctgttgttgcagcagcaaaagaactttgctaagcttgcttagaagtgtcgggagaaatttgtggttctgggttggaggttacactgaagagagaccattccatttgtgacagtctcgtttgtttttaataagaatcagaatccacttatattttatgttgcctgtgattcatcaaaaagcaaaacatagagagaaagggagggtagaagttgtgtatgatca

SEQ ID NO: 221032 - DNA, 327 bp, Gossypium hirsutum
gtggaatgcctacattctgcattcctgtccaagatgggtgtgggatttgattaccgtcttcacatggccattgctgataaatggattgagattcttaaaaagagagacgaagactggaaaatgggtgaaattgttcactcgctaaccaacaggaggtggatggaaaagtgtgttgcttatgctgaaagccatgaccaagctctagttggcgacaaaacaatagcattctggttgatggataaaggtatgtatgagtttatggctctagatagaccaagtactgcacttatagatcgtggcattgcattacacacaatgattaggctc

SEQ ID NO: 221033 - DNA, 333 bp, Gossypium hirsutum
caaaatcagttgcttcacaatggcctctacaaccatggctctttcttccccatcattcgccggtaaggcagtgaagttctccccttccacccctgaaatccggggaactggccgtgtttccatgaggaaaaccaccaagcctgttccttctggtgactatggttgggacactgctggactctcagctgatcccgagacctttgctaggaaccgtgagctcgaagtcattcactgcagatgggccatgttgggagctcttgggtgtgttttccctgagctgttggctaggaacggtgtcaagttcggtgaagccgtatggttcaaggccgggtc

SEQ ID NO: 221034 - DNA, 392 bp, Gossypium hirsutum
cccacgcgtccggatatatttagctatagcatacactactagtacccactactagcaatggcttcctcaatgatctcatcggctaccattgccactgcctctccggcacaggctaacatggtcgctcctttcaccggcctcaagtctgcctctgctttcccagtcaccaggaaggccaacaacgacattacttctctcgcaagcaatggcggcagagtgcaatgcatgcaggtgtggcctcctactggaaagaagaagttcgagactctctcatacctccccgatcttacacccgtgcaggtggctaaagaagtggattaccttcttcgctcaaaatgggttccttgcttggaattcgaattagaggagggattcgtgcaccgtaaatactc

SEQ ID NO: 221035 - DNA, 389 bp, Gossypium hirsutum
caaaattccacttaaaaaatggcctccacagcttccctctccaccgccgtagccaccacctctttcctccgcggccacccggccccgaaaaccctaagctcccttcctttcaaccaatctcttttcgggctaaaaccccaacgaaatggccgtctcaccatggctgcatacaaagtgacactgttaacacccgaaggaccccaagaattcgtgtgccccgacgacgtttacatcgttgaccaagctgaggaagaaggcattgatcttccgttctcgtgtagggctgggtcttgttcttcgtgtgccggaatgattaagcaaggctccgtcgatcaatccgacggtaatttccttgatgatgaccagattgctgcaggttttggcctcac

SEQ ID NO: 221036 - DNA, 398 bp, Gossypium hirsutum
atttagctatagcatacactactagtacccactactagcaatggcttcctcaatgatctcatcggctaccattgccactgcctctccggcacaggctaacatggtcgctcctttcaccggtctcaagtctgcctctgctttcccagtcaccaggaaggccaacaacgacattacttctctcgcaagcaatggcggtagagtgcaatgcatgcaggtgtggcctcctactgggaagaagaagtttgagactctctcatacctccccgatcttacacccgtgcagttggctaaggaagtagattaccttcttcgctcaaaatgggttccttgcttggaattcgaattggaggagggattcgtgcaccgtaagtactcgagcttacccacgtactacgatg

SEQ ID NO: 221037 - DNA, 399 bp, Gossypium hirsutum
gtagcatatagtaatagtaagcagtaatagcaatggcctcctccatgatctcatcggcaaccattgccaccgtgaaccgctcctccccggcacaggccaacatggtggcccccttcaccggcctcaaatctgcctctgctttcccagtcaccaggaaggccaacaacgacatcacttctcttgcaagcaacggtgggagagtgcaatgcatgcaggtgtggccgcctcttgggaagaagaagttcgagactctctcatacctgcccgatcttactcccgtacagttggctaaggaagtagattaccttcttcgctctaaatggattccttgcttggaattcgaattagaggagggattcgtgcaccgtaagtactcgagcttacccacgtactacgatg

SEQ ID NO: 221038 - DNA, 314 bp, Gossypium hirsutum
cgagttttgtacttgggtccactttccggtgagccaccatcttacttgaccggtgagttccctggtgactatggttgggacactgctggactctcagctgatcccgagacctttgctaggaaccgtgagctcgaagtcattcactgcagatgggccatgttgggagctcttgggtgtgttttccctgagctgttggctaggaacggtgtcaagttcggtgaagctgtatggttcaaggccgggtctcaaatcttcagtgagggtggacttgactacttgggtaacccaagcttgatccatgctcaaagcatttt

SEQ ID NO: 221039 - DNA, 371 bp, Gossypium hirsutum
cccacgcgtccgcagattcttcactcattcatcttttttctttggtttttgagcatcaccacacaaatccatagatacctcccctccacccccctctcaacccacaattttacacaggagaaatttatcacaatcatgaagcgagaccacaatcatctccaacccaacccagacccctcttctctccgcggcgctccttcaaccggaaaggccaaggtttgggacgaagaatccgcccaacaagactgtgggatggatgagcttttggcggttttgggttacaaggtcaaaacttcagacatggctgaagtggctcaaaagcttgagcagttggaggaggttatgtgtaatgttcaagatgatgggatttc

SEQ ID NO: 221040 - DNA, 394 bp, Gossypium hirsutum
gttcaatctccacaccagcgaaaacccatttaggttttcaccaaaaggaagtagttttctataggagaagcagcaagagaggtggcagcggcagcggcagcagcagcggcccatgcgtgataacatgctcggccggtgattcacaaactgttgtgattggtttggccgcagactcaggatgtgggaagagtaccttcatgaggaggctaacaagtgtgtttggtggtgcagccgatccacctaagggaggcaatcctgattcaaacacactcattagcgatatgaccactgtgatatgcttagatgattaccattcactcgacagaactggaaggaaagagaagggggtgacagcacttgacccaagagctaacgactattacctcatgtatga

SEQ ID NO: 221041 - DNA, 393 bp, Gossypium hirsutum
catttctcaaaaatgagctccattgctttcaagcccttccacggcctccgccggagctgcgccgtccccacccctacttccactaccaccaccctttacaaacctgctgtcaaattccatgtctcagccgccaaaacttctccaaaactaagcaaccgcaacctcagggtagccatcatagggggtggtccggcaggaggctcagccgccgaaactctcgcgaaggctggcatagaaacgttcctaatcgaacgaaaactggacaactgcaaaccttgcggcggagccatcccgctttgcatggtgggtgaatttgacttgccgttggatatcatcgaccggcgagtcaccaaaatgaagatgatttcgccctccaacattgccgtcgacatc

SEQ ID NO: 221042 - DNA, 389 bp, Gossypium hirsutum
cccacgcgtccgcttttgtataactgtagcatatagtactagtaagcagtaatagcaatggcctcctccatgatctcatcggcaaccattgccaccgtgaactgctcctccccggcacaggccaacatggtggcccccttcaccggcctcaagtctgcctctgctttcccagtcactaggaaggccaacaacgacatcacttctcttgcaagcaatggtgggagagtgcaatgcatgcaggtgtggcctcctcttgggaagaagaagttcgagacactctcatacctccccgatcttacacccgtacagttggctaaggaagtagattaccttcttcgctctaaatggattccttgcttggaattcgaattagaggagggattcgtgca

SEQ ID NO: 221043 - DNA, 383 bp, Gossypium hirsutum
aaatcaactgcttcacaatggcctctacaaccatggctctttcttccccatcattcgccggtaaggcagtgaagttctccccttccacccctgaaatccagggaactggccgtgtttccatgaggaaaaccaccaagcctgttccttctggtagcccatggtacggtcctgaccgagttttgtacttgggtccactttccggtgagccaccatcttacttgaccggtgagttccctggtgactatggttgggacactgctggactctcagctgatcccgagacctttgctaggaaccgtgagctcgaagtcattcactgcagatgggccatgttgggagctcttgggtgtgttttccctgagcttgtggctaggaacggtgtc

SEQ ID NO: 221044 - DNA, 376 bp, Gossypium hirsutum
ctttgttttccaatagttcgtaacaatgtcggtctcacttcaagctgcagctaccctgatgcaaccaatcaaggttgctgcaccatcaaggaccaatgtgctgctcaggtcctcccagagcgtttctaaggccttcggtttggagcctgttggtgctaggctcacctgctctttgcaaactgacctcaaggacttggctcagacgtgtgttgatgctaccaagctcgctggtttcgctcttgctacatctgctcttgttgtctcgggagcaagcgctgaaggagttccaaagcggctaacctacgatgaaatccaaagcaagacatacatggaagtcaaaggaacaggaactgctaaccagtgcccaaccatcgat

SEQ ID NO: 221045 - DNA, 349 bp, Gossypium hirsutum
aacaaaatcagttgcttcacaatggcctctacaaccatggctctttcttgcccatcattcgccggtaaggcagtgaagttctccccttccacccctgaaatccggggaactggccgtgtttccatgaggaaaaccaccaagcctgttccttctggtagcccatggtacggtcctgaccgagttttgtacttgggtccactttccggtgagccaccatcttacttgaccggtgagttccctggtgactatggttgggacactgctggactctcagctgatcccgagacctttgctaggaaccgtgagctcgaagtcattcactgcagatgggccatgttgggagctcttg

SEQ ID NO: 221046 - DNA, 392 bp, Gossypium hirsutum
cttcacaatggcctctacaaccatggctctttcttccccatcattcgccggtaaggcagtgaagtgctcgccttccacccctgaaatccggggaactggccgtgtttccatgaggaaaaccaccaagcctgttccttctggtagcccatggtacggtcctgaccgagttttgtacttgggtccactttccggtgagccaccatcttacttgaccggtgagttccctggtgactatggttgggacactgctggactctcagctgatcccgagacctttgctaggaaccgtgagctcgaagtcattcactgcagatgggccatgttgggagctcttgggtgtgttttccctgagctgttggctaggaacggtgtcaagttcggtgaagctgtat

SEQ ID NO: 221047 - DNA, 355 bp, Gossypium hirsutum
  unsure (1)..(355): unsure at all n locations
cccacgcgtccggttccatgtgaacggcacttgcacatgggttagtcgatcctaagagacgggggaagcccgtccgacagcgcgtccagcgcgagcttcgaaagggaatcgggttaaaattcctgaaccgggacgcggcggctgacggcaacgttagggagtccggagacgtcggcggnggcctcgggaagagttatcttttctgtttaacggcctgcccaccctggaaacggctcagccggaggtagggtccagcggccggaagagcaccgcacgtcgcgtggtgtccggtgcgcccccggcggcccttgaaaatctcgaggaccgagtgccgtccgcgcccggtcgtactcat

SEQ ID NO: 221048 - DNA, 356 bp, Gossypium hirsutum
acaaaatcaactgcttcacaatggtctctacaaccatggctctttcttgcccagcattcgccggtaaggcagtgaagttctccccttccacccctgaaatccagggaactggccgtgtttccatgaggaaaaccaccaagcctgttccttctggtagcccatggtacggtcctgaccgagttttgtacttgggtccactttccggtgagccaccatcttacttgaccggtgagttccctggtgactatggttgggacactgctggactctcagctgatcccgagacctttgctaggaaccgtgagctcgaagtcattcactgcagatgggccatgttgggagctcttgggtgtgtt

SEQ ID NO: 221049 - DNA, 384 bp, Gossypium hirsutum
ctcaaattcagataacaatttcacagttgttttcttcactctctctctcagccgtggctgcagccatctccaccgtcgccgccgctgccgccgccaaccgagctctgggagtgtcagtcccaacctcagctttcatggggaagaaagtgagctcgagattcaacaacaccaggcaggttccttcgggaagttttaaggtgatggcggccgaaaaagagatagacgaagagacacagaccgaaaaggaccgatggaaagggttggcttacgatatttcggacgaccaacaagacattactcgagggaaagggatggtggattccttgttccaagctcccatgaatgatggaactcactatgctgtcatgagttcctatgaataca

SEQ ID NO: 221050 - DNA, 362 bp, Gossypium hirsutum
cccaacctaagttttcatggggaagaaagtgagctcgagattcaacaacaccaggcaggttccttcgggaagttttaaggtgatggcggccgaaaaagagatagacgaagagacacagaccgaaaaggaccgatggaaagggttggcttacgatatttcggacgaccaacaagacattactcgagggaaagggatggtggattccttgttccaagctcccatgaatgatggaactcactatgctgtcatgagttcctatgaatacatcagccaaggtcttaaaacgtacaatttggacaacaacatggatggtttctacatcgctcctgcattcatggacaagcttgttgttcacatcagca

SEQ ID NO: 221051 - DNA, 379 bp, Gossypium hirsutum
gtacaagaagacgtaccgatacgatgccgttttcgcccttggtttcgttactgtctatgatcagttgatggaagggtacccgagtgatgaggatcgagatgccatcttccaagcttatattaacgccttaaaagaggaccctcaacagtatagagctgatgcgcagaaattagaagaatgggcgcgagctcagacttctagttcgctagtcgagttttcatctagagatggagaggttgaagcgatacttaaagacattgcagaaagagctggtagtaaagggagtttcagttatagccgtttctttgctattgggttgtttcgtcttcttgagcttgccaatgcaactgaacctacggtgttggaaaagctctgtgca

SEQ ID NO: 221052 - DNA, 392 bp, Gossypium hirsutum
caagatctggttttgatctgatcatatcgtataaaaatatcaaaacatgtttgggagagcaccgaagaaaagcgataattccaaatactatgagattttgggagtatcgaaaaacgcttcccaagatgatctaaagaaagcttatagaaaagccgctattaagaatcatcccgataaaggcggcgatcctgaaaagtttaaagagttggctcaagcttatgaggtgctgagtgacccggagaagcgtgagatttatgatcagtatggtgaggacgcccttaaagaagggatgggcagcggtggcggtggccatgaccctttcgatatcttccagtctttctttggtggcaatccttttggtgctggtggaagcagccggggcagaagacaaa

SEQ ID NO: 221053 - DNA, 129 bp, Gossypium hirsutum
cccacgcgtccgggcaaaatggatccgtatcctcgggaaaaggattggctctgagggctgggcaggggggtcccagtcccgaacccgtcggctgcccggcgcactgctcgaaggctgctccccgcgggc

SEQ ID NO: 221054 - DNA, 356 bp, Gossypium hirsutum
cccacgcgtccgcccacgcgtccgtccacgcgtccgatatttagctatagcatgcactactagtacccactactagcaatggcttcctcaatgatctcatcggctaccattgccactgcctctccggcacaggctaacatggtcgctcctttcaccggcctcaagtctgcctctgctttcccagtcaccaggaaggccaacaacgacattacttctctcgcaagcaatggcggcagagtgcaatgcatgcaggtgtggcctcctactggaaagaagaagttcgagactctctcatacctccccgatcttacacccgtgcagttggcttaggaagtggattaccctcttcgctcaaa

SEQ ID NO: 221055 - DNA, 386 bp, Gossypium hirsutum
cccacactctcaaattcagttaacaatttcacagttgttttcttcagtctctctctcagccatggctgcagccatctccaccgtcgctgccgctgccgccgccaaccgagctctgggagtgtcagtcccaacctcagctttcatggggaagaaagtgagctcaagattcaacagcaccaggcaggttccttcgggaagttttaaggtgatggcggcggagaaagagatagacgaagagacacagaccgaaaaggaccgatggaaagggttggcttacgatatttcggacgaccaacaagacattactcgagggaaagggatggtggattccttgttccaagctcccatgaatgatggaactcactatgctgtcatgagttcctatg

SEQ ID NO: 221056 - DNA, 399 bp, Gossypium hirsutum
cccacgcgtacgaagaaacacaggttttgtatgatggttcaaacattgactcgcctgtatagtactcgaaatgtaggatcttttcgcctgtgtgataatgcaatgagacatcaccaccaccagcaacaaaacgcaaccgcggcaggcggtaataacgagcacgtggatgatgtccatgatcatctgcaaccaagtgaagataaatcaatggggcagcaaaatataggagagcctgcggttgaaactccccaggagaggccacaaacagatatggagcagatgaaggaaagattttctaagttgcttctgggagaagatatgtcacggggaggcaaaggtgttccttcggctttggctttgtcaaatgcagtgacaaacctagcagcatctgattttggg

SEQ ID NO: 221057 - DNA, 392 bp, Gossypium hirsutum
cccacgcgtccggccaacatggcctcattagcagcctccaccgctgccgcctgccttggcgtctctgaaatgctcggtaaccctctgattttcagtggtggagctaggtcatcggctccaacaccatccaactcatccattttcaagaccgttgctcttttctccaagaagaaggccgctcctccaaagcccaaggctgctgctgtcgccccggccgatgaagagctggctaagtggtacggtccggacagaaggattttcttgcctgaaggtctgttagacagatcggagatcccagagtacttgaacggagaagttcccggagactatggatacgatccgtttggtctgagcaagaagccagaagactttgcaaaatatcaagcatatga

SEQ ID NO: 221058 - DNA, 379 bp, Gossypium hirsutum
cattctttttcgttcttttttcccctaaatgttattttctcaaaaatggcgctcctccaatcctccgtctatcctccgtcaacacttcgttcttcgccgtcactgtcatgcacagcggcacacccgatcgcttcctcccatagagttccttccacttcgaattccttcgtcgcgttagaatcgtcatcgttaaagaccgttaactctatttcgagcgctaagaacaacagaaggaaaggcgttgtcggaaaggtgaggtcgagcctggagacagcgggagcaactgtggggcacgtgacggaggttacaaaggacaccttctggcccatcgttaacgccgcgggggataaaaccggcgtcctcgatatgtacactcaat

SEQ ID NO: 221059 - DNA, 288 bp, Gossypium hirsutum
cccatcattcgccgggaaggcagtgaagttctccccttccacccctgaaatccggggaactggccgtgtttccatgaggaaaaccaccaagcctgttccttctggtagcccatggtacggtcctgaccgagttttgtacttgggtccactttccggtgagccaccatcttacttgaccggtgagttccctggtgactatggttgggacactgctggactctcagctgatcccgagacctttgctaggaaccgtgagctcgaagtcattcactgcagatgggccatgtt

SEQ ID NO: 221060 - DNA, 391 bp, Gossypium hirsutum
cccacgcgtccggtcgactctggttagtcgaccactactggtcatttgatctacaagctaggtggtattgacaagcgtgtgattgagaggttcgagaaggaggctgctgaaatgaacaaaaggtcattcaagtatgcttgggtgcttgacaagcttaaggctgagcgtgaacgtggtatcaccattgatattgccctgtggaagtttgagaccaccaaatactattgcaccgttattgatgcacctggacaccgtgactttatcaagaacatgattaccggtacctcacaagctgactgtgctgatctcattattgactcaaccactggtggttttgaagctggtatctctaaagatggtcagactcgtgagcatgctttgcttgctttta

SEQ ID NO: 221061 - DNA, 395 bp, Gossypium hirsutum
atagttagctatagcatacactactagtacccactactagcaatggcttcctcaatgatctcatcggctaccattgccactgcctctccggcacaggctaacatggtcgctcctttcaccggcctcaagtctgcctctgctttcccagtcatcaggaaggccaacaacgacattacttctctcgcaagcaatggcggcagagtgcaatgcatgcaggtgtggcctcctactggaaagaagaagttcgagactctctcatacctccccgatcttacacccgtgcagttggctaaggaagtagattaccttcttcgctcaaaatgggttccttgcttggaattcgaattagaggagggattcgtgcaccgtaaatactcgagcctacccacgtacta

SEQ ID NO: 221062 - DNA, 385 bp, Gossypium hirsutum
caaaatcagttgcttcacaatggcctctacaaccatggctctttcttccccatcattcgccggtaaggcagtgaagttctccccttccacccctgaaatccggggaactggccgtgtttccatgaggaaaaccaccaagcctgttccttctggtagcccatggtacggtcctgaccgagttttgtacttgggtccactttccggtgagccaccatcttacttgaccggtgagttccctggtgactatggttgggacactgctggactctcaaatcttcagtgagggtggacttgactacttgggtaacccaagcttgatccatgctcaaagcattttggccatctgggcttgccaagttatcttgatgggagccgtcgagggtac

SEQ ID NO: 221063 - DNA, 383 bp, Gossypium hirsutum
aagcgtttgtctcagatttttgaagatggcccgtaccaagcagacagcccgtaagtcgactggtgggaaggctccaaggaagcaacttgctaccaaggctgcccgtaaatctgccccaaccaccggtggtgtgaagaagcctcatcgctaccgtcctggaactttgctcttcgtgaaattcgaaagtaccaaaagagtactgagcttcttatcaggaaattgcctttccagaggcttgttcgtgaaattgcccaggacttcaagactgatttgcgtttccagagccatgctgttctagctctccaggaagctgcagaggcataccttgtgggtctttttgaagacaccaacctttgtgcgatccacgccaagcgtgtcacaat

SEQ ID NO: 221064 - DNA, 395 bp, Gossypium hirsutum
cccacgcgtccgggggcattagcaatagctacaaaactgccacaactacgcccaccaccatgccatgcgtcggcatcccatacatgcaaaccagccaatggatttcagatggggattttatacgtggccttatatctaattgcactaggcactggtggcctaaaatctagtgtctcaggatttggaactgatcagtttgatgacaaagatgaaaaggagaaagcccaaatgacctattttttcaacaggttcttcttcttcattagtaccggaaccctgacggcggttacggtgctcgtctacttacaagatgaagtcggtcgaagctggagttatggaatctgctctgtttccatgtttgtagccatcttgatattcttatcaaggactaaaag

SEQ ID NO: 221065 - DNA, 401 bp, Gossypium hirsutum
cccacgcgtccggatggagtcgatattgttcaatgggttcgaaaaatgacagactcaaacaaagaaagtgtcctcaaagtccttgatcccagactcccatcagttcctctccaggaagtgatgcacgtattctacgtcgccatgctttgcgtcgaagaacaagctgtagagcgaccaacgatgagggaagtggttcaaatcctaaccgaactcccaaaaccaccaaactcaaaacagggagacaccacaatcaatgagtccccaacatcaccatcaccagacacaactctagactcacctacaacaacaatcacaaaggacccaaaagaccagcaacaacagcccccagcacctaaatcaacaccacctgatcttcttagcatttaaggttgtcaatgttt

SEQ ID NO: 221066 - DNA, 397 bp, Gossypium hirsutum
cccacgcgtccgcaggattgaagagataagattatagtgaaaaactaaacataataaagccccttcgacttgcttcattgatttgccctctcaaagcccaagaaaaatggcttctgcttccgctactctcctcaagtcttcacctattatcgacaagtccgagtggattaagggccaaaacctccgccacccttcggtttgttttgtacggtcacaccctacatcggccgcctttgccgtccgtgctagttcatatgccgatgagcttgttaagaccgcgaaaactgttgcatctccaggtcgtggtattttggccatggatgaatcaaatgctacatgtgggaaacggcttgcctcgattggtctcgagaataccgaggcaaaccggcaagcttac

SEQ ID NO: 221067 - DNA, 385 bp, Gossypium hirsutum
  unsure (1)..(385): unsure at all n locations
gaaaaacttaatcatgcctcggttgacgttggtgtcctccatcatccttctgctatgctccgtcgccgccggatcaactttcgaggactccaaccccatccagatggtatccgatggcctcagcggcttcgaatcctccgttcttcgtgtcatcggtcacactcgtcatgctctctccttcgcccgttttgcatacaagcatgggaagaggtatgaaaacgtggaggagatgaagctacggtttcagattttcaaaggcaacttggatttaatcagatccactaacaagaagggactgccttacactctngctgtcaatcagtttgctgattggagctgggaagagttccaganacacagattggggctgctcaaactgctctgt

SEQ ID NO: 221068 - DNA, 365 bp, Gossypium hirsutum
cttttgtataactgtagcatatagtactagtaagcagtaatagcaatggcctggtccatgatctcatcggcaaccattgccaccgtgaactgctcctccccggcacaggccaacatggtggcccccttcaccggcctcaagtctgcctctgctttcccagtcactaggaaggccaacaacgacatcacttctcttgcaagcaatggtgggagagtgcaatgcatgcaggtgtggcctcctcttgggaagaagaagttcgagacactctcatacctccccgatcttacacccgtacagttggctaaagaagtagattaccttcttcgctctaaatggattccttgcttggaattcgaattagagga

SEQ ID NO: 221069 - DNA, 394 bp, Gossypium hirsutum
aaaatctgtgcctgcccttttctctgcacacctcgggatatcagtttcaactccactcatcccacgggttgagtaccgagtccatatatcgttaagttcaaggaaggaacttgggcatcatgggtcttaaggcattagactatgagacaatgaatgaaaacgtgaagaaagttcaatatgcagttagaggtgagttgtatcttcgagcttctgagcttcagaaggaagggaagaagattattttcacaaatgttggcaatcctcaagctcttggacagaagccactgactttccctcgtcaggtggttgctttgtgccaagctccatttctgctagatgatcctaatgtaggacttatatttcctgctgatgccattgcaagagcaaaacatta

SEQ ID NO: 221070 - DNA, 388 bp, Gossypium hirsutum
caccatcactgcctactcctcagccatggtaaccaccacagctgccaccgtgtcacattttttcggtacccgtatccaaacctctaacccaagctccggtagaatccaagctaggttcggctttggaaccaagaaagcaccacccgcaccaaaaaaggccgcccctaaacggccatccgatcgccttgtttggttccccggcgcaaacccaccggaatggcttgacggtacaatgatcggagaccgtgggttcgatcctttcgggtttgctaaaccggctgaatacttacagtacgatttggactcgttggaccaaaacttagccaagaatgtggctggtgaaattataggggtgattagcgagacggcggagcttgaaccgacgccg

SEQ ID NO: 221071 - DNA, 396 bp, Gossypium hirsutum
tgatgcttcactgctgctggactccacaagaaggagcttgtctgagaaggagacagacaggagctttggcctaaggaatttcaggtacattgagaccatcaaagaagctgtagaaagggaatgtcctggagttgtttcttgtgctgatatccttgttctgtctgctagagaaggcatcgtttcgttgggaggcccttacattcctctcaaaactggaagaagagacggtagaaggagcagagcagatgttgtggaggagtatcttccggaccacaatgagaccatctctggcgttctcgacaggtttgccgccatgggtattgacacccctggagtcgttgccctcctaggagctcacagtgtcggcagaactcactgtgtgaagctggtgcatcg

SEQ ID NO: 221072 - DNA, 284 bp, Gossypium hirsutum
ctgaaaacgcaaaaccatggcctctgcttctctcctcaagacttcaccagttttagacaagtctgagtgggttaagggtcacacccttcgccaaccttccacttctgcggtgaggtgccaccctgttgcaccctctggactaactgtgcgtgcaagctcatatgccgatgagcttgtcaagactgctaaagctattgcttctcctggccgtggaattttggccatggatgagtccaacgctacctgtgggaaacgtttggcctcaatcgggctagaaaacacag

SEQ ID NO: 221073 - DNA, 284 bp, Gossypium hirsutum
atatttagctatagcatacactactagtacccactactagcaatggcttcctcaatgatctcatcggctaccattgccactgcctctccggcacaggctaacatggtcgctcctttcaccggcctcaagtctgcctctgctttcccagtcaccaggaaggccaacaacgacattacttctctcgcaagcaatggcggcagagtgcaatgcatgcaggtgtggcctcctactggaaagaagaagttcgagactctctcatacctccccgatcttacacccgtgca

SEQ ID NO: 221074 - DNA, 395 bp, Gossypium hirsutum
cccacgcgtccgcccacgcgtccgtgatggcagaatgtattaccaatatgaattggagccaccccatgtattgattaccgcaactgcagccggtaatcgcctttacctattcagcgtaaccggaagtggtcttcaatggaagaggcattaccaggatttaaagaggatatccgagtcttttcgtgtaatctagttttggatctccctggattatgacatgagtagattagtagtgatggatatttttactctgtaatttaaagttgcaacaaaaacaaagagtgtatttgcagcacagttataaaatgtgcaactttcttcaaagtaagatttttgctgaaaagctatacagcttgctagaagccacttatctgaacttgggataagtgtcagat

SEQ ID NO: 221075 - DNA, 371 bp, Gossypium hirsutum
  unsure (1)..(371): unsure at all n locations
taaaaattgaaatcataaacaaaaacacttgcagttttctgaatggggacgatagttcaaactaccgttgtcactgtttttctttgtcttctttttcctattgtcttttccacatccaatgacggattgttcagaattggactgaagaagagaaagtttgatcgcaacaatctgttagctgcccaacttgattccaaggaaggagaagcgttgagaggttcttttagaaagtatcttcatggcaacttacaggagtcaaaggatattgatatagtggcactaaagaactacatggatgctcagtactntggtgaaattggtattggcacgcctccacagaacttcactgtaatttttgacactgggagttc

SEQ ID NO: 221076 - DNA, 394 bp, Gossypium hirsutum
cccacgcgtccgcccacgcgtccgtccacactttaaaattcagttaacaatttgacagttgttttcttcagtctgtctctcagccatggctgcagccatctccaccgtcgctgccgctgccgccgccaaccgagctctgggagtgtcagtcccaacctcagctttcatggggaagaaagtgagctcaagattcaacagcaccaggcaggttccttcgggaagttttaaggtgatggcggcggagaaagagatagacgaagagacacagaccgaaaaggaccgatggaaagggttggcttacgatatttcggacgaccaacaggacattactcgagggaaagggatggtggattccttgttccaagctcccatgaatgatgggactcactatgct

SEQ ID NO: 221077 - DNA, 373 bp, Gossypium hirsutum
cccacgcgttcgaaaggagtcaaggtatgccatcgaatgagaggaaggagagctggttctaatctgtaccttgatgtacatattgtggttgatcccttttctagtgttagtactgcacatggcattggcgaaaatgttcgtcaccaaattcataaatcccaccctgaagtaaccgaagttttcatacacattgatcctgcctatgtagagttctcccctgatttaatggaccaaaatgaaggtttgaagacaatcactgaacagaatagtaacatgtctgtcggtgaagagaatgttcaagcaattgtttctcatcttctctcatcaaagttttcaaagaaatttaaggtcgagcgcatcacccaacacacct

SEQ ID NO: 221078 - DNA, 363 bp, Gossypium hirsutum
gcctcactcgccgtctcgcctcttgcttattggttcaagatctggttttgatctgatcagatcgtataaaaatatcaaaacatgtttgggagagcaccgaagaaaagcgataattccaaatactatgagattttgggagtatcgaaaaacgcttcccaagatgatctaaagaaagcttatagaaaagccgctattaagaatcatcccgataaaggcggcgatcctgaaaagtttaaagagttggctcaagcttatgaggtgctgagtgacccggagaagcgtgagatttatgatcagtatggtgaggacgcccttaaagaaagggatgggcagcggtggcggtggccatgaccctttcgatat

SEQ ID NO: 221079 - DNA, 280 bp, Gossypium hirsutum
gaacgtacaagcagagctgtgacactggggatgggcaatgttgggggctgcgggtgttttcatgccagggttattaaccaaggtggggattctaaacactccatcggggtactcagctggaacagcggactacttcactgacaccacatctttcttcatggtagagctaattaacatcggttgtgatgaagggagacgatctgctgacattatcaagccagggcgtgttaatacagaccccatcttgcctaacaacaaggtgaccgggactgatgttgga

SEQ ID NO: 221080 - DNA, 390 bp, Gossypium hirsutum
  unsure (1)..(390): unsure at all n locations
caagcttctattcagttttgtaagagctatggctaaggacattgaggttggtggtgagttccaggccaaggactaccatgatcctccacccgctccattggtagacgctcaggagttagccaagtggtctttttacagggctgtcatagctgagttcattgccactctcctctttctctacatcactgtcttgactgtgatcggttacaagacccagaccgacctngctaagggcggtgaagattgtggaggcgttggcattctcggcattgcttgggcttttggtggcatgatttttatccttgtttactgcactgccggtatctctgggggacacatcaacccagcagtgacctttggacttttcttggctaggaaggtgtcgttagt

SEQ ID NO: 221081 - DNA, 381 bp, Gossypium hirsutum
agccattccaccattcaattaccctgtcaaccttgccgtttcaaaaatagcaccggctttaattgcaggaaactcccttgtactcaagccacctacacagggtgctgtttcagctcttcatatggtgcactgctttcacttggctggctttcccaaagggctcattagctgtgtgacagggaaaggctctgagattggtgatttccttactatgcatcctggagttaattgtataagcttcactggtggagacactggtattgctatctcaaagaaggcaagaatggtccctcttcaaatggaattgggaggaaaagatgcttgtatcgtactcgaggacgccgacttagatttggttgctgcaaacataataaaaggagg

SEQ ID NO: 221082 - DNA, 380 bp, Gossypium hirsutum
cccacgcgtccgctgagtttaagcatatcaataagcggaggaaaagaaacttaccaggctacttcggcaatgtaatctttacgactgcactaattgctgaagctggtgatctcgaaaccgaatcgtttactgacaccataaagaggattcatgaacgattaaatcagataaatgatgaatatttaagatcagctattgattacattgaaaaagtgcctgatttaaacaccttggttagaggaccgcatacttttcgatgcccaaaccttgttgttgttccatggaactggttgcctatatatgaggcagatttcggatggggtcgtcccatatatatggggccagggaatgtcgtccaagaaggtaaaatttacatgcta

SEQ ID NO: 221083 - DNA, 373 bp, Gossypium hirsutum
cccacgcgtccgtgcagatcttcgtcaaaaccctgaccggcaagaccataactgtggaagtcgaaagctctgacaccattgacaacgtcaaggcaaagatccaagacaaggaaggcatcccaccagaccagcaaaggctcatatttgccgggaaacaactcgaggacggtcgcaccttggccgattacaacatccagaaggagtccaccctccatttggtattgaggcttcgtggtgggatgcagattttcgtcaagacgttgactgggaaaaccataactttggaggtggagagttccgatacgatcgacaatgttaacgcgaagattcatgacaaagaaggaattccaccagatcagcaaaggttgatttt

SEQ ID NO: 221084 - DNA, 302 bp, Gossypium hirsutum
ctatactacacattaaagatgtgcctgcccttttctctgcacacctagagatatcaggttcaactccactcatcccacgggttgagtaccgagtccatatatcgttaagttcaaggaaggaacttgggcatcatgggtcttaaggcattagactatgagacaatgaatgaaaacgtgaagaaagttcaatatgcagttagaggtgagttgtatcttcgagcttctgagcttcagaaggaagggaagaagattattttcacaaatgttggcaatcctcaagctcttggacagaagccactgac

SEQ ID NO: 221085 - DNA, 382 bp, Gossypium hirsutum
  unsure (1)..(382): unsure at all n locations
aaccccaaccatcgtttatcaaggtttcttaaactctctcccctgcagctccttggcagctatgctccagcaagagtggcatgttctgcccatcacgagcgtttcttgtgaaaccagcgaggacccatatggtcaaaaacgaaaagggaatgaggatcacatgccaggccactagcatccctgctgatagagtgccagacatgggcaagaggcagctcatgaatctgcttctgttgggggctatttcactcccctcaggtttcatgttggttccttatgcagccttctttgtgccatctgggggacggngtaccggtggtggcaccgttgccaaggacgcaatcgggaatgatgtaattgctgaagaatggctcaagactca

SEQ ID NO: 221086 - DNA, 382 bp, Gossypium hirsutum
ctcaattcccccacctcattgttgtgtcaaaatggccactgtttgtgcttcttctgccgttgcagccgttgccatctcatcccccagttcccagaggagtggatcagtagtgaggacaacaaaggcttctttccttacagggaagaaacttcgatcagtcaaaaagtacacaaaaccagcagcagtccgaaccgttccggtgtgtgcagtggctgaccccgaccgacctctttggttcccaggcagtactcctcctccatggctcgatggcagcctccctggagacttcggttttgatcctctaggccttggatcagaccctgagaccttgagatggaacgtacaggcagagctcgtccattgcagatgggcaatgttagga

SEQ ID NO: 221087 - DNA, 381 bp, Gossypium hirsutum
cccacgcgtccgcccacgcgtccgatcactcccaatactttcataacatttcacgaacttcactctccagtctccaatggcggctgccgtctccaccatcggtgctgtcaaccgagcaccgttgagtttgaatggatcaggtgccggagcttctgctccaagctcagctttcatggggaacagcttgaagaaagtgagcgctaggttcaacaacaacggcaaggctccagtgggaagtttcatgattgtggctgccaaagaaatcgacgaagacacacagaccgaccaggaccgatggaagggtcttgcttatgatatctccgatgaccaacaagacattaccagagggaaaggtatggtcgactcattgttccaagctcc

SEQ ID NO: 221088 - DNA, 380 bp, Gossypium hirsutum
cccacgcgtccggccacccttccctgatttcatttcttctgtactcacagtaatcacctctccaaaaccctagctctttcactcactgccgccaatttcaaccaattatttgcttataagcgtcgaaaacgatgtcggacgacgagcgagaggagaaggagttggatctcacctcccctgaagttgttactaaatacaagagtgctgctgagatcgctaacaaagcgctgcagttagtggtgaaagaatgcgcaccaaaaactcagattgttgacacttgcgagaagggtgatgcatttatcagagagcaaacaggcgatatgtgtaagaatgctcagaggaagattgagaggggtgttgccttccccacttgtctttct

SEQ ID NO: 221089 - DNA, 366 bp, Gossypium hirsutum
cccacgcgtccggagaagaaaacattgtcaggtcctcagtgctgttcgaatccaccaacattggattctgcaagtggggctggtcacgttgagaatcttgctggtctcaacacttatgtttctgggtctcttcaatctaagcttgctgtttttcttatctctgatattttcggatatgaggctccaaactttagaaagctcgcggacaaggttgcagccgctgggttctatgtggtggctcctgacttcttttatggagaaccctatgaccctaataaccctgatagacctctatctgtttggataaaggatcatggaccggataaaggttacgaggatgcaaagctcgtaattgacgctttgaaa

SEQ ID NO: 221090 - DNA, 378 bp, Gossypium hirsutum
ccggatttcccgggctcaactttcccatttccaatctccagctcccaaggtaattttgccgttcagaaacatagcggttggccggcccgaagaggctactcaccccgatgctctcaaggctgctttggctgagttcatctcaaccctgatcttcgttttcgctggatcgggctcaagaatggcctttaacaagttgactgacaacggagcaaccaccccggctggtctcgtagccgccgctctagctcatggcttcggtcttttcgtcgctgtctccgttggcgccaacatcttatgtggccacgtcaaccctgccgtcaccttcggtgcttatgttggcgggaacatcactctcttgcgcggcattctttactggat

SEQ ID NO: 221091 - DNA, 326 bp, Gossypium hirsutum
cttacctcccgatccaaccacaagagcttggtcctggctgctgccgtcaaaacaatgggtgaccgcagccgagacttcctaggcggtgaaatccgcaacaccatcagattctagtctattgatgcggtcgtgaaagcggatttcaaggcatgctgggtagcccacaggctgtgctcccatgggtcacattgtgttcaagggattcatgacgtataacccctagaacccttactggttcaaccgtgaccgcgtcattctgggcgctggtcatagttgtatgctgcagactgctctgctctacctggctaggtacgacagtgtcctgg

SEQ ID NO: 221092 - DNA, 380 bp, Gossypium hirsutum
cttaaaaacagcaaagaagatgtcatcatcaacggcggccaatcaagtgagggcatctcacatactcatcaatcaccaaggctctcgtcgtaaggcttcttggaaggatccagaaggtcgcgtcatctccaccaccacccgagacgccgctgtctcacagcttaaacttctcggcgacgacatcgtttccaacaaggctaagttcgacgaggttgcctctcgctactcggattgcagctccgctaaacgtggcggtgatctcggctgcaaggagtgtgcctcaactcagttcttattgttaattatctgagacctttagttggtttataccagcattacgggacataatgcaaactaaaaaccttatacaaactttttgg

SEQ ID NO: 221093 - DNA, 380 bp, Gossypium hirsutum
aagaaatcaaaagacaaaatagcctataacaatggcactcagaatgtgggcttgttccactgccaatgcactcaaaatctcttgttcctccaaacctaatgtttcccttgctttctcactctctagatgcttttccactgttttggatgggctgaagtatgctaattcacatgaatgggtgaagcatgaaggtcctgtggctaccattggcatcactgaccatgctcaggaccatcttggagaagtagtgtttgtggagttgccggaaccaggtggttcagtgagccaaggaaaagggtttggagcagtggaaagtgttaaagcaacaagtgatatcaattccccaatctccggcgaagtcgtggaggttaactccaagc

SEQ ID NO: 221094 - DNA, 336 bp, Gossypium hirsutum
  unsure (1)..(336): unsure at all n locations
cccacgcgtccgattcaaggctcataatttgacccaaaatggcctctgtttgagcttcttcggctattgcagctgttgccatctcatcccccagttcccagaagactggatcagtagtggggacaacaaaagcttctttccttacagggaagaaacttagatctgtgagaaagtacacataaccagctgccggaccaacattttcagtgtgcgccgncgncgaccccgacagaccccttaggttccagcagcactcctctccatagctgatggcagctccctgtgacttgagttcatcctctcgtcttggtctgacccgagacatgagatgaacgt

SEQ ID NO: 221095 - DNA, 366 bp, Gossypium hirsutum
cccacgcgtccgtctggtttcactgtcagagctcatcagacaccggccgagcctgagactggacgcagagccatgttgggtcttgttgctgctggtttggccactggctcctttgttcaagctgtgcttgccgatgccagaagcatcaaggttggcccacctccccctccctctggtggactgcctggaactctgaactctgatgagccaagagaccttgttctgccatacaaagacaggttcttcctccaaccagttactccagctcaggcagcacagagagcaaaggaatcagccaaggacattctgggtgtcaagaacttgattgacaaaaaagcctggccttatgtcatgaatgatctccgt

SEQ ID NO: 221096 - DNA, 372 bp, Gossypium hirsutum
ccaataaaccaccattgtttgctcctttaaatctcccccccactatctcggtgcgctaacttcagctattgcagctgttgcattcctttagggcatattcgatactcgctgatctatatatacaactacatatgctattgaactcacagggatacagacttagatctgtgctagacgtcacataaccagctgagggaccaacatttccagtgtgcgccgccgacgaccccaacagaccccttaggttcccaggcagcactcctgctgcatggctggatggcagtcttcctggtgactatggtttcgatcctctcggtcttgggtctgcccctgagacattgagatggaacgtacaagcagagctggttcact

SEQ ID NO: 221097 - DNA, 368 bp, Gossypium hirsutum
cccacgcgtccgaagagacttgatggggaagtccctaatgaagcgtgtgatgcagacctggcttcctgcaagcaatgctctcctggaaatgatgatctttcaccttccctcacctagcaaggctcagaagtatcgtgttgagaacttgtacgagggtcctcttgatgatatctatgccaatgctatcagaaactgtgatcctgagggtcctcttatgctctatgtttcaaagatgattcctgcttctgataagggcagattctttgcttttggtcgtgtcttttctggcaaagtctcaactggattgaaggttaggatcatgggtccgaactatgtccctggtgagaagaaagacttgtttgttaaga

SEQ ID NO: 221098 - DNA, 383 bp, Gossypium hirsutum
cccacgcgtccggcagctgttgccatctcatcccccagttcccagaagactggatcagtagtggggacaacaaaggcttctttcctttcagggaagaaacttagatctgtgagaaagtacacaaaaccagctgccggaccaacatttccagtgtgcgccgccgccgaccccgacagacccctttggttcccaggcagcactcctcctccatggctggatggcagtctccctggtgactttggtttcgatcctctcggtcttggttctgaccctgagacattgagatggaacgtacaagcagagctggtgcactgcagatgggcaatgttgggagctgctggtattttcatcccagagttcttaaccaagattgggattttaaa

SEQ ID NO: 221099 - DNA, 376 bp, Gossypium hirsutum
agccttcggttttcccagaaattaaaaaggaggatgttaggggatcccatgatgtctcttacaatggcaactaatctctcaaaatcaattttgaagccaaagctggagacccaagtgatccccaagggttcatccaaatcattgattggatgctcctccagcaatcctttctccttcgacaaataggcttcatcacttcaaggccttctcagcggctctcgctctttcttccattcttctttcggcttcactccctgctggtgcggacattgcggggctcactccttgcaaagagtccaagcaattcgccaagcgcgagaagcagcagatcaagaagctggaatcctcgttgaagctttacgcccccgatagcgca

SEQ ID NO: 221100 - DNA, 375 bp, Gossypium hirsutum
attcaccatgtctgacaggtgcggctactgtgactgcgctgaccgcagccaatgcacgaagggaaacagcaacaccatgatcattgagactgagaagagctacatcaacactgctgtgatggatgctccagctgagaacgatggcaagtgcaagtgcggtactggctgcagctgcacagactgcacctgtggccactaagccaacatacaatggtcatgcttcaagtcatggcatatatagggatctaaataatgaatttaagggtgaataatttgtctgttgtagttagagaggtgacttatatctggcagctaacctttagatcctttactatgatgtaatggctatgcttatggccttatctggctaatgaa

SEQ ID NO: 221101 - DNA, 384 bp, Gossypium hirsutum
cccacgcgtccgttttgttccacctttttctttctttttctccaaagccatcatgaatctcattaataggctcagccccaagcgtctctttcgatctaataaaaaagatagatccatcgtctccaagttcgacccctcctcctatagttccggttccgccgtttcctcctcttgctcctccgaatccgtctcttccaccctcaaagaacatcagtacccttccacggctaccgctggcttcgtaacgcccaccagtgttttgccccaaacatcaggtgactggtccgattttcccgctaatttttatctagaactttgccaggcgtttaaaatgttagacaaagataacgacggggttatatcgagaagcgagctcgaggcttt

SEQ ID NO: 221102 - DNA, 354 bp, Gossypium hirsutum
cccacgcgtccggccggtgcaaccgcagctaaagttagcgccacagccaaggttgcagcctctccagtcccaaggggcagcatcaaggcctccctcaaagacgttggtgttgctgttggggcaactgctgcaagcgtaatccttgccagcaatgccatggccattgaagtcttgctcggcagtgacgatgggggtctggctttcattcccaaagaattcagcgtaagcccaggggagaagattgtgttcaagaacaatgccggattcccacacaatgttgtgttcgatgaggacgaaatcccaagcggcgtcgacgtatccaaaatctccatgcctgaagaagagctactcaat

SEQ ID NO: 221103 - DNA, 379 bp, Gossypium hirsutum
cccacgcgtccggatgtcttggttcatggagagcctgagagaaacgatatggtggagtactttggtgagcagttgtctggttttgcattcactgttaatggatgggtgcaatcttacggatctcgatgtgtcaagccaccaatcatctacggtgatgttagccgccccaagccaatgactgttttctggtcatctaccgcacaaagcatgactgcacgcccaatgaagggaatgcttactgggcctgttaccatccttaactggtcctttgtcagaaatgatcagccccggtttgagacttgctaccagattgccttggccatcaaggacgaagtggaggatcttgagaaggccggtatcaatgttatccaaattgacg

SEQ ID NO: 221104 - DNA, 381 bp, Gossypium hirsutum
gtagccgccgcctgcgtctctctcttcatctctctgaaccaaaaagtctttagcttttcgcttcgagagagaccatgttggtttaccaggatctcatctccggtgacgagcttctttctgactcattcccctacaaggaaatcgagaatgggatgctgtgggaagttgagggaaagtgggttgtgcaaggagctgtcgatgttgacattggtgccaatccttcagccgaaggtgctgatgaggatgaaggtgttgatgaccaagctgtgaaggttgttgacattgttgacactttcaggcttcaagagcaaccccctttcgacaagaagcagtttgtcgtgttcatcaagaagttcatcaagaacttgacaccaaaactgg

SEQ ID NO: 221105 - DNA, 363 bp, Gossypium hirsutum
cttcctcctcctttcctccgtcgttgcttcggccgtcgtctccgacgttaatagcgacggcgatcctctcatccgtcaagttgtttccgatggtggtgtcgaggaggactccgatgaccatctccttaacgcggagcaccacttcacgctgttcaaatccaagtatgggaaaacctacgcatcccaggaggagcacgattaccgactgggagtcttcaaggctaacctgcgtcgggccaagcgtcatcagctcctggaccccagtgccgtccatggcgtcacaaagttttccgatttaactccatcggagttccgccgccagtatctaggcttgaaaccgctcaagctcccagccgatgctca

SEQ ID NO: 221106 - DNA, 415 bp, Gossypium hirsutum
cggtcggaatttccggtcggccccacccgtccgaccaccatggttggattctacattgccccagctttcatggccaagctggttgtgaacatcaccaagaactacatgacccttcctaacattaaagttcctcttatcttgagtatttggggaggcaaaggtcaaggaaaatctttccaatgtgagcttgtctttgccaagatgggaatcaaccccattatgatgagtgccggagaattggaaagtgggaacgccggagaaccagccaagttgatcaggcaaaggtaccgtgaggccgccgacattatcaagaaagggaaaatgtgttgcctctttatcaacgatctcgacgctggagccggtcgtatgggaggaaccacacaatacacagtgtacaaccaaatggtgaacgcca

SEQ ID NO: 221107 - DNA, 311 bp, Gossypium hirsutum
  unsure (1)..(311): unsure at all n locations
ccaaggttaaccttacccaaaaggaaaatgggttttggtttccgttcctttcctaaagctttaaccttttttcgccaagtccaaggggtttaagggccaaaacctccgccacccttcggtttgttttgtacggtcacaccctacttcggccgcctttaccgtccgtgctagttcatatgccgatgagcttgttaagaccgcgaaaactgttgcatctncaggtcgtggtattttggccatggatgaatcaaatgctacatgtgggaagcggcttgcctcgattggtctcgagaataccgaggcaaaccggc

SEQ ID NO: 221108 - DNA, 375 bp, Gossypium hirsutum
cggacgcgtgggcggacgcgtgggttttcattttcaaaccccactccccccatggctggtctcaagcttatttgtggcctagtattgttgtgcatgttggttttggaacccatggccacaactgctctcacatgtggacaagtggcaagccaaacgggtagttgtataaggtatttgcagcgtggagggaaccctccagctgcttgctgcaacggagttaggaacctaaacaggcaagctagaaccacccgtgaccgtcaaactgcatgcagatgcttgcaaactgccgctaggaccatctccggtatcaatactaaattggctgccggtcttccggccaaatgcggtgtcaaaattccttacaagatcagcccc

SEQ ID NO: 221109 - DNA, 376 bp, Gossypium hirsutum
gaaagagcttcttcactttgacaacaatactcactttctcttacagagattgagagaaaatcacaaacacacatttatatagcacagtgatcatcatggctcttcacttgtcttgggttttcgtttttggtattctaggcaacgctgtttcattcatggtttccttggctccactgccaacattttaccaaatattcaagaagaaaacatcggaaggtttccagtcgattccctacgtggtttcgctcttcagtgcgatgctttggatttactatgcactgcttaagaaagatgccattttcctcattaccatcaacactttctgcgttttcattcaaactttttacattgttacttacttttactacggcccaaa

SEQ ID NO: 221110 - DNA, 380 bp, Gossypium hirsutum
ttcaattttcactagctacttgacttcattgcttaattattatttgcagaaagatggattcaattaaatcgcatgcagtatgtcttccaagcccagcacaaggtcatattaaccccatgatgcaactggccaagctcttgcactctagaggcttccatataacctttgtcaactccgagttcaatcatagacgatttatacggtctagaggggaagaagctgttaagggtctgcctcatttccggttcgaagccatacccgacgggctgccaccttccgattctgatgcgactcagtctgttccggcactatgcaattccacacggaaaaattgtttggctccattcttggagctactatctaagcttaattcctcaccc

SEQ ID NO: 221111 - DNA, 379 bp, Gossypium hirsutum
cccacgcgtccggagactcttttgtatacctgtagcatatagtaatagtaagcagtaatagcaatggcctcctccatgatctcatcggcaaccattgccaccgtgaaccgctcctccccggcacaggccaacatggtggcccccttcaccggcctcaaatctgcctctgctttcccagtcaccaggaaggccaacaacgacatcacttctcttgcaagcaacggtgggagagtgcaatgcatgcaggtgtggccgcctcttgggaagaagaagttcgagactctctcatacctgcccgatcttactcccgtacagttggctaaagaagtagattaccttcttcgctctaaatggattccttgcttggaattcgaattag

SEQ ID NO: 221112 - DNA, 373 bp, Gossypium hirsutum
gtttcccatgaaagtagccaaggaagggttgatgaccatccttcttttagaccccatttgccacctgaattctacaagaaacctactgtgaaagtctattgcaaagctgatcctaattttcatctcaccatcagagacggtaaagttattcttgctccatctgatccctctaatgaattccagcactggtacaaagatgagaagttcagcacaagtgtgaaagatgaagtgggtttcccaagcttttctctggttaataaagccactggtcaagccattaaacattccattggagcttcttatcctgtccaactggtaccttacaaaccagatcatcttgatgagtcagttgatttcaggtgctctgatgtgt

SEQ ID NO: 221113 - DNA, 386 bp, Gossypium hirsutum
tttagctatagcatacactactagtacccactactagcaatggcttcctcaatgatctcatcggctaccattgccactgcctctccggcacaggctaacatggtcgctcctttcaccggtctcaagtctgcctctgctttcccagtcaccaggaaggccaacaacgacattacttctctcgcaagcaatggcggtagagtgcaatgcatgcaggtgtggcctcctactgggaagaagaagtttgagactctctcatacctccccgatcttacacccgtgcagttggctaaagaagtagattaccttcttcgctcaaaatgggttccttgcttggaattcgaattggaggagggattcgtgcaccgtaagtactcgagcttacccac

SEQ ID NO: 221114 - DNA, 386 bp, Gossypium hirsutum
cgggaagctgcaaatgtatttggatagccaaaaacaaacacagagttcatcccatacaatggggaagggttcaagctgtcaataccatcaaaatggaacccaagcaaagaggttgagtacccaggtcaagtcctgagatacgaggacaacttcgactccaccaccaatgttgctgtcctggtcactcctactgataagaagtccattactgacttcggttcccctgaaaatttcctctctaaggtggactatctgcttggaaaacaagcatactctggcttaactgatgctgagggtgggtttgactcaaatgcagtggcaactgcaaacatattggagacttcaactcctgtgatcggagggaaacagtactacttcttgtcggt

SEQ ID NO: 221115 - DNA, 381 bp, Gossypium hirsutum
cccacgcgtccgcccacgcgtccgccacactctcaaattcagataacaatttcacagttgttttcttcactctctctctcagccatctccaccgtcgccgccgctgccgccgccaaccgagctctgggagtgtcagtcccaacctcagctttcatggggaagaaagtgagctcgagattcaacaacaccaggcaggttccttcgggaagttttaaggtgatggcggccgaaaaagagatagacgaagagacacagaccgaaaaggaccgatggaaagggttggcttacgatatttcggacgaccaacaagacattactcgagggaaagggatggtggattccttgttccaagctcccatgaatgatggaactcactatgct

SEQ ID NO: 221116 - DNA, 383 bp, Gossypium hirsutum
ctcaagagtacatgccgtccgcaattctttgttgagctgccaagtccattgtggcgatgttttagctcaaaatatgacaaggtgcatatcctcataaaccacatatggaagacaccatttaactctgacaccgaggggggatctgccctgttcaggccccatataaaagctcaacccccgttaacgcttacaggtcctcatatatagccccagtttagtgtggtcttcgtgagcttagagaccggcttgattcactcaaaaactcgcagaagatcactgaagccatgaatcttgtggctgctgctcaagcatgtagagcatcatgcagcagctgtctatggcagacctttctgtgagtccatagatagtagcccttacatcat

SEQ ID NO: 221117 - DNA, 381 bp, Gossypium hirsutum
cccacgcgtccgctgaaaactaattgaaatcgtcggctgtctctcatttgcgtggctctcgggcttccgccaccgtcgacacccaaaatggaggctcaccggctatcttctactaaacctgttcaatctctcaagccaacgaaaaagattcctttagaggaagataccggtaaagcctccgacgcactgccgcttcccttgtacctaacgaacgccctgttcttcaccctcttcttctcggaggtttattttcttctttcccgttggcgtgagaagatccgtacctccacacctctccatgtcgtcaccttttccgagatcatcgccattctctcatttttcgcgtcctttatttaccttttgggtttctttggaattgac

SEQ ID NO: 221118 - DNA, 373 bp, Gossypium hirsutum
ctttctcttgctctctttagagtaaatttctcttgcaatcctttgtagagatccgggatccattgtcaccatgtcttgctcaaatctgacaatgtgggtgtcctcaaaaccctctctttctgacacttcttcactctctttccgttctttcatcagcccttttcagctcccgtctcagagctcaacccccggtaacccttccaggtcctcatctgtaaccccagttcactgtggtcttcgtgagcttagagaccgtattgattcagtaaagaacacgcagaagatcactgaagctatgaaacttgtggctgctgctaaagttaggagagcacaagaagctgttgtcaatggcagacctttctctgagtccctg

SEQ ID NO: 221119 - DNA, 383 bp, Gossypium hirsutum
cccacgcgtccgtccccttccaacgttggaccgcttttttcttctcttcctccgcctgtcctccgtcgttgcttcggccgtcgtctccgacgttaatagcgacggcgatcctctcatccgtcaagttgtttccgatggtggtgtcgaggaggactccgatgaccatctccttaacgcggagcaccacttcacgctgttcaaatccaagtatgggaaaacctacgcatcccaggaggagcacgattaccgactgggagtcttcaaggctaacctgcgtcgggccaagcgtcatcagctcctggaccccagtgccgtccatggcgtcacaaagttttccgatttaactccatcggagttccgccgccagtatctaggcttgaaac

SEQ ID NO: 221120 - DNA, 369 bp, Gossypium hirsutum
ggagtacttgcattatgatttggtttctttggaccagaacctggctaagaattcgggtggtgagataattggaactaggaccgaggttgccgacgtgaaggcgacgccgtttcagccttacagcgaggtttttggtctacagaggtttagggagtgtgagttgatccatggacggtgggccatgttggctacgcttggtgcacttaccgttgaatggctcactggtgttacatggcaagatgctggcaaggtggagttagttgagggttcatcgtatctcggccaaccccttcccttctcgatgacaacattgatttggatagaagtattggtgatcggattcatcgagttccaaaggaacgccgagct

SEQ ID NO: 221121 - DNA, 372 bp, Gossypium hirsutum
cccacgcgtccgaggagctgatagtcctttatggttggcatctaaacaaagcctttcatacttggatggcagccttccaggtgattatggatttgaccccttgggactctcagaccctgaaggtccaggagggttcatcgagcctaaatggctagcctacggtgagatcatcaacgggcgttatgctatgttgggtgcagtaggtgcgattgcccctgaaatacttgggaaggccggtcttatcccagcagaaacagccctcccttggtttagaaccggtgtgatcccaccagcaggaacatacagctattgggcagacccttacactttgtttgtgttcgagatggcactcatgggatttgcagagcacag

SEQ ID NO: 221122 - DNA, 381 bp, Gossypium hirsutum
cccacgcgtccgcccacgcgttcgtccacgcgtccgcccacgcgtccgcccaagctcagctttcatggggaagaaagtgagctcaagattcaacagcaccaggcaggttccttcgggaagttttaaggtgatggcggcggagaaagagatagacgaagagacacagaccgaaaaggaccgatggaaagggttggcttacgatatttcggacgaccaacaggacattactcgagggaaagggatggtggattccttgttccaagctcccatgaatgatggaactcactatgctgtcatgagttcctatgaatacctcagccaaggtcttaaaacgtacaatttggacaacaacatggatggtttctacattgcttctgcatt

SEQ ID NO: 221123 - DNA, 380 bp, Gossypium hirsutum
accacacaaaaatcaaccatggcagcagcagccagagtgatagccatcgccggcgactccaccgccgccgcgtcttcctgcttgcttatcaaaacaccgttcgctttacaacgctgcagcaacggacttagattcaacaacgtcagacgatcatcgaaaagattgttttcttgcaatgccatttataaccctcaggttcaaatcaaacaagaaggccaacccgaaactctcgactatagagtcttcttcgaggatacttcgggcaaaaagatttctccttggcacgatgttccattgcacttgggagatggtgtttttagcttcattgttgagatacccaaagaatcaagtgctaaaatggaggttgctactgatgaact

SEQ ID NO: 221124 - DNA, 385 bp, Gossypium hirsutum
gccccatcagcgattttttggactgactatgtagcaacccgttggtatcgtgctcctgaactctgtggatcctttttctccaaatacactcctgcaattgatatatggagcataggatgcatatttgctgagatacttacaggaaaaccactatttcctggaaaaaatgtggtgcaccaattggatctcatgaccgatacacttggcacaccccctcctgaatccatatcaaggattagaaatgaaaaggcaaggaggtaccttagtagcatgcgtaaaaagcaaccaattcctttctcacagaagttccctaatgtggatcacctggctcttcgcctacttgagcgcttacttgcatttgatccaaaagatcgtcccacagctg

SEQ ID NO: 221125 - DNA, 391 bp, Gossypium hirsutum
cacgcgtccgatcactcccaatactttcataacatttcacgaacttcactctccagtctacaatggcggctgccgtctccaccatcggtgctgtcaaccgagcaccgttgagtttgaatggatcaggtgccggagcttctgctccaagctcagctttcatggggaacagcttgaagaaagtgagcgctaggttcaacaacaacggcaaggctccagtgggaagtttcatgattgtggctgccaaagaaatcgacgaagacacacagaccgaccaggaccgatggaagggtcttgcttatgatatctccgatgaccaacaagacattaccagagggaaaggtatggtcgactcattgttccaagctcccatgaacgatggtactcactatgc

SEQ ID NO: 221126 - DNA, 387 bp, Gossypium hirsutum
agccttccgccaacccttccggtttatttctcttaccttggtgccctccgtccttcattaaaggccggaagtccaacctaacaattccagggctcatttgtgtttaaccctggcttacgatggcattttctgcatatcttggaggatggattgcagacacacttgtgagcaaaggcttatctgtgacaactgttcgcaaggtcatgcaatccattgggtttcttggccctgctttcttcctaactcagctgagccatgtcaattctcctgctatggcagttttgtgtatggcatgcagtcagggaactgatgcattttcacagtctggcctttattcaaaccatcaagatattgcccctcgatattcaggtgtattacttggtttgt

SEQ ID NO: 221127 - DNA, 411 bp, Gossypium hirsutum
ccggtacggcctggccgggccgacccatgcgtccgatcactcggagactctttagtatacctgtagcatatagcaatagtaagcagtaatagcaatggcctcctccatgatctcatcggcaaccattgccaccgtgaaccgctcctccccggcacaggccaacatggtggcccccttcaccggcctcaaatctgcctctgctttcccagtcaccaggaaggccaacaacgacatcacttctcttgcaagcaacggtgggagagtgcaatgcatgcaggtgtggccgcctcttgggaagaagaagttcgagactctctcatacctgcccgatcttactcccgtacagttggctaaggaagtagattaccttcttcgctctaaatggattccttgcttggaattcgaattaga

SEQ ID NO: 221128 - DNA, 391 bp, Gossypium hirsutum
gtcccgtcggtctcactgtaagctgcagcttccctgatgcaaccaatcaaggttgctgcaccatcaaggaccaatgtgctgctcaagtcctcccagagcgtttctaaggccttcggtttggagcctgttggtgctaggctcacctgctctttgcaaactgacctcaaggacttggctcagacgtgtgttgatgctaccaagctcgctggtttcgctctttctacatctgctcttgttgtctcgggagcaagcgctgaaggagttccaaagcggctaacctacgatgaaatccaaagcaagacatacatggaagtcaaaggaacaggaactgctaaccagtgcccaaccatcgatggtggtgtcgactcttttgccttcaagcctggcaaat

SEQ ID NO: 221129 - DNA, 375 bp, Gossypium hirsutum
cttaacaaacatcaactccagagatcgccaaacatgctaggaactgagcatgatttgaacttcaaagagaccgagctgtgtctcggcctgcctggtggaagtggtggaggaggaggagctgccgccgccggtggtggtggtggtggtaaaaatgaagcggaaagttccccaaagaccaccgggaaaagaggctactccgagactgctgatttgaagcttaatcttcagtctaaagaaggctgcatggatctgcatcaggacctagaaaatggtgcaaaagaaaagaatcatctcactgcaaaaccaccagccaaggcacaagttttgggttggccaccaggtcgatcttataggaagaacattatggcttaccag

SEQ ID NO: 221130 - DNA, 381 bp, Gossypium hirsutum
ctcaccattgatccaagttagttgttaaccaagctagaaccagcagccaacatggcctcattagcagcctccaccgctgccgcctcccttggcgtctctgaaatgctcggtaaccctctgaatttcagtggtggagctaggtcatcggctccaacaccatccaactcatccattttcaagaccgttgctcttttctccaagaagaaggccgctcctccaaagcccaaggctgctgctgtcgccccggccgatgaagagctggctaagtggtacggtccggacagaaagattttcttgcctgaaggtctgttagacagatcggagatcccagagtacttgaacggagaagttcccggagactatggatacgatccgtttggt

SEQ ID NO: 221131 - DNA, 493 bp, Gossypium hirsutum
agccattccaccattcaattaccctgtcaaccttgccgtttcaaaaatagcaccggctttaattgcaggaaactcccttgtactcaagccacctacacagggtgctgtttcagctcttcatatggtgcactgctttcacttggctggctttcccaaagggctcattagctgtgtgacagggaaaggctctgagattggtgatttccttactatgcatcctggagttaattgtataagcttcactggtggagacactggtattgctatctcaaagaaggcaggaatggtccctcttcaaatggaattgggaggaaaagatgcttgtatcgtactcgaggacgccgacttagatttggttgctgcaaacataataaaaggaggattttcttatagtggccaaagatgcactgctgttaaagttgtgttggtgatggaatctgttgctgatgtttctgtggacaaagtgaaggcaaaaaatcgcaagttaacggtt

SEQ ID NO: 221132 - DNA, 509 bp, Gossypium hirsutum
  unsure (1)..(509): unsure at all n locations
gcgcccacgcgttcgctgagtttaagcatatcaatatgcggaggaaaagaaacttaccaggctacttcggcaatgtaatctttacgactgcactaattgctgaagctggtgatctcgaaaccgaatcgtttactgacaccataaagaggattcatgaacgattaaatcagataaatgatgaatatttaagatcagctattgattacattgaaaaagagcctgatttaaacaccttggttagaggaccgcatacttttcgatgcccaaaccttgttgttgttccatggaactggttgcctatatatgaggcagatttcggatggggtcgtcccatatatatggggccagggaatgtcgtccaagaaggtaaaatttacatgctaccaagtccagctaacgatgggagtttgacactggcagctcgtttagagatccctcacatgaaagtttttgaaaaacttatttatgagatttaatagttattttnnnaaacaaaaaaaaaataaaat

SEQ ID NO: 221133 - DNA, 426 bp, Gossypium hirsutum
cccacgcgtccgtgcagatcttcgtcaaaaccctgaccggcaagaccataactttggaagtcgaaagctctgacaccattgacaacgtcaaggcaaagatccaagacaaggaaggcatcccaccagaccagcaaaggctcatatttgccgggaaacaactcgaggacggtcgcaccttggccgattacaacatccagaaggagtccaccctccatttggtattgaggcttcgtggtgggatgcaaattttcgtcaagacgttgactgggaaaaccataactttggaggtggagagttccgatacgatcgacaatgttaacgcgaagattcaagacaaagaaggaattccaccagatcagcaaagggtgattttcgcttggaaacaattggaagatggaaggactttggctgattacaatattcaga

SEQ ID NO: 221134 - DNA, 140 bp, Gossypium hirsutum
gaataccgggcgaccacgcgtccgccacgcgtccggatggcagattattaccatgtttccgagcgttcagatgccctgagggcttttccaaccatcgctgatcgggatggaagctgcaggcatacacgagacaactgata

SEQ ID NO: 221135 - DNA, 571 bp, Gossypium hirsutum
  unsure (1)..(571): unsure at all n locations
cgccacgcgtcaacccaacatcgttatcatggcttcctcaactctctccntgcagctccttgcagctatgctccagcaagagtggcatgttctgcccatcacgagcgtttcttgtgaaaccagcgaggacccatatggtcaaaaacgaaaagggaatgaggatcacatgccaggccactagcatccctgctgatagagtgccagacatgggcaagaggcagctcatgaatctgcttctgttgggggctatttcactcccctcaggtttcatgttggttccttatgcagccttctttgtgccatctgggggacggggtaccggtggtggcaccgttgccaaggacgcaatcgggaatgatgtaattgctgaagaatggctcaagactcatggccctggggaccgaaccctgactcaaggattgaagggagacccaacctacctagtggtagagaaagacagaacccttgcaacatatggtataaatgctgtgtgcacacaccttgggtgtgttgttccgtggaatcaagccgagaacaaagtcatatgcccctgccatggatcccaatacaa

SEQ ID NO: 221136 - DNA, 376 bp, Gossypium hirsutum
  unsure (1)..(376): unsure at all n locations
cccacgcgtncgnccacgcgtncgttcccttacagccaatctcctcaataccccatttttctggttcctttttcaagccattttacaagcacttcccaattgggagaaggggaaaatggcacagcttttaacaccctcaactcaatggcaaatgacactaccaaagacctcaacctatggaagtcccattgcaacaaaaatgtggagttctctggtactgaaacagaacaagaaaggagctgctaaaagctctggcaagattaaagtggctgccttgtctgaaaacagcactgtcaacaggctagagaacttactaaacatggacgtgactccatacaccgacaagatcattgctgaatacatttggataggaggc

SEQ ID NO: 221137 - DNA, 269 bp, Gossypium hirsutum
gcatcgcgcatacgatcaggtcttttttctctgcactaagactcagagctactctcgtcctagttattttccatggcgattgagaaaattcttaaagatgatgctcgtgaagagaagggggagcgtgccagaatggcatcatttgttggggcaattgcaattactgacttggttaagacaacccttgggccaaagggaatgggataaattttaccggcaactggcacgggaaatgaagtcactgttacacatgatggagctaccatctt

SEQ ID NO: 221138 - DNA, 628 bp, Gossypium hirsutum
  unsure (1)..(628): unsure at all n locations
ctcaattcccccacctcattgtaggcaaaatggccactgtttgtgcttcttctgccgttgcagccgttgccatctcatcccccagttcccagaggagtggatcagtagtgaggacaacaaaggcttctttccttacagggaagaaacttcgatcagtcaaaaagtacacaaaaccagcagcagtccgaaccgttccggtgtgtgcagtggctgaccccgaccgacctctttggttcccaggcagtactcctcctccatggctcgatggcagcctccctggagacttcggttttgatcctctaggccttggatcagaccctgagaccttgagatggaacgtacaggcagagctcgtccattgcagatgggcaatgttaggagccgctgggattttcatcccagagttcctaaccaaaattggcattttaaacactccatcatggtactctgctggaaccgaggaatacttcactgacaccaccaccctcttcatcgttgagcttattttcatcgggtgggcagaagggagaagatgggctgacattctcaagcctgggtgcgtaaacactgaccccatcttncctaacaacaagctcacgggcaccgatgttgggtaccctggtgggct

SEQ ID NO: 221139 - DNA, 553 bp, Gossypium hirsutum
  unsure (1)..(553): unsure at all n locations
cccacgcgtccgcccacgcgtccgatcactcccaatactttcataacatttcacgaacttcactctccagtctccaatggcggctgccgtctccaccatcggtgctgtcaaccgagcaccgttgagtttgaatggatcaggtgccggagcttctgctccaagctcagctttcatggggaacagcttgaagaaagtgagcgctaggttcaacaacaacggcaaggctccagtgggaagtttcatgattgtggctgccaaagaaatcgacgaagacacacagaccgaccaggaccgatggaagggtctggcttatgatatctncgatgaccaacaagacattaccagagggaaaggtatggtcgactcattgttccaagctcccatgaacgatggtactcactatgctgtcatgagctcctatgagtacattagccaagggccttcgcacatacgacttggacaacaacatggatggattctacattgccccagctttcatggaccaagcttgttgttcacatcaccaagaactacatgaccctttcctaacatt

SEQ ID NO: 221140 - DNA, 614 bp, Gossypium hirsutum
tcccgggctaacattcccatttccaatctccagctcccaaggtaaatatgccgatcagaaacatagcggttggccggcccgaagaggctactcaccccgatgctctcaaggctgctttggctgagttcatctcaaccttgatcttcgttttcgctggatcgggctcaggaatggcctttaacaagtggactgacaacggagcaaccaccccggctggtctcgtagccgccgctctagctcatggcttcggtcttttcgtcgctgtctccgttggcgccaacatctcaggtggccacgtcaaccctgccgtcaccttcggtgcttttgttggcgggaacatcactctcttgcgcggcattctttactggatcgcccaactcctaggctcaaccgtcgcttgcctgttgcttaagttcgctaccggcgacctggctgtacccgcttttgggttgtcatcaggtgtgggcgtgtctaacgcattggttctcgaaatcgtgatgaccttcggattggtgtacacagtgtacgccacagccgttgatcccaaaaagggaagctggtgaacaatcgcaccattggcaattggtttcatcgtgggggccaacattttggca

SEQ ID NO: 221141 - DNA, 549 bp, Gossypium hirsutum
cccacgcgtccggccacccttccctgatttcatttcttctgtactcacagtaatcacctctccaaaaccctagctctttcactcactgccgccaatttcaaccaattatttgcttataagcgtcgaaaacgatgtcggacgacgagcgagaggagaaggagttggatctcacctcccctgaagttgttactaaatacaagagtgctgctgagatcgttaacaaggctttgcagttagttgtaaaagaatgcaaaccaaaaactaagattgttgacatttgcgagaagggtgatgcatttatcagagagcaaacaggcaatatgtataagaatgctaagaggaagattgagaggggtgttgccttccccacttgtctttctgttaacaacactgtttgtcatttctctccacttgctagtgacacctccgagctgcaagaaggtgatatggtgaagattgacatgggttgccacattgatgggtttattgctgtagttgcgcacacccatgttgtccaggaaggactagttaatgacaggaaggctgatg

SEQ ID NO: 221142 - DNA, 507 bp, Gossypium hirsutum
cccacgcgtccggagaagaaaacaatgtcaggtcctcagtgctgttcgaatccaccaacattggattctgcaagtggggctggtcacgttgagaatcttgctggtctcaacacttatgtttctgggtctcttcaatctaagcttgctgtttttcttatctctgatattttcggatatgaggctccaaactttagaaagctcgcggacaaggttgcagccgctgggttctatgtggtggctcctgacttcttttatggagaaccctatgaccctaataaccctgatagacctctatctgtttggataaaggatcatggaccggataaaggttacgaggatgcaaagctcgtaattgacgctttgaaaagtaaaggggtttcatccattggagctgctgggttctgttggggtgctaaagttgtggctggactggctaaggatccccttattcaaacaagctgaatgttacatccttcatttgtgactggggaccatttcaaaagtgtg

SEQ ID NO: 221143 - DNA, 558 bp, Gossypium hirsutum
ttaaaaacagcaaagaagatgtcatcatcaacggcggccaatcaagtgagggcatctcacatactcatcaatcaccaaggctctcgtcgtaaggcttcttggaaggatccagaaggtcgcgtcatctccaccaccacccgagacgccgctgtctcacagcttaaacttctcggcgacgacatcgtttccaacaaggctaagttcgacgaggttgcctctcgctactcggattgcagctccgctaaacgtggcggtgatctcggctgcaaggagtgtgcctcaactcagttcttattgttaattatctgtgacctttagttggtttataccagcattacgggacataatgcaaactaaaaaccttatacaaacttttttgtggaggtccttttggtcgaggccagatgcaaaagccatttgaggatgcaacatataatcttaacattggcgagataagtgacattgtggataccgatagcggtgttcacatcataatgcgaactgggtaatcattattgatggagcctggatatcgtgagcaattagttcagtcttctc

SEQ ID NO: 221144 - DNA, 609 bp, Gossypium hirsutum
aagaaatcaaaagacaaaatagccaataacaatggcactcagaatgtgggcttcttccactgccaatgcactcaaaatctcttgttcctccaaacctaatgtttcccttgctttctcactctctagatgcttttccactgttttggatgggctgaagtatgctaattcacatgaatgggtgaagcatgaaggtcctgtggctaccattggcatcactgaccatgctcaggaccatcttggagaagtagtgtttgtggagttgccggaaccaggtggttcagtgagccaaggaaaagggtttggagcagtggaaagtgttaaagcaacaagtgatatcaattccccaatctccggcgaagtcgtggaggttaactccaagctgtccgaaactccgggcctgatcaactcaagcccatatgcagatggatggatgatcaaagtgaagccaagcagtccatcagagttagaatcattgatgggtccaaaggaatacaccaaattctgtgaggaagaagatgcttcccactaagaaaccattgtacccttattttcaaactttgtgttcaagaaataaggtttattgcaattttaattttatggctatttatc

SEQ ID NO: 221145 - DNA, 557 bp, Gossypium hirsutum
  unsure (1)..(557): unsure at all n locations
cccacgcgtccgattcaaggcacaaaatttgacccaaaatggcctctgtttgtgcttcttcggctattgcagctgttgccatctcatcccccagttcccagaagactggatcagtagtggggacaacaaaggcttctttccttacagggaagaaacttagatctgtgagaaagtacacaaaaccagctgccggaccaacatttccagtgtgcgccgccgccgaccccgacagacccctttggttcccaggcagcactcctcctccatggctggatggcagtctccctggtgactttggtttcgatcctctcggtcttgggtctgaccctgagacattgagatggaacgtacaagcagagctggttcactgcagatgggcaatgttgggagctgctggtattttcatcccagagttcttaaccaagattgggattttaaacactccatcgtggtactcagctggaacagaggaatacttcactgacaccacaactctcttcatcgntgagcttatttttatcggctgggctgaagggagaagatgggctgacattctc

SEQ ID NO: 221146 - DNA, 535 bp, Gossypium hirsutum
cccacgcgtccgtctggtttcactgtcagagctcatcagacaccggccgagcctgagactggacgcagagccatgttgggtcttgttgctgctggtttggccactggctcctttgttcaagctgtgcttgccgatgccagaagcatcaaggttggcccacctccccctccctctggtggactgcctggaactctgaactctgatgagccaagagaccttgttctgccatacaaagacaggttcttcctccaaccagttactccagctcaggcagcacagagagcaaaggaatcagccaaggacattctgggtgtcaagaacttgattgacaaaaaagcctgggcttatgtcatgaatgatctccgtctcaaggccgagtatctccgctatgacctcaacaccgtcattgctgccaagtccaaagatgagaagaaaactctaaaggacctcaccaagaagctcttcagtaccatcgatgatcttgaccatgcagccaagatcaaaagcacccctgaagcagagaaatcttacgctc

SEQ ID NO: 221147 - DNA, 285 bp, Gossypium hirsutum
cggacgcgtgggttagctatagcatacactactagtacccactactagcaatggcttcctcaatgatctcatcggctaccattgccactgcctctccggcacaggctaacatggtcgctcctttcaccggtctcaagtctgcctctgctttcccagtcaccaggaaggccaacaacgacattacttctctcgcaagcaatggcggtagagtgcaatgcatgcaggtgtggcctcctactgggaagaagaagtttgagactctctcatccctccccgatcttacac

SEQ ID NO: 221148 - DNA, 498 bp, Gossypium hirsutum
  unsure (1)..(498): unsure at all n locations
cccacgcgtncggcagctgttgccatctcatcccccagttcccagaagactggatcagtagtggggacaacaaaggcttctttcctttcagggaagaaacttagatctgtgagaaagtacacaaaaccagctgccggaccaacatttccagtgtgcgccgccgccgaccccgacagacccctttggttcccaggcagcactcctcctccatggctggatggcagtctccctggtgactttggtttcgatcctctcggtcttggttctgaccctgagacattgagatggaacgtacaagcagagctggtgcactgcagatgggcaatgttgggagctgctggtattttcatcccagagttcttaaccaagattgggattttaaacactccatcgtggtactcagctggaacagaggaatacttcactgacaccacaactctcttcatcgntgagcttatttttatcggctgggctgaaaggagaagatgggctgacatt

SEQ ID NO: 221149 - DNA, 357 bp, Gossypium hirsutum
  unsure (1)..(357): unsure at all n locations
tcggtcgccacgcgcacacatgtgacagcgaactgactgcctgaccgacagcgaagggaacagacaccatgaattgactgaaagctacataacactgtggatggatgtcagtgaacatgcaggcaaggcgactgctgcagtgacagactgcacctgggccactaagccaacatacaatggtcatgcttcaggtcatggcatatatagggatctaaataatgaatttaaggttgaataatttggctggtggaggttgtgtggtgacttatatctggcagntaacctttggatcctttactatgatgtaatggctatgcttatgtggcttatctgggtaatgaaagattcctacctatt

SEQ ID NO: 221150 - DNA, 576 bp, Gossypium hirsutum
  unsure (1)..(576): unsure at all n locations
cccacgcgtccgctttgttccacctctttctttctttttctccaaagccatcatgaatctcattaataggctcagccccaagcgtctctttcgatctaataaaaaagatagatccatcgtctccaagttcgacccctcctcctatagttccggttccgccgtttcctcctcttcctcctccgaatccgtctcttccaccctcaaagaacatcagtacccttccacggctaccgctggcttcgtaacgcccaccagtgttttgccccaaacatcaggtgactggtccgattttcccgctaatttttatctagaactttgccaggcgtttaaaatgttagacaaagataacgacggggttatatcgagaagcgagctcgaggctttgcttggcaaggtcgcaaggcagccgcccagccgggacgaggtttccttgatgttgagcgaagtggacggtgacggcgacggctacatcaacctggaaacgttgatgaaccaggtggttggaccggcttgcgacgaacccgcctgcgaaccggaactganggagacttttgatatatttgacacagatcatga

SEQ ID NO: 221151 - DNA, 560 bp, Gossypium hirsutum
cccacgcgtccggccggtgcaaccgcagctaatgttagcgccacagccaaggttgcagcctctccagtcccaaggggcagcatcaaggcctccctcaaagacgttggtgttgctgttggggcaactgctgcaagcgtaatccttgccagcaatgccatggccattgaagtcttgctcggcagtgacgatgggggtctggctttcattcccaaagaattcagcgtaagcccaggggagaagattgtgttcaagaacaatgccggattcccacacaatgttgtgttcgatgaggacgaaatcccaagcggcgtcgacgtatccaaaatctccatgcctgaagaagagctactcaatgccaaagacgagacttacgctgttaccttgactgagaaaggaacctacagtttctactgttctcctcaccagggtgcaggtatggttggaaaagtcacagttaactgagttatacatttatcttttcaacccctttgtgctttgtatgtatcatctcacacatctcttctactttttgagcactagagttttgagtattggggatg

SEQ ID NO: 221152 - DNA, 576 bp, Gossypium hirsutum
cccacgcgtccggatgtcttggttcatggagagcctgagagaaacgatatggttgagtactttggtgagcagttgtctggttttgcattcactgttaatggatgggtgcaatcttacggatctcgatgtgtcaagccaccaatcatctacggtgatgttagccgccccaagccaatgactgttttctggtcatctaccgcacaaagcatgactgcacgcccaatgaagggaatgcttactgggcctgttaccatccttaactggtcctttgtcagaaatgatcagccccggtttgagacttgctaccagattgccttggccatcaaggacgaagtggaggatcttgagaaggccggtatcaatgttatccaaattgacgaggctgctttgagagaggggttgcctcttagaaagtcggagcacgccttctacttgaaatgggctgtccactccttcagaatcaccaactgtggtgtacaggacactacccagatccacactcatatgtgctactccaacttcaatgacatcatccactcaattattgacatggatgctgatgtgataaccatcgag

SEQ ID NO: 221153 - DNA, 515 bp, Gossypium hirsutum
  unsure (1)..(515): unsure at all n locations
gtagccgccgcctgcgtctctctcttcatctctctgaaccaaaaagtctttagcttttcgcttcgagagagaccatgttggtttaccaggatctcatctccggtgacgagcttctttctgactcattcccctacaaggaaatcgagaatgggatgctgtgggaagttgagggaaagtgggttgtgcaaggagctgtcgatgttgacattggtgccaatccttcagccgaaggtgctgatgaggatgaaggtgttgatgaccaagctgtgaaggttgttgacattgttgacactttcaggcttcaggagcaaccccctttcgacaagaagcagtttgtcgtgttcatcaagaagttcatcaagaacttgacaccaaaactggatgcggaaaagcaagagtccttcaagaaaaacattgagggagcaaccaagtttttgctttcaaaattgaaggaccttcaatttttcgtaggagagagcatgcatgatgatggatgctnggtgtttgcttactac

SEQ ID NO: 221154 - DNA, 594 bp, Gossypium hirsutum
acgcgtccgcttcctcctcctttcctccgtcgttgcttcggccgtcgtctccgacgttaatagcgacggcgatcctctcatccgtcaagttgtttccgatggtggtgtcgaggaggactccgatgaccatctccttaacgcggagcaccacttcacgctgttcaaatccaagtatgggaaaacctacgcatcccaggaggagcacgattaccgactgggagtcttcaaggctaacctgcgtcgggccaagcgtcatcagctcctggaccccagtgccgtccatggcgtcacaaagttttccgatttaactccatcggagttccgccgccagtatctaggcttgaaaccgctcaagctcccagccgatgctcaaaaggctcctatccttccgactgacaacttaccggatgactttgactggcgtgaccacggcgccgtcactggcgttaaagaccagggttcctgtggatcgtgttggtcgttcagtgcgacgggggctttggagggagcccattatttggcgacaggagagcttgtaagcttgagtgagcagcaacttgttgattgtgatcacgagggtgatccacaacaata

SEQ ID NO: 221155 - DNA, 309 bp, Gossypium hirsutum
aacaacatggatggattctacattgccccagctttcatggacaagcttgttgttcacatcaccaagaactacatgacccttcctaacattaaggttcctcttatcttgggtatttggggaggcaaaggtcaaggaaaatctttccaatgtgagcttgtctttgccaagatgggaatcaaccccattatgatgagtgccggagaattggaaagtgggaacgccggagaaccagccaagttgatcaggcaaaggtaccgtgaggccgccgacattatcaagaaagggaaaatgtgttgcctctttatcaac

SEQ ID NO: 221156 - DNA, 580 bp, Gossypium hirsutum
tagattatggtgaaaaactaaacataataaagtccctcataacattcttcgacttgcttcattgattagcccaaagataaacataaccaaaaagaaaaatggcttctgcttccgctactctcctcaagtcttcacctattatcgacaagtccgagtggattaagggccaaaacctccgccacccttcggtttgttttgtacggtcacaccctacatcggccgcctttaccgtccgtgctagttcatatgccgatgagcttgttaagaccgcgaaaactgttgcatctccaggtcgtggtattttggccatggatgaatcaaatgctacatgtgggaagcggcttgcctcgattggtctcgagaataccgaggcaaaccggcaagcttaccgtacccttctcgtgtctgcccctggcctcggtaactacatctcgggagctatccttttcgaggagactctctaccaatctaccatcgatgggaaaaagatggtcgatgttcttgttgagcaaaatattgtcccttgtatcaaagttgacaagggtttggttccactccctggttccaacaacgagtcatg

SEQ ID NO: 221157 - DNA, 306 bp, Gossypium hirsutum
gaaagagcttcttcactttgacaacaatactcactttctcttacagagattgagagaaaatcacaaacacacatttatatagcacagtgatcatcatggctcttcacttgtcttgggttttcgtttttggtattctaagcaacgctggttcattcatgggttccttggcttcactggccacattttaccaaatattcaaaaagaaaacatcggaagggtttcaggccattccctacctgggttcggtttttaaggccatgctttggatttactattcaccggttaagaaagaagccatttttctta

SEQ ID NO: 221158 - DNA, 572 bp, Gossypium hirsutum
ttcaattttcactagctacttgacttcattgcttaattattatttgcagaaagatggattcaattaaatcgcatgcagtatgtcttccaagcccagcacaaggtcatattaaccccatgatgcaactggccaagctcttgcactctagaggcttccatataacctttgtcaactccgagttcaatcatagacgatttatacggtctagaggggaagaagctgttaagggtctgcctcatttccggttcgaagccatacccgacgggctgccaccttccgattctgatgcgactcagtctgttccggcactatgcaattccacacggaaaaattgtttggctccattcttggagctactatctaagcttaattcctcaccccacctgccgcctgttacatgcatagtttgtgatggaaccatgaactttggtaccaaggcagctcaactcattggggtgccttatgttcaactctggacttttttaaccgttagctttctgggatttctgcactacaaagaactagctcaaagaggcattgttccattcaaagatgaacgcttttgtagcgat

SEQ ID NO: 221159 - DNA, 652 bp, Gossypium hirsutum
  unsure (1)..(652): unsure at all n locations
cccacgcgtacgatgccttacacccgcctgcttggttccacctgtttctttctttttctccaaagccatcatgaatctcattaataggctcagccccaagcgtctctttcgatctaataaaaaagatagatccatcgactacaaggtcgacccctcctcctatagttccggttacggcggttactgctcttgctgctgcgaatccgactcttccaccctcaaagaacatcagtacccttccacggctaccgctggcttcgtaacgcccaccagtgttttgccccaaacatcaagtgactggtccgattttcccgctaatttttatctagaactttgccaggcgtttaaaatgttagacaaagataacgacggtgttatatcgagaagcgagctcgaggctttgcttggcaaggtcgcaaggcagccgcccagccgggacgaggtttccttgatgttgagcgaagtggacggtgacagcgacggctacatcaacctggaaacgttgatgaaccaggtggttggaccggcttgcgacgaacccgcctgcgaaccggaactgacgggagactttgatatatntgacacagatcatgacgggaagatcacggccgaggagttgatggcgttttttaaggacataatatgggatgag

SEQ ID NO: 221160 - DNA, 594 bp, Gossypium hirsutum
cccacgcgtccggagactcttttgtatacctgtagcatatagtaatagtaagcagtaatagcaatggcctcctccatgatctcatcggcaaccattgccaccgtgaaccgctcctccccggcacaggccaacatggtggcccccttcaccggcctcaaatctgcctctgctttcccagtcaccaggaaggccaacaacgacatcacttctcttgcaagcaacggtgggagagtgcaatgcatgcaggtgtggccgcctcttgggaagaagaagttcgagactctctcatacctgcccgatcttactcccgtacagttggctaaggaagtagattaccttcttcgctctaaatggattccttgcttggaattcgaattagaggagggattcgtgcaccgtaagtactcgagcttacccacgtactacgatggacgctactggaccatgtggaaactgcccatgttcgggtgcaccgactcggctcaggtgttgaaggagcttgaggaatgcaagaaggaataccccaatgcattcattagaatcattgggttcgacaacgttcgtcaagtgcagtgcattagtttcattgcctac

SEQ ID NO: 221161 - DNA, 461 bp, Gossypium hirsutum
  unsure (1)..(461): unsure at all n locations
ccacgcgtncggtttcccatgaaagtagccaaggaagggttgatgaccatccttcttttagaccccatttgccacctgaattctacaagaaacctactgtgaaagtctattgcaaagctgatcctaattttcatctcaccatcagagacggtaaagttattcttgctccatctgatccctctaatgaattccagcactggtacaaagatgagaagttcagcacaagtgtgaaagatgaagtgggtttcccaagcttttctctggttaataaagccactggtcaagccattaaacattccattggagcttcttatcctgtccaactggtaccttacaaaccagatcatcttgatgagtcagttgatttcaggtgctctgatgtgtcctccaccgttgatgcatcactcaccatggtcatgggagacgacattggtaaggtgattgcttggtacgacaatgag

SEQ ID NO: 221162 - DNA, 604 bp, Gossypium hirsutum
tttagctatagcatacactactagtacccactactagcaatggcttcctcaatgatctcatcggctaccattgccactgcctctccggcacaggctaacatggtcgctcctttcaccggtctcaagtctgcctctgctttcccagtcaccaggaaggccaacaacgacattacttctctcgcaagcaatggcggtagagtgcaatgcatgcaggtgtggcctcctactgggaagaagaagtttgagactctctcatacctccccgatcttacacccgtgcagttggctaaggaagtagattaccttcttcgctcaaaatgggttccttgcttggaattcgaattggaggagggattcgtgcaccgtaagtactcgagcttacccacgtactacgatggacgctactggaccatgtggaagctgcccatgttcgggtgcaccgactcggctcaggtgttggaggagcttgaggaatgcaagaaggcataccccaatgcattcattagaatcattggcttcgacaacgtgcgtcaagtgcagtgcattagtttcattgcctacaagcctccaggcttctaagctttttattaactttggctctcca

SEQ ID NO: 221163 - DNA, 568 bp, Gossypium hirsutum
cgggaagctgcaaatgtatttggaaagccaaaaacaaacacagagttcatcccatacaatggggaagggttcaagctgtcaataccatcaaaatggaacccaagcaaagaggttgagtacccaggtcaagtcctgagatacgaggacaacttcgactccaccaccaatgttgctgtcctggtcactcctactgataagaagtccattactgacttcggttcccctgaaaatttcctctctaaggtggactatctgcttggaaaacaagcatactctggcttaactgatgctgagggtgggtttgactcaaatgcagtggcaactgcaaacatattggagacttcaactcctgtgatcggagggaaacagtactacttcttgtcggtgttgacgagaactgctgatggagatgaaggtggcaagcaccaactaattacagccaccgtaaacaatggtaaactttacatttgcaaagcacaagctggggacaagcggtggtttaaaggagctagaaagtttgtggagagtgctgcaaattccttcaagtgtgcttagttaaaaagtctta

SEQ ID NO: 221164 - DNA, 523 bp, Gossypium hirsutum
cccacgcgtccgcccacgcgtccgccacactctcaaattcagataacaatttcacagttgttttcttcactctctctctcagccatctccaccgtcgccgccgctgccgccgccaaccgagctctgggagtgtcagtcccaacctcagctttcatggggaagaaagtgagctcgagattcaacaacaccaggcaggttccttcgggaagttttaaggtgatggcggccgaaaaagagatagacgaagagacacagaccgaaaaggaccgatggaaagggttggcttacgatatttcggacgaccaacaagacattactcgagggaaagggatggtggattccttgttccaagctcccatgaatgatggaactcactatgctgtcatgagttcctatgaatacatcagccaaggtcttaaaacgtacaatttggacaacaacatggatggtttctacatcgctcctgcattcatggacaagcttggtgttcacatcagcaagaacttcatgtccctccctaaca

SEQ ID NO: 221165 - DNA, 500 bp, Gossypium hirsutum
  unsure (1)..(500): unsure at all n locations
cccacgcgtncgctgaaaactaattgaaatcgtcggctgtctctcatttccgttcctctcgggcttccgccaccgtcgacacccaaaatggaggctcaccggctatcttctactaaacctgttcaatctctcaagccaacgaaaaagattcctttagaggaagataccggtaaagcctccgacgcactgccgcttcccttgtacctaacgaacgccctgttcttcaccctcttcttctcggtggtttattttcttctttcccgttggcgtgagaagatccgtacctccacacctctccatgtcgtcaccttttccgagatcatcgccattctctcatttttcgcgtcctttatttaccttttgggtttctttggaattgacttcgttcaatctttggttttccaaccatcgcctgacgtttggattgccgaggaagtggatgatgaagttctgcttgcaaaggaagaaagcccgaagggtcccttgcgggcaagctctcg

SEQ ID NO: 221166 - DNA, 533 bp, Gossypium hirsutum
ctttctcttgctctctttagagtaaatttctcttgcaatcctttgtagagatccgggatccattgtcaccatgtcttgctcaaatctgacaatgtgggtgtcctcaaaaccctctctttctgacacttcttcactctctttccgttctttcatcagcccttttcagctcccgtctcagagctcaacccccggtaacccttccaggtcctcatctgtaaccccagttcactgtggtcttcgtgagcttagagaccgtattgattcagtaaagaacacgcagaagatcactgaagctatgaaacttgtggctgctgctaaagttaggagagcacaagaagctgttgtcaatggcagacctttctctgagtccctggttgaagttctttacaacatcaatgaacagctccagactgaagacatagatgctcctctcacaaacgtcaggcctgtcaaaaaaagtgctttggttggtggtactggtgatcgtggtctctgtggaggtttcaacaatgctatcctcaaaaagctgaagc

SEQ ID NO: 221167 - DNA, 556 bp, Gossypium hirsutum
ctcccccacacattcaaaatcctattccttttctcctttttctttttctcagacaagatgggttctcagggatcggttatggcgatgcttttgctgatgatgttcactttatcatcagcttccgacatgtccattatatcctacgatgaaacacatcccgacaagtcaacgtctagttggagaacagacgacgaagttatggccatgtacgaggagtggcttgtaaagcatggaaaaacatacaacggtttgggtgagaaagagaggaggttccagatttttaaggataaccttaggttcatcgatgaacataacgccgatgagagtcagagttttaatgttggtttgaaccgctttgctgatcttaccaacgaggagtaccgagccatctacctgggaatcaagaaacccaaccggaaagtttccaaggccagtgaccgatactccgcgcttctcggcgaaaaagtgccccgatccgttgattggagggaaaaaggggctgtcgcttgagcaaagatcaaggaagttgcgggaggtgctgggcttttctcgacta

SEQ ID NO: 221168 - DNA, 570 bp, Gossypium hirsutum
  unsure (1)..(570): unsure at all n locations
cccacgcgtccgtccccttccaacgatggaccgcttctctcttctcttcctcctcctttcctccgtcgttgcttcggccgtcgtctccgacgttaatagcgacggcgatcctctcatccgtcaagttgtttccgatggtggtgtcgaggaggactccgatgaccatctccttaacgcggagcaccacttcacgctgttcaaatccaagtatgggaaaacctacgcatcccaggaggagcacgattaccgactgggagtcttcaaggctaacctgcgtcgggccaagcgtcatcagctcctggaccccagtgccgtccatggcgtcacaaagttttccgatttaactccatcggagttccgccgccagtatctaggcttgaaaccgctcaagctcccagccgatgctcaaaaggctcctatccttccgactgacaacttaccggatgactttgactggcgtgaccacggcgccgtcactggcgttaaagaccagggtcctgtggatcgtgttggtcgttcagtgcgacgggggctttggagggagcccattatntggcgacaggagagctt

SEQ ID NO: 221169 - DNA, 587 bp, Gossypium hirsutum
ggagtacttgcaatatgatttggattctttggaccagaacctggctaagaattcggctggtgagataattggaactaggaccgaggttgccgacgtgaaggcgacgccgtttcagccttacagcgaggtttttggtctacagaggtttagggagtgtgagttgatccatggacggtgggccatgttggctacgcttggtgcacttaccgttgaatggctcactggtgttacatggcaagatgctggcaaggtggagttagttgagggttcatcgtatctcggccaaccccttcccttctcgatgacaacattgatttggatagaagtattggtgatcggattcatcgagttccaaaggaacgccgagcttgacccggagaagaggctgtaccccggaggaaagtactttgatcctctcggcctagccgccgacccggagaagaaagcaaccctacaattggctgagatcaagcatgctcgccttgccatggttgctttcttggggtttgctgtccaagctgctgcaacaggcaaaggccctctcaacaattgggctactcacttgggtgacccccttcatactacca

SEQ ID NO: 221170 - DNA, 539 bp, Gossypium hirsutum
  unsure (1)..(539): unsure at all n locations
cccacgcgtccgcccacgcgtccgcccacgcgttcgcccacgcgtncgcccaacctcagctttcatggggaagaaagtgagctcaagattcaacagcaccaggcaggttccttcgggaagttttaaggtgatggcggcggagaaagagatagacgaagagacacagaccgaaaaggaccgatggaaagggttggcttacgatatttcggacgaccaacaggacattactcgagggaaagggatggtggattccttgttccaagctcccatgaatgatggaactcactatgctgtcatgagttcctatgaatacctcagccaaggtcttaaaacgtacaatttggacaacaacatggatggtttctacattgctcctgcattcatggacaagcttgttgttcacatcaccaagaacttcatgtccctccctaacattaaagttcctctaatcttgggtatttggggaggcaaaggtcaaggaaaatctttccaatgtgagcttgtgtttgccaagatgggtatcaaccccatcatgatga

SEQ ID NO: 221171 - DNA, 538 bp, Gossypium hirsutum
  unsure (1)..(538): unsure at all n locations
accacacaaaaatcaaccatggcagcagcagccagagtgatagccatcgccggcaactccaccgccgccgcgtcttcctgcttgcttatcaaaacaccgttcgctttacaacgctgcagcaacggacttagattcaacaacgtcagacgatcatcgaaaagattgttttcttgcaatgccatttataaccctcaggttcaaatcaaacaagaaggccaacccgaaactctcgactatagagtcttcttcgaggatacttcgggcaaaaagatttctccttggcacgatgttccattgcacttgggagatggtgtttttagcttcattgttgagatacccaaagaatcaagtgctaaaatggaggttgctactgatgaactttacactcccattaaacaggatacaaaaaagggcaagcttcgatattacccctataatataaattggaattatggattgcttncacaaacatgggaagacccatctttggcaaactctgaagttgaaagagcatttggtgataacgaccctggtgatg

SEQ ID NO: 221172 - DNA, 532 bp, Gossypium hirsutum
gccccatcagcgattttttggactgactatgtagcaacccgttggtatcgtgctcctgaactctgtggatcctttttctccaaatacactcctgcaattgatatatggagcataggatgcatatttgctgagatacttacaggaaaaccactatttcctggaaaaaatgtggtgcaccaattggatctcatgaccgatacacttggcacaccccctcctgaatccatatcaaggattagaaatgaaaaggcaaggaggtaccttagtagcatgcgtaaaaagcaaccaattcctttctcacagaagttccctaatgtggatcacctggctcttcgcctacttgagcgcttacttgcatttgatccaaaagatcgtcccacagctgaagaagcattagctgacccatatttttatggtttggcaaatgtggatcgtgaaccatctacacaacctatttcaaaactagaatttgagtttgagagaagggaattgacaaaagatgatgttagagagctgatttatcgagagatat

SEQ ID NO: 221173 - DNA, 564 bp, Gossypium hirsutum
attcctctttctctcccccccccacaaaaaaaaaaaactccaaatctaaagagagactttcctctcctccgatcctttattcgtcttggtttatgagctcgaaggagaaacccactctcggtggtacgcggattaagacccgcaaacggaatattgctgcgcctctggaccctgcagcatttgctgatgcagttgtccagatctatttggataatgctggtgatctggaacttgttgccaagaaccttgaatcttctgatcttaacttctcaagatacggtgacactttctttgaggttgttttcaccgggggccgcacacaaccaggcacaatcaaacctgatgagggggagcgccacccttactctgtaatagagtgtgaggctaaacgtgaagccattttgccatctgtgatctacatacagaaaatcttgcgtcgaaggccttttctgataaagaatcttgaaaatgttatgcaaagattgttgcagtccttggagcttgttgaggacaatgaaaggaagaagcttgcaattttcacagcacttgctttttcccagaagc

SEQ ID NO: 221174 - DNA, 639 bp, Gossypium hirsutum
  unsure (1)..(639): unsure at all n locations
atcactcccaatactttcataacatttcacgaacttcactctccagtctccaatggcggctgccgtctccaccatcggtgctgtcaaccgagcaccgttgagtttgaatggatcaggtgccggagcttctgctccaagctcagctttcatggggaacagcttgaagaaagtgagcgctaggttcaacaacaacggcaaggctccagtgggaagtttcatgattgtggctgccaaagaaatcgacgaagacacacagaccgaccaggaccgatggaagggtcttgcttatgatatctccgatgaccaacaagacattaccagagggaaaggtatggtcgactcattgttccaagctcccatgaacgatggtactcactatgctgtcatgagctcctatgagtacattagccaaggccttcgcacatacgacttggacaacaacatggatggattctacattgccccagctttcatggacaagacttgtgttcacatcaccaagaactacatgaccctttctacataagggtcctctatcttgggatttgngaggcaaggtcaagaaaattttcatggagctgcttgcaagtggatcacccatatatgagtgcgagatggagtggacgcgagacagcagtg

SEQ ID NO: 221175 - DNA, 383 bp, Gossypium hirsutum
  unsure (1)..(383): unsure at all n locations
ntcacgcgtacggagagaaaaacataaaacacttccgtaatggcacgcatgaagatcagagagtgcgattgcatgagattgttgaaagaacattgcaagaggctntcactgtagagattagccaatcacatgtgcacaatttacggcatcaactgatttcaatcaactagtacagatagagccatggctttcgtcacagatactggctgttaaacctgatatgttgttcggtatgcgtgggcagagtgcgttgggtggcttaaatatagattgtgctcaagttattacgatacgcgaaagagcgcctaggcacatagggggaattgagtggatacaagggacctgttacaactccgattgtgggaccttacatacctgacaat

SEQ ID NO: 221176 - DNA, 589 bp, Gossypium hirsutum
  unsure (1)..(589): unsure at all n locations
gcgtncgnccacgcgtncgcgtttattctcttaacatggatgcctacgtactatcatcaagtcctgaagttcaacctcacagattcagggctcatttgtgttttaccctggcttacgatggcattttctgcaaatcttggaggatggattgcagacacacttgtgagcaaaggcttatctgtgacaactgttcgcaaggtcatgcaatccattgggtttcttggccctgctttcttcctaactcagctgagccatgtcaattctcctgctatggcagttttgtgtatggcatgcagtcagggaactgatgcattttcacagtctggcctttattcaaaccatcaagatattgcccctcgatattcaggtgtattacttggtttgtccaacactgctggagtactagctggggtctttggaacagctgctactggttacattctgcaacatggttcttgggacaatgtcttcgaggtttcggttgggctatacttggttggaaccgtggtctggaacctcttttcaactggtgagaaaatactggactgactcagatatttagatgtttagcatgagttagctcaagccc

SEQ ID NO: 221177 - DNA, 582 bp, Gossypium hirsutum
  unsure (1)..(582): unsure at all n locations
cccacgcgtccggagactcttttgtatacctgtagcatatagtaatagtaagcagtaatagcaatggcctcctccatgatctcatcggcaaccattgccaccgtgaaccgctcctccccggcacaggccaacatggtggcccccttcaccggcctcaaatctgcctctgctttcccagtcaccaggaaggccaacaacgacatcacttctcttgcaagcaacggtgggagagtgcaatgcatgcaggtgtggccgcctcttgggaagaagaagttcgagactctctcatacctgcccgatcttactcccgtacagttggctaaggaagtagattaccttcttcgctctaaatggattccttgcttggaattcgaattagaggagggattcgtgcaccgtaagtactcgagcttacccacgtactacgatggacgctactggaccatgtggaaactgcccatgttcgggtgcaccgactcggctcaggtgttgaaagagctngaggaatgcaagaaggaataccccaatgcattcattagaatcattgggttcgacaacgttcgtcaagtgcagtgcattagt

SEQ ID NO: 221178 - DNA, 434 bp, Gossypium hirsutum
  unsure (1)..(434): unsure at all n locations
gtcggtctcacttcaagctgcagctaccctgatgcaaccaatcaaggttgctgcaccatcaaggaccaatgtgctgctcaggtcctcccagagcgtttctaaggccttcggtttggagcctgttggtgctaggctcacctgctctttgcaaactgacctcaaggacttggctcagacgtgtgttgatgctaccaagctcgctggtttcgctctttctacatctgctcttgttgtctcgggagcaagcgctgaaggagttccaaagcggctaacctacgatgaaatccaaagcaagacatacatggaagtcaaaggaacaggaactgctaaccagtgcccaaccatcgatggtggtgtcgactcttttgccttcaagcctggcaaatactacgccaagaagttctgcttggagcccacttncttcactgtcaagg

SEQ ID NO: 221179 - DNA, 601 bp, Gossypium hirsutum
  unsure (1)..(601): unsure at all n locations
gacccacgcgtncgcccacgcgtncgatttcttgaattctcctctctaccccctaaccaaatcatccatttcataaatattaatccaccaaaagaattatccattcagttcaaagacaccatgacatctacacctactcaagaaaacactcaagtagaaggatcccacgaacccacagtagaagcacccccatcggaagaagatattaagaaatggggcacgcacgtcatgggatccccagcagctcctagtgcccatccagacaaccagaaggcggctttatggaatgctagtgatcaccaacaaatctatgagctgccctatgtcgtttattcccctgcagaaagaccaagccataatccttttgaacctgtgattaacatgttcaatacctggagtaggaagaccgagtctatagcacgcaacatctggcacaaccttaaaactggaccgtctgtatcggaagcagcatggggttaatttaacctgacagccaaagctataacagagggaggatttgagtctctgttcaagcagatttttgcaactgatacggatgaaagggttaaggaagacattcgcctggtatttgtccacaaca

SEQ ID NO: 221180 - DNA, 485 bp, Gossypium hirsutum
  unsure (1)..(485): unsure at all n locations
cttaacaaacatcaactccagagatcgccaaacatgctaggaactgagcatgatttgaacttcaaagagaccgagctgtgtctcggcctgcctggtggaagtggtggaggaggaggagctgccgccgccggtggtggtggtggtggtaaaaatgaagtggaaagttccccaaagaccaccgggaaaagaggctactccgagactgttgatttgaagcttaatcttcagtctaaagaaggttgcatggatctgaatcagaacctagaaaatggttcaaaagaaaagaatcatttcactgcaaaaccaccagccaaggcacaagtattgggtnggccaccagttcgatcttataggaagatcattatggctatccagaagaacaacagtgacgaaattagtgtcagagctagcattggcagtgtgggtgcagcgtttgttaaaagtttgcatggttggtgccccatattttgcgtaatgaatatttt

SEQ ID NO: 221181 - DNA, 543 bp, Gossypium hirsutum
ctcaccattgttccaagtttgttgtaaaccaagctagaaccagcagccaacatggcctcattagcagcctccaccgctgccgcctcccttggcgtctctgaaatgctcggtaaccctctgaatttcagtggtggagctaggtcatcggctccaacaccatccaactcatccattttcaagaccgttgctcttttctccaagaagaaggccgctcctccaaagcccaaggctgctgctgtcgccccggccgatgaagagctggctaagtggtacggtccggacagaaggattttcttgcctgaaggtctgttagacagatcggagatcccagagtacttgaacggagaagttcccggagactatggatacgatccgtttggtctgagcaagaagccagaagactttgcaaaatatcaagcatatgagttgatacacgcaaggtgggcaatgcttggtgctgcagggttcatcatccctgaagcctttaacaaatttggtgccaactgtggccccgaagcccgttggttcaagaccggagctctt

SEQ ID NO: 221182 - DNA, 665 bp, Gossypium hirsutum
  unsure (1)..(665): unsure at all n locations
atcactcccaatactttcataacatttcacgaacttcactctccagtctccaatggcggctgccgtctccaccatcggtgctgtcaaccgagcaccgttgagtttgaatggatcaggtgccggagcttctgctccaagctcagctttcatggggaacagcttgaagaaagtgagcgctaggttcaacaacaacggcaaggctccagtgggaagtttcatgattgtggctgccaaagaaatcgacgaagacacacagaccgaccaggaccgatggaagggtcttgcttatgatatctccgatgaccaacaagacattaccagagggaaaggtatggtcgactcattgttccaagctcccatgaacgatggtactcactatgctgtcatgagctcctatgagtacattagccaaggccttcgcacatacgacttggacaacaacatggatggattctacattgccccagctttcatggacaagcttgttgttcacatcaccaagaactacatgacccttcctaacattaaggttcctcttatcttgggtatttggggaggcaaaggtcaaggaaaatctttccaatgtgagcttgtctttgccaagatgggaatcaaccccattatgatgagtgccggagaattgggaagtgngaacgccggagaac

SEQ ID NO: 221183 - DNA, 380 bp, Gossypium hirsutum
tcggccacgcgttcggccacgcgtccgctcccttacagccaatctcctcaataccccatttttctggttcctttttcaagccattttacaggcacttcccagttgggagaaggggaaaatggcacagcttttagcaccctcaactcaatggcaaatgacactaccaaagacctcaacctatggaagtcccattgcaacaaaaatgtggagttctctggtactgaaacagaacaagaaaggagctgctaaaagctctggcaagtttaaagtggttgccttgtctgaaaacagcactgtcaacaggctagagaacttactaaacatggacgtcactccatacaccgacaggatcatggctgaatccattgggataggaggca

SEQ ID NO: 221184 - DNA, 627 bp, Gossypium hirsutum
agccattccaccattcaattaccctgtcaaccttgccgtttcaaaaatagcaccggctttaattgcaggaaactcccttgtactcaagccacctacacagggtgctgtttcagctcttcatatggtgcactgctttcacttggctggctttcccaaagggctcattagctgtgtgacagggaaaggctctgagattggtgatttccttactatgcatcctggagttaattgtataagcttcactggtggagacactggtattgctatctcaaagaaggcaggaatggtccctcttcaaatggaattgggaggaaaagatgcttgtatcgtactcgaggacgccgacttagatttggttgctgcaaacataataaaaggaggattttcttatagtggccaaagatgcactgctgttaaagttgtgttggtgatggaatctgttgctgatgttctggtggacaaagtgaaggcaaaaatcgcaaagttaacggttggaccaccggaggatgactgtgatatcactccggttgtgtcggaatcatctgcaaatttcattgaagggctggtcaaggatgccaaagagaaaggagctatattttgtcaggagtacaagagagaaggcaatct

SEQ ID NO: 221185 - DNA, 545 bp, Gossypium hirsutum
cccacgcgtccggaaaaagtctctgacacttgcaacacaataaactacacataaaatctgtgcctgcccttttctctgcacacctcgggatatcagtttcaactccactcatcccacgggttgagtaccgagtccatatatcgttaagttcaaggaaggaacttgggcatcatgggtcttaaggcattagactatgagacaatgaatgaaaacgtgaagaaagttcaatatgcagttagaggtgagttgtatcttcgagcttctgagcttcagaaggaagggaagaagattattttcacaaatgttggcaatcctcaagctcttggacagaagccactgactttccctcgtcaggtggttgctttgtgccaagctccatttctgctagatgatcctaatgtaggacttatatttcctgctgatgccattgcaagagcaaaacattatctttcgttgacttctggtggtctaggtgcatatagtgattccagaggtattccaggcgttaggaaggaggttgctgaattcattgagaggcgtgatgg

SEQ ID NO: 221186 - DNA, 558 bp, Gossypium hirsutum
cccacgcgtccgcgatggtcagattattaccatcggggccgagcgttttagatgccctgaagtgcttttccaaccatcgatgatcggtatggaagctgcaggcatccaccagacaccttataactcgataatgaaatgtgacgtcgatattaggaaagacttgtacggtaacattgtactcagtggtggtacaactatgttccccggtatcgctgatagaatgaccaaggagatctcggctttagctcctagcagcatgaagattaaggttgctgctccacctgagaggaagtatagtgcctggattggcggatcgatcttggcttcccttagcacattccaacaaatgtggatcgccaaggcagagtacgatgaatcgggtccatcaattgtacacagggaaatgcttgtaaatgtttatagacatgagctttgatctatcaacatatgtgtattctcttgtcggatagaacgagcaaacattagagaaagagaattggaatttgtgtggaccaattctttcaattctttttaatgagaagttggtgcctttaccat

SEQ ID NO: 221187 - DNA, 551 bp, Gossypium hirsutum
aaccccaaccatcgtttatcatggcttcctcaactctctcccctgcagctccttggcagctatgctccagcaagagtggcatgttctgcccatcacgagcgtttcttgtgaaaccagcgaggacccatatggtcaaaaacgaaaagggaatgaggatcacatgccaggccactagcatccctgctgatagagtgccagacatgggcaagaggcagctcatgaatctgcttctgttgggggctatttcactcccctcaggtttcatgttggttccttatgcagccttctttgtgccatctgggggacggggtaccggtggtggcaccgttgccaaggacgcaatcgggaatgatgtaattgctgaagaatggctcaagactcatggccctggggaccgaaccctgactcaaggattgaagggagacccaacctacctagtggtagagaaagacagaacccttgcaacatatggtataaatgctgtgtgcacacaccttgggtgtgttgttccgtggaatcaagccgagaacaagttcatatgcccctgccat

SEQ ID NO: 221188 - DNA, 657 bp, Gossypium hirsutum
cttttccaacaaacctaatctgaaattcacttcttttgatcaaaactatttggtccaaaacttaaagtatccaaaaacctcaggaatcccattgttttccttttccattttttgtttgtttctaagggaaatgagggatgttttcatggttggcaaggatagctctggcttgttggagaccagtgagtcgatatgcccgtatgaacaaggattacaacaatagcaatagtgaggaacttgaagaagattcttcttctttacgtgactcgcttctttggtgtagagaccttgaaaaacactcttgtggtgatttttcatttgctgttgttcaagccaatgagatcattgaagatcatagtcaagttgagactggcaaagatgcaatttttgttggtgtctacgatggacatggtggccctgatgcttctcgctttatctctgatcatctctttcaaaatttgattacagggcttgctcgagcaaatggaaccatttcggaagatattcttagaaatgctttctccgcaaccgaagatgggtttcttgcgcttgtgcgtaggtcttgtggaataaaaccattaattgctgcaatcggatctttgtgtctggttggagttataatggaggggggcgttatatgtcgctaatttgggtgat

SEQ ID NO: 221189 - DNA, 671 bp, Gossypium hirsutum
ccgaatctccgattttcccaagcatcgcgcatacgatcaggtcttttttctctgcactaagactcagagctactctcgtcctagttattttccatggcgattgagaaaattcttaaagatgatgctagtgaagagaagggggagcgtgccagaatggcatcatttgttggggcaattgcaattactgacttggttaagacaacccttgggccaaagggaatggataaaattttacagtcaactggcaggggaaatgaagtcactgttacaaatgatggagctaccatcttaaagtccctgcacattgacaacccagcggcaaaagttttgattgacatctccaaagttcaagatgatgaagttggagacgggacaacctctgttgtggttttggctggggaggctttaagggaggcagaaaagctagtggcagccaagattcaccctatgacaataatatcaggttatagaatggcagccgaatgtgctcgtaatgctttgttgcagagggttgtggataacaaagagaatgcagagaaattcaagtcagacttgatgaaaattgcaatgaccactttgagctccaaaattctctctcaggataaggagcattttgcacaactagcttgggatgctgttatgaggttaaaggggagcacaaaattagaggc

SEQ ID NO: 221190 - DNA, 622 bp, Gossypium hirsutum
cccacgcgtccgtgcagatcttcgtcaaaaccctgaccggcaagaccataactttggaagtcgaaagctctgacaccattgacaacgtcaaggcaaagatccaagacaaggaaggcatcccaccagaccagcaaaggctcatatttgccgggaaacaactcgaggacggtcgcaccttggccgattacaacatccagaaggagtccaccctccatttggtattgaggcttcgtggtgggatgcagattttcgtcaagacgttgactgggaaaaccataactttggaggtggagagttccgatacgatcgacaatgttaacgcgaagattcaggacaaagaaggaattccaccagatcagcaaaggttgattttcgctgggaaacaattggaagatggaaggactttggctgattacaatattcagaaggaatccactctccaccttgtcttgcgtcttcggggtggtttctaagctctcctatgaaaatgaggtttctggattttatgtgaatgattgtgatgtctggccctgttaaggcctcataaataaacctaaactattttatctgtgttttatcctatgtaatgatattatatgaataaaaaatacatgtttacctt

SEQ ID NO: 221191 - DNA, 650 bp, Gossypium hirsutum
cttaaaaacagcaaagaagatgtcatcatcaacggcggccaatcaagtgagggcatctcacatactcatcaatcaccaaggctctcgtcgtaaggcttcttggaaggatccagaaggtcgcgtcatctccaccaccacccgagacgccgctgtctcacagcttaaacttctcggcgacgacatcgtttccaacaaggctaagttcgacgaggttgcctctcgctactcggattgcagctccgctaaacgtggcggtgatctcggctgcaaggagtgtgcctcaactcagttcttattgttaattatctgtgacctttagttggtttataccagcattacgggacataatgcaaactaaaaaccttatacaaactttttggtggaggtccttttggtcgaggccagatgcaaaagccatttgaggatgcaacatataatcttaacattggcgagataagtgacattgtggataccgatagcggtgttcacatcataatgcgaactggttaatcattattgatggagcctggatatcgtgagcaattagttcagtcttctcggaaaattctatcgaagaacattctgaaatcacttctgataatgcctatggctaatttcaatggcttaatttttgaacccctttggttttg

SEQ ID NO: 221192 - DNA, 579 bp, Gossypium hirsutum
tccgctcaacattcccatttccaatctccagctcccaaggtaaatatgccgatcagaaacatagcggttggccggcccgaagaggctactcaccccgatgctctcaaggctgctttggctgagttcatctcaaccttgatcttcgttttcgctggatcgggctcaggaatggcctttaacaagttgactgacaacggagcaaccaccccggctggtctcgtagccgccgctctagctcatggcttcggtcttttcgtcgctgtctccgttggcgccaacatctcaggtggccacgtcaaccctgccgtcaccttcggtgcttttgttggcgggaacatcactctcttgcgcggcattctttactggatcgcccaactcctaggctcaaccgtcgcttgcctgttgcttaagttcgctaccggcgacctggctgtacccgcttttgggttgtcatcaggtgtgggcgtgtctaacgcattggttttcgaaatcgtgatgaccttcggattggtgtacacagtgtacgccacagccgttgatcccaaaaagggaagcttgggaacaatcgcaccattggca

SEQ ID NO: 221193 - DNA, 551 bp, Gossypium hirsutum
cttacattccgatccaaccacaagcgccaggtccgtgctgctgtcgttgaaacaattgtgaccgcctccgagacttccttggtcgtgaaatccgtcaacaccatcatattgttgtctattgatgcggacgtgaaggcgaattcaggtgatgctgggttgcccatgggctgtgctcccatgggtcacattgtgtacgaggaattgatgaggtataaccccaagaacccttactggttcaaccgtgaccgcttcattctgtccgctgttcatggttgtatgctgcagtatgctctgctttacctggctgggtacgacagagtcctggaagaagatttgaagagttgacgtcagtgagtaagcagaacccgtggacatgcagagatctttgaaacaccatgagttgacgtcacagctggcactatgggtcagggtatcgcaaatgctgcaggaatggctattgctgagaaacacttggctgctagattcaacaagccagacaatgagattgttgatcactacacatatgttatcttaggagatggttgtgaaat

SEQ ID NO: 221194 - DNA, 548 bp, Gossypium hirsutum
cccacgcgtccggccacccttccctgatttcatttcttctgtactcacagtaatcacctctccaaaaccctagctctttcactcactgccgccaatttcaaccaattatttgcttataagcgtcgaaaacgatgtcggacgacgagcgagaggagaaggagttggatctcacctcccctgaagttgttactaaatacaagagtgctgctgagatcgttaacaaggctttgcagttagttgtaaaagaatgcaaaccaaaaactaagattgttgacatttgcgagaagggtgatgcatttatcagagagcaaacaggcaatatgtataagaatgctaagaggaagattgagaggggtgttgccttccccacttgtctttctgttaacaacactgtttgtcatttctctccacttgctagtgacacctccgagctgcaagaaggtgatatggtgaagattgacatgggttgccacattgatgggtttattgctgtagttgcgcacacccatgttgtccaggaaggactagtcaatgacaggaaggctgat

SEQ ID NO: 221195 - DNA, 599 bp, Gossypium hirsutum
  unsure (1)..(599): unsure at all n locations
cccacgcgtccggagaagaaaacaatgtcaggtcctcagtgctgttcgaatccaccaacattggattctgcaagtggggctggtcacgttgagaatcttgctggtctcaacacttatgtttctgggtctcttcaatctaagcttgctgtttttcttatctctgatattttcggatatgaggctccaaactttagaaagctcgcggacaaggttgcagccgctgggttctatgtggtggctcctgacttcttttatggagaaccctatgaccctaataaccctgatagacctctatctgtttggataaaggatcatggaccggataaaggttacgaggatgcaaagctcgtaattgacgctttgaaaagtaaaggggtttcatccattggagctgctgggttctgttggngtgctaaagttgtggctggactggctaaggatccccttatccaagcagctgtaatgttacatccttcatttgtgactgtggacgatatcaaaagtgtgaaggtgcccattgcgatattgggagctgagcatgaccatatatcntccccagagcttttaaaacagtttgatgagatcttaaaagcgagtga

SEQ ID NO: 221196 - DNA, 407 bp, Gossypium hirsutum
cccacgcgtccgctgagtttaagcatatcaataagcggaggaaaagaaacttaccaggctacttcggcaatgtaatctttacgactgcactaattgctgaagctggtgatctcgaaaccgaatcgtttactgacaccataaagaggattcatgaacgattaaatcagataaatgatgaatatttaagatcagctattgattacattgaaaaagtgcctgatttaaacaccttggttagaggaccgcatacttttcgatgcccaaaccttgttgttgttccatggaactggttgcctatatatgaggcagatttcggatggggtcgtcccatatatatggggccagggaatgtcgtccaagaaggtaaaatttacatgctaccaagtccagctaacgatgggagtttg

SEQ ID NO: 221197 - DNA, 653 bp, Gossypium hirsutum
cccacgcgtccgcccacgcgtccgatcactcccaatactttcataacatttcacgaacttcactctccagtctccaatggcggctgccgtctccaccatcggtgctgtcaaccgagcaccgttgagtttgaatggatcaggtgccggagcttctgctccaagctcagctttcatggggaacagcttgaagaaagtgagcgctaggttcaacaacaacggcaaggctccagtgggaagtttcatgattgtggctgccaaagaaatcgacgaagacacacagaccgaccaggaccgatggaagggtcttgcttatgatatctccgatgaccaacaagacattaccagagggaaaggtatggtcgactcattgttccaagctcccatgaacgatggtactcactatgctgtcatgagctcctatgagtacattagccaaggccttcgcacatacgacttggacaacaacatggatggattctacattgccccagctttcatggacaagcttgttgttcacatcaccaagaactacatgacccttcctaacattaaggttcctcttatcttgggtatttggggaggcaaaggtcaaggaaaatctttccaatgtgagggctgtcttgccaagatgggaatcaaccccattatgatga

SEQ ID NO: 221198 - DNA, 664 bp, Gossypium hirsutum
cccacgcgtccgaaggacttgatggggaagtccctaatgaagcgtgtgatgcagacctggcttcctgcaagcaatgctctcctggaaatgatgatctttcaccttccctcacctagcaaggctcagaagtatcgtgttgagaacttgtacgagggtcctcttgatgatatctatgccaatgctatcagaaactgtgatcctgagggtcctcttatgctctatgtttcaaagatgattcctgcttctgataagggcagattctttgcttttggtcgtgtcttttctggcaaagtctcaactggattgaaggttaggatcatgggtccgaactatgtccctggtgagaagaaagacttgtatgttaagagtgtgcaaagaactgtcatttggatgggaaagaagcaagagactgttgaagatgtaccttgtggtaacacagttgccatggttggtttggatcagtttatcaccaagaatgctactttgacaaacgagaaggaagttgatgcccacccaattcgtgcaatgaagttttccgtctcccctgttgtccgtgttgctgttcagtgcaaggttgcatctgatcttcctaaacttggtgaaaggcttaagcgtttggccaagtctgatcctatggttctctgtaccattgaagagtcccgag

SEQ ID NO: 221199 - DNA, 356 bp, Gossypium hirsutum
aagaaatcaaaagacaaaatagccaataacaatggcactcagaatgtgggcttcttccactgccaatgcactcaaaatctcttgttcctccaaacctaatgtttcccttgctttctcactctctagatgcttttccactgttttggatgggctggagtatgctaattcacatgaatgggtgaagcatgaaaggtccggggctaccattggcattacttaccatgctcaagaccatcttggagaagtagtgtttgtggagttgccggaaccaggtggttcagtgagccaaggaaaagggtttggagcagtggaaagtgttaaagcaacaagtgatatcaattccccaatcttcggcg

SEQ ID NO: 221200 - DNA, 535 bp, Gossypium hirsutum
cccacgcgtccgtctggtttcactgtcagagctcatcagacaccggccgagcctgagactggacgcagagccatgttgggtcttgttgctgctggtttggccactggctcctttgttcaagctgtgcttgccgatgccagaagcatcaaggttggcccacctccccctccctctggtggactgcctggaactctgaactctgatgagccaagagaccttgttgtgccatacaaagacaggttctttctccaaccagttactccagctcaggcagcacagagagcaaaggaatcagccaaggacattctgggtgtcaagaacttgattgacaaaaaagcctggccttatgtcatgaatgatctccgtctcaaggccgagtatctccggtatgaccttaacaccgtcatggctgccaagtccaaagatgagaagaaaactctaaaggacctcaccaagaagctcttcagtaccatcgatgatcttgaccatgcagccaagatcaaaagcacccctgaagcagagaaatcttacgctc

SEQ ID NO: 221201 - DNA, 666 bp, Gossypium hirsutum
  unsure (1)..(666): unsure at all n locations
cggacgcgtgggttagctatagcatacactactagtacccactactagcaatggcttcctcaatgatctcatcggctaccattgccactgcctctccggcacaggctaacatggtcgctcctttcaccggtctcaagtctgcctctgctttcccagtcaccaggaaggccaacaacgacattacttctctcgcaagcaatggcggtagagtgcaatgcatgcaggtgtggcctcctactgggaagaagaagtttgagactctctcatacctccccgatcttacacccgtgcagttggctaaggaagtagattaccttcttcgctcaaaatgggttccttgcttggaattcgaattggaggagggattcgtgcaccgtaagtactcgagcttacccacgtactacgatggacgctactggaccatgtggaagctgcccatgttcgggtgcaccgactcggctcaggtgttggaggagcttgaggaatgcaagaaggcataccccaatgcattcattagaatcattggcttcgacaacgtgcgtcaagtgcagtgcattagtttcattgcctacaagcctncaggcttctaagctttttattaactttgtctctccaattgtttgaatttgtactcagaaaaaatcatgttctttacttttgcttttc

SEQ ID NO: 221202 - DNA, 663 bp, Gossypium hirsutum
ctcaattcccccacctcattgtaggcaaaatggccactgtttgtgcttcttctgccgttgcagccgttgccatctcatcccccagttcccagaggagtggatcagtagtgaggacaacaaaggcttctttccttacagggaagaaacttcgatcagtcaaaaagtacacaaaaccagcagcagtccgaaccgttccggtgtgtgcagtggctgaccccgaccgacctctttggttcccaggcagtactcctcctccatggctcgatggcagcctccctggagacttcggttttgatcctctaggccttggatcagaccctgagaccttgagatggaacgtacaggcagagctcgtccattgcagatgggcaatgttaggagccgctgggattttcatcccagagttcctaaccaaaattggcattttaaacactccatcatggtactctgctggaaccgaggaatacttcactgacaccaccaccctcttcatcgttgagcttattttcatcgggtgggcagaagggagaagatgggctgacattctcaagcctgggtgcgtaaacactgaccccatcttccctaacaacaagctcacggtcacccgatgtgggtaccctggtgggctgtggttcgaccctctaggttgggaactggtcccct

SEQ ID NO: 221203 - DNA, 576 bp, Gossypium hirsutum
cccacgcgtccggcagctgttgccatctcatcccccagttcccagaagactggatcagtagtggggacaacaaaggcttctttcctttcagggaagaaacttagatctgtgagaaagtacacaaaaccagctgccggaccaacatttccagtgtgcgccgccgccgaccccgacagacccctttggttcccaggcagcactcctcctccatggctggatggcagtctccctggtgactttggtttcgatcctctcggtcttggttctgaccctgagacattgagatggaacgtacaagcagagctggtgcactgcagatgggcaatgttgggagctgctggtattttcatcccagagttcttaaccaagattgggattttaaacactccatcgtggtactcagctggaacagaggaatacttcactgacaccacaactctcttcatcgttgagcttatttttatcggctgggctgaagggagaagatgggctgacattctcaagccagggtgtgtaaacaccgaccccatcttccctaacaacaagctcaccgggactgatgttggatacccaggt

SEQ ID NO: 221204 - DNA, 533 bp, Gossypium hirsutum
atataccagaaaatcaaaaagaagatgaaaagagatccccatgatgtctcttacaatcccaactaatctctcaaaatcaattttgaagccaaagctggagacccaagtgatccccaaggcttcatacagatcattgattgtatgctcctccagcaatccttcctcctccgacaaatcggcttcatcactccaggccttctcagcggctctcgctctttcttccatccttctttcggatccactccctgctgttgcggacattgcggagctcactccttgcaaagagtccaagcaattcgccaagctgcgagaagcatcagatcaagaagctggaatcctcgttgaagctttacgcccccgatagcgcaccggctctcgccattaaagccaccattcgtgaaaaccaatagaccggtcgacaactacggcaagtacggattgctctgcggctccgatgggttgccttatttgatagtgagcggtgatcagaggcactggcgtgagttcatcacgcccggtctgttgttcttgta

SEQ ID NO: 221205 - DNA, 388 bp, Gossypium hirsutum
attcaccatgtctgacaggtgcggcaactgtgactgcgctgaccgcagccaatgcacgaagggaaacagcaacaccatgatcattgagactgagaagagctacatcaacactgctgtgatggatgctccagctgagaacgatggcaagtgcaagtgcggtactggctgcagctgcacagactgcacctgtggccactaagccaacatacaatggtcatgcttcaggtcatggcatatatagggatctaaataatgaatttaaggttgaataatttgtctgttgtagtttgtgtggtgacttatatctgtcagttaacctttgtatcctttactatgatgtaatggctatgcttatggccttatctggttaatgaagtatccttactat

SEQ ID NO: 221206 - DNA, 635 bp, Gossypium hirsutum
cccacgcgtccgctttgttccacctctttctttctttttctccaaagccatcatgaatctcattaataggctcagccccaagcgtctctttcgatctaataaaaaagatagatccatcgtctccaagttcgacccctcctcctatagttccggttccgccgtttcctcctcttcctcctccgaatccgtctcttccaccctcaaagaacatcagtacccttccacggctaccgctggcttcgtaacgcccaccagtgttttgccccaaacatcaggtgactggtccgattttcccgctaatttttatctagaactttgccaggcgtttaaaatgttagacaaagataacgacggggttatatcgagaagcgagctcgaggctttgcttggcaaggtcgcaaggcagccgcccagccgggacgaggtttccttgatgttgagcgaagtggacggtgacggcgacggctacatcaacctggaaacgttgatgaaccaggtggttggaccggcttgcgacgaacccgcctgcgaaccggaactgagggagacttttgatatatttgacacagatcatgacgggaagatcacggcggaggagttgatggcgttttttaaggacaaaataggggatgagc

SEQ ID NO: 221207 - DNA, 612 bp, Gossypium hirsutum
  unsure (1)..(612): unsure at all n locations
cccacgcgtccggccggtgcaaccgtagctaaagttagcgccacagccaaggttgcagcctctccagtcccaaggggcagcatcaaggcctccctcaaagacgttggtgttgctgttggggcaactgctgcaagcgtaatccttgccagcaatgccatggccattgaagtcttgctcggcagtgacgatgggggtctggctttcattcccaaagaattcagcgtaagcccaggggagaagattgtgttcaagaacaatgccggattcccacacaatgttgtgttcgatgaggacgaaatcccaagcggcgtcgacgtatccaaaatctccatgcctgaagaagagctactcaatgccaaagacgagacttacgctgttaccttgactgagaaaggaacctacagtttctactgttctcctcaccagggtgcaggtatggttggaaaagtcacagttaactgagttatacatttatcttttcaacccctttgtgctttgtatgtatcatctcacacatctcttctactttttgagcactagagttttgagtattggggatggatgaggtgatcttgaaaaatcaactatgatgcttttgtatcttnctatctt

SEQ ID NO: 221208 - DNA, 552 bp, Gossypium hirsutum
  unsure (1)..(552): unsure at all n locations
cccacgcgtccgattaaaataggagactccgcccatttttcttcattttcctccaaccataatcattatatttatatttcttcctctctcttctttatttcttcaagtttaaggcctcaaaatggaggcagccactgtggttggatcttctatgtctctacatcgaacttcatgctccgctgccagatccgcccttttagctgccaatggcccgctctttccacgtttcgctgctaaccctcgctcctccttctcgatcaagctttattcttcagtttcatattcaaaatcacggaataggagaatgggtttggggggtaggagaggcatggtggtaaaggcgtcttcatctcctgactcagctgaacccaatgctcaaattgcgtcacttcggatggaatctccaattggtcagnttttgtctcaaatcttgataagtcatcctcatcttgttcctgctgcagttgagcagcagcttgaacaacttcaaactgaccgtgatactgatgaaaagaaggaagagccgtctgcttcaggcacggatttagtatt

SEQ ID NO: 221209 - DNA, 615 bp, Gossypium hirsutum
cccacgcgtccgattcaaggcacaaaatttgacccaaaatggcctctgtttgtgcttcttcggctattgcagctgttgccatctcatcccccagttcccagaagactggatcagtagtggggacaacaaaggcttctttccttacagggaagaaacttagatctgtgagaaagtacacaaaaccagctgccggaccaacatttccagtgtgcgccgccgccgaccccgacagacccctttggttcccaggcagcactcctcctccatggctggatggcagtctccctggtgactttggtttcgatcctctcggtcttgggtctgaccctgagacattgagatggaacgtacaagcagagctggttcactgcagatgggcaatgttgggagctgctggtattttcatcccagagttcttaaccaagattgggattttaaacactccatcgtggtactcagctggaacagaggaatacttcactgacaccacaactctcttcatcgttgagcttatttttatcggctgggctgaagggagaagatgggctgacattctcaagccagggtgtgtaaacacagaccccatcttccctaacaacaagctcaccgggactg

SEQ ID NO: 221210 - DNA, 620 bp, Gossypium hirsutum
gaaagagcttcttcactttgacaacaatactcactttctcttacagagattgagagaaaatcacaaacacacatttatatagcacagtgatcatcatggctcttcacttgtcttgggttttcgtttttggtattctaggcaacgctgtttcattcatggtttccttggctccactgccaacattttaccaaatattcaagaagaaaacatcggaaggtttccagtcgattccctacgtggtttcgctcttcagtgcgatgctttggatttactatgcactgcttaagaaagatgccattttcctcattaccatcaacactttctgcgttttcattcaaactttttacattgttacttacttttactacggcccaaagaaagaaaagatcgtcacggtgaagcttatgcttctcttcaaacgttttcggttcggagttatctttctcgcaacttacttcctaaaaaaacccttcccttcgtctcctgattttgggttacatttgcatggcattcgctttggctgtgttcgtcgcacctctcgccattgtgagaaaagtcataaaaacgaagagcgttgagtacatgccatttactttatcagtgttcctcactttaggagc

SEQ ID NO: 221211 - DNA, 598 bp, Gossypium hirsutum
cccacgcgtccggatgtcttggttcatggagagcctgagagaaacgatatggttgagtactttggtgagcagttgtctggttttgcattcactgttaatggatgggtgcaatcttacggatctcgatgtgtcaagccaccaatcatctacggtgatgttagccgccccaagccaatgactgttttctggtcatctaccgcacaaagcatgactgcacgcccaatgaagggaatgcttactgggcctgttaccatccttaactggtcctttgtcagaaatgatcagccccggtttgagacttgctaccagattgccttggccatcaaggacgaagtggaggatcttgagaaggccggtatcaatgttatccaaattgacgaggctgctttgagagaggggttgcctcttagaaagtcggagcacgccttctacttgaaatgggctgtccactccttcagaatcaccaactgtggtgtacaggacactacccagatccacactcatatgtgctactccaacttcaatgacatcatccactcaattatcgacatggatgctgatgtgataaccatcgagaactcacgttcagatgaaaagc

SEQ ID NO: 221212 - DNA, 678 bp, Gossypium hirsutum
  unsure (1)..(678): unsure at all n locations
cttcctcctcctttcctccgtcgttgcttcggccgtcgtctccgacgttaatagcgacggcgatcctctcatccgtcaagttgtttccgatggtggtgtcgaggaggactccgatgaccatctccttaacgcggagcaccacttcacgctgttcaaatccaagtatgggaaaacctacgcatcccaggaggagcacgattaccgactgggagtcttcaaggctaacctgcgtcgggccaagcgtcatcagctcctggaccccagtgccgtccatggcgtcacaaagttttccgatttaactccatcggagttccgccgccagtatctaggcttgaaaccgctcaagctcccagccgatgctcaaaaggctcctatccttccgactgacaacttaccggatgactntgactggcgtgaccacggcgccgtcactggcgttaaagaccagggttcctgtggatcgtgttggtcgttcagtgcgacggnggctttggagggagcccattatttggcgacaggagagcttgtaagcttgagtgagcagcaacttgttgattgtgatcacgagtgtgatccacaacaatatggtgcgtgtgactcanggtgtaattgtggtctaatgacctctgctttcgagtacaccctgaaagttggtggacttgagagaggagaggatta

SEQ ID NO: 221213 - DNA, 576 bp, Gossypium hirsutum
aacaacatggatggattctacattgccccagctttcatggacaagcttgttgttcacatcaccaagaactacatgacccttcctaacattaaggttcctcttatcttgggtatttggggaggcaaaggtcaaggaaaatctttccaatgtgagcttgtctttgccaagatgggaatcaaccccattatgatgagtgccggagaattggaaagtgggaacgccggagaaccagccaagttgatcaggcaaaggtaccgtgaggccgccgacattatcaagaaagggaaaatgtgttgcctctttatcaacgatctcgacgctggagccggtcgtatgggaggaaccacacaatacacagtgaacaaccaaatggtgaacgccacactcatgaacatcgctgataaccccaccaacgttcagctccccggtatgtacaacaaggaagagaaccctcgtgttccgatcattgtcaccggtaacgatttctcgacgctgtacgcgccgctcatccgtgacggtcgtatggagaagttttactgggcacccaccaaggaagataggatcggtgtttgcaca

SEQ ID NO: 221214 - DNA, 646 bp, Gossypium hirsutum
taagattatggtgaaaaactaaacataataaagtccctcataacattcttcgacttgcttcattgattagcccaaagataaacataaccaaaaagaaaaatggcttctgcttccgctactctcctcaagtcttcacctattatcgacaagtccgagtggattaagggccaaaacctccgccacccttcggtttgttttgtacggtcacaccctacatcggccgcctttaccgtccgtgctagttcatatgccgatgagcttgttaagaccgcgaaaactgttgcatctccaggtcgtggtattttggccatggatgaatcaaatgctacatgtgggaagcggcttgcctcgattggtctcgagaataccgaggcaaaccggcaagcttaccgtacccttctcgtgtctgcccctggcctcggtaactacatctcgggagctatccttttcgaggagactctctaccaatctaccatcgatgggaaaaagatggtcgatgttcttgttgagcaaaatattgtccctggtatcaaagttgacaagggtttggttccactccctggttccaacaacgagtcatggtgccaaggtcttgacggtctttcattccgcacagctgcctactaccagcagggtgcttcgttcg

SEQ ID NO: 221215 - DNA, 634 bp, Gossypium hirsutum
cggacgcgtgggcggacgcgtgggttttcattttcaaaccccactccccccatggctggtctcaagcttatttgtggcctagtattgttgtgcatgttggttttggaacccatggccacaactgctctcacatgtggacaagtggcaagccaaacgggtagttgtataaggtatttgcagcgtggagggaaccctccagctgcttgctgcaacggagttaggaacctaaacaggcaagctagaaccacccgtgaccgtcaaactgcatgcagatgcttgcaaactgccgctaggaccatctccggtatcaatactaaattggctgccggtcttccggccaaatgcggtgtcaaaattccttacaagatcagcccctccaccaactgcaatagagtgagatgatcatggatgaagtaagcagcttgcaggaaatgttatatatatatatatataagcgtgaaataaagattttgggatggatgcttattccaaaatccaaattagtgtcttgattaattatttgtttatctttgagatgttggctctaattatgttgtctatgtatggaatgttcagtgttttatgagttaaaaagcctatgttttattatattacatgatatctggattgtttc

SEQ ID NO: 221216 - DNA, 673 bp, Gossypium hirsutum
  unsure (1)..(673): unsure at all n locations
ttcaattttcactagctacttgacttcattgcttaattattatttgcagaaagatggattcaattaaatcgcatgcagtatgtcttccaagcccagcacaaggtcatattaaccccatgatgcaactggccaagctcttgcactctagaggcttccatataacctttgtcaactccgagttcaatcatagacgatttatacggtctagaggggaagaagctgttaagggtctgcctcatttccggttcgaagccatacccgacgggctgccaccttccgattctgatgcgactcagtctgttccggcactatgcaattccacacggaaaaattgtttggctccattcttggagctactatctaagcttaattcctcaccccacctgccgcctgttacatgcatagtttgtgatggaaccatgaactttggtaccaaggcagctcaactcattggggtgccttatgttcaactctggacttcttcaaccgttagctttctgggatttctgcactacaaagaactagctcaaagaggcattgttccattcaaagatgaacgctntgttagcgatgggacacttgagatgcccattgattggatccctggtatgcctaacatgcgtntnaaggacataccaagcttcataagaaccaccgaccctgatgacttcat

SEQ ID NO: 221217 - DNA, 646 bp, Gossypium hirsutum
cccacgcgtccgcccacgcgtccgccacactctcaaattcagataacaatttcacagttgttttcttcactctctctctcagccatctccaccgtcgccgccgctgccgccgccaaccgagctctgggagtgtcagtcccaacctcagctttcatggggaagaaagtgagctcgagattcaacaacaccaggcaggttccttcgggaagttttaaggtgatggcggccgaaaaagagatagacgaagagacacagaccgaaaaggaccgatggaaagggttggcttacgatatttcggacgaccaacaagacattactcgagggaaagggatggtggattccttgttccaagctcccatgaatgatggaactcactatgctgtcatgagttcctatgaatacatcagccaaggtcttaaaacgtacaatttggacaacaacatggatggtttctacatcgctcctgcattcatggacaagcttgttgttcacatcagcaagaacttcatgtccctccctaacattaaggttcctctaatcctgggtatttggggaggcaaaggtcaaggaaaatcttttcaatgtgagcttgtgtttgcccagatgggtatcaaccccatcatgatgagtgccggagaactggaaa

SEQ ID NO: 221218 - DNA, 571 bp, Gossypium hirsutum
gccacgcgtacgattccttccacccggctgcttggttccacctgtttctttctttttctccaaagccatcatgaatctcattaataggctcagccccaagcgtctctttggatctaataaaaaagatagatccatcgactacaagttcgacccctcctcctatagttccggttacggcggttactgctcttgctgctgcgaatccgactcttccaccctcaaagaacatcagtacccttccacggctaccgctggcttagtaacgcccaccagtgttttgccccaaacatcaggtgactggtccgattttcccgctaatttgtatctagaactgtgccaggcgtttaaaatgttagacaaagataacgacggcgttatatcgagaagcgagctcgaggctttgcttggcaaggtcgcaaggcagccgcccagccgggacgaggtttccttgatgttgagcgaagtggacggtgacggcgacggctacatcaacctggaaacgttgatgaaccaggtggttggaccggcttgcgacgaacccgcctgcgaaccggaactgagggagactttt

SEQ ID NO: 221219 - DNA, 642 bp, Gossypium hirsutum
gtttcccatgaaagtagccaaggaagggttgatgaccatccttcttttagaccccatttgccacctgaattctacaagaaacctactgtgaaagtctattgcaaagctgatcctaattttcatctcaccatcagagacggtaaagttattcttgctccatctgatccctctaatgaattccagcactggtacaaagatgagaagttcagcacaagtgtgaaagatgaagtgggtttcccaagcttttctctggttaataaagccactggtcaagccattaaacattccattggagcttcttatcctgtccaactggtaccttacaaaccagatcatcttgatgagtcagttgatttcaggtgctctgatgtgtcctccaccgttgatgcatcactcaccatggtcatgggagacgacatggttaaggtgattgcttggtacgacaatgagtggggttactctcaaagagttgtagacttggctgacattgttgccaacaactggaagtgattcgaaatacttgtctgcagtgtgatatggttaatttttgctcacctcatttcttttcggctttcatcaaagatgtataattttaacgtggactgtatgcaataaaaatcgtgcttgcactttgatggcctt

SEQ ID NO: 221220 - DNA, 665 bp, Gossypium hirsutum
tttagctatagcatacactactagtacccactactagcaatggcttcctcaatgatctcatcggctaccattgccactgcctctccggcacaggctaacatggtcgctcctttcaccggtctcaagtctgcctctgctttcccagtcaccaggaaggccaacaacgacattacttctctcgcaagcaatggcggtagagtgcaatgcatgcaggtgtggcctcctactgggaagaagaagtttgagactctctcatacctccccgatcttacacccgtgcagttggctaaggaagtagattaccttcttcgctcaaaatgggttccttgcttggaattcgaattggaggagggattcgtgcaccgtaagtactcgagcttacccacgtactacgatggacgctactggaccatgtggaagctgcccatgttcgggtgcaccgactcggctcaggtgttggaggagcttgaggaatgcaagaaggcataccccaatgcattcattagaatcattggcttcgacaacgtgcgtcaagtgcagtgcattagtttcattgcctacaagcctccaggcttctaagctttttattaactttgtctctccatttgtttgaatttgtactcagaaaaaatcatgttccttacttttgcttttcctttctttga

SEQ ID NO: 221221 - DNA, 627 bp, Gossypium hirsutum
cgggaagctgcaaatgtatttggaaagccaaaaacaaacacagagttcatcccatacaatggggaagggttcaagctgtcaataccatcaaaatggaacccaagcaaagaggttgagtacccaggtcaagtcctgagatacgaggacaacttcgactccaccaccaatgttgctgtcctggtcactcctactgataagaagtccattactgacttcggttcccctgaaaatttcctctctaaggtggactatctgcttggaaaacaagcatactctggcttaactgatgctgagggtgggtttgactcaaatgcagtggcaactgcaaacatattggagacttcaactcctgtgatcggagggaaacagtactacttcttgtcggtgttgacgagaactgctgatggagatgaaggtggcaagcaccaactaattacagccaccgtaaacaatggtaaactttacatttgcaaagcacaagctggggacaagcggtggtttaaaggagctagaaagtttgtggagagtgctgcaaattccttcagtgttgcttagttaaaagtcttacttgttaactagagaataatttcatgtaaatcttgttagaaaatatctgatgttggacct

SEQ ID NO: 221222 - DNA, 647 bp, Gossypium hirsutum
gtagccgccgcctgcgtctctctcttcatctctctgaaccaaaaagtctttagcttttcgcttcgagagagaccatgttggtttaccaggatctcatctccggtgacgagcttctttctgactcattcccctacaaggaaatcgagaatgggatgctgtgggaagttgagggaaagtgggttgtgcaaggagctgtcgatgttgacattggtgccaatccttcagccgaaggtgctgatgaggatgaaggtgttgatgaccaagctgtgaaggttgttgacattgttgacactttcaggcttcaggagcaaccccctttcgacaagaagcagtttgtcgtgttcatcaagaagttcatcaagaacttgacaccaaaactggatgcggaaaagcaagagtccttcaagaaaaacattgagggagcaaccaagtttttgctttcaaaattgaaggaccttcaatttttcgtaggagagagcatgcatgatgatggatgcttggtgtttgcttactacaaggatggtgctgttgacccaacatttttgtactttgcatatgcattgaaggaggtcaagtgctgaggtttgaagcaaagaaaaaaaaagtggttgctgaaagaattaagtccttttattattgcttttggc

SEQ ID NO: 221223 - DNA, 541 bp, Gossypium hirsutum
ctcacgcgtacaggccgtccgcaattctttgtagagatgacaagtacatagtgaccatgttatgatacaaatatgacagggtgcagtgtccattaaaacacacatatggatgacactatttaactaagtcacagaggtgggatcacccctgtttagccccaatataaaagctcaacctccgttaacgcttacaggtccatatgagaagccccagttcagatgggtcttcgtgagcttagagaccggcttgattcagtaaagatcacgcagacgatcactgaagtcatgaatcttgtggctgatgatcaagcatggagagcacatgaagctgctgtcaaaggcagacctttctgtgagtccaatggatgaagctctttacatcatgaatgaacagttccagactgcagacatagatgcgtctcttacaaacgataggcttgctaaaaaagttgatacggttgccgttactgcagatcgagggctatggggaggtcctaacaaggctatcacaaggtaagctggggcttgaacggcagcattg

SEQ ID NO: 221224 - DNA, 553 bp, Gossypium hirsutum
  unsure (1)..(553): unsure at all n locations
cccacgcgtccggagactcttttgtatacctgtagcatatagtaatagtaagcagtaatagcaatggcctcctccatgatctcatcggcaaccattgccaccgtgaaccgctcctccccggcacaggccaacatggtggcccccttcaccggcctcaaatctgcctctgctttcccagtcaccaggaaggccaacaacgacatcacttctcttgcaagcaacggtgggagagtgcaatgcatgcaggtgtggccgcctcttgggaagaagaagttcgagactctctcatacctgcccgatcttactcccgtacagttggctaaggaagtagattaccttcttcgctctaaatggattccttgcttggaattcgaattagaggagggattcgtgcaccgtaagtactcgagcttacccacgtactacgatggacgctactggaccatgtggaaactgcccatgttcggggtgcaccgactcgctcaagtgtngaaggagctngaggaatgcaaganggnaataccccatgcattcattagaatcattgggttcg

SEQ ID NO: 221225 - DNA, 502 bp, Gossypium hirsutum
ctcccccacacattcaaaatcctattccttttctcctttttctttttctcagacaagatgggttctcagggatcggttatggcgatgcttttgctgatgatgttcactttatcatcagcttccgacatgtccattatatcctacgatgaaacacatcccgacaagtcaacgtctagttggagaacagacgacgaagttatggccatgtacgaggagtggcttgtaaagcatggaaaaacatacaacggtttgggtgagaaagagaggaggttccagatttttaaggataaccttaggttcatcgatgaacataacgccgatgagagtcagagttttaatgttggtttgaaccgctttgctgatcttaccaacgaggagtaccgagccatctacctgggaatcaagaaaaccccacccggaaagtttccaaggccagtgaccgatactccgcgcttttcggcgaaaagttgcccgattccggtgattggagggaaaaaggggc

SEQ ID NO: 221226 - DNA, 618 bp, Gossypium hirsutum
  unsure (1)..(618): unsure at all n locations
cccacgcgtccgtccccttccaacgatggaccgcttctctcttctcttcctcctcctttcctccgtcgttgcttcggccgtcgtctccgacgttaatagcgacggcgatcctctcatccgtcaagttgtttccgatggtggtgtcgaggaggactccgatgaccatctccttaacgcggagcaccacttcacgctgttcaaatccaagtatgggaaaacctacgcatcccaggaggagcacgattaccgactgggagtcttcaaggctaacctgcgtcgggccaagcgtcatcagctcctggaccccagtgccgtccatggcgtcacaaagttttccgatttaactccatcggagttccgccgccagtatctaggcttgaaaccgctcaagctcccagccgatgctcaaaaggctcctatccttccgactgacaacttaccggatgactttgactggcgtgaccacggcgccgtcactggcgttaaagaccagggtcctgtggatcgtgttggtcngtcagtgcgacgggggctttggagggagcccattatttggcgacaggagagctngtaagcttgagtgagcagcaacttgttgattgtgatcacgagtgtgat

SEQ ID NO: 221227 - DNA, 623 bp, Gossypium hirsutum
  unsure (1)..(623): unsure at all n locations
ggagtacttgcaatatgatttggattctttggaccagaacctggctaagaattcggctggtgagataattggaactaggaccgaggttgccgacgtgaaggcgacgccgtttcagccttacagcgaggtttttggtctacagaggtttagggagtgtgagttgatccatggacggtgggccatgttggctacgcttggtgcacttaccgttgaatggctcactggtgttacatggcaagatgctggcaaggtggagttagttgagggttcatcgtatctcggccaaccccttcccttctcgatgacaacattgatttggatagaagtattggtgatcggattcatcgagttccaaaggaacgccgagcttgacccggagaagaggctgtaccccggaggaaagtactttgatcctctcggnctagccgccgacccggagaagaaagcaaccctacaattggctgagatcaagcatgctcgccttgccatggttgctttcttggggtttgctgtccaagctgctgcaacaggcaaaggccctctcaacaattgggctactcacttgagtgacccccttcatactaacattattgacactttcacctcttaaaaaaagccatatt

SEQ ID NO: 221228 - DNA, 674 bp, Gossypium hirsutum
cccacgcgtccgaggagctgatagacctttatggtttgcatctaaacaaagcctttcatacttggatggcagccttccaggtgattatggatttgaccccttgggactctcagaccctgaaggtccaggagggttcatcgagcctaaatggctagcctacggtgagatcatcaacgggcgttatgctatgttgggtgcagtaggtgcgattgcccctgaaatacttgggaaggccggtcttatcccagcagaaacagccctcccttggtttagaaccggtgtgatcccaccagcaggaacatacagctattgggcagacccttacactttgtttgtgttcgagatggcactcatgggatttgcagagcacagaaggttccaagactgggccaaaccaggttcgatggggaaacaatatttcttggggttcgagaagtaccttggagggtctggtgagccggcataccctggaggaccactgtttaacccacttggttttgggaaagatgagaagtcattgaaggatttgaagctgaaagaagtgaagaatgggagattggcaatgttggcaatcttgggttacttcatacaagggctcgtgacaggtgtaggaccataccagaacctgttggatcacttggctgaccctttcaacaacaatgtcttgactaacc

SEQ ID NO: 221229 - DNA, 566 bp, Gossypium hirsutum
cccacgcgtccgcccacgcgtccgcccacgcgtccgcccacgcgtccgcccaacctcagctttcatggggaagaaagtgagctcaagattcaacagcaccaggcaggttccttcgggaagttttaaggtgatggcggcggagaaagagatagacgaagagacacagaccgaaaaggaccgatggaaagggttggcttacgatatttcggacgaccaacaggacattactcgagggaaagggatggtggattccttgttccaagctcccatgaatgatggaactcactatgctgtcatgagttcctatgaatacctcagccaaggtcttaaaacgtacaatttggacaacaacatggatggtttctacattgctcctgcattcatggacaagcttgttgttcacatcaccaagaacttcatgtccctccctaacattaaggttcctctaatcttgggtatttggggaggcaaaggtcaaggaaaatctttccaatgtgagcttgtgtttgccaagatgggtatcaaccccatcatgatgagtgccggagaactggaaagtggaaacg

SEQ ID NO: 221230 - DNA, 670 bp, Gossypium hirsutum
accacacaaaaatcaaccatggcagcagcagccagagtgatagccatcgccggcaactccaccgccgccgcgtcttcctgcttgcttatcaaaacaccgttcgctttacaacgctgcagcaacggacttagattcaacaacgtcagacgatcatcgaaaagattgttttcttgcaatgccatttataaccctcaggttcaaatcaaacaagaaggccaacccgaaactctcgactatagagtcttcttcgaggatacttcgggcaaaaagatttctccttggcacgatgttccattgcacttgggagatggtgtttttagcttcattgttgagatacccaaagaatcaagtgctaaaatggaggttgctactgatgaactttacactcccattaaacaggatacaaaaaagggcaagcttcgatattacccctataatataaattggaattatggattgcttccacaaacatgggaagacccatctttggcaaactctgaagttgaaggagcatttggtgataacgaccctgttgatgtcgttgagatcggtgaatcccggaggaaaatcggtgacattttgaaggttaagcccctggctgctttagctatgaatgatgaaggggaacttgactggaaaatggtgccatttcattagatgatccaagggc

SEQ ID NO: 221231 - DNA, 553 bp, Gossypium hirsutum
  unsure (1)..(553): unsure at all n locations
gccccatcagcgattttttggactgactatgtagcaacccgttggtatcgtgctcctgaactctgtggatcctttttctccaaatacactcctgcaattgatatatggagcataggatgcatatttgctgagatacttacaggaaaaccactatttcctggaaaaaatgtggtgcaccaattggatctcatgaccgatacacttggcacaccccctcctgaatccatatcaaggattaaaaatgaaaaggcaaggaggtaccttagtagcatgcgtaaaaagcaaccaattcctttctcacagaagttccctaatgtggatcacctggctcttcgcctacttgagcgcttacttgcatttgatccaaaagatcgtcccacagctgaagaagcattagctgacccatattnttatggtttggcaaatgtggatcgtgaaccatctacacaacctatttcaaaactagaatttgagtttgagagaaggaaattgacaaaagatgatgttagagagctgatttatcgagagatattggagtatcatccccagatgc

SEQ ID NO: 221232 - DNA, 554 bp, Gossypium hirsutum
ctttctcttgctctctttagagtatttttctcttgcaatcctttgtagagatccgggatccattgtcaccatgtcttgctcaaatctgacaatgtgggtgtcctcaaaaccctctctttctgacacttcttcactctctttccgttctttcatcagcccttttcagctcccgtctcagagctcaacccccggtaacccttccaggtcctcatctgtaaccccagttcactgtggtcttcgtgagcttagagaccgtattgattcagtaaagaacacgcagaagatcactgaagctatgaaacttgtggctgctgctaaagttaggagagcacaagaagctgttgtcaatggcagacctttctctgagtccctggttgaagttctttacaacatcaatgaacagctccagactgaagacatagatgctcctctcacaaacgtcaggcctgtcaaaaaagttgctttggttgttgttactggtgatcgtggtttctgtggaggtttcaacaatgctatcctcaagaaagctgaagcttagaattgcagaattgaag

SEQ ID NO: 221233 - DNA, 691 bp, Gossypium hirsutum
  unsure (1)..(691): unsure at all n locations
ctcaccattgttccaagtttgttgtataccaagctagaaccagcagccaacatggcctcattagcagcctccaccgctgccgcctcccttggcgtctctgaaatgctcggtaaccctctgaatttcagtggtggagctaggtcatcggctccaacaccatccaactcatccattttcaagaccgttgctcttttctccaagaagaaggccgctcctccaaagcccaaggctgctgctgtcgccccggccgatgaagagctggctaagtggtacggtccggacagaaggattttcttgcctgaaggtctgttagacagatcggagatcccagagtacttgaacggagaagttcccggagactatggatacgatccgtttggtctgagcaagaagccagaagactttgcataatatcaagcatatgagttgatacacgcaaggtgggcaatgcttggtgctgcagggttcatcatccctgaagcctttaacaaatttggtgccaactgtggccccgaagccgtttggttcaagaccggagctcttctcttggacggtaacaccttgaactacttcgggaagaacatccncatcaacccttggggtggctgtcgttgccgaagtcggtcttgttggtggtgctgaatattacaggatcatcaatgggctggatctggaggacaagccttaccct

SEQ ID NO: 221234 - DNA, 366 bp, Gossypium hirsutum
ctcacgcgtacggagagaaaaacaaaaaacacttccgaaatggcacgcaagaagatcagagagtactattccaagagattgtggaaagaacatgttaagaggctttacgttagagatatgccaatcaaatgtgcacaaattactgaatcaactgatatcaatcagctagtacagaaggagccatggcttacgacacagaaactggctggtaaacctggtatgttgttcggtatgcgtgggcagagtgcgttgggtgtcttaaatataggatgtgctcaagttataggtttcgcgaaagagcgcctaggcacataggtggaaatgaggggatacaaggaacctgttacaacactcattggttgacct

SEQ ID NO: 221235 - DNA, 623 bp, Gossypium hirsutum
cccacgcgtccgcgtttattctcttaacatggatgcctacgtactatcatcaagtcctgaagttcaacctcacagattcagggctcatttgtgttttaccctggcttacgatggcattttctgcaaatcttggaggatggattgcagacacacttgtgagcaaaggcttatctgtgacaactgttcgcaaggtcatgcaatccattgggtttcttggccctgctttcttcctaactcagctgagccatgtcaattctcctgctatggcagttttgtgtatggcatgcagtcagggaactgatgcattttcacagtctggcctttattcaaaccatcaagatattgcccctcgatattcaggtgtattacttggtttgtccaacacttgctgagtactagctggggtttttggaaccagtgctacttgttacattctgcaacatggttcttgggacaatgtcttcgaggtttcggttgtgctatacttggttggaaccgtggtctggaacctcttttcaactggtgagaaaatactggacttgcctcagatatttagatgtttagcatggagtagctcaagccttcatggtctcgagctaattgaaagagtcaatttattgaat

SEQ ID NO: 221236 - DNA, 622 bp, Gossypium hirsutum
cccacgcgtccggagactcttttgtatacctgtagcatatagtaatagtaagcagtaatagcaatggcctcctccatgatctcatcggcaaccattgccaccgtgaaccgctcctccccggcacaggccaacatggtggcccccttcaccggcctcaaatctgcctctgctttcccagtcaccaggaaggccaacaacgacatcacttctcttgcaagcaacggtgggagagtgcaatgcatgcaggtgtggccgcctcttgggaagaagaagttcgagactctctcatacctgcccgatcttactcccgtacagttggctaaggaagtagattaccttcttcgctctaaatggattccttgcttggaattcgaattagaggagggattcgtgcaccgtaagtactcgagcttacccacgtactacgatggacgctactggaccatgtggaaactgcccatgttcgggtgcaccgactcggctcaggtgttgaaggagcttgaggaatgcaagaaggaataccccaatgcattcattagaatcattgggttcgacaacgttcgtcaagtgcagtgcattagtttcatggcctacaagccttgaagctactaaagttgttact

SEQ ID NO: 221237 - DNA, 533 bp, Gossypium hirsutum
gtcggtctcacttcaagctgcagctaccctgatgcaaccaatcaaggttgctgcaccatcaaggaccaatgtgctgctcaggtcctcccagagcgtttctaaggccttcggtttggagcctgttggtgctaggctcacctgctctttgcaaactgacctcaaggacttggctcagacgtgtgttgatgctaccaagctcgctggtttcgctctttctacatctgctcttgttgtctcgggagcaagcgctgaaggagttccaaagcggctaacctacgatgaaatccaaagcaagacatacatggaagtcaaaggaacaggaactgctaaccagtgcccaaccatcgatggtggtgtcgactcttttgccttcaagcctggcaaatactacgccaagaagttctgcttggagcccactttcttcactgtcaaggctgagggtgttaacaagaatgcccctactgagttccaaaacaccaagctcatgacccgtttaacctacactcttgacgaaatcgagggccctttcgagg

SEQ ID NO: 221238 - DNA, 628 bp, Gossypium hirsutum
cccacgcgtccgatttcttgaattctcctctcaaccccctaaccaaatcatccatttcataaatattaatccaccaaaagaattatccattcagttcaaagacaccatgacatctacacctactcaagaaaacactcaagtagaaggatcccacgaacccacagtagaagcacccccatcggaagaagatattaagaaatggggcacgcacgtcatgggatccccagcagctcctagtgcccatccagacaaccagaaggcggctttatggaatgctagtgatcaccaacaaatctatgagctgccctatgtcgtttattcccctgcagaaagaccaagccataatccttttgaacctgtgattaacatgttcaatacctggagtaggaagaccgagtctatagcacgcaacatctggcacaaccttaaaactggaccgtctgtatcggaagcagcatggggtaaattaaacctgacagccaaagctataacagagggaggatttgagtctctgttcaagcagatttttgcaactgatacggatgaaaggttaaagaagacattcgcctgttatctctccacaacaacaggccctgttgcgggtacgctctatttatcaacggctcgg

SEQ ID NO: 221239 - DNA, 607 bp, Gossypium hirsutum
cttaacaaacatcaactccagagatcgccaaacatgctaggaactgagcatgatttgaacttcaaagagaccgagctgtgtctcggcctgcctggtggaagtggtggaggaggaggagctgccgccgccggtggtggtggtggtggtaaaaatgaagtggaaagttccccaaagaccaccgggaaaagaggctactccgagactgttgatttgaagcttaatcttcagtctaaagaaggttgcatggatctgaatcagaacctagaaaatggttcaaaagaaaagaatcatctcactgcaaaaccaccagccaaggcacaagtattgggttggccaccagttcgatcttataggaagaacattatggctaaccagaagaacaacagtgacgaaattagtgacagagctagcagtggcagtgggggtgcagcgtttgtgaaggtttgcatggatggtgcaccatatttgcgtaaagtagatttgaagatgtacaacagctaccaaaagttatccgatgccttggctaagatgttcagttccttcaccatggggagttatggatgtgaaggaatgatagacttcatgaatgagagcaagttgatggatc

SEQ ID NO: 221240 - DNA, 524 bp, Gossypium hirsutum
  unsure (1)..(524): unsure at all n locations
cccacgcgtccgctgaaaactaattgaaatcgtcggctgtctctcatttccgttcctctcgggcttccgccaccgtcgacacccaaaatggaggctcaccggctatcttctactaaacctgttcaatctctcaagccaacgaaaaagattcctttagaggaagataccggtaaagcctccgacgcactgccgcttcccttgtacctaacgaacgccctgttcttcaccctcttcttctcggtggtttattttcttctttcccgttggcgtgagaagatccgtacctncacacctctccatgtcgtcaccttttccgagatcatcgccattctctcatttttcgcgtcctttatttaccttttgggtttctttggaattgacttcgttcaatctttggttttcaaccatcgcctgacgtttggattgccgagaaagtggatgatgaagttctgcttgcaaaggaagaagcccgtaaggtcccttgcgggcaagctttcgattgttcgctttcgcctttgcctcct

SEQ ID NO: 221241 - DNA, 627 bp, Gossypium hirsutum
agccattccaccattcaattaccctgtcaaccttgccgtttcaaaaatagcaccggctttaattgcaggaaactcccttgtactcaagccacctacacagggtgctgtttcagctcttcatatggtgcactgctttcacttggctggctttcccaaagggctcattagctgtgtgacagggaaaggctctgagattggtgatttccttactatgcatcctggagttaattgtataagcttcactggtggagacactggtattgctatctcaaagaaggcaggaatggtccctcttcaaatggaattgggaggaaaagatgcttgtatcgtactcgaggacgccgacttagatttggttgctgcaaacataataaaaggaggattttcttatagtggccaaagatgcactgctgttaaagttgtgttggtgatggaatctgttgctgatgttctggtggacaaagtgaaggcaaaaatcgcaaagttaacggttggaccaccggaggatgactgtgatatcactccggttgtgtcggaatcatctgcaaatttcattgaagggctggtcaaggatgccaaaagagaaggagctatattttgtcaggagtacaagagagattgcaatct

SEQ ID NO: 221242 - DNA, 483 bp, Gossypium hirsutum
cccacgcgtccgctgagtttaagcatatcaataagcggaggaaaagaaacttaccaggctacttcggcaatgtaatctttacgactgcactaattgctgaagctggtgatctcgaaaccgaatcgtttactgacaccataaagaggattcatgaacgattaaatcagataaatgatgaatatttaagatcagctattgattacattgaaaaagtgcctgatttaaacaccttggttagaggaccgcatacttttcgatgcccaaaccttgttgttgttccatggaactggttgcctatatatgaggcagatttcggatggggtcgtcccatatatatggggccagggaatgtcgtccaagaaggtaaaatttacatgctaccaagtccagctaacgatgggagtttgacactggcagctcgtttagagatccctcacatgaaagtttttgaaaaacttatttatgagatttaatagttatttt

SEQ ID NO: 221243 - DNA, 622 bp, Gossypium hirsutum
  unsure (1)..(622): unsure at all n locations
cccacgcgtccgtgcagatcttcgtcaaaaccctgaccggcaagaccataactttggaagtcgaaagctctgacaccattgacaacgtcaaggcaaagatccaagacaaggaaggcatcccaccagaccagcaaaggctcatatttgccgggaaacaactcgaggacggtcgcaccttggccgattacaacatccagaaggagtccaccctccatttggtattgaggcttcgtggtgggatgcagattttcgtcaagacgttgactgggaaaaccataactttggaggtggagagttccgatacgatcgacaatgttaacgcgaagattcaggacaaagaaggaattccaccagatcagcaaaggttgattttcgctgggaaacaattggaagatggaaggactttggctgattacaatattcagaaggaatccactctccaccttgtcttgcgtcttcggngtggtttctaagctctcctatgaaaatgaggtttctggattttatgtgaatgattgtgatgtctggccctgttaaggcctcataaataaacctaaactantttatctgngttttatcctatgtaatgatattatatgaataaaaattacatgtttacctt

SEQ ID NO: 221244 - DNA, 555 bp, Gossypium hirsutum
cccacgcgtccggaaaaagtctctgacacttgcaacacaataaactacacataaaatctgtgcctgcccttttctctgcacacctcgggatatcagtttcaactccactcatcccacgggttgagtaccgagtccatatatcgttaagttcaaggaaggaacttgggcatcatgggtcttaaggcattagactatgagacaatgaatgaaaacgtgaagaaagttcaatatgcagttagaggtgagttgtatcttcgagcttctgagcttcagaaggaagggaagaagattattttcacaaatgttggcaatcctcaagctcttggacagaagccactgactttccctcgtcaggtggttgctttgtgccaagctccatttctgctagatgatcctaatgtaggacttatatttcctgctgatgccattgcaagagcaaaacattatctttcgttgacttctggtggtctaggtgcatatagtgattccagaggtattccaggcgttaggaaagaggttgctgaattcattgagaggcgtgatgggtatcctagt

SEQ ID NO: 221245 - DNA, 538 bp, Gossypium hirsutum
cccacgcgtccgcgatggtcagattattaccatcggggccgagcgtttcagatgccctgaagtgcttttccaaccatcgatgatcggtatggaagctgcaggcatccacgagacagcttataactcgataatgaaatgtgacgtcgatattaggaaagacttgtacggtaacattgtactcactggtggtacaactatgttccccggtatcgctgatagaatgaccaaggagatctcggctttagctcctagcagcatgaagattaaggttgctgctccacctgagaggaagtatagtgcctggattggcggatcgatctgggcttcccttagcacattccaacaaatgtggatcgccaaggcagagtacgatgaatcggctccatcaattgtacacaggaaatgcttgtaaatgtttttcgacatgagctttgatctatcaacatatgtgtattctcttggcggatagaacgagcaaacattagagaacgagaattggaatttgtgtggaccaattctttcaattctttttaatgag

SEQ ID NO: 221246 - DNA, 563 bp, Gossypium hirsutum
aaccccaaccatcgtttatcatggcttcctcaactctctcccctgcagctccttggcagctatgctccagcaagagtggcatgttctgcccatcacgagcgtttcttgtgaaaccagcgaggacccatatggtcaaaaacgaaaagggaatgaggatcacatgccaggccactagcatccctgctgatagagtgccagacatgggcaagaggcagctcatgaatctgcttctgttgggggctatttcactcccctcaggtttcatgttggttccttatgcagccttctttgtgccatctgggggacggggtaccggtggtggcaccgttgccaaggacgcaatcgggaatgatgtaattgctgaagaatggctcaagactcatggccctggggaccgaaccctgactcaaggattgaagggagacccaacctacctagtggtagagaaagacagaacccttgcaacatatggtataaatgctgtgtgcacacaccttgggtgtgttgttcccgggaatcaagccgagaacaagttcatatgcccctgccatggatcccaatac

SEQ ID NO: 221247 - DNA, 661 bp, Gossypium hirsutum
cttttccacaaacctaatctgaaattcacttcttttgatcaaaactatttggtccaaaacttaaagtatccaaaaacctcaggaatcccattgttttccttttccattttttgtttgtttctaagggaaatgagggatgttttcatggttggcaaggatagctctggcttgttggagaccagtgagtcgatatgcccgtatgaacaaggattacaacaatagcaatagtgaggaacttgaagaagattcttcttctttacgtgactcgcttctttggtgtagagaccttgaaaaacactcttgtggtgatttttcatttgctgttgttcaagccaatgagatcattgaagatcatagtcaagttgagactggcaaagatgcaatttttgttggtgtctacgatggacatggtggccctgatgcttctcgctttatctctgatcatctctttcaaaatttgattacagggcttgctcgagcaaatggaaccatttcggaagatattcttagaaatgctttctccgcaaccgaagatgggtttcttgcgcttgtgcgtaggtcttgtggaataaaaccattaattgctgcaatcggatcttgttgtctggttggagttatatggaaggggacgttatatgtcgctaatttgggtgattctcga

SEQ ID NO: 221248 - DNA, 723 bp, Gossypium hirsutum
cccacgcgtccgcccacgcgtccgctcccttacagccaatctcctcaataccccatttttctggttcctttttcaagccattttacaggcacttcccagttgggagaaggggaaaatggcacagcttttagcaccctcaactcaatggcaaatgacactaccaaagacctcaacctatggaagtcccattgcaacaaaaatgtggagttctctggtactgaaacagaacaagaaaggagctgctaaaagctctggcaagtttaaagtggttgccttgtctgaaaacagcactgtcaacaggctagagaacttactaaacatggacgtcactccatacaccgacaagatcattgctgaatacatttggataggaggcagtggactcgatatgcgtagcaagtccaggacaatatcaaagccagttaaacatccctctgagcttcccaagtggaactatgatggatcaagtactggacaagcacccggtgaagatagtgaagttatcttataccctcaagcaatctttaaggaccctttccgaggaggtaacaatatcttggtaatttgtgattcatacacaccagctggtgagcctattcccacaaacaagcgccaccgtgccgctgagattttcaagaacaagaaggtggtcgatgaagtaccatggtttggtattgagcaagagtacactttactttaacaaaatgtgaaatggccttggga

SEQ ID NO: 221249 - DNA, 562 bp, Gossypium hirsutum
ccgaatctccgattttcccaagcatcgcgcatacgatcaggtcttttttctctgcactaagactcagagctactctcgtcctagttattttccatggcgattgagaaaattcttaaagatgatgctagtgaagagaagggggagcgtgccagaatggcatcatttgttggggcaattgcaattactgacttggttaagacaacccttgggccaaagggaatggataaaattttacagtcaactggcaggggaaatgaagtcactgttacaaatgatggagctaccatcttaaagtccctgcacattgacaacccagcggcaaaagttttgattgacatctccaaagttcaagatgatgaagttggagacgggacaacctctgttgtggttttggctggggagcttttaagggaggcagaaaagctagtggcagccaagattcaccctatgacaataatatcaggttatagaatggcagccgaatgtgctcgtaatgctttgttgcagagggttgtggataacaaagagaatgcagagaaattcaagtcagacttgatgaaaa

SEQ ID NO: 221250 - DNA, 639 bp, Gossypium hirsutum
ggtcaaagccctaagtatatgattcttttcatattttgccaaccaagagagggcagctcacgtactcatcaatcaccaaggctgtcgctgcaaggctactgggaaggatccagaatgtcgcgtcatctgcaccaccacccgagacgccggtgtctcacagcttaaacttctcggcgacgacatcgcttgcaacaaggctaagttcgacgaggttgcctctcgctactcggattgcagctccgctaaacgtggcggtgatctcggctgcaaggagtgtgcctcaactcagatcttattgttaattatctgtgacctttagttggtttataccagcattacgggacataatgcaaactaaaaaccttatacaaactttttggtggaggtccttttggtcgaggccagatgcaaaagccatttgaggatgcaacatataatcttaacattggcgagataagtgacattggggataccgatagcggtgttcacaatataatgcgaactggttaatcattattgatggagcctggatatcgggagcaattagttcagtcttctcggaaaattctatcgaagaacattctgaaatcacttctggtaatgcctatggcttatgtcatggcataattttgaaccctt

SEQ ID NO: 221251 - DNA, 627 bp, Gossypium hirsutum
ctcaattcccccacctcattgtaggcaaaatggccactgtttgtgcttcttctgccgttgcagccgttgccatctcatcccccagttcccagaggagtggatcagtagtgaggacaacaaaggcttctttccttacagggaagaaacttcgatcagtcaaaaagtacacaaaaccagcagcagtccgaaccgttccggtgtgtgcagtggctgaccccgaccgacctctttggttcccaggcagtactcctcctccatggctcgatggcagcctccctggagacttcggttttgatcctctaggccttggatcagaccctgagaccttgagatggaacgtacaggcagagctcgtccattgcagatgggcaatgttaggagccgctgggattttcatcccagagttcctaaccaaaattggcattttaaacactccatcatggtactctgctggaaccgaggaatacttcactgacaccaccaccctcttcatcgttgagcttattttcatcgggtgggcaagaaggagaagatgggctgacattctcaagcctgggtgcgtaaacactgaccccatcttccctaacaacaagctcacgggcaccgatgttgggtaccctggtgggc

SEQ ID NO: 221252 - DNA, 602 bp, Gossypium hirsutum
  unsure (1)..(602): unsure at all n locations
cccacgcgtccgcccacgcgtccgatcactcccaatactttcataacatttcacgaacttcactctccagtctccaatggcggctgccgtctccaccatcggtgctgtcaaccgagcaccgttgagtttgaatggatcaggtgccggagcttctgctccaagctcagctttcatggggaacagcttgaagaaagtgagcgctaggttcaacaacaacggcaaggctccagtgggaagtttcatgattgtggctgccaaagaaatcgacgaagacacacagaccgaccaggaccgatggaagggtcttgcttatgatatctccgatgaccaacaagacattaccagagggaaaggtatggtcgactcattgttccaagctcccatgaacgatggtactcactatgctgtcatgagctcctatgagtacattagccaaggccttcgcacatacgacttggacaacaacatggatggattctacattgccccagctttcatggacaagcttgttgttcacatcaccaagaactacatgacccttcctaacattaangggttctctatcttgggtatttggggaggcaaaggtcaaggaaaatctt

SEQ ID NO: 221253 - DNA, 636 bp, Gossypium hirsutum
  unsure (1)..(636): unsure at all n locations
ctcaacattcccatttccaatctccagctcccaaggtaaatatgccgatcagaaacatagcggttggccggcccgaagaggctactcaccccgatgctctcaaggctgctttggctgagttcatctcaaccttgatcttcgttttcgctggatcgggctcaggaatggcctttaacaagtggactgacaacggagcaaccaccccggctggtctcgtagccgccgctctagctcatggcttcggtcttttcgacgctgtctccgttggcgccaacatctcaggtggccacgtcaaccctgccgtcaccttcggtgcttttgttggcgggaacatcactctcttgcgcggcattctttactggatcgcccaactcctaggctcaaccgtcgcttgcctgttgcttaagttcgctaccggcgacctggctgtacccgcttttgggttgtcatcaggtgtgggcgtgtctaacgcattggttttcgaaatcgtgatgaccttcggattggtgtacacagtgtacgccacaagacgtgatcccaaaaagggaagcttgggaacaatcgcaccattggncaatggtttcatcgtggnggccaacattttggcagggggtgccttcgatggaacctcaatga

SEQ ID NO: 221254 - DNA, 531 bp, Gossypium hirsutum
cttacctcccgatccaaccacaaccgccaggtccgtgctgctgtcgttgaaacaatggtgaccgccgccgagacttccttggtcgtgaaatccgccaacaccatcagattcttgtctatcgatgcggacgtgaaggcgaattcaggtgatgctgggttgcccatgggctgagctcccatgggtcacattgtgtacgatgaagtgatgacgtataaccgcaagaacccttactgcttcaaccgtgaccgcgtcattctgtccgctggacatggttgtatgctgcaaaatgctctgctctacctggatgggtacgacagagtcctggaagaagatttgaagagatgacgacagtgagtaagcagaacccgtggacatgccgagatctttgaaacaccaagagctgacgtcacaactgggcctatgggtcagggtatcgcaaatgctgcatggatggctatcgctgagaaacacatggctgctagattcaacaagccagacaatgagattgttgatcactacacatatgttatc

SEQ ID NO: 221255 - DNA, 590 bp, Gossypium hirsutum
cccacgcgtccggccacccttccctgatttcatttcttctgtactcacagtaatcacctctccaaaaccctagctctttcactcactgccgccaatttcaaccaattatttgcttataagcgtcgaaaacgatgtcggacgacgagcgagaggagaaggagttggatctcacctcccctgaagttgttactaaatacaagagtgctgctgagatcgttaacaaggctttgcagttagttgtaaaagaatgcaaaccaaaaactaagattgttgacatttgcgagaagggtgatgcatttatcagagagcaaacaggcaatatgtataagaatgctaagaggaagattgagaggggtgttgccttccccacttgtctttctgttaacaacactgtttgtcatttctctccacttgctagtgacacctccgagctgcaagaaggtgatatggtgaagattgacatgggttgccacattgatgggtttattgctgtagttgcgcacacccatgttgtccaggaaggactagtcaatgacaggaaggctgatgttatggctgctgcaaataccgccgcagaagttgcattgagg

SEQ ID NO: 221256 - DNA, 671 bp, Gossypium hirsutum
  unsure (1)..(671): unsure at all n locations
cccacgcgtccggagaagaaaacaatgtcaggtcctcagtgctgttcgaatccaccaacattggattctgcaagtggggctggtcacgttgagaatcttgctggtctcaacacttatgtttctgggtctcttcaatctaagcttgctgtttttcttatctctgatattttcggatatgaggctccaaactttagaaagctcgcggacaaggttgcagccgctgggttctatgtggtggctcctgacttcttttatggagaaccctatgaccctaataaccctgatagacctctatctgtttggataaaggatcatggaccggataaaggttacgaggatgcaaagctcgtaattgacgctttgaaaagtaaaggggtttcatccattggagctgctgggttctgttggggtgctaaagttgtggctggactggctaaagatccccttatccaagcagctgtaatgttacatccttcatttgtgactgtggacgatatcaaaagtgtgaaggtgcccattgcgatattgggagctgagcatgaccatatatctcccccagagcttttaaaacaggttgatgagatcttaaaagcgagtgaggttgatagctatgtgaagatatttnctaaagttgcccatggatggtcggtgagatatgatgtcaatgatct

SEQ ID NO: 221257 - DNA, 730 bp, Gossypium hirsutum
cttaaaaacagcaaagaagatgtcatcatcaacggcggccaatcaagtgagggcatctcacatactcatcaatcaccaaggctctcgtcgtaaggcttcttggaaggatccagaaggtcgcgtcatctccaccaccacccgagacgccgctgtctcacagcttaaacttctcggcgacgacatcgtttccaacaaggctaagttcgacgaggttgcctctcgctactcggattgcagctccgctaaacgtggcggtgatctcggctgcaaggagtgtgcctcaactcagttcttattgttaattatctgtgacctttagttggtttataccagcattacgggacataatgcaaactaaaaaccttatacaaactttttggtggaggtccttttggtcgaggccagatgcaaaagccatttgaggatgcaacatataatcttaacattggcgagataagtgacattgtggataccgatagcggtgttcacatcataatgcgaactggttaatcattattgatggagcctggatatcgtgagcaattagttcagtcttctcggaaaattctatcgaaaacattctgaaatcacttctgataatgcctatggctaatttcatggcataatttttggacccctttggttttggtgtgaaattgacttgccagttataataaacaaatattgggtgaactaaatttctctggcttcttctcttctctttatctcc

SEQ ID NO: 221258 - DNA, 608 bp, Gossypium hirsutum
aagaaatcaaaagacaaaatagccaataacaatggcactcagaatgtgggcttcttccactgccaatgcactcaaaatctcttgttcctccaaacctaatgtttcccttgctttctcactctctagatgcttttccactgttttggatgggctgaagtatgctaattcacatgaatgggtgaagcatgaaggtcctgtggctaccattggcatcactgaccatgctcaggaccatcttggagaagtagtgtttgtggagttgccggaaccaggtggttcagtgagccaaggaaaagggtttggagcagtggaaagtgttaaagcaacaagtgatatcaattccccaatctccggcgaagtcgtggaggttaactccaagctgtccgaaactccgggcctgatcaactcaagcccatatgcagatggatggatgatcaaagtgaagccaagcagtccatcagagttagaatcattgatgggtccaaaggaatacaccaaattctgtgaggaagaagatgcttcccactaagaaaccattgtacccttattttcaaactttgtgttcaagaaataaggtttattgcaattttaatgttatgtctatttat

SEQ ID NO: 221259 - DNA, 599 bp, Gossypium hirsutum
  unsure (1)..(599): unsure at all n locations
cccacgcgtccgattcaaggcacaaaatttgacccaaaatggcctctgtttgtgcttcttcggctattgcagctgttgccatctcatcccccagttcccagaagactggatcagtagtggggacaacaaaggcttctttccttacagggaagaaacttagatctgtgagaaagtacacaaaaccagctgccggaccaacatttccagtgtgcgccgccgccgaccccgacagacccctttggttcccaggcagcactcctcctccatggctggatggcagtctccctggtgactttggtttcgatcctctcggtcttgggtctgaccctgagacattgagatggaacgtacaagcagagctggttcactgcagatgggcaatgttgggagctgctggtattttcatcccagagttcttaaccaagattgggattttaaacactccatcgtggtactcagctggaacagaagaatacttcactgacaccacaactctcttcatcgntgagcttatttttatcggctgggctgaagggagaagatgggctgacattctcaagccagggtgtgtaaacacagaccccatcttgcctaacaac

SEQ ID NO: 221260 - DNA, 679 bp, Gossypium hirsutum
cccacgcgtccgtctggtttcactgtcagagctcatcagacaccggccgagcctgagactggacgcagagccatgttgggtcttgttgctgctggtttggccactggctcctttgttcaagctgtgcttgccgatgccagaagcatcaaggttggcccacctccccctccctctggtggactgcctggaactctgaactctgatgagccaagagaccttgttctgccatacaaagacaggttcttcctccaaccagttactccagctcaggcagcacagagagcaaaggaatcagccaaggacattctgggtgtcaagaacttgattgacaaaaaagcctggccttatgtcatgaatgatctccgtctcaaggccgagtatctccgctatgacctcaacaccgtcattgctgccaagtccaaagatgagaagaaaactctaaaggacctcaccaagaagctcttcagtaccatcgatgatcttgaccatgcagccaagatcaaaagcacccctgaagcagagaaatcttacgctcagaccatatctagtctgaatgatgttcttgccaaactgtgctaaaagaatgcttaattgtattttgatgtaagatagctttggtcatcgtttgtagacacactttcatttttatgctatctgaaagaacctttaccacttaacg

SEQ ID NO: 221261 - DNA, 523 bp, Gossypium hirsutum
  unsure (1)..(523): unsure at all n locations
cggacgcgtgggttagctatagcatacactactagtacccactactagcaatggcttnctcaatgatctcatcggctaccattgccactgcctctccggcacaggctaacatggtcgctcctttcaccggtctcaagtctgcctctgctttcccagtcaccaggaaggccaacaacgacattacttctctcgcaagcaatggcggtagagtgcaatgcatgcaggtgtggcctcctactgggaagaagaagtttgagactctctcatacctccccgatcttacacccgtgcagttggctaaggaagtagattaccttcttcgctcaaaatgggttccttgcttggaattcgaattggaggagggattcgtgcaccgtaggtactcgagcttacccacgtactacgatggacgctactggaccatgtggaagctgcccatgttcgggtgcacccgactcgctcangtgttggaggagcttgaggaatgcaagaagcataccccaatgcattcattagaaatcat

SEQ ID NO: 221262 - DNA, 547 bp, Gossypium hirsutum
  unsure (1)..(547): unsure at all n locations
cccacgcgtccgaaggacttgatggggaagtccctaatgaagcgtgtgatgcagacctggcttcctgcaagcaatgctctcctggaaatgatgatctttcaccttccctcacctagcaaggctcagaagtatcgtgttgagaacttgtacgagggtcctcttgatgatatctatgccaatgctatcagaaactgtgatcctgagggtcctcttatgctctatgtttcaaagatgattcctgcttctgataagggcagattctttgcttttggtcgtgtcttttctggcaaagtctcaactggattgaaggttaggatcatgggtccgaactatgtccctggtgagaagaaagacttgtatgttaagagtgtgcaaagaactgtcatttggatgggaaagaagcaggagactgttgaagatgtaccttgtggtaacacagttgccatggttggtttggatcagtttatcaccaagaatgctactntgacaaacgagaaggaagttgatgcccacccaattcgtgcaatgaaagtttccgtctcccctg

SEQ ID NO: 221263 - DNA, 497 bp, Gossypium hirsutum
  unsure (1)..(497): unsure at all n locations
cccacgcgtccggcagctgttgccatctcatcccccagttcccagaagactggatcagtagtggggacaacaaaggcttctttcctttcagggaagaaacttagatctgtgagaaagtacacaaaaccagctgccggaccaacatttccagtgtgcgccgccgccgaccccgacagacccctttggttcccaggcagcactcctcctccatggctggatggcagtctccctggtgactttggtttcgatcctctcggtcttggttctgaccctgagacattgagatggaacgtacaagcagagctggtgcactgcagatgggcaatgttgggagctgctggtattttcatcccagagttcttaaccaagattgggattttaaacactccatcgtggtactcagctggaacagaggaatacttcactgacaccacaactctcttcatcgntgagcttatttttatcggctgggctgaaaggagaagatgggctgacat

SEQ ID NO: 221264 - DNA, 560 bp, Gossypium hirsutum
atataccagaaaatcaaaaagaagaagaaaagagatccccatgatgtctcttacaatcccaactaatctctcaaaatcaattttgaagccaaagctggagacccaagtgatccccaaggcttcatccagatcattgattgtatgctcctccagcaatccttcctcctccgacaaatcggcttcatcactccaggccttctcagcggctctcgctctttcttccatccttctttcggctccactccctgctgttgcggacattgcggggctcactccttgcaaagagtccaagcaattcgccaagcgcgagaagcagcagatcaagaagctggaatcctcgttgaagctttacgcccccgatagcgcaccggctctcgccatcaaagccaccatcgagaaaaccaagagacggttcgacaactacggcaagtacggcttgctctgcggctccgatgggttgcctcatttgatagtgagcggcgatcagaggcactggggtgagttcatcacgcccggcctgttgttcttgtacatcgctggatggatcgggtgggtcggaa

SEQ ID NO: 221265 - DNA, 634 bp, Gossypium hirsutum
  unsure (1)..(634): unsure at all n locations
cccacgcgtccgctttgttccacctctttctttctttttctccaaagccatcatgaatctcattaataggctcagccccaagcgtctctttcgatctaataaaaaagatagatccatcgtctccaagttcgacccctcctcctatagttccggttccgccgtttcctcctcttcctcctccgaatccgtctcttccaccctcaaagaacatcagtacccttccacggctaccgctggcttcgtaacgcccaccagtgttttgccccaaacatcaggtgactggtccgattttcccgctaatttttatctagaactttgccaggcgtttaaaatgttagacaaagataacgacggggttatatcgagaagcgagctcgaggctttgcttggcaaggtcgcaaggcagccgcccagccgggacgaggtttccttgatgttgagcgaagtggacggtgacggcgacggctacatcaacctggaaacgttgatgaaccaggtggttggaccggcttgcgacgaacccgcctgcgaaccggaactgaaggagacttttgatatatntgacacagatcatgacgggaagatcacggcggaggagttgatggcgttttttaagacaaaatangggatgagc

SEQ ID NO: 221266 - DNA, 666 bp, Gossypium hirsutum
cccacgcgtccggccggtgcaaccgcagctaaagttagcgccacagccaaggttgcagcctctccagtcccaaggggcagcatcaaggcctccctcaaagacgttggtgttgctgttggggcaactgctgcaagcgtaatccttgccagcaatgccatggccattgaagtcttgctcggcagtgacgatgggggtctggctttcattcccaaagaattcagcgtaagcccaggggagaagattgtgttcaagaacaatgccggattcccacacaatgttgtgttcgatgaggacgaaatcccaagcggcgtcgacgtatccaaaatctccatgcctgaagaagagctactcaatgccaaagacgagacttacgctgttaccttgactgagaaaggaacctacagtttctactgttctcctcaccagggtgcaggtatggttggaaaagtcacagttaactgagttatacatttatcttttcaacccctttgtgctttgtatgtatcatctcacacatctcttctactttttgagcactagagttttgagtattggggatggatgaggtgatcttgaaaaatcaactatgatgcttttggatcttcctatcttgtactttaaatttggctcatatttgcttggaacccggttttaattttacccttc

SEQ ID NO: 221267 - DNA, 643 bp, Gossypium hirsutum
cccacgcgtccgattaaaataggagactccgcccatttttcttcattttcctccaaccataatcattatatttatatttcttcctctctcttctttatttcttcaagtttaaggcctcaaaatggaggcagccactgtggttggatcttctatgtctctacatcgaacttcatgctccgctgccagatccgcccttttagctgccaatggcccgctctttccacgtttcgctgctaaccctcgctcctccttctcgatcaagctttattcttcagtttcatattcaaaatcacggaataggagaatgggtttggggggtaggagaggcatggtggtaaaggcgtcttcatctcctgactcagctgaacccaatgctcaaattgcgtcacttcggatggaatctccaattggtcagtttttgtctcaaatcttgataagtcatcctcatcttgttcctgctgcagttgagcagcagcttgaacaacttcaaactgaccgtgatactgatgaaaagaaagaagagccgtctgcttcaggcacggatttagtatttgataggagaattgctgagggtaaagctaatgagcggaaaagggcattagaagagattctctatgcattggtcgtacaaaagtttatggat

SEQ ID NO: 221268 - DNA, 661 bp, Gossypium hirsutum
cccacgcgtccggatgtcttggttcatggagagcctgagagaaacgatatggttgagtactttggtgagcagttgtctggttttgcattcactgttaatggatgggtgcaatcttacggatctcgatgtgtcaagccaccaatcatctacggtgatgttagccgccccaagccaatgactgttttctggtcatctaccgcacaaagcatgactgcacgcccaatgaagggaatgcttactgggcctgttaccatccttaactggtcctttgtcagaaatgatcagccccggtttgagacttgctaccagattgccttggccatcaaggacgaagtggaggatcttgagaaggccggtatcaatgttatccaaattgacgaggctgctttgagagaggggttgcctcttagaaagtcggagcacgccttctacttgaaatgggctgtccactccttcagaatcaccaactgtggtgtacaggacactacccagatccacactcatatgtgctactccaacttcaatgacatcatccactcaattatcgacatggatgctgatgtgataaccatcgagaactcacgttcagatgaaaagctcctttctgtattccgtgaaagagtgaagtatggtgctggaatcggccctggtgtctatgaca

SEQ ID NO: 221269 - DNA, 559 bp, Gossypium hirsutum
  unsure (1)..(559): unsure at all n locations
gtagccgccgcctgcgtctctctcttcatctctctgaaccaaaaagtctttagcttttcgcttcgagagagaccatgttggtttaccaggatctcatctccggtgacgagcttctttctgactcattcccctacaaggaaatcgagaatgggatgctgtgggaagttgagggaaagtgggttgtgcaaggagctgtcgatgttgacattggtgccaatccttcagccgaaggtgctgatgaggatgaaggtgttgatgaccaagctgtgaaggttgttgacattgttgacactttcaggcttcaggagcaaccccctttcgacaagaagcagtttgtcgtgttcatcaagaagttcatcaagaacttgacaccaaaactggatgcggaaaagcaagagtccttcaagaaaaacattgagggagcaaccaagtttttgctttcaaaattgaaagaccttcaatttttcgtaggagagagcatgcatgatgatggatgcttggtgtttgcttactacaaagatggtgctgntgacccaacatttttgtactttgcatatgc

SEQ ID NO: 221270 - DNA, 586 bp, Gossypium hirsutum
cttcctcctcctttcctccgtcgttgcttcggccgtcgtctccgacgttaatagcgacggcgatcctctcatccgtcaagttgtttccgatggtggtgtcgaggaggactccgatgaccatctccttaacgcggagcaccacttcacgctgttcaaatccaagtatgggaaaacctacgcatcccaggaggagcacgattaccgactgggagtcttcaaggctaacctgcgtcgggccaagcgtcatcagctcctggaccccagtgccgtccatggcgtcacaaagttttccgatttaactccatcggagttccgccgccagtatctaggcttgaaaccgctcaagctcccagccgatgctcaaaaggctcctatccttccgactgacaacttaccggatgactttgactggcgtgaccacggcgccgtcactggcgttaaagaccagggttcctgtggatcgtgttggtcgttcagtgcgacgggggctttggagggagcccattatttggcgacaggagagcttgtaagcttgagtgagcagcaacttgttgattgtgatcacgagtgtgatccacaacaatat

SEQ ID NO: 221271 - DNA, 489 bp, Gossypium hirsutum
aacaacatggatggattctacattgccccagctttcatggacaagcttgttgttcacatcaccaagaactacatgacccttcctaacattaaggttcctcttatcttgggtatttggggaggcaaaggtcaaggaaaatctttccaatgtgagcttgtctttgccaagatgggaatcaaccccattatgatgagtgccggagaattggaaagtgggaacgccggagaaccagccaagttgatcaggcaaaggtaccgtgaggccgccgacattatcaagaaagggaaaatgtgttgcctctttatcaacgatctcgacgctggagccggtcgtatgggaggaaccacacaatacacagtgaacaaccaaatggtgaacgccacactcatgaacatcgctgataaccccaccaacgttcagctccccggtatgtacaacaaggaagagaaccctcgtgttccgatcattgtcaccggtaacgatttctcg

SEQ ID NO: 221272 - DNA, 539 bp, Gossypium hirsutum
taagattatggtgaaaaactaaacataataaagtccctcataacattcttcgacttgcttcattgattagcccaaagataaacataaccaaaaagaaaaatggcttctgcttccgctactctcctcaagtcttcacctattatcgacaagtccgagtggattaagggccaaaacctccgccacccttcggtttgttttgtacggtcacaccctacatcggccgcctttaccgtccgtgctagttcatatgccgatgagcttgttaagaccgcgaaaactgttgcatctccaggtcgtggtattttggccatggatgaatcaaatgctacatgtgggaagcggcttgcctcgattggtctcgagaataccgaggcaaaccggcaagcttaccgtacccttctcgtgtctgcccctggcctcggtaactacatctcgggagctatccttttcgaggagactctctaccaatctaccatcgatgggaaaaagatggtcgatgttcttgttgagcaaaatattgtccctggtatcaaaagtga

SEQ ID NO: 221273 - DNA, 624 bp, Gossypium hirsutum
cggacgcgtgggcggacgcgtgggttttcattttcaaaccccactccccccatggctggtctcaagcttatttgtggcctagtattgttgtgcatgttggttttggaacccatggccacaactgctctcacatgtggacaagtggcaagccaaacgggtagttgtataaggtatttgcagcgtggagggaaccctccagctgcttgctgcaacggagttaggaacctaaacaggcaagctagaaccacccgtgaccgtcaaactgcatgcagatgcttgcaaactgccgctaggaccatctccggtatcaatactaaattggctgccggtcttccggccaaatgcggtgtcaaaattccttacaagatcagcccctccaccaactgcaatagagtgagatgatcatggatgaagtaagcagcttgcaggaaatgttatatatatatatatataagcgtgaaataaagattttgggatggatgcttattccaaaatccaaattagtgtcttgattaattatttgtttatctttgagatgttggctctaattatgttgtctatgtatggaatgttcaatgttttatgaggtaaaaagcctatgttttattataatacatgatatct

SEQ ID NO: 221274 - DNA, 515 bp, Gossypium hirsutum
  unsure (1)..(515): unsure at all n locations
gaaagagcttcttcactttgacaacaatactcactttctcttacagagattgagagaaaatcacaaacacacatttatatagcacagtgatcatcatggctcttcacttgtcttgggttttcgtttttggtattctaggcaacgctgtttcattcatggtttccttggctccactgccaacattttaccaaatattcaagaagaaaacatcggaaggtttccagtcgattccctacgtggtttcgctcttcagtgcgatgctttggatttactatgcactgcttaagaaagatgccattttcctcattaccatcaacactttctgcgttttcattcaaactttttacattgttacttacttttactacggcccaaagaaagaaaagatcgtcacggtgaagcttatgcttctcttcaacgttttcgggttcggagttatctttctcgcaacttacttcctaaaaaaacccttcccttcgtctnctgattttgggttacatttgcatggcattcgc

SEQ ID NO: 221275 - DNA, 602 bp, Gossypium hirsutum
  unsure (1)..(602): unsure at all n locations
ttcaattttcactagctacttgacttcattgcttaattattatttgcagaaagatggattcaattaaatcgcatgcagtatgtcttccaagcccagcacaaggtcatattaaccccatgatgcaactggccaagctcttgcactctagaggcttccatataacctttgtcaactccgagttcaatcatagacgatttatacggtctagaggggaagaagctgttaagggtctgcctcatttccggttcgaagccatacccgacgggctgccaccttccgattctgatgcgactcagtctgttccggcactatgcaattccacacggaaaaattgtttggctccattcttggagctactatctaagcttaattcctcaccccacctgccgcctgttacatgcatagtttgtgatggaaccatgaactttggtaccaaggcagctcaactcattggggtgccttatgttcaactctggacttcttcaaccgttagctttctgggatttctgcactacaaagaactagctcaaagaggcattgttccattcaaagatgaacgcttntgtagcgatgggacacttgagatgcccattgattggatc

SEQ ID NO: 221276 - DNA, 666 bp, Gossypium hirsutum
  unsure (1)..(666): unsure at all n locations
cccacgcgtacgattccttccacccgcctgcttggttccacctgtttctttctttttctccaaagccatcatgaatctcattaataggcatcagccccaagcgtctctttcgatctaataaaaaagatagatccatcgactacaagttcgacccctcctcctatagttccggttacgccggttactgctcttgctgctgcgaatccgactcttccaccctcaaagaacatcagtacccttccacggctaccgctggcttcgtaacgcccaccagtgttttgccccaaacatcaagtgactggtccgattttcccgctaatttttatctagaactttgccaggcgtttaaaatgttagacaaagataacgacggtgttatatcgagaagcgagctcgaggctttgcttggcaaggtcgcaaggcagccgcccagccgggacgaggtttccttgatgttgagcgaagtggacggtgacggcgacggctacatcaacctggaaacgttgatgaaccaggtggttggaccggcttgcgacgaacccgcctgcgaaccggaactgagggagactgttgatatatttgacacagatcatgacgggaagatcacggcngaggaggtgatggcgttttttaaggacaaaataggggatgagcggtgcacgttag

SEQ ID NO: 221277 - DNA, 632 bp, Gossypium hirsutum
  unsure (1)..(632): unsure at all n locations
cccacgcgtccggagactcttttgtatacctgtagcatatagtaatagtaagcagtaatagcaatggcctcctccatgatctcatcggcaaccattgccaccgtgaaccgctcctccccggcacaggccaacatggtggcccccttcaccggcctcaaatctgcctctgctttcccagtcaccaggaaggccaacaacgacatcacttctcttgcaagcaacggtgggagagtgcaatgcatgcaggtgtggccgcctcttgggaagaagaagttcgagactctctcatacctgcccgatcttactcccgtacagttggctaaggaagtagattaccttcttcgctctaaatggattccttgcttggaattcgaattagaggagggattcgtgcaccgtaagtactcgagcttacccacgtactacgatggacgctactggaccatgtggaaactgcccatgttcgggtgccaccgactcgctcangtgttgaaggagcttgaggaatgcanganggnataccccaatgcattcattagaatcattgggttcgacaaccgtcgtcaagtgcagtgcattagtttcattgcctacaagcctgaagctactaagttgttactttcctctaggaa

SEQ ID NO: 221278 - DNA, 642 bp, Gossypium hirsutum
gtttcccatgaaagtagccaaggaagggttgatgaccatccttcttttagaccccatttgccacctgaattctacaagaaacctactgtgaaagtctattgcaaagctgatcctaattttcatctcaccatcagagacggtaaagttattcttgctccatctgatccctctaatgaattccagcactggtacaaagatgagaagttcagcacaagtgtgaaagatgaagtgggtttcccaagcttttctctggttaataaagccactggtcaagccattaaacattccattggagcttcttatcctgtccaactggtaccttacaaaccagatcatcttgatgagtcagttgatttcaggtgctctgatgtgtcctccaccgttgatgcatcactcaccatggtcatgggagacgacatggttaaagtgattgcttggtacgacaatgagtggggttactctcaaagagttgtagacttggctgacattgttgccaacaactggaagtgattcgaaatacttgtctgcagtgtgatatggttaatttttgctcacctcatttcttttcggctttcatcaaaaatgtataattttaacgtggactgtatgcaataaaaatcgtgcttgcactttgatggcctt

SEQ ID NO: 221279 - DNA, 601 bp, Gossypium hirsutum
  unsure (1)..(601): unsure at all n locations
tttagctatagcatacactactagtacccactactagcaatggcttcctcaatgatctcatcggctaccattgccactgcctctccggcacaggctaacatggtcgctcctttcaccggtctcaagtctgcctctgctttcccagtcaccaggaaggccaacaacgacattacttctctcgcaagcaatggcggtagagtgcaatgcatgcaggtgtggcctcctactgggaagaagaagtttgagactctctcatacctccccgatcttacacccgtgcagttggctaaggaagtagattaccttcttcgctcaaaatgggttccttgcttggaattcgaattggaggagggattcgtgcaccgtaagtactcgagcttacccacgtactacgatggacgctactggaccatgtggaagctgcccatgttcgggtgcaccgactcggctcaagtgttggaggagcttgaggaatgcaagaaggcataccccaatgcattcattagaatcattggcttcgacaacgtgcgtcaagtgcagtgcattagtttcattgcctacaagcctncaggcttctaagctttttattaactttgtctct

SEQ ID NO: 221280 - DNA, 651 bp, Gossypium hirsutum
  unsure (1)..(651): unsure at all n locations
cgggaagctgcaaatgtatttggaaagccaaaaacaaacacagagttcatcccatacaatggggaagggttcaagctgtcaataccatcaaaatggaacccaagcaaagaggttgagtacccaggtcaagtcctgagatacgaggacaacttcgactccaccaccaatgttgctgtcctggtcactcctactgataagaagtccattactgacttcggttcccctgaaaatttcctctctaaggtggactatctgcttggaaaacaagcatactctggcttaactgatgctgagggtgggtttgactcaaatgcagtggcaactgcaaacatattggagacttcaactcctgtgatcggagggaaacagtactacttcttgtcggtgttgacgagaactgctgatggagatgaaggtggcaagcaccaactaattacagccaccgtaaacaatggtaaactttacatttgcaaagcacaagctggggacaagcggtggtttaaaggagctagaaagtttgtggagagtgctgcaaattccttcaagtgtgcttagttaaaagtcttacttgntaactagagaataatttcatgtaaaatttgttagaaaatatctgatgttggacctaaaaaaaaaaaaaaaaagggcggc

SEQ ID NO: 221281 - DNA, 589 bp, Gossypium hirsutum
cccacgcgtccgcccacgcgtccgccacactctcaaattcagataacaatttcacagttgttttcttcactctctctctcagccatctccaccgtcgccgccgctgccgccgccaaccgagctctgggagtgtcagtcccaacctcagctttcatggggaagaaagtgagctcgagattcaacaacaccaggcaggttccttcgggaagttttaaggtgatggcggccgaaaaagagatagacgaagagacacagaccgaaaaggaccgatggaaagggttggcttacgatatttcggacgaccaacaagacattactcgagggaaagggatggtggattccttgttccaagctcccatgaatgatggaactcactatgctgtcatgagttcctatgaatacatcagccaaggtcttaaaacgtacaatttggacaacaacatggatggtttctacatcgctcctgcattcatggacaagcttgttgttcacatcagcaagaacttcatgtccctccctaacattaaaggtcctctaatcctgggtatttggggaggcaaaggtcaaggaaaatctttccaatgtgagc

SEQ ID NO: 221282 - DNA, 450 bp, Gossypium hirsutum
ctcacgcgtacaggccgtccgcaatcctttgtagagctgacaagtccattgtgacgatgtcattgctcaaataatgacaggtgtgcggtgtccattaaaacacatatatggatgacactatttaactatgtcacagaggtgggatcagctttgttcgggtccaatataaaagctcaacttcccgttaacgcttaacaggtccatatgtgagactcctagttcagtggggtcttcgtgagcttagagaccggcttgattcagtaaagatcacgcagacgatcactgaagccatgaatcttgtggctgatgatcaagcatggagagctcatgaagctgctgtcaatggcggacctttctgtgagtcgcatggatgaagctctttacatcatgaatgaacagtttcagactgcagaataaatgctacttttacaaacgataggcttgctaaaa

SEQ ID NO: 221283 - DNA, 655 bp, Gossypium hirsutum
cccacgcgtccgctgaaaactaattgaaatcgtcggctgtctctcatttccgttcctctcgggcttccgccaccgtcgacacccaaaatggaggctcaccggctatcttctactaaacctgttcaatctctcaagccaacgaaaaagattcctttagaggaagataccggtaaagcctccgacgcactgccgcttcccttgtacctaacgaacgccctgttcttcaccctcttcttctcggtggtttattttcttctttcccgttggcgtgagaagatccgtacctccacacctctccatgtcgtcaccttttccgagatcatcgccattctctcatttttcgcgtcctttatttaccttttgggtttctttggaattgacttcgttcaatctttggttttccaaccatcgcctgacgtttggattgccgaggaagtggatgatgaagttctgcttgcaaaggaagaagcccgtaaggtcccttgcgggcaagctctcgattgttcgcttccgcctctgcctcctgcggcaccaatcgtgaccgttcagaaggtgttcgatgaaaagcctgtgacggtactaacggaggaagatgaagaaataattaaatctgtagtggctggtacaaccccttcgtattccctggaatcgaaat

SEQ ID NO: 221284 - DNA, 530 bp, Gossypium hirsutum
ctttctcttgctctctttagagtaaatttctcttgcaatcctttgtagagatccgggatccattgtcaccatgtcttgctcaaatctgacaatgtgggtgtcctcaaaaccctctctttctgacacttcttcactctctttccgttctttcatcagcccttttcagctcccgtctcagagctcaacccccggtaacccttccaggtcctcatctgtaaccccagttcactgtggtcttcgtgagcttagagaccgtattgattcagtaaagaacacgcagaagatcactgaagctatgaaacttgtggctgctgctaaagttaggagagcacaagaagctgttgtcaatggcagacctttctctgagtccctggttgaagttctttacaacatcaatgaacagctccagactgaagacatagatgctcctctcacaaacgtcaggcctgtcaaaaaagttgctttggttgttgttactggtgatcgtggtctctgtggaggtttcaacaatgctatcctcaagaaagctg

SEQ ID NO: 221285 - DNA, 500 bp, Gossypium hirsutum
ctcccccacacattcaaaatcctattccttttctcctttttctttttctcagacaagatgggttctcagggatcggttatggcgatgcttttgctgatgatgttcactttatcatcagcttccgacatgtccattatatcctacgatgaaacacatcccgacaagtcaacgtctagttggagaacagacgacgaagttatggccatgtacgaggagtggcttgtaaagcatggaaaaacatacaacggtttgggtgagaaagagaggaggttccagatttttaaggataaccttaggttcatcgatgaacataacgccgatgagagtcagagttttaatgttggtttgaaccgctttgctgatcttaccaacgaggagtaccgagccatctacctgggaatcaagaaacccaaccggaaagtttccaaggccagtgaccgatactccgcgcttctcggcgaaaagttgcccgattccgttgattggagggaaaaaggggc

SEQ ID NO: 221286 - DNA, 629 bp, Gossypium hirsutum
cccacgcgtccgtccccttccaacgatggaccgcttctctcttctcttcctcctcctttcctccgtcgttgcttcggccgtcgtctccgacgttaatagcgacggcgatcctctcatccgtcaagttgtttccgatggtggtgtcgaggaggactccgatgaccatctccttaacgcggagcaccacttcacgctgttcaaatccaagtatgggaaaacctacgcatcccaggaggagcacgattaccgactgggagtcttcaaggctaacctgcgtcgggccaagcgtcatcagctcctggaccccagtgccgtccatggcgtcacaaagttttccgatttaactccatcggagttccgccgccagtatctaggcttgaaaccgctcaagctcccagccgatgctcaaaaggctcctatccttccgactgacaacttaccggatgactttgactggcgtgaccacggcgccgtcactggcgttaaagaccaaggtcctgtggatcgtgttggtcgttcagtgcgacgggggctttggagggagcccattatttggcgacaggagagcttgtaagcttgagtgagcagcaactttgtgattgtgatcacgagtgtgatccacaacaata

SEQ ID NO: 221287 - DNA, 479 bp, Gossypium hirsutum
ggagtacttgcaatatgatttggattctttggaccagaacctggctaagaattcggctggtgagataattggaactaggaccgaggttgccgacgtgaaggcgacgccgtttcagccttacagcgaggtttttggtctacagaggtttagggagtgtgagttgatccatggacggtgggccatgttggctacgcttggtgcacttaccgttgaatggctcactggtgttacatggcaagatgctggcaaggtggagttagttgagggttcatcgtatctcggccaaccccttcccttctcgatgacaacattgatttggatagaagtattggtgatcggattcatcgagttccaaaggaacgccgagcttgacccggagaagaggctgtaccccggaggaaagtactttgatcctctcggcctagccgccgacccggagaagaaagcaaccctacaattggctgagatcaagcatgctc

SEQ ID NO: 221288 - DNA, 511 bp, Gossypium hirsutum
cccacgcgtccgaggagctgatagacctttatggtttgcatctaaacaaagcctttcatacttggatggcagccttccaggtgattatggatttgaccccttgggactctcagaccctgaaggtccaggagggttcatcgagcctaaatggctagcctacggtgagatcatcaacgggcgttatgctatgttgggtgcagtaggtgcgattgcccctgaaatacttgggaaggccggtcttatcccagcagaaacagccctcccttggtttagaaccggtgtgatcccaccagcaggaacatacagctattgggcagacccttacactttgtttgtgttcgagatggcactcatgggatttgcagagcacagaaggttccaagactgggccaaaccaggttcgatggggaaacaatatttcttggggttcgagaagtaccttggagggtctggtgagccggcataccctggaagaccactgtttaacccacttggttttgggaaagatgag

SEQ ID NO: 221289 - DNA, 566 bp, Gossypium hirsutum
cccacgcgtccgcccacgcgtccgcccacgcgtccgcccacgcgtccgcccaacctcagctttcatggggaagaaagtgagctcaagattcaacagcaccaggcaggttccttcgggaagttttaaggtgatggcggcggagaaagagatagacgaagagacacagaccgaaaaggaccgatggaaagggttggcttacgatatttcggacgaccaacaggacattactcgagggaaagggatggtggattccttgttccaagctcccatgaatgatggaactcactatgctggcatgagttcctatgaatacctcaaccaaggtcttaaaacgtacaatttggacaacaacatggatggtttctacattgctcctgcattcatggacaagcttgttgttcacatcaccaagaacttcatgtccctccctaacattaaagttcctctaatcttgggtatttggggaggcaaaggtcaaggaaaatctttccaatgtgagcttgtgtttgccaagatgggtatcaaccccatcatgatgagtgccggagaactggaaagtggaaacg

SEQ ID NO: 221290 - DNA, 616 bp, Gossypium hirsutum
accacacaaaaatcaaccatggcagcagcagccagagtgatagccatcgccggcaactccaccgccgccgcgtcttcctgcttgcttatcaaaacaccgttcgctttacaacgctgcagcaacggacttagattcaacaacgtcagacgatcatcgaaaagattgttttcttgcaatgccatttataaccctcaggttcaaatcaaacaagaaggccaacccgaaactctcgactatagagtcttcttcgaggatacttcgggcaaaaagatttctccttggcacgatgttccattgcacttgggagatggtgtttttagcttcattgttgagatacccaaagaatcaagtgctaaaatggaggttgctactgatgaactttacactcccattaaacaggatacaaaaaagggcaagcttcgatattacccctataatataaattggaattatggattgcttccacaaacatgggaagacccatctttggcaaactctgaagttgaaggagcatttggtgataacgaccctgttgatgtcgttgagatcggtgaatcccggaggaaaatcggtgacatttttgaggttaagcccctggctgctttagctatgattg

SEQ ID NO: 221291 - DNA, 539 bp, Gossypium hirsutum
gccccatcagcgattttttggactgactatgtagcaacccgttggtatcgtgctcctgaactctgtggatcctttttctccaaatacactcctgcaattgatatatggagcataggatgcatatttgctgagatacttacaggaaaaccactatttcctggaaaaaatgtggtgcaccaattggatctcatgaccgatacacttggcacaccccctcctgaatccatatcaaggattagaaatgaaaaggcaaggaggtaccttagtagcatgcgtaaaaagcaaccaattcctttctcacagaagttccctaatgtggatcacctggctcttcgcctacttgagcgcttacttgcatttgatccaaaagatcgtcccacagctgaagaagcattagctgacccatatttttatggtttggcaaatgtggatcgtgaaccatctacacaacctatttcaaaactagaatttgagtttgagagaaggaaattgacaaaagatgatgttagagagctgatttatcgagagatattggagta

SEQ ID NO: 221292 - DNA, 703 bp, Gossypium hirsutum
attcctctttctctcccccccccacaaaaaaaaaaaactccaaatctaaagagagactttcctctcctccgatcctttattcgtcttggtttatgagctcgaaggagaaacccactctcggtggtacgcggattaagacccgcaaacggaatattgctgcgcctctggaccctgcagcatttgctgatgcagttgtccagatctatttggataatgctggtgatctggaacttgttgccaagaaccttgaatcttctgatcttaacttctcaagatacggtgacactttctttgaggttgttttcaccgggggccgcacacaaccaggcacaatcaaacctgatgagggggagcgccacccttactctgtaatagagtgtgaggctaaacgtgaagccattttgccatctgtgatctacatacagaaaatcttgcgtcgaaggccttttctgataaagaatcttgaaaatgttatgcaaagattgttgcagtccttggagctgtttgaggacaatgaaaggaagaagcttgcaattttcacagcacttgctttttcccagaagctatcagggctgccacctgagactgtgttccagccactgcttaaggacaatcttgtggtcaaagggctagttctttcattcataacagactttttcaaggagtatctggtggataatagccttgacgatttaatttcaat

SEQ ID NO: 221293 - DNA, 631 bp, Gossypium hirsutum
atcactcccaatactttcataacatttcacgaacttcactctccagtctccaatggcggctgccgtctccaccatcggtgctgtcaaccgagcaccgttgagtttgaatggatcaggtgccggagcttctgctccaagctcagctttcatggggaacagcttgaagaaagtgagcgctaggttcaacaacaacggcaaggctccagtgggaagtttcatgattgtggctgccaaagaaatcgacgaagacacacagaccgaccaggaccgatggaagggtcttgcttatgatatctccgatgaccaacaagacattaccagagggaaaggtatggtcgactcattgttccaagctcccatgaacgatggtactcactatgctgtcatgagctcctatgagtacattagccaaggccttcgcacatacgacttggacaacaacatggatggattctacattgccccagctttcatggacaagcttgttgttcacatcaccaagaactacatgacccttcctaacattaaggttcctattatcttgggtatttggggaggcaaaggtcaaggaaaatctttccaatgtgagcttgtctttgccaagatgggaatcaaccccattatgatgagt

SEQ ID NO: 221294 - DNA, 403 bp, Gossypium hirsutum
ctcacgcgtacgtagagaaaaacataaaacacttccgaaatggctcgcatgaagatcagagagtactattgcaagagattggggaaagaacatgtcaagaggctttcacgttagagattatgccaatgacatctgcacaatttacggcatcaactgatttcaatcagctagtacagatggagccatggctttcgacacagatactggctggtaaacctggtatgttgttcggtatgcgtggacagagtggtttgggtgggtgaaatatagattgtgctcaagttatagcgttagcgaaagagcgtcttggcacataggtggaaatgagtggatgcaagggacctgttacaactctcattggttgacctttcatacgtcacaatgaaaagcatttacttaacga

SEQ ID NO: 221295 - DNA, 611 bp, Gossypium hirsutum
cccacgcgtccgcgtttattctcttaacatggatgcctacgtactatcatcaagtcctgaagttcaacctcacagattcagggctcatttgtgttttaccctggcttacgatggcattttctgcaaatcttggaggatggattgcagacacacttgtgagcaaaggcttatctgtgacaactgttcgcaaggtcatgcaatccattgggtttcttggccctgctttcttcctaactcagctgagccatgtcaattctcctgctatggcagttttgtgtatggcatgcagtcagggaactgatgcattttcacagtctggcctttattcaaaccatcaagatattgcccctcgatattcaggtgtattacttggtttgtccaacactgctggagtactagctggggtctttggaacagctgctactggttacattctgcaacatggttcttgggacaatgtcttcgaggtttcggttgggctatacttggttggaaccgtggtctggaacctcttttcaactggtgagaaaatactggactgactcagatatttaaatgtttagcatgagttagctcaagccttcatgtgctcgagctaattgaaagagtca

SEQ ID NO: 221296 - DNA, 562 bp, Gossypium hirsutum
  unsure (1)..(562): unsure at all n locations
cccacgcgtccggagactcttttgtatacctgtagcatatagtaatagtaagcagtaatagcaatggcctcctccatgatctcatcggcaaccattgccaccgtgaaccgctcctccccggcacaggccaacatggtggcccccttcaccggcctcaaatctgcctctgctttcccagtcaccaggaaggccaacaacgacatcacttctcttgcaagcaacggtgggagagtgcaatgcatgcaggtgtggccgcctcttgggaagaagaagttcgagactctctcatacctgcccgatcttactcccgtacagttggctaaggaagtagattaccttcttcgctctaaatggattccttgcttggaattcgaattagaggagggattcgtgcaccgtaagtactcgagcttacccacgtactacgatggacgctactggaccatgtggaaactgcccatgttcgggtgcaccgactcggctcaagtgttgaaggagcttgaggaatgcangaaggaataccccaatgcattcattagaatcattgggttcgacaacgttc

SEQ ID NO: 221297 - DNA, 578 bp, Gossypium hirsutum
gtcggtctcacttcaagctgcagctaccctgatgcaaccaatcaaggttgctgcaccatcaaggaccaatgtgctgctcaggtcctcccagagcgtttctaaggccttcggtttggagcctgttggtgctaggctcacctgctctttgcaaactgacctcaaggacttggctcagacgtgtgttgatgctaccaagctcgctggtttcgctctttctacatctgctcttgttgtctcgggagcaagcgctgaaggagttccaaagcggctaacctacgatgaaatccaaagcaagacatacatggaagtcaaaggaacaggaactgctaaccagtgcccaaccatcgatggtggtgtcgactcttttgccttcaagcctggcaaatactacgccaagaagttctgcttggagcccacttccttcactgtcaaggctgagggtgttaacaagaatgcccctcctgagttccaaaacaccaagctcatgacccgtttaacctacacccttgacgaaatcgagggccctttcgaggtatccaccgatggcaccggcaaatcgaggagaaagatgggattga

SEQ ID NO: 221298 - DNA, 547 bp, Gossypium hirsutum
cccacgcgtccgatttcttgaattctcctctcaaccccctaaccaaatcatccatttcataaatattaatccaccaaaagaattatccattcagttcaaagacaccatgacatctacacctactcaagaaaacactcaagtagaaggatcccacgaacccacagtagaagcacccccatcggaagaagatattaagaaatggggcacgcacgtcatgggatccccagcagctcctagtgcccatccagacaaccagaaggcggctttatggaatgctagtgatcaccaacaaatctatgagctgccctatgtcgtttattcccctgcagaaagaccaagccataatccttttgaacctgtgattaacatgttcaatacctggagtaggaagaccgagtctatagcacgcaacatctggcacaaccttaaaactggaccgtctgtatcggaagcagcatggggtaaattaaacctgacagccaaagctataacagaaggaggatttgagtctctgttcaagcagatttttgcaactgatacggatgaa

SEQ ID NO: 221299 - DNA, 608 bp, Gossypium hirsutum
cttaacaaacatcaactccagagatcgccaaacatgctaggaactgagcatgatttgaacttcaaagagaccgagctgtgtctcggcctgcctggtggaagtggtggaggaggaggagctgccgccgccggtggtggtggtggtggtaaaaatgaagtggaaagttccccaaagaccaccgggaaaagaggctactccgagactgttgatttgaagcttaatcttcagtctaaagaaggttgcatggatctgaatcagaacctagaaaatggttcaaaagaaaagaatcatctcactgcaaaaccaccagccaaggcacaagtattgggttggccaccagttcgatcttataggaagaacattatggctaaccagaagaacaacagtgacgaaattagtgacagagctagcaatggcagtgggggtgcagcgtttgtgaaggtttgcatggatggtgcaccatatttgcgtaaagtagatttgaagatgtacaacagctaccaaaagttatccgatgccttggctaaaatgttcagttccttcaccatggggagttatggatgtgaaggaatgatagactttatgaatgagagcaagttgatggatct

SEQ ID NO: 221300 - DNA, 583 bp, Gossypium hirsutum
ctcaccattgttccaagtttgttgtaaaccaagctagaaccagcagccaacatggcctcattagcagcctccaccgctgccgcctcccttggcgtctctgaaatgctcggtaaccctctgaatttcagtggtggagctaggtcatcggctccaacaccatccaactcatccattttcaagaccgttgctcttttctccaagaagaaggccgctcctccaaagcccaaggctgctgctgtcgccccggccgatgaagagctggctaagtggtacggtccggacagaaggattttcttgcctgaaggtctgttagacagatcggagatcccagagtacttgaacggagaagttcccggagactatggatacgatccgtttggtctgagcaagaagccagaagactttgcaaaatatcaagcatatgagttgatacacgcaaggtgggcaatgcttggtgctgcagggttcatcatccctgaagcctttaacaaatttggtgccaactgtggccccgaagccgtttggttcaagaccggagctcttctcttggacggtaacaccttgaactacttcgggaagaaca

SEQ ID NO: 221301 - DNA, 234 bp, Gossypium hirsutum
gcgggccaagccgtccgttaattaaacattcccatttccaatttttagctcccaaggtaaatatgccgatcagagacatatcagttggccggcccgaagaggcgactcaccccgatgctctcaaggcagctttggctgagttcatctcaaccttgatcttcgttttcgctggatcgggctcaggaatggctcttaacaagttgaccgacaacggagcaacaaccccggccggtc

SEQ ID NO: 221302 - DNA, 355 bp, Gossypium hirsutum
cccacgcgtccgcccacgcgtccgtccacgcgtccgttcagataacaatttcacaggggttttcttcactctctctctcagccatggctgcagccatctccaccgtcgccgccgctgccgccgccaaccgagctctgggagtgtcagtcccaacctcagctttcatggggaagaaagtgagctcgagattcaacaacaccaggcaggttccttcgggaagttttaaggtgatggcggccgaaaaagagatagacgaagagacacagaccgaaaaggaccgatggaaagggttggcttacgatatttcggacgaccaacaagacattactcgagggaaagggatggtggattcctt

SEQ ID NO: 221303 - DNA, 419 bp, Gossypium hirsutum
ggccggcccgcgccacccgtactataccagaaaatcaaaaagttgaataaaagagatccccatgatgtctctgacagggccaactaatctctcaaaatcaattttgaagccaaagctggagacccaagtgatccccaaggcttcatccagatcattgattgtatgctcctccagcaatccttcctcctccgacaaatcggcttcatcactccaggccttctcagcggctctcgctctttcttccatccttctttcggctccactccctgcttgtgcggacattgcggggctcactccctgcaaagagtccaagcaattcgtcaagcgcgagaagcagcagatcaagaagctggaatcctcgttgaagctttacgcccccgatagcgcaccggctctcgccatcaaagccaccatcgaga

SEQ ID NO: 221304 - DNA, 382 bp, Gossypium hirsutum
cttgtctttgccaagatgggaatcaaccccattatgatgagtgccggagaatgggaaagtgggaacgccggagaaccagccaagttgatcaggcaaaggtaccgtgaggccgccgacattatcaagaaagggaaaatgtgttgcctctttatcaacgatctcgacgctggagccggtcgtatgggaggaaccacacaatacacagtgaacaaccaaatggtgaacgccacactcatgaacatcgctgataaccccaccaacgttcagctccccggtatgtacaacaaggaagagaaccctcgtgttccgatcattgtcaccggtaacgatttctcgacgctgtacgcgccgctcatccgtgacggtcgtatggagaagtttt

SEQ ID NO: 221305 - DNA, 393 bp, Gossypium hirsutum
cccacgcgtacggttaggtatagcattcactactcgtacccactactagcaagggcttcctaaatgagctcatcggctaccattgccactgccattactgcacaggctaacatgggcgctactttcaccggcctcaagtgtgcctctgctttgccagtcatcaagaaggccaacaacgacattacttctgtcgcaagcaatggcggcagagtgcaatgcatgcacgtgtggccttccactggaaagaagaagttagagactctgtcatgcctacccgaacttacacccgagcagttggctaaggaagtagattaccttcttcgatcaaaatggagtccttgcttggaattcggattagaggcgggattcatgcaccgtaaatactggagccta

SEQ ID NO: 221306 - DNA, 391 bp, Gossypium hirsutum
cggacgcgtgggtgagactcttttgtatacctgtagcatatagtaatagtaagcggggatagcaatggcctcctccatgatctcatcggcaaccattgccaccgtgaaccgctcctccccggcacaggccaacatggtggcccccttcaccggcctcaaatctgcctctgctttcccagtcaccaggaaggccaacaacgacatcacttctcttgcaagcaacggtgggagagtgcaatgcatgcaggtgtggccgcctcttgggaagaagaagttcgagactctctcatacctgcccgatcttactcccgtacagttggctaaggaagtagattaccttcttcgctctaaatggattccttgcttggaattcgaattagaggagggattc

SEQ ID NO: 221307 - DNA, 370 bp, Gossypium hirsutum
caaaaagaaaaatggcttctgctttttctactctcctcaagtcttcacctattatcgggaagtccgagtggattaagggtcaaaacctccgccacccttcggtttgttttgtacagtgcaaccctacatcggccgcctttaccgtccgtgctagttcatatgccgatgagcttgttaagaccgcgaaaactgttgcatctccaggtcgtggtattttggccatggatgaatcaaatgctacatgtgggaaacggcttgcctcgattggtctcgagaataccgaggcaaaccggcaagcttaccgtacccttctcgtgtctgcccctggcctcggtgactacatctcgggagctatccttttcgaggagac

SEQ ID NO: 221308 - DNA, 396 bp, Gossypium hirsutum
ccacgcgtccggcagaagccaatatgtttttcttagaatctccaattggtgttggatgttcatactcaaatgtttctactgattacagaaatataggagatgagttcaccgcaaacgatgcttacactttcctgcataagtggttcgtgatgtttccgtcgtatagaacacgatccttttacatagctggagaaagctatgcgggcaaatatgtgccagagctggctgatctcatttatgacaacaacaaggatccttcactttatattgagcttaagggtattttgttaggtgatccagaaacaaatgatgctgaagactggagaggcatggtggattatgcttggagtcatgctatagtgtctgatgaaacttacaaaatcatcattgggagct

SEQ ID NO: 221309 - DNA, 304 bp, Gossypium hirsutum
cccacgcgtccggaaggaatactctatatgcattcattagaatcattgggtgcggcgaacgttcgtcaagtgcagtgcattagtttcattgcctacaagcctgaaggctactaagttgtttacttccctcctaggaattccatttgtttcaaagttgtacttaaattaagcccctcaaacccccccccctttttctttttcttttttagttgagttatttggcttggggtctctctttgttttgtttttggatttccaatggaacggctgagaactaatgaataaaaaggtagtttcttgccat

SEQ ID NO: 221310 - DNA, 356 bp, Gossypium hirsutum
gtgagactcttttgtataactgtatcatatagtactagtaagcagtaatagcggtggcctcctccatgatctcatcggcaaccattgccaccgtgaactgctcctccccggcacaggccaacatggtggcccccttcaccggcctcaagtctgcctctgctttcccagtcactaggaaggccaacaacgacatcacttctcttgcaagcaatggtgggagagtgcaatgcatgcaggtgtggcctcctcttgggaagaagaagttcgagacactctcatacctccccgatcttacacccgtacagttggctaaggaagtagattaccttcttcgctctaaatggattccttgcttg

SEQ ID NO: 221311 - DNA, 387 bp, Gossypium hirsutum
ctcaaattcagataacaatttcacagttgttttcttcactctctctctcagccggggctgcagccatctccaccgtcgccgccgctgccgccgccaaccgagctctgggagtgtcagtcccaacctcagctttcatggggaagaaagtgagctcgagattcaacaacaccaggcaggttccttcgggaagttttaaggtgatggcggccgaaaaagagatagacgaagagacacagaccgaaaaggaccgatggaaagggttggcttacgatatttcggacgaccaacaagacattactcgagggaaagggatggtggattccttgttccaagctcccatgaatgatggaactcactatgctgtcatgagttcctatgaatacatca

SEQ ID NO: 221312 - DNA, 335 bp, Gossypium hirsutum
caagttgctgccgttggtgattgttgtcaaaagggagtcaaaaaaaattgcttgggtgatggcgggacgtcgacccggtgatgttgaaactgtttatgcttcaacgaagaaggctgagcatgaattgaattggaaggcaaaatacggcatcgaggagatgtgcagggatcaatggaactgggccagcaagaacccgtatggatacgcattttcgaacttgaattaactcggtgccaatacttttgtcaggtcacacaatacctatgaggatagattttcttaactttatacagatttaattgggtttgatttatcattttagatgatttattaag

SEQ ID NO: 221313 - DNA, 383 bp, Gossypium hirsutum
caaactcccatcatccgagatcatcttgaacatagagaatggcggatgcgaccagggctctgtatgccccatcactcaacacaaaggccgaaaagctctttcctttcagacataaaaggcaaggcaacggccgtggttccatgaggaaaaccgctaccaaggctgctgcctatggaagtacatggaacggtcctgaccgggtctcgtacttgggtgcactatctggggcgccttcattttacttgaccggagaatatcgtggcgactacagatggtacactgcatggactctcggcggacccatagacatctgccaggaaccgtgagctcgaagtcatctcactggaggtgggctatgttgtgtgctctagggtgtgttttcc

SEQ ID NO: 221314 - DNA, 398 bp, Gossypium hirsutum
cccacgcgtccgatcagaactagagagtttacatcctggtaagaggttgagttgcgcagggcttcagcttcctccaattcactatcaatctcaccctcatccaccctcgtggatgccaaagctcctcgtcaaccaactgctgcatccccacaatgtgtcactcttcctactcttcctcccccacccgttcagtcccagagtcgtccctggaagaccactgcctactgtcgcaagattgctcgaaatgtgatggctatggccactggtgagactttggccacgcgtgaagctccaaccgaagttaccccaactgagctgacagagtttatcaacaaaatacaagaaacctgggataaagttgaggacaagtacgcagtgagttcacttgctgtagcagg

SEQ ID NO: 221315 - DNA, 385 bp, Gossypium hirsutum
ataagattatagtgaaaaactaaacataataaagtccctcataacattctgcgacttgcttcattgattagcccaagataacataaccaaaaagaaaaatggcttctgcttccgctactctcctcaagtcttcacctattatcgacaagtccgagtggattaagggtcaaaacctccgccacccttcggtttgttttgtacagtgcaaccctacatcggccgcctttaccgtccgtgctagttcatatgccgatgagcttgttaagaccgcgaaaactgttgcatctccaggtcgtggtattttggccatggatgaatcaaatgctacatgtgggaaacggcttgcctcgattggtctcgagaataccgaggcaaaccggcaagc

SEQ ID NO: 221316 - DNA, 385 bp, Gossypium hirsutum
cccacgcgttcgcccacgcgttcttccacgcgtccgcggacgcgtggggcagggggtgctattgcggctgaaatacttgggaaggccggtcttatcccagcagaaacagccctcccttggtttagaactggtgtgatcccaccagcagggacatacaactattgggcagacccttacactttgtttgtgttcgagatggcactcatgggatttgcagagcacagaaggttccaagactgggccaaaccaggttcgatggggaaacaatatttcttggggttcgagaagtaccttggagggtctggtgagccggcataccctggaggaccactgtttaacccacttggttttgggaaagatgagaagtcattgaaggatttgaagc

SEQ ID NO: 221317 - DNA, 367 bp, Gossypium hirsutum
ggaaatcccggggcggaccgcaggcgtccgccacacgcgtccgtccgtaagggagttttttcgggtaaggccaatgattcaagggatgggggactcaacgccttggacttattctcaaactttaaataggtaggacggctgtggctgtttttttttttcaattttaggtttagttagttgccgtggatgggacagtcagtttcgtcggcgaaactcacgactcgtcgggattgttatcatagtcaacggtcttacttcagatcaacggttctgatctctccgatgaaaaccgaggaagctgaagtgattgatgaattatccgatttcatatcggatctaccggacgagtgtttagctagagtttttc

SEQ ID NO: 221318 - DNA, 378 bp, Gossypium hirsutum
cccacgcgtccgaaagatttaagagtcgtagtggtgcaaaatggatttaatagaagtttgggattttctggattatagtttcatcgatgaaaatacatctccagatatacttttgcccaattacagtagcggtagggaaattgttgttcatgaagaaaaggaattcgtcgatagagattgctcgcgcaagaggggacgcagtggatcatgcagcaggccagggactaaagcttgccgtgagaaattaagacgggagaaattgaatgaaaggtttctggatctaagctctactttggaacctgggagacctgccaggactgacaaatccgcaatactggatgatgcaatcagagttctgacccaactaagaactgacgc

SEQ ID NO: 221319 - DNA, 410 bp, Gossypium hirsutum
  unsure (1)..(410): unsure at all n locations
gggcgttctcttttttaccatggatccttacaagtttcgtccttctagttcctttgattccccgttctggactaccaattctggtgctccagtttggaacaataactcatcacttactgtgggagcaagaggtccaattctccttgaagactatcatttggtggagaagctagctaatttcgacagagaacgcatacctgaacgtgttgttcatgctagaggagccagtgcgaaagggttctttgaggtcactcatgatatatctcagctcacatgtgctgatttccttcgtgcccctggagtgcagaccccgctcattgttagattctccacggttattcatgaacgtggtagtcctgaaactttgagagacccccgaggtttcgctgtgaaatnttacactcgagagg

SEQ ID NO: 221320 - DNA, 200 bp, Gossypium hirsutum
gactgggaaccgctccctctgaggcctttcccgggcgacgaacagtcgactcaaaactggttccgacaaagggaatcccactgtttaattaaaacaaaacattgcgaaagtcccttccgatgctcactcaatgtgatttctgtccaatgctcttaatgtcaaagtgaataaatttaaccaaacccgggttaaccggggga

SEQ ID NO: 221321 - DNA, 384 bp, Gossypium hirsutum
ctcggactctagggtctgcccatctcatgtgctggacatgcaacctggtgaagcttttgtggtccgtaatgttgctaacatggtgccaccatatgaccagattaaatatgctggcattggatctgctattgaatatgcagttttgcatctcaaggtacaagaaattgtggtgattggacacagtgcctgtggaggaatcaaggggcttatgtctttcccattagatggaaacaactcaactgatttcatagaggattgggttaagattggaatccctgctaaggccaaggtgctagctgaacatggtggtgagcctttgggagtccaatgtacacactgcgagaaggaagcagtgaatgtatcccttggaaacctgctgagtta

SEQ ID NO: 221322 - DNA, 348 bp, Gossypium hirsutum
cccacgcgtccgcttacctcctcttcttcctccaccaccacctcctctttttgcgctcgtcgacgacctacattgcggccttcggtcgtcgctagccttaactcttctccttctcctccgactcttatccaagaccgcccggttttcgctgcccctgttcctttgctcaccccgagagaagagatgggaaacaagtcctacgacgaagccattgaagctctcaagaaacttctcagtgagaaaggagaactgaaagctgaagcagctgcaagggtagatcaaataacagcagagttaaacacaacatcagctgacggcaaaccatctgactcttctgttgagagactg

SEQ ID NO: 221323 - DNA, 402 bp, Gossypium hirsutum
  unsure (1)..(402): unsure at all n locations
ggcggccccacccgtccggaaaaccaaaaatggccatggcattgtttcttcgccgactctccttttccatggccgggcctttccgggctttcttcaatgccccttccctctattacatgtcgtctttgccaaatgaagctgtgtacgagaaggagaaacctggcgtcacttggccaaagcaactgaatgctccacttgaaaccgttgatcccggaaattgctgacatcatcgagcttgaaaaagcgcgccaatggaagggacttgaactcattccatcggagaacttcacttcggtgtcagtgatgcaagcagttgggtctatcatgaccaacangtacagtgaagggtatccccgtgctagatactatggagggaatgagtacatcgacatggcagagaca

SEQ ID NO: 221324 - DNA, 249 bp, Gossypium hirsutum
ccggggcggcccaacccttccgttataccatacactcctagtcccctcttctagcaagggcttcctaaaggatctgatgggctaccattgccactgcctatccggcacaggctaacatggtcgctcctttcaccggcctcaagtctgcctctgctttcccagccaccaggaaggccaacaacgacattacttttttcgcaagcaatggcggcagagtgcaatgcatgcaggtgtggccttctactggaa

SEQ ID NO: 221325 - DNA, 381 bp, Gossypium hirsutum
  unsure (1)..(381): unsure at all n locations
atttcttaacaagttcctttttttaagaaaatggcctccaacatggtggggtatccccgattgggaccaaggagagagcttaagtttgctttggaatccttttgggataagaagagcagtgccgaggatttgcaaaaggttgctgctgatctcaggtcatccatctggaaacagatgtctgatgctgggatcaagtacatccncagcaatactttctcttactatgaccaggtgctcgatgccacatcgatgctcggagctgttccacctagatacggctggaatggtggtgagatcggatttgacacttacttctccatggccagaggaaatgcctctgtccctgcaatggaaatgaccgagtggtttgacaccaactac

SEQ ID NO: 221326 - DNA, 387 bp, Gossypium hirsutum
cccacgcgtccgcgatgaagtcattaggtataaccccaagaacccttactggttcaaccgtgaccgtttcattctgtccgctggtcatggttgtatgttgcagtatgctctgcttcacctcgctggttacgacagtgtcctggaagaagatttgaagagtttccgtcagtggggaagcagaacccctggacatcccgagaactttgaaacaccaggagttgaagtcacaactgggcctcttggtcagggtattgcaaatgctgttggattggctcttgctgagaaacacttggctgctagattcaacaagccagacaatgagattggtgatcactacacatatgttattttgggagatggttgtcaaatggagggtatttcaaatga

SEQ ID NO: 221327 - DNA, 390 bp, Gossypium hirsutum
cccacgcgtccgaacatcgtcgttttttacactcttctctggtaagttcatcgaaggatcaaatcaagatccctgccaaaatgaacgacgctgatgtatccaagcagatccagcagatggtgagattcatccgccaggaagcggaggaaaaggctaacgagatctctgtttccgctgaagaggagttcaacatcgaaaagcttcaattggtggaagcggagaagaagaagattaggcaggagtacgagaagaaggagaagcaagttgaaatccgaaagaaaattgagtattcgatgcagcttaatgcatctaggatcaaggtccttcaggctcaagatgatgtggttaatgctatgaaagaatcagcatccaaggaccttctcaatgtga

SEQ ID NO: 221328 - DNA, 386 bp, Gossypium hirsutum
ctttgctctatccccttccaacgatggaccgcttctctcttctcttcctgctgctttcctccgtcgttgcttcggccgtcgtctccgacgttaatagcgacggcgatcctctcatccgtcaagttgtttccgatggtggtgtcgaggaggactccgatgaccatctccttaacgcggagcaccacttcacgctgttcaaatccaagtatgggaaaacctacgcatcccaggaggagcacgattaccgactgggagtcttcaaggctaacctgcgtcgggccaagcgtcatcagctcctggaccccagtgccgtccatggcgtcacaaagttttccgatttaactccatcggagttccgccgccagtatctaggcttgaaaccgctc

SEQ ID NO: 221329 - DNA, 417 bp, Gossypium hirsutum
gggcggaccaacgcgtccgccaacgcgtccgcccacgcgtccgactttctccaccatcacccccaaaaaacagaggaaattgtagaagaatggcaacacaagcacttgtatcatcgtctcttacctactcagtggagactgcaaggcagattcttggagctaaacgacaaattgggccttcaaggaaaggatcctttgttgttaaggcagcttcgactccacccgttaagcaaggagctgatagacctttatggtttgcatctaaacaaagcctttcatacttggatggcagccttccaggtgattatggatttgaccccttgggactctcagaccctgaaggtccaggagggttcatcgagcctaaatggctagcctacggtgagatcatcaacgggcgttatgctatgttgggtg

SEQ ID NO: 221330 - DNA, 386 bp, Gossypium hirsutum
cccacgcgtccgtaacaatttcacagttgttttcttcactctctctctcagccgtggctgcagccatctccaccgtcgccgccgctgccgccgccaaccgagctctgggagtgtcagtcccaacctcagctttcatggggaagaaagtgagctcgagattcaacaacaccaggcaggttccttcgggaagttttaaggtgatggcggccgaaaaagagatagacgaagagacacagaccgaaaaggaccgatggaaagggttggcttacgatatttcggacgaccaacaagacattactcgagggaaagggatggtggattccttgttccaagctcccatgaatgatggaactcactatgctgtcatgagttcctatgaatacatc

SEQ ID NO: 221331 - DNA, 397 bp, Gossypium hirsutum
gaaaaacagagaaagagtactttcttttttcttcttcttttggttctgtttcacggccatggcgaaaacgcaaacaccccatatagcgattcttcctagtcctgggatgggtcatcttattccactcgttgagttcgctaagcgatttgtacagcaacacaatttcactgtcacttttgttatccccaccgctgattctccttcgaaagctcaaatatcaaccctggattcccttcccagctctatagattatgttttccttcctcctgttgacttgagtgacctccctcaagacgcaaagattgaaaccgtgatttctttaacgggggctcgctctctgtcgttccttcgggatgctttgaagtcgctggctgcaaagacaaaactcgtcggtttg

SEQ ID NO: 221332 - DNA, 363 bp, Gossypium hirsutum
cccacgcgtccggttttaaacctttccttgcttgtataagcatacctaaatgtagcaatgacaacaacaacctgagctacactctctccacccacattggctgctgccagtgttggcaatcccaggaggagaactaaagttaatgtaagttacattataggattgaattcctttggtgggctaaaagctcataacaatgtgatctcactaggccaaccagtgtgcattgaacgatcatttgcaaaggttgtgagctcactcagagctccatccaaggggaaaggtagtggcggcggtgccctctcttcaacctgcaatgcaattggtgagatatttaggattgcggcaatcatgaatggactt

SEQ ID NO: 221333 - DNA, 335 bp, Gossypium hirsutum
gaattttcagtcgtcttctctttttgtcctctcgatcccaaagcaagctctgggttccgaatctctcccagaagatgcagatctttgtgaaaacccttactggtaaaaccatcacccttgaggtggaaagctcctatactattgataatgtcaaggccaaaatccaagacaaagaaggcattcctccagaccaacagaggcttatttttgccggaaaacaactcgaggatggccgaactcttgccgactacaacatccaaaaggagtccaccctccacctagtccttcgactaaggggtggcatgcagatatttgtgaaaacccttacgggcaag

SEQ ID NO: 221334 - DNA, 389 bp, Gossypium hirsutum
gtccttaggccacgaagttcatggtgttgaaggatttgggttggatttatttgattctcttggagattgggtaatctgcatatcggcatagtctggtttatttgttgacatctaaaagatgtcaagtaagaaagaagaaaaatctcaagcagctgccgacagaatcaaggctgctgcattgactgctgcaaaaggcctcagtcgagctcaggctgaaagggcagctgctgccgcagctcgaaatgttaatgcttatgggcaaaaggaagaaggacctagcagatggcaggagaagagggaagccaagaagcagatgtatttgatgagcacagagaaggcggtgaggttaggggaaaggaaagacaaggcatcaatgtctacaatgggtg

SEQ ID NO: 221335 - DNA, 370 bp, Gossypium hirsutum
cccacgcgtccgtcaccaccaccatagtccaacattttcataacaatggctgcgatcacaaacgccgctgctacatcctccttcatggggacactcttccccgacgtctacacaagttcagggagattcgtcgccaggtttggctttggcggcaaaaaagcagctcccaagaaagtctcgaaacgaaccccagaccgccctctatggtacccaggagcagtggcgcctgattggctcgatggaagtttggtgggtgattacgggttcgacccgttcgggttagggaaaccggcggagtacttgcaatatgatttggattctttggaccagaacctggctaagaattcggctggggagataattggaacta

SEQ ID NO: 221336 - DNA, 412 bp, Gossypium hirsutum
aaattccggggcggaccacgcgtccgcggacgcgtccgcccacgcgtccgtactagtggtctcaggcttcctcatccaggtggggaagcctgaggagattaccaaggaagaatatgctgctttttacaagagccttacaaatgactgggaagagcatttggccgtcaagcacttctcagttgaggggcaacttgagttcaaggctgtcctctttgtccccaagagggctccttttgatctctttgatacaaggaagaagcccaacaacattaagctctatgtgagacgtgtctttatcatggacaactgcgaggagttgattcctgaattcctcagctttgttaagggtattgtcgactcagaggacctttctttgaacatcttaagagaaatgttgcagcaaaacaagatc

SEQ ID NO: 221337 - DNA, 391 bp, Gossypium hirsutum
cccacgcgtccggagacattgagatggaacgtacaagcagagctggtgcactgcagatgggcaatgttgggagctgctggtattttcatcccagagttcttaaccaagattgggattttaaacactccatcgtggtactcagctggaacagaggaatacttcactgacaccacaactctcttcatcgttgagcttatttttatcggctgggctgaagggagaagatgggctgacattctcaagccagggtgtgtaaacaccgaccccatcttccctaacaacaagctcaccgggactgatgttggatacccaggtggcctgtggtttgaccctcttgggtggggaagtggttcgcctgagaagatcaaggagctgaggaccaaagagatca

SEQ ID NO: 221338 - DNA, 395 bp, Gossypium hirsutum
cccacgcgtccgcccacgcgtccgtctggatacattcagcaagccttgcacaatggccaccatcacctctgccgctgtcgctatcccatctttcaccggccttaaagccggtgcaaccgcagctaaagttagcgccacagccaaggttgcagcctctccagtcccaagggtcagcatcaaggcctccctcaaagacgtcggtgttgctgttgcggcaactgctgcaagcgcaatccttgccaacaatgccatggccattgaagtcttgctcggcagtgacgatgggggtctggctttcattcccaaagaattcagcgtaagcccaggggagaagattgtgttcaagaacaatgccggattcccacacaatgttgtgttcgatgaggacgaaatcc

SEQ ID NO: 221339 - DNA, 358 bp, Gossypium hirsutum
acccactcgtgttttaagatcgtttttgccgcccttttttttttttttttgggggggggatcacaggggggtttgtgtcacacaaaaatagggtgcccaattccacttaaaacacaaagggaaaacacactttcatttaagacacaaaggggggatttcctttgttgtggcaaaaaatgaattcttggttccttaagcattcaatttcccattataaaagctcctatcttgatagcatcgtcattagcttttccaagggcaggcttactcaaatatttggcagccaattgaaccctcttcacattctcttgctcagcaacaagcatgtatccatattccaacagcttctcaatggtca

SEQ ID NO: 221340 - DNA, 391 bp, Gossypium hirsutum
cccacgcgtccgcttttgtttagattaaattctgtttgagtttcctttggtgggtgatcagacttagagagagagcagagtaatttgggtcaagtgtttctgggttttcacaaccatggcttcttcaatgcttagtggagcagccccaacaggggtaggatttgcgaggtccaattttcattttaggagcttgccccagaagagtttattttcttatacaaagaatcagaagactagaatggtggtaacaaccagatgcagtatatcatcctcaaggccggcttctcagcctaggttcatacaacacaagaaagaagcgttttggttttacaggtttttatcaatagtgtatgatcatatcataaaccctggtcattggactgaggatatg

SEQ ID NO: 221341 - DNA, 392 bp, Gossypium hirsutum
ccttaacacaagttacaaacttaataaccccaagttctcactttcaaaaaggtggccacattcaccaggtctgagaggtgcggcaactgtgactgcgctgaccgcagccaatgcacgaagggaaacagcaacaccatgatcattgagactgagaagagctacatcaacactgctgtgatggatgctccagctgagaacgatggcaagtgcaagtgcggtactggctgcagctgcacagactgcacctgtggccactaagccaacatacaatggtcatgcttcaggtcatggcatatatagggatctaaataatgaatttaaggttgaataatttgtctggtgtagtttgtgtggtgacttatatctgtcagttaacctttgtatcctttact

SEQ ID NO: 221342 - DNA, 358 bp, Gossypium hirsutum
catgacccaccaccggcaccgttgtatgacatggaagaactcaccaaatggtgggtttatagggcggcgatcgctgagttcattgccacccttcttttcttgtatgtcacggtgttgactgtgatcgggtataaagtccaaaccgacccggtaaagaatactattgacccggattgtggtggtgttggtatacttggtattgcttgggcttttggtggcatgatctttatccttgtttactgcactgctggtatctctggaggacacatcaacccggcggtgacgtttggactgttcgtggggcggaaggtgtcactgagccgagccctgttgtacatggtggctcaatgcttgggtg

SEQ ID NO: 221343 - DNA, 386 bp, Gossypium hirsutum
cggaaaaaccgggccggacgaacccttcctcggacccttggccggacccttggttgttacccgtgggcggacacatggccgaacgcgggggctgacgcgtgggtgagttttgaatctagggatttgcgggtggagaagactagagctcatctctctgcttcaaagctcctgtccaggtagaattctcttcttcctttgcgttgtgttctttgttgttcagtcagccatggcttcaaagcggattttgaaggaactcaaggatttgcagaaagatccacccacttcttgcagtgcttgtccagtacctgaagacatgtttcattggcaagcaacaatcatgggacccttagatagcccttatgcttgaggtgtgtttctagttacca

SEQ ID NO: 221344 - DNA, 337 bp, Gossypium hirsutum
ccgaagggtccagggtttccccaaacttttttcaaatcctggtctaaccaattttgggtgaaagcctagtaaaagggcgtccacatttagcggtgatgaaactgctcctttcttcggcttcctcggagccgctgctgccctcgttttctcctgtatgggtgctgcgtacgggacggcgaagagcggtgtcggggtggcgtcgatgggagtgatgaggccggagttggtgatgaaatcgatcgtgcccggtgttatggccggagttttaggtatttatgggttgatcattgcggttattatcaacactgggattaacccaaaggccaaaacgtactac

SEQ ID NO: 221345 - DNA, 387 bp, Gossypium hirsutum
cttgagattatcaatttgaagccttcttcgaatttcctcattcaagatgcaaggtttcgtcaagaccctcaccggaaagaccatcacattggaggtggagagttctgatactattgacaatgtaaaggccaagattcaggacaaggaaggcatccccccagaccagcaaaggttgatcttcgctggtaagcaacttgaggatggccgcacgttggctgattacaacatccagaaggagtccacactccacttagtgcttcgcctccgtggaggaatgcaaatttttgttaagactttgactgggaagaccattacattggaggtagagagttcagataccattgataatgttaaggcaaaaattcaagacaaggggggaattccccc

SEQ ID NO: 221346 - DNA, 392 bp, Gossypium hirsutum
acgcgtccggagctcccttcatacgttactagattatcttctctctcttctcttaccatggggccttacaagtttcgtgcttcaagttcctttgattccccgttctggaccaccaattctggtgctccagtttggaacaataactcatcacttactgtgggagcaagaggtccaattctccttgaagactatcatttggtggagaagctagctaatttcgatagagaacgcatacctgaacgtgttgttcatgctagaggagccagtgcgaaagggttcttcgaggtcactcatgatatatctcagctcacatgtgctgatttccttcgtgcccctggagtccagacccctctcattgttagattctccacggttattcatgaacgcggtag

SEQ ID NO: 221347 - DNA, 322 bp, Gossypium hirsutum
gatggtactcactatgctgtcatgagctcctatgaataccttagccaagggcggcgcacatacgacttggacaacaacatggatggattctacattgccccagctttcatggacaagcttgttgttcacatcaccaagaacttcatgacccttcctaacattaaggttcctcttatcttgggtgtttggggaggcaaaggtcaaggaaaatctttccaatgtgagcttgtctttgccaagatgggaatcaaccccattatgatgagtgccggagaattggaaagtggggacgccggagaaccagccaagttgatcaggcaaa

SEQ ID NO: 221348 - DNA, 359 bp, Gossypium hirsutum
gtccaaacttgaggtcaggtcgttcaagcatggcagtcaatgaaactgggaaggatggaatcataggggtagggatgatgggaagagaacatcttattaatcttcaccatcttagaacccaaggagtggtggttgtttgcatagctgatcctcacgtaccctctcagcaacttgccttggaactggctaaatcctttgattggccacttaaggtcttctcggggcaccaggaactactggacagtggcttatgtgatgtagttgttgcgtcaagccctaatatgactcattatcagattctgatggatattttgaaccatcctaaacctcatcatgtgctagttgagaaaccattgtgt

SEQ ID NO: 221349 - DNA, 218 bp, Gossypium hirsutum
cgtccggtgaacggcacttgcacatgggttagtttatcctaagagacgggggaagcccgtgcggcagttcgtccagcgcgagcttcgaaagggaatcgggttaaaattcctgaaccgggacgcgggggctgacggtaacgttagggagtccggagacgttggcgggggccttgggaagaggtatcttttctgtgtaacggattgcccattgtggaaac

SEQ ID NO: 221350 - DNA, 349 bp, Gossypium hirsutum
tccgagcaagccatggttgatacatatctacgacagcgagcacagtacgtacgccctggaggggatcctcgatcactggtttgctcctttcgcttccaatcctcctttcaagctcgtcatcgttcatgccaagcctactgcttcttctgctgttggtctcgccggacctggagctgctgatgtattgccctatgtggatgcggatttgaggaagatcgctcccagggttgttgagaaagccaaggaactctgccttagcaaatcggtacatgatgccgtagttgaagtggtggaaggttatgcaaggaatgttctctgtgacgctgtagaaaaacaccatgccttcgtt

SEQ ID NO: 221351 - DNA, 364 bp, Gossypium hirsutum
caggaactgcggggatattttctgtgacaagtgtacccatgctagaattgctcgagacgtgctgatgagaatgctccacaagttagggtttgcgaccgatgcatggctgaagtcactcagaggctgaataatgctaaggaaatatcaagtaaacctactgtattgcagagccacgaggatcttgctaagaagcttcaggaagagatggggagaagtcgcagagcatcatcagactccatgtctgatgcctctggtaggcggatgaaggaagttgcctgtcctacatgcacagttcatttgcaggttcaagttccaagctcaggttctgagaccattgaatgtggggtgtgccagcattcttttc

SEQ ID NO: 221352 - DNA, 276 bp, Gossypium hirsutum
cccacgcgtccgcccacgcgtccgtccacgcgtccgaacggatatttatgcttggtgaccatgatatggatggagcccttagtgatgcagagttgaatgagtttcaggttaaatgttttaatgctccattacaacctgctgagattgtgggtgtaaagagggtggttcacgagaggatatgaggaggagtctgcaaccttggattaactgttgaagggttgctttatcttaatgcacttttgatagaaaaagggcgtgttgagacaacttgggctg

SEQ ID NO: 221353 - DNA, 293 bp, Gossypium hirsutum
cataaggtttcatgactgggccaaaccaggttcgatggggaggcaatatttcttggggtgcgagaagtacctcggagggtctggtgagccagcataccctggaggaccactgtttaacccacttggttttgggaaagatgagaagtcattgaaggatttgaagctgaaagaagtgaagaatgggagattggcaatgttggcaatcttgggttacttcatacaagggctcgtgacaggtgtaggaccataccaaaacctgttggatcacttggctgaccctttcaacaacaatg

SEQ ID NO: 221354 - DNA, 390 bp, Gossypium hirsutum
cccacgcgtccgatagcatacactactagtacccactactagcaatggcttcctgaatgatctcatcggctaccattgccactgcctctccggcacaggctaacatggtcgctcctttcaccggtctcaagtctgcctctgctttcccagtcaccaggaaggccaacaacgacattacttctctcgcaagcaatggcggtagagtgcaatgcatgcaggtgtggcctcctactgggaagaagaagtttgagactctctcatacctccccgatcttacacccgtgcagttggctaaggaagtagattaccttcttcgctcaaaatgggttccttgcttggaattcgaattggaggagggattcgtgcaccgtaagtactcgagcttaccca

SEQ ID NO: 221355 - DNA, 399 bp, Gossypium hirsutum
acgcccacgcgtacgcccacgcgtccgctctcaaattcagttaacaatttcacagttgttttcttcagtctctctctcagccatggctgcagccatctccaccgtcgctgccgctgccgccgccaaccgagctctgggagtgtcagtcccaacctcagctttcatggggaagaaagtgagctcaagattcaacagcaccaggcaggttccttcgggaagttttaaggtgatggcggcggagaaagagatagacgaagagacacagaccgaaaaggaccgatggaaagggttggcttacgatatttcggacgaccaacaggacattactcgagggaaagggatggtggattccttgttccaagctcccatgaatgatggaactcactatgctgtcatgag

SEQ ID NO: 221356 - DNA, 372 bp, Gossypium hirsutum
acgcccacgcgtccggaactaattccttaaaatttggttcaataattggttgcttaagtattggttttttaggtacccttaaaccttattttaaatgttgaaaaccctggtgagagggggttctcttcttgctaggagcccttcttctttcaaggatgaagccagtggtggcaagaagatcaagaccgacaagccttactgaatcaatggtggtatgagcttgagggatggtgttgatgcctctcgaaggaagggtaagggaaagggtgtttaccaatatgttgacaaatatggtgctaacgtcgatgggtacagtcctatctacaacaccaacgactggtctcccagtggtgatgtttatgttggcggtac

SEQ ID NO: 221357 - DNA, 350 bp, Gossypium hirsutum
gtccaatcactcccaatactttcataacatttcacgaacttcactctccagtctccaatggcggctgccgtctccaccatcggtgctgtcaaccgagcaccgttgagtttgaatggatcaggtgccggagcttctgctccaagctcagctttcatggggaacagcttgaagaaagtgagcgctaggttcaacaacaacggcaaggctccagtgggaagtttcatgattgtggctgccaaagaaatcgacgaagacacacagaccgaccaggaccgatggaagggtcttgcttatgatatctccgatgaccaacaagacattaccagagggaaaggtatggtcgactcatt

SEQ ID NO: 221358 - DNA, 388 bp, Gossypium hirsutum
ccaattttacaaatacaatccttccatgcaaggaaaagaccctgttagggtgatcagggaggcactcgcacaagcgttagtgttttattacccgtttgccggtaggctaagggaaggagctcagcgcaagctgatagtggattgcagcggtgaaggtgtaatgtttatcgaagcggatgcggatgttacgctggagcaattcggtgatgcacttcaaccaccatttctatgcttggaggagctcctttatgatgttccgggttctactggggtgttgaattgccccgtaatacttattcaggtaacacggcttagatgcggtggttttatcttcgcccttcgcctgaaccacaccatgagtgatgctgctggcctagctcaattcatg

SEQ ID NO: 221359 - DNA, 390 bp, Gossypium hirsutum
gagactcttttgtataactgtagcatatagtactagtaagcagtaatagcaatggcctcctccatgatctcatcggcaaccattgccaccgtgaactgctcctccccggcacaggccaacatggtggcccccttcaccggcctcaagtctgcctctgctttcccagtcactaggaaggccaacaacgacatcacttctcttgcaagcaatggtgggagagtgcaatgcatgcaggtgtggcctcctcttgggaagaagaagttcgagacactctcatacctccccgatcttacacccgtacagttggctaaggaagtagattaccttcttcgctctaaatggattccttgcttggaattcgaattagaggagggattcgtgcaccgtaag

SEQ ID NO: 221360 - DNA, 383 bp, Gossypium hirsutum
ggagtaccaaaccgccgttcaaatggctattaggaagctaagaggtctcatcggtgagaagaactgtgctccactcatgctccgtctagcgtaagcttctcttttttctatcgtctgatttgaaatttggtattgagatccgtgaagctgataggccttacggtgatgggtggggacaggtggcactcagctggaacttttgatgtcaagaccaagaccggaggtccattcggaaccatgaagcaacctgctgagctcgctcatgctgctaacaacggtctcgatattgcagtcaggcttctcgagccgatcaaggagcagttccctatcctttcatacgctgacttctatcagcttgctggtgttgttgtgttgagatcacc

SEQ ID NO: 221361 - DNA, 394 bp, Gossypium hirsutum
gatcatccaaaatttaaacgaaagggtgatgacttatttgtagaacatacgttgacacttactgaggcagtttgcggcttccagtttatactgacccacctagatggtaggcaacttctcattaagacccatcctggtgaagtggttaagcctgatcaatgcaaggccataaatgatgaagggatgcctatgtatcaaaggccattcatgaggggtaaactatacattcactttaccgttgattttcctgactccttggcccccgagcagtgcaaggcactcgaggctgtgctaccttcgagggcctcagtccagctgacagacatggagctggatgagtgtgaggaaacaactctatatgatgtcaacattgaggaagagatgcgtaggaagc

SEQ ID NO: 221362 - DNA, 378 bp, Gossypium hirsutum
  unsure (1)..(378): unsure at all n locations
cccttccgtcttctacaataacccccaaaaaccaaagcaaatggtggaagatggcaccacaggcacttgtttcatcgtctctaacctactcagtggagactgcaaggcaaattcttggagctaaacgacaaattgggccttcaaggaagggatcctttgttgttaaggcagcttcgactccacccgttaagcaaggagctgatatacctttatggtttgcatctaaacanagcctttcatacttggatggcagccttccaggtgattatggatttgaccccttgggactctcagaccctgaaggtccaggagggttcatcgagcctaaatggctagcctacggtgagatcatcaacgggcgttatgctatgttgggtg

SEQ ID NO: 221363 - DNA, 392 bp, Gossypium hirsutum
cccacgcgtccgcccacgcgtccgtctactcttccggaaaaatggcttctgcttccgctgctctcctcaagtcttcacctattatcgacaagtccgagtggattaagggccaaaacctccgccacccttcggtttgttttgtacggtcacaccctacatcggccgcctttgccgtccgtgctagttcatatgccgatgagcttgttaagaccgcgaaaactgttgcatctccaggtcgtggtattttggccatggatgaatcaaatgctacatgtgggaaacggcttgcctcgattggtctcgagaataccgaggcaaaccggcaagcttaccgtacccttctcgtgtctgcccctggcctcggtgactacatctcgggagctatccttttc

SEQ ID NO: 221364 - DNA, 383 bp, Gossypium hirsutum
cccacgcgtccgctcttctctgcttttacaagcaaatttcttcgaggctgtattttcagatatcggaactggcaaacagcaattccacggacaaatggattataaagcggctggtttatatacgttggatgaagcccttgaaactgtggggtttgggaaattccagggctttgttcttggatacgctggtcttggttggtttgctgaagccatggagattatgattctttcctttataggacaagctgttaaatctgagtggcaactttcctctggtcaggagagccttttaagtaccatcgtctttgctgggatgcttctcggagccaaaacatggggccttttatcagataactacgggaggaggaaagggttttttacta

SEQ ID NO: 221365 - DNA, 389 bp, Gossypium hirsutum
ctcttcttctgcttctagtttagctaatctcaaaagactccccttttagctagcggctcctctcttgagtactataatgggtaaaggagaaggttcacatcaacattgtggtcatcggccatgtcgactctgggaagtctacaaccactggtcatttgatctacaagcttggtggtattgacaagcgtgtgattgagaggtttgagaaggaggctgctgagatgaacaaaaggtcatttaagtatgcatgggtgcttgacaagcttaaggccgaacgtgaacgtggtattaccatcgatattgccctctggaagtttgagactaccaaatactactgcacagtcattgatgcccctggacaccgtgacttcatcaagaacatgattact

SEQ ID NO: 221366 - DNA, 230 bp, Gossypium hirsutum
gtgagactcttttgaatacctgtatcatttagtaatagtaagcagtaatagcagtggcctcctccatgatctcatcggcaaccattgccaccgtgaaccgctcctccccgcacaggcctcatggtgcccccttaccggctcaaattgctctgtttccagcacaggaagcacacacatacttttgagcacggggagcatcatcaggtgcgcttggagagagtgagctttat

SEQ ID NO: 221367 - DNA, 389 bp, Gossypium hirsutum
atctgcatattactcgaggtgaatatgatgaagattcccgttatccagagaacaaaacactgacaattggtcaattcaagcttgggatatgccatgggcatcaggtcattccatggggggatttggattcactagcaatggtacaaaggcaattggacgtggatatccttgtaactggtcacactcatcagttcaaagcatacaagcatgagggtggtgtcgtcataaatccaggctcggccactggtgcatatagtagtttcacctacgatgttaacccgagctttgtgctcatggacatcgatggcttgcgtgttgtggtatatgtgtatgaactcatcgatggtgaagttaaggtcgacaaaattgattttaagaagacagccact

SEQ ID NO: 221368 - DNA, 388 bp, Gossypium hirsutum
aaaaaaaattcttctctctgcttgcaactcctgataattatcttcaaactctggaatatagaaatggaaggagtgggctccaccaggctgggccgagcttccgctaggtacggaggttcaacggcggtgttcaatggaccagtgaggaagtggaagaagaagtgggttcacgtatcgccttcatccaccgctaaactctctcagtccaacgggaacggttccgccgcctccagcatcctactttgtaggtggaccccactctcctttgctgattccgggtcctccgccgtcgatggcgaggacgaggagcaacccccaaagcgcaagtaccgttatacccctgttgctgtgttagaggaagagcgtagaagggcagctgctgcaaaac

SEQ ID NO: 221369 - DNA, 398 bp, Gossypium hirsutum
  unsure (1)..(398): unsure at all n locations
cccacgcgtccgaatctccttcctagttcttcctctttctggcctaacaagaaatggtgacagtgaacacacctgagtttgatagaacaagcgaactgaaagcttttgatgacacaaaagctggagttaaaggccttgccgatggtggaatcacgaaggtccctcgaatatttcatcaaccgcctgaaaaactccacanattcccagtttcaaacgattcccagttcagtattccggtcatagaccttgaaggagtgaacaatgatccgattactcgaaaggaagtggtggataaagttggaaatgcatcaaggaaatggggttttttccaagtgatcaatcatgggattccagttagtgtcatggaggagatgaaggatggtgttaggaggtttcat

SEQ ID NO: 221370 - DNA, 394 bp, Gossypium hirsutum
cccacgcgtccgaaatacccaagtttttataaatttaaatatataaattaataagcacgaatctatggctcaactagggtcgtctctgtcagcagaaaccgagacactgagcaatgtcctaagcctggtggaggccttcagagcatttgattcagacaacgatggcgcaatcaatgctgcagagctagggggaatcctgagttcgctggggtacaacgctagcgagcaagacgtgagggccatgatgcgagaaggggacaccaacaaggacggattgctgagcatggaagagttcctagagatgaacaccaaggacatggagcttggggagcttgccaatttcctcaggaccgctttccaagcttttgaagtcgaaggggatgatgctttgaca

SEQ ID NO: 221371 - DNA, 395 bp, Gossypium hirsutum
cccacccgtccgcccacccttccgttattgtccacggcttcggtctccggcttgggcctgtcttccaataccacctctccttctaactcactccggcaacccacattgcggcggccctctatcatcgccaacctcaactcttccacttctcctcctacactcatccgaaatcaaccagttttcgcagcacctactcctttgctcactccttccaattggaaagaaaccatgggagacgagtcatacgaggaagccattgaagctctcaagaaactgctcaatgagaaaggagaattgaagagtgcagcgacggcaaaggtagagcaagtgacagctgagttgaagactgctgcttcctccgatgagtctgttgaccgcttgaaacaaggcttcat

SEQ ID NO: 221372 - DNA, 391 bp, Gossypium hirsutum
cccaggcgtccgaaaaatcagttgtttattaagggcctctacaaccatggctttttgtgcccaataattcgccggtagggcagaaaagttctccccttccacccctgaaatccggggaactggccgtgtttccatgaggaaaaccaccaagcctggtccttctggtagcccatggtacggtcctgaccgagttttgtccttgggtccactatccggtgagccaccatcttacttgaccggtgagttccctggtgactatggttgggacactgctggactctcagctgatcccgagacctttgctaggaaccgtgagctcgaagtcattcactgcagatgggccatgttgggagctcttgggtgtgttttccctgagctgttggctaggaac

SEQ ID NO: 221373 - DNA, 392 bp, Gossypium hirsutum
caattgtcctcaaatatctcatacatggaattaaattgaattaatggctcaaacgatgttgctcatgtctagccatgcagtgagcttgaagagagatcaccctttactccatttccaagctcaaggactcaagcctaaacctgcctctcatctcttcttcaatccattgtctaatggtgtccatacttcacccaaagctttcaccactttagctgtctttaaatcaaagaccaaagcagctcccaagagggttgagccaaagccaaaggttgaagatgggatctttggcacctctggagggattggttttaccaagcaaaatgagctctttgtgggacgtgttgccatgcttggttttgctgcatcattgctaggcgaagcaataacaggga

SEQ ID NO: 221374 - DNA, 390 bp, Gossypium hirsutum
cattatttggcgacaggagagcttgtaagcttgagtgagcagcaacttgttgattgtgatcacgagtgtgatccacaacaatatggtgcgtgtgactcagggtgtaatggtggtctaatgacctctgctttcgagtacaccctgaaggttggtggacttgagagagagaaggattacccttacactgggaatgaccgtggtccctgcaaatttgacaagaccaaaatcgctgcctctgtttctaacttcagtgtcatttctgttgatgaggatcaaatcgctgctaatttggtgaagcatggtccccttgctgtgggtatcaatgcagttttcatgcagacatatatgggaggggtttcatgtccttatatttgctttagaactttggat

SEQ ID NO: 221375 - DNA, 393 bp, Gossypium hirsutum
gtagcatatagtactagtaagcagtaatagcaatggcctcctccatgatctcatcggcaaccattgccaccgtgaactgctcctccccggcacaggccaacatggtggcccccttcaccggcctcaagtctgcctctgctttcccagtcactaggaaggccaacaacgacatcacttctcttgcaagcaatggtgggagagtgcaatgcatgcaggtgtggcctcctcttgggaagaagaagttcgagacactctcatacctccccgatcttacacccgtacagttggctaaggaagtagattaccttcttcgctctaaatggattccttgcttggaattcgaattagaggagggattcgtgcaccgtaagtactcgagcttacccacgtact

SEQ ID NO: 221376 - DNA, 395 bp, Gossypium hirsutum
cccacgcgtccgccaacgttcagtttcccggtatgtacaacaaggaagagaaccctcgtgttccgatcattgtcaccggtaacgatttctcgacgctgtacgcgccgctcatccgtgacggtcgtatggagaagttttactgggcacccaccagggaagataggatcggtgtttgcacaggtattttcaggaccgacaatgttcccgttgatgacattgttaagcttgttgacaccttcccgggccaatccattgactttttcggtgctctgagggccagagtttacgatgacgaagtgaggaaatggatcggagaggtaggagtcaatagtgtcgggaaaaagctcgtgaactcgagggaagggccaccatctttcgagcaacctacgatgacc

SEQ ID NO: 221377 - DNA, 394 bp, Gossypium hirsutum
cccacgcgtccgttcaaattcagataccattttcacagtggttttcttaactctgtttctcagccatggctgcagccatctccaccgtcgccgccgttgccgccgccaaccgagctctgggagtgtcagtcccaacctcagctttcatggggaagaaagtgagctcgagattcaacaacaccaggcaggttccttcgggaagttttaaggtgatggcggccgaaaaagagatagacgaagagacacagaccgaaaaggaccgatggaaagggttggcttacgatatttcggacgaccaacaagacattactcgagggaaagggatggtggattccttgttccaagctcccatgaatgatggaactcactatgctgtcatgagttcctatgaata

SEQ ID NO: 221378 - DNA, 393 bp, Gossypium hirsutum
  unsure (1)..(393): unsure at all n locations
gcattacaagagctttttgaagcttttttttaatttataaaccaatgtttttcggtggccacaggggaaaacccttcctgacccatggaactacaggggctgccccgccgaccggtccaagtccggtggttggaccagtgcagccatgattctaggggttgaggcatgtgagaggctaacaacgttaggtatcgctgttaatatggtgacatatttaaccggcaccatgcatttgggaaatgcttnctcagccaccaccgtcaccaacttccttggcacatctttcatgctttgtcttctcggtggttttatcgccgacacttttcttggcaggtatctcacaattggaatcttcgccaccgttcaggcaactggcgtcaccattttgacaat

SEQ ID NO: 221379 - DNA, 393 bp, Gossypium hirsutum
gaggttctgtttgattatgaaaccaaaattaatcaggctgcctttcctggacttcaagggggtccgaacaaccacacaattactggtctagcagttgccctgaaacaggcaacaactccggagtacaaggcctaccaagagcaagttctcagtaattgctcgaagtttgcacagactctggctgcaaaaggatacgaacttgtttctggtggaacagagaatcatctagttttggttaatctgaagaacaagggcattgatggctccagggttgaaaaggtattggaagcagttcatattgctgcaaacaaaaacactgtacctggagatgtgtctgctatggttcctggtggcatcaggatgggaactccggctcttacgtctaggggattt

SEQ ID NO: 221380 - DNA, 381 bp, Gossypium hirsutum
atagttcgtaacaatgtcggtctcacttcaagctgcagctaccctgatgcaaccaatcaaggttgctgcaccatcaaggaccaatgtgctgctcaggtcctcccagagcgtttctaaggccttcggtttggagcctgttggtgctaggctcacctgctctttgcaaactgacctcaaggacttggctcagacgtgtgttgatgctaccaagctcgctggtttcgctcttgctacatctgctcttgttgtctcgggagcaagcgctgaaggagttccaaagcggctaacctacgatgaaatccaaagcaagacatacatggaagtcaaaggaacaggaactgctaaccagtgcccaaccatcgatggtggtgtcgactcttt

SEQ ID NO: 221381 - DNA, 394 bp, Gossypium hirsutum
ccggcttctgcctcacttccaacttcacctctccttctaactcactccgggaagccacattgcggcggccgtctatcgtcgccaacctcaactcttccacttctcctcctactctcattcgaaatcaacccgttttcgcagcacctactcctttgctcactccttccaattggaaagaaaacatgggagaccagtcatacgaggaagccattgaagctctcaagaaactgctcaatgagaaaggagaattgaagagtgcagcgacggcaaaggtagagcaagtgacagctgagttgaagactgctgcttcttccgatgagtctgttgaccgcttgaaacaaggcttcatttacttcaagactgaaaaatacgaaaagaatcctgctctgtatgg

SEQ ID NO: 221382 - DNA, 396 bp, Gossypium hirsutum
ctctaccactgaaagcaaagaaaaaatggcaacggagatggcccttgtaaagcctatctccaaattcagtacaagcagtccaatttttagcaactcccgatatgggaagttcacgaccgtcagaatgtcatctacttcccaatcaacagcaaaggccgccgcgaagggtggcaagaaagctgccaaaaccgccatcaaagagacccttttgacaccaaggttttacaccaccgactttgatgaaatggaggcgcttttcaacactgagattaacaagaaccttaaccagtccgagtttgaggcactgctgcaagagttcaagactgattacaatcagactcactttgtaaggaacaaggagtttaaagaagctgctgataagattgatggtccttt

SEQ ID NO: 221383 - DNA, 78 bp, Gossypium hirsutum
cccacgcgtccgattagaggcatcgggggcgcaacgccctcgacctattctcaagctttaaataggtaggacggcgcg

SEQ ID NO: 221384 - DNA, 384 bp, Gossypium hirsutum
  unsure (1)..(384): unsure at all n locations
cccacgcgtccgatacgacttggacaacaccatggatggattctacattgccccagctttcatggacaagcttgttgttcacatcaccaagaactacatngacccttctaacattaaggttcctcttatcttgggtatttggggaggcaaaggtcaaggaaaatctttccaatgtgagcttgtctttgccaagatgggaatcaaccccattatgatgagtgccggagaattggaaagtgggaacgccggagaaccagccaagttgatcaggcaaaggtaccgtgaggccgccgacattatcaagaaagggaaaatgtgttgcctctttatcaacgatctcgacgctggagccggtcgtatgggaggaaccacacaatacacagt

SEQ ID NO: 221385 - DNA, 397 bp, Gossypium hirsutum
  unsure (1)..(397): unsure at all n locations
cggccccgtggcctttgccttaacatctttcaactaagcctttcctttttctttgtctgttcgcctccaaatggcttctgccaccacttccaccactctttccctnctcaaaaccaccgnctnncaccaccttttcttcggctnccgctcttctgcatccctcatccgccttccttccacgcgccgccacctcaagtcctctcctctcatccacagcctaggcttctcctccgctgcttctggggactctctgctttccctccatgtctcctccaaagttcgatctttcaagggaaaagggtcaagaggggttgtttcaatggccaagaagagtgttggggacttgactgccgctgatttgaaagggaagaaagtgtttgtgagggctgacttgaat

SEQ ID NO: 221386 - DNA, 388 bp, Gossypium hirsutum
tttcaccttcttcactcccatttttttatttttggaaaccccataaaccaaacgtttatccattaatattaagacccaattctcacatcattttcctttgaggaatttaaccgaaaagtttggatttcttttttgtaggatccaacccatttcaggttgttttcaatggcatcatcggacttgaaagaatcagctgccaataaccctgggcttcatactacccctgatgaagctaccaaagactacatcatgcagcaaactatgtatcgaattaaggatccaaaagtcagtcttgatttttactctcgtgtattgggcatgtcgctgcttaagagagtggatgttccagaattgaagtttaccttgtactttatgggctatgaggatg

SEQ ID NO: 221387 - DNA, 388 bp, Gossypium hirsutum
cccacgcgtccgcccacgcgtccggcacgagtggtctttggtgaacaaacagaagcccatctggatgaggaagcctgaggagattaccaaggaagaatatgctgctttttacaagagccttacaaatgactgggaagagcatttggccgtcaagcacttctcagttgaggggcaacttgagttcaaggctgtcctctttgtccccaagagggctccttttgatctctttgatacaaggaagaagcccaacaacattaagctctatgtgagacgtgtctttatcatggacaactgcgaggagttgattcctgaattcctcagctttgttaagggtattgtcgactcagaggaccttcctttgaacatctcaagagaaatgttgcagcaa

SEQ ID NO: 221388 - DNA, 394 bp, Gossypium hirsutum
  unsure (1)..(394): unsure at all n locations
ttcaaataaaaccagaacttccaatgtttttaaacaggattagtgtttcgggttcaaggaaccaaacaggccaagtccttggttgatttggccgttcagatccctacaactttggatccattcgccgaggctggggaatttgatggcactggtaccaaagagtatgttcatatacggattcaacaaaggaacgggaagaaaagcttgacgacggttcaaggnctgaggcatgacctgagctacgagaaaatgctcaagagtctcaagaaggacttttgttgcaacggcaacgttgttaaagacaaatagctcggcaagatcattcaactccaaggcgatcaacgcaagaacgtgtcgcaggtcctcgttaatgccggcatcgtcaagaaagacc

SEQ ID NO: 221389 - DNA, 395 bp, Gossypium hirsutum
ttagctatagcatacactactagtacccactactagcaatggcttcctgaatggtctcatcggctaccattgccactgcctctccggcacaggctaacatggtcgctcctttcaccggcctcaagtctgcctctgctttcccagtcaccaggaaggccaacaacgacattacttctctcgcaagcaatggcggcagagtgcaatgcatgcaggtgtggcctcctactggaaagaagaagttcgagactctctcatacctccccgatcttacacccgtgcagttggctaaggaagtggattaccttcttcgctcaaaatgggttccttgcttggaattcgaattagaggagggattcgtgcaccgtaaatactcgagcctacccacgtactacgat

SEQ ID NO: 221390 - DNA, 394 bp, Gossypium hirsutum
caaattctaaagcaatgggcaccatttccgacgaccctccggcgacacttatcgaagacctcaaaatcaccacccaaaacgtttctcttatatttccctcccggaaaaccgagagaaaaaaatccatgttcttgtcgaacatagacaaagtgctgaatttcccggtggaaaccgtccattttttccggtcccacgaggattttccgccccatgttgcggctgagaagctgaaaaccgcattatcggagctgctagtgccgtatgatttcttagccggaaggttgaggtcgaacccggaaacaggtcggctggaaatcgactgtaactcggccggaatcggttttgcggtggcttcaagtgattatgcgttggatgatgttggagacttgattta

SEQ ID NO: 221391 - DNA, 301 bp, Gossypium hirsutum
cccacgcgtccgtaaccttacaatgtggtctccaaggataacccatcggagactggtgattgccaatgatgataagggagctcaagaggagagtgtccagatgcgcggtgagaggaaaacagtgggcaacaatgcccggagggagatgatgtatgcagctgcagctgctgctatgtcctcggctgcggcggacgcaactgtgttgcatgcacaagtcatcgcacaagcctagatggcatattctcctgtgactgttgctacgataactgctaggatgtgtctgacctgaagacatggcaat

SEQ ID NO: 221392 - DNA, 429 bp, Gossypium hirsutum
  unsure (1)..(429): unsure at all n locations
ggttcggaaatnccggggcggaccaacccgtccggtttgttccggtttaaccggttttatggttcaactccattgaggaaggtatccaccacggcaatgctagcaactttggactccaaggatgtgtcttcacaaaggatgtcaataaagcaatattgatcagtgatgcaatggagacgggtacggttcagataaattctgcaccagctcgtggaccagatcatttcccatttcagggtttgaaagacagtggaataggatcacagggggttaccaacagcattaacatgatgacaaagatcaagagcacagttatcaacttaccaaccccgtcttacaccatgggttaggcatttcataaatatcagaataacaaccagggttatcttagttaagatagtatttgtgttttagagcttatttccatat

SEQ ID NO: 221393 - DNA, 394 bp, Gossypium hirsutum
ggctgcttttggggatgatgttgttattgttgcggcatgtcgcactgcaattggcaaggcaaagcgtggaggcttcaaagatacacttgcagatgatttgcttgcccctgttttaaaggctgtgattgatagaacaaagctgaacccaagtgaagtgggggatatagttgttggtacagtgttggcacctggttcacaaagagcatcggagtgtaggatggcagcattctatgctggtttccctgatacggtgcctattagaactgtcaacaggcaatgttcatcgggcctgcaagcagttgccgatgttgctgcttgcataaaagcaggattttatgatattggcattggtgctggacttgagagcatgacaactaatggtagtgctcctgat

SEQ ID NO: 221394 - DNA, 395 bp, Gossypium hirsutum
taaatctatctctctaaggtatcttttttttgctaatttctgcaaaattaagggtattttttgttggctaattgttcggtggattcgggagattaaaaagttgaaatctttttaatgtaaaattctgggtttttattttttatatttgagaaggtttgggaaatcaaatgggagtgaaggtagagcactgatgtcactgttttggattgtaattcgtcgattagctgaaattgaagaaagaatggcaacctcaaagaaagtgattacaagggaagagtgggaaaagagattgaatgatgttaaaatcaggaaagaagacatgaataaattggtgatgaattttcttgtcacggagggttatgtcgaagctgctgaaaaattccagatggaatctg

SEQ ID NO: 221395 - DNA, 393 bp, Gossypium hirsutum
atctctcctttgtttccccttttctctctcttttttcaaccctaaccctacctgaccaaccaggattcaacatgaagggaggaaaatctaagtcagatactaagagtgccaagctatccgtgaaatccaaagctggaaagaaatcggggaaggctgccaaggatccaaacaagccaaagaggcctgctagtgccttcttcgttttcatggaggagttccgtgagcaatacaagaaggatcaccctaaaaacaaatccgttgccgctgtcggcaaagctggtggagataaatggaagagcttgtctgaagctgaaaaagcaccttatgtagccaaggcagaaaagtgaaaggtcgagtatgaaaagaacatgaaggcctacaataagagacagg

SEQ ID NO: 221396 - DNA, 395 bp, Gossypium hirsutum
cccacgcgtccggggtggcatgttatctgggtcaagaatggaaacactggctatgatgaaattcgcgctgcaatcaaggaagcaaaggctgtcaaagacaagcccactctgatcaaggtgacaaccaccattggttatgggtctcctaacaaggcaaactcatatagtgtacatgggagtgcactgggtgccaaggaagttgatgctactaggaaaaaccttggatggccatatgagcctttccatgtaccggaagatgttaaagcctctaattgtagagatgcaattgtggtgtcattcaaggtttggaataatccgatttttgtctgtttgattaacagagaaatattggagataagttgtgaagggaaataatggacaaattggttgtaatt

SEQ ID NO: 221397 - DNA, 386 bp, Gossypium hirsutum
ctggtttacgtggctcttcacaagctgtgttggaaggtagtctccaactcagcggccaaacccggttgaacgttgctagcaccaacagggtggctgtggctagacctggttttaccgttagagctcaacaggtccctgccgagcctgaaactggacgcagagctgtgctgggtcttgttgctgctggtttggctactggctcctttgttcaagctgtgcttgctgatgcacgaagcatcaaggttggcccgcctccaccaccctccggtggattgcccggaactttgaattccgatgagccaagagaccttgatctggcgtacaaagatcggtttttcctccaaccattgactccggcacaagcggctcagagggcaaaggaatca

SEQ ID NO: 221398 - DNA, 401 bp, Gossypium hirsutum
  unsure (1)..(401): unsure at all n locations
gtccgttgtcatttcccttacttcctaaaaccataagccatggccggcatgataatggctgccgcaaagcctgtaatctccattgctgtttaataatccttcttttccaaacccaaactcaaacaaatccccaacttttccctccaaaaactccccacccaaaagttcttgaaaacccaacaaatcccctcactttcctccaccactctcaaatctatctccctcttcacagtcaccactttatcctntgccccaccttctcttgctgcagaaatagaaaaggccgctcttttcgatttcaacttaaccctccccatcatgatggtccagttcttgttcctcatgtttgctcttgacaaggtctactttaccccactcgggaaattcatggatgagagaga

SEQ ID NO: 221399 - DNA, 397 bp, Gossypium hirsutum
caaaaccgaaactcgggaatttcaactcattttccactttgactagcggttcacttcactgagtcaactaaaagttatggcgttacctactcatcagttacagagattccttgcaatcgagttcaatttcatctccaatcccaaaatcgcttacaggaaccaactaaccgcaacaacggcagtaagatctagtccaagaagcccctgccgttgctccgcgattgcaataaacgctccttcttcgctaacggatgtttccgggatccgttgggggtcgacgagtgtgcagggcaggcgcgaagagatggaggatgatttagttatacgatcggacggtcttgatggattctcgttcgctgccgtctttgatggccacggcggcgtagcttccgtcaag

SEQ ID NO: 221400 - DNA, 401 bp, Gossypium hirsutum
gaaagaaaaaagggaaaaattcttttttttttcatcaatcgtgaaaagcttctaaaagcgttttcgatcagaacccaatcgaggaatatggggaagaaaaggaagtcaatagcgacgagccttgatgaggtggatcggactatgtatgcttcgttttgcagcgctgctaactctttgtctcaactttatactcaggctatgaaccagcagaaactctcctttcaagccggaaaaggccatagccttgaaaaactttatcagtggatttggagacaacaagagggaggatcaagggtaacaacaatggatatcctcaattaccttcagaatgagatagactactgtggtgaggagccatcaatgtcacctagagcaccaagccaacagcaccaatcccagcc

SEQ ID NO: 221401 - DNA, 389 bp, Gossypium hirsutum
cccacgcgtccgcccacgcgtccggagaaccctcgtgttccgatcatcgtcaccggtaacgatttctcgacgctgtacgcgcctctcatccgtgacggtcgtatggagaagttttactgggcacccaccagggaagataggatcggtgtttgcacaggtattttcaggaccgacaatgttcccgttgatgaccttgttaagcttgttgacaccttcccgggccaatccattgactttttcggtgctctgagggccagagtttacgatgacgaagtgaggaaatggatcggagaggtcggagtcaatggtgtcgggaaaaagctcgtgaactcgagggaagggccaccatctttcgagcaaccgaagatgaccattgagaagcttgtgga

SEQ ID NO: 221402 - DNA, 383 bp, Gossypium hirsutum
gattcttctagttccgaccaaaaaatagaattgctcatctttccttcagagaatgggtgttttgagtgaaaaaaaaaaatgttgggagtattcagcggagcgatagtgtccccgccggacgagctggtggctgccggttgcaggacgccgtcgcctaagataacggcggacgctcttgtgaaacggttcatcgaggcaaacccctccaccgtgtctatgcagatcggagatcatgtccaattcgcttattctcaccgtaacgagtctgctttacttcccaggtcattcgcggtgaaagatgaaatattctgcatgtttgagggggcacttgataacttaaggagtttaaagcagcaatatggacttggtaagtcagcaacaga

SEQ ID NO: 221403 - DNA, 406 bp, Gossypium hirsutum
aaatcattcaagtttcttaattttcattcgatatcgaagatgtcaggaagaggaaagggaggcaagggacttggcaagggaggagcgaagcgccaccgtaaggtcctccgtgacaacatccagggcatcacaaagccggcaattcgacgcttggcccgtaggggaggagtaaagcgtatcagtggcttaatctacgaggaaacccgtggagttctcaagatcttcttggagaacgtcattcgcgatgctgtcacctacactgaacatgccaggaggaagacggtgaccgccatggatgtggtttatgctctgaagaggcagggtaggactttgtatggatttggcggttagtcgatttagggtttaggtttgtaattaggggaatcctttagggcttaatcgaaac

SEQ ID NO: 221404 - DNA, 395 bp, Gossypium hirsutum
gaaacgttaaaacagactcgttaccttttgagttttcccctgtggttttctttcaattacttcaagctggcgatcgataatcaagaacccactgtccgtgaaatcaagcccaagaacagaaaaatcatgggagctggtgggccctgatgaaaaagacaacaggtggcctccatggctgaaacctttgttaagagagcatttctttgttcaatgcaagcttcatgctgattctcacaagagcgaatgcaatatgtactgcttagattgcatgaacggcgctctctgttctttctgcttagcttatcacaaggatcatcgttacattcagattaggaggtcttcataccatgatgtgataagggtatctgagatacagaaatacctggacatatctg

SEQ ID NO: 221405 - DNA, 252 bp, Gossypium hirsutum
cacctgtgcctatttctcctcaattccctctaaactaacctctacccacctctcctattgcttcctccctcctttactcactaccgggcgcaccactttcgtattccctcgccgtcgcggttctttcaccgtcaaaactgcccgtggcaaattcgaacgcaaaaagccccacgttaacatcggcaccatcggccatgtcgaccacggcaaaaccaccttaactgccgctctaactatggccttagcctccat

SEQ ID NO: 221406 - DNA, 396 bp, Gossypium hirsutum
tcgtatgtgagaaacaatggtagaccaaatgccatgtgcagctttgtctaatgtatggaacaaagtgaaaccattcttggcaatcatcttcctgcaatttggatatgcagggatgtatatcatctccttggtttctttaaagcatggaatgagtaatttcatcctttgtacctatcgccatgttgttgccaccattatcattgctccctttgcctttgttctcgaaaggaaaatccggccaaagatgacccttcctatcttcctcaagattgtggttcttggtttgctcgaaccagtacttgaccagaacttatactatttgggaatgatgaagacaactgcaacatattcatcggctttcgtcaacatgcttcctgctgttactttcatattggc

SEQ ID NO: 221407 - DNA, 383 bp, Gossypium hirsutum
tttctctttcctttttttcctccctattttttttctcgggaaaaaaagactttttttccggtatacccagatcttgtttagttccaagctttaggttgtcatcgttttctcgaggttttaaactatgggtatctcttgaatttgtgaagcaaagggagaaatattggttaaaaactagtagcagtgtattgaatcaagttttacaaaaaaagaagttaaaaagaaagatgaaaatccagtgtgatgtttgtgagagagctccagcaacagtgatatgttgtgcagatgaggctgcactttgtgctaaatgtgatatcgaagttcatgcagctaacaagcttgctagcaaacaccaaaggcttctccttcaatgcctttctaac

SEQ ID NO: 221408 - DNA, 394 bp, Gossypium hirsutum
aacccccctcctcctccacctccatcacaaacactctttcctctctctcctctgcgaccaccttctctcatgcttcttccaccacatccacaactacttcccaagctatctcctttgacaccctccaacaccacctttccaatcaaaacttccgccaggccgacgaagaaacccgccatctgctcatccttctagccggcgaagcagctcagaagcgcggctacgtcttcttctccgaagtccaattcatctcccaaaatgacctcaaagccattgacgaactttggaaaaaacacagcaacaacaaattcgggtacagcgtccaaaaaaagacagtggcaaaaagtaaaaaaggacttcaccaagttgttcctcaaactgggatggatgaaaa

SEQ ID NO: 221409 - DNA, 387 bp, Gossypium hirsutum
cacaaacgcagtaccaattttctctcgacaatccaaagccctttcaatggcgtgcagtacgaccgcattcggttccggcgtatcaacaacagctttggggttgagcagcctcaagcgaagccccactgttggtgtcgctaccattatttttccaaagcctcgccgctcgtcggctatggtagtcagagctgagggtcaaaccataaacccagagataaggaaaacggaggagaaggtggtcgactcagttgtagtcactgaactctctaagccccttacagcttattgcagatgttggaggtcaggtactttccctctttgcgatggaggacatgtgaaacacatcaaggctacaggggacaatgttggtcctttgctcttgaagaa

SEQ ID NO: 221410 - DNA, 386 bp, Gossypium hirsutum
agcaaatagaggaaaaatgaccaatgtttaggcagaaaaagctctctcaatgggtaaaggagttctggattactctgaatttaaagacgtagacatggtcatagaggcagttgttgaaaatgttgctttaaagcaaaaaatattcagtgagatagagaaggcttgccctcctcactgcattttggcaacaaacacatccactattgacctcaatttaataggagaaaaaatgaactcgcaagatcgtcttataggagctcactttttcagtcctgcccatctgatgcctcttttggagattgtacgaacacagaaaacttccccacaaataattcttgatcttatgacggttggcaaagtaataaagaaagttcctgttgtggttg

SEQ ID NO: 221411 - DNA, 383 bp, Gossypium hirsutum
ttcctccccacccttaaaccatgtttgcttttgttggcaagtatgcagaggaggtgggcaagaacgccaactacatcgccacgccaggcaaaggtattttggcggcggacgagagcacaggcaccatcgggaagcgtctctcgagcatcaacgtcgagaacatcgagtccaatcgccaagccctccgcgagctccttttcacctctcccaacgcattatcctgcctctccggtgtcattcttttcgaggaaacactttaccagaaaacatctgacgggaaacccttcgttgaaatcctcgaagagaacaatgtcattccaggtatcaaggtcgataagggcaccgttgagatagccggcaccaatggcgagaccaccactcaa

SEQ ID NO: 221412 - DNA, 365 bp, Gossypium hirsutum
  unsure (1)..(365): unsure at all n locations
cccacgcttnncgtcacacccttctttttttttttacgttaattgccctttcggggtagtggatactaaaaaaaggaagcaactaagaagggaaatggagggcaaagaagaggatgttagattgggagccaacaagttcacagagaggcaaccaattgggaccgcggctcacagtcaagatgacgggaaagactacactgaaccaccaccggctccatttttcgagcctggcgagttaacctcatggtctttttatagggctgggattgccgagcttgcggcgactttccttttcttgtatatcactattttgactgttatgggagtagttaaggaaaaaactaagtgcccaactgttgggattc

SEQ ID NO: 221413 - DNA, 379 bp, Gossypium hirsutum
cccactcgtccgaccacgctttcttccacgcgtccgcccacgcgtccgagaaggtggccactttgatctagtcgtcaagatttacttcaaaggggtgcacccgaaattccctaacggtggcctcatgtcacaatatttggactctctccccctcagttcgtcactagacgtgaagggtcctttgggtcacatcgaatacaccggtcagggcaactttttggttcacggcaaacccaactttgccaagaaactagcaatgttagccggtgggacggcgatcacccccatttatcaactcatccaagccattttaaaagaccccaaggacgagaccgagatgtatgtcgtgtacgcaaaccgaaccgaggacgacattttg

SEQ ID NO: 221414 - DNA, 386 bp, Gossypium hirsutum
cacaaacgcagtaccaattttctctcgacaatccaaagccctttcaatggcgtgcagtgcgaccgcattcggttccggcgtatcaacaacagctttggggttgagcagcctcaagcgaagccccactgttggtgtcgctaccattatttttccaaagcctcgccgctcgtcggctatggtagtcagagctgagggtcaaaccataaacccagagataaggaaaacggaggagaaggtggtcgactcagttgtagtcactgaactctctaagccccttacagcttattgcagatgttggaggtcaggtactttccctctttgcgatggaggacatgtgaaacacaacaaggctacaggggacaatgttggtcctttgctcttgaaga

SEQ ID NO: 221415 - DNA, 384 bp, Gossypium hirsutum
cagacgcgtggagctgataacccttccttcgttcagctccccggtatgtacaggaaggaagagaaccctcgtgttccgatcatcgtcaccggtaacgatttctcgacgctgtacgcgcctctcatccgtgacggtcgtatggagaagttctactgggcacccaccagggaagataggatcggtgtttgcacaggtattttcaggaccgacaatgttcccgttgatgaccttgttaagcttgttgacaccttcccgggccaatccattgactttttcggtgctctgagggccagagtttacgatgacgaagtgaggaaatggatcggagaggtcggagtcaatggtgtcgggaaaaagctcgtgaactcgagggaagggccacca

SEQ ID NO: 221416 - DNA, 384 bp, Gossypium hirsutum
cccactcgtccgcaacaaaatcatttgcttcacaatggcctctacaaccatgggtctgttcttccccatcattcgccggtaaggcagtgaagttctccccttccacccctgaaatccggggaactggccgtgtttccatgaggaaaaccaccaagcctgttccttctggtagcccatggtacggtcctgaccgagttttgtacttgggtccactttccggtgagccaccatcttacttgaccggtgagttccctggtgactatggttgggacactgctggactctcagctgatcccgagacctttgctaggaaccgtgagctcgaagtcattcactgcagatgggccatgttgggagctcttgggtgtgttttccctgagctgt

SEQ ID NO: 221417 - DNA, 352 bp, Gossypium hirsutum
aacacacttactatacacttccttatatccaacacaaaaagctcttaagatagttaaattagacctggattactccactatttaaagacactacacgttgtcttaaatacacatgttgcaatccatcctttcaatcaaaaaatactcaattacataaagatagcttaccctcctaaatggattttggcaacaaacacatacactattgacctcaatttaataagacaaaaaatgaactctcaagatcttacttataagaactcactttttcattcctgcccatttgatacctcttttggagattataccaacacagtaaacttccctacatataattcttgatcttataact

SEQ ID NO: 221418 - DNA, 378 bp, Gossypium hirsutum
cggacgcgtgggcaaaccctactgtgttgttaagtttctggaggagcgtgacgtctccgacgtggacggagacgctgatgtcagccgggaggaagcggaggcggcgtcgtggctgcttccgaaccctaaccataaggctgtggacagcccggacgtgaactcggggcagtacgtgttctcggagatggacccgtttctggatctagattacgggcatggggatccaaaaatggatgcccaggagcagaacagctccggcaccgatggggtggtccctgtccaaagcaagaatgttcaagctccgtcggctaacgatcactgtttcgacttggacttcaccggatccaaatccttctcttatggctacaaccccaactt

SEQ ID NO: 221419 - DNA, 349 bp, Gossypium hirsutum
atcaaactgagtataaatgtctttttataaagcacaaatagctctatggatggtgtaaatagtcctggattactctcaatttaaagacctatacttggctattaatgctggtgctgcaaatcttcctttcaatcaataaatatctattgcgacaaagaatgctttccttcttgactacattcttgcaacaaacacattcactattgacctcaatttaataagagaaaaaatgaactctcatgatcatcttataagagctcactttttcagtcctgcccatctgatacctgttttagagatagttcctacacattataacttccccacatataatacttgatcttatgac

SEQ ID NO: 221420 - DNA, 377 bp, Gossypium hirsutum
ctcaagctctctcttcctgtctttttctacttcgcctctttctctatggatgcggtacaagcaccgtccatcaagtgctttcaattcaccattctggactaccaattctggcgctccagtttggaataacaattcatctctcactgttggacccagaggtccaattcttcttgaggactatcatctggcggaaaagcttgccaactttgacagggagcggattccagaacgtgttgtccatgctaggggagcaagcgcaaagggtttcttcgaggttacccatgacatttctcaccttacatgtgctgattttctgcgagcacctggagttcaaacccctgttatcgtgcgattttcaaccatcatccatgagcgtg

SEQ ID NO: 221421 - DNA, 380 bp, Gossypium hirsutum
atccgccagagaattggtccattgcttatgaaaatgcagaaaagatatgggaggggtgatgaaagaggcgagttaacagagaaagagattattagagctgagaggaactcaggtgtaattagtgacagagtgagggaaatccaaatgcaaaactatatgaggaaaaaggaacaaaaagaacgcagggaaacggatcttcgtgaagggttgcaattatacaagagcggcaattacgagcaagcgctggagaaattcgagtctgtactgggatcaaagccagagcctaatgaagcagctgtagcaagttacaatgttgcttgctgttattcaaagcttaatcagattcaagctggtctatcagcacttaaagatgccttgga

SEQ ID NO: 221422 - DNA, 348 bp, Gossypium hirsutum
atcaaactgaggatacacgtctttttctaaagcacaaaaagctctatggaggggtaacaatacatctggcttactctctaactaaagacataaacttggccttaaaggctggtgttgcaattctacctttcaatcaataaatacctatcgcgacaaagatggctttccctcctaaatgcattttggcaacaaacacattcactattgacctcaatttaataagacaaaaaatgaactcccaagatcgtagcatagagactcactttttcaatcctgcccatctgaaacctgtttgagagattatacctacatcttatacttccccacctataatgcgtgatcttatga

SEQ ID NO: 221423 - DNA, 372 bp, Gossypium hirsutum
ctcaagctctctcttcctgtctttttctacttcgcctctttctctatgggtgcggtacaagcaccgtccatcaagtgctttcaattcaccattctggactaccaattctggcgctccagtttggaataacaattcatatctcactgttggacccagaggtccaattcttcttgaggactatcatctggcggaaaaactcaccatctttgacagtgagctaattccataacgtgtcttccatgctcggggaacaagcgcaaagtgtttcttcgaggttacccatgacattcctcaccttacatgcgctgattttctgcgagcacctggagttcaaacccctgttatcgtgcgattttcagccgtcatgcatga

SEQ ID NO: 221424 - DNA, 383 bp, Gossypium hirsutum
cccacgcgtccgagtccaatcacttcctttactttcataacatttcacgaacggcactctccagtctccaatggcggctgccgtctccaccatcggtgctgtcaaccgagcaccgttgagtttgaatggatcaggtgccggagcttctgctccaagctcagctttcatggggaacagcttgaagaaagtgagcgctaggttcaacaacaacggcaaggctccagtgggaagtttcatgattgtggctgccaaagaaatcgacgaagacacacagaccgaccaggaccgatggaagggtcttgcttatgatatctccgatgaccaacaagacattaccagagggaaaggtatggtcgactcattgttccaagctcccatgaacg

SEQ ID NO: 221425 - DNA, 269 bp, Gossypium hirsutum
aagcacctccccataagcaaacctcaaattaaagcttggagagagacccaaaagcagtgtctaaggaagtgagtgaagaaagacagggtcgtaaggactatgtggaccctccaccggcacctctgattgatatggctgaactcaagtcatggtctttttacagagccctcatagctgagttcatagccactctcctcttcctctatgtcactgttgctaccgtaattggtcacaagaaacaacaagatgcatgtgatggtgttggtctc

SEQ ID NO: 221426 - DNA, 382 bp, Gossypium hirsutum
aagtccaatcactcccaatactttcatatcatttcacgaacttcactctccaggctggaatggcggctgccgtctccaccatcggtgctgtcaaccgagcaccgttgagtttgaatggatcaggtgccggagcttctgctccaagctcagctttcatggggaacagcttgaagaaagtgagcgctaggttcaacaacaacggcaaggctccagtgggaagtttcatgattgtggctgccaaagaaatcgacgaagacacacagaccgaccaggaccgatggaagggtcttgcttatgatatctccgatgaccaacaagacattaccagagggaaaggtatggtcgactcattgttccaagctcccatgaacgatggtactca

SEQ ID NO: 221427 - DNA, 383 bp, Gossypium hirsutum
cccactcctccggcctcctaacattgactattggggtgaatcagacccacaagcacggctcgcctttacaatggcgagttctgaggaaggcgactcaagctcaactcgttcgatccaactcaaagccgagcgtaccatggggtccgattcagaggtctgtataaccttcacaataagcttccaagggttccaatcttcacctctttgggtctctgacccctgttctctatcttcagagcaacctttcctccctttagtacttcagcttctccaagaaaccatcagccgttcaccagcaatgcccaacaccatttgcccgaggtctcagcttcaaaaactcaaacccgaacccatttcttggatcattgagtctcactcacccg

SEQ ID NO: 221428 - DNA, 383 bp, Gossypium hirsutum
gatctcccctgttttattctctgttaattttataacttgggaacctagacacgcaaggctactgtttctcaattgaacaactttccatgcaagaccttcttaataatcccacaaaacagtaactttacctcaaagcttccggttctgcctctaaactctacaaaaccaactcagaattcgatcaagaaatctcaatttttgacccagaaatcagtccagccaatgcctgttttccagatccgtgcttcggacgccgacgatgaatggggcccagacaaggaggagccagttgtaatcgagagtcctggagtggccgtagcggaagagaagaagcctgacgatgcgggggaaatagagagcttgaagaaagctttggtggattc

SEQ ID NO: 221429 - DNA, 377 bp, Gossypium hirsutum
ctcaagctctctcttcctgtcttcgtctacttcgcctctttctctatggatcggtacaagcaccgtccatcaagtgctttcaattcaccattctggactaccaattctggcgctccagtttggaataacaattcatctctcactgttggacccagaggtccaattctccttgaggactatcatctggtggaaaagcttgccaactttgacggggagcggattccagaacgtgttgtccatgctaggggagcaagcgcaaagggtttcttcgaggttacccatgacatttctcaccttacatgtgctgattttctgcgagcacctggagttcaaacccctgttatcgtgcgattttcaaccgtcatccatgagcgtgg

SEQ ID NO: 221430 - DNA, 380 bp, Gossypium hirsutum
gttagctttagcatacactactattacccactactagcaatggcttccgcagggatctcatcggctaccattgccactgcctctccggcacaggctaacatggtcacccctttcaccggcctcaagtctgcctctgctttcccagtcaccaggaaggccaacaacgacattacttctctcgcaagcaatggcggcagagtgcaatgcatgcaggtgtggcctcctactggaaagaagaagttcgagactctctcatacctccccgatcttacacccgtgcagttggctaaggaagtagattaccttcttcgctcaaaatgggttccttgcttggagttcgaattggaggagggattcgtgcaccgtaagtactcgagctt

SEQ ID NO: 221431 - DNA, 378 bp, Gossypium hirsutum
cccacgcgtccgattgaaccaactttgttatgctgagaaacaagctcggggggaagtgagtgtagagcttttggacacccaagtgaacccggctgtgtgggaaattagtggtcatatggtgttgaaaaggaggaaggactatgatgaggcgtccgacgaaaatgcttggaggttacttgcagaggtatctctctctgacgagaggtttgatgaagtgaatgcacttatctttgaagccattggcggtggcaaagatgcaattgaaaatgttgaggagcctgataccaaagctcaatctattgaaaaagagaatggcatcaccgaaacttcccaccatgctatggtggctgggacacaacaatgccttgttctgcagta

SEQ ID NO: 221432 - DNA, 393 bp, Gossypium hirsutum
  unsure (1)..(393): unsure at all n locations
aaaatgccttcgaatgccttgcgagtttctatcttcnnttcctcttcttctctggtcaggtaagcctttttttntctcatttctcccaagcnttccccatctctttctctcctatctctctccctttccctcaaaccagacgatccatttcccttcacacacgccccatgaacatccttaaaaatctaggcttcggagccaacaacaagccagccccgtccatggagggttcctccatcgctcaaggtccagacgacgacgtccctgctcctggtcaacagtttgctcagttcggtgcgggttgcttttggggtgttgaattggccttccagagagttccaggggtgaccaaaacggaggtggggtatagccaagggtttatgcataatccta

SEQ ID NO: 221433 - DNA, 383 bp, Gossypium hirsutum
gaaccagggaacaccgaaagaagtatctcgagaaccatggacagagactggggctcgaaacccggttctggaggtgctgcctccgcccaaactgaagccatggaccgccgcgagcggctccgtcggcttgctcttgaaaccatcgatctcgccaaagatccctatttcatgcgcaaccacctcggcagttatgagtgtaagctttgtctgacgctacacaacaatgaagggaactatttggcacatacgcaagggaagcggcaccagaccaacttagctaagagagcggcgcgtgaggctaatgaggctccggctcagcctcagcctcacaagcgtaaagtttctgttcgtaaaacagtcaaaattggtaggccaggatatcg

SEQ ID NO: 221434 - DNA, 357 bp, Gossypium hirsutum
gttccatgtgaacggcacttgctcttgtgttagtcgatcctaagagacggggggaggccgtccgacagcgcgtgcagcgcgagcttcgaaagggaatcgggttaaaattcctgaaccgggacgcggcggctgacggcaacgttagggagtccggagacgtcggcgggggcctcgggaagagttatcttttctgtttaacggcctgcccaccctggaaacggctcagccggaggttgggtccagcggccggaagagcaccgcacgtcgcgtggtgtccgtagcgcccccggcggcccttgtaaatccggaggaccgagtgccgtccgcgcccggtcgtactcataaccgcatcaggtc

SEQ ID NO: 221435 - DNA, 380 bp, Gossypium hirsutum
cccacgcgtccggaacccatatactacttcagacgaagtatacgctttagggggacatatatgtatgtctgctcacaaagcacgaagaataattgatcagattcgtggacgttcctacgaagaaacacttatgatactagaactcatgccttatcgagcatgttatcccattttaaaattggtttattctgcagcagcaaatgctcgtcacaataggggtttcaatgaagcgagtttaatcattagtcaagtcgcagtaaatgagggaactactctgaaaagactaaaacctcgagctcgaggacggagttatctgataaaaagacccacttgtcatataactattgcattgaaagatcttgaatttgaaccacttgaca

SEQ ID NO: 221436 - DNA, 375 bp, Gossypium hirsutum
ctcaagctctcttttcctgtctttttctacttctcctatacctctatgggtgggtacaagctccttgcatcaagtacccccaattaaccattctgtactaccaattctagcgctccagtatggaatatcaatgtatgtctcactattggacccaaaggtacagttctgcttgatgactatcatctggtggaaaaacttgccaactttgacagagagcgaattccagaacgtattgtccatgctaggagagcaagcgcaaagggtttcttcgacgttacccatgacattcctcaccttacatgtgctgattttctgcgagcacctggagttcaaagccctgttatgcggcgatcttcaaccgtcatccatgagcgt

SEQ ID NO: 221437 - DNA, 384 bp, Gossypium hirsutum
ccagctttcatggacaagctagttgttctcatcaccaagaacttcatgaccctgccgtacattaaggttcctcttatcttgggtgtttggggaggcaaaggtcaaggaaaatctttccaatgtgagcttgtctttgccaagatgggaatcaaccccattatgatgagtgccggagaattggaaagtgggaacgccggagaaccagccaagttgatcaggcaaaggtaccgtgaggccgccgacattatcaagaaagggaaaatgtgttgcctcttcatcaacgatctcgacgctggagccggtcgtatgggaggaaccacacaatacacagtgtacaaccaaatggtgaacgccacactcatgaacatcgctgataaccccacc

SEQ ID NO: 221438 - DNA, 381 bp, Gossypium hirsutum
tttagctatagcatacactactagttcctactactagcaatggcttcctcagggaggtcatcggctaccattgccactgcctctccggcacaggctaacatggtcgctcctttcaccggcctcaagtctgcctctgctttcccagtcaccaggaaggccaacaacgacattacttctctcgcaagcaatggcggcagagtgcaatgcatgcaggtgtggcctcctactggaaagaagaagttcgagactctctcatacctccccgatcttacacccgtgcagttggctaaggaagtggattaccttcttcgctcaaaatgggttccttgcttggaattcgaattagaggagggattcgtgcaccgtaaatactcgagccta

SEQ ID NO: 221439 - DNA, 384 bp, Gossypium hirsutum
ccccacccaaaaaaaaaagaaaagtttatcccaggctctctcgaaaaacattggggtggattacgaaggctcttttcaacaacatactacgtcgtttcatccatcaagatttccatgaagctgtttctttcatgaccataattgatgcttttctcttcctcatggttcattcggtggatagattggggatatggcaccggttacctgttgtcttaggctcaatatatctggctgcacgtcgccatcttcaccagcaatacaatctcatcaatgtcggggtaactccatccggcgttcggcttagcccaggagattatccgcacagaacagctagtggaagttacaatgatcctttcaatgagggagctggcagccaaagatctt

SEQ ID NO: 221440 - DNA, 381 bp, Gossypium hirsutum
cttttgtataactgtagcatatattacttgtaagcagtaatagcaatggcctgctcgatgatctcatcggcaaccattgccaccgtgaactgctcctccccggcacaggccaacatggtggcccccttcaccggcctcaagtctgcctctgctttcccagtcactaggaaggccaacaacgacatcacttctcttgcaagcaatggtgggagagtgcaatgcatgcaggtgtggcctcctcttgggaagaagaagttcgagacactctcatacctccccgatcttacacccgtacagttggctaaggaagtagattaccttcttcgctctaaatggattccttgcttggaattcgaattagaggagggattcgtgcaccgt

SEQ ID NO: 221441 - DNA, 371 bp, Gossypium hirsutum
tcaagctctctcttactgtctttttatttttcgcctctttctctatggatccgtaggagcaccgtccatgaagtgctttcaattcaccattctggactaccaattctggcgctccagtttggaataacaattcatctctcactggtggacccagaggtccaattctccttgaggactatcatctggcggaaaagcttgccaactttgacagggagcggattccataacgtgttgtccatgctaggggagcaagcgcaaagggtttcttcgaggttacccatgacatttctcaccttacatgtgctgattttctgcgagcacctggagttcaaacccgtgttatagtgcgattttcaaccgttatccatgag

SEQ ID NO: 221442 - DNA, 377 bp, Gossypium hirsutum
cccacgcgtccgctggacattgtttccttgtatgacatctgtttccggggagggaagctaaccactcccagctttggtgatttgaaccatttgatatctgcaacaatgtctggagttacatgctgcttgcgattccctggtcagctcaactccgatctcaggaaacttgccgtgaatctcatcccctttcctcgtcttcactttttcatggtgggttttgctccactcacttctagggggtctcaacagtaccgagctctaacagtacctgagctcacccagcaaatgtgggacgcaaagaacatgatgtgtgctgctgatcctcgtcacggtcgatacttgactgcatctgctatgttccgtggtaaaatgagcac

SEQ ID NO: 221443 - DNA, 376 bp, Gossypium hirsutum
ctcttatggtcctgactaatgtgtttttatcttctacatcctctgcaatgcgggaaggtggacctgatgttgttgggcttatcttaccaagtagcttcggagcttccttgtatttcatgaccagaaggaacttgaagttaggtaaggctacattaataactataggggggcttgttgctggtgcagtggtgggatcagccgttgaaaactggttgcaggtagacatagtcccatttcttggaatacactctccagctactgtagttggtgaaattatactcttctctcaattcttggtatctctctatctacggtaggaataagctggatgtttttgttatttaatatgtaaaacctgtaactattcattttcatg

SEQ ID NO: 221444 - DNA, 382 bp, Gossypium hirsutum
gacagcttctatcaacggttggttcctttcctcctcttcttccaccactaccgcctggtctttttccgctcgtcgacgacctacattgcggccttcagtcgtcgctagccttaactcttctccttctcctccgactcttatccaagaccgcccggtttttgctgcccctattcctttgctcaccccgagagaagagatgggaaacaagtcctacgacgaagccattgaagctctcaagaaacttctcagtgagaaaggagaactgaaagctgaagcagctgcaagggtagatcaaataacagcagagtttaacacagcatcagctgatggcaaaccatctgactctttctgtgagagactgaaagaaggcttcgtttacttc

SEQ ID NO: 221445 - DNA, 382 bp, Gossypium hirsutum
caaccgcttacgataatgctttgtttcttgcctgctggaggaagagggggggaggtagagctagccaaggagaacaacaagagtgctgcatcttcatcagggaaaatcaccttgagcgtcacaaagagcaagccggagaccggtgaagttatcggtgtgttcgagagccttcagccatctgacactgacttgggtgccaagactccaaaggatgtcaagatcactggtgtctggtatgctcagcttgattcataaacaagtcttgtatgaatctgtttattctcggcgtgagattttgtaatttttaaacaagtgttgctaaactttgcagtaatccactgagaaacccttatcttctttgtatgttactatgctggctttt

SEQ ID NO: 221446 - DNA, 378 bp, Gossypium hirsutum
cccacgcgtccggcaattttctttttcatgatctcatcggctaccatgggcggcgtgaactgctcctccccggcacaagccaacatggtggcccccttcaccggcctcaagtctgcctctgctttcccagtcactaggaaggccaacaacgacatcacttctcttgcaagcaatggtgggagtgtgcaatgcatgcaggtgtggcctcctcttgggaagaagaagttcgagacactctcataccttcccgatcttacacccgtacagttggctcaagaagtagattaccttcttcgctctaaatggattccttgcttaggaattcgaattagaggagggattcgtgcaccgtaagtactcgagcttacccacgtacta

SEQ ID NO: 221447 - DNA, 382 bp, Gossypium hirsutum
cccactcgtccgccaacccttccgtttttaattgcttttgaagcaagaaaacggttgtgcagatgaaagaatttggattaccaatgaaattatccataacccaactgttaataagcgattagaggagatggaagttaaaaatattcctatcgaggaagggaagaaacggtttgatgtagtggataagaaggatgtcgtggttttgcctgcttttggagctgcagttgatgagatgttggttttgaatgacaaaaatgtgcaaattgttgatacaacttgtccttgggtaactaaggtatggaacgtagtagagaagcacaagaaaggagactttacttcaatcatacatggtaaatatgctcatgaggagacaattgcaact

SEQ ID NO: 221448 - DNA, 379 bp, Gossypium hirsutum
ataatggtgtcctttactgtttctttagctaaaccaacccttcaagcaaatggaaagggttttgcggaattctcaagtctgcacaactcatctagccttacctttgccaggaaaacctcggatgactttcaatcagtcattgctttccagacatctgctttgggaatcaataatggtggataccggaaaggcgtagtagaggcaaagctaaaggtcgctattaatgggtttggtaggattggcaggaacttcttaagatgctggcatggccgttaggactccccacttgatgtcattgcaatcaatgacactggtggtgttaagcaagcttgtcaccttctcaagtatgactctacccttgggatatttgaagccgatg

SEQ ID NO: 221449 - DNA, 390 bp, Gossypium hirsutum
aaaacccttctttttttccctcatcaatccaccatgggaggaggaaatggccgaaaagccaagatggcccgtgagaagaacttggaaaagcaaaaagctgctggcaaaggaagccagcttgagtctaacaagaaggccatgtccatccagtgcaaggtgtgtatgcaaacattcatgtgtaccacaacggaagtgaaatgccgggagcacgctgaggcgaagcatccaaagtccgacgtgtacgcgtgctttcctcatcttaaaaaataaacatcgaaactccacagaaagaacggagatgtcaagacagcttgtaatgcatatcatctatctatgttgtatcttggtactctataatttatcttaaattctctttcacaagcctgtaaa

SEQ ID NO: 221450 - DNA, 377 bp, Gossypium hirsutum
accatcttcctttctcaatggcattggcttcccaagcctgcctgttcactccggcaagcctccgtaccccaaaatccggccaccgcatcgccgccgggttacggaaacaaccaccattcctaacactccctagcttcaagtccccaaaaatgatcatcgccccacgcaccatcaatgccgaagcaaccgaagagaaagccgagacaaccgccacaaaggaagcaccagtcggtttcaccccaccagagctggacccaaacaccccatcaccgatcttcggcggcagcaccggcgggcttttacgcaaagcacaagtggaagagttttacgtcatcacatgggagtcacccaaggaacaaatcttcgagatgccaaca

SEQ ID NO: 221451 - DNA, 348 bp, Gossypium hirsutum
cccacgcgtacgtccacgctttcttccacgctttcggtgaacggcactgggaggtggatttgtccatcctaagagactgcagaagcccattcgacagcgcgtacagcgcgagcttcgaaagggaatcgcgttaaaattcctgtaccgagacgcgtcggttgacgagtacgttagggtgtccgaatacgtgggctgcggcctctgcatgagttatcttttctgtttaacgagctgcccaccttgtaaacggataagcccgaggttggttccaccggcctgaatagcaccgtacgtcgtgtggagtacagaagcgcccccgacagtccttgtaaatccaatgggccgagt

SEQ ID NO: 221452 - DNA, 386 bp, Gossypium hirsutum
cccacgcgtccgggggtcttatgtatctctcagcacatttgggaacttggagaggacaacagaatggctggaggttgttttcaacatcattgttcttactagtggacttcttctagtcacaatgttgattggtaacatcaaggtgtttttgcatgcaacaacgtccaagaaacaagcaatgcaattgaagatgaggaacatagagtggtggatgaggaagaggcgcctgccttctgggttcaagcaaagggtccgcaactacgagcggcaacggtgggcggccatgcgtggtgtcgatgaatgccagatgatcagaaacctccccgaggggctccggagagatatcaagtaccatctttgcctggatttagttagacaggtaccat

SEQ ID NO: 221453 - DNA, 385 bp, Gossypium hirsutum
ggagactagtgtcacgtgctacgctcgtgggattgttcttcctggtgtctctgctaagcactcctcggcattagtctcccctccatccacatctccttccttcagctctaagagccttaaaacaagttcactatttggagaatcattaagggttgttccaaggtcatcattgaaggtttcaaaggcaaagcacactacttcactagtgacaaaatgtgaaattggagagtctttggaagagtttctcacaaaggcaacaacagataaggcattgattagattaatgatgtgtatgggtgaagcattaagaacaattgcttttaaagttagaacagcttcatgtggtggtactgcttgtgttaattcctttggtgatgaacaactt

SEQ ID NO: 221454 - DNA, 381 bp, Gossypium hirsutum
cggacgcgtgggtcaccctaggggtggatcatgttcctctgttatctgggcggactgcccttcagtgttatgaagatttcatgcttagttttgttaacaaatttgaatcctttattggaactgtaattgaagaaataagcatcggtcttggtccttctggagaacttaagtatcctgctcatccttttggtgatggtagatggaaattccctggcatcggtgaattccagtgctatgataagttcatgatggaggacttaaagatggctgcatgccgagaaggaaaacctcaatggggggacaaagggccacagaatgcttgctgttacaacagtcttccatctggggtgcccttctttgaagagggaaaggagagctttc

SEQ ID NO: 221455 - DNA, 273 bp, Gossypium hirsutum
gtagggtggctattgtcccaaaggttgggtttttcggtcaaggccttcgtgaccggaaagggaccttgggaaacctggcctgaccaccttgctgccccattaaacaacattgcttggccctatgccacaatctttgccccgggaaagtgatcttagagagtaaaaggggtttcgcctcgaaattgttttatttgggggggagaatgaaattttgcggcacaattaaagaaagcatattgaatttttgtggtcctcaaaaaaaaataatgaata

SEQ ID NO: 221456 - DNA, 416 bp, Gossypium hirsutum
cccacgcgttcgcccacgcgtccgcccacgcgtccgataccctcaaaattccactaaaaaatggcctccacagcttccctctccaccgccgtagccaccacctctttcctccgcggccatccggcgccgaaaaccctaaactcccttcctttcaaccaatctcttttcgggctaaaaccccaacgaaatggccgtctcaccatggcagcatacaaggtgacactgttaacacccgaaggaccccaagaattcgtgtgccccgacgacgtatacatcgttgaccaagctgaggaagaaggcattgatcttccgttctcgtgtagggctgggtcttgttcttcgtgtgccggagtgattaagcaaggctccgtcgatcaatccgacggtaatttccttgatgatgaccagattgctgc

SEQ ID NO: 221457 - DNA, 405 bp, Gossypium hirsutum
actcccaatactttcataacatttcacgaacttcactctccagtctccaatggcggctgccgtctccaccatcggtgctgtcaaccgagcaccgttgagtttgaatggatcaggtgccggagcttctgctccaagctcagctttcatggggaacagcttgaagaaagtgagcgctaggttcaacaacaacggcaaggctccagtgggaagtttcatgattgtggctgccaaagaaatcgacgaagacacacagaccgaccaggaccgatggaagggtcttgcttatgatatctccgatgaccaacaagacattaccagagggaaaggtatggtcgactcattgttccaagctcccatgaacgatggtactcactatgctgtcatgaagctctatgagtacattag

SEQ ID NO: 221458 - DNA, 106 bp, Gossypium hirsutum
ccgtcacgctttcgggtcattggaacaacgtaggcaagttaagtcggcaaaaaggatccgtaacctggggaaaaggtttggctttaagggccgtgcccgggggtcc

SEQ ID NO: 221459 - DNA, 419 bp, Gossypium hirsutum
cggacgcgtgggcggacgcgtgggctagtacccactactagcaatggcttcctcaatgatctcatcggctaccattgccactgcctctccggcacaggctaacatggtcgctcctttcaccggcctcaagtctgcctctgctttcccagtcatcaggaaggccaacaacgacattacttctctcgcaagcaatggcggcagagtgcaatgcatgcaggtgcggcctcctactggaaagaagaagttcgagactctctcatacctccccgatcttacacccgtgcagttggctaaggaagtagattaccttcttcgctcaaaatgggttccttgcttggaattcgaattagaagagggattcgtgcaccgtaaatactcgagcctacccacgtactacgatggacgctactggaccatgt

SEQ ID NO: 221460 - DNA, 422 bp, Gossypium hirsutum
gacgggaagtctttcgctgagaaagagtctctctacttcatggaaacttccgctctcgaagctacaaatgtagagaacgcatttgccgaagttcttactcaaatctaccatatcgtaagcaaaaaagccatggagacagctgacgaagggactgcatcaaccgttccttccaaaggcgagaaaatcgatgttggtaaagacatctccgcaatgaagaaagggggttgttgctcaagctaagaaaatgacataaacccgaacatccaattgtttaacgacgcagctgggggttgttctgctgtgtcggttttgtagaatcttctcgaaaaggcgcctaacagtaggaatttcgggtgagatcgggtcggtttacatccaaattttttttccagggaattatattgttgaatttagataggtga

SEQ ID NO: 221461 - DNA, 416 bp, Gossypium hirsutum
cccacgcgtccgaaaatcagttgcttcacaatggcctctacaaccatggctctttcttccccatcattcgccggtaaggcagtgaagttctccccttccacccctgaaatccggggaactggccgtgtttccatgaggaaaaccaccaagcctgttccttctggtagcccatggtacggtcctgaccgagttttgtacttgggtccactttccggtgagccaccatcttacttgaccggtgagttccctggtgactatggttgggacactgctggactctcagctgatcccgagacctttgctaggaaccgtgagctcgaagtcattcactgcagatgggccatgttgggagctcttgggtgcgctttccctgagctgttggctaggaacggtgtcaagttcggtgaagctgtatg

SEQ ID NO: 221462 - DNA, 426 bp, Gossypium hirsutum
gaaaaacaaaaatggccatggcaatggcgcttcgacgactctcctcttccattgacaagcctctccgtcctttcttcaatgccccttccctctattacatgtcgtctttgccaaatgaagctgtgtacgagaaggagaaacctggcgtcacttggccaaagcaactgaatgctccacttgaaaccgttgatcctgaaattgctgacatcatcgaacttgaaaaagcgcgccaatggaagggacttgaactcattccatcggagaacttcacgtcggtgtcagtgatgcaagcagttgggtctatcatgaccaacaagtacagtgaagggtatcccggtgctagatactatggagggaatgagtacatcgacatggcagagatattgtgtcagaagcgtgctctggaagcattcaggttagatcctg

SEQ ID NO: 221463 - DNA, 419 bp, Gossypium hirsutum
cccacgcgtccggaaaaacttaatcatggctcggttgacgttcgtgacctccatcatccttctgctatgctccgttgccgctggatcaactttcgacgactccaaccccatccagatggtatccgatggcctcaccggcttcgaatcctccgttcttcgtgtcatcggtcacactcgccatgctctctccttcgcccgttttgcatacaagcatgggaagaggtatgaaaacgtggaggagatgaagctacggtttcagattttcgaagacaacttggatttaatcagatccactaagaagaagggactgccttatactcttgctgtcaatcagtttactgattggagctgggaagagttccagaaacacagattgggggctgctcaaaactgctctgctaccacaaagggcaatcacc

SEQ ID NO: 221464 - DNA, 442 bp, Gossypium hirsutum
agataaaaacactttggcggtggagatagcaacaacagagtggctgtgggtaggtctggtttcactggctcctttgttcaagctgtgcttgccgatgccagaagcatcaaggttggcccacctcccccttcctctggtggactgcctggaactctgaactctgatgagccaagagaccttgttctgccatacaaagacaggttcttcctccaaccacttactccagctcaggcagcacagagagcaaaggaatcagccaaggatattctgggtgtcaagaacttgattgacaaaaaagcctggccttatgtcatgaatgatctccgtctcaaggccgagtatctccgctatgacctcaacaccgtcattgctgccaagcccaaagatgagaagaaaactctcaaggacctcaccaaaaagctcttcagtaccatcgatgatc

SEQ ID NO: 221465 - DNA, 378 bp, Gossypium hirsutum
  unsure (1)..(378): unsure at all n locations
ttcatacgttactagattatttcgtttctatgttatcaccacgggtacanacatgtgtcgttcctaaaatacctttgatgcccggttctgagccaccaatgctggtgctccagttgggaatcagtatctaatcacttaccgggggcgcaggaggtgcaatcatccttagagactatcattacgtggacaagctccctaatatgagtagtgtacgcttacctaaacgtgtcgttcatgctaaacgagccagcgcgaaagggttctcagaggccactaatgatctatccgacctgacatgtgctgttctcctccgtgccccttgagtacagacccggctcattggtagatcgtccacggttattcttatacgcggttgtc

SEQ ID NO: 221466 - DNA, 346 bp, Gossypium hirsutum
aaagggttggcttacgatatttcggacgaccatcaagacattactcgagggaaagggatggtggattccctggtccaaagtcccattgattattggacctaactttgctgccatgagtccctatgattccatcagccaaggtcttaaaccgtccattttgaccaccaccttggttggtttttacttcgttcctgctttcatgaccaagcttgttgtcaacttaagcaggaacttaatgtccttccttaacattaaggttcctttattcctgggtttttggggaggcaaaggccaaggaaattctttccattgtaagcttgtgtttgccaagatggttttcaccccc

SEQ ID NO: 221467 - DNA, 417 bp, Gossypium hirsutum
actaggggcactggcattacagtctgtggtgaacaccaaaattgagcaaacattttctcttggtgggtgcaccctcactattgttgtgccaagtgcaaatgggccacttgtgatcggactcgagacgagccaggccctatggctggagattatttgcacctttgtatttctttttgcttccatatggattgcttttgataaacgtcaagccaagcacttgggtcgagtggtggtttgctctatcattggtgttgaggtgggccttatcgtatttatctcaactactgtaacttccaccaagggatatgcaggggttgggatgaaccctgcaagatgtttgggtccggctttaattagaggcggccacctttggaacggacactgggttttttgggctggacctgtcgttgcttgtgt

SEQ ID NO: 221468 - DNA, 387 bp, Gossypium hirsutum
gttaccgtattgccggtggaccactcggtgaagtgactgacccattgtacccaggtggtagctttgacccattgggtcttgctgatgacccagaggcattcgctgagctcaaggtgaaagagatcaagaacggtaggttggctatgttctcaatgttcgggttcttcgttcaggccatcgtgaccggaaagggaccattggagaacttggctgaccaccttgctgacccagtcaacaacaatgcttgggcctatgccaccaactttgtccccggaaagtgaacttagagagtgaaaagggatttgtcttgttcatgtttttatttgttggtgtgaatgtaaatttgttgcacaatcaatgaaagcagaatgtgaattttgtgtgctc

SEQ ID NO: 221469 - DNA, 373 bp, Gossypium hirsutum
cccacgcgtccgcaccaacaaaatcagttgcttcacaatggcctctacaaccatggctctttcttccccatcattcgccggtaaggcagtgaagttctcccctttcacccctgaaatccggggaactggccgtgtttccatgaggaaaaccaccaagcctgttccttctggtacccaatggtccggtcctgaccgagtttggacctggggtccactttccggtgagccacctttttactggaccggggagttccctggtgactttggtggggacactgctggactctaagttgttcccgaaaccttggctaggaaccggaagctcgaagccttcaactgcaaatgggccatgtgggaagctctggggggggtt

SEQ ID NO: 221470 - DNA, 427 bp, Gossypium hirsutum
ctcttttgtataactgtagcatatagtactagtaagcagtaatagcaatggcctcctccatgatctcatcggcaaccattgccaccgtgaactgctcctccccggcacaggccaacatggtggcccccttcaccggcctcaagtctgcctctgctttcccagtcactaggaaggccaacaacgacatcacttctcttgcaagcaatggtgggagagtgcaatgcatgcaggtgtggcctcctcttgggaagaagaagttcgagacactctcatacctccccgatcttacacccgtacagttggctaaggaagtagattaccttcttcgctctaaatggattccttgcttggaattcgaattagaggagggattcgtgcaccgtaagtactcgagcttacccacgtactacgatggacgctactggac

SEQ ID NO: 221471 - DNA, 420 bp, Gossypium hirsutum
aatggcggtctcacttcaagctgcagctaccctgatgcaaccaatcaaggttgctgcaccatcaaggaccaatgtgccgctcaggtcctcccagagcgtttctaaggccttcggtttggagcctgttggtgctaggcttacctgctctttgcaaactgacctcaagaacttggctctgaagtgtgttgatgctaccaagctcgctggtttcgctcttgctacatctgctcttgttgtctcgggagcaagcgctgaaggagtttcaaagcggctaacctacgctgaaatccaaagcaagacattcgatgatgtcaaaggaacaggaactgctaaccagtgcccaaccatcgatggtggtgtcggctcttttggctgtaagcctcgcaaatactacgcccagaagttctgcttggagcccac

SEQ ID NO: 221472 - DNA, 422 bp, Gossypium hirsutum
ggaaaggcagttccctaaccaacaaaatctgaatgatcctgacctttatcactatgcagtattgtcagacaatgttctggctgcttctgtcgttgttaactccacaatttcctctgcttaggagcccgagaaaattggttttcatgtggtgaccgattctctcaatctcccagcaatttcaatgtggcgtttatataaatcctcctggcaaagctacaattcatgtgtcagagcgtataaaattttgattggggatccactcaggataattcgacacttgaatgaacagaaatcctatgatccaagatattcttttgcccttaaccatacttggttctatctgcctgacatatttccagcactgaataagattgtgctcttcgatcatgatgtgggggtgcacagagagttaactgtgattt

SEQ ID NO: 221473 - DNA, 424 bp, Gossypium hirsutum
ccagctttcatggacaagcttgttgttcacatcaccaagaacttcatgacccttcctaacattaaggttcctcttatcttgggtgtttggggaggcaaaggtcaaggaaaatctttccaatgtgagcttgtctttgccaagatgggaatcaaccccattatgatgagtgccggagaattggaaagtgggaacgccggagaaccagccaagttgatcaggcaaaggtaccgtgaggccgccgacattatcaagaaagggaaaatgtgttgcctcttcatcaacgatctcgacgctggagccggtcgtatgggaggaaccacacaatacacagtgaacaaccaaatggtgaacgccacactcatgaacatcgctgataaccccaccaacgttcagctccccggtatgtacaacaaggaagagaacc

SEQ ID NO: 221474 - DNA, 425 bp, Gossypium hirsutum
catgggtgttgtaatcattgacggatcgacggtgagagcctttgtgactgacgaccagcagttcacgaagagcgtggatgagcgtttcgcagctcttgacctcaacaacgacggtgtcctctccaggtccgagcttcgcaaggccttcgagtctctgcgtctcctcgagtcccacttcggtgtcgacgtcgccactccccccgacgagctcactcagctttacaactccattttcgagaggttcgattgcgatggcagcggcaccgttgacctccaggagttcagatctgagatgaagaagattctgcttgctattgctgatggattgggatcttgccctatccagatggttcttgaggatgatgaccaaagttttctgaagaaagctgctgatcttgaggctgctaagctcgatccaaaccatg

SEQ ID NO: 221475 - DNA, 414 bp, Gossypium hirsutum
gtttgtctcagatttttgaagatggcccgtaccaagcagacagcccgtaagtcgactggtgggaaggctccaaggaagcaacttgctaccaaggctgcccgtaaatctgccccaaccaccggtggtgtgaagaagcctcatcgctaccgtcctggaactgttgctcttcgtgaaattcgaaagtaccaaaagagtactgagcttcttatcaggaaattgcctttccagaggcttgttcgtgaaattgcccaggacttcaagactgatttgcgtttccagagccatgctgttctagctctccaggaagctgcagaggcataccttgtgggtctttttgaagacaccaacctttgtgcgatccacgccaagcgtgtcacaattatgcccaaagacatccagttggctcgtaggatc

SEQ ID NO: 221476 - DNA, 332 bp, Gossypium hirsutum
accacgcgtccgcccacgcgtgcgggagatccaaaagttcttacgggttatatgggaaaaaataagggctttttgccatcaaacccttctgagatttctattcagcgaaatcaaatgaaggaaattatctactctctacttcctgcttgcaaagaacctgatcctgattctggtattccttttaaggcagatgcaatcattgcaaatcctccagcatacgggcatacccatgtggcagaagcactaaaagtaccagttcatatattcttcactatgccatggacgccaacaagtgaatttccgcatcctttggcccgtgtgaagcaacctgc

SEQ ID NO: 221477 - DNA, 422 bp, Gossypium hirsutum
  unsure (1)..(422): unsure at all n locations
cccacgcgtccgcccacgcgtccgcccacgcgtccggttggctcgtaagctttcttcgtgctctccaagcaagtttgagaaattttattttttagcaatcaacagtgatggcttcatctctagctctcaagaggctcctctcatgcaacatcctccctagctccttgcgggtggtccgcccaatggccatcgctccatcctcctccaggctctttaacaccaatgccatgcgtgagttcgacgacgatggtgatgggcgtgacctcagtgatgaacgccagcgttcactttctcgccgcggtgacggtttcttcacagaggtgttcgatccttttgctccaacaaggagcctgagccaagtcctgaacatgatggatcagttcatggagagcccatntctctccgcttcccgtggcatgggg

SEQ ID NO: 221478 - DNA, 428 bp, Gossypium hirsutum
caaaaatataatccgccatggatgttctcaaagcttctcctaccattgttcattcaccatacattccaacaacaacaagaaacaaaacccagtttgctaaacccatctttcacaatttgaacttacaattaccatgttatacaagaaatggatcgaaatccaggttgtttacgaccttatcatcgtccccaatatcaacaacggagtctattgagccacctatgccggaagttgaggctgaggtcggtaaagagagattcgattggtactcacagtggtatccagtgatgcctgtatgtgatttggataagagggtgccacatggtaagaaagtattgggacttgatctagtggtgtggtgggataagaacgagaatgaatggaaagtgttcgatgatacttgtcctcatagattagctcctttatct

SEQ ID NO: 221479 - DNA, 405 bp, Gossypium hirsutum
atcagttgcttcacaatggcctctacaaccatggctctttcttccccatcattcgccggtaaggcagtgaagttctccccttccacccctgaaatccggggaactggccgtgtttccatgaggaaaaccaccaagcctgttccttctggtagcccatggtacggtcctgaccgagttttgtacttgggtccactttccggtgagccaccatcttacttgaccggtgagttccctggtgactatggttgggacactgctggactctcagctgatcccgagacctttgctaggaaccgtgagctcgaagtcattcactgcagatgggccatgttgggagctcttgggtgtgttttccctgagctgttggctaggaacggtgtcaagttcggtgaagctgtatggttc

SEQ ID NO: 221480 - DNA, 421 bp, Gossypium hirsutum
tatagattcttctagttccgaccaaaaaaagaattgctcatctttccttcagagaatatttgttttgagtgaaaaaaaaaatgttgggagtattcagcggagcgatagtgtccccgccggacgagctggtggctgccggttgcaggacgccgtcgcctaagataacggcggacgctcttgtgaaacggttcatcgaggcaaacccctccaccgtgtctatgcagatcggagatcatgtccaattcccttattctcaccgtaacgagtctgctttacttcccaggtcattcgcggtgaaagatgaaatattctgcatgtttgagggggcacttgataacttagggagtttaaagcagcaatatggacttggtaagtcagcaacagaggtggtataggtgatagaagcttacaaggctcttcg

SEQ ID NO: 221481 - DNA, 424 bp, Gossypium hirsutum
atcttccttccttttcattccttttgctatggcaggaactggggtggtcgctgtttatgggaacggcgcaatagctgaaacccacaaatcccctttctccgtcaaggttggcctagcccaaatgctccgtggcggggtgattatggatgtcgtcacccctgaccaagctcgcatcgctgaagaagctggagcctgcgccgtcatggctcttgaacgagtccccgccgacatccgagcccaaggtggcgtggcgcggatgagtgacccacaactcatcaaagaaattaagcaagctgtcaccattcccgtcatggccaaggctcgtattggccatttcgttgaggcccagatccttgaagccattggcatcgactatgttgacgagagcgaagtccttaccctcgccgacgaagaaaaccacatt

SEQ ID NO: 221482 - DNA, 421 bp, Gossypium hirsutum
cccacgcgtccggagaaagcactgaaaacgcataaccatggcctctgcttctctcctcaagacttcaccagttttagacaagtctgagtgggttaagggtcacacccttcgccaaccttccacttctgcggtgaggtgccaccctgttgcaccctctggactaactgtgcgtgcaagctcatatgccgatgagcttgtcaagactgctaaagctattgcttctcctggccgtggaattttggccatggatgagtccaacgctacctgtgggaaacgtttggcctcaatcgggctagaaaacacagaggctaaccgccaagcctacaggacgttgcttgtttcagctcctggccttggtcagtacatctctggtgccatcctctttgaggaaaccctctatcaaaccacaattgatggcaag

SEQ ID NO: 221483 - DNA, 420 bp, Gossypium hirsutum
cccacgcgtccggccatggattccctcacttgcacggcctctgacctcgtccccctcctctcctcctccgccaatgcaaccgccctcgcctccttcctttgcgcccgtttctccaccatctccagccaactctctgacgccactcacgccgttgacaacacttacctcctcttctccgcttacctagtcttcgccatgcaactcggctttgccatgctttgtgctggctctgtcagagctaagaacaccatgaacatcatgttgactaacgtccttgacgctgcagccggtgctctttcttattacctctttggttttgcctttgcctttggtgccccttctaatggtttcattggacgtcatttctttggtcttaaagcatacccttcaccccgaggagattatagttttttctttatc

SEQ ID NO: 221484 - DNA, 419 bp, Gossypium hirsutum
cccacgcgtccgcccacgcgtccgatttccgtttctcgagtttccttttcgatcttcaaactcgtagttgggcttatagaaatcctgtgggaaaataatgtctgatcacgaagacaagcacgaggaatcgttgttggagaagatatcagagaaggtcaaaggccatgatttatcttcctcctcctcggattccgatgatgacaagccatcagaatcctccatgaaggccaaagtcttccgtctgtttggaagagaaaggcccgtccacgacgttttcggtggaggcaaacaggctgatattttcctgtggaggaacaaaaagatttcggcaggagcactaggtgttgcaactgtgatttgggttttgtttgaattgctcgagtaccatcttctcacactagtctgtcacttagtgatac

SEQ ID NO: 221485 - DNA, 427 bp, Gossypium hirsutum
gaaaaaggaagagatcaacagtgctggtggtggtggggtgaggccaaagcttgtgcttcaaccacgtacggttcccgtgatggaggagtgtaaaaaggactcgacggtggccaagcccaaaggggcaaatcctttcggccaggcaaggccgagagaggaggtgttgaaggaaaaggggaaagactggaaggagatcgatgaaaagcttgaagctatgaagattaaagaggcagtagctgttacagagaaagagagaggggcaaaggcaagcttcggtaatggccatatcccggctgacaagagctggaggaagagtgaacctgttgaagctacagctgatgctgatcatcaaccccaaagtgctgaggaatcggagaatggccatgttgcagagaattgaagatagacactgacaaatgcgaagcat

SEQ ID NO: 221486 - DNA, 422 bp, Gossypium hirsutum
cggacgcgtgggctaccattatggcttcggctactgtttctgtagccaaacccaaccttcagattcaggcaaaaggaaagggtgttggttttgcagatttctcaggcctacacaactcctctactagccttccctttgccaggaaaacctctgatgacttccattcactcgttgcttttcagacatctgctctaggaagcaataatggcgggtacaggaaagggatggcagaggcaaagctaaaggtggctataaatgggtttggtaggattggcaggaacttcttaaggtgctggcatggccgtaaagactccccacttgatgtcattgccatcaatgacactggtggtgttaagcaggcttctcaccttctcaaatatgattccacccttggcatcttcgctgccgatgtcaagcctgtc

SEQ ID NO: 221487 - DNA, 423 bp, Gossypium hirsutum
gaattttcagtcgtcttctcttttagtcctctcgatcccaaagcaagctctcgattccgaatctctcccagaagatgcagatctttgtgaaaacccttactggtaaaaccatcacccttgaggtggaaagctccgatactattgataatgtcaaggccaaaatccaagacaaagaaggcattcctccagaccaacagaggcttatttttgccggaaaacaactcgaggatggccgaactcttgccgactacaacatccaaaaggagtccaccctccacctagtccttcgtctaaggggtggcatgcagatatttgtgaaaacccttacgggcaagaccatcaccctcgaggtggaaagttctgatacgattgataatgtcaaggccaagatccaagacaaggaagggatccctccagaccaac

SEQ ID NO: 221488 - DNA, 387 bp, Gossypium hirsutum
ctctcttcaaattctaacctcgaaagctttcgagattctcattttgctaagcgtattttagatcgggagtttagaggttattcattaatggcggatacagagacatttgctttccaagctgagatcaatcagcttcttagcttgatcatcaacactttctacagcaacaaagagatctttcttcgtgagctcatcagcaacgcatccgatgctttggataagatcagatttgagagcttaacagacaagagcaagctcgatgctcaacctgagctcttcatccacattattccagacaagactaacaacacactgtccatcattgacagtggtgttggcatgactaaggctgatttggtgaataatcttggtacaatcgcaagatct

SEQ ID NO: 221489 - DNA, 420 bp, Gossypium hirsutum
gaaagacgttagtagcggaaaattttgaacgttactattaaggaaggataatgctatccttgcgcttcgctattcctaccgcgaatacattaactccgcccaagattaaaccaaaaccgggtttagtagtacaaaccgcttggaaccaaacggacctttttccttctcttcccaaacgaaatgattataagctacaagcagctaccacggacttatctgtggcgggagatataccggcggaggaggtggtggagcttccggcggagctgagcagagagttgatgccgaagcacgtagcggtgataatggacgggaacgggcggtgggctcggcagcggggattggcgacatcagcgggacacgaagccggtgtaaaggcgttgagggagctggtcgaactatgttgccagtgggggatcc

SEQ ID NO: 221490 - DNA, 424 bp, Gossypium hirsutum
aacatggtcgctcctttcaccggcctcaagtctgcctctgctttcccagtcatcaggaaggccaacaacgacattacttctctcgcaagcaatggcggcagagtgcaatgcatgcaggtgtggcctcctactggaaagaagaagttcgagactctctcatacctccccgatcttacacccgtgcagttggctaaggaagtagattaccttcttcgctcaaaatgggttccttgcttggaattcgaattagaggagggattcgtgcaccgtaaatactcgagcctacccacgtactacgatggacgctactggaccatgtggaagctgcctatgttcgggtgcaccgactcggctcaagtattgaaggagcttgaggaatgcaagaaggaataccccaatgcattcattagaatcattggcttcg

SEQ ID NO: 221491 - DNA, 408 bp, Gossypium hirsutum
cccacgcgtccgctttgccaagatgggaatcatccccattatgatgagtgccggagaattggaaagtgggaacgccggagaaccagccaagttgatcaggcaaaggtaccgtgaggccgccgacattatcaagaaagggaaaatgtgttgcctctttatcaacgatctcgacgctggagccggtcgtatgggaggtaccacacaatacacagtgtacaaccaaatggtgaacgccacactcatgaacatcgctgataaccccaccaacgttcagctccccggtatgtacaacatggaagagaaccctcgtgtttcgatcattgtcaccggtaactatttcttgacgctgtacgcgccgttcattcttgactgtcgattggtaatttttattggtctctttctatttaa

SEQ ID NO: 221492 - DNA, 426 bp, Gossypium hirsutum
cggacgcgtgggctagtacccactactagcaatggcttcctcaatgatctcatcggctaccattgccactgcctctccggcacaggctaacatggtcacccctttcaccggcctcaagtctgcctctgctttcccagtcaccaggaaggccaacaacgacattacttctctcgcaagcaatggcggcagagtgcaatgcatgcaggtgtggcctcctactggaaagaagaagttcgagactctctcatacctccccgatcttacacccgtgcagttggctaaggaagtagattaccttcttcgctcaaaatgggttccttgcttggagttcgaattggaggagggattcgtgcaccgtaagtactcgagcttacccacgtactacgatcgacgctactggaccatgtggaagctgcccatgttcgg

SEQ ID NO: 221493 - DNA, 409 bp, Gossypium hirsutum
gctggaaccatcctcacaaacccctgattacctaatctcacccataacaccgccggcaccaccatcaccgccgccgccgcccacaaaacccaatcagtttctatccttgatatccaacagaccatcccttagagtgacttcagagttcgacagtgatagccgtgtgttctttcacaaagtgtcttttaagttgttcgatgaccttgctaagcttaaactatccttcgttaataacgttaaacgtgagatctcggagcctcttttggcgttaacttcgaagcatttgtctattcactatgatcctgaggaaaaaaatgctcttatcaagacatcttttgatgtgggtcctaaattgcagttcaaagctgctcatgatgttaaggcaaaacgaggcgaggttgcaatgatt

SEQ ID NO: 221494 - DNA, 421 bp, Gossypium hirsutum
gaaaaatggcttctgcttccgctactctcctcaagtcttcacctattatcgacaagtccgagtggattaagggccaaaacctccgccacccttcggtttgttttgtacggtcacaccctacatcggccgcctttgccgtccgtgctagttcatatgccgatgagcttgttaagaccgcgaaaactgttgcatctccaggtcgtggtattttggccatggatgaatcaaatgctacatgtgggaaacggcttgcctcgattggtctcgagaataccgaggcaaaccggcaagcttaccgtacccttctcgtgtctgcccctggcctcggtgactacatctcgggagctatccttttcgaggagactctctaccaatctaccatcgatgggaaaaagatggtcgatgttcttgttgagcaaaa

SEQ ID NO: 221495 - DNA, 416 bp, Gossypium hirsutum
cccacgcgtccgcccacgcgtccgaagagatatgattatagtgaaaaactaaacataataatgccccttcgacttgcttcattgatttgccctctcaaagcccaagaaaaatggcttctgcttccgctactctcctcaagtcttcacctattatcgacaagtccgagtggattaagggccaaaacctccgccacccttcggtttgttttgtacggtcacaccctacatcggccgcctttgccgtccgtgctagttcatatgccgatgagcttgttaagaccgcgaaaactgttgcatctccaggtcgtggtattttggccatggatgaatcaaatgctacatgtgggaaacggcttgcctcgattggtctcgagaataccgaggcaaaccggcaagcttaccgtacccttctcgtg

SEQ ID NO: 221496 - DNA, 424 bp, Gossypium hirsutum
cccacgcgtccgatgggtccgatccataatccgacggaatcgggccagggtctcgaaccccatgaaccaccgtttaggggatttgccccgcttgccttaccccaacttttactacgcgctagaagatcttttggagtcatacgcgccatcattgacctactctgtgtaccgctcgtcgatcataataggcgcgtcgtcgagaagcgtgtacaacgcgctacttacatcagcagtgtacgcattgatatgtcgatacgagggtttaccgtttcgatacccaggtagccggtacacatgggagcatttttgcgacatgtccgatgcacgcgtgctcgccaagcagcatatatgggccgcagtgactcccagtgccaagaaccaagcctttaattgcactaacggcgatatgttcacttagaaaagc

SEQ ID NO: 221497 - DNA, 427 bp, Gossypium hirsutum
gcgctttagctatagcatacactactagtacccactactagcaatggcttcctcaatgatctcatcggctaccattgccactgcctctccggcacaggctaacatggtcgctcctttcaccggtctcaagtctgcctctgctttcccagtcaccaggaaggccaacaacgacattacttctctcgcaagcaatggcggtagagtgcaatgcatgcaggtgtggcctcctactgggaagaagaagtttgagactctctcatacctccccgatcttacacccgtgcagttggctaaggaagtagattaccttcttcgctcaaaatgggttccttgcttggaattcgaattggaggagggattcgtgcaccgtaagtactcgagcttacccacgtactacgatggacgctactggaccatgtggaagctg

SEQ ID NO: 221498 - DNA, 424 bp, Gossypium hirsutum
atctgtccgtctctctgttttactccacaaccactatcactaccattatggcttcggctactgtttctgtagccaaacccaaccttcagattcaggcaaaagagaaagggtgttggttttgcagatttataatgcctacacaactcctttactagccttccctttgccaggaaaacctctgatgacttccattcactcgttgcttttcagacatctgctctaggaagcaataatggcgggtacaggaaagggatggcagaggcaaagctaaaggtggctataaatgggtttggtaggattggcaggaatttcttaagatgctggcatggccgcaaggactccccacttgatgtcattgccatcaatgacactggtggtgttaagcaggctcctcaccttctcaaatatgattccacccttggca

SEQ ID NO: 221499 - DNA, 397 bp, Gossypium hirsutum
cccacgcgttcgcagttcctcaatctctctaatcctcgctttcttccccatcaaacacaccttcgattttcccaaggttgtagaagatggcagaaggtgaggatattcagccacttgtttgtgacaatggaactggaatggttaaggctggatttgctggggatgatgctccccgagccgtattccctagcatcgtcggtcggccacgtcacaccggtgtgatggttggcatgggccagaaagatgcatatgttggtgatgaagctcaatcaaagagaggtattttgactttgaaataccctattgagcatggtattgtgagcaactgggatgatatggaaaagatttggcatcataccttttataacgagcttcgtgttgtcccggaagagcaccc

SEQ ID NO: 221500 - DNA, 416 bp, Gossypium hirsutum
cctttgtagagatccgggatccattgtcaccatgtcttgctcaaatctgacaatgtgggtgtcctcaaaaccctctctttctgacacttcttcactctctttccgttctttcatcagcccttttcagctcccgtctcagagctcaacccccggtaacccttccaggtcctcatctgtaaccccagttcactgtggtcttcgtgagcttagagaccgtattgattcagtaaagaacacgcagaagatcactgaagctatgaaacttgtggctgctgctaaagttaggagagcacaagaagctgttgtcaatggcagacctttctctgagtccctggttgaagttctttacaacatcaatgaacagctccagactgaagacatagatgctcctctcacatacgtcaggcctgtcaaaa

SEQ ID NO: 221501 - DNA, 348 bp, Gossypium hirsutum
cgagggccctttcgaggtatctaccgatggctccctcaaattcgaggagaaagatgggattgattatgctgccgtcacagttcagcttcctggtggtgagcgtgtgcctttcctgttcaccatcaagcaattggttgcatcaagcaaacctgatagctttggaggagacttccttgtaccatcctaccgtggctcatctttcttggacccaaagggaaggggtggctcaaccggctacgataatgcagtggccttgcctgctggaggaagaggggatgaggaagagctagccttggagatcaacaagagtgctgcatcttcatcagggaaaatcaccttgagcgtcac

SEQ ID NO: 221502 - DNA, 428 bp, Gossypium hirsutum
  unsure (1)..(428): unsure at all n locations
gtgcgtgcaagctcatatgccgatgagcttgtcaagactgctaaagctattgcttctcctggccgtggaattttggccatggatgagtccaacgctacctgtgggaaacgtttggcctcaatcgggctagaaaacacggaggctaaccgccaagcctacaggacgttgcttgtttcagctcctggccttggtcagtacatctcaggtgccatcctctttgaggaaaccctctatcaaaccacaattgatggcaagaagatggttgatgttcttgttgagcagaacatagtccctggtatcaaggttgacaagggtcttgttccactggctggttcaaacaacgagtcatggtgnnaaggtctagatggcctngctccacgttcagctgcatactaccaacaaggaagctcgtttgcataatggcgtac

SEQ ID NO: 221503 - DNA, 401 bp, Gossypium hirsutum
ctccatttctcttcgtttcggttcttcctcttttgaggattacgacaaaccacccaaactaaccccatctttcctaatcgggaaactcctctcctctttctggatttatctggaaaataaaaaacccaaatagtaaatccaaatctttctttgttttcctcccccccaatactcatggagatggaagcctcttcagctaatcaacgcctccattttgggaagatgggatatggatgccaacattataggaggagatgcaagattcgagctccatgttgcaacgaggttttctcgtgtcgccattgccataacgaagctgtgaacctgttaagtaacccttttgacaggcacgagcttgttcgaaaagatgttaaacaaagtatttgctcggtttgtgacac

SEQ ID NO: 221504 - DNA, 424 bp, Gossypium hirsutum
cccacgcgtccgcccacgcgtccgtttcgtttcaactcaaaccttcgtcttgtctccctttctacagagcaacgtgaagaaggggaaagaatggggaaaataacgtataagagactgaagggaagtcaaaacatgaggcaaaggctactcttagcaacattaaaatcaactccggttctcatagaagacatccacgccgacgacaccttacctggtctccgaccgcatgagatttccctccttcgtctctttgaaaagctcacggatgactgcctaattgaaatcaatgaaactggtacaaaattgaagtacaagcctgggattatagttggagggagtcatctggtgcatgattagggtggtagtagagcaattgggtattttttggaagccttgatcttgcttggtttatttgctaggaaaa

SEQ ID NO: 221505 - DNA, 422 bp, Gossypium hirsutum
cccacgcgtccggccttcacaacttacaactcagcctctcctctctctttctctcttcgcctccaaatggcttctgccaccacttccaccactctttccctcctcaaaaccaccgcctccaccacctcttcctccgcctcccgctcttctgcatccctcatccgccttccttccacgcgccgccacctcaagtcctctcctctcatccacagcctaagcttctcctccgctgcttctggggactctctgctttccctccatgtctcctccaaagttcgatctttcaagggaaaagggtcaagaggggttgtttcaatggccaagaagagtgttggggacttgactgccgctgatttgaaagggaagaaagtgtttgtgagggctgacttgaatgttccattggatgatagccagaacatcac

SEQ ID NO: 221506 - DNA, 428 bp, Gossypium hirsutum
gataaaaatggcgatggcgagtgttcgatctggtctcctacgagcagcccttcgcggcggctctcgtcctactgctcctcccacgcgtggcttcgcttcctcttctcatcacgatgatgcttatgaaaccgcaaaatgggaaaagataacatatttaggtgttgctacctgcactgttttagcgatttataacctatcaaaaggtcatccccaccatgaagagcctcctgcatacccatatttgcacattcgcaacaaggagttcccatggggtccggatggtctgtttgagagaaaggagcatcactagggatggccggatggatgcatatctttccgagttcggcgcatttttatcatttctctgagaaatcaatcagataattctggggatcttttagaattttagcactcgatttccggtttat

SEQ ID NO: 221507 - DNA, 376 bp, Gossypium hirsutum
cttccggtgttcctagttgaactcaaccggatcattttctttggggggaaccaaaggggaaaaggctggttgatttttatttccaagaccaataccaaccgcgaaaagcgtggcctatcaaccctttacacctccgaatttagaacttagaggtgtcaaaaaagtcaccacagggatacctgttttgtggcacccaagcttttatagccactttttttttagacccttagatgggggctttccctatctttgagaagcagttttccccatgtgttgttttgcccacccaccaataggaaacgtgtgctgggtttaccccgtcgagagacaggtttttttcccctactgatgcccgcgtcacaatatttttacaccc

SEQ ID NO: 221508 - DNA, 400 bp, Gossypium hirsutum
gccagcatgataatggctccctcaaagcctgtaatctccattgctgctttatcatccttgttttccaaacccaaactcaaacaaataccacaactttccctcccaaaactccccactccaaagttcttgaaaacccaacaaatgccctcactctcgtacaccactctcaaatctatctccctcttcacagtcaccactttatcctttgccccaccttctgttgctgcagaaatagaaaaggccgctcttttcgatttcaacttaaccctccccatcatgatggtccagttcttgttcctcatgtttgctcttgacaaggtctactttaccccactcgggaaattcatggattagagagattgctgccataaaggagaaacttgccagtgtgaaggacacg

SEQ ID NO: 221509 - DNA, 411 bp, Gossypium hirsutum
cacactctcaaattcagttaacaatttcacagttgttttcttcagtctctctctcagccatggctgcagccatctccaccgtcgctgccgctgccgccgccaaccgagctctgggagtgtcagtcccaacctcagctttcatggggaagaaagtgagctcaagattcaacagcaccaggcaggttccttcgggaagttttaaggtgatggcggcggagaaagagatagacgaagagacacagaccgaaaaggaccgatggaaagggttggcttacgatatttcggacgaccaacaggacattactcgagggaaagggatggtggattccttgttccaagctcccatgaatgatggaactcactatgctgtcatgagttcctatgaatacctcagccaaagtcttaaaacgt

SEQ ID NO: 221510 - DNA, 277 bp, Gossypium hirsutum
ccatgggagacgagtcatacgaggaagccattgaagctctcaagaaactgctcaatgagaaaggagaattgaagagtgcagcgacggcaaaggtagagcaagtgacagctgagttgaagactgctgcttcctccgatgagtctgttgaccgcttgaaacaaggcttcatttacttcaagactgaaaaatacgaaaagaatcctgctctgtatggtgagcttgccaagggtcaaagcccaacgtatatgatagtggcatgctcggactcaagggtgtg

SEQ ID NO: 221511 - DNA, 404 bp, Gossypium hirsutum
cccacgcgtccgcccacgcgtccggccaaaacctccgccacccttcggtttgttttgtacggtcacaccctacatcggccgcctttaccgtccgtgctagttcatatgccgatgagcttgttaagaccgcgaaaactgttgcatctccaggtcgtggtattttggccatggatgaatcaaatgctacatgtgggaagcggcttgcctcgattggtctcgagaataccgaggcaaaccggcaagcttaccgtacccttctcgtgtctgcccctggcctcggtaactacatctcgggagctatccttttcgaggagactctctaccaatctaccatcgatgggaaaaagatggtcgatgttcttgttgagcaaaatattgtccctggtatcaaagttgacaggggt

SEQ ID NO: 221512 - DNA, 401 bp, Gossypium hirsutum
gtgagactcttttgtataactgtagcatatagtactagtaagcagtaatagcaatggcctcctccatgatctcatcggcaaccattgccaccgtgaactgctcctccccggcacaggccaacatggtggcccccttcaccggcctcaagtctgcctctgctttcccagtcactaggaaggccaacaacgacatcacttctcttgcaagcaatggtgggagagtgcaatgcatgcaggtgtggcctcctcttgggaagaagaagttcgagacactctcatacctccccgatcttacacccgtacagttggctaaagaagtagattaccttcttcgctctaaatggattccttgcttggaattcgaattagaggagggattcgtgcaccgtaagtactcgagc

SEQ ID NO: 221513 - DNA, 399 bp, Gossypium hirsutum
cccacgcgtccgctggatatattcagcaagccttgcacaatggccaccatcacctctgccgctgtcgctatcccatctttcaccggccttaaagccggtgcaaccgcagctaaagttagcgccacagccaaggttgcagcctctccagtcccaaggggcagcatcaaggcctccctcaaagacgttggtgttgctgttggggcaactgctgcaagcgtaatccttgccagcaatgccatggccattgaagtcttgctcggcagtgacgatgggggtctggctttcattcccaaagaattcagcgtaagcccaggggagaagattgtgttcaagaacaatgccggattcccacacaatgttgtgttcgatgaggacgaaatcccaagcggcgtcgacgta

SEQ ID NO: 221514 - DNA, 372 bp, Gossypium hirsutum
ctctgttttactccacaaccactatcactaccattatggcttcggctactgtttctgtagccaaacccaaccttcagattcaggcaaaaggaaagggtgttggttttgcagatttctcaggcctacacaactcctctactagccttccctttgccaggaaaacctctgatgacttccattcactcgttgcttttcagacatctgctctaggaagcaataatggcgggtacaggaaagggatggcagaggcaaagctaaaggtggctataaatgggtttggtaggattggcaggaacttcttaaggtgctggcatggccgtaaagactccccacttgatgtcattgccatcaatgacactggtggtgttaagc

SEQ ID NO: 221515 - DNA, 392 bp, Gossypium hirsutum
cccacactctcaaattcagttaacaatttcacagttgttttcttcagtctctctctcagccatggctgcagccatctccaccgtcgctgccgctgccgccgccaaccgagctctgggagtgtcagtcccaacctcagctttcatggggaagaaagtgagctcaagattcaacagcaccaggcaggttccttcgggaagttttaaggtgatggcggcggagaaagagatagacgaagagacacagaccgaaaaggaccgatggaaagggttggcttacgatatttcggacgaccaacaggacattactcgagggaaagggatggtggatttccttgttccaagctcccatgaatgatggaactcactatgctgtcatgagttcctatgaatac

SEQ ID NO: 221516 - DNA, 406 bp, Gossypium hirsutum
  unsure (1)..(406): unsure at all n locations
ccctaacttctacattaggcaagaagctcctaatgtttgagagagatggcttcaaaaagatcggcatcggttgccctcttttttgcactcaacattctcttcttttcacttgtcagtgctaattgttcttgcccttcccccaagccaaaaccaaaccccactccctccccaactcctgctgcggaaggaaagtgccccataaatacccttaaactaggtgtatgtgctgaggtgcttggtttagtcaatgtaactgttgggtcacccncagttcaaccttgctgcacccttatcaaaggccttgctgatcttgaagctgctgtttgcctttgcacagcgatcaaaggcaacattttgggtatcaatcttaatatcccagtttccctcagcttgcttctaaatgtct

SEQ ID NO: 221517 - DNA, 389 bp, Gossypium hirsutum
ggtgccaatcaaaaccaagctcagcaacaagagaaaacagcaccagaagccatcaccgacggtcactgtccacaaaggccgtgaattctgctggttaactcaagaagatgtgattagattcctactcagctcaattggcctcttttcacctgtccctgctttctccatcgacactcttggcatcatcagctctgaaatcctcaccattgagtaccactcccctgcttctgcagccataggagccatttctcgaacccttgtggaccaaacttcagtggctgtggttgacagtgaaggctgtttgattggagaaatttctaccttcaccttggcctgcttcgacgagacggtggcagcagccgtcaagaccttgtcctccgggatctaat

SEQ ID NO: 221518 - DNA, 406 bp, Gossypium hirsutum
gtccattgattcccttcccttactgctccctccctcttccattaaaaaagaagatagaaagcagctaccaaaatggctactttgctagcggctacaggtcgtagagcaactactctatctcgatccccggctctgtctcaagccgcttctctcattcctcgccgtggtcttgccggcgctgcggatcaccatggacccccgaaggttaattgttggcaagacccaatgaacccatctaaatggaaagaagagcactttgttattgtctctttatccggttggggcctgcttttctttagcggatacaagttcttcactaaaggcaaaggcaagaaggaagagaacatggtggaaacgacacattaatgaggttggagtttccaaattttacaaatagtccatgaat

SEQ ID NO: 221519 - DNA, 340 bp, Gossypium hirsutum
aagagaaagcactgaaaaagcaaaaccatggcctctgcttctctcctcaagacttcaccagtttgagacaagtctgagtgggttaagggtcacacccttcgccaaccttccacttctgtggtgaggtgccaccctgttgcaccctccggactaactgtgcgtgcaagctcatatgccgatgagcttgtcaagactgctaaagctattgcttctcctggccgtggaattttggccatggatgagtccaacgctacctgtgggaaacgtttggcctcaatcgggctagagaacacggaggctaaccactaagcctacaggacgttgcttgtttcaacctcct

SEQ ID NO: 221520 - DNA, 407 bp, Gossypium hirsutum
gttttccaatagttcgtaacaatgtcggtctcacttcaagctgcagctaccctgatgcaaccaatcaaggttgctgcaccatcaaggaccaatgtgctgctcaggtcctcccagagcgtttctaaggccttcggtttggagcctgttggtgctaggctcacctgctctttgcaaactgacctcaaggacttggctcagacgtgtgttgatgctaccaagctcgctggtttcgctcttgctacatctgctcttgttgtctcgggagcaagcgctgaaggagttccaaagcggctaacctacgatgaaatccaaagcaagacatacatggaagtcaaaggaacaggaactgctaaccagtgcccaaccatcgatggtggtgtcgactcttttgccttcaagcctgcaaa

SEQ ID NO: 221521 - DNA, 410 bp, Gossypium hirsutum
ggattacccgctgagtttaagcatatcaataagcggtgcaaagaaatataccagaaaatcaaaaagaagaagaaaagagatccccatgatgtctcttacaatcccaactaatctctcaaaatcaattttgaagccaaagctggagacccaagtgatccccaaggcttcatccagatcattgattgtatgctcctccagcaatccttcctcctccgacaaatcggcttcatcactccaggccttctcagcggctctcgctctttcttccatccttctttcggctccactccctgctgttgcggacattgcggggctcactccttgcaaagagtccaagcaattcgccaagcgcgagaagcagcagatcaagaagctggaatcctcgttgaagctttacgcccccgatagcg

SEQ ID NO: 221522 - DNA, 409 bp, Gossypium hirsutum
aaacacccaggtacagaagcactaacattttctctttggcttaccaaccttggatctgaaatggcaaagtcacccgaagaagaacaccctgtcaagacctttggctgggctgcaagggacccatctggtcatctctctcctttcaccttctccagaagggtaactggtgaagaagatgtgaggtttaaggtgctgtattgtgggatttgtcattctgaccttcacagtatcaagagtgaatggggctcctccaactaccccatggttcctgggcatgaaatagtaggggaagtgacagaagtaggcagcaaagtggaaaaggttaaggtgggagataaagtgggcgtgggatgcatggtcggagcttgccacagctgcgacagttgtgcaaacgaccttgaaaattact

SEQ ID NO: 221523 - DNA, 393 bp, Gossypium hirsutum
cccacgcgtccgcccacgcgtccgatctccctattctcaatggcaatggcaacccaagcctccctcttcactccatcaaccctccgcaccccaaaatccggcgaccgcatcgccgccgtgttacggaaacaaccaccattcctaacactccctagcttcaagtccccaaaaatcatcatcgccccacgcaccatcaaagccgaagcaaccgaagagaaagccgagacaaccgccacaaaggaagcaccagtcggtttcaccccaccagagctggacccaaacaccccatcaccgatcttcggcgggagcaccggcgggcttttacgcaaagcacaagtggaagagttttacgtcatcacatgggaggtcacccaaggaacaaatcttcgagat

SEQ ID NO: 221524 - DNA, 410 bp, Gossypium hirsutum
  unsure (1)..(410): unsure at all n locations
cccacgcgtccgcccacgcgtccggaaaaaaagaatatggaaaccgtaactttgacaggattacttcacaaggctgcggccgagttccctaccaggcgagctttatcagtttccggcaagttcgatttgacgcatgctcaattacaacacatcatcgatcatgctgcttctctcctcatcgcctccggcatccatcccggcgatgtcgtcgctcttactttcccaaacaccgnggagcttgttattatgttcttggctgtaattcgttgccgtgcaaccgccgcgccgttaaactcagcttatactggccgaggagtttgagttttacctttctgattcagaatccaagctgttattaatcccagccgaaggcatcaagccggctgaagccgccgcttccaagttgaaca

SEQ ID NO: 221525 - DNA, 406 bp, Gossypium hirsutum
aaaccttttacttctcaactctctcaaattcaccatggctgacaagtgcggcaactgcgactgctctgacaagagccagtgtgtgaagaaaggaaacgccttggtcattgagactgagaaaagctacatcagcactgtagtggtcgaggctgtggcagagaacgatggcaagtgcaagtgtggaactagctgcagctgcacaaactgcacatgtggcaatcattaagcagacatatatagaactgcacgatgttttagtccataattaaattaagttgaataattggtggcgtgttgcatgtttgtctccgcctcattgtataccatgatagaatggccatgtctatggactttgtctgattaatgaatgattattagcacaaaaaaaaaaattttaaaataatat

SEQ ID NO: 221526 - DNA, 402 bp, Gossypium hirsutum
  unsure (1)..(402): unsure at all n locations
cttaaagctagcaagagcagtgctgcggcatttcttcctcagaagacccgtcaaacagaaatgaagttcaacattgcaaatccgactactggttgccaaaaaaagctggaaattgatgatgaccagaaacttcgagccttttttgacaagaggatctcacaggaagtcagtggtgatgccctcggtgaggagtttaagggctatgtattcaagatcatgggaggctgtgataaacagggttttccaatgaagcaaggagttctcactcctggacgtgttcgtcttttgcttcacagaagtactccctgcttccgtgggtatggtaggagaaatggagagcgcangaggaagtcagttcgtggatgcattggtagtcaggatcttttagttttgaacttggtt

SEQ ID NO: 221527 - DNA, 393 bp, Gossypium hirsutum
ggcttcattacctgcatccgcctgtgggactgggatacccttttccagggctggcttagggttgccagtgagagctgccccagatagcatatcggggaaggtggagaaaagcgtcaaggaagcacaggaggcgtgctcggatgaccactctagcggagagtgtgtagcggcatgggacgaggtggaagagctgagtgcaggatccagtcacgccagggacaagaagaaagacaacgatcctttggagaattattgcaaagacaaccccgagacagatgagtgccgcacttacgataattgaagtcttattatattatgacggccttttttgggtttggtgatgaaaaatttggagttggcctaaaactctgtttaagttgttaatgtcacact

SEQ ID NO: 221528 - DNA, 379 bp, Gossypium hirsutum
cccacgcgtccgcccacgcgtccgatatcaacccggtaccaagtccgcttaggaaaatcatcacggttgcatccattgccgccggcatccagtttgggtgggctctgcagctgtctctcctgacaccctatgtccagacccttggtgtaccccacgcttgggctgctttcatttggctttgcggtcccatttctggccttctggttcaacccattgtgggatacaacagtgaccgttgcacctctcggtttcggccgacgccgaccctttattgtcattggagctctttctgtctctatagctgtcttcctcatcggtttcgccaaagacattggccaccatgcgggagattccttggagagatcgactaaaccgagag

SEQ ID NO: 221529 - DNA, 410 bp, Gossypium hirsutum
  unsure (1)..(410): unsure at all n locations
ggcttctgccaccacttccaccactctttcccttctcaaaaccaccgcctccaccacctggtccggcgcctcccgctcttctgcatccctcatccgccttccttccacgcgccgccacctcaagtcctctcctctcatccacagcctaggcttctcctccgctgcttctggggactctctgctttccctccatgtctcctccaaagttcgatctttcaagggaaaagggtcaagaggggttgtttcaatggccaagaagagtgttggggacttgactgccgctgatttgaaagggaagaaagtgtttgtgagggctgacttgaatgttccattggatgatagccagaacatcactgatgacaccaggattcgtgctgctattcccaccatcaagcatntgattcagaatg

SEQ ID NO: 221530 - DNA, 393 bp, Gossypium hirsutum
acaagtcgttgtttcaacaggcaagttctatatgtttatgatccaaggctgacagactctgttctggaaccaattatatatcagggcagagtggcgtgtggttcaagaagagaacgcaatgagaggctgttaaactatgcatggacatgaggacggcacttaccagaactgaactagcatccctatctgaagaggctacatattgctggggctgtgaatggattggagactacaagagctacactgatggactctaggcagccccagagacatttgccaagaaccgtgagctcatagttattcactgtatgtggcatgtgtggggtgctctaggatgcgattctgctgcgcttttgactaggcatggcgatgaattcggtgaggctgcgagga

SEQ ID NO: 221531 - DNA, 397 bp, Gossypium hirsutum
cccacgcgtccgcccacgcgtccgcaccataactgaaaaagaaaaagaagagatgggagttttaggcaaagtggtggatgggattctattgctaacattcgtgtccatgtcggtggtgccagcgtgcttggactcccaggtacttttgcctaaagcccttttccccgatgtgctgggtcgtgtatatacatggtatacgacaacataccaagattatttgctgttggacgagcctcattttttcatggcacttatgaaattggaggcttgttttagtattgccgctcgctatacttaacacttatggcttgttgacctccaagccttggttcaacaccacctgccttatcttcggttctgctcttggtacctccacgacagctatggtgggagacat

SEQ ID NO: 221532 - DNA, 373 bp, Gossypium hirsutum
cccacgcgtccggcaaaacggatttttgttaaaaaatgagtcagtgtgttccgagttgggaactggatgacaacaatccactcaccactcgccatcactcgttccgcttcaactcaaattccactgcccctgatgttcccatgttagattatgaagtagctgaattaacatgggaaaatgggcaactagccatgcacagcttaggtccaccgcgtgtggtggctaaacaactaaacgccaccacttgggataaaccaagagccagtggcggtggcggtggcactttagagtctatagtgaaccaggctacttgttttccatatggtagtaaggattctgtcggtgttggtggggatgaattggtatgttggac

SEQ ID NO: 221533 - DNA, 375 bp, Gossypium hirsutum
gtttctctcatcatcctctcaaaaccgaaactcgggaatttcaactcatcttacactttgactagcggttcacttcactgagtcaactaaaagttatggcgttacctactcatcagttacagagattccttgcaatcgagttcaatttcatcgtccaatcccaaaatcgcttacaggaaccaactaaccgcaacaacggcagtaagatctagtccaagaagcccctgccgttgctccgcgattgcaataaacgctccttcttcgctaacggatgtttccgggatccgttgggggtcgacgagtgtgcagggcaggcgcgaagagatggaggatgatttagttatacgatcggacggtcttgatggattctcgttc

SEQ ID NO: 221534 - DNA, 381 bp, Gossypium hirsutum
cccacgcgtccgtactttctagtctttacgcttctttcttttgcatttatttttatatccatttgagacgaaaggtagtgtggagtagtcctcgtcttcaacccaagacttgacccatcttatatatatatagttctttatttgtttggatcaaaatccaatatactaatccttcaaatcatatattacaaaagatgggagtagaaggcaccttggaatacatctctgatttgcttagcagcgtgaagaagaagaagaagaagaagcaaattcaaactgtagctctcaaaatcaggatggattgtgaaggttgtgctcgtaaggtcaagaaggtcctctccggcgtaaagggggcaaagtctgtggacgtggacttaaaac

SEQ ID NO: 221535 - DNA, 399 bp, Gossypium hirsutum
tggagctcaaggcaaaaagaacccaccgcttcattgttttcaaaattgaggagaagcaaaagcaagttattgtggagaagcttggtgaaccaaccgaaagctatgaggattttactaaatgtctccccgctgatgaatgtcgatatgctgtgtacgattttgattttctaacggccgagaacgtaccgaagagcagaatctttttcatagcatggtctcccgacacgtcaaggatcaggagcaagatgatttacgccagctccaaagatagattcaagcgagaactggatggaattcaggtggaattgcaagcaacagatccaactgagatgggtctcgatgtgttcaaaagccgtgctaactgaatacggttcttttaggcatttgcaaccgggaagc

SEQ ID NO: 221536 - DNA, 412 bp, Gossypium hirsutum
atactcccaaaatgtctcttacaatccccactaacctctccaaatcccttttgaagccaaagataaactcccaactcacccccaaagtttcacgatcattggtggtatgctccaccgacaagacttcatcgccaccatcatcagcttcaccactccaagccttctcagcagctcttgctctttcttccattcttctctcagccccgcagcctgccgtagctgatattgcaggcctcacaccatgcaaagagtccaagcaattcgccaaacgtgagaagcagcagatcaagaagctggaatcgtcgttgaagctatacgcccctgacagcgctccagctctcgctatcaaagcaaccatcgagaaaaccgagagacggtttgacaactatgggaagtaccggctggtggtgtg

SEQ ID NO: 221537 - DNA, 410 bp, Gossypium hirsutum
cccacgcgtccgctaaatcctcacacaatcacttaatagaaacccaataacttacaaatccaccatgtccggtagcaaagactgtggcggccaccacaaatccccccggaaaaatttccggcgagtcatctcttgtattctaatcctcctccttctcgttctcatcacaatcttactcatatgggcaatccttcgtcctagcaaacccaacttcactctcctcgacaccaccgtctacgccttcaacgccaccaccttcaacttcctcacttcaaactttcaaatcaccgtccgttcagaaaacccaaacgatgatatcggtatttattacgaccggctcgacgtttacgctacttaccggaaccaagaaataacactccggactcgattcccaccaacgtaccaaggcc

SEQ ID NO: 221538 - DNA, 407 bp, Gossypium hirsutum
cggacgcgtgggcgggataccagctgcccgggtgacgaagaaagaagatctcaaagcagcaattcagaaaatgttggacactcctggaccttacttgttggatgtgattgtcccacatcaagaacatgtcctgcctatgatccccagtggaggcgctttcaaagatgtgatcacagagggtgatggaagaacacaatattgacctcaatgagcatcaaatggttttttttttggggtaatgtatgtaatgaatgagggtgggttatgggggcttagtttctgagttctggaacatagtttttctatgcttttaaaagcaaccaattaggttttcagtttggtcttatgcaagtcttgtatgtctttagtaatgttatgtaatgggcgaatctaaacttgtttttgtt

SEQ ID NO: 221539 - DNA, 405 bp, Gossypium hirsutum
gctggggttaatcctttggcaggttgcttccctactttagctactattccagtctggattggcctgtatcaagctctctcaaatgtggcaaatgaggggctgttgacagaaggtttcttttggatcccatctttgggtgggccaactacaattgctgctcggcaaagtgggtctggaatttcttggcttattccatttgtggatgaccatccaccattgggttggcatgacactgctgcataccttgttttacctgtgcttcttgttgtcagtcaatatgtttcaatggagctgatgaagccaccccagacggatgatccagcccaaaagaacacacttcttgttttcaagtttctttcgcttatgattggttacttttcattatccgttccgtcaggatttttt

SEQ ID NO: 221540 - DNA, 367 bp, Gossypium hirsutum
ggcgggattacccgctgagtttaagcatatcaataagcggaggaaaagaaacttaccaggattcccctagtaacggcgagcgaaccgggaaaagcccagcttgagaatcggtcgccatcggcgtccgaattgtagtctggagaagcgtcctcagcgacggaccgggcccaagtcccctggaaaggggcgccggagagggtgagagccccgtcgtgcccggaccctgtcgcaccaagaggcgctgtctacgagtcgggttgtttgggaatgcagccctaatcgggcggtaaattccgtccaaggctaaatacgggcgagagaccgatagcgaacaagtaccgggaggggaaagatgaaaaggactttg

SEQ ID NO: 221541 - DNA, 396 bp, Gossypium hirsutum
cccacgcgtccgctcaaattcagttaacaattttacagtggtttttttaagcttcttttttagccatggctgcagccatctccaccgtcgctgccgctgccggcgccaaccgagctctgggagtgtcagtcccaacctcagctttcatggggaagaaagtgagctcaagattcaacagcaccaggcaggttccttcgggaagttttaaggtgatggcggcggagaaagagatagacgaagagacacagaccgaaaaggaccgatggaaagggttggcttacgatatttcggacgaccaacaggacattactcgagggaaagggatgggggattccttgttcccagctcccatgaatgatggaactcactatgctgtcatgagttcctatgaatacc

SEQ ID NO: 221542 - DNA, 404 bp, Gossypium hirsutum
cccacgcgtccgatctccttcacttacaggagtatctattccaagaaagccatgacggatatggacagtacaaatgtctatgcttatatttccatcattgctctcttcgtctgtattcccccagccctcatttttgagggtcctcaattgttgaagcatggtttcaatgatgctattgctaaagtgggtatgactaagttcatctcagatcttttctgggtgggaatgttttaccatctctataatcagttggctaccaatactctggagcgggtggcaccactgacccatgcagtgggcaacgtgctgaaacgtgtatttgtcattggcttctcaatcattggctttggaaacaagatttcaactcagactggtataggaacagtcattgcaattgctggagg

SEQ ID NO: 221543 - DNA, 346 bp, Gossypium hirsutum
catagtccaacattttcataacaatggctgccatcacaaacgccgctgctacatcctccttcatggggacactcttccccgacgtctacacaagttcagggagattcgtcgccaggtttggctttggcggcaaaaaagcagctcccaagaaagtctcgaaacgaaccccagaccgccctctatggtacccaggagcagtggcgcctgattggctcgatggaagtttggtgggtgattacgggttcgacccgttcgggttagggaaaccggcggagtacttgcaatatgatttggattctttggaccagaacctggctaagaattcggctggtgaggataatggaac

SEQ ID NO: 221544 - DNA, 411 bp, Gossypium hirsutum
  unsure (1)..(411): unsure at all n locations
atatcttcctctccacccttgaaccatgtcggcttttgttggcaagtatgcagaggagttgatcaagaacgccaagtacatcgccacgccaggcaaaggtattttggcggcggacgagagcacaggcaccatcgggaagcgtctctcgagcatcaacgtcgagaacatcgagtccaatcgccaagccctccgcgagctccttttcacctctcccaacgcattatcctgcctctccggtgtcattcttttcgaggaaacactttaccagaaaacctctgacgggaaacccttcgttgaaatcctcgaagagaacaatgtcattccaggtatcaaggtcgatnagggcaccgttgagatagccggcaccaatggcgagaccactacttcagggttcgacttcctgggtgcgcg

SEQ ID NO: 221545 - DNA, 397 bp, Gossypium hirsutum
  unsure (1)..(397): unsure at all n locations
gtgcaatgcatgcaggtgtggcctcctactggaaagaagaagttcgagactctctcatacctccccgatcttacacccgtgcagttggctaaggaagtggattaccttcttcgctcaaaatgggttccttgcttggaattcgaattagaggagggattcgtgcaccgtaaatactcgagcctacccacgtactacgatggacgctactggaccatgtggaagctgcctatgttcgggtgcaccgactcggctcaggtattgaaggagcttgaggaatgcaagaaggaataccccaatgcattcattagaatcattggcttcgacaacgtgcgtcaagtgcagtgcattagtttcattgcctacaagcctncaggcttctaaagcttttataaacttt

SEQ ID NO: 221546 - DNA, 420 bp, Gossypium hirsutum
attcctctctcggtatatgttcaatcaaattccaacccaaagtactgctcaactttcttaatttccaacaagttttcttttaatttccctgtttttgcatcaattaaatatctcattactccagtacagactacagaggttttagccatggcgtcccttaacccaagtgggtatgaaaagttttcaggttcaccaccgaagcagggcaaagaagcagccacaactgggattccacttagctcctcaaaccaatacttcaacgagagttgtgagaccaatacccgtcttcagactaaaactcgagtcccttggtcttcagggctctgcgactgcttctctgattggagaaactgttgcatcacatgttggtgcccttgcgtaacttttggccagattgccgagatagtagataaaggatca

SEQ ID NO: 221547 - DNA, 329 bp, Gossypium hirsutum
cccacgcgtccggcgatggaatgtactgtggttaaaaaccaccgtctgtgtctcggacattcggcttttttatcattgctgagcgcattgtactctctgcgcaccaccatgcatgtcctcatcttcctcataagcttcttgttgagcttgagcctgtttcctacgcatctcttcctcaatgttaacatcatgcatggttgtttcctcgcactcatccagctccatgtcagtcagctgaaccgatgccttgggaggaagcacagcctccagtgccttgcattggtctggggtcaacgagtcagggacgtcaacagtgaagtgaatgaaaa

SEQ ID NO: 221548 - DNA, 394 bp, Gossypium hirsutum
caattttagggttttttctattatttcataatcagattctggattatccaaaactcaatcttcagatcaggtcttagttttctagttgttgggttctttcgacgagctaagtttcatgtctgatcttgacatccagattcctactgcctttgatccgtttgctgatgcaaatgctgaagactctggtgctggtgccaaggagtatgtgcatattcgtattcagcagcggaatggtaggaaaagcctgaccacggtccaggggttgaaaaaaagattcagctataacaaaattcttaaggacctcaagaaagagttttgttgcaatggcactgtggtccaagaccctgaattaggacaggtttttcagctttaaggcgatcaaaggaagaatgtt

SEQ ID NO: 221549 - DNA, 422 bp, Gossypium hirsutum
cgatggctctctcaaactcagtcccgtcagcttgcattatctgtctcagtgcttctaatcaattctatcccccatcttcacctttcaagtctctcaagccccctctcttctggccatggcaaaaggtgaaaatgggtcctttgactgtttctccaatggggtttgggacgtgggcatggggaaaccagcttctctggggttaccaaccttcaatggattctcaacttcaacaggtttttaatcttgccgtggagaatggcatcaatctttttgacaccgccgattcttatgggactggcagactcaacggacagagtgaaaagcttttagggaagttcattagagaatttcaaggggaaaaacggatacgagatgagattgtgattgccacaaagtttgcagcttacccatggcgtctaaca

SEQ ID NO: 221550 - DNA, 396 bp, Gossypium hirsutum
  unsure (1)..(396): unsure at all n locations
gcctcaaccacgtctgctgctgcttctccttctctattccctctttcaatccatatataaatgattggctgtgaggtggaaaattaacaggattaggaggacactctttcgtcttaaagatggcttccgtgggcatggtgcctgcttctggtttaagagaatctagtactgccagtgttgagaagttacctgaggagatgaatgacatgaaaatccgagatgacaaagaaatggaagcaacagtagtggacggtaacgggactgagacagggcatataattgtgacaaccattggtggtagaaatgggcagccaaaacagacgataagttacatggctgaacgtgtggttggacatggatcatntgnagttgtcttccaggcaaagtgcttggaga

SEQ ID NO: 221551 - DNA, 409 bp, Gossypium hirsutum
  unsure (1)..(409): unsure at all n locations
gaaaagatggactatgtgtacggaccaggaaagaaccatctctttgttccagggccggttaacatcccggaaccagttcttcgagccatgaacaggaacaatgaggattaccgttcccctgccattcctgccatgacaaaaactcttcttcaagatgtcaagaaaattttcaagactactactggaactccctttttgattccaactacaggaactggtgcatgggagagtgcactcactaataccctgtcccctggagatcgaactgtatcttttctaattggacaattcagtctgctgtggattgatcaacaacaacgcctcaacttcaacgtcgacgttgttgaaagtgagtggggtcaaggtgctaacctngacattctggcagaaaaacttgcagctgatcact

SEQ ID NO: 221552 - DNA, 299 bp, Gossypium hirsutum
gttaacaccagccagccaccctgtctgcgaagtcaagtttcagagagtacattggttttcatgccaagccaggaaaaaggtagtactacatagttgttgagttaagtcttgaatcttgagtccgatcatgagttgcaacggctgccgagtcttacggaaaggatgcagtgagtcttgtatattacgtccttgtttgcaatggattgagagccctgaagctcaaggccacgccactgttttcgttgccaagtttttcggccgtgctggtctcatgtcttttatttcaagccgttcctgaa

SEQ ID NO: 221553 - DNA, 181 bp, Gossypium hirsutum
gaactacatgacccttcctaacattaaggttcctcttatcttgggtatttggggaggcaaaggtcaaggaaaatctttccaatgtgagcttgtctttgccaagatgggaatcaaccccattatgatgagtgccggagaattggaaagtgggaacgccggagaaccaccccagttgatcaca

SEQ ID NO: 221554 - DNA, 361 bp, Gossypium hirsutum
cccacgcgtccggcgggattacccgctgagtttaagcatatcaataagcggaggaaaaggttccatgtgaacggcacttgcacatgggttagtcgatcctaagagacgggggaagcccgtccgacagcgcgtccagcgcgagcttcgaaagggaatcgggttaaaattcctgaaccgggacgcggcggctgacggcaacgttagggagtccggagacgtcggcggtggcctcgggaagagttatcttctctggttaacggcctgcccaccctggaaacggctcagccggaggtagggtccagcggccggaagagcaccgcacgttgcgtggtgtcccgtgcgcccccggcggcccttgaaa

SEQ ID NO: 221555 - DNA, 420 bp, Gossypium hirsutum
  unsure (1)..(420): unsure at all n locations
cgacccacgcgaccggttccttccttcgccgtctattgctttttgttacctcgatttcaagtgaatcagaatgggtaaggaaaagactcacattaacattgtggttatcggccacgtcgattctgggaaatcaaccaccactggccacctgatttacaagcttggtggtattgacaagcgtgtgattgaaaggttcgagaaagaagctgctgagatgaacaagaggtcattcaagtatgcttgggtgcttgacaagctcaaggctgagcgtgagcgtggtatcaccattgatattgccttgtgganaattgagaccacgaaatactactgcactgtgattgatgcacctggacaccgtgactttatcaagaatatgattactggtacgtcacaggctggctgtgctgttttgattattga

SEQ ID NO: 221556 - DNA, 330 bp, Gossypium hirsutum
ctcaagctctctcttgctgtctaggtgtactttttctgtttatctatggatccctagaagcgccggccatcaagtgctatcaattcaccattctggactaccaattctggcgctgcagactggaataacaattcatatctcactgttggacccagagagtgcaattgtccttgaggactatcatgtggtggaaaagcttgccaactttgacagggagcggataccataacgtgttgtccatgctaggggagcaagcacaaagggtatatttgaggctacccatgacatttctcacgttacatgtgctgatattctgcgagcacctggagt

SEQ ID NO: 221557 - DNA, 361 bp, Gossypium hirsutum
gttgaaacgatttcgtttttggtgatagaaaacaaatggcggtttcatcatgttcatttactcttagccctagggtttgtaatccatattcttcatttgagtgccgtccagatcccgatttctccagtgcgccgatcggggacaagcctcgtcttgcctccagccgaagggtgacggcttcgtcgctttacgccggaggtatcagtagccgaggtttgtcttctctgatctttcgtttcccgccgaatttcgtgcgccagcttagcatcaaggctcgccgcaactttagcaatatcggtgttgcgcaaatagtcgctgcttcgtggtcgaatggtcctgctccagattcccccttcttggc

SEQ ID NO: 221558 - DNA, 397 bp, Gossypium hirsutum
cgattttctattttgttttctctccctccaattaagatgcagatcttcgttaagaccctgaccggcaagaccatcaccctcgaagtcgagagttccgacacgatcgacaacgttaaggcgaaaatccaagacaaggaagggatcccaccagaccaacaacgtctcatcttcgccggaaaacagctcgaagatggccggaccttggccgattacaacatccagaaggagtccaccctccatctcgtcctccgtctacgtggtggcatgcagatcttcgtcaaaaccctgaccggcaagaccataactttggaagtcgaaagctctgacaccattgacaacgtcaaggcaaagatccaagacaaggaaggcatcccaccagaccagcaaaggctcatat

SEQ ID NO: 221559 - DNA, 453 bp, Gossypium hirsutum
cgaatcccgggcgcccaccgcatgcgtccgaccctcagacattgagatggaacgtacaagctgagctggttcactgcagatgggcaatgttgggagctgctggtattttcatcccagagttcttaaccaagattgggattttaaacactccatcgtggtactcagctggaacagaggaatacttcactgacaccacaactctcttcatcgttgagcttatttttatcggctgggctgaagggagaagatgggctgacattctcaagccagggtgtgtaaacacagaccccatcttccctaacaacaagctcaccgggactgatgttggatacccaggtggcctgtggtttgaccctcttggctggggaagtggttcgcctgagaagatcaaggagctgaggacgaaagagatcaagaatggccgattggctatgttggcagtgatgggtgcat

SEQ ID NO: 221560 - DNA, 397 bp, Gossypium hirsutum
tttctccacactgtatgctcctctcatccgtgacggtcgtatggagaaattttactgggcaccaactagggacgaccgtatcggtgtttgcaaaggtattttcaggaccgacggcgtccgagatgaagacattgttaagctcgtcgacaccttccccggccaatccatcgatttcttcggtgccttgagggctcgggtttacgatgacgaagtgaggaaatggatcagtgaggtcggagtcgcaagcgtagggaagaagttagtgaactcaagggaaggacctccaacatttgagcagccaaaaatgaccattgaaaagctattggaatatggaaacatgcttgttgctgagcaagagaatgttaagagagtccaattggctgacaaatacttgagt

SEQ ID NO: 221561 - DNA, 427 bp, Gossypium hirsutum
accactcgacattgaaactcatccttccccttctctctcaaatcctcctaccgtccttcttcaccacacaccacaactactatactcccaaaatgtctcttacaatccccactaacctctccaaatcccttttgaagccaaagctaaactccaaactcacccccaaagtttcacgatcattggtggtatgctccaccgacaagacttcatcgccactatcatcagcttcatcactccaagccttctcagcagctcttgctctttcttccattcttctctcagccccacagcctgccgtagctgatattgcaggcctcacaccatgcaaagagtccaagcaattcgccaaacgtgagaagcagcagatcaagaagctggaatcgtcgttgaagctatacgcccctgacagcgctccagctctcgctat

SEQ ID NO: 221562 - DNA, 441 bp, Gossypium hirsutum
ctggctcggctccacgcgtccgttgttttttgtttccatggcggtaggcttatccgccgccgtaactcctaaacccttccgctcatttccgctgctgaagcctgctccaattttccatcctttactgcacctcccaaaaataacaacctacggagctcgaagaaagaaaagctttgctgtttgtttcgtggtggatgaagaacagaagcagagcgctcctacccagatcgtggaacaaggattcgaggaagttagagatcgtcagatcttaataccggcgcgtctgtcggagaaattagctagaaagagatccgaaaggtttacttacctcgttgccgctgtcatgtctagctttggaattacatccatgtctgttatggccgtttattacaggttttggtggcaaatggagggggggaggggcctctttctgaaatgttc

SEQ ID NO: 221563 - DNA, 407 bp, Gossypium hirsutum
gtggagcggaggatgttgctttgattgagtatgcaaaattgactggtaggccatttagggtgttcagccttgatactggcaggctgaacccagaaacctaccgattctttgatgaggttgagaagcattatgggattcgtattgagtacatgtttcctgatgctgttgaagttcaggccttggttaggagcaaagggttgttttcattttacgaggatgggcaccaagaatgctgccgtgttaggaaagtgaggcctttgaggagagcactcaaggggttgcgtgcctggattactggtcaaaggaaagatcagtctccgggaacttaggtcggaggttcctgttgttcaagtggatcctgttttcgaaggtttggatggtgggtatggagcttgctgagtggaacc

SEQ ID NO: 221564 - DNA, 416 bp, Gossypium hirsutum
ctcaaattcagttaacaatttcacagttgttttcttcagtctctctctcagccatggctgcagccatctccaccgtcgctgccgctgccgccgccaaccgagctctgggagtgtcagtcccaacctcagctttcatggggaagaaagtgagctcaagattcaacagcaccaggcaggttccttcgggaagttttaaggtgatggcggcggagaaagagatagacgaagagacacagaccgaaaaggaccgatggaaagggttggcttacgatatttcggacgaccaacaggacattactcgagggaaagggatggtggattccttgttccaagctcccatgaatgatggaactcactatgctgtcatgagttcctatgaatacctcagccaaggtcttaaaacgtacaatttggac

SEQ ID NO: 221565 - DNA, 432 bp, Gossypium hirsutum
gcgtccgccaagcctgcctcttcactccatcaaccctccgcaccccaaaatccggcgaccgcatcgccgccgtgttacggaaacaaccaccattcctaacactccctagcttcaagtccccaaaaatcatcatcgccccacgcaccatcaaagccgaagcaaccgaagagaaagccgagacaaccgccacaaaggaagcaccagtcggtttcaccccaccagagctggacccaaacaccccatcaccgatcttcggcggcagcaccggcgggcttttacgcaaagcacaagtggaagagttttacgtcatcacatgggagtcacccaaggaacaaatcttcgagatgccaacaggtggtgcagccatcatgagacaaggtccgaacctgctgaaattggctcgtaaagagcagtgcttggctcttgggacta

SEQ ID NO: 221566 - DNA, 418 bp, Gossypium hirsutum
gcgatggcctctcttctcagtccctctgcagcaatttctcttcgactcaagttgaatcgttcaagtgccgtatctgcaaatacaccctccaaaatttgttgtacttttcctggaaatggaagatgtcaaaggttaagtttcaagaccaaagctgcgggttcagttgaaggaaatgtactggacaaagaatcggctagtatcagtgacaagatagattatggagttgttggtattcaccatgttggaattctatgtgaaaaccttgaaagatcgcttgaattttatcagaatattttaggtcttgaaataaatgaggctaggccacatgataagcttccatacagaggtgcttggttggtgggtgggttctgagatgatacatttgatggaacttccaaatccagaccccttaatcgga

SEQ ID NO: 221567 - DNA, 404 bp, Gossypium hirsutum
caccagtcgtcccaagggtgttcctttgactcagctcaatttggggacttcagttttgaacattaaatcggtttacgaactcactgagtcagactcgacggtcattgtgctcccgttatttcacgtgcatggcttgttagctggcttactgagttcactcgtttccggagctgccgtcactctcccggccgccggcagattttctgcatcgacattttggacggacatgattaaatacaaagccacatggtacactgctgtccccacgatacaccagatcatattggaccgccatgagagcaatcccgaacgtccacggtaccccaagctaaggttcattagaagctgcagtgcatcattggcaccgagtatattagaacggctagaggcggcatttgacgcac

SEQ ID NO: 221568 - DNA, 422 bp, Gossypium hirsutum
  unsure (1)..(422): unsure at all n locations
cccacgcgtccgcccacgcgtccgaaggccgtaatctgaaagacaagacacagagaaaaagagagagagagagagagatgtcgggaggaatagcgcgtggtcgactcgccgaggaacgtaaggcatggaggaagaaccatccccatggttttgttgcgaaaccagagacgttgcctgatggaacggtcaatttgatggtgtggcattgcacgatccctggtaaagcaggaactgattgggagggtggctacttcccgctcacgctccatttcagtgaagattatcccagcaagcctccaaagtgtaaatttccccagggctttttccacccaaatgtttatccatctggtactgtttgcctttcaatcctaaatgaagatagtggttggagaccagncataacctgtgaagcagattcttat

SEQ ID NO: 221569 - DNA, 372 bp, Gossypium hirsutum
accagcaccaacaccagcaaccaccactgcgctcaccagaaggtggtgaagctcctaagcctaagccaccaccgattggaccaaaaagaggaaccaaggtgaggatccttagaagggagtcctactggtacaatggctatggatccgttgttacagttgaccaggaccccaagactcggtacccggtggtggttcgattcaacaaagtcaactatgccaatgtatctaccaacaactatgcactggatgagattgaagaagttaaatgagattagtccatcaagtctttgtaattttatgttgtattttgtatcgtattacaacctcacaattcatatactaatgtaatgtatatctgcctttcaaatctaa

SEQ ID NO: 221570 - DNA, 422 bp, Gossypium hirsutum
aaaaggaataccttggttactggtggtgtgaggggaactcttccatggatggccccagagctgttgaatggcagtagtagcaaggtttctgaaaaggtcgatgtgttctcatttggtattgttctatgggagattcttactggcgaggaaccgtatgccaatatgcattatggagcaataataggaggcatcgttagcaacacgctcaggccacccgtaccaagctactgtgacccagaatggaagctactaatggagcagtgttgggctccggatcccgtggttcgaccttcattcacagagattgctagacgcttacgaatcatgtcatcagcatgccagacaaaaccacagggtcatcagatgcagaaccaagcatccaagtaaaatgtttctcaaataatccccttattttgatgcta

SEQ ID NO: 221571 - DNA, 419 bp, Gossypium hirsutum
cccacgcgtccgatagcatacactactagtacccactactagcaatggcttcctcaatgatctcatcggctaccattgccactgcctctccggcacaggctaacatggtcgctcctttcaccggcctcaagtctgcctctgctttcccagtcaccaggaaggccaacaacgacattacttctctcgcaagcaatggcggcagagtgcaatgcatgcaggtgtggcctcctactggaaagaagaagttcgagactctctcatacctccccgatcttacacccgtgcagttggctaaggaagtggattaccttcttcgctcaaaatgggttccttgcttggaattcgaattagaggagggattcgtgcaccgtaaatactcgagcctacccacgtactacgatggacgctactggaccatg

SEQ ID NO: 221572 - DNA, 424 bp, Gossypium hirsutum
aagcactgaaaaagcaaaaccatggcctctgtttttctcctcaagacttcaccagttttagacaagtctgagtgggttaagggtcacacccttcgccaaccttccacttctgtggtgaggtgccaccctgttgcaccctccggactaactgtgcgtgcaagctcatatgccgatgagcttgtcaagactgctaaagctattgcttctcctggccgtggaattttggccatggatgagtccaacgctacctgtgggaaacgtttggcctcaatcgggctagaaaacacggaggctaaccgccaagcctacaggacgttgcttgtttcagctcctggccttggtcagtacatctcaggtgccatcctctttgaggaaaccctctatcaaaccacaattgatggcaagaagatgggttgtgttcttg

SEQ ID NO: 221573 - DNA, 426 bp, Gossypium hirsutum
gggcaactgcaggttgaaacatatgcttgtgctgttagtaacgtgtatacatttgggccaacgttttcgggctgaacactctcacacttcaaggcatttggcagaattttggatggtagagcctgaaatagcatttgcagatctacaggatgacatgaactgtgccgaggcttatgtgaagtatatgtgcaattggttgcttgataaatgccttgacgatatgcaattcatggctaaaagttatgataaaggttgcattgatcggttgagaatggttgcttcaattccctttgtacggatatcatacacagaagcggtggagcttttagaggaagctgtgaaaggtggtaagaaatttgagaatgaagtgaagtgggggattgatttggcttctgagcatgaaagatacttgactgaagttaaatt

SEQ ID NO: 221574 - DNA, 417 bp, Gossypium hirsutum
ggactgttttcgatgatgccactcctgagatggtgagggatttcttttgggacgatgaattccgatcaaaattgaagtgggatgaaatgcttcttagtgccgaaactctcgagtcgtctcccactgatggcaccatgatggtccagtgggttcgaaagtttcccttcttctgcagtgacagagaatacttgataggtcgtcggatttggtcgtgtggtcggacatattactgtgttacaaagggagtaccatatccctctattcctagaaaaaccaaacctaggcgcgttgatttatactattcaagttggtgcattcgtgcagctgaatcaaggaaaggggatggccagctgactgcatgcgaggtattactttttcaccatgaaaatatgggtataccatgggaaattgcaaagc

SEQ ID NO: 221575 - DNA, 418 bp, Gossypium hirsutum
gttttccttcccatcataccaactttctcctttgtatcattatctccttccatctcctgcccttttctccaaccagcttcttcctgaaaaccatgttaattggactcaaaccccagaggctcacgtttactctgctgatcttcctggtaactctctgccatggaaaattttctcttcattatcttcttttcctttaccttgttaatttatgtaccagaaattagttccatgccatggtttttcttttttttctttttgtcctatacattaggggtgaggaaggaggaaataaaagtggaagttgaggactcaagatatcttataattaggaccgaggccatcgatgactcaacaaaaccagccatggacttcaagaggaaattccggctgcctggttccatagatattgatggaatat

SEQ ID NO: 221576 - DNA, 420 bp, Gossypium hirsutum
aagaatcctgctctgtatggtgagcttgccaagggtcaaagccctaagtatatgattgttgcctgctcggactctagggtctgcccatctcatgtgctggacatgcaacctggtgaagcttttgtggtccgtaatgttgctaacatggtgccaccatatgaccagattaaatatgctggcattggatctgctattgaatatgcagttttgcatctcaaggtacaagaaattgtggtgattggacacagtgcctgtggtggaatcaaggggcttatgtctttcccatttgatggaaacaactcaactgatttcatagaggattgggttaagattggaatccctgctaagaccaaggtgctagctgaacatggtggtgagcctttgggagtccaatgtacacactgcgagaaggaagcagtg

SEQ ID NO: 221577 - DNA, 416 bp, Gossypium hirsutum
cccacgcgtccgcccacgcgtccggtaaatttcttttgcaatcctttgtagagctccgggatccattgtcaccatgtcttgctcaaatctgacaatgtgggtgtcctcaaaaccctctctttctgacacttcttcactctctttccgttctttcatcagcccttttcagctcccatctcagagctcaacccccggtaacccttccaggtcctcatctgtaaccccagttcactgtggtcttcgtgagcttagagaccgtattgattcagtaaagaacacgcagaagatcactgaagccatgaaacttgtggctgctgctaaagttaggagagcacaagaagctgttgtcaatggcagacctttctctgagtccctggtgaagttctttacaacatcaatgaacagcttcagactga

SEQ ID NO: 221578 - DNA, 414 bp, Gossypium hirsutum
cccacgcgtccgggccaatccattgactttttcggtgctctgagggccagagtttacgatgacgaagtgaggaaatggatcggagaggtcggagtcaatggtgtcgggaaaaagctcgtgaactcgagggaagggccaccatctttcgagcaaccgaagatgaccattgagaagctgttggaatatggatacatgcttgttgctgagcaagagaatgtgaagagggttcaattggctgacaaatatttgagtgaagctgcccttggaaatgctaatgacgatgctatcaagagaggagctttctaaatgggaaattaagctctaagggaagaaaaaaatctatattgggcacaaacaaaggaaatcccccctttgtgtcttaattgaatgttgttttccttttgtgttttaagt

SEQ ID NO: 221579 - DNA, 316 bp, Gossypium hirsutum
gtggagcggaggatgttgctttgattgagtatgcaaaattgactggtcggccatttagggtgttcagccttgatactggcacgctgaacccagaaacctaccgattctttgatgaggttgagaagcattatgggattcttattgagtacatgtttcctgatgctgaacaagctcaggcctaggttacgagcaaagggttgttttcattttacgaggatgcgcaccaagaatgctggcgtgtttggaaagtgtggcctctgaggagagcactcaaggcgctgcgtgcctggattactggttaaaggtaatatcagtc

SEQ ID NO: 221580 - DNA, 390 bp, Gossypium hirsutum
cccacgcgtccgcccacgcgtccgggaattctcctccgttgctttataagatgagattgatcaagggaatagctaattttaggcgtctttacgctaattctatagacttgaacacaaaatcctacctctctacgacaaagcgcgcattttgcaggccaagtgaatacgcaaaggtcgttaacaccaccatcacttgttctccattttattgcagcaataacttaggatcgagatcccattcaagcagacccgaaatggaggggatagagcatagggtaatcaaagccaatggcataaatattcacgtcgctgagaaagggaaaggccctgtaatccttttccttccatggattcccagagctctggtatacatggcgcaatcagatcact

SEQ ID NO: 221581 - DNA, 423 bp, Gossypium hirsutum
gcttctgcttctcatttaaacattcaaggcaaaagaaaaagagacaaaacattgaaggaaatgacatgtttctgttgcttccttacaaccttgtaaagttataagcatcgtgtcagaatttctctctgccaattgccaaggttctcattatctatggtttgatggagatagagataagatagatcatggtaaaattagttgagtgcgttacatggtggattttgttaaggaggagattgcacctactagtcttaacatgtcatctaaaaaggagcttctttccacagccatgaagagaaccagcgagtggattttctctcaggagattcccagtgatgtcactgtccaagttggaggagtttctttctcactgcataagtttccattaatatctaagtctggatacgtaaggaaagttgtatc

SEQ ID NO: 221582 - DNA, 419 bp, Gossypium hirsutum
gtctttgccaagatgggaatcaaccccattatgatgagtgccggagaattggaaagtgggaacgccggagaaccagccaagttgatcaggcaaaggtaccgtgaggccgccgacattatcaagaaagggaaaatgtgttgcctctttatcaacgatctcgacgctggagccggtcgtatgggaggaaccacacaatacacagtgaacaaccaaatggtgaacgccacactcatgaacatcgctgataaccccaccaacgttcagctccccggtatgtacaacaaggaagagaaccctcgtgttccgatcattgtcaccggtaacgatttctcgacgctgtacgcgccgctcatccgtgacggtcgtatggagaagttttactgggcacccaccagggaagaatggatcggtgtttgcac

SEQ ID NO: 221583 - DNA, 396 bp, Gossypium hirsutum
acaaaatccgtaaatggctaccactgcttctccaatggcgactcagctgaagagcagctttacgtcgtctgttacaagaggactggtagtccccaggggcatttcgggatccccgttcaaagtatcttccggaaagaccaggaccccttgcttcactgtcaaagctgttcaatccgacaagtcaacatttcaagtaatccaacccatcaacggcgaccccttcattggaagcctggagactccaatcacctcaagccccttaattgcatggtacctttccaacctcccagcctataggacggcagtgaacccacttctgaggggaatcgaagtgggtctggctcacggcttcctcctggtgggtccattcgttaaggccggccctctaaagaacac

SEQ ID NO: 221584 - DNA, 411 bp, Gossypium hirsutum
ctcacttcaagctgcagctaccctgatgcaaccaatcaaggttgctgcaccatcaagggccaatgtgccgctcaggtcctcccagagcgtttctaaggccttcggtttggagcctgttggtgctaggcttacctgctctttgcaaactgacctcaaggacttggctctgaagtgtgttgatgctaccaagctcgctggtttcgctcttgctacatctgctcttgttgtctcgggagcaagcgctgaaggagtttcaaagcggctaacctacgctgaaatccaaagcaagacatacatggaagtcaaaggaacaggaactgctaaccagtgcccaaccatcgatggtggtgtcgactcttttgccttcaagcctggcaaatactacgccaagaagttctgcttggagcccac

SEQ ID NO: 221585 - DNA, 414 bp, Gossypium hirsutum
ctacattgccccagctttcatggacaagcttgttgttcacatcaccaagaacttcatgacccttcctaacattaaggttcctcttatcttgggtgtttggggaggcaaaggtcaaggaaaatctttccaatgtgagcttgtctttgccaagatgggaatcaaccccattatgatgagtgccggagaattggaaagtgggaacgccggagaaccagccaagttgatcaggcaaaggtaccgtgaggccgccgacattatcaagaaagggaaaatgtgttgcctcttcatcaacgatctcgacgctggagccggtcgtatgggaggaaccacacaatacacagtgaacaaccaaatggtgaacgccacactcatgaacatcgctgataaccccaccaacgttcagctccccggtat

SEQ ID NO: 221586 - DNA, 409 bp, Gossypium hirsutum
  unsure (1)..(409): unsure at all n locations
ttcctcacttttctttggattancccttttctattatatcacagaagatttntgcagtctttctttcagacgcaagcagcaggcacctgtcctagaaacagagatcttctcaagttagttaaataacggtttttgctatccccattttgccctttcatcttcttcttctccttcatcggaagatgattagttggaacgatctttacaccgttttaacggcggtgatcccactgtacgttgctatgatcttggcttacggctccgtccgttggtggaaaatattcacccccgaccagtgctcgggtatcaaccgctttgtcgccatatttgccgttcctctcttgtctttccacttcatttccaccaatgacccttacgnccatgaacttaggttcatagcagccgacac

SEQ ID NO: 221587 - DNA, 416 bp, Gossypium hirsutum
cccacgcgtccgattcggatccgggtcacccgatttcaaaaatatccggtgagatttttgatgcagtgacggcgtgctggttttggatatggagacagagaatgcagtgaattacaagtttatggggaggagctttaatgatttgagtatcaacgatgattcttctgcttttagtgattgtaacagcgacagatccggtgagttctccacggcgtcatcgcaaagccggaggttatttctcgcttgtactaattctgataactccgatgaatttatacggcaactcgtatcggatctcggctcctgttcgattgatgagcaaaagaacgcggctttagagcttagattgttggcgaagaacaaaccggagaatcgaatcaagatcgctaaagccggtgcgatcaaaccgttgattt

SEQ ID NO: 221588 - DNA, 413 bp, Gossypium hirsutum
gtccaatcactcccaatactttcataacatttcacgaacttcactctccagtctccaatggcggctgccgtctccaccatcggtgctgtcaaccgagcaccgttgagtttgaatggatcaggtgccggagcttctgctccaagctcagctttcatggggaacagcttgaagaaagtgagcgctaggttcaacaacaacggcaaggctccagtgggaagtttcatgattgtggctgccaaagaaatcgacgaagacacacagaccgaccaggaccgatggaagggtcttgcttatgatatctccgatgaccaacaagacattaccagagggaaaggtatggtcgactcattgttccaagctcccatgaacgatggtactcactatgctgtcatgagctcctatgagtacattag

SEQ ID NO: 221589 - DNA, 421 bp, Gossypium hirsutum
  unsure (1)..(421): unsure at all n locations
ccttcatttgttttcctctaaaaggaacaacagagaagaaaacttcatcaaacaaggaaaaaacttaacaagtaaaacaattgagagaagatgtcctggcaagcgtatgtagatgatcacttgatgtgtgatattgagggcaaccatctctctgccgccgctatcattggccaagacggcagcgtttgggcccagagctccaatttccctcagttcaagccagaagaaatcactggcatcatgaatgacttttctgaacctggatcgcttgctccgactggattgtaccttggtggcacaaaatacatggtgatccaaggtngaacccggagctgttattcgagggaaaaagggcccccggaggtgttactgttaaaaagaccaacctgtccttgatcaatgggatctatgacgagccaat

SEQ ID NO: 221590 - DNA, 359 bp, Gossypium hirsutum
cccacgcgtccgccaacattttcataacaatggctgccatcacaaacgccgctgctacatcctccttcatggggacactcttccccgacgtctacacaagttcagggagattcgtcgccaggtttggctttggcggcaaaaaagcagctcccaagaaagtctcgaaacgaaccccagaccgccctctatggtacccaggaacaggggcgcctgaatggctcgaaggaaggtttggtgggtgattacgggttcgacccgttcgggttagggaaaaccggcggagtacttgcaatatgatttggattctttggaccagaacctggctaagaattcggctggtgagataattggaactagga

SEQ ID NO: 221591 - DNA, 409 bp, Gossypium hirsutum
  unsure (1)..(409): unsure at all n locations
ggaaggccaacaacgacattacttctctcgcaagcaatggcggcagagtgcaatgcatgcaggtgtggcctcctactggaaagaagaagttcgagactctctcatacctccccgatcttacacccgtgcagttggctaaggaagtggattaccttcttcgctcaaaatgggttccttgcttggaattcgaattagaggagggattcgtgcaccgtaaatactcgagcctacccacgtactacgatggacgctactggaccatgtggaagctgcctatgttcgggtgcaccgactcggctcaggtattgaaggagcttgaggaatgcaagaaggaataccccaatgcattcattagaatcattggcttcgacaacgtgcgtnaagtgcagtgcattagtttcattgccta

SEQ ID NO: 221592 - DNA, 414 bp, Gossypium hirsutum
cccacgcgtccgcaactttcttcttaagctcactgtagttactctctacctcccacagccgcatcatggccgattccgccaccgcgtcttcccccctaaaagtcatcgccggagctgattcttttggcgccgagctaaaagacgccatggtatcccacctccgctccctcaacatagaagtcgaagatctcggaatcacctcctactacaacatcggtgctgaagtcggccgtcgagtatcttccgccaccacctcgccctccttggagacccgtggcctccttgcttgcggaacgggcgtcggagtcgggatcttcgccaacaaattccccggcgtgttcgccaccacatgtctcactccggacgaagctcgcaacaatcgctccatcaataactgcaacgtcttggcactct

SEQ ID NO: 221593 - DNA, 458 bp, Gossypium hirsutum
  unsure (1)..(458): unsure at all n locations
cccacgccgtccgcccacgcgtnccgtttagctatnagcatacacctactatgttacctcactacnntagcaatggcttggctggagtgnnatctcatcggctacccattgccaccctgcctctccggcacaggnctannacatggtcgctctctttcaccggcctcaagtcntgcctctgctttcccagtcaccaggnaaggccaacaacgacattacttctctcgcaagcaatggcggcagagtgcaatgcatgcaggtgtggcctcctactggaaagaagaagttcgagactctctcatacctccccgatcttacacccgtgcagttggctaaggaagtggattaccttcttcgctcaaaatgggttccttgcttggaattcgaattagaggagggattcgtgcaccgtaaatactcgagcctacccacgtactacgatggacgctactggacca

SEQ ID NO: 221594 - DNA, 411 bp, Gossypium hirsutum
cccacgcgtccggtagagcttctttctagctatatccttatcagctttcaaagatggcaggaatcgcctttggtcgctttgatgattccttcagtttggggactgtcaaggcctaccttgctgagtttatctcaactttggtgtttgttttcgccggcgttggctctgccattgcttacaacaagttgacaactgatgcagccctagatcccgatgggctagtcgccattgctgtttgccatggatttgctctctttgttgcagtggctatcggtgccaacatctcaggtggccatgtcaaccctgcagtcacttttgggttagctcttggtggccaaatcaccatactaactggcatcttttactggattgcccaactttctggatccattgttgcttgcttcttgctca

SEQ ID NO: 221595 - DNA, 402 bp, Gossypium hirsutum
cccacgcgtccgctttaaccttgtacactactattacacttccggaaaaaaatcatggccaccgtcacgacgcaagcctctgccgctgttttccggccatgtgcatcgaaaacacggttccttactggttcttccggtaagttaaaccgagacgtttcatttaaaccagtggcttctacatcgactagctcattcaaagttgaagcaaagaaaggggagtggttacctggtcttccttcaccagcttacctcaatggcagtcttccaggtgataatggctttgatcctcttggattggctgaggaccctgagaacttaagatggtatgtacaagctgagcttgtgaatggacgttgggcttatgttgggtgttgcagggatgcttctggccgaagttttcac

SEQ ID NO: 221596 - DNA, 419 bp, Gossypium hirsutum
cccacgcgtccgcccacgcgtccgcccacgcgtccgctccaacccaaacccttcctccgccggcatttgtttgcaaaaaaaaaaaaaaaagaagttcaaattgaagaatgcctgtattttcttcaagagctatgttcaggaactacgacaagcatagaaagcaaaaaagtgaccctaaaggcaaattgtccgacgtgttcaggagctatgctgattctaatggggagctaaacaaggaaaagctgaaagacgcttttctacatctggatgctgccatgccgtaccggcaagccgaagaagccctccgtgtcgtcggcaaaagctattacattaacatcaaggatgaaaccgaccttaacacccttgtcgactatgcttacaataagggttacgggtattcaatttgattagctaattta

SEQ ID NO: 221597 - DNA, 390 bp, Gossypium hirsutum
aaaatgctaaccctcttagagatgttgtctttttgggcactcccaaatatgcaatgggaaatgaactatggtatggaccagacagagtgaagtacttgggaccattttcagctcagactccatcttacttgactggagaattccctggtgactatggttgggacactgctggtttgtcagccgatcctgaggcatttgccaggaatagggctcttgaggtcatccatggaagatgggcaatgctgggagcactaggctgcatcacaccagaagtacttgagaaatggcttagggttgatttcaaggaaccatactgcggacgcgtgggcggacgcgtgggcggacgcgtgggcggacgcgtgggctccaaccttccatacaattctcacc

SEQ ID NO: 221598 - DNA, 407 bp, Gossypium hirsutum
ccatggcaacaaaagctgctttagctccttcaagaatccctgccaacaccaggcttccatctaagaccactcactctttccccactcaatgctcttccaagagactggaagtgactgaattctctggacttcgatccagctcatgcgtcacctttgccaagaatgttagagatacttcctttttcgacgtgctggctgcccaacttactcccaagagtgaaggtgtaccatcagcatctgttaggggagaaacagttgccaaactgaaggttgcaatcaatggatttggacgcattggcaggaacttcctcagatgctggcatggcaggaaggactcacccctcgaggttgttgttgtaaatgacagtggtggtgtcaagaatgcttcacacttgctgaaatatgac

SEQ ID NO: 221599 - DNA, 419 bp, Gossypium hirsutum
cccacgcgtccgttctactccatcttcactcttctttctcacccaaaccctacaaaatggccgccgccgcgcgccctcttgtctccgtccaaaccatagagtccgacatggctactgatgccactccaaccgttcctctcgctgatgtgatgaaagcctcgattcgacccgacatcgtcaccttcgttcacgacaatatatccaaaaacagccgtcaaccctatgccgtctccaaacgcgctggtcaccaaacttcagctgaatcctggggtaccggtcgtgccgtctcacgtatccctcgtgttcctggtgggggtactcaccgtgcaggccaaggtgctttcggaaacatgtgtcgcggaggacgcatgtttgctcctaccaagatctggcgccggtggcaccggaaaatcaacgtt

SEQ ID NO: 221600 - DNA, 412 bp, Gossypium hirsutum
cccacgcgtccggtttgctcctggtggtgatgcgtggcatcccaaaaacagaaaagtaaagatgtctgttacagtgaaggagctcgggctttcaaagcatcaattccgccggttacgagagcttgttggaaagagataccatccaggcgaaggtgaacttacaattactagtgagaggtttgaacaccgtgaagagaacagaaaagattgcctcagaacactcttttctctcatcgaggaagccggaaaagctaacaaaatggtggaggaggctcgtactaaatatgtcaagaacaggcttcgagccaatccagcattcatggagagattgcgtgcaaagacgatgaaattgcaagaatctactacattcccaataatgaactctttaaaggaaattaattggttttttttt

SEQ ID NO: 221601 - DNA, 421 bp, Gossypium hirsutum
tgcaggtgtggcctcctactgggaagaagatgtttgagactctctcatacctccccgatcttacacccgtgcagttggctaaggaagtagattaccttcttcgctcaaaatgggttccttgcttggaattcgaattggaggagggattcgtgcaccgtaagtactcgagcttacccacgtactacgatggacgctactggaccatgtggaagctgcccatgttcgggtgcaccgactcggctcaggtgttggaggagcttgaggaatgcaagaaggcataccccaatgcattcattagaatcattggcttcgacaacgtgcgtcaagtgcagtgcattagtttcattgcctacaagcctccaggcttctaagctttttattaactttgtctctccatttgtttgaatttgtactcagaaaa

SEQ ID NO: 221602 - DNA, 414 bp, Gossypium hirsutum
aatttccatagcttattttcatcaaccctttgtcgtctccgtacaagaccttgcttagaagaaaaatgtcaaccttccctgactctttcactcaactcgccgacgactccttagactcttttgactctgttccacaccaggatgaagacggtgccggctacgccggatacgacccttctcagcaattcgactctttcgccgaccactcggatcatgccaagggctccactgatgatgtgtttgcatcagattcatacacaaatggggtaggttttggccaagattttggcggatcggacggcccggttttgcctccgccggcggagatagagcctgaggaaggtgttgctctcagggaatggagaaaggagaatgcgattcggttggaggagaaagacaagaaggagaaggagt

SEQ ID NO: 221603 - DNA, 404 bp, Gossypium hirsutum
gtgaatgttgagaagaagggtatcacagctgaagatgtgaatcctgcattcagaaaggcagccaaggggccattgaagggcgtattggatgtgtgtgatgttcctcttgtctcggtggactttaggtgctctgatgtttcctccaccattgactcttcattgaccatggtcatgggagatgacatggtcaaggtggtggcctggtatgacaatgaatggggttacagccaaagggttgttgatttggcacacttggtggcaagcaagtggccaggcatgcctgcaggaggaagcagtgaccccttggaggatttctgcaagacaaacccagctgatgaagaatgcaaagtttacgaggcttaaatgattgcaattttcatttttttttaaattgttttccatgc

SEQ ID NO: 221604 - DNA, 311 bp, Gossypium hirsutum
gggaaaggttacatgtgaacggcacttgcacatgggttagtcgatcctaagagacgggggaagcctgtccgacagtgcatccagcgtgagcttggaaagggaatcgggttaaaattcctgaaccgggacgcgtcggctgacatcaacgttagggagtcctgagacgtcagcaggggcctcgggaagagttatctttgctgtataacggcctgcccaccctgagaactgctcaaccagacgtagggtccagcggccggaagagcaccgcacgctcacgtggtgtccggcgcgcccccggccgtccttgaaaa

SEQ ID NO: 221605 - DNA, 396 bp, Gossypium hirsutum
cccgaatggccgggtcgacccgaccgacccgtccggctttaaagtgactactttggttgctattaggccaagtgaacaatctgcttcaaagaaagaggtctctgatgcttcttggttatcaactgcttttgaagagccttatggaactgcagctaagatgcttgttaaaagaaggacttactgtttggagatgaactcgttttgatctctgcttcttgatctttgaagggagagcagtcgagcacaatagtcgagggggaagaaggcatagcatacttttggaaagctgacgatcaaacaacaattttgttacgtgttgtagctttttaatgcaagagcagtgtcctgtgaaagctgaaaccttgcttatgaatgccattgaaagcaatcgacgca

SEQ ID NO: 221606 - DNA, 423 bp, Gossypium hirsutum
caaaaacaaaataaaataaagaacacacaccattgttcgccaacacactaatgagctggggcatagccaccacatttccttcacttctttcctcatcaaagtccaagttcagtggcgccgccgtatcgttgcctagtgctgttggtaccaatgttggccaccgtgttagcatgtcagctgattggatgcctggtcaacctagaccaccttaccttgatggctcagcaccaggtgactttgggtttgacccactaagacttggtgaggtccctgagaaccttgagaggtacaaagaatctgagttgattcactgcagatgggctatgcttgctgttccaggtatattggtaccagaggccttagggttgggaaactgggtaaaagctcaagaatgggcagcaattccaggtggccaagccactt

SEQ ID NO: 221607 - DNA, 457 bp, Gossypium hirsutum
taccgggtcggaaaggccggacccacgcgtccgctatagcatacactactagtacccactactagttttggcttcctcaatgatctcatcggctgccattgccactgcctctccggcacaggctaacatggtcgctcctttcaccggcctcaagtctgcctctgcttacccagccaccaggaaggccaacaacgacattacttctctcgcaagcaatggcggcagagtgcaatgcatgcacgtgtggcctcctactggaaagaagaagttcgagactctttcacccctccccgatcttacacccgtgcagttggctaaggaagtggattaccttcttcgctcaaaatgggttccttgctaggaattcgaattagaggagggattcgtgcaccgtaaatactcgagcctacccacgtactacgatggacgctactggaccatgtggaagctgcctatg

SEQ ID NO: 221608 - DNA, 444 bp, Gossypium hirsutum
  unsure (1)..(444): unsure at all n locations
gaccggaccgactgcccggcccacgcgtccgcccacgcgtccggtttaatctgctgtgctcgttgtagctcaccacccaaactttaacaatggccgtcggtaagaacaagaggatttccaagggaaagaagggaggaaagaagaaagcagctgatccatttgcgaagaaggattggtatgatatcaaggctccatcagtttttacgagcagaaatgttgggaagactcttgttacccgtactcagggtaccaagattgcttcagaaggactcaaacacagagtgtttgaggtttcactggctgatcttcaaggaggtgatgaggatcatgctttcagaaagattcgtttgagagctgaagatgttcaaggaaaaaatgttttgaccaacttctgnngaatgaattttacgactgacaagctgaggtccttgggtcgtaaatggc

SEQ ID NO: 221609 - DNA, 414 bp, Gossypium hirsutum
gtgagactcttttgtataactgtagcatatagtactagtaagcagtaatagcaatggcctcctccatgatctcatcggcaaccattgccaccgtgaactgctcctccccggcacaggccaacatggtggcccccttcaccggcctcaagtctgcctctgctttcccagtcactaggaaggccaacaacgacatcacttctcttgcaagcaatggtgggagagtgcaatgcatgcaggtgtggcctcctcttgggaagaagaagttcgagacactctcatacctccccgatcttacacccgtacagttggctaaggaagtagattaccttcttcgctctaaatggattccttgcttggaattcgaattagaggagggattcgtgcacccgaagtactcgagcttacccacgtact

SEQ ID NO: 221610 - DNA, 423 bp, Gossypium hirsutum
cggaatggccgggccgacccacccgacccgccacgctttaaaaggcagcttctgtgtttagtgtagccaggattttaaaaaaaacctccattaatggctgcactaaggagcttccttaggaaaagatgtttaacatgcgacgagctgatgatgacaaggaggctgatctccaccgaacccatcattgattccccttcttttgcacaaagactcagagatcttcccaaggatctccctggtactaaaattaagagggaggtttcgcagctaattggaagaacaccccttgtctttcttaataaagtaaccgaaggctgcggcgcgtatatcgctgtgaaacaggagatgatgcaacccacttctagtattaaagacagaccagcatttgccatgatcaacgatgcagaaaaagaaaacttaatc

SEQ ID NO: 221611 - DNA, 398 bp, Gossypium hirsutum
caacaagacattaccagagggaaaggtatggtcgactcattgttccaagctcccatgaacgatggtactcactatgctgtcatgagctcctatgagtacattagccaaggccttcgcacatacgacttggacaacaacatggatggattctacattgccccagctttcatggacaagcttgttgttcacatcaccaagaactacatgacccttcctaacattaaggttcctcttatcttgggtatttggggaggcaaaggtcaaggaaaatctttccaatgtgagcttgtctttgccaagatgggaatcaaccccattatgatgagtgccggagaattggaaagtgggaacgccggagaaccagccaagttgaatcaggcaagggtcccgtgaggccg

SEQ ID NO: 221612 - DNA, 413 bp, Gossypium hirsutum
ctcttttgtatacctgtagcatatagtaatagtaagcagtaatagcaatggcctcctcggggatctcatcggcaaccattgccaccgtgaaccgctcctccccggcacaggccaacatggtggcccccttcaccggcctcaaatctgcctctgctttcccagtcaccaggaaggccaacaacgacatcacttctcttgcaagcaacggtgggagagtgcaatgcatgcaggtgtggccgcctcttgggaagaagaagttcgagactctctcatacctgcccgatcttactcccgtacagttggctaaggaagtagattaccttcttcgctctaaatggattccttgcttggaattcgaattagaggagggattcgtgcaccgtaagtactcgagcttacccacgtactacgat

SEQ ID NO: 221613 - DNA, 411 bp, Gossypium hirsutum
cccacgcgtccgctaaactgccactgaatttgtcctcctctctcatccaaccaatctggagatcctttcccatactttttttttgtcttttttatttcctttttcaatttggttctacttgactcaagttcttcctccacttgaaggccacaattcattctttttttttcctgtgcttgtacacaatggctatgactgtaaatgcagcagtatctcttccatcttccaagtcatctaccctgtcatttaaaaactcagtcactgtccctgaaagaatcaacttcaacaagagtgttttgtacccaaaaaatgtcagccttggtggaaatgtggtttccattagagctcaggtcactacagaagctcctgcaaaagcaccaaaaatttccaagaaagatgacgagggtattg

SEQ ID NO: 221614 - DNA, 406 bp, Gossypium hirsutum
tcaatcctttctcagattcggactccaatcatgtgaagtgctacatccagcggcaaagggttgtcatttcttgagatcccaactctgatcccttctgaaatctttccttttacagttctcaccaagatgttcaaaaaattttcatctgaagatgtgtcttcacaaaaccaagtcaaagcatctgtgcagcggaaaattcggcaaagcattgctgaggagtacccaggacttgagcctgtgttggatgatttgcttccgaagaaggcccctttaattgttgtgaaatgtcaaaaccatttgaatctggtattggttaatagtgttccactattcttcaatattcgtgatggaccatacatgcccactcttagacttcttcaccagtattccaacataatgaaaaagt

SEQ ID NO: 221615 - DNA, 451 bp, Gossypium hirsutum
  unsure (1)..(451): unsure at all n locations
ccggnccggaaannccggggcggaccaagccgtcgcccaacccttccgaccgatctcccttgtttaattttttgtaaattttataacttgggaacgtggacacccatggctactgtttctcaattgaacaactttccatgcaagaccttcttaataatcccacaaaacagtaactttacctcaaagcttccggttctgcctctaaactctacaaaaccaactcagaattcgatcaagaaatctcaatttttgacccagaaatcagtccagccaaggcctgttttccagatccgtgcttcggacgccgacgatgaatggggcccagacaaggaggagccagttgtaatcgagagtcctggagtggccgtagcggaagagaagaagcctgacgatgcgggggaaatagagagcttgaagaaagctttggtggattcgttttatgggacggatc

SEQ ID NO: 221616 - DNA, 415 bp, Gossypium hirsutum
aaaaagaaaaatggcttctgcttccgctactctcctcaagtcttcacctattatcgacaagtccgagtggattaagggccaaaacctccgccacccttcggtttgttttgtacggtcacaccctacatcggccgcctttaccgtccgtgctagttcatatgccgatgagcttgttaagaccgcgaaaactgttgcatctccaggtcgtggtattttggccatggatgaatcaaatgctacatgtgggaagcggcttgcctcgattggtctcgagaataccgaggcaaaccggcaagcttaccgtacccttctcgtgtctgcccctggcctcggtaactacatctcgggagctatccttttcgaggagactctctaccaatctaccatcgatgggaaaaagatggtcgatgttctt

SEQ ID NO: 221617 - DNA, 358 bp, Gossypium hirsutum
cgcctcgcttccaagggtttgctagtcacactatctacacccaaaggcttcggcagggggatggttaaagccaacaacatcactgaccaccagcttatccctgtgggcgacggctttctccgatttgaatcgatccaggatggttgggacgacgactacccgagacgcgcacacctcgaccaatacatgcaccaactggagctcgcaggcaaaccagcgatttcagcgatgataaagagatacgccgagcaaaaccgacccggttcttgctttatgaacaaccctgtcattccttgggcatctgatgttgctgaagtctcggcatcccttctgcaatgctttgggtgcagacttgcgc

SEQ ID NO: 221618 - DNA, 412 bp, Gossypium hirsutum
cataaaatctgtgcctgcccttttctctgcacacctcgggatatcagtttcaactccactcatcccacgggttgagtaccgagtccatatatcgttaagttcaaggaaggaacttgggcatcatgggtcttaaggcattagactatgagacaatgaatgaaaacgtgaagaaagttcaatatgcagttagaggtgagttgtatcttcgagcttctgagcttcagaaggaagggaagaagattattttcacaaatgttggcaatcctcaagctcttggacagaagccactgactttccctcgtcaggtggttgctttgtgccaagctccatttctgctagatgatcctaatgtaggacttatatttcctgctgatgccattgcaagagcaaaacattatctttcgttgacttc

SEQ ID NO: 221619 - DNA, 416 bp, Gossypium hirsutum
cccacgcgtccgaaggtatcctcctcaagccaagtatggtcactcccggtgcggagtgcagggacagggctactcctcaacaagttgctgattacaccctcagcctcctccgccaaagaatccctccagctgtccctggaatcatgtttttgtctggtgggcagtctgaagttgaggctaccttgaacttgaatgcaatgaaccaagctccaaacccatggcatgtgtcattctcatatgcaagagcccttcaaaacacttgcctgaagaagtggggaggcaggcctgagaatgtgaaggatgctcaggaagcgctgctcatccgagcaaaggccaactctcttgctcaactcggaaagtacactggcgaaggagagtcagaggaggccaagcaaggaatgtttgtcaagggttat

SEQ ID NO: 221620 - DNA, 416 bp, Gossypium hirsutum
aaaaaaacccaaaattcaaatctacagaaaccatgtcgtgttttttacaggcgccagtggctcacacaatcctatcttcagcttcttcatgtcgaactgttcgaagaacaaaggctttgaagcttaggtgcggagctttgggtgccaaaaacgccgccaaaatccccatgcctccgataaaccctaaggacccttttctttcaaagcttgcctccgttgcctcttcttcccccgaagcgctacataatggctcggctaatcccgatacgccgccgtttttggacttgtttgagtcccccaagcttatggctactcctgctcaagtggaaagatcagtgtcatacaatgagcacaggccgagaagccctccaccggacttaccttcattgcttcttaatggtagaatagtttacatt

SEQ ID NO: 221621 - DNA, 403 bp, Gossypium hirsutum
gcccaggattgaagagataagattatagcgaaaaactaaacataataaagccccttcgactggcttcattgatttgccctctcaaagcccaagaaaaatggcttctgcttccgctactctcctcaagtcttcacctattatcgacaagtccgagtggattaagggccaaaacctccgccacccttcggtttgttttgtacggtcacaccctacatcggccgcctttgccgtccgtgctagttcatatgccgatgagcttgttaagaccgcgaaaactgttgcatctccaggtcgtggtattttggccatggatgaatcaaatgctacatgtgggaaacggcttgcctcgattggtctcgagaataccgaggcaaaccggcaagcttaccgtacccttctcgtg

SEQ ID NO: 221622 - DNA, 420 bp, Gossypium hirsutum
gccgaaccctcaatttttttctgcaaccagcggtacccaaagatgcaaatcttcgtcaaagccctaacggggaagaccataaccctagaggttgagtcttccgacaccatcgacaatgtcaaagccaagatccaagacaaggaaggcatccgacccgaccaacagcgccttatctttgccggcaagcagctcgaggacggccgcaccttagccgactacaacatccagaaggaatccaccctccatctcgtgctccgtcttaggggaggtgctaagaagagaaagaagaagacctacaccaagcccaagaagatcaagcacaagaagaagaaggtcaagctcgctgtgctacagttctacaaggtgctaagaagagaaagaagaagacctacaccaagcccaagaagatcaagcacaaga

SEQ ID NO: 221623 - DNA, 417 bp, Gossypium hirsutum
cccacgcgtccgcccacgcgtccgcccacgcgttcgtttagaaccttttcttgcacgagaaaatggattcttcactcactgatcagcagcaagacaagtaccgttcttacttgcatggagaaggtgaaaagaataccaactggaagcttggtgctcctccaaactatgacactgttaacaagctctttgaagaaggccgaaccaagatatggcctcctgcatcactagaagagaaggtccagaaccttgtgaagacatgggaaatggaaatgttcaataaaatatccttccctgactacaaatcagtgaaactacagaattatacagtcagcgtgaatgggaggaaacctttgagtttagaagagaagaggaagctgggaggaggctataattcctttatgcaaacctccttaccag

SEQ ID NO: 221624 - DNA, 416 bp, Gossypium hirsutum
cccacgcgtccgcccacgcgtccggacaggaatgtagttgcacagctagctagaaaagccgtgagggctggattgaaggcaatcgcccttacaggtgatactgcgagactgggacgcagagaagctgatatcaagaacaggttcactggaccaccatttttgacattgaacaactgtgaaggttcggaccttggcaagagggataaagctgatgactctggtcttgcttcgagtgcggccggacaaatcgatcgctccctatagctgtgaggatgtgaaatggcttcaaacaatcactacattgccaattcttgtgaagggtgtactcactgctgaagatgcaaggatagcggtagacgctggagcatccggaatcatggtgttcaaccaccgagctggccaactcgattatgttt

SEQ ID NO: 221625 - DNA, 285 bp, Gossypium hirsutum
ggcgggattacccgctgagtttaagcatatcaataagcggaggaaaagaaacttaccaggattcccctagtaacggcgagcgaaccgggaaaagcccagcttgagaatcggtcgccatcggcgtccgaattgtagtctggagaagcgtcctcagcgacggaccgggcccaagtcccctggaaaggggcgccggagagggtgagagccccgtcgtgcccggaccctgtcgcaccaagaggcgctgtctacgagtcgggttgtttgggaatgcaagcctaatcgggc

SEQ ID NO: 221626 - DNA, 398 bp, Gossypium hirsutum
ttcgatttttgtattaagagtcgccctttggtgtttttctaattcaatcagtgaggtgagagaaaaatgtcttgctgtggtggaaactgcggttgcggctccggttgcaagtgcggcggcggcggcggctgcggctgcggcggttgcaagatgtaccctgagatgaactttgctgagcaaaccacaactgagacacttgttcttggcgtggcaccccggaaagtgaactttgatggagctgaaatggaaactggggctgaaaatggctgcaaatgtggagataactgcacttgcaacccttgcaattgtaaatgaggggaaaaaaaaaaccgaagcatattatggaagctgatctaaataatatatgatgtatttgggtttttattattagaataaag

SEQ ID NO: 221627 - DNA, 402 bp, Gossypium hirsutum
gtttcgtgggccaaccccaaccttcagattcaggcaaaaggaaagggtgttggttttgcagatttctcaggcctacacaactcctctactagccttccctttgccaggaaaacctctgatgacttccattcactcgttgcttttcagacatctgctctaggaagcaataatggcgggtacaggaaagggatggcagaggcaaagctaaaggtggctataaatgggtttggtaggattggcaggaatttcttaagatgctggcatggccgtaaggactccccacttgatgtcattgccatcaatgacactggtggtgttaagcaggcttctcaccttctcaaatatgattccacccttggcatcttcgctgccgatgtcaagcctgttggcactgatggcatc

SEQ ID NO: 221628 - DNA, 388 bp, Gossypium hirsutum
cccacgcgtccgttttttttttttttttttttaagacaagaacaaagtggagattttatgacacaaaaatagaggatgcaaatccacttaaaacacaaaaggaaaacaacattcaattaagacacaaaggggggatttcctttgtttgtgcccaatatagatttttttcttcccttagagcttaatttcccatttagaaagctcctctcttgatagcatcgtcattagcatttccaagggcagcttcactcaaatatttgtcagccaattgaaccctcttcacattctcttgctcagcaacaagcatgtatccatattccaacagcttctcaatggtcatcttcggttgctcgaaagatggtggcccttccctcgagttcacgagctt

SEQ ID NO: 221629 - DNA, 400 bp, Gossypium hirsutum
gacgcttttctccccttctctgaaattcccttgctatcgttttctggaagaaaattttttgagatggcccgtacgaagcaaactgctcgtaagtctaccggcggcaaggctacaaggaagcaccttgccactaaggctgctcgcaagtcggcaccgacaaccggaggcgtgaagaagcctcaccgatatcgccctggaactgtagctctgcgtgaaatccggaagtaccagaaaagcactgaactcctcatcaggaaactgcctttgcaaaggctcgttcgtgaaattgcccaagactttaagaccgatctacgtttacagagccatgctgtattcgcgttgcaagacgcggcaaacgcataccttgttgggttgttcgaagataccaacctgtgcgcca

SEQ ID NO: 221630 - DNA, 415 bp, Gossypium hirsutum
cccacgcgtccgcagtgagactcttttgtatacctgtagcatatagtaatagtaagcagtgatagcaatggcctcctccatgatctcatcggcaaccattgccaccgtgaaccgctcctccccggcacaggccaacatggtggcccccttcaccggcctcaaatctgcctctgctttcccagtcaccaggaaggccaacaacgacatcacttctcttgcaagcaacggtgggagagtgcaatgcatgcaggtgtggccgcctcttgggaagaagaagttcgagactctctcatacctgcccgatcttactcccgtacagttggctaaggaagtagattaccttcttcgctctaaatggattccttgcttggaattcgaattagaggagggattcgtgcaccgtaagtactcgagc

SEQ ID NO: 221631 - DNA, 411 bp, Gossypium hirsutum
cttagattcatagcacttgtaaatttattattttttatttatttcttcttttggcgaaattcctatttgcaacaaagatgatagcttgcttgggtcgaatagtacacgacagcgacgccgagtcgaagctggacgacgacgtttccaccatattcaactctctcaatttacaaggcagcatcgaaaacggcgacgtttccggcatagccagtaaagatttcggcggtctttattcggttaagcccttgtatctaattagaccatcgggagccgaggatatatctcgggtcgttaaggccgccgccgggacgccccaccctgcggttgcggctaggggtaacggccactcaatcaacggtcaggctatggccgacggggggtacgtgatagacatgcgttccactggggaaa

SEQ ID NO: 221632 - DNA, 414 bp, Gossypium hirsutum
acccgtccgcccacgcgtccgcccacgcgtccgatgttgagatgaagggtatcacagctgaagatgtgaatgctgcattcaaaaaggcagctgaggggccattgaagggcgtattggatgtgtgtgatgttcctcttgtctcgggggactttaggtgctctgatgtttcctccaccattgactcttcattgaccatggtcatgggagatgacatggtcaaggtggtggcctgctatgacaatgaatggggttacagccaaagggttgttgatttggcacacttggtggcaagcaagtcgccaggcatgcctgcaggaggaagcagtgacccctcggaggatctctgcaagacacacccagctgatgaagaatgcagagtttacgaggcttaaatgatcgcaatcttcatttttt

SEQ ID NO: 221633 - DNA, 426 bp, Gossypium hirsutum
cagccgtccgatctcctccgccggagcttaattgcttcgccgttttttaccttctcgcagttcatttcccatggcggctggcttatccgccgccgtaccccttaaacctttcctttcatttcatccctcacccaagcaaaggctagttttcaaccctctacttcgcctcccacagctaacacacggtgctcgaaaggagacaaggctttccatttgtttcgtgttggaggaacaaaatgatgttgaaccccagaccttagtgaatctagtagaagaaggatccggttccgaggattttgggaacaaacagatcttaatacctccacatgtggcggagaaattagctagaaaaaaatccgaaaggttcacttacttggtcgctgctgtcatgtctagtttcggtatcacttccatggctatcatggc

SEQ ID NO: 221634 - DNA, 414 bp, Gossypium hirsutum
accaatgtcggtctcacttcaagctgcagctaccctgatgcaaccaatcaaggttgctgcaccatcaaggaccaatgtgctgctcaggtcctcccagagcgtttctaaggccttcggtttggagcctgttggtgctaggctcacctgctctttgcaaactgacctcaaggacttggctcagacgtgtgttgatgctaccaagctcgctggtttcgctcttgctacatctgctcttgttgtctcgggagcaagcgctgaaggagttccaaagcggctaacctacgatgaaatccaaagcaagacatacatggaagtcaaaggaacaggaactgctaaccagtgcccaaccatcgatggtggtgtcgactcttttgccttcaagcctggcaaatactacgccaagaagttctgctt

SEQ ID NO: 221635 - DNA, 332 bp, Gossypium hirsutum
atccattcaccgcttaatggctcgttcactttgccaaaccgtaatcaagctacgacgcggcaccaaaccttgcacatcttcctctcgtctcgtttcgttgcgaacccaatcgagccaacccaatcatttcgatcagtccgatgcttcttccgagtcttcctccgatccgctcctgcgaaaactcgaagacgccatccatcggatcattgttcgccgttcggcgcccgattggctccctttcctacccggatcctcttattgggtcccgcctcccacgtcgcaatcatacggccttgctcagattgttgagaaattggctaatactttgaccc

SEQ ID NO: 221636 - DNA, 404 bp, Gossypium hirsutum
ctcttcttcattttccaaagccaaaggccaataccctcctttcctctcttctcccctgcgctacaaggaaatggcaatttcatcaacagcagcagccactgccgcttcttctaagcttagatacccacacgcctcccctttcccaactcactcctcaaccaccacctctgcctttttctcctcaattccctctaaactaacccctacccacctctcctcttccttcctccctcctttcctcactaccgttgccaccacttacgtattccctcgccgtcgcgattctttcaccgtcaaagctgcccgtgggaaattcgaacgcaaaaagccccacgttaacatcgggaccatcggccatgtcgaccacggcaaaaccaccttaactgccgctctaactatggcct

SEQ ID NO: 221637 - DNA, 403 bp, Gossypium hirsutum
tgaagaaccgctttccggattagctttcaaaattatgaccgatccgtttgtgggatcccggacatttgtgagggtgtattcaggaaagctagctgcgggatcttatgttttgaatgctaacaaagggaagaaagagagaatcggtcgactattggaaatgcacgctaatagtctagaggacgttaaggttgcattgcccggcgatattgctgctcttgcaggtctaaaggatactataacaggtgaaactcttagcgaccctgaccatcctattgtacttgaacgaatggacttccccgatcccgtgattaaggttgctattgaacctaagactaaagctgatgtcgataaaatggctaatggtttgatcaagcttgctcaagaagacccttctttccacttc

SEQ ID NO: 221638 - DNA, 410 bp, Gossypium hirsutum
aaatcagttgcttcacaatggcctctacaaccatggctctttcttccccatcattcgccggtaaggcagtgaagttctccccttccacccctgaaatccggggaactggccgtgtttccatgaggaaaaccaccaagcctgttccttctggtagcccatggtacggtcctgaccgagttttgtacttgggtccactttccggtgagccaccatcttacttgaccggtgagttccctggtgactatggttgggacactgctggactctcagctgatcccgagacctttgctaggaaccgtgagctcgaagtcattcactgcagatgggccatgttgggagctcttgggtgtgttttccctgagctgttggctaggaacggtgtcaagttcggtgaagctgtatggttcaag

SEQ ID NO: 221639 - DNA, 414 bp, Gossypium hirsutum
cccacgcgtccgcttgactggtgttcaaggagctgtcaacgttcaaggagaggatcaaaagaagctcgacgttgtttctaatgaggtgttctctaactgcttgagatcaagtggaaggacagggattatagcatcagaggaagaagatgtgccagtggcagtggaagagagttactctgggaactatattgtggtatttgaccctcttgatggatcatccaacattgatgctgctgtttcaacaggttcaatttttgggatatacagtcccaacgatgaatgcctagcagaaatagatgatgattccactcttggttcagcagaacaaagatgtgttgtgaatgtgtgccaaccagggagtaatctattagctgctggatactgcatgtactcgagctctataatctttgtgct

SEQ ID NO: 221640 - DNA, 411 bp, Gossypium hirsutum
aaactcaaccataactcatattgtctactgtttggtagcaaaaaggcatagccaagccaagcagaggaaaacatgaactcatcgcccaatcctccacaaccccctccgccgcagtcttccacttccaccaccgccactgatggctccggcaagaaagtcaggaaaccttacaccattactaagtcgcgtgagagctggactgaagaagagcacgacaaattccttgaagctcttcaactgtttgatcgggactggaaaaaaattgaagattttgtcggttcaaagacagttatccagattcgaagtcatgcccagaaatactttctgaaggttcaaaagaatgggactattgcgcatgtgccgcctcctcgtcccaagcgcaaagctgcacacccttaccctcaaaaggcc

SEQ ID NO: 221641 - DNA, 388 bp, Gossypium hirsutum
cccacgcgtccgcccacgcgtccgtgaagttttctttctcgattttctatttagccaaacaagatgcagatcttcgttaagactctaaccggcaagacgatcactctcgaggtcgagagctccgatacgatcgacaacgtgaaggccaaaatccaagataaggaaggcatccctccagaccagcagcgtctgatcttcgccggaaaacagctcgaagacggccggaccttggccgattacaacatccaaaaggagtcaactctccacctcgtcctccgtctgcgcggtgggatgcaaatcttcgtgaaaaccttgactggcaagacaatcactctcgaggtcgagagctccgacacgatcgacaacgttaaagcgaagatccaagaca

SEQ ID NO: 221642 - DNA, 407 bp, Gossypium hirsutum
gtttaggcagttgcgggtttataagactcctgtacttggagacacccagatatcagatgctaaagaggactgcaaattatgaggtaaggaaatatgaaccattcatagtggtagaaacaattggagagaagctatcaggatcaaatggctttaatgctgttgctgggtatatatttggtaagaattcaacaacagagaagataccaatgactactcctgtgtttacccacgcacttgatcccgaactatccgatgtatccatccaaattgttctaccatctgagaaagatataagcagtctgccagatcctagtcaagaaacagttaagttgagaaaagtggaaggaggggttgctgcagcattgaagttcagtggaaaaccaacagaggatgttgttcgtgagaaa

SEQ ID NO: 221643 - DNA, 403 bp, Gossypium hirsutum
ctcgtatcttcactctcccaccccgaccgcttgattttgatcagacggtaatcatgccgatcagaaacatagccgttggccggcctgaagaagctactcacccagatgctcttaaagcagctttagctgagttcatatcaacgttaatcttcgtttttgctggatctggttcaggcatggcttttaataagctgaccgacggcggtgcaacaactccggctggtctcgttgccgcctctctagctcacggatttgcgcttttcgtcgctgtatccgtcggcgctaacatctccggtggccatgtcaatcccgccgttacattcggtgctttcgttggcgggaacattactcttttacgtggtatcctttattggattgctcaactccttggctcaaccgtcgc

SEQ ID NO: 221644 - DNA, 419 bp, Gossypium hirsutum
agccttccgcccacccgtccgttttttaatctaaacctgaaatcaaactagaaaagatcagagagagggtgagaggcaccttgtaattgacttgaaccaattctgattctctcttgcatactatcaaatggcagctactgcagcaatcaccactctcccccagttcagtgggttaagacccaaagtttctactgctccagttaggagcctggcagcagttcaaccaatgaggcgcaaggggaagggtgctctcggtgctcgatgtgatttcatcggatcccccacaaatttgataatggtgactacaacaaccctgatgctgtttgctgggaggtttgggttggctccatcagcaaacagaaaggccaccgctggattgaagcttgaagtaagggactcaggcttgcagactggtgacc

SEQ ID NO: 221645 - DNA, 289 bp, Gossypium hirsutum
gtgtgggataagtgggagctctcgttctaatttgaaataccactacttttagcgtgattttacttattccgtgaatcggaggcggggcacggcccctctttttggacccaaggccgccttcggccgtccgatctgatctgattacttcaccctgtgtttacttccttcacctcttttttctccacatcttcaccacaggtttttttttttttgggccctggtttcagttactttaaaccccgaaacatttttcactagttttttttcacaaaatattttaatttttttc

SEQ ID NO: 221646 - DNA, 434 bp, Gossypium hirsutum
gcggaccaagccgtccggttttggttctttctgttttgccttctctgcttttcactgaaacgttaaaacagactcgggaccctttgagttttcccctgttgttttctttcaattacttcaagctggcgatcgataatcaagaacccactgtccgtgaaatcaagcccaagaacagaagaatcatgggagctggtgggcctgatgaagaagacaacaggtggcctccatggctgaaacctttgttaagagagcatttctttgttcaatgcaagcttcatgctgattctcacaagagcgaatgcaatatgtactgcttagattgcatgaacggcgctctctgttctttctgcttagcttatcacaaggatcatcgttacattcagattaggaggtcttcataccatgatgtgataagggtatctgagatacagaaa

SEQ ID NO: 221647 - DNA, 421 bp, Gossypium hirsutum
agccttccgccaaaccaaaatccaaaaattaagccaattttcagtatttttttaactatggcttcaaatccgaaggttttcttcgacatgacgatcggaggtcaaccggccggccggatcgtgatggagcttttcgcagacgtcactcctcgtactgccgagaacttccgggcactctgtaccggtgagaaaggcgtcggtcgttccggtaaaccactccactacaaaggctctaagttccaccgcgtgatccctgatttcatgtgccaaggaggtgatttcacagccggaaacggaaccggaggtgaatcgatatacggatctaagttcgccgacgagaacttcatcaagaagcacaccggacccggcatactatccatggcgaaacgccgtccccgaacgaaatgatctcagttcttta

SEQ ID NO: 221648 - DNA, 408 bp, Gossypium hirsutum
  unsure (1)..(408): unsure at all n locations
cgttcaatatttggctctttgtttttgttttttggtttagagagatggatcatgcagcagatgctcataggactgatttgatgacaataacacgtttcgtgttgaacgagcaatccaagtatcctgagtctcgtggggatttcaccatcttgcttaatcacattgttcttgggtgcaaggttggttgctctgctgntaacaaggctggtcttgccaaactcatcggactcgctggggagactaatgttcagggtgaagaacaaaagaaattggatgtgctttcaaatgaagtctttgtcaaggctttagtaagcagtggcagaacatgcatccttgtcttagaagaagatgaagaggcgacttttgtagatccctcaaagcgtgggaggtactgtgttgtttttgatc

SEQ ID NO: 221649 - DNA, 401 bp, Gossypium hirsutum
agccttccgttgggtcttgggcttatctatcatttttgctttacagattgttttgaaaaacaccatctttcttgtgaattctgcaacctttggagtaacttaagaagaaatgggggaaaagagtttaattgccaaggatgtcaccgaattgatcggtaacacgccactggtatatctcaacaatgttgtagatggatgtgtggctaaaattgctgccaagttggaggcaatggaaccctgctccagtgtcaaggacaggattggatatagtatgattgcagatgcagaggagaagggtctcattgtaccaggcgagagtgtgctgatcgagccaactagtggtaataccggaatagggttggcattcatggcagctgctaagggttacagactcataatta

SEQ ID NO: 221650 - DNA, 416 bp, Gossypium hirsutum
ctcaaattcagataacaatttcacagttgttttcttcactctctctctcagccatggctgcagccatctccaccgtcgccgccgctgccgccgccaaccgagctctgggagtgtcagtcccaacctcagctttcatggggaagaaagtgagctcgagattcaacaacaccaggcaggttccttcgggaagttttaaggtgatggcggccgaaaaagagatagacgaagagacacagaccgaaaaggaccgatggaaagggttggcttacgatatttcggacgaccaacaagacattactcgagggaaagggatggtggattccttgttccaagctcccatgaatgatggaactcactatgctgtcatgagttcctatgaatacatcagccaaggtcttaaaacgtacaatttggac

SEQ ID NO: 221651 - DNA, 396 bp, Gossypium hirsutum
agccttccaaccggttcctaaatttctttaatcctaacttttttccccatcaaacacaccttcgattttgcgaaggttgtagaagatggcagaaggtgaggatattcagccacttgtttgtgacaatggaactggaatggttaaggctggatttgctggggatgatgctccccgagccgtattccctagcatcgttggtcggccacgtcacaccggtgtgatggttggcatgggccagaaagatgcatatgttggtgatgaagctcaatcaaagagaggtattttgactttgaaataccctattgagcatggtattgtgagcaactgggatgatatggaaaagatttggcatcataccttttataatgagcttcgtgttgccccggaagagcaccc

SEQ ID NO: 221652 - DNA, 186 bp, Gossypium hirsutum
  unsure (1)..(186): unsure at all n locations
ccgttccatgtaacggcacttgcacatgggttatttatcctaaagacgggggaagcccggggcacaccgtcagcgcgagcttcnaaaggaatcgggtaaaattcctgaaccgggacgcggctgctgacagcaacgttagggagtccatgtacctcttcaatttacacataacatttttatttttct

SEQ ID NO: 221653 - DNA, 404 bp, Gossypium hirsutum
caaaaatggccatggcaatggcgcttcgacgactctcctcttccattgacaagcctctgcgtcctttcttcaatgccccttccctctattacatgtcgtctttgccaaatgaagctgtgtacgagaaggagaaacctggcgtcacttggccaaagcaactgaatgctccacttgaaaccgttgatcctgaaattgctgacatcatcgaacttgaaaaagcgcgccaatggaagggacttgaactcattccatcggagaacttcacgtcggtgtcagtgatgcaagcagttgggtctatcatgaccaacaagtacagtgaagggtatcccggtgctagatactatggagggaatgagtacatcgacatggcagagatattgtgtcagaagcgtgctctggaagca

SEQ ID NO: 221654 - DNA, 201 bp, Gossypium hirsutum
gacaccatagcgcttttatatagtgacataaatataatatactgggcgcggttttacaccgcgttgactgtgaaaacactgtcgtgacccaacttaatatcctcgcagaacatatccctttctccagatgtcgtaatatcgaaaaggggcgcacagatcgcgcttttcaacacatgcgcacactgtatgtggaatgtgaca

SEQ ID NO: 221655 - DNA, 400 bp, Gossypium hirsutum
gaaaaagtctctgacacttgcaacacaataaactacacataaaatctgtgcctgccctttgctctgcacacctcgggatatcagtttcaactccactcatcccacgggttgagtaccgagtccatatattggtaagttcaaggaaggaacttgggcatcatgggtcttaaggcattagactatgagacaatgaatgaaaacgtgaagaaagttcaatatgcagttagaggtgagttgtatcttcgagcttctgagcttcagaaggaagggaagaagattattttcacaaatgttggcaatcctcatgctcttggacagaagccactgactttccctcgtcaggtggttgctttgtgccaagctccatttctgctagatgatcctaatgtaggacttatat

SEQ ID NO: 221656 - DNA, 413 bp, Gossypium hirsutum
  unsure (1)..(413): unsure at all n locations
aagataagagaaggcactgaaaacgcaaaaccatggcctctgcttctctcctcaagacttcaccagttttagacaagtctgagtgggttaagggtcacacccttcgccaaccttccacttctgcggtgaggtgccaccctgttgcaccctctggactaactgtgcgtgcaagctcatatgccgatgagcttgtcaagactgctaaagctattgcttctcctggccgtggaattttggccatggatgagtccaacgctacctgtgggaaacgtttggcctcaatcgggctagaaaacacagaggctaaccgccaagcctacaggacgttgcttgtttcagctcctggccttggtcagtacatctctggtgccatcctctntgaggaaaccctctatcaaaccacaattgatggc

SEQ ID NO: 221657 - DNA, 297 bp, Gossypium hirsutum
acccgggccggaccacacgcgtccggagggaccgcttctctcttctcttcctcctctttatctccgtcgttgcttcggccgtcggcgccgacgttaatagcgatgacgatcctctcatccgtcaagttgtttccgatggtggtgtcgaggaggactccgatgaccatctccttaatgcggagcaccacttcacgctgttcaaatccaagtatgggaaaacctacgcatcccaggaggagcacgattaccgactggtagtcttcatggctaacctgcgtcggtccaagcgtcatcagg

SEQ ID NO: 221658 - DNA, 418 bp, Gossypium hirsutum
gacgaccacgcgtttcatccgactcgaaatatggattattgaaaaaaaaagtagaacatgtattgggatatttcctttcaactacaacaatattctagtatttatttgatatgacatgaatagttgaagggaattccccgaagagaaaatggattatgggagtaacaaaaaaaacctgacttgaacgatcctgtattaagagctaaattagctaaaggtatgggtcataattattatggggaacccgcatggcccaatgatcttttatatatttttccagtagtaattctcggtactattgcttgtaacgtgggcttagcggttctagaaccttcaatgattggtgaacccgcggatccatttgcaactcctttggaaatattacctgaatggtatttctttcctgtatttcaaatac

SEQ ID NO: 221659 - DNA, 411 bp, Gossypium hirsutum
gtttgtttgttttctggtgctttctttctctatcctgaaaccacagccgtaaccatgtcgtccttgctagccaacggtatttccagcttctcaccacagcctacttccgattcaaccaagttccttaaagggttcttcccaaagctcgattccgtcaaacccataaccccaaaactccaaagttcaaggcttttgaaggtcagagcagatgttggtttcgatcctcaaaccctcacgtcagatcccagctcttcatcaggtaaatcctacgatgacaaaatccaggaaattcttcgaaaccgtgattatgataaaaagtttggctttacgatggatatcgattcttttgcgatacccaaagggctttctacagaaacaattcgtttaatttcttctttaaaggaagaacct

SEQ ID NO: 221660 - DNA, 418 bp, Gossypium hirsutum
  unsure (1)..(418): unsure at all n locations
caagaagcgagctttgcacctgcaggaaaacattcacaaagataaagctgaattccaagaagcaaagatgttgagcgtctcaattgcgtccccagctaccttaactctccctccaaaacccaaatcctcaattcccaaaacttccttcaccggcgttagaatccagcacttatgtccccaacggttgccttctcaggcgacctgcttttggcaaccgtcaccttcgtcctccgtggtcatgatggctaagagagaagaagaaatgaaggaaataagagccaaaaccactgaggaaatcaacgatgaagtggttgaattaaaaggtgagcttttgatgcttcgtctccagaaatcggttcgtaatgagttcaagtctagcgagtttgggcgaatgcgccaaaggatngctcgcatgctt

SEQ ID NO: 221661 - DNA, 424 bp, Gossypium hirsutum
  unsure (1)..(424): unsure at all n locations
ggaaagcaaagcaaacgaaactcctctcnctcatctcactccttacccaaaacaacgggggctttcaccttgtttaaatttttttcctctcttcgtccaagatgccggctgctagcacaaatatgtctgaccgagagggagaatcatttgttgaggttgatcccactggtcgctttgggcgctataatgatttgcttggtgcgggtgcagtaaagaaggtttacagggcatttgatcaggaggaaggtatagaggtggcctggaatcaagtgaaattgactaacttcagtgaagacctgtgcttatcaataggcttcaatccgaggtacagttgctgagaacgttgaaaaacaagtatatcattgtttgctacagtgtctggagggatcgagaacataacacattaaattttatcactgaggtc

SEQ ID NO: 221662 - DNA, 426 bp, Gossypium hirsutum
ggcgggtacaggaaagggatggcagaggcaaattttaaggtggctataaatgggtttggtaggattggcaggaatttcttaagatgctggcatggccgtaaggactccccacttgatgtcattgccatcaatgacactggtggtgttaagcaggcttctcaccttctcaaatatgattccacccttggcatcttcgctgccgatgtcaagcctgttggcactgatggcatctctgttgatggcaaggttatcaaggttgtttctgaccgcaaccctgccaacctcccatggggggaccaggaatagatctagtcatcgaaagaaccggtgtgtttgtcgatagagaaggtgcaggtaagcacattcaagcaggagccaagaaagtgctgattactgccccaggtaagggtgacatccccacctatt

SEQ ID NO: 221663 - DNA, 344 bp, Gossypium hirsutum
ctccttgtaaggcgtttgctccaccacgtttgtttccttgtggtaagaaagttattacagccagatgttctgataggaagtcggttcttacttgtggtcagcggtgtggtaaacttcttgagtgtgggcgccatcagtgtgaacgtatttgccatatcggagcttgtgatccttgcaaggttctaattaatgccccctgtttctgcaagaaaaaggttgaagttgtcatctgcggtgacatggttgtgaagggaaaggtgaaagcagaagatggcattttttctatgtgtttaacatgctaatgaagtttaaatggtgtaaccattactgtgcttaaatattgc

SEQ ID NO: 221664 - DNA, 338 bp, Gossypium hirsutum
cccacgcgtccgtgatcttccgttctcgttattgctgggtcttgttcttcgtgtgccggagtgattaagcaaggctccgtcgatcaatccgacggtaatttccttgatgatgaccagattgctgcaggttttgtcctcacttgtgttgcttaccctcagagtgatgttgttattgagacccacaaggaggaacagcttaccgcttgattatatatgattctatataatataatcatcaactagaccaatatttaatcatctttctcctgtctagatgatttatgtgtgttatattggtcggagggattaatttcatgtacttgtttgagggaagccat

SEQ ID NO: 221665 - DNA, 420 bp, Gossypium hirsutum
cccacgcgttcgcccacgcgtccggtgagactcttttgtatacctgtagcatatagtaatggtaagcagtaatagcaatggcctcctccatgatctcatcggcaaccattgccaccgtgaaccgctcctccccggcacaggccaacatggtggcccccttcaccggcctcaaatctgcctctgctttcccagtcaccaggaaggccaacaacgacatcacttctcttgcaagcaacggtgggagagtgcaatgcatgcaggtgtggccgcctcttgggaagaagaagttcgagacttctcatacctgcccgatcttactcccgtacagttggctaaggaagtagattaccttcttcgctctaaatggattccttgcttggaattcgaattagaggagggattcgtgcaccgtaagtactc

SEQ ID NO: 221666 - DNA, 427 bp, Gossypium hirsutum
cccacgcgtccgttagcattagcactagcactttttgcaaccatggcctccgccgcatgtggcgggcaccaccacgcactcacaaccaatggcagatcatcatcattatcgccgtcgctgcgccaggtttcaaacatgaagcctacccagcaggtggtgtgcaaggctcaaaagcaggaagatgatggaagccttgtgtcccgtaggttggctctcactgtactcattggtgctgccgctgttggctctaaggtttctcctgctgatgctgcctatggtgaagctgcaaatgtatttggaagccaaaaacagacacagacttcatgccatacagtggggatggattcaagctctcgataccatcgaaatggaacccaagcaaagaggtggagttcccaggtcaagtgctgaggtacgaggacaactt

SEQ ID NO: 221667 - DNA, 417 bp, Gossypium hirsutum
cggacgcgtgggcggacgcgtgggaaatttttgtgaaacttatctcgacctcaaagggggccctcccgaaaccgctagagccgtcgttcaccgagcaatcatcactgacttacaaaacaagcgtcgtggcacagcttctacactcactcgtggtgaagtccgtggtggaggaaaaaagccttaccctcaaaagaaaaccggacgtgctcgccgtgggtctacgcgcaccccgctccgtcccggtggtggtgttatcttcggacccaaacccagagactggtcggtttagatcaataaaaaagagaaaaggttggcgatttcgacggcgttatccagtgcggctgagaacacgatagttgttgaagattttggggataaatttgagaaaccgaaaactaaagagtttattgacgcttt

SEQ ID NO: 221668 - DNA, 418 bp, Gossypium hirsutum
aacttgagtagggttccccttttccaaattcttatctgtgttcagcgatggcggttgctgtggcagtaacaggtggaggtgggcaatacaatggtaggatgacctggttcgttgttctgtcatgtatgatggctgccatgggaggcgtcatctttggctatgatattgggatttcaggtggagtgacatctatggagccatttctcaagaagttcttcccagaagtatatagaaagatgaaggtggacaccaaaatcagtaactactgcaaatttgatagccaactgttaactcatttacatcttcactatacatagctgggctagtcgctacgttcttcgcctcatcagttacaaaagttttcggtcgtaagccgtcaatcttgacaggaggtgctgcattccttgctggttcagcc

SEQ ID NO: 221669 - DNA, 363 bp, Gossypium hirsutum
agactcttttgtataactgtagcatatattactagtaagcagtaatagcaatggcctccgccatgatctcatcggcaaccattgccaccgtgaactgctcctccccggcacaggccaacatggtggcccccttcaccggcctcaagtctgcctctgctttcccagtcactaggaaggccaacaacgacatcacttctcttgcaagcaatggtgggagagtgcaatgcatgcaggtgtggcctcctcttgggaagaagaagttcgagacactctcatacctccccgatcttaccccgtacagttggctaaagaagtagattaccttcttcgctctaaatggattccttgcttggaattcgaatt

SEQ ID NO: 221670 - DNA, 235 bp, Gossypium hirsutum
gagagcagcaaccatggatctaatcaaagatgcctgtgagaattggggcttctttgaggcgttgaaccatgggatttcctatgaatttctggacagagtggaaagcttgacgaaagaacatgtccagaaatgcatggtgcaaaggtttaaggaactggaagcaagcaaggcccttggggtctacaagctgaaggtactgatattgactgggaaagaaccctctatttgcgccatc

SEQ ID NO: 221671 - DNA, 433 bp, Gossypium hirsutum
acgcgtccgggcaaaaccagtttcaattgaagtgtggaactttattgggaaatacagagttattagcacgaaacctatgcctggaactcgatggatcaacctcttaatcgagcaagattgccgtgtcgaaatatgtactgagaagaaaacaattttgtccgttgaggatatcatttctttgattggcaataagtgcgatggggtgattggacagttgactgaagactggggggagactttatttgcagctttaagcagagcaggaggcaaagcatttagtaacatggctgttggttacaacaatgttatgttaatgctgccaacaagtatggtgttgctgttggtaacactcctggtgtactcacagaaacaacggcagagctagcggcttctctttctttggcagctgctaaaagaattgttgaagcagatg

SEQ ID NO: 221672 - DNA, 419 bp, Gossypium hirsutum
cccacgcgtccgcccacgcgtccgcccattttttcggccaatggaagggacttgaactcggtccatcggagaacttcacgtcggtgtcagtgatgcaagcagttgggtctatcatgaccaacaagtacagtgaagggtatcccggtgctagatactatggagggaatgagtacatcgacatggcagagatattgtgtcagaagcgtgctctggaagcattcaggttagatcctgaaaaatggggagtgaatgtgcagcccctttctggttctccttccaattttcaagtttacctgcactcttaaagcctcatgacagaattatggcacttgatcttccccatggtggtcatctctctcatggttatcagacggacaccaaaaagatatctgctgtgtccatattttttgagacaatgc

SEQ ID NO: 221673 - DNA, 419 bp, Gossypium hirsutum
ttcaattacttcaagctggcgatcgataatctttaacccactgtccgtgaaatcaagccgaagaacagaagaatcatgggagctggtgggcctgatgaagaagacaacaggtggcctccatggctgaaacctttgttaagagagcatttctttgttcaatgcaagcttcatgctgattctcacaagagcgaatgcaatatgtactgcttagattgcatgaacggcgctctctgttctttctgcttagcttatcacaaggatcatcgttacattcagattaggaggtcttcatacatgatgtgataagggtatctgagatacagaaatacctggacatatctggaatccagacttatgttatcaacagtgctaaggttgttttcatcaatgagaggcctcagccaaggcctggaaaaggt

SEQ ID NO: 221674 - DNA, 428 bp, Gossypium hirsutum
agccttccgattttttcccttgaagttccttggcagttatgttttggcaagagtggcatgttctgcccataacaggcgtttctggtgaaaccaacgaggacccatatggtcaaaaacgaaaagggaatgaggatcacatgccaggccactagcatccctgctgatagagtgccagacatgggcaagaggcagctcatgaatctgcttctgttgggggctatttcactcccctcaggtttcatgttggttccttatgcagccttctttgtcccatctgggggacggggtaccggtggtggcaccgtgccaaggacgcaatcggaaacgatgtaattgctgaagaatggctcaagactcatggccctggggaccgtaccctgactcaaggattgaagggagacccaacctacctagtcgtagagaaagac

SEQ ID NO: 221675 - DNA, 423 bp, Gossypium hirsutum
cccacgcgtccgcttaacaaaaaaaaaaaaaaactgtctcagatctgaggtgccgttgctgatttgttcatcagcttgattgaatctgacgcctattatcgtcgccggcaccgatctgttgctttaaaaagaaatggagaatttaatttctcttgtgaacaagattcaaagagcttgcaccgctcttggtgaccatggagaagcaagtgcattgccgactctttgggactcattacctgcgattgccgtcgtcggcggtcagagttcagggaaatcttcggtgctcgaaagcattgcggcaaagattttttaccccgtggatcaggaattgttacccggagacctctggtgttgcagcttcataagactgatgaaggaagcagagaatacgctgaatttcttcaccttccaagaaaaagattc

SEQ ID NO: 221676 - DNA, 418 bp, Gossypium hirsutum
  unsure (1)..(418): unsure at all n locations
gggattatcaatttgaagccttcttcgattttcctctttcaagatgcaaattttcgtcaagacccttactggcaagaccatcacccttgaggtggaaagttctgataccatcgacaatgtaaagaccaagatccaagacaaggaagggatcccaccagaccaacagaggcttatctttgctggtaaacagctggaggatggccgtacccttgctgactacaacatccagaaggaatccacactccatttggtcctccgattgaggggtggtatgcaaatttttgtcaagaccctaccgggaagaccatcacccttgaggtggaaagttctgataccatcgacaatgtaaaggccaagatccaagacaaagaagggatcccaccagaccagcagaggcttatctntgctggtaaacagc

SEQ ID NO: 221677 - DNA, 419 bp, Gossypium hirsutum
cccacgcgtccggaaggccaacattgaagagataagattatggtgaaaaactaaacataataaagtccctcataacattcttcgacttgcttcattgattagcccaaagataaacataaccaaaaagaaaaatggcttctgcttccgctactctcctcaagtcttcacctattatcgacaagtccgagtggattaagggccaaaacctccgccacccttcggtttgttttgtacggtcacaccctacatcggccgcctttaccgtccgtgctagttcatatgccgatgagcttttaagaccgcgaaaactgttgcatctccaggtcgtggtattttggccatggatgaatcaaatgctacatgtgggaagcggcttgcctcgattggtctcgagaataccgaggcaaaccggcaagctt

SEQ ID NO: 221678 - DNA, 396 bp, Gossypium hirsutum
  unsure (1)..(396): unsure at all n locations
gaattccctggatgataggccaagatgtgtaattagtcatgttaggcaccggcagacgccgcctanacagatgcttagacagtttgaaaataacatcgtgacaaagtaagaggatgggtagggttttccgtaaagacagctaccgtataacagccgggctgatattttactatgccataagatttgaaccctgcggtctaaaccaactatatgctatgaactatggaacaataccggttgtccatgcagtcngtggactgagagacacagtgcagcagttcaatcgttaagagttggggtcggtggcatttgacagtgcggatgcaagaagttgatacatgcataggtaactgtttgtgcatatcggagttaaaacaattgggaagggttgaaata

SEQ ID NO: 221679 - DNA, 422 bp, Gossypium hirsutum
caaggcacaaaatttgacccaaaatggcctctgtttgtgcttcttcggctattgcagctggtgccatctcatcccccagttcccagaagactggatcagtagtggggacaacaaaggcttctttccttacagggaagaaacttagatctgtgagaaagtacacaaaaccagctgccggaccaacatttccagtgtgcgccgccgccgaccccgacagacccctttggttcccaggcagcactcctcctccatggctggatggcagtctccctggtgactttggtttcgatcctctggtcttgggtctgaccctgagacattgagatggaacgtacaagcagagctggttcactgcagatgggcaatgttgggagctgctggtattttcatcccagagttcttaaccaagattgggattttaa

SEQ ID NO: 221680 - DNA, 419 bp, Gossypium hirsutum
ttcatttcaaagattctctcaaaacagtgagggtgttgtagttcgagttatcgacgacgggtggtttcaacacgaaaaaaaatggataacttttacgcaccagggaagaaccatctcttcgttccgggtccggttaacataccggaacccgttattcgagccatgaaccggaacaacgaggattaccgttccccggctattccggcgatgacaaaaacccttctcgaagatgtcaagaagatattcaagactacgaccgggactccttttatgatcccaacaacaggaaccggtgatgggagagtgcacttactaatacgttatcccccggtgaccgaatcgtatcgttcctcattggacaattcagtcttctttggatcgatcaacaacaacgtctcaaattcaacgtcgacgttgtc

SEQ ID NO: 221681 - DNA, 422 bp, Gossypium hirsutum
cccacgcgtccggaaaaactaaacataataaagtttctcataacattcttcgacttgctgcagtgattagcccaaagataaacataaccaaaaagaaaaatggcttctgcttccgctactctcctcaagtcttcacctattatcgacaagtccgagtggattaagggccaaaacctccgccacccttcggtttgttttgtacggtcacaccctacatcggccgcctttaccgtccgtgctagttcatatgccgatgagcttgttaagaccgcgaaaactgttgcatctccaggtcgggtattttggccatggatgaatcaaatgctacatgtgggaagcggcttgcctcgattggtctcgagaataccgaggcaaaccggcaagcttaccgtacccttctcgtgtctgcccctggcctcggt

SEQ ID NO: 221682 - DNA, 445 bp, Gossypium hirsutum
aaaacaggcgggacccacgcgtccgaaaagcagctcccaagaaagtctcgaaacgatctcttgaccgccctctatggtacccaggagcagtggcgcctgattggctcgatggaagtttggtgggtgattacgggttcgacccgttcgggttagggaaaccggcggagtacttgcaatatgatttggattctttggaccagaacctggctaagaattcggctggtgagataattggaactaggaccgaggttgccgacgtgaaggcgacgccgtttcagccttacagcgaggtttttggtctacagaggtttagggagtgtgattgatccatggacggtgggccatgttggctacgcttggtgcacttaccgttgaatggctcactggtgttacatggcaagatgctggcaaggtggagttagttgagggttcatcgtatctcggc

SEQ ID NO: 221683 - DNA, 425 bp, Gossypium hirsutum
aaaaagatcaaataattctctgtttcgatggttttagagaactgaagaagaaccaatggggggttaatataaaaaatctgaaaatttataaaacaacaataaagataaaaggaaaaaacgggtggtgatttgagtttgatttgcagttagccaaagcaaagcgatgacacttcaagcaacttcctgcaactttggagccatttcatctctgcttcgtcctcctaaaatttcccgtcatcgtttcgtgatcagagctgaagtggaaccgtcagagaaatctgtggaaatcatgaggaaatctcagaacaatatgcacgtcgctcaggaacctatttctgtatggataagggagttacttctgttgtaatcaagggattggcggagcataaagattcgttgggtgcgccactttgcccttgtaggca

SEQ ID NO: 221684 - DNA, 391 bp, Gossypium hirsutum
cccacgcgtccgcccacgcgtccgatttgtggtaagcgctccggagaatccgagagacgcccgcgatgatccgaaccaaaggagaagcggggaccgggaatgttatcgaagctgttaggcatgtcagatccgtgatgggggatattagggcccttaggaacatggatgatgatgaggttttcagcttcgctaagaaaatccagtctccctacgatttggttatgcaaacgaagcagctggggaggttgccagtggttcagttcgccgccggaggagtggccacaccggcagatcggcgttgatgatgcagttgggttgtgacggagtgtttgtcggatctggggtttttaagagtggtgacctcgtttagctgtcccgagctatttgttag

SEQ ID NO: 221685 - DNA, 380 bp, Gossypium hirsutum
cggcacttgcacatgggttagtcgatcctattatacgggggaagcccgtccgacagcgcgtccagcgcgagcttcgaaagggaatcgggttaaaattcctgaaccgggacgcggcggctgacggcaacgttagggagtccggagacgtcggcgggggcctcgggaagagttatcttttctgtttaacggcctgcccaccctggaaacggctcatccggaggtagggtccagcggccggaagagcaccgcacgtcgcgtggtgtccggtgcgcccccggcggcccttgaaaatacgaggaccgagtgccgtccgcgcccggtcgtactcataaccggatcaggtcttcaaggtgaacagcctttggtcaatggaacaatgt

SEQ ID NO: 221686 - DNA, 416 bp, Gossypium hirsutum
gccacgcgtacggagaaaacggaggcattatttgtttctgaagggctcgactttagcaggctgaaaaagaagaagaagaaaccagtagaggccaatacattcactgacgaaagtggggatgcaggagatgattttgatggtcatattgatggggatgaagaaggtgaaggcattgtgttgcgacaaccgtgcccttgagatggaactgaccgtgattatatatatgatgagctactcggccggctgttcaacattctccgggagaacaaccctgagcttgctggacacagacgctcactgttatgaggcctccacaagttcttcgtgggggcaccaagaaaactgtatttgtaaatttcatggatctatgcaagacaatgcatggacaacctgaccatgtgatggccttcttgctt

SEQ ID NO: 221687 - DNA, 420 bp, Gossypium hirsutum
gttcgttcctttcctttcctttccttttctctctctctagcaatggagtcgcgatggttagcacgcgcttctgttatcaccggcttacctcagctcaggccgaagctttcgccggggattgtcaacgtttcgtatgcttcggctaagccgatcggagccgtcggtgaaggcgggaacgtcatatggcggaggcaactaaggccctccttgctactcgaatgctcgtcggttagcaagcgagaggttctgaaaccggtttcggctgccgcgtcgtcaccggccgagggaggaagcgttccgccggggaggggaagatcgctccggttggattcttcgagaagtatcctgctcttgttaccggatttttcttcttcatgtggtacttcttgaatgtaatattcaacattctcaacaagaaga

SEQ ID NO: 221688 - DNA, 426 bp, Gossypium hirsutum
cccacgcgtccgcaagtttgttgtaaactaagctagaaccagcagccaacatggccgcagtagcagcctccaccgctgccgcctcccttggcgtctctgaaatgctcggtaaccctctgaatttcagtggtggagctaggtcatcggctccaacaccatccaactcatccattttcaagaccgttgctcttttctccaagaagaaggccgctcctccaaagcccaaggctgctgctgtcgccccggccgatgaagagctggctaagtggtacggtccggacagaaggattttcttgccgaaggtctgttagacagatcggagatcccagagtacttgaacggagaagttcccggagactatggatacgatccgtttggtctgagcaagaagccagaagactttgcaaaatatcaagcatatgagtt

SEQ ID NO: 221689 - DNA, 413 bp, Gossypium hirsutum
atctacagttcacttctgcttctgcctgcctgtctttaatggcttactacaaactctgagcccgctttctgctctacactcttcttttccactcaacattcaccactgcttgcaattcatgcaaacccaaacctccaccatgccctccaccagcaacccctgcttattgccctaaggacacattgaagctcggtgtttgcgctgacgtgcttggacttgtcaacgtgattgtcggaacccctccttacagcaaatgctgtgctttgcttcaagggttggctgatttggaagctgcctttgcctttgcactgccattaaagccaatgtacttggaatcaacctcaacatcccagtttctcttagtctaatccttagtgcatgtcagaaggaggttcctccaggcttcaaatgtg

SEQ ID NO: 221690 - DNA, 396 bp, Gossypium hirsutum
cgccacccagctgctgcaaatctctctcgaaacatttcctccggttccaacttcagctcaggaatatgtcaggggaagaagttgcggttgcccaacccgaggcggcgcctgcactcggtgagccaatggacatcaacacagccttgccccttgtggttaggaagtcacgagctcacggtgggctcgcacggggattacatgaagctgctaaggcaattgaaaagcacaatgcacatctttgcgttatagctgatgactgtgaccagccggattatgttaagctggtcaaggcactttggctgatcataatgttaaagtgctacgtgccccgagcgcaaaatcacttggcgagtgggctggtttgtgtaagatagactctgagggtaaagcacgaaa

SEQ ID NO: 221691 - DNA, 428 bp, Gossypium hirsutum
atgactggtcaggctatcttgctgttgctgatttggttcagaaagcacgtctgaagcttgaccgcgtcgctctgcttccacgcttcgagtcaaccgaaaattccgcttcccaagtgggtaacgaagattggcgaatcccaatcaagtatcttctttgcggatcgttcaggacagcattatcagcaatgtctatcactggctgttgatgatcttgcagttcttgatggaaagactccggttcaagtctaccagggcttttgcgagagctttaagtccacattctcacctttcatgggttctccatcacgggcatctcaatgggtcttggaccagatggtgaactccggtatccctcacaccacaagcctgccaagagtggcacgattactggagtcggggagttccaatgttatgacacaaacatgctt

SEQ ID NO: 221692 - DNA, 399 bp, Gossypium hirsutum
cccacgcgtccgaaatcagttgcttcacatttttctctacaaccatggctctttctgcgcggatcattcgccggtaaggcagtgaagttctccccttccacccctgaaatccggggaactggccgtgtttccatgaggaaaaccaccaagcctgttccttctggtagcccatggtacggtcctgaccgagttttgtacttgggtccactttccggtgagccaccatcttacttgaccggtgagttccctggtgactatggttgggacactgctggactctcagctgatcccgagcctttgctaggaaccgtgagctcgaagtcattcactgcagatgggccatgttgggagctcttgggtgtgttttccctgagctgttggctaggaacggtgtcaagt

SEQ ID NO: 221693 - DNA, 397 bp, Gossypium hirsutum
cccacgcgtccggaaacagaatttgtaactggttttcctcttgcctagcgggcaaggatggcggtccgtggaaaagatgattcattcggatccgcatgaaagcccaactccattgcattgccagaatccatgttgtatatttgaaagaagttgacctccttgcttctctcatggtacaatcctcttcccgctgagccccctttctcctcggtccacagagacaaaatggaatgtaggactaggactggcgccaacagttaatcacggaagaaaggactcactgagccgggatcactactaatactaatctaatctaactaatactaatctaatactaatagaatactaatctaatactctaatactaatagaatagaaaaaatagaatagaaaatac

SEQ ID NO: 221694 - DNA, 418 bp, Gossypium hirsutum
aaaatcagttgcttcacaatggcctctacaaccatggctctttcttccccatcatgcgccggtaaggcagtgaagttctccccttccacccctgaaatccggggaactggccgtgtttccatgaggaaaaccaccaagcctgttccttctggtagcccatggtacggtcctgaccgagttttgtacttgggtccactttccggtgagccaccatcttacttgaccggtgagttccctggtgactatggttgggacactgctggactctcagctgatcccgagacctttgctaggaacgtgagctcgaagtcattcactgcagatgggccatgttgggagctcttgggtgtgttttccctgagctgttggctaggaacggtgtcaagttcggtgaagctgtatggttcaaggccgggtc

SEQ ID NO: 221695 - DNA, 388 bp, Gossypium hirsutum
  unsure (1)..(388): unsure at all n locations
acccttccgtaaaaactaaaacaaactttttagttctcaactttttcaaattcaccatggctgacaagcggggaaactggcaatgcgctgacaggagccagtgtgtgaaaaaaggaaacagcttggtcattgagactggagagagctacatcaacaccctagtggtcgagcctcttgcagaaaacgattgcaagtgcaagtgcggaactagctgcaactgcacaaactgcacatgtggcagtcactaagcagacatatagaatgatgaagtttgggacctaaaaagaataaaagttgggttgaatatttgtgtcttttggtgtaagttgagtgtgttttcttgtctatcntgccgatgattgtctatgtctctcattttatacaatga

SEQ ID NO: 221696 - DNA, 408 bp, Gossypium hirsutum
catcatcactcatggctatcgaggcttggtttttggatgaaagcaaagaagaccaaacgctgcctcatcgacgcaaccccaacgaacctgtttcgttggagcacttggcagagctgggagtgttgtattggcatttgaaccccgaggattatgagaacgatgaagagttgaagaagattagagaagccagaggttataattacatggatttgcttgatttatgccctgagaaagttgccaactatgaggagaaactgaggaacttttacaccgagcacatccatgccgaccaaggatacgctactgcttggaaggcagcgggtattttgatgttagggacaaggatgaccggtggattcggatttggatcaaaggaggtgatcttattatattgcctgctggaatcta

SEQ ID NO: 221697 - DNA, 382 bp, Gossypium hirsutum
gtgagactcttttgtatacctgtagcatattgttatagtaagcagtaatagcaatgggcggctccatgatctcatcggcaaccattgccaccgtgaaccgctcctccccggcacaggccaacatggtggcccccttcaccggcctcaaatctgcctctgctttcccagtcaccaggaaggccaacaacgacatcacttctcttgcaagcaacggtgggagagtgcaatgcatgcaggtgtggccgcctcttgggaagaagaagttcgagactctctcatacctgcccgatcttatcccgtacagttggctaaggaagtagattaccttcttcgctctaaatggattccttgcttggaattcgaattagaagagggattcgtg

SEQ ID NO: 221698 - DNA, 418 bp, Gossypium hirsutum
gttccatgtgaacggcacttgcacatgggtttttcgatcctaagagacgggggaagccggtgcgacagcgcgtacagcgcgagcttcgaaagggaatcgggttaaaattcctgaaccgggacgcggcggctgacggcaacgttagggagtccggagacgtaggcgggggcctcgggaagagttatcttttctgtttaacggcctgcccaccctggaaacggctcagccggaggtagggtccagcggccggaagagcaccgcacgtcgcgtggtgtacggtgcgcccccagccgccttgaaaattctgaggaccgagtgccgttcgcgcccggtcgtactcataaccgtatcatgtcttcaaggtgaacagcctgtggtcaattgaacaatgtacgcaagggaagtcggcaaaattgat

SEQ ID NO: 221699 - DNA, 420 bp, Gossypium hirsutum
ctcttattggataaataaagaagagaagtagtttcaaagatgattcagctcagtattaagagggttcctactgttgtttcgaattatcaaaaggatgaggcggaagagactgctcgccggagcggtggatgtgggaaagaattgccttagaaactgttgcatttcaggagcaaagcttcctttatatgctttcaagaaggagagtgaaaaagatgcatttgaaagtgataacaaagagcctccggttgcttttcttgattctctcgttcttggggagtgggaggatcgcatgcaaagaggctctttcgatatgatgttactgcctgtgaaaccaaggtgattcctggtgaatatggctttattgctcagctgaacgagggccgccaccttaagaagaggccaactgagttccgtgtagat

SEQ ID NO: 221700 - DNA, 326 bp, Gossypium hirsutum
tcgacggcttccatcaacggttggtgccttacctcctcttcttcctccaccaccacctccgctttttccgctcgtcgacgacctacattgcggccttcggtcgtcgctagccttaactcttctccttctcctccgactcttatccaagaccgcccggttttcgctgcccctgttcctttgctcaccccgagagaagagatgggaaacaagtcctacgacgaagccattgaagctctcaagaaacttctcagtgagaaaggagaacttgaagctgtagcacctgcaagggtagatcaaatacagcagagttaaacacaacatcagct

SEQ ID NO: 221701 - DNA, 412 bp, Gossypium hirsutum
atttgctatgcacatttggcagcctcacaggtgggtacattcatgaagtttgaagataccgcagagacatcctcgagccatggtggagttactgcacccggagccatttctgtccctcagctgccgaggttgaaggagaacgtctgcaattccatgttcttctgctgagcccccatgttttgtataggcttttggttgttaccaaaacgactgaaacgtttttaagttatatgaaagttgaaaaaaaaagtagggttataattgatgatgtgatggtggttgaaacatcatcccatttggggttttgccctactgtatgtaggatatatgaaggtatgtttgactagcacttgttaaatggctttcgcctctgtagcacctgtaatcctgtttggtgataatcaatgcatag

SEQ ID NO: 221702 - DNA, 422 bp, Gossypium hirsutum
atcggttccacgccgaacaccaccgtccaagattacaggaacccgatgtttttaaagctggggcgattgggagcctctggtatatttattgggcgaccagtggtgttctcattagctgctgaaggagaagctggcgtgaggaaagtgctttcgatgctgcgtgaggagtttgagctaaccatggcgttgagcggttgtcgttctcttaaagaaatcactcgtgaccacatcatgacagaatgggacagtcctcatcctcgtccggccccgagactgtagagccttatatattatgggctggaactttagcctagcaaatcgcaagatgaacttagtcggagctcaagagatatatatagcatttgcattgcattaatggcataaaattactgttttttttcttctttgggaacatgttactg

SEQ ID NO: 221703 - DNA, 471 bp, Gossypium hirsutum
  unsure (1)..(471): unsure at all n locations
ccgggacatggaacgggccggacccacgcgntccggagatatagagaaagcacctgaaaacgcanaaaccatggctctctgcttctnctcctcaagacttgaccggttttagacaagtctgagtgggttaagggtcacacccttcgccaaccttccacttctgcggtgaggtgccaccctgttgcaccctctggactaactgtgcgtgcaagctcatatgccgatgagcttgtcaagactgctaaagctattgcttctcctggccgtggaattttggccatggatgagtccaacgctaccttgggaaacgtttggcctcaatcgggctagaaaacacagaggctaccgccaagcctacaggacgttgcttgtttcagctcctggccttggtcagtacatctctggtgccatcctctttgaggaaaccctctatcaaaccacaattgatggcaagaagatggntgatgttct

SEQ ID NO: 221704 - DNA, 423 bp, Gossypium hirsutum
ccaccatcacccccaaaaaacaaagcaaattgttgattatggcaacacaagcacttgtatgatcggctcttacctactcagtggagactgcaaggcagattcttggagctaaacgacaaattgggccttcaaggaaaggatcctttgttgttaaggcagcttcgactccacccgttaagcaaggagctgatagacctttatggtttgcatctaaacaaagcctttcatacttggatggcagccttccaggtgattatggatttgaccccttgggactctcagaccctgaaggtccaggagggttatcgagcctaaatggctagcctacggtgagatcatcaacgggcgttatgctatgttgggtgcagtaggtgcgattgcccctgaaatacttgggaaggccggtcttatcccagcagaaac

SEQ ID NO: 221705 - DNA, 415 bp, Gossypium hirsutum
gctgataaccccaccaacgttcagctcctttgtatgtacaacaaggaagagaaccctcgggttccgatcattgtcaccggtaacgatttctcgacgctgtacgcgccgctcatccgtgacggtcgtatggagaagttttactgggcacccaccagggaagataggatcggtgtttgcacaggtattttcaggaccgacaatgttcccgttgatgacattgttaagcttgttgacaccttcccgggccaatccattgactttttcggtgctctgagggccagagtttacgatgacgagtgaggaaatggatcggagaggtaggagtcaatagtgtcgggaaaaagctcgtgaactcgagggaagggccaccatctttcgagcaacctacgatgaccattgagaagctgttggagta

SEQ ID NO: 221706 - DNA, 416 bp, Gossypium hirsutum
gtggtttgtgagataaaaacaaaaaaaaattcttatacaaacacacacacatcgaaaggcagtaaaaaaaggttggaattgttactctataagcgccgtctacaaatctcttctctatttcacttcgaagcggagaagaaaatagctcaaatatcgaaaaccgtaataatgggaggaggtggtgctggtggttcagtgaaagatgtgcagtccaagggtgagctcgatgggttacggcagagtggcgcaacgcttatccttcacttctgggcttcgtggtgtgaggcttcaaaacagtggaccaagtgttttctcaccttttcaccgatttccccaacttttactttcttagggtagaagctgaagaaccacctgagatatttgaggaatactcgggttctgcttggccttttttt

SEQ ID NO: 221707 - DNA, 407 bp, Gossypium hirsutum
cccacgcgtccgacataaccaaaaagaaaaatggcttctgcttccgctactctcctggagtcttcacctattatcgacaagtccgagtggattaagggtcaaaacctccgccacccttcggtttgttttgtacagtgcaaccctacatcggccgcctttaccgtccgtgctagttcatatgccgatgagcttgttaagaccgcgaaaactgttgcatctccaggtcgtggtattttggccatggatgaatcaaatgctacatgtgggaaacggcttgcctcgattggtctcgagaataccgaggcaaaccggcaagcttaccgtacccttctcgtgtctgcccctggcctcggtgactacatctcgggagctatccttttcgaggagactctctaccaatctaccat

SEQ ID NO: 221708 - DNA, 409 bp, Gossypium hirsutum
cccacgcgtccggtaagcagtaatagcaatggtctcctccatgatctcatcggcgggcggtgccaccgtgaaccgctcctccccggcacaggccaacatggtggcccccttcaccggcctcaaatctgcctctgctttcccagtcaccaggaaggccaacaacgacatcacttctcttgcaagcaacggtgggagagtgcaatgcatgcaggtgtggccgcctcttgggaagaagaagttcgagactctctcatacctgcccgatcttactcccgtacagttggctaaggaagtagattaccttcttcgctctaaatggattccttgcttggaattcgaattagaggagggattcgtgcaccgtaagtactcgagcttacccacgtactacgatggacgctactggacc

SEQ ID NO: 221709 - DNA, 403 bp, Gossypium hirsutum
cttcgctgaattttcgtgatcgtcgagaaagaaaatgatgggaaggaaattcttcggcggcggaaattggaaatgcaatggaaccactgaggaagtgaataagattgtgagtactttgaatgctggagaggtgccttctccggatgttgttgaggttgtggttagccctccatttttgttccttcctttggtaaaaacttcactgagacctgagttccaagtcgctgcacaaaattgttgggtcaagaaaggaggtgctttcactggtgaagttagtgcggagatgcttgtcaatttgagcattccttgggttattattggtcattctgagaggagacttattttgatggagtcaaatgagttcgttgcggataaggttgcttatgcactttctcaaggcttg

SEQ ID NO: 221710 - DNA, 376 bp, Gossypium hirsutum
  unsure (1)..(376): unsure at all n locations
cccacgcgtccgcccacgcgtccgnttcagntttcttttgtgttttaagatatgggaactcaagggcctccagaaaatggttatggcagaagcaacagcttggaagagaaatcagcaaaggagaaagcaatcgatgagtggctgccaatcacctcatcaagaaatgcaaaatggtggtatccagctttccacaatgtcaccgttatggggggagctggtgtccccagtctccctaaccccatggcaaaactcggatggggtcctggggtgactgttctaatcctatcatggattattaccctatatacactatggcaaatggtggaaatgcatgaaatggttcctggaagacgtttcgatagataccatgaactgg

SEQ ID NO: 221711 - DNA, 412 bp, Gossypium hirsutum
cccacgcgtccgcccacgcgtccgatgttgagatgaagggtatcacagctgaagatgtgagtgctgcattcagaaaggcagctgaggggccattgaagggcgtattggatgtgtgtgatgttcctcttgtctcggtggactttaggtgctctgatgtttcctccaccattgactcttcattgaccatggtcatgggagatgacatggtcaaggtggtggcctggtatgacaatgaatggggttacagccaaagggttgttgatttggcacacttggtggcaagcaagtggccaggcatgcctgcaggaggaagcagtgaccccttggaggatttctgcaagacaaacccagctgatgaagaatgcaaagtttacgaggcttaaatgattgcaattttcattttttttaaaaa

SEQ ID NO: 221712 - DNA, 413 bp, Gossypium hirsutum
ccaaaactcacttctcttggctctcatgcttcttttctaccatcccttgcgactaggcccgagagtttttcaacaaagctaggaacaagcaccagctctcgcttcattaccaaggctacagccgctcctgggaccaaggatgctccgagtgatgagcgagttcagaaggttcacagcattgaggaattcgacgaagctctcaggaaggctaaaaacaggcttgttgtggtggaatacgccactagcttcagctatcatagcagtaaaatttacccgtttatggtagaccttagcaggacatgcaacgatgtcgaattcatcctcgtgatgggtgatgaatcggacgagactagggagctttgcaaaagagagaaaattacgaaagtcccgcactttagcttctacaagagcat

SEQ ID NO: 221713 - DNA, 264 bp, Gossypium hirsutum
gcatgttgtatcctctgctcattagttctgtttgtattcttgtctgtttgatcacaaccctatttgctaccgatttgttcgaaatcaaggttgtcaaggaaattgaaccagctttgaagaagcagctcatcatctccactattcttatgacagtaggaattgcaattgttacttggattggtgtgccatcttccttcaccatttacaattttggggttcagaaagttgttaagaattggcaactatttttgtgcgtgggtgttg

SEQ ID NO: 221714 - DNA, 333 bp, Gossypium hirsutum
gcaaaaataatggccgcttttgtttcgttgcaaagctcaatgactgctcgttctctatcctcaaactccttcttgggccaacgtctctcaattcctccttctctctcccctcttcacatcaaaccaagagagaatccatgtctcattgtagtgaagcttaaacgatgggaacggaaggaatgtaaaccgaacagccttccagttttgcataaaatgcatgttaaggttggagataccatcaaagtaatatcgggtcgtgataagggcaagattggagagataagcaagatcttcaagcataacaccaccattgtagtgaaagatataaacctg

SEQ ID NO: 221715 - DNA, 403 bp, Gossypium hirsutum
gcttcttttgttagaaagacgttagtagcggtttatttttaacgttactattaaggaaggatagggctatccttgcgcttcgctattcctaccgcgaatacattaactccgcccaagattaaaccaaaaccgggtttagtagtacaaaccgcttggaaccaaacggacctttttccttctcttcccaaacgaaatgattataagctacaagcagctaccacggacttatctgtggcgggagatataccggcggaggaggtggtggagcttccggcggagctgagcaaagagttgatgccgaagcacgtagcggtgataatggacgggaacgggcggtgggctcggcagcggggattggcgacatcagcgggacacgaaaccggtgtaaaagcgttgagggagc

SEQ ID NO: 221716 - DNA, 369 bp, Gossypium hirsutum
cccacgcgtccgatgggttctcagggatcggttatggcgatgcttttgctgatgaggttgactttatcatcagcttccgacatgtccattatatcctacgatgaaacacatcccgacaagtcaacgtctagttggagaacagacgacgaagttatggccatgtacgaggagtggcttgtaaagcatggaaaaacatacaacggtttgggtgagaaagagaggaggttccagatttttaaggataaccttaggttcatcgatgaacataacgccgatgagagtcagagttttaatgttggtttgaaccgctttgctgatcttaccaacgaggagtaccgagccatctacctgggaatcaaagaacccaac

SEQ ID NO: 221717 - DNA, 414 bp, Gossypium hirsutum
ggcattcttatttctgaaaactgaaaatggctttcaccgccgccctctccacttccacgggcaggagcacctcattcgtccgccccaaactttaagcaggctcttttcgggctaaaaccccaaagaggtgggcgtcttacaatggcagtatacaaagtaacgctgctcactccggaaggacctcaagagtttgagtgcccagatgatttgaagatcctggacccggcggaggagaacgggattgatcttccgtactcgtgcagggctggtgcttgctcttcatgtgctgggagagtcaaagaaggcagtgtggaccagtctgaaaatagcttccttagtgatgaacaaacagaagaaggctttgttctcacttgcgttgctctcccaacaagtgatgtcgtcattgaaacacac

SEQ ID NO: 221718 - DNA, 409 bp, Gossypium hirsutum
aaagagcatatcttgttggctaaacaggtcggttttcctaacgtggttgtgttcttgaaggacgggaccaggtagatgatgaagagcttttgcaattagtcgaattggaggtgcgtgaattgctttctagttacgaatttcccggtgatgatgtccctattatttctggctccgcacttttagctttagaagctttgatggctaagcccagtattcctaggggtgaaaaccaatgggtggataagatttatgaacttatggatgctgttgatagttacattcctgttcctcaaagacaaacagatttgcctttcttgttagctgttgaggatgtgttttccatcacgggtcgtggtactgttgccactggtcgtatcgagagaggtactgttaagggtggagagactgt

SEQ ID NO: 221719 - DNA, 408 bp, Gossypium hirsutum
cccacgcgtccgcccacgcgtccggtttaatataaaaggggaaaggggtgcactcggcagaggaagtttggagaggaagaaaaaaaaactctgatacagaaaaaataatcttgtaaaattgacgaagatggtgttggcaaacaaggaaatggtggtctactgcttcgacactttgatcgcccattataacagcgaggaggctgctccgcccgctttcgatgagggccaacacccattgtttgtcacttggaagaaggttgtgaatggtggggagcctcgtctacgaggatgtatcggcacacttgaagcttgtcagttgattaatgggtttagggactatgctctgacgagtgctttgagggaccgcaggttccctcctattcaagctaaagaactgcctaacttaga

SEQ ID NO: 221720 - DNA, 408 bp, Gossypium hirsutum
ggcaaaatggcctctgtttgtgcttcttctgttattgcagccgttgccatctcatccccgagttcctagaggagtggatcagtagtgaggacaacaaaggcttctttccttacagggaagaaacttcgatcagtcaaaaagtacacaaaaccagcagcagcccgaacagttccggtgtgtgcagtggctgaccccgaccgacctctttggttcccaggcagtactcctcctccatggctcgatggcagcctccctggagacttcggttttgatcctctaggccttggatcagaccctgagaccttgagatggaacgtacaggcagagctcgtccattgcagatgggcaatgttaggagccgctgggattttcatcccagagttcctaaccaaaattggcattttaaac

SEQ ID NO: 221721 - DNA, 387 bp, Gossypium hirsutum
gtttcatcaacgatatcttcgagaagcttgcttatgaagcctctaggctcgcgaggtacggcaagaaacccaccatcacttccagggaaatccagaccgctgttaggcttgtacttcccggtgagcttgccaagcacgccgtttctgaaggtaccaaggccgtgaccaagtttacttcatcttgaaaaggctattagttgatctgtagttggggttagggttaggaggttgctttttaaattagatcggtgtggtttttatgtttatttttctgaaatttctgcatatttattttgatatatggtttgtattggcgagatggatctactcgatcctgatatgactattgtagaaattaatgctattaacgacaacttaatttcttgg

SEQ ID NO: 221722 - DNA, 422 bp, Gossypium hirsutum
ctctactccaaattttctctagaaccatacttcgagatggcttttcttatgccttcacctgaaatttccacgcgccgctgcaaaatttttctctaaccctaccccccgccctaaatttctcaagagctgcgcgatttcgaagaacgacgacgagaaagtttggtcaaggaccaacgctagggtcggtgttaaagatgccggcagtacggtttcgtgtttgagccaaaacttgaggttgtacgtacaattttcggctccggtgaagcgaggatcgaagcccagcaaagaggaagaggagaagcaggattattacgtgaatatgggttacgctattcggaccttgagagaggagttcccggacatcttttacagggagctcagttttgatatttacagggatgacattgtattcaaagatcctc

SEQ ID NO: 221723 - DNA, 407 bp, Gossypium hirsutum
caaggtcttgacggtctttcatcccgcacagttgcctactaccagcagggtgctcgttgggccaaatggcgtaccgttgtgagcattccaaatggtccatctgccttggcagtgaaagaagcagcttggggacttgctcgctatgccgccatttctcaagacagtggactggtcccgattgtggagccggaaatcttgcttgatggtgaccatggaattgataggactttcgaagtagcgcagaaggtttgggctgaggttttcttctaccttgctgagaacaatgtcatgtttgagggcatccttctcaagcccagcatggtcactcctggtgctgaatgcaaagacaaggccaccccacagcaagttgctgattacaccctcaagctcctccacaggagaatcct

SEQ ID NO: 221724 - DNA, 409 bp, Gossypium hirsutum
ttgaacacttaaagggagatcaagttcaaaatctgttatggcttttgtaacgtcggaggaatgggtggccactttggtgccaattgctgtttattggatatactcaggtatgtatgtgatgtttgagtcaaggtttgagaagtacaagttgcactccaagaaagaagaggaggagaagaatttggtttccagaaaggaagtcttcaaagccgttctttgccatcaagtcatgtcaattgctattaacctcttcacgtatgcggtaacaagagaaaaagatggtgaggcatctccaaagaaatcactaaccttgcttattctagccaagcaattggtgatagcaatggtggtgatagatacatggtcgttttttgtgcattggtacttgcatcagaacaagtttttatac

SEQ ID NO: 221725 - DNA, 412 bp, Gossypium hirsutum
aaaacctctgatgacttccattcactcgttgttttttttacatctgctctaggaagcaatgagggcgggtacaggaaagggatggcagaggcaaagctaaaggtggctataaatgggtttggtaggattggcaggaacttcttaaggtgctggcatggccgtaaagactccccacttgatgtcattgccatcaatgacactggtggtgttaagcaggcttctcaccttctcaaatatgattccacccttggcatcttcgctgccgatgtcaagcctgtcggcactgatggcatctctgttgatggcaaggttatcaaggttgtttctgaccgcaacccttccaacctcccatggggggacctaggaatagatctagtcatcgaaagaaccggtgtgttcgtcgatagagaag

SEQ ID NO: 221726 - DNA, 409 bp, Gossypium hirsutum
gtcccctgtaccaactccagaaacacagtttttttcttacttgtcttccccccctcaccgctcggtggctgcaatcactaatttcttaactaagccacctacttccgatcttcacttcaccccaaaactcacttctctttgctctcatgcttcttttctaccatcccttgcgactaggcccagatctttttcaacaaagctaggaacaagcacaagctctcgcttcattaccaaggctacagctgctcctgggaccaagaatgctccgagtgatgagcgagttcagaaagttcacagcattgaagaattcgatgaagctctcaggaaggctaaaaacaagcttgttgtggtggaatacgccactagcttcagctatcatagcaataaaatttacccgtttatggtagac

SEQ ID NO: 221727 - DNA, 409 bp, Gossypium hirsutum
attggctctgacacaaaaagaaaaatgtttgtttcacttcccacaccccatctccggtcggtcccttctccaaccccactttctttcaaactctccttcgcattccctgaaaccagaaggaaatcactaagcatcagctctactccgaagggaacaccatctccttctttggcttacgtgccactgagggtgactgccagttctcaagccgcttctgcacctactgtcaatttgacggcaattcccaccgaaatgaaggcttgggtgtacggggaatatggaggtgttgatgtgttgaagttggatgagaaagtgagcgttccagaagtgaaggaagatgaggttttgataaaagtggctgctgctgcccttaaccccgttgatgccaagcgaaggcagggcaagttta

SEQ ID NO: 221728 - DNA, 409 bp, Gossypium hirsutum
ctttatatttatatatttttttgcttgtttatttgcaccaatggcgaccgatgctaaaggagatccagagccgcactgcagagaagacgatgacaacgctcccgccaccgccgcagacgatgaggacaccggtgctcaagtagctcctatcgtcaagctcgaggaagtcgctgtcactactggtgaagaagacgaggatccgattctcgatctgaaggcaaagctgtatcgattcgataaggaagggaatcaatggaaggagagaggagttggaaatgtgaagctcttgaagcacaaagtcaatggcaaagtccgtctagtcatgcgccaatctaaaacccttaagatctgtgctaaccatttcgttattccaacaatgacggtgcaagaacattctggaaatgataaa

SEQ ID NO: 221729 - DNA, 335 bp, Gossypium hirsutum
cccacgcgttcgctttgtgatggggatatcaatacttgtggctgtcacagtgcttgtttacattgaagataacattgggtggggatggggccttggagtccccaccatcgccatgtttttgtccatcatcacgttcatcatcggctatccactttaccgacacatggatccggcagggagtccgtttacccggttgttacaggtctgtgtgtcagctttcaagaagaggaagttggccatggtttctgaccccaacttgttgtatcggaatgatgagcttgacgcctccattttcgtaggtggaaaacttgttcacaccccagacatgacatttc

SEQ ID NO: 221730 - DNA, 408 bp, Gossypium hirsutum
ggaaatttctcaaggattctcattgcttttcttaggcaaatcccaaagccataacagatgcaatctctcgtacccaaccgcccaccgcccaccgccaccaatggttccgccgtcgtcaacaccgccgccaaacccccaacaaatccaacaattcctctcctccgtcctctcccaacgcggcccttccgccctcccttactccgaagacaccaaatggctaatccgtcaacaactcgtttccctcatctccaactacccttccctcgaacccaagaccgccacttttacccataacgacggccgatccgttaacctcctccaagccgacggcaccatccctatgcctttccaaggcgtcacttacaacatccccatcattatctggctcatggaatcttaccctcgtta

SEQ ID NO: 221731 - DNA, 407 bp, Gossypium hirsutum
cccacgcgtccggcatacaggtaaagagtctgttatttacaaacatgtggctgggggggagaaaagggccatctgggttttcgtcatcttccacagctgaggaagttacacaggggatcgatggcactggtctcactgccattgttacaggagcatccagtggtattggcactgaaaccgcacgtgttcttgctctgcgtggtgttcatgtaattatgggggtcaggaatgtggctgctggtagagatgttaaagaagcaattgtgacggaaattccaacagctaaagttgatacaatggaattagatctcagttcaattgcatctgtgaggaaatttgcagcagatttcagctcctcaggtcaccctatgaatcttcttatcaataatgcaggaattatggcaact

SEQ ID NO: 221732 - DNA, 412 bp, Gossypium hirsutum
ctttaaccctttttttttatttttttttaaaataaatctcttttaaatgaacaacaaagaacagggaaaatccgaagaagaagaagaggaagtagtgatggaatcgaagcctttacgtttccttactcaacaatctttatttgtagccgttcgatctggtgaacttgaagcggtgaagcagatattagataagttgaagaaagatgatgaagcgtgtgatggatcatcaacggtgtatgatctgatggctgctcaaagtgaatcaggggctactgctttttatattgcagctgagaataatttcaatgaggtttttgattatttgatcaaattttgtgatgtggagattgttaagatcaggtctaagtctgatatgaacgcttttcatgttgctgctaaacttggacatttg

SEQ ID NO: 221733 - DNA, 410 bp, Gossypium hirsutum
gtgagactcttttgtatacctgtagcatatatttattttaagcagtaatagcaatggcctgctggatgatctcatcggcaaccattgccaccgtgaaccgctcctccccggcacaggccaacatggtggcccccttcaccggcctcaaatctgcctctgctttcccagtcaccaggaaggccaacaacgacatcacttctcttgcaagcaacggtgggagagtgcaatgcatgcaggtgtggccgcctcttgggaagaagaagttcgagactctctcatacctgcccgatcttactcccgtacagttggctaaggaagtagattaccttcttcgctctaaatggattccttgcttggaattcgaattagaggagggattcgtgcaccgtaagtactcgagcttacccacg

SEQ ID NO: 221734 - DNA, 410 bp, Gossypium hirsutum
cccacgcgtccgcccacgcgtccgaatatgtatctttcatgttagcagcaggggccaaagtggcgtacgagaaagaaaggagcatcggatggctatgtcttgtagttgtcatgtcaagtgctgcaacagtgtaccagttgtattgggactttgtaaaggactggggtttgcttcaaatgaattccaagaacccttggctaaggaatgaactaatgcttcgtcgaaagttcatttactacttctccatgggattgaaccttatcctcaggctggcttggctgcaaacagttgtccattcaacctttgaacatgttgattacagggtaaccggactgtttttggcggcgcttgaggtgattagaagaggactgtggaatttctacaggttggagaatgagcatctaaataac

SEQ ID NO: 221735 - DNA, 406 bp, Gossypium hirsutum
gggatggtggattccttgttccaagctcccatttattatggaactcactatgctgtcatgagggcctatgaatacatcagccaaggtcttaaaacgtacaatttggacaacaacatggatggtttctacatcgctcctgcattcatggacaagcttgttgttcacatcagcaagaacttcatgtccctccctaacattaaggttcctctaatcctgggtatttggggaggcaaaggtcaaggaaaatctttccaatgtgagcttgtgtttgccaagatgggtatcaaccccatcatgatgagtgccggagaactggaaagtggaaacgccggtgaaccagccaagttgatcaggcaaaggtaccgtgaagccgccgacataatcaaaaagggcaaaatgtgcgcct

SEQ ID NO: 221736 - DNA, 408 bp, Gossypium hirsutum
ctgaattgctctcttttgagttttgaataagatttacgcaaagaaaggtcctttaagatgaggggaagtctttggcatcttgggcaatcgattacacgccgtgtagctcaggctgacaagaaggctgcagcacgtcgattctttgcttcagaagctgatctgaaaaagactgttctttatgacttccacgttgctcatggtgggaagatggtcccattcgctggatggagcatgccaatccagtacaaggactcgatcatggactctacggtgaattgcaggcagaatggttcactctttgacgtttctcatatgtgtgggttgagccttaagggaaaggactgtgttccattccttgaaaagctcgtcattgctgatgttgctggactcgcccctggaacgggaaca

SEQ ID NO: 221737 - DNA, 407 bp, Gossypium hirsutum
cccacgcgtccgattttctcgctccctttactttaatccaaagcttcctcccctcgctctgacatccacttctaaaccttcttttctctttccaaccaggaaactctctcttccttctctccacagtctcattttcaatcaatccaaaaacagttctaacaataattctagtaatagttgcatagtttcttcagctttcgattccttctttattctctgcacttcgcttgctctatctttctcgctattcgtaaccgatgtgggagccgcctcggcctttgtggtgacccctccccggaaattacagtccgatgagttggctacggttcgtctttttcaagagaacactccctctgttgtttatatcaccaatctcgccgtcaggcaggatgcttttacgttggatg

SEQ ID NO: 221738 - DNA, 408 bp, Gossypium hirsutum
gccaggattgaagagataagattatagtgtattactaaacataataaagcccctgcgacgcgcttcattgatttgccctctcaaagcccaagaaaaatggcttctgcttccgctactctcctcaagtcttcacctattatcgacaagtccgagtggattaagggccaaaacctccgccacccttcggtttgttttgtacggtcacaccctacatcggccgcctttgccgtccgtgctagttcatatgccgatgagcttgttaagaccgcgaaaactgttgcatctccaggtcgtggtattttggccatggatgaatcaaatgctacatgtgggaaacggcttgcctcgattggtctcgagaataccgaggcaaaccggcaagcttaccgtacccttctcgtgtctgct

SEQ ID NO: 221739 - DNA, 404 bp, Gossypium hirsutum
gaactaaattccccagaatttgcttcagtaatttctgtctcagttatggcttcttcaggtacccgcaagccttcattcaatgttgagaaatctggtgtaagaggggttccttcccttgctaggtccccttcttctttcaaggttgaagccagtggtggcaagaagatcaagaccgacaagccttatggaatcaatggtggtatgaacttgagggatggtcttgatgcctctggaaggaagggtaagggaaagggtgtttaccaatatgttgacaaatatggtgctaacgtcgatgggtacagtcctatctacaacaccaacgactggtctcccagtggtgatgtttatgttggcggtactaccggattggcaatctgggcggttaccctagccggaattcttgc

SEQ ID NO: 221740 - DNA, 420 bp, Gossypium hirsutum
gcgtgagccgctatagttacgattccctccagcctagattcttatatttgtgtttcccctctgcaaaggggttagtcttcattcgcttcgttgaatttctatcttcttttgatctgaacggagtttggtaatccagttttcgtcttctgttgattcaggaaatcttagtttttgaattgcgtgactgaatgatctaatggagtctaaaggtgggaaaaagaagtccagtagtagtaagtctttattctacgaagctcctctcggttacagcattgaagacgttcgaccaaacggtggaatcaagaagttcagatctgctgcttactccaactgcgctcgcaagccatcctgatatactcacaagcgtgccgtctgaccactagtagtggttaataaaactgttatttgctttgttagtta

SEQ ID NO: 221741 - DNA, 408 bp, Gossypium hirsutum
cccacgcgttcggagactcaccaaagcacgaatgtttttatctttcagaaaatggattccgatgggaagagtgcataaccgcatggataagctcacactaacccgtcaattttggatccaattcgggattttccttggggggtatcagtaaggaattggaatgtaataatattgattcatataggaggaaaaggttctctattgattcaaatgctgtacctatgggatagggatagagaaagaggaaaaaccgaagatttcacatagtgcttttgatcgaaaaatcaatctgatttatttcgtacccctcgctcaatgagaaaatgggtcagattctataggatcaaacctatgggacttagggaatgatggaagggaataaaataaaaaaaaaaaagaaatcaaaaa

SEQ ID NO: 221742 - DNA, 405 bp, Gossypium hirsutum
cccacgcgtccgcttagagtctctctcagattttaactagagtgtttacatcctggtaagagggggagttgccatggcttcagcttcctccaattcactatcaatctcaccctcatccaccctcgtggatgccaaagctcctcgtcaaccaactgctgcatccccacaatgtgtcactcttcctactcttcctcccccacccgttcagtcccagagtcgtccctggaagaccactgcctactgtcgcaagattgctcgaaatgtgatggctatggccactggtgagactttggccacgcgtgaagctccaaccgaagttaccccaactgagctgacagagtttatcaacaaaatacaagaaacatgggataaagttgaggacaagtacgcagtgagttcacttgc

SEQ ID NO: 221743 - DNA, 261 bp, Gossypium hirsutum
cccacgcgtccgatccccttccaacgatggactgcttctctcttctcttcctcctccttgcctgcgtcgttgcttcggccgtcgtctccgacgttaatagcgacggcgatcctctcatccgtcaagttgtttccgatggtggtgtcgaggaggactccgatgaccatctccttaacgcggagcaccacttcacgctgttcaaatccaagtatgggaaaacctacgcatcccaggaggagcacgattaccgactgggagtct

SEQ ID NO: 221744 - DNA, 415 bp, Gossypium hirsutum
gtctctctcagatcagaactagagtgtttacattctgttaagaggttgagttgccatgggttcagcttcctccaattcactatcaatctcaccctcatccaccctcgtggatgccaaagctcctcgtcaaccaactgctgcatccccacaatgtgtcactcttcctactcttcctcccccacccgttcagtcccagagtcgtccctggaagaccactgcctactgtcgcaagattgctcgaaatgtgatggctatggccactggtgagactttggccacgcgtgaagctccaaccgaagttaccccaactgagctgacagagtttatcaacaaaatacaagaaacatgggataaagttgaggacaagtacgcagtgagttcacttgctgtagcaagtcttgttttggtctggggt

SEQ ID NO: 221745 - DNA, 408 bp, Gossypium hirsutum
attcaaggcacaaaatttgacccaaaatttcttttgtttgtgcttcttcggctatggcaggtgttgccatctcatcccccagttcccagaagactggatcagtagtggggacaacaaaggcttctttcctttcagggaagaaacttagatctgtgagaaagtacacaaaaccagctgccggaccaacatttccagtgtgcgccgccgccgaccccgacagacccctttggttcccaggcagcactcctcctccatggctggatggcagtctccctggtgactttggtttcgatcctctcggtcttggttctgaccctgagacattgagatggaacgtacaagcagagctggtgcactgcagatgggcaatgttgggagctgctggtattttcatcccagagttcttaa

SEQ ID NO: 221746 - DNA, 391 bp, Gossypium hirsutum
  unsure (1)..(391): unsure at all n locations
tcgnccacacgttcgnccacacgttcgatttatactttccttgcacaatggccaccatgaccggtgccgctgtcactataccatatttcaccggccttaaagcccgtgcaaccgcagctaaagttagcgccacagccaaggttgcagcctctccagtcccaagggtcagcatcaaggcctccctcaaagacgtcggtgttgctgttgcggcaactgctgcaagcgcaatccttgccaacaatgccatggccattgaagtcttgctcggcagtgacgatgggggtctggctttcattcccaaagaattcagcgtaagcccaagggagaagattgtgttcaagaacaatgccggattcccacacaatgttgtgttcgatgaggacgaaaatcc

SEQ ID NO: 221747 - DNA, 412 bp, Gossypium hirsutum
cccacgcgtccgcccacgcgtccgggaggtgtttatttatccgacggcagtgataacgaatggggttattgggattcgaataacgggaaagacagctccgatacttattatcagaaaatgatccaagctaatcctggaaattcgcttctcctcagcaattacgctagattcttaaaagaggttcgtggggatttagtgagagcagaagaatattgtgggagagcaatcttggcaaatccaaatgatgggaatcttctctccatgtacgctgatttaatctggcaaactcataaagatggtcctagagctgaaacttactttgatcaagccgttaaatctgcccctgacgactgttttgtactagcatcatatgcacgatttctttgggatgctgaggaggaagacgatgaat

SEQ ID NO: 221748 - DNA, 167 bp, Gossypium hirsutum
cccacgcgtccggagattatcaatttgtatccttcttcgaatttcctcattcaagaggcgaattttcgtcaagaccctcaccggaaagaccatcacattggaggtggagagttctgatactattgacaatgtaaaggccaagattcaggacagggaaggattccccc

SEQ ID NO: 221749 - DNA, 390 bp, Gossypium hirsutum
cccacgcgtacgtgagaacccattctggtcttactgatggagatgctacatcatgttcgagctaaccttgtaccaataatcgacaggtttcaccatcaagctttctaagcagaagttagctggtaccatccatggtagtgacagatccagttgttgcgcctgcaagtgcactggttcaggagcttcagagcaagcctgatctccgaatgaaacacgagttgcttgcctataaaggtccagatcaatcaacggacacaagtactgtgacagaccagtttgaagcatcctcttatggaacatcatactgcctggatgcaggcaccatccagcataatatctctctgcccagctttgtggaaggtgatgttcaatcacatcctcagaacaatc

SEQ ID NO: 221750 - DNA, 417 bp, Gossypium hirsutum
aaagaaagaaaaaaagcagagaatcacaataattgttgcagcagtggcagcaacagcatcagctgaactactggtatcaagttcccgctctttgtcacggctgtcaccatttcagctatgcgtatttgattccaagtccctcgtgtcatgccccagcaatggcaatggcattaacaacagtatcaagagaaggcatgttaggtgcctggctgtggggacagcaccagaggcagaaaccaagaaaagtgggttcgaaatccagacactaacaggttggttgttgaagcaggaacaggcgggtactattgatgctgagctcactattgtcctttccagcatttccatggcctgtaagcaaattgcttctttggttcaaagggctagtatttcaaacttgactggtgttcaaggagctgt

SEQ ID NO: 221751 - DNA, 363 bp, Gossypium hirsutum
cgggaagctgcaaatgtatttggaaagccaaattcatacacagagttcatcccatacaagggggaggggttcaagctgtcaataccatcaaaatggaacccaagcaaagaggttgagtacccaggtcaagtcctgagatacgaggacaacttcgactccaccaccaatgttgctgtcctggtcactcctactgataagaagtccattactgacttcggttcccctgaaaatttcctctctaaggtggactatctgcttggaaaacaagcatactctggcttaactgatgctgagggtgggtttgactcaaatgcagtggcaactgcaaacattattgagacttcaactctgtgatcggaggga

SEQ ID NO: 221752 - DNA, 406 bp, Gossypium hirsutum
cccacgcgtccgcccacgcgtccgattatcttttatttcttcttttgttggccaaatcatgaccactctcgtgaccggtgtgtttctcctcctactatccgtcgccggcgtcgtatccgccgctagatatatcaccggtgatgttctccggttaccttcggaagcttcaaggttcttccgatggaggagcgatgatgatgaagttggtggcacaagatgggcggtcctgattgctggatctaatggatattggaattacaggcatcaggctgatgtttgtcatgcttatcaactcctaaggaacggtggtttgagagaggaaaatatcattgtctttatgtacgatgatatcgctttcaatgtagaaaaccctaggcctggtgttatcattaacaatcctcatggc

SEQ ID NO: 221753 - DNA, 407 bp, Gossypium hirsutum
cccacgcgtccggagattatcaatttgttgccttcttcgaatttcctcattcaagatgcggattttcgtcaagaccctcaccggaaagaccatcacattggaggtggagagttctgatactattgacaatgtaaaggccaagattcaggacaaggaaggcatccccccagaccagcaaaggttgatcttcgctggtaagcaacttgaggatggccgcacgttggctgattacaacatccagaaggagtccacactccacttagtgcttcgcctccgtggaggaatgcaaatttttgttaagactttgactgggaagaccattacattggaggtagagagttcagataccattgataatgttaaggcaaaaattcaggacaaggagggaattcccccagaccaacaga

SEQ ID NO: 221754 - DNA, 415 bp, Gossypium hirsutum
cccacgcgtccgattaaattgaatcaatttcttttaccatgttgctcatgtctaggcatgcagtgagcttgaagagagatcaccctttactccatttccaagctcaagggctcaagcctaaacctgtctctcatctcttcttcaatccattgtctaacggtgtccatacttcatccaaagctttcaccactttagctatctttaaatcaaagaccaaagcagctcccaagagggttgagccaaagtcaaagccaaaggttgaagatgggatctttggcacctctggagggattggttttaccaagcaaaatgagctctttgcgggacgtgttgccatgcttggttttgctgcatcattgctaggcgaagcaataacagggaaaggaatcctagcacagctgaatttggagactgg

SEQ ID NO: 221755 - DNA, 420 bp, Gossypium hirsutum
atcttcgtcaaaaccttaaccggcaagaccattttcttctaagtcgagagctccgacaccgagcggtatgtgaagtctaaaattcaagacaaggaaggcatcccaccagaccagcagcgtcttatcttcgccggaaaacagctcgaggacggccgtaccttggccgattacaacatccagaaggaatctaccctccaccttgtcctccgtcttcgtgggggtatgcagatcttcgtcaaaaccttaaccggcaagaccatcaccctcgaagtcgagagctccgacaccatcgataatgtgaagtctaaaattcaagacaaggaaggcatcccaccagaccagcagcgtcttatcttcgccggaaaacagctcgaggacggccgtaccttggccgattacaacatccagaaggaatccacc

SEQ ID NO: 221756 - DNA, 409 bp, Gossypium hirsutum
tatactcccaaaatgtctcttacaatctttattatcctctccaaatcccttttggagccgaggctaaactccaaactcacccccaaagtttcacgatcattggtggtatgctccaccgacaagacttcatcgccactatcatcagcttcatcactccaagccttctcagcagctcttgctctttcttccattcttctctcagccccacagcctgccgtagctgatattgcaggcctcacaccatgcaaagagtccaagcaattcgccaaacgtgagaagcagcagatcaagaagctggaatcgtcgttgaagctatacgcccctgacagcgctccagctctcgctatcaaagcaaccatcgagaaaaccaagagacggtttgacaactacgggaagtacgggctgctgt

SEQ ID NO: 221757 - DNA, 414 bp, Gossypium hirsutum
cccacgcgtccgcccacgcgttcgcccacgcgttcgtttatttcaaagattctctcaaaacagtgagggagtagtagttcgagttatcgacgacgttttttttcaacacgaaaaaaaatggataacttttacgcaccagggaagaaccatctcttcgttccgggtccggttaacataccggaacccgttattcgagccatgaaccggaacaacgaggattaccgttccccggctattccggcgatgacaaaaacccttctcgaagatgtcaagaagatattcaagactacgaccgggactccttttatgatcccaacaacaggaaccggtgcatgggagagtgcacttactaatacgttatcccccggtgaccgaatcgtatcgttcctcattggacaattcagtcttctttgg

SEQ ID NO: 221758 - DNA, 412 bp, Gossypium hirsutum
actcccttcaaatcctcgtctcaacaatttttttttaaagcctagtaaaatggcggccacatttagcggtgatgaaactgctcctttcttcggcttcctcggagccgctgctgccctcgttttctcctgtatgggtgctgcgtacgggacggcgaagagcggtgtcggggtggcatcgatgggagtgatgaggccggagctggtgatgaaatcgatcgtgcccgttgttatggctggagttttaggtatttatgggttgattattgcggttattatcagcactgggattaacccaaaggccaaatcttactacctgttcgatggctatgctcatctttcctctggtctcgcttgtggcctcgccggtctctctgccggtatggccattggaatcgtcggcgatgctggagtt

SEQ ID NO: 221759 - DNA, 414 bp, Gossypium hirsutum
  unsure (1)..(414): unsure at all n locations
cgatactcaacggngttttgtgattaaaaaaactaccaagattgtggcaaaacaagaggggttccctgcatgaaccatggctagtggagaacgggttgaaggggtctagcaaggagattcgccatggcaggactgcacacaacatgtcgtcttcgtcgttgcggaaaaaatcggacctgacgcttgtttccaaggttcggtatgcaatgcttaggcagttcctcgccaatcttcaagaggtcatattagggaccaagctctccgttctcttcccagctattccattggccattgttgctgagtgttatggatttggaagaccctgggtgtttgcattaagtttacttggacttacaccattggctgaacgagtcagctttctcaccgagcaaattgcttattacactggtccaa

SEQ ID NO: 221760 - DNA, 423 bp, Gossypium hirsutum
gagagataagagaaagcactgaaaacgcaaaaccatggcctctgcttttcttttcaagacttcaccagttttagacaagtctgagtgggttaagggtcacacccttcgccaaccttccacttctgcggtgaggtgccaccctgttgcaccctctggactaactgtgcgtgcaagctcatatgccgatgagcttgtcaagactgctaaagctattgcttctcctggccgtggaattttggccatggatgagtccaacgctacctgtgggaaacgtttggcctcaatcgggctagaaaacacagaggctaaccgccaagcctacaggacgttgcttgtttcagctcctggccttggtcagtacatctctggtgccatcctctttgaggaaaccctctatcaaaccacaattgatggcaagaagat

SEQ ID NO: 221761 - DNA, 406 bp, Gossypium hirsutum
cccacgcgtccgcccacgcgtccgccaggcttttacttatcaaaataaacccatcttcttgattggcaggcaatcaaaaagccaaaaatcatggcactgagaatgtgggcttctactactgccaatgccctcaaaatttcttgtgctaccaccaaagcccctgttttctccctctccagatgcttttccactgttttggatgggttgaaatatgctgaatcacatgaatgggtgaagcacgaaggtccagtagctaccattggcatcactgaccatgctcaggaccatttaggagaagtagtgtttgtagagctgccagaaccaggtggttcagtgagcaaaggaaaagggtttggagctgttgaaagtgttaaagcaaccagtgatgtcaattcccctatctctg

SEQ ID NO: 221762 - DNA, 407 bp, Gossypium hirsutum
cccacgcgtccgcaacaaaatcaactgcttcattatggcctctacaaccatggctctttcgtccccatcattcgccggtaaggcagtgaagttctccccttccacccctgaaatccagggaactggccgtgtttccatgaggaaaaccaccaagcctgttccttctggtagcccatggtacggtcctgaccgagttttgtacttgggtccactttccggtgagccaccatcttacttgaccggtgagttccctggtgactatggttgggacactgctggactctcagctgatcccgagacctttgctaggaaccgtgagctcgaagtcattcactgcagatgggccatgttgggagctcttgggtgtgttttccctgagctgttggctaggaacggtgtcaagttcg

SEQ ID NO: 221763 - DNA, 416 bp, Gossypium hirsutum
gcaaaaggcaaaaaagccatgtcaaagctggttgtgtttcagcccacaaagcagcctcccgtctggctcctctcttcctctctttcccacttcaatggcaccaagctctgccaaatccagtacaagagaaaggtatatcagccaaaaggtgcattgcatattgcagcatccagcaccaagaagattctcataatgggaggcactaggttcattggtgtgtttttatcaagactccttgtaaaagagggtcatcaggttactttgtttactagaggtaaagcaccagttactcaacaattgcctggtgaatcagacagtgactacgctgagtttaaatccaagattttgcatttgaaaggagatagaatggacttcgattttgtgaaatccagtctttctgcagaaggctacgatgt

SEQ ID NO: 221764 - DNA, 410 bp, Gossypium hirsutum
cccacgcgtccgctcaaattcagttaacatttttacagttgttttcttcagtctctctctcagccatggctgcagccatctccaccgtcgctgccgctgccgccgccaaccgagctctgggagtgtcagtcccaacctcagctttcatggggaagaaagtgagctcaagattcaacagcaccaggcaggttccttcgggaagttttaaggtgatggcggcggagaaagagatagacgaagagacacagaccgaaaaggaccgatggaaagggttggcttacgatatttcggacgaccaacaggacattactcgagggaaagggatggtggattccttgttccaagctcccatgaatgatggaactcactatgctgtcatgagttcctatgaatacctcagccaaggtctt

SEQ ID NO: 221765 - DNA, 404 bp, Gossypium hirsutum
cccacgcgtccgagattatagtgtaaatttagtcataataaagcccctcataacatcctgggacttgcttcattgattagccctctgaaagcccaagaaaaatggcttctgcttccgctactctcctcaagtcttcacctattatcgacaagtccgagtggattaagggccaaaacctccgccacccttcggtttgttttgtacggtcacaccctacatcggccgcctttaccgtccgtgctagttcatatgccgatgagcttgttaagaccgcgaaaactgttgcatctccaggtcgtggtattttggccatggatgaatcaaatgctacatgtgggaagcggcttgcctcgattggtctcgagaataccgaggcaaaccggcaagcttaccgtacccttctc

SEQ ID NO: 221766 - DNA, 409 bp, Gossypium hirsutum
ctcttttgtatacctgtagcatatagttttagttagcagtaatagcaatggcctcgtccgggatctcatcggcaaccattgccaccgtgaaccgctcctccccggcacaggccaacatggtggcccccttcaccggcctcaaatctgcctctgctttcccagtcaccaggaaggccaacaacgacatcacttctcttgcaagcaacggtgggagagtgcaatgcatgcaggtgtggccgcctcttgggaagaagaagttcgagactctctcatacctgcccgatcttactcccgtacagttggctaaggaagtagattaccttcttcgctctaaatggattccttgcttggaattcgaattagaggagggattcgtgcaccgtaagtactcgagcttacccacgtacta

SEQ ID NO: 221767 - DNA, 383 bp, Gossypium hirsutum
caaaatttgacccaaaatggcctctgtttgtgcttcttcggctattgcagctgttgccaggtcatgccccagttcccagaagactggatcagtagtggggacaacaaaggcttctttccttacagggaagaaacttagatctgtgagaaagtacacaaaaccagctgccggaccaacatttccagtgtgcgccgccgccgaccccgacagacccctttggttcccaggcagcactcctcctccatggctggatggcagtctccctggtgactttggtttcgatcctctcggtcttgggtctgaccctgagacattgagatggaacgtacaagcagagctggttcactgcagatgggcaatgttgggagctgcttgtattttca

SEQ ID NO: 221768 - DNA, 421 bp, Gossypium hirsutum
gagactcttttgtatacctgtagcatatagtaatagtaagcagtaatagcaatggggtcgtccatgatctcatcggcaaccattgccaccgtgaaccgctcctccccggcacaggccaacatggtggcccccttcaccggcctcaaatctgcctctgctttcccagtcaccaggaaggccaacaacgacatcacttctcttgcaagcaacggtgggagagtgcaatgcatgcaggtgtggccgcctcttgggaagaagaagttcgagactctctcatacctgcccgatcttactcccgtacagttggctaaggaagtagattaccttcttcgctctaaatggattccttgcttggaattcgaattagaggagggattcgtgcaccgtaagtactcgagcttacccacgtactacgatggac

SEQ ID NO: 221769 - DNA, 417 bp, Gossypium hirsutum
cccacgcgtccggtaaatttctcttgcaatcctttgtagagatccgggatccatgggcaggatgtcttgctcaaatctgacaatgtgggtgtcctcaaaaccctctctttctgacacttcttcactctctttccgttctttcatcagcccttttcagctcccgtctcagagctcaacccccggtaacccttccaggtcctcatctgtaaccccagttcactgtggtcttcgtgagcttagagaccgtattgattcagtaaagaacacgcagaagatcactgaagctatgaaacttgtggctgctgctaaagttaggagagcacaagaagctgttgtcaatggcagacctttctctgagtccctggttgaagttctttacaacatcaatgaacagctccagactgaagacatagatgc

SEQ ID NO: 221770 - DNA, 417 bp, Gossypium hirsutum
atactctatatcaccatggcaatgaccactttccatatgccacgaccttctttctggaagggtcagggtatcagattttcacagaaaccatcatggttccgagctcaacccagaaccaaactcaacccctcagtcaacattaaagcttcagctggtgtacgaaaagaagatatcgtcatcgtcggagctgggattgctggtctcgccactgccgtgtctcttcgcaggctagggattgggtcagtggtgcttgagcaagcagcgtcgcttagaactggtggaacctcacttacccttttcaagaatgggtggcgggtattggatgccattggtgttgctgatactctcaggggccaatttcttgaaattcaagggatggcggtgaattcagaagatggaagggagttacgctccttc

SEQ ID NO: 221771 - DNA, 400 bp, Gossypium hirsutum
  unsure (1)..(400): unsure at all n locations
aaaaaaaaaaaaaaagcagagaatcaaaataatggttgtagcagtggcagcaacagcatcggctcggctaccggtatcaagttcccgctctttgtcacggctgtcaccatttcagctatgcgtatttgattccaagaccctcgtgtcatgccccagcaatggcaatggcagtaacaacagtatcaagagaaggcatgttaggtgcatggctgtggggacagcaccagaggcagaaaccaagaaaagtgggttcgaaatccagacactaacaggttggttgttgaagcaagaacaggcgggtactattgatgctgagctcactattgtcctttccagcatttccatggcctgtaagcaaatngcttctttggttcaaagggctagcatttcaaacttgact

SEQ ID NO: 221772 - DNA, 415 bp, Gossypium hirsutum
cccacgcgtccgctcaatcgaaacagaggaagttaagttatgcattagcaagaaaaaatgggttccgcaacactctcaactctttctctcagttccccttcttatccttcacccactactactacagcccattttttcaaaaccccttctcttcaattccctctccgttccaccgccactactaccctcacccaccgtaccacattcctccgtcctctcaacgccaccgcggcacccgaaaaaatcgaaaacctcggcactgaaatctccaacttaaccctcgaagaagcccgaacactcgtcgactacctccaggacaaactcggtgtctccgccgctgcatttgcccccgcggccgtagctgtcgcagcaccagatgccggtggtgccggaactccagttgttgaggaaaaga

SEQ ID NO: 221773 - DNA, 435 bp, Gossypium hirsutum
cccggcccgacccacgcgtccgcccacgcgtccggaagaagagaaaaaggaagattaattcccagagattatactaaaagtgcatgtccactgtgaagcttgtgctagaaaagttgcaagaaccctcaaaggatttgaaggagtggaggatgttgcgactgatagcaaggcaaataaggtggtggtgaaaggaaagacggccaaccccgtcaaggttcacgaaaggctattaaagaaatacggtagaaaagtggagttagtctcgccgttgccggaaccaccgacgccggaagagaacatggcagaaaacaaagaagctaaacccaaagaagaagaacagaaacaagagccttctgcagtgataacggtagtattgaaggtcggcatgcattgtgaagcatgcgctcaagcattgcgtaagcgaataaggaagat

SEQ ID NO: 221774 - DNA, 387 bp, Gossypium hirsutum
gtcatctgtctgtctctctgttttacttcacattcactatcactaccattatggcgtccgctactgtttctgtagccaaacccaaccttcagattcaggcaaaaggaaagggtgttggttttgcagatttctcaggcctacacaactcctctactagccttccctttgccaggaaaacctctgatgacttccattcactcgttgcttttcagacatctgctctaggaagcaataatggcgggtacaggaaagggatggcagaggcaaagctaaaggtggctataaatgggtttggtaggattggcaggaacttcttaaggtgctggcatggccgtaaagactccccacttgatgtcattgccatcaatgacactggtggtgttaagc

SEQ ID NO: 221775 - DNA, 374 bp, Gossypium hirsutum
ctttcatcatgaggttgttaagagggctttggttcttgctatggaaattcgaacagctgggccatttttgctgaaactcttgaaggaagcagctgaggaagggttgataagttcgagtcaaatggtgaaagggtttgctcggttagcagagagtcttgatgaccttgccctagacattccatctgcaaaaaccttgtttcaatcgattgtacccaaagctatttctcaagggtggcttgatgcatcattcatgaaatcctcatgtactgatggagaggctcaaaatgaagacaaaaagttagaccggtacaagaaggagattgtaactataattcacgagtattttctctcggatgatattcctgaactcattc

SEQ ID NO: 221776 - DNA, 406 bp, Gossypium hirsutum
gttagctttagcatacactactagtacccactactagcaatggcttcctcaatgatctgggggggtaccattgccactgcctctccggcacaggctaacatggtcacccctttcaccggcctcaagtctgcctctgctttcccagtcaccaggaaggccaacaacgacattacttctctcgcaagcaatggcggcagagtgcaatgcatgcaggtgtggcctcctactggaaagaagaagttcgagactctctcatacctccccgatcttacacccgtgcagttggctaaggaagtagattaccttcttcgctcaaaatgggttccttgcttggagttcgaattggaggagggattcgtgcaccgtaagtactcgagcttacccacgtactacgatggacgctact

SEQ ID NO: 221777 - DNA, 412 bp, Gossypium hirsutum
cggacgcgtggggttattaatgcattggtataacttgaatgccaggctttatgttgggcagaggtgcttatatttccagaaaccgcttctcgagtctggaactcttggtgccaaatgcaacacacagatggttattcctcacctaactgaaaactatggtgcttcaagagacccacctgagaaacaagctcctatgtgcacagtgcactcatttcctcacaatattgaccattgtctgacatgggctcggtctgagtttgagggtctactggagaaaactcctgctgaagtgaatgcttatctgtccaacccagttgagtataaaactgcacaaaggactgctggcgatgctcaggcaagagataatttggaacgtattcttgaatgcctcgagaaagagaagtgtgtgaca

SEQ ID NO: 221778 - DNA, 423 bp, Gossypium hirsutum
cccacgcgtccgagactcttttgtataactgtttcatatagtactagtaagcaggggtaggaatggcctcctccatgatctcatcggcaaccattgccaccgtgaactgctcctccccggcacaggccaacatggtggcccccttcaccggcctcaagtctgcctctgctttcccagtcactaggaaggccaacaacgacatcacttctcttgcaagcaatggtgggagagtgcaatgcatgcaggtgtggcctcctcttgggaagaagaagttcgagacactctcatacctccccgatcttacacccgtacagttggctaaggaagtagattaccttcttcgctctaaatggattccttgcttggaattcgaattagaggagggattcgtgcaccgtaagtactcgagcttacccacgtact

SEQ ID NO: 221779 - DNA, 414 bp, Gossypium hirsutum
  unsure (1)..(414): unsure at all n locations
cctattatcttccttccttttcattccttttgttatttcaggaactggggtggtcgctcgtaggggaacggcgcaatagctgaaacccacaaatcccctttctccgtcaaggttggcctagcccaaatgctccgtggcggggtgattatggatgtcgtcacccctgaccaagctcgcatcgctgaagaagctggagcctgcgccgtcatggctcttgaacgagttcccgccgacatccgagcccaaggtggcgtggcgcggatgagtgacccacaactcatcaaagaaattaagcaagctgtcaccattcccgtcatggccaangctcgtattggccatttcgttgaggcccagatccttgaagccattggcatcgactatgttgacgagagcgaagtcttaccctcgccgacg

SEQ ID NO: 221780 - DNA, 263 bp, Gossypium hirsutum
gaggaattctatcaccttattactctggctaaggataaattagacaagtcaatggtggccccgcattatatcttgttatagcattgaaactcaaattcgaaccagctctggcatgtttcttcagaaagctcatgatgaagtagttgctgatatctaacctaggattgctgcatggactttccttccattaaagaatggggtgtccatgcatatactacattaccagaatgttctatagttttaaccacattttcatttttttt

SEQ ID NO: 221781 - DNA, 422 bp, Gossypium hirsutum
  unsure (1)..(422): unsure at all n locations
cccacgcgtccgcatcgctctttttcatcgattttatttcttcaaacccatctgtcaaaagaacgctccactcattccatccatgacgcttggctcangaggatccagtgttgtggtgcctcggaacttcagattgctggaggagcttgagcgtggagaaaaaggtattggagatggtactgtcagctatggaatggatgacggagatgacatttacatgcgctcttggactggcaccattattggtcctcataatactgtacatgaaggtcgaatctatcagctgaagctgttctgtgataaagattatccagagaagccaccaagcgtccgttttcattcaagaatcaacatgacttgtgttaaccacgaaactggagtggtggaaccaaagaagtttggacttcttgcaaattggcaga

SEQ ID NO: 221782 - DNA, 399 bp, Gossypium hirsutum
atttcctagtcttccacgatgactcccctccttttcttcctcctcctcctcgtccgcctcctttcgtcagctgctttaatctccgccgccgccgccaccaccgcatatccttccatcccgggcaccgattccacaactgattgtggcctatccggaggagacgagaatccagttcccatccgtcgcgaagtctacggtaacggcaagatattcgacatcagccataggtacaccgtcgacatgccgtcttgggaatccaaggacggcgtaggacagttcctatggttgcctaaaagcatgaagaacggttccctcgctaataattcggagatgaaactcccaactcacaccggcacccaccttgacgctcccggacacgtcatcgatcggtacttcgat

SEQ ID NO: 221783 - DNA, 354 bp, Gossypium hirsutum
cggagaaccagccaagttgatcaggcattggtttcgtgaggccgccgacattatcgggagggggaaaatgtgttgcctctttatcaacgatctcgacgctggagccggtcgtatgggaggaaccacacaatacacagtgaacaaccaaatggtgaacgccacactcatgaacatcgctgataaccccaccaacgttcagctccccggtatgtacaacaaggaagagaaccctcgtgttccgatcattgtcaccggtaacgatttctcgacgctgtacgcgccgctcatccgtgacggtcgtatggagaagttttactgggcacccaccaaggaagataggatcggtgtttgcac

SEQ ID NO: 221784 - DNA, 369 bp, Gossypium hirsutum
cggacgcgtgggcggacgcgtgggcgtgtacgctttggcggacgcgtgggcggacgggtggtcagtgagactcttttgtatacctgtagcatatagtaatagtaagcagtaatagcaatggcctcctccatgatctcatcggcaaccattgccaccgtgaaccgctcctccccggcacaggccaacatggtggcccccttcaccggcctcaaatctgcctctgctttcccagtcaccaggaaggccaacaacgacatcacttctcttgcaagcaacggtgggagagtgcaatgcatgcaagtgtggccgcctcttgggaagaagaaattcgagactctttcatacctgcccgatcttacttccctacag

SEQ ID NO: 221785 - DNA, 406 bp, Gossypium hirsutum
cccacgcgtccgatcacccccaaaaaacaaagtttattgtagaagatggcaacacaggcgctggtatcatcgtctcttacctactcagtggagactgcaaggcagattcttggagctaaacgacaaattgggccttcaaggaaaggatcctttgttgttaaggcagcttcgactccacccgttaagcaaggagctgatagacctttatggtttgcatctaaacaaagcctttcatacttggatggcagccttccaggtgattatggatttgaccccttgggactctcagaccctgaaggtccaggagggttcatcgagcctaaatggctagcctacggtgagatcatcaacgggcgttatgctatgttgggtgcagtaggtgcgattgcccctgaaatacttggga

SEQ ID NO: 221786 - DNA, 401 bp, Gossypium hirsutum
cggaactagcgagacctgaggaaaagcttgctggtcttcgaattgatgggaaatgtgacgccaggagccggatgtctttttacactggcatagggattcattcactgatgcctgatggttctttgggacccgaaacagaggttagaggattgcctgatggtgctaagattaattttgttacttggtctaatgatggtaaacttttggcctttagtgttcgttttgaggaagaggagagtagttcaagtaaacttagagtgtgggttgccgatgtcgagactggaatggctaggccgctgtttcagtctccagatatttatctgaatgcagtgtttgataattatgtttgggtggataactctaccctcttagtttgtactattcctttgtctcgtggagat

SEQ ID NO: 221787 - DNA, 472 bp, Gossypium hirsutum
  unsure (1)..(472): unsure at all n locations
atacccgggctcgaccccacgcccgtccgtnattgaattcaaagaaccttgacccatgccccagtatcttcgtatttttgctttctttctttcctatatgccggggtagcactttccctccattttcaagatcggagagcaaagttattacccttgtgaacaaacctgcaaggaaaagccatntggccctgnggtaccttggcagtgcagngtcagtccaactcctaaaaatggtgcgattccaatcttggtagtggtgaagaagtagttcttgacgttccacagaaatggtctgggaggatatgggccaggcaaggttgtaatttcaacagtaatggcaagggttcttgtgatactggtgactgctccggacgacttcagtgccaaggaacaggcggtacaccacctgcaaccgtgatagaaatgactcttgggtcatcttcttcaccactgcatttctatgatgtaagtt

SEQ ID NO: 221788 - DNA, 427 bp, Gossypium hirsutum
  unsure (1)..(427): unsure at all n locations
gcaagaccaagtaaaacgagtcctaagcaagattaaatagccagaaacaaactcgaaagagaagagggagtaaagcttgaaaatgtgccaagcaagtatccgattttgaggaggcggcatagattggttgttttaatacttgactgctatgacagcaacgggttacctgagaagaagatggctcaaattatacaagacatatttaaggctgttcggctggacactcaaaatgcaaaattcacaggttttgctatatcgactgctatgccagtctcagaaacaatggagttcttgaaatcagcaaagattcaagtaaatgagtttgatgctctgatctgtggcagtggcagtgaagtgtattaccctggaacttacacaacaaaaagatggaaagcnttttgctgatcctgattatgcctctcatatt

SEQ ID NO: 221789 - DNA, 426 bp, Gossypium hirsutum
  unsure (1)..(426): unsure at all n locations
agcaattgtcctcaaatatctcatacaaggaattaatttgaatcaatggctcaaaccagtcgcgcggatgtctagccatgcagtgagcttgaanagagatcaccctttactccatttccaagctcaagggctcaagcctaaacctgtctctcatctcttcttcaatccattgtctaacggtgtccatacttcatccaaagctttcaccactttagctatctttaaatcaaagaccaaagcagctcccaagagggttgagccaaagtcaaagcccaaaggttgaagatgggatctttggcacctctggagggattggttttaccaagcaaaatgagctctttgtgggacgtgttgccatgcttggttttgctgcatcattgctaggcgaagcaataacagggaaaggaattctagcacagctgaatt

SEQ ID NO: 221790 - DNA, 407 bp, Gossypium hirsutum
cccacgcgtccgcaactcgattatgttcctgctactatcatggccttggaagaggggccgaaggcttttcaaggtcgggttcctgtcttcttggacggtggtgttcggcgtggaaccgatgtttttaaagctttggcattgggagcctctggtatatttattgggcgaccagtggtgttctcattagctgctgaaggagaagctggcgtgaggaaagtgctttcgatgctgcgtgaggagtttgagctaaccatggcgttgagcggttgtcgttctcttaaagaaatcactcgtgaccacatcatgacagaatgggacagtcctcatcctcgtccggccccgagactgtagagccttatatattatgggcttggaactttagcctagcaaatcgcaagatgaactta

SEQ ID NO: 221791 - DNA, 392 bp, Gossypium hirsutum
gcatactatcaaatggcagctactgcagtaattaccactctcccccagttcagtggttagcacccaaagtttctactgctccacttaggagcctggcagcagttcaaccaatgaggcgcaaggggaagggtgctctcggtgctcgatgtgatttcatcggatcccccacaaatttgataatggtgactacaacaaccctgatgctgtttgctgggaggtttgggttggctccatcagcaaacagaaaggccaccgctggattgaagcttgaagtaagggactcaggcttgcagactggtgaccctgctggttttacacttgctgacactttggcttgtggtgttgttggccatatttttggtgttgggatcgttcttggtctcaagaacatt

SEQ ID NO: 221792 - DNA, 425 bp, Gossypium hirsutum
agcaaaatattgtccctggtatcaaagttgacatgggtttggttccactccctggttccggcacgagtcatggtgccaaggtcttgacggtctttcatcccgcacagctgcctactaccagcagggtgctcgtttcgccaaatggcgtaccgttgtgagcattccaaatggtccatctgccttggcagttaaagaagcagcttggggacttgctcgctatgccgccatttctcaagacagtggattggtcccgattgtggagccggaaatcttgcttgatggtgaccatggaattgataggactttcgaagtagcgcagaaggtttgggctgaggttttcttctaccttgctgagaacaatgtaatgtttgagggcatccttcttaagcccagcatggtcactcctggtgctgaatgcaaagaca

SEQ ID NO: 221793 - DNA, 405 bp, Gossypium hirsutum
cggacgcgtgggctttgttgagacttttatacttatctttgctgaattttcgtgagcgtcgagaaagaaaattatgggaaggaaattcttcgttggcggcaattggaaatgcaatggaaccactgaggaagtgaataagattgtgagtactttgaatgctggagaggtgccttctcaggatgttgttgaggttgtggttagccctccatttgtgttccttcctttggtcaaaacttcactgagacccgatttccatgtcgctgcacaaaattgttgggtcaagaaaggaggtgctttcactggtgaagttagtgcatagatgcttgtcaatttgagccttccttggggtaattattggtcattctgagaggagacttattttgaaggagtcaaatgagttcgttg

SEQ ID NO: 221794 - DNA, 419 bp, Gossypium hirsutum
cccacgcgtccgcccacgcgtccgcccacgcgttcgcaaaatttgacccaaaatgggctgggtttgtgcttcttcggctattgcagctgttgccatctcatcccccagttcccagaagactggatcagtagtggggacaacaaaggcttctttccttacagggaagaaacttagatctgtgagaaagtacacaaaaccagctgccggaccaacatttccagtgtgcgccgccgccgaccccgacagacccctttggttcccaggcagcactcctcctccatggctggatggcagtctccctggtgactttggtttcgatcccctcggtcttgggtctgaccctgagacattgagatggaacgtacaagcagagctggttcactgcaaatgggcaatgttgggagctgctggtattttca

SEQ ID NO: 221795 - DNA, 421 bp, Gossypium hirsutum
  unsure (1)..(421): unsure at all n locations
ttctattcagttttgtaagagctatggctaattacattgaggttggtggtgagttccacggcaaggactaccatgatcctncacccgctccattggtcgacgctcaagagttagccaagtggtctttttacagggctgtcatagctgagttcattgccactctcctctttctctacatcactgtcttgactgtgatcggttacaagacccagaccgaccctgctaagggcggtgaagattgtggcggcgttggcattctcggcattgctttgggcttttggtggcatgatctntatccttgtttactgcactggcggtatttctgggggacacatcaacccagcagtaacctttggacttttcttggctaggaaagtgtcgttggttcgagccatattttacatgggtgctcagtgtttgg

SEQ ID NO: 221796 - DNA, 400 bp, Gossypium hirsutum
cccacgcgtccgccttttctcctttttctttttctcatacaagatgggttctcagggatcgggggtggcgatgcttttgctgatgatgttcactttatcatcagcttccgacatgtccattatatcctacgatgaaacacatcccgacaagtcaacgtctagttggagaacagacgacgaagttatggccatgtacgaggagtggcttgtaaagcatggaaaaacatacaacggtttgggtgagaaagagaggaggttccagatttttaaggataaccttaggttcatcgatgaacataacgccgatgagagtcagagttttaatgttggtttgaacccgtttgctgatcttaccaacgaggagtaccgagccatctacctgggaatcaagaaacccaac

SEQ ID NO: 221797 - DNA, 342 bp, Gossypium hirsutum
gttttctgctctgtttttcagtgacaagttttttttgtaaaaccagtttcaattgaagtcggcagcctaaatgggaaatacagagttattagcaccaaacctatgcctggaactcgatggatcaacctcttaatcgagcaagattgccgtgtcgaaatatgtactgagaagaaaacaattttgtccgttgaggatatcatttctttgattggcaataagtgcgatggggtgattggacagttgactgaagactggggggagactttatttgcagctttaagcagagcatgaggcaaagcatttagtaacatggctgttggttacaacaatgttgatgttaat

SEQ ID NO: 221798 - DNA, 428 bp, Gossypium hirsutum
cccacgcgtccgtgatgattctgtctccaagactaccaaaccatcgtctccgaaattctgtgagacgcttttgagttcatttcctctatgtcgtcagggtttgatttgtcgagtttgttcgaaaacaagaggaaaccgaggacgatgttcacgtcgagatgttcacctacaacaatcatggcgaaaattgaagttgtggtgaaggggttgaacttcagagtaggaaaagtcaaggacttcaagatgaaactacaagggtcatcagaaggacggaaagggaagctcttggtgactgcggaggtgtctgaagtggcaccggaggtagcaattgtggaattctccaagtcttccggtgacaccttggaatatgctcagttctgcgaggaaagtgtgaggcctgcattaaaagacattgtttggacatggca

SEQ ID NO: 221799 - DNA, 425 bp, Gossypium hirsutum
atacactactagtacccactactagcaatggcttccttaatgatctcatcggctaccatggccgctgcctctccggcacaggctaacatggtcacccctttcaccggcctcaagtctgcctctgctttcccagtcaccaggaaggccaacaacgacattacttctctcgcaagcaatggcggcagagtgcaatgcatgcaggtgtggcctcctactggaaagaagaagttcgagactctctcatacctccccgatcttacacccgtgcagttggctaaggaagtagattaccttcttcgctcaaaatgggttccttgcttggagttcgaattggaggagggattcgtgcaccgtaagtactcgagcttacccacgtactacgatggacgctactggaccatgtggaagctgcccatgttcgggtg

SEQ ID NO: 221800 - DNA, 416 bp, Gossypium hirsutum
tttctttctcacttgtcttcctcccctttccttttaatggctgcaatcactaatccgttggctaaaccacctccttccgatcttcttcacttcaccccaaaactcacttctcttggctctcatgcttcttttctaccatcccttgcgactaggcccagatctttttcaacaaagctaggaacaagcaccagctctcgcttcattaccaatgctacagccgctcctgggaccaaggatgctccgagtgatgagcgagttcagaaggttcacagcattgaggaattcgacgaagctctcaggaaggctaaaaacaggcttgttgtggtggaatacgccactagcttcagctatcatagcactaaaatttacccgtttatggtagaccttagcacgacatgcaacgatgtccaattcat

SEQ ID NO: 221801 - DNA, 418 bp, Gossypium hirsutum
gcaactcccgatatgggaagttcaccaccgttttaatgtcatctacttcccagtcggcagcaaggccgccgcgaagggtggcaagaaagctgccaaaaccgccatcaaagagacccttttgacaccaaggttttacacaaccgactttgatgaaatggaggcgcttttcaacactgagattaacaagaaccttaaccagtccgaatttgaggcactgctgcaagagttcaagactgattacaatcagactcactttgtaaggaacaaggagttcaaagaagctgctgataagattgatggtcctttgagacaaatcttcgttgagttcttggagaggtcttgtactgctgagttctctggttttctcctctacaaagaacttggaaggaggctgaagaaaaccaatccagttgtggct

SEQ ID NO: 221802 - DNA, 421 bp, Gossypium hirsutum
aattaatcaaccacacactcaggcagccttggtatcagcctcagctttgttaaccgccaggttcaccaccaccctccaaaacaaacatggcagccgccacaacatcgccactccatcgttccaaggcctcaggcccctacgcaaggccccctcctccaagctcgcccccttgtcttgtggtagaaaggttggtggtgtgaaggctgagctaagcgccccagtggtgataagcctaagcacaggcctctcccttttcttgggtcggttcgtgttcttcaacttccaaagagagaacgtggcgaagcaagtgcctgagcaaaacgggttgacccatttcgaagcgggtgacactcgagccaaggagtatgttagcctcctgaaatccaacgatccggtgggattcaacctggtggatgttctg

SEQ ID NO: 221803 - DNA, 417 bp, Gossypium hirsutum
taacatttcacgaacttcactctccagtctcctatggcggctgccgtctccaccgggggggctgtcaaccgagcaccgttgagtttgaatggatcaggtgccggagcttctgctccaagctcagctttcatggggaacagcttgaagaaagtgagcgctaggttcaacaacaacggcaaggctccagtgggaagtttcatgattgtggctgccaaagaaatcgacgaagacacacagaccgaccaggaccgatggaagggtcttgcttatgatatctccgatgaccaacaagacattaccagagggaaaggtatggtcgactcattgttccaagctcccatgaacgatggtactcactatgctgtcatgagctcctatgagtacattagccaaggccttcgcacatacgacttggac

SEQ ID NO: 221804 - DNA, 410 bp, Gossypium hirsutum
  unsure (1)..(410): unsure at all n locations
attttctactgcttttcttctcttccaagccttctttctcttctgtgtctttcgtcgctggtcgagccatggttctcgaggctactatgatatgcattgataactcagagtggatgcgaaacggcgattattctccgtctcgatttcaagcccaagctgatgctgttagtcttatctgtggagctaaaacccagtctaatccggagaatacggtggggattttgactatggcgggcaaaggagtacgtgtattggctactcctactagcgatcttggaaaaatcttgtcttgcatgcacggtcttgaaatggggggtgagatgaacctagcagctggaattcagattgctcagttggctctaaagcatcgncaaaacaaaaatcagcaacaaaggattatagtttttgct

SEQ ID NO: 221805 - DNA, 410 bp, Gossypium hirsutum
cccacgcgtccgcccacgcgtccggagaacctttgtgttccgatcatcgtcaccggtaacgattgctcgacgctgtacgcgcctctcatccgtgacggtcgtatggagaagttttactgggcacccaccagggaagataggatcggtgtttgcacaggtattttcaggaccgacaatgttcccgttgatgaccttgttaagcttgttgacaccttcccgggccaatccattgactttttcggtgctctgagggccagagtttacgatgacgaagtgaggaaatggatcggagaggtcggagtcaatggtgtcgggaaaaagctcgtgaactcgagggaagggccaccatctttcgagcaaccgaagatgaccattgagaagctgttggaatatggatacatgcttgttgc

SEQ ID NO: 221806 - DNA, 425 bp, Gossypium hirsutum
cccacgcgtccgcccacgcgtccgttcttattgtgacttgaactcatagggaagaaaagggatgggtggaatcaaatatgtagtagttacagacaaaagtattcggttattggtgaaaaatcaatatacttttaatgtcgaatcaggattaactaggacagaaataaagcattgggtcgaactcttctttggtgtcaaggtaatagctatgaatagtcatcgactccccggaaagggtagaagaatgggacctattatgggacatacaatgcattacaggcgtatgatcattacgcttcaaccgggttattctattccacctcttagaacgaaaagaacttaaaatcaaaatacttaatagcatggcgatacatttatacaaaacttctaccccgggcacacgcaatggagccgtagacagtcaa

SEQ ID NO: 221807 - DNA, 358 bp, Gossypium hirsutum
  unsure (1)..(358): unsure at all n locations
caagcttctattcagttttgtaagagcttttgtttaggacattgaggttggtggccagcccaggccaaggactaccatgatcctccacccnctccattggtcgacgctcaggagttagccaagtggtctttttacagggctgtcatagctgagttcattgccactctcctctttctctacatcactgtcttgactgtgatcggttacaagacccagaccgaccctgctaagggcggtgaagattgtggcggcgtttgcattctctgcattgcttgggcttttggtggcatgatctttatccttgtttactgcactgcctttatctctgggggacacattcaacctcacagtaaccttt

SEQ ID NO: 221808 - DNA, 420 bp, Gossypium hirsutum
attcagcgaaggggtgctctgagatcacatactaaaatggtgaaggccgttgccgggctgcgcagcaatgaaggtgttagcggaactgttttcttctcccaagaaggagatggtccaactaccgtgactgggaacctttctggtcttaagccgggactccatggcttccatgttcatgcccttggggacacaactaacgggtgcatgtcaactggaccccattttaatcctgctggcaaagagcatggtgctccagaagatgagaaccgccatgctggtgatctagggaatgtcactgttggtgatgatggctgtgcaagcttctccatcaccgacaaacagattcctctcacaagcccaaactccattatcggaagagctgtagttgtccatgcagatcccgatgaccttggcaagggc

SEQ ID NO: 221809 - DNA, 336 bp, Gossypium hirsutum
gaagaactaaattccccagaatttgctttatttttggctccctcagttatcgctgggtcaggtaccctcaagccttcattcaatgttgcgaaatctggtgtaagaggggttccttcccttgctaggtccccttcttctttcaaggttgaagccagtggtggcaagaagatcaagaccgacaagccttatggaatcaatggtggtatgaacttgagggatggtcttgatgcctctggaaggaagggtaacggaaagggtgtttaccaatatgatgacagatatggtgctaacatcgataggtacagtcctatatacaacaccaacgactggtcttcc

SEQ ID NO: 221810 - DNA, 424 bp, Gossypium hirsutum
ttgaacacttaaagggagatcaagttcaaaaactgggatggcttttgtaacgtcggagcagttgctggccactttggtgccaattgctgtttattggatatactcaggtatgtatgtgatgtttgagtcaaggtttgagaagtacaagttgcactccaagaaagaagaggaggagaagaatttggtttccagaaaggaagtcttcaaagccgttctttgccatcaagtcatgtcaattgctattaacctcttcacgtatgcggtaacaagagaaaaagatggtgaggcatctccaaagaaatcactaaccttgcttcttctagccaagcaattggtgatagcaatggtggtgatagatacatggtcgttttttgtgcattggtacttgcatcagaacaaggttttatacaaacaccttcatgtt

SEQ ID NO: 221811 - DNA, 419 bp, Gossypium hirsutum
gaatctacaaaagggctacttctccacttggtctctgaaccaaaccatgggttctgctgggatcactctcccaacccttcaaggttctctatttcaatctcatttcctaaccggggggttccccggtggtgaaaagggattgaaaaagttcattgaggaaaacccaccaccggcgaagcaatcagtttccgattcggtaagtattgctaggcttgggaagccaaaatcaccggagttgccactgttaatgccgggaatgatcgcgattgttaagaacccgaacaaccccttctacatgtactgcggcattgtgcagcggatcactgatgggaaagcaggggttcttttcgaaggtggaaactgggatagattgatcacgtttcgactggacgagcttgaacgcagagaaaaaggccctt

SEQ ID NO: 221812 - DNA, 408 bp, Gossypium hirsutum
cccacgcgtccgcaactcaccatttggtgtatttgaatgctaaatccctgagacagatatggttttgccatccccacttctatgagctgatggtgcatgctttacagtgaaattgctcttattttatccaatttaatcttgtctagtgtggtaacatctgcgctaactttcttgcaggtaattagatgctggaatgcttatttgggtcatgaaattttcaaaagtgtagtaggtcttggagggttgggccgtgggcctgagctttgtgtatggtcattactttctttgaggtgcggaactgttgttagtgcagacagcaccggatctgttcagttctggaatggtgataatgggactcttcttcagacacattctacccacaaaggtgatgtgaatgccttggcagca

SEQ ID NO: 221813 - DNA, 419 bp, Gossypium hirsutum
taaaatgaccacaattttgggtattcacttaatttttctaggtataggtgcttttcttctacgattcaaggctctttattttgggggcgtatacgatacctgggctccgggagggggagatgtaagaaaaattaccaacttgactcttagcccaagtgttatatttggttatttactaaaatcgccctttggaggcgaagggtggattgttagtgtggacgatttggaagatataattggaggacatgtatggttaggttccatttgtatatttggtggaatctggcatatcttaaccaaaccttttgcatgggctcgccgtgcacttgtatggtcgggagaagcttacttgtcttatagtttaagtgctttatccgtttttggtttcattgcttggtgctttgtctggttcaataata

SEQ ID NO: 221814 - DNA, 370 bp, Gossypium hirsutum
  unsure (1)..(370): unsure at all n locations
gtagcagccattaaagccatgtctccgtgcgttacctacgccgctcgaaccctcggctggcgcgacggcgccgncgcgtcacacctaaagctcatctctcttgtagtaatcttcatctccagcatcgccggcatatcttcccctatcttcctagctcgttacttccaagggaaacccgtttacgacaaggcgattttggtaatcaagtgcttcgccgccggcgtcatcctctcgacctccttagttcacgtcctccccgaagccttcgctgctctctccgattgccacgtcgcttcccgccatccgtggaaggatttccctttcgctgggctggtcacgttactcggagcccttctggctcttttcgtcg

SEQ ID NO: 221815 - DNA, 429 bp, Gossypium hirsutum
  unsure (1)..(429): unsure at all n locations
attcccgggctgtatcatcttattttggtataccctcttcttttttttttttttcttattttctctncttgcaaagatggcaccagcctcagcatgcttgctaggaaacggtctgtctactcacagaactaaatcgaagttgagtaaagacttttatgggaggaatattgtatttacccccgccatttcatcgttgggtcggaaatcgaatgccgtacttgtaaaggcatctttaaaacttaaacaacatgaaggaagaaggggattcttgaagtcattactcggaactgctggaattggagttccggctttactaggaaatggtgaagcgtatgctttttaacaaggggtttcttcctctagaatgttcttatttttagtttttaaatttttttatttcattatctggttatataaatttttttcttt

SEQ ID NO: 221816 - DNA, 405 bp, Gossypium hirsutum
cttcccttaattactaatggaatagaacaaatattaatcctttctccgaaagaatccaccgaagaggggaggtattccaatgcaataaagttacatagtgtctatttttcgttgataaaggggtatttccatgggtttgccttggtatcgtgttcatactgtcgtattgaatgatcccggtcgcttgctttctgttcatataatgcatacggctctggttgctggttgggccggttcaatggctctatatgaattagccgtttttgatccctccgatcccgttcttgatccaatgtggagacaaggtatgttcgttatacccttcatgactcgtttaggaataaccaattcatggggcggttggagtattacacgggggactataacaaatgcgggtttttggag

SEQ ID NO: 221817 - DNA, 419 bp, Gossypium hirsutum
  unsure (1)..(419): unsure at all n locations
cccactcctcctgtactagtaagcagttttagttatggcctcctccatgatctcaccgcaaccattgccaccgtgaactgctcctccccngcacaggccaacatggtggcccccttcaccggcctcaagtctgcctctgctttcccagtcactaggaaggccaacaacgacatcacttctcttgcaagcaatggtgggagagtgcaatgcatgcaggtgtggcctcctcttgggaagaagaagttcgagacactctcatacctccccgatcttacacccgtacagttggctaaagaagtagattaccttcttcgctctaaatggattccttgcttggaattcgaattagaggagggattcgtgcaccgtaagtactcgagcttacccacgtactacgatggacgctactggaccatgtg

SEQ ID NO: 221818 - DNA, 404 bp, Gossypium hirsutum
taactcttcaaccaaaaccctatacacttattttaaaagctcaatttctctagaaccagctcgccaattcgctctttcttcgctcgaccgcctgctgttcttcgctctccttacccttttgcatccctcagaaaagaagaaaaaaaaccgttgacttttcgtttttggggggggggccaaactcgaagaccccaatttgttcaaaaagagagagggttgaaaaatggatcaagggttactggatgatattataaaccggcttttggaagttaggggtcgaccagggaaacaagttcagttatctgaatcagagatccggcagctttgtttggtttctaaagagattttcttacaacaacctaatttgttggaacttgaagcccccatcaagatttgtggtgata

SEQ ID NO: 221819 - DNA, 436 bp, Gossypium hirsutum
gttcagcaggtcatcaaagacatcagggagttcaaagagaaaattaaggttgacaaggttgttgtactctgggctcgaaacactgagaggtacagcaatgtcattgtggggctaaatgacaccgtggaaagccttatggcttctttggagaagaatgaatcagagatttctccttccactttgtatgctattgcttgtgttcttgaaaatgttcctttcatcaatggcagcccacaaaacacctttgttccagggttgattgatttggctattcaaaggaactgtctgattggaggagatgacttcaagagtggccagaccaagatgaaatctgtcctcgtggatttccttgttggggctggtatcaagccaacatcgatagtgagttacaaccatctgggaaataatgatggcatgaatctgtcagcaccccaaa

SEQ ID NO: 221820 - DNA, 418 bp, Gossypium hirsutum
cggacgcgtggggttactctctacctttcacattcgcatcatggccgattccgccgccgggtcttcccccctaaaagtcatcgccggagctgattcttttggcgccgagctaaaagacgccatggtatcccacctccgctccctcaacatagaagtcgaagatctcggaatcacctcctactacaacatcggtgctgaagtcggccgtcgagtatcttccgccaccacctcgccctccttggagacccgtggcctccttgcttgcggaacgggcgtcggagtcgggatcttcgccaacaaattccccggcgtgttcgccaccacatgtctcactccggacgaagctcgcaacaatcgctccatcaataactgcaacgtcttggcactctccggcatgtcaacgtccgccgataccgct

SEQ ID NO: 221821 - DNA, 406 bp, Gossypium hirsutum
  unsure (1)..(406): unsure at all n locations
atttgtcccgcgcgacacccaattcttctccatttcatatcttccgnggcgtttcaattggtcaggttagatcaagcatttctcttttcctttcttcttcttatctctgccaaaaaagaaatttaaattcttcagcagatctcatacaaaaaagcaaaaccaaaggtaatggcggggctgttcggatcgcaatcctctacggttgcacccatgattgtcaccagcacaccatccacagatctcgccttgactaattttgcttattgctccccttccgatcttcaaagcttcgccgtccctggctccaaactctttcttcgctaacgtcggggatgccttccntcttactgtttcttctcatgaaagcatacgcaatggatatattgctctaaatgctatccatcgt

SEQ ID NO: 221822 - DNA, 400 bp, Gossypium hirsutum
  unsure (1)..(400): unsure at all n locations
gaaagggattcttcaagctggttcttcatatttttattacaaataatgtacgaaagcatgaaagtgagagtcgaacacgtcgttgaaacaagaaaaattagtgaggaatacaacaccagcgatgaagtccgtcaggttttcagtcaatggagtattgatggatttacccgtcaaaatcaccccacagtgatccaggttttattggaccaaaataaagacaaagacatcacaggcaattgcttgcccaacctggtttatgtctctaggcaaaaaagcaagacatccnctcatcatttcaaagccggtgcacttaatgtcctggtccgagttttgctgccatgaccaatgcacctgttattttaaccttagactgtgacatgtactccaatgatcccacaac

SEQ ID NO: 221823 - DNA, 424 bp, Gossypium hirsutum
aaaaatggcttctgcttccgctactctcctcatgtcttcacctattatcgacaagtccgaggggattaagggccaaaacctccgccacccttcggtttgttttgtacggtcacaccctacatcggccgcctttaccgtccgtgctagttcatatgccgatgagcttgttaagaccgcgaaaactgttgcatctccaggtcgtggtattttggccatggatgaatcaaatgctacatgtgggaagcggcttgcctcgattggtctcgagaataccgaggcaaaccggcaagcttaccgtacccttctcgtgtctgcccctggcctcggtaactacatctcgggagctatccttttcgaggagactctctaccaatctaccatcgatgggaaaaagatggtcgatgttcttgttgagcaaaatatt

SEQ ID NO: 221824 - DNA, 422 bp, Gossypium hirsutum
ctcactatgctgtcatgagttcctatgaatacattagttaaggtcttaaaacgtacaatggggacggcaacatggatggtttctacatcgctcctgcattcatggacaagcttgttgttcacatcagcaagaacttcatgtccctccctaacattaaggttcctctaatcctgggtatttggggaggcaaaggtcaaggaaaatctttccaatgtgagcttgtgtttgccaagatgggtatcaaccccatcatgatgagtgccggagaactggaaagtggaaacgccggtgaaccagccaagttgatcaggcaaaggtaccgtgaagccgccgacataatcaaaaagggcaaaatgtgcgccttgttcattaatgatctcgatgctggtgccggtcgtatgggaggaaccacccaatacacc

SEQ ID NO: 221825 - DNA, 182 bp, Gossypium hirsutum
  unsure (1)..(182): unsure at all n locations
cccactcttacttccatcntccaacttttctttaagaaacagccaaaggacccgccccaatataacaattcaactccccaaaatggatccataacctagggaaaaggattgactctgaggactgaacacaacggtcccagtccctaacccatctgctgcctacgcactgctcgagctgctcc

SEQ ID NO: 221826 - DNA, 394 bp, Gossypium hirsutum
caaactggtaaccctttggatccaacttttctttgttgcaaaaaatcaatctgtcggggcgaccatctcggctaccaccacccctgcagctcttgttcacaagacattgcccaggattgcatccccagtccccattgggtcgccaacaatgggaaagagggggaaggtgatgatgatgtgtagcatggagaagaagagtgagaatgggtcaaacatggggatgagtgcatcattgctggcagcagcctgtgcagcaaccatgtcaagcccagccattgctctggtggacgagagaatgtccactgaaggaacaggacttccctttggtttgagcaacaacctcctcgggtggatcctgtttggtgtgttcggcctgatctgggctctttacttc

SEQ ID NO: 221827 - DNA, 357 bp, Gossypium hirsutum
ataagagaaagcactgaaaacgcaaaaccatggtctctgcttctctcctcaagacttcaccagtggtagacaagtctgagtgggttaagggtcacacccttcgccaaccttccacttctgcggtgaggtgccaccctgttgcaccctctggactaactgtgcgtgcaagctcatatgccgatgagcttgtcaagactgctaaagctattgcttctcctggccgtggaattttggccatggatgagtccaacgctacctgtgggaaacgtttggcctcaatcgggctagaaaacacagaggctaaccgccaagcctacaggacgttgcttgtttcagctcctggccttggtcagtaca

SEQ ID NO: 221828 - DNA, 412 bp, Gossypium hirsutum
gcttgcttcagcaccatcagttgcttttctagttatgtgcggtggtcacaagttgcctgggatcagagtccagcaggctaaattttctgattccaaaggatcaggtgccagtgaaggaagaagagctgctatgctctacttggcagctggccttttcaccacagatgttgcttcttctgcaaatgctggggtcattgacgagtaccttgaaaagagcacagctaacaccgaattgactgacaagaagaggttggcaacaagtggcgcatacttttgcagagcatacactgttcaatttggcacttgcaagttccctgagaacttcactggctgccaacatcttgcaaagcaaaagaaagtaccattcatctgtgatgatgtggccttggcatgtgaacggaaggacaaatac

SEQ ID NO: 221829 - DNA, 418 bp, Gossypium hirsutum
cccacgcgtccgagtatccactttacttatcttcaatatctctctttggcgggtcgctggtgccttactacctagaagagactgcaaactgggggctggacgtaaacaatcttcgtgaatcagttgcacaggctcgcttcaaaggaataactgtgagagcaatggtaattattaaccctgggaaccctactggtcagtgtctcagtgaagctaatttaagagaaatattgaacttctgttaccaagaaaacttggtattacttggagatgaggtttaccaacagaatatataccaggatgagcgcccctttatcagttctagaaaggtgttgatggatatggggcctccaattagcaaggaagtccagcttgtttctttccacactgtgtctaaaggatattggggtgaatgtgggca

SEQ ID NO: 221830 - DNA, 450 bp, Gossypium hirsutum
attggagggccgggcccggcccacgcgtccggatcccttggcggcaataatgtccacggcttttgtctccggcttctgcctcacttgcaacgccacctctccttctaactcactccggcaacccacattgcggcggccgtctatcgtcgccaacctcaactcttccacttctcctcctactctcattcgaaatcaacccgttttcgcagcacctactcctttgctcactccttccaattggaaagaaaacatgggagaccagtcatacgaggaagccattgaagctctcaagaaactgctcaatgagaaaggagaattgaagagtgcagcgacggcaaaggtagagcaagtgacagctgagttgaagactgctgcttcttccgatgagtctgttgaccgcttgaaacaaggcttcatttacttcaagactgaaaaatacgaaaagaatcc

SEQ ID NO: 221831 - DNA, 412 bp, Gossypium hirsutum
cccacgcgtccgggctaccactgcttctccaatttcttctcagctgaagagcagctttagggcgggtgttacaagaggactggtagtccccaagggcatttcgggatccccgtttaaagtatcttccggaaagaccaggaccccttgcttcactgtcaaagctgttcaatccgacaagtcaacatttcaagtaatccaacccatcaacggcgaccccttcattggaagcctggagactccaatcacctcaagccccttaattgcatggtacctttccaacctcccagccctataggacggcagtgaacccacttctgaggggaatcgaagtgggtctggctcacggcttcctcctggttggtccattcgtaaaggccggccctctaaggaacactgcggtggcgggtcaagc

SEQ ID NO: 221832 - DNA, 393 bp, Gossypium hirsutum
cagaaaatcaaaaagaagaagaaaagagatcctttttttttttttaacaatccaaactaaggtttgaaaatcaattttgaagccaaacttgaaaaccaaattaatcccaaaggtttaatcaaaatcaatgatggtatgcctcctccagaaatccttcttcttccgcaaatcggctttataacttcaggcctctcagcggctctcgctctttcttccatccttctttcggctccactccctgctgttgcggacattgcggggctcactccttgcaaagagtccaagcaattcgccaagcgcgagaagcagcagatcaagaagctggaatcctcgttgaagctttacgcccccgatagcgcaccggctctcgccatcaaagccaccatcgagaaa

SEQ ID NO: 221833 - DNA, 402 bp, Gossypium hirsutum
ctcaaacaaaccttttacttctcaactctctcatattcaccatggctgacaagtgcggcagctgcgactgctctgacaagagccagtgtgtgaagaaaggaaacgccttggtcattgagactgagaaaagctacatcagcactgtagtggtcgaggctgtggcagagaacgatggcaagtgcaagtgtggaactagctgcagctgcacaaactgcacatgtggcaatcattaagcagacatatatagaactgcacgatgttttagtccataattaaattaagttgaataattggtggcgtgttgcatgtttgtctccgcctcattgtataccatgatagaatggccatgtctatggactttgtctgattaatgaatgattattagcacaaatctgttccatg

SEQ ID NO: 221834 - DNA, 415 bp, Gossypium hirsutum
ctttaatcatcttattttgatggcagcattgttagcatgcttgctaggaaatgggggcgggactcacagaacaaaatcgaagttgagtaaagaattttatgggaggaatattgtatttacccctgccatttcatctttgggtcggaaatcgaatgccgtactcgtaaaggcatctttaaaacataaacaacatgaaggaagaaggggattcttgaagtcattactcggaactgctggaattggagttccggctttacttaggaaatggtaaagcatatgctgatgaacaaggggtttcttcctcgagaatgtcgtattctaggtttttggagtatttggacaaggacagggttaaaaaagtggatttgtttgaaaatggaacgatagctattgtggaagctgtctctcctgagtt

SEQ ID NO: 221835 - DNA, 251 bp, Gossypium hirsutum
catacgcgaacgtttaaacacaaattgctgatgtcacaaacgccgctgctacatcctccttgatggggacacgcttccccgacgtctacacaagttcagggagattcgtcgccaggtttggttttggcggcaaaaaaaagcagctcccaagaaagcctagaaacaaacctccgaccgtcctctatggtacccaggagcggtggctactgattggctcgatggaagcttggtgggtgattacgggttcgacc

SEQ ID NO: 221836 - DNA, 430 bp, Gossypium hirsutum
aaacccggaaaggtaacaattagtggatatgcattatcaggagggggccgaggaatcgagagagttgatatatctattgatggcggtaaaacctggttggaagcatctagatctcagaaaaccggtgccccttacatagcagatcatgtaagcagtgacaaatgggcatgggtgctttttgaggtcacagttgatatcccatacagtactgagatcgttgccaaagcggtggattcggctgcaaatgtgcaacctgaaaacgtgcaagatatttggaacctaagaggtattctcaacacttcatggcatcgagttcaagttcgcgtcgggcactcaaatatgtaaatggaacagttaaataacttgattagcatgctgaaatatgtggctgaactttctttaccattgtgttttttgagaaaataatatc

SEQ ID NO: 221837 - DNA, 305 bp, Gossypium hirsutum
  unsure (1)..(305): unsure at all n locations
catgaccactctcgtgaccggtgtgtttctccttctactatccgncgccggcgtcgtatccgccgctagatatatcaccggtgatgttctccggttaccttcggaagcttcaaggttcttccgatggaggagcgatgatgatgaagttggtggcacaagatgggcggtcctgattgctggatctaatggatattggaattacaggcatcaggctgatgtttgtcatgcttatcaactcctaaagaacggtggtttgagagaggaaaatatcattgtctttatgtacgatgatatcgcttttcaat

SEQ ID NO: 221838 - DNA, 426 bp, Gossypium hirsutum
  unsure (1)..(426): unsure at all n locations
cccacgcgtacgttcaaacacaaatgactccatttaacagactcgacaatgctgcttaacgtgggtacttccataagatcagctactcgattttctcctttcattataacccattcttctccttcatctccttcttcgttttgtttcagtttctctccaaagcaaaccgtctcttttactctacaatcatcgcaaatggcgtcttttactacgttatctcaatcgcctccaaagctattgtttcgtcagttgttcgagaaagaatcatctacttatacttaccttcttgctgattgttcccaccctgataaaccagcgcttttgattgaccctgtagacaggactgttgatagagatttaaatttggttaaagaattgnngctgaagcttatttatgctatgaacactcatgtacatgctgatcat

SEQ ID NO: 221839 - DNA, 463 bp, Gossypium hirsutum
ggcccggaagacccgggccgaccgcacgcagtgcgcccacgcgtccgaccacgcgtacgtttctatttatttttctcttcctccaatgaagatgcagatcttcgttaagaccctgaccggcaagaccatcaccctcgaagtcgagagttccgacacgatcgacaacgttaaggcgaaaatccaagacaaggaagggatcccaccagaccaacaacgtctcatcttcgccggaaaacagctcgaagatggccggaccttggccgattacaacatccagaaggagtccaccctccatctcgtcctccgtctacgtggtggcatgcagatcttcgtcaaaaccctgaccggcaagaccataactttggaagtcgaaagctctgacaccattgacaacgtcaaggccaagatccaagacaaggaaggcattccaccagaccagcaaaggctcatctttgccgggaaa

SEQ ID NO: 221840 - DNA, 426 bp, Gossypium hirsutum
cccacgcgtccgtccaaacccagcttattctgttgctctccctctcgcgcaatggaaaccaacgacgacacctccaaagctaagggcttaagctttgatgatttcctcagcaagaagccctactctcctcctacttgggcctcccatctcaaaccaatcccttcccatgtcttctccctcgcccatcttcctactccaattcacaagtggaatctgcctaatttgccccaaaacacggaagtttggttgaagcgtgacgatctttcaggtatgcaattgagcggtaacaaagtcaggaaattggagttcttattggcggaagcagtggcacagggtgctgattgcatcattacaatcggcggcatccaaagcaaccactgccgcgccaccgctgtcgctgctaagtatttgaatctagactcctat

SEQ ID NO: 221841 - DNA, 430 bp, Gossypium hirsutum
atcaatttttgttttctcagtttctttgcgattttccgacatggggtttttaagatctgtgaagataagggaagtttggtcggataatttagaatcagagttcgagctgatcagtcgggtaattgatgacttccctttcgtttccatggacactgaatttcccggtcttgttttcagaccaaaagtggacctcactaggccttaccatgagcaactcctccgaccctccgatcattacaagatcctcaaatccaacgttgatgctctcaacttgatccaagtgggcctcactctctccgattcttcaggtaacctgccggttctcggaaccgacgacactcagttcatctggcaattcaatttctgcgacttcgatgtggagcgtgacgctcacgcccctgattccattgagcttttgaggaggcaaggg

SEQ ID NO: 221842 - DNA, 427 bp, Gossypium hirsutum
  unsure (1)..(427): unsure at all n locations
cccacgcgtccgcccacgcgtncgcggacgcgtgttgttagtgagctcatataccgggaaattcttgagtatcatcctaaaatgttgaaagagtatctggaaggatcagagccaactggcttcatgtatccaagtgcggttgaccatttcaagaagcagtttgccttccttgaggagcactatggaaatggtacgactgcagctccacttgagagacaacatgcatctttgccaaggccatgtgtgttatattcagataattcagtacaaaactcaacagatgtgacagataacttatctaaatgttccatcaaggaaactgagaaaccccaaacagagagaagctttccaatccctatgtcaaggcttccccctcaagttcctcaaagcatccaaggtgctgccagacctgggaaagtagttggat

SEQ ID NO: 221843 - DNA, 397 bp, Gossypium hirsutum
aacataacaacaacaacaacaacattaataattttcacaaatatctcgcaccaaaacccaaataacccacctgcttcctcatgccttattcatcatcatcatcatcaatggctagcaaattggctttcactttgatgcctcctcgtttcttcactgcgactattcaaaaacccgtggtttgtttctcttcttcttcttcttcttcttctatcagggttcaacccagtgggaagcatctatgttttcgacgccgattgctcttactacccctcaaggctactgccgatcaacaaggtcaggtcgaagaagatgaagttgttgatagtaaaattctgccttactgtagcatagacaagaaagagaagaagtctttgggtgaaatggaacaagagtttct

SEQ ID NO: 221844 - DNA, 386 bp, Gossypium hirsutum
caacaatgttcttaagggagctccttatccaccatctttgcttatggcagatgcatggacaaagccgtattctcgggaatacgctgccttccctgcttcctggcttcgaactgctaagttctggcctactacaggacgtgttgacaacgtatatggtgatcgcaacgtcatctgcacccttcttcccgtatcgcagatggttgaagaggctgctgcagccaattcgtaggcctaggcctcatctatgttgtcattgaagccaacattttctttttccttcaacaaaaaaggggtgggggggggggggtccaatgtctttcttgttcatgtacacaaactattcaccatttgcatatgttctaagctgtgactttcattttattggt

SEQ ID NO: 221845 - DNA, 423 bp, Gossypium hirsutum
aaaaaaaataagacatgtatttggatatttcctttcaactacaacaatattctagtatttatttgatatgacatgaatagttgaagggaattccccgaagagaaaatggattatgggagtaacaaaaaaaacctgacttgaacgatcctgtattaagagctaaattagctaaaggtatgggtcataattattatggggaacccgcatggcccaatgatcttttatatatttttccagtagtaattctcggtactattgcttgtaacgtgggcttagcggttctagaaccttcaatgattggtgaacccgcggatccatttgcaactcctttggaaatattacctgaatggtatttctttcctgtatttcaaatacttcgtacagtacctaacaagttattgggtgttcttttaatggtttcag

SEQ ID NO: 221846 - DNA, 410 bp, Gossypium hirsutum
gagaattggaaagtgggaacgccgttataaccagtcaagttgatcaggcaaaggtaccgtgaggccgccgacattatcaagaaagggaaaatgtgttgcctcttcatcaacgatctcgacgctggagccggtcgtatgggaggaaccacacaatacacagtgaacaaccaaatggtgaacgccacactcatgaacatcgctgataaccccaccaacgttcagctccccggtatgtacaacaaggaagagaaccctcgtgttccgatcatcgtcaccggtaacgatttctcgacgctgtacgcgcctctcatccgtgacggtcgtatggagaagttttactgggcacccaccaaggaagataggatcggtgtttgcacaggtattttcaagaccgacaatgttccccgtga

SEQ ID NO: 221847 - DNA, 408 bp, Gossypium hirsutum
atcaccaacaaaatcaactgcttcacaatggcttctacaactatggctctttcttccccatcattcgccggtaaggcagtgaagttctccccttccacccctgaaatccagggaactggccgtgtttccatgaggaaaaccaccaagcctgttccttctggtagcccatggtacggtcctgaccgagttttgtacttgggtccactttccggtgagccaccatcttacttgaccggtgagttccctggtgactatggttgggacactgctggactctcagctgatcccgagacctttgctaggaaccgtgagctcgaagtcattcactgcagatgggccatgttgggagctcttgtgtgtgttttccctgagctgttggctaggaacggtgtcaagttcggtgaagct

SEQ ID NO: 221848 - DNA, 428 bp, Gossypium hirsutum
ctttttcatcacttttatccatggttataaccttagcagctgcagcagtcccagcactgtcttccctctcccatcgagctccaattccttccatttccttcctcttccccgactccaccagacccttttctctttcccgctcattccgctccttttccctcactccccaagccaaagcctcagacatcgaaatctcctttttcgacgacctcaaccccgaagacgaacctgtcgcctttgacccgccaacacccccagaagggttcatccctccacctgctttcgacgatggccccgaggaaaccgaggacgaagtcgccgctgcctatgaggagctctacggcccagcctacagtggggtctccgttctaggcaacgatgtttatgtaatggactctaaagtgaagaaaacgagtgcatttggaaaa

SEQ ID NO: 221849 - DNA, 392 bp, Gossypium hirsutum
atgattgtggctgccaaagaaatctacgaagacacacagaccgaccaggaccgatggaagggtcttgcttatgatatctccgatgaccaacaagacattaccagagggaaaggtatggtcgactcattgttccaagctcccatgaacgatggtactcactatgctgtcatgagctcctatgagtacattagccaaggccttcgcacatacgacttggacaacaacatggatggattctacattgccccagctttcatggacaagcttgttgttcacatcaccaagaactacatgacccttcctaacattaaggttcctcttatcttgggtatttggggaggcaaaggtcaaggaaaatctttccaatgtgagcttgtctttgccaagatggg

SEQ ID NO: 221850 - DNA, 422 bp, Gossypium hirsutum
aatggagtccattgaacattgcattttgtgcactttgtggcatcttgggaggcactgttggtggattgcttggttctggtggtggattcattttgggtcctctcctccttgaaattggtgtgattccacaggtggctagtgcaacagcaacattcgtgatgatgttctcttcatccttgtccgttgttgaattctatttgcttaagaggttcccaatgccctatgctttgtacttgatgggagtatctattttggctggtttctggggacagtatttcgtgagaaaactaataacaatccttaggagagcttcacttattgtgttcatcctatctggtgtcatctttgcaagtgctctcaccatgggagtcattggcattgagagaagcattcgaatgattcacaaccatgagttcatgggg

SEQ ID NO: 221851 - DNA, 423 bp, Gossypium hirsutum
  unsure (1)..(423): unsure at all n locations
cccacgcgtncgcccacgcgtccgaatttatctttcccagctttcaaagcaacccttctttgctcctttgctctcctcactgggttttaaggattccaccctccaatcaagctatttccctatggcttccaatttgcagaaggaatccacttcttccgatgagaaatcgactttgacaacggagagcaaaagttctaacccagaaacatccaccgccgagaacaaaacttcttccactgggccgtctcaaccagcacaggctggagcttcccctaccactatgcctgggtttgtgccacccaatccttttgatttctcagccatgagtggccttcttaatgatccaagcatcaaggaactagctgagcagatagctaaagatccttcattcacccaaatggcagaacggctcactaagacatt

SEQ ID NO: 221852 - DNA, 409 bp, Gossypium hirsutum
cccacgcgtccgatttagctatagcatacacttctagtacttactactagcaatggcttcctcaatgatctcatcggctaccattgccactgcctctccggcacaggctaacatggtcgctcctttcaccggtctcaagtctgcctctgctttcccagtcaccaggaaggccaacaacgacattacttctctcgcaagcaatggcggtagagtgcaatgcatgcaggtgtggcctcctactgggaagaagaagtttgagactctctcatacctccccgatcttacacccgtgcagttggctaaagaagtagattaccttcttcgctcaaaatgggttccttgcttggaattcgaattggaggagggattcgtgcaccgtaagtactcgagcttacccacgtactacgat

SEQ ID NO: 221853 - DNA, 443 bp, Gossypium hirsutum
gcgaccacgcgtccgccacgcgtccgattcatgtctctccttttaaccttggtttttgccacttcaattttctggttaacatggatgtaccttaaatccaagaaggggaagccgccacccccaccaggccctctaggcctccccttggtgggaaaccttcccttccttcgtactgaccttcactcctacttctctgaactagctcacatctacggtccagttgtgaaactccagcttggaggcaagcttgcgatcctgataacctccccatccacggctcgagaagttcttaaagaccaagacatcgcgtttgctaaccgtgatgtgcctgtggttgccaaggttgtaaccggcggccgtgatatagtttggaacccctatggcccggaatggaagatgttaaggaaagtatgcgttatcaagatgcttagcaatgctacttt

SEQ ID NO: 221854 - DNA, 409 bp, Gossypium hirsutum
cccacgcgtccgcccacgcgtccgtttgaagtgtataagattatggtgaaaaactgaacatggtaaagtccctcataacattcttcgacttgcttcattgattagcccaaagataaacataaccaaaaagaaaaatggcttctgcttccgctactctcctcaagtcttcacctattatcgacaagtccgagtggattaagggccaaaacctccgccacccttcggtttgttttgtacggtcacaccctacatcggccgcctttaccgtccgtgctagttcatatgccgatgagcttgttaagaccgcgaaaactgttgcatctccaggtcgtggtattttggccatggatgaatcaaatgctacatgtgggaagcggcttgcctcgattggtctcgagaataccgaggc

SEQ ID NO: 221855 - DNA, 436 bp, Gossypium hirsutum
  unsure (1)..(436): unsure at all n locations
ggaaaacccggcccgacccacgcgtccggnccagctccccggnatgaacaattttgaagttttcccccgcggccccatcagcgncacgggtgacgttttctccacactgtatcctcctctcatccgngacggccgtatggagaaattatactgggcaccaactagggacgaccgaatcggtgtttgcaaaggtattttcaggaccgacggcgtccgagatgaagacattgctaagctcgtcgacaccttccccggccaatccatcgatttcttccgtgccttgagggctcgggtttacgatgacgaagtgaggaaatggatcagtgaggtcggagtcgcaagcgtacggaagaagttagtgaactcaagggaaggacctccaacatttgagcagccaaaaatgaccattgaaaagctattggaaatggaaacatgc

SEQ ID NO: 221856 - DNA, 422 bp, Gossypium hirsutum
agttgcttcacaatggcctctacaaccatggctttttcttccccatcattcgccggtaaggcagtgaagttctccccttccacccctgaaatccggggaactggccgtgtttccatgaggaaaaccaccaagcctgttccttctggtagcccatggtacggtcctgaccgagttttgtacttgggtccactttccggtgagccaccatcttacttgaccggtgagttccctggtgactatggttgggacactgctggactctcagctgatcccgagacctttgctaggaaccgtgagctcgaagtcattcactgcagatgggccatgttgggagctcttgggtgtgttttccctgagctgttggctaggaacggtgtcaagttcggtgaagctgtatggttcaaggccgggtctcaaatctt

SEQ ID NO: 221857 - DNA, 433 bp, Gossypium hirsutum
  unsure (1)..(433): unsure at all n locations
gccaacatgataagcgtccccatgtctctcaactctatcgttcgcctcaacgtacccgatgctatctggcaaggaggcgccaacacccctctctccgccgtccagattctctcacgggtactcccttacggcggcggagaccctgaaaacctccagcgtatcctccgtatgctcaccagctacggcgttttcgatgaacaccttaattgcagcggtgatgactcccactccccggagagaaaatactccctaactgacatcggaaaaacactcgtaacagacgctgagggtctatcctatgcaccatatgtcctccagcaccaccaggatgctntgatgagagcgtggccattggtgcacgaagcagtgctgaatccgacatcggagccattcgtgaaggcgaatggtgagggagcttatagttactatggga

SEQ ID NO: 221858 - DNA, 455 bp, Gossypium hirsutum
  unsure (1)..(455): unsure at all n locations
ccgggnncgacaccacgcccgtccgcnntttcataaccattgtcacgaacccttcactctccatgtctttcaatgtgtcggctgcncgnnctccaccatgcggtgcgtgtgcaaccgagcanctcgttgagtttgaatgggatcagggtgcnncggagcttctggcttccaagactcagctttcatgggggaaccagcttgaagaaaggtgagcgctagtggttcaacaaccaacggcaagtgctttccagtgggaaggtttcaatgatttgtgggctgccaaaaggaaatcgacgaaagacaccacaagaccgacccaggacccgatgggaagggtctttgcttatgatatcntccgatgaccaacaagacattaccagagggaaaggtatggtcgactcattgttccaagctcccatgaacgatggtactcactatgctgtcatgagctccta

SEQ ID NO: 221859 - DNA, 423 bp, Gossypium hirsutum
ctcttttgtataactgtagcatatattactagttagcagtaatagcaatggcctcctccatgatctcatcggcaaccattgccaccgtgaactgctcctccccggcacaggccaacatggtggcccccttcaccggcctcaagtctgcctctgctttcccagtcactaggaaggccaacaacgacatcacttctcttgcaagcaatggtgggagagtgcaatgcatgcaggtgtggcctcctcttgggaagaagaagttcgagacactctcatacctccccgatcttacacccgtacagttggctaaggaagtagattaccttcttcgctctaaatggattccttgcttggaattcgaattagaggagggattcgtgcaccgtaagtactcgagcttacccacgtactacgatggacgctact

SEQ ID NO: 221860 - DNA, 332 bp, Gossypium hirsutum
gttccatgtgaacggcactggcacatgtgttatttgtatcctaagacacggatggagacggggcgactgtgattccagaacgagcttccaaagggaatggggataaaaactctgaaccccaacgcggtaactgacggcaacacttggaactgcggaaacgcaagtgtgggaaaacctacgagttatatgatgtgcacaacgacctactgacagtgtaaacggctaacccggaggtaggcaagacggatcagatgatgaacccacgtgccgtgcatggcgtcacaaagttttccgatttaactacatcggaggaccgacggcagtatctacgc

SEQ ID NO: 221861 - DNA, 380 bp, Gossypium hirsutum
  unsure (1)..(380): unsure at all n locations
acttgatcgagaagcagatgatctatctgtgcttattgctttgggggaaactcaagtgatgtcagagaccaaaaaggcccttacaaattctggagtaaacattttttctttggaggaaatagctggtggtaaaatggatgggaaaaaaaggagtaaccatgttctggtagtcaagaacttgccataccggtcattagagggtgaactagcttagatgtttggaaaatttgggagtttagacaagattattcttccttcaacaaaaacattggccctggttgtttttctataaccagctgaagctcgtgcagcatttaagggtttagcatacaaacgtttcaaggatgctnncttatacttggagtgggcttctgacaatg

SEQ ID NO: 221862 - DNA, 321 bp, Gossypium hirsutum
actgcttctccaatggcgactcaactgaagagcttctttacttcgtctgttacaagaggagtggtagtgcccatgggcatttcgggatccccgttcaaagtatcttccggaaagaccaggaccccttgcttcactgtcaaagctgttcaatccgacaagtcaacatttcaagtgatccaacccatcaacggcgaccccttcattggaagcctggagactccaatcacctcaagccccttaattgcatggtacctttccaacctcccagcctataggacggcagtgaacccacttctgaggggaatcgaagtgggtctggct

SEQ ID NO: 221863 - DNA, 406 bp, Gossypium hirsutum
  unsure (1)..(406): unsure at all n locations
gattgcacaaaaccaaatcttctttgctttgctattttggttcgttttgctaagaactgggtaacgcacagcaaaaaaccgtggaggaaaccaacaagaaccaagcggtggttcttgccctctatgaagccttaaacacacgagacgtcaacaccgttcaccaaatccttgctcccgacctagagtggtggttccacggtccacccactcaccagtttttgatgcgcttactcaccggcgcttcatccgacgatcctttccgtttcgaggtcgaccctgtctcagtcaccacctttggatccaccgtcatcgttgaaggctgtgataacagccgntcgatctcctgggttcacgcttggactgttcgtgatgggataatcacccaagtgagggagtatttcaacac

SEQ ID NO: 221864 - DNA, 366 bp, Gossypium hirsutum
cccacgcgtccgcggaatctgaaagacaagacactgagaaaaagagagagagagagagagatgtcgggaggaatagcgcgtggtcgactcgccgaggaacgtaaggcatggaggaagaaccatccccatggttttgttgcgaaaccagagacgttgcctgatggaacggtcaatttgatggtgtggcattgcacgatccctggtaaagcaggaactgattgggagggtggctacttcccgctcacgctccatttcagtgaagattatcccagcaagcctccaaagtgtaaatttccccaaggctttttccacccaaatgtttatccatctggtacttgttggctttcaatcctaaatgaggatagt

SEQ ID NO: 221865 - DNA, 327 bp, Gossypium hirsutum
gttttgcaaaatggcgtactgtggtaagcattttcaatggaccaactgaacttgctgtgaaggaagcagcctggggactcgctcgctatgccgccatctcccaggacaatggattggttccaattgttgagccagagatcttgcttgatggtgatcacggaattgacaggactttcgaagtagccaaaaaggtatgggctgaggttttcttctatcttgcccagaacaatgtgatgtttgaaggtatcctcctcaagccaagtattgtcactcccggtgcggagtgcaaggacagggctactccttaacaagttgctgattacaccc

SEQ ID NO: 221866 - DNA, 326 bp, Gossypium hirsutum
  unsure (1)..(326): unsure at all n locations
cccacgcgtncgcccacgcgttcgcccacgcgttcgttcagtttacaatttcacagttgttgtcttcacgctctctctcagccatggctgcagccatctccaccgtcgccgccgctgccgccgccaaccgagctctgggagtgtcagtcccaacctcagctttcatggggaagaaagtgagctcgagattcaacaacaccaggcaggttccttcgggaagttttaaggtgatggcggccgaaaaagagattgacgaagagacacagacctgaaaggaccgatggaaagggttggcttacgatatttcggacgaccaacaagacatt

SEQ ID NO: 221867 - DNA, 410 bp, Gossypium hirsutum
gaggattcagtgattgtaatgacagttatgattttgccattaactacggtcccaaagtggagaaaactgctcaaaactacgcaaattacagcagttggaacaccttggaagggaggttcgaagctgaaacattgatggcggacgatgagtccggaatttccagtcctcctttatggaaatccagtcctcaacatgaaaacaacgttaattaccggtgtctatcgccatcgtcgagagctcaagccatagctagaggccaaaaggagcttatggaaatggttagtaaaatgcccgagtcttgttacgagctttcgttgaaagatctcgtggaacatcagcctgtcgttgttgtggaaccgaagcaagagagtttcgcccaagggagaggttcaaattcgatcgatgaacgc

SEQ ID NO: 221868 - DNA, 343 bp, Gossypium hirsutum
cgtcctcttaacgatatcctctgtttgcagttaagaaaagcaaatcatggctgctaccacggtcccagccgccgcaaggcagctatctcctaaagaagccgatatccagatgatgttggctgccgaggtccatctcggtaccaagaactgtgatttccaaatggagcgttacgtcttcaagcgtcgcaatgacggaatttacatcttcaaccttggcaagacctgggagaagcttcagcttgctgctcgtgtaattgtcgctatagagaaccctcaagatatcattgtccaatctgcaagaccctatggtcagagggctgtcttgaaatttgctcagtacact

SEQ ID NO: 221869 - DNA, 375 bp, Gossypium hirsutum
  unsure (1)..(375): unsure at all n locations
gagcttctttctagctatatccttatcagcttttaaagatggcaggaatcgcctttggtcgctttgatgattccttcagtttggggactgtcaaggcctaccttgctgagtttatctcaactttggtgtttgttttcgccggcgttggctctgccattgcttacaacaagttgacaactgatgcagccctagatcccgatgggctagtcgccattgctgtttgccatggatttgctctctttgttgcagtggctatcggtgccaacatctcangtggccatgtcaaccctgcagtcacttttgggttagctcttggtggccaaatcaccatactaactggcatcttttactggattgcccaacttcttggatcca

SEQ ID NO: 221870 - DNA, 426 bp, Gossypium hirsutum
cccacgcgtccggttttccaatagtttgtaactttgtcggtctcacttcaagctgcagctgccctgatgcaaccaatcaaggttgctgcaccatcaaggaccaatgtgctgctcaggtcctcccagagcgtttctaaggccttcggtttggagcctgttggtgctaggctcacctgctctttgcaaactgacctcaaggacttggctcagacgtgtgttgatgctaccaagctcgctggtttcgctcttgctacatctgctcttgttgtctcgggagcaagcgctgaaggagttccaaagcggctaacctacgatgaaatccaaagcaagacatacatggaagtcaaaggaacaggaactgctaaccagtgcccaaccatcgatggtggtgtcgactctttttgccttcaagcctggcaaatacta

SEQ ID NO: 221871 - DNA, 225 bp, Gossypium hirsutum
cgccgttctaaatcacagaaagctttgaagaatttgcttttggaggtgcaaaacatggggccgaagaaaggtggaaaggtggctgtgcccgccaagaagaaacaagagaaggttgtcaatccgttatttgagaagcgtccaaagcagttcggcattggaggggctttacctcctaagaaggatttgcatcgattcgtgaattggcctaaggttgttcgtattcaa

SEQ ID NO: 221872 - DNA, 401 bp, Gossypium hirsutum
cccacgcgtccgcggcttcggtctccggcttctgcctctcttccaataccacctctccttgtaactcactccggcaacccacattgcggtggccctctatcatcgccaacctcaactcttccacttctcctcctacactcatccgaaatcaaccagttttcgcagcacctactcctttgctcactccttccaattggaaagaaaccatgggagacgagtcatacgaggaagccattgaagctctcaagaaactgctcaatgagaaaggagaattgaagagtgcagcgacggcaaaggtagagcaagtgacagctgagttgaagactgctgcttcctccgatgagtctgttgaccgcttgaaacaaggcttcatttacttcaagactggaaaatacgaaaag

SEQ ID NO: 221873 - DNA, 421 bp, Gossypium hirsutum
  unsure (1)..(421): unsure at all n locations
cttctgcttctgcctgcctgcctgcctgcctgtattggctttctacaaactctgtgccctggttctgctcttcactcttcttttccactcaacattcaccactgcttgcaattcatgcaaacccaaacctccaccatgccctccaccttcttgccctaaggacacattgaagctcggtgtctgtgctgacgtgcttggacttgtcaacgtgattgttggaacccctccttccagcaaatgctgtgctttgcttcaaggattggctgatttggaagctgccctttgcctttgcactgccattaaagccaatgtacttggaatcaacctcaacatcccagtttctcttagtctaatccttagtgcatgtcagaaggaggttcctncaggcttcaaatgtgaataaaaaagatatattatcatg

SEQ ID NO: 221874 - DNA, 426 bp, Gossypium hirsutum
gtgagactcttttgtataactgtagcatatagttctagtaagcagtaatagcaatggcctgctccatgatctcatcggcaaccattgccaccgtgaactgctcctccccggcacaggccaacatggtggcccccttcaccggcctcaagtctgcctctgctttcccagtcactaggaaggccaacaacgacatcacttctcttgcaagcaatggtgggagagtgcaatgcatgcaggtgtggcctcctcttgggaagaagaagttcgagacactctcatacctccccgatcttacacccgtacagttggctaaggaagtagattaccttcttcgctctaaatggattccttgcttggaattcgaattagaggagggattcgtgcaccgtaagtactcgagcttacccacgtactacgatggacgct

SEQ ID NO: 221875 - DNA, 322 bp, Gossypium hirsutum
  unsure (1)..(322): unsure at all n locations
cccacgcgtccgaaaaaaagtcctctttataaacccttgccttcctgtaaccctctctgtatgtccttcgattcgcttaccttttcctttttggccatggctacttgttcagcggacttagctccgcttcttggccccaacgccaccgcagcagccgactacatatgcaacaagttcagtgacacttcctttgccgttgacaatacttaccttctcttctcagcctacctcgtcttctccatgcaacttggcttcgccatgctttgcgctggttcagtgcgtgccaaaaacaccatgaacatcatgcttactaacgtnctcg

SEQ ID NO: 221876 - DNA, 313 bp, Gossypium hirsutum
aagattatagtgaaaaactaaacattataaagccccttcgacttgcttcattgatttgccctctcaaagcccaagaaaaatggcttctgcttccgctactctcctcaagtcttcacctattatcgacaagtccgagtggattaagggccaaaacctccgccacccttcggtttgttttgtacggtcacaccctacatcggccgcctttgccgtccgtgctagttcatatgccgatgagcttgttaagaccgcgaaaactgttgcatctccaggtcgtggtattttggccatggatgaatcaaatgctacatgt

SEQ ID NO: 221877 - DNA, 331 bp, Gossypium hirsutum
cccacgcgtccggccggtgcaaccgtagctaatgttagcgccacagccaaggttgcagcctgtccagtcccaaggggcagcatcaaggcctccctcaaagacgttggtgttgctgttggggcaactgctgcaagcgtaatccttgccagcaatgccatggccattgaagtcttgctcggcagtgacgatgggggtctggctttcattcccaaagaattcagcgtaagcccaagggagaagattgtgttcaagaacaatgccggattcccacacaatgttgtgttcgatgaggacgaaattccaagcggcgtcgacgtattcaaaatcttca

SEQ ID NO: 221878 - DNA, 372 bp, Gossypium hirsutum
cggaagctaagcttttgtttatcgttcgaatccttggtatcaatgctatgcacccgaggacgagaaagattttgcagctcttgcgattgagacagattttcaatggtgttttccttaaagtaaacaaggcaacaatgaacatgcttcacctggttgaaccttacgttacatacggataccctaatctcaagagtgtgaaggaattgatttacaaacgaggtttcgggaagttgaacaagcagagagttgctttgaccgacaatgcaatcgtcgagcaggcgcttggcaaatacgggatcatctgtgtcgaagatctcatccatgagatcatgacagtggggtctcattttaaagagggccataacttccttt

SEQ ID NO: 221879 - DNA, 418 bp, Gossypium hirsutum
cccacgcgtccgctcgaactggtttaagatctcatctcagtgaacaatggctagtctttacagaggggcatcaaggaaagacaagcagaagggaagacaccatggattaagccaacagaagaggcaagagattaaggaagcatttgaactgtttgacactgatggctcaggtaccatcgatgccaaagagctgaatgttgccatgagggctcttggtttcgaaatgacagaagagcaaatcaatcaaatgattgcggatgttgacaaggatggcagtggtgccattgactttgatgaatttgttcacatgatgactgccaagatcggggagagggacactaaagaagagcttatgaaagcattccaaatcattgatcaagataacaatggaaagatatctgctgatgacgttaaacgc

SEQ ID NO: 221880 - DNA, 420 bp, Gossypium hirsutum
acaccgatcaacagcagtggtcaatgagtatggtaacaacaatatataactatccgagcccacgttttatctcttcaccgaaaagaaaaaccacgtataggagggaacagccgcaggatctgagatacaacggctgaaagtcggcaaatactaacatataaagagtctccatgggatctctggacctaagctcaagatcagaagttgttaccattcatgttaatgaagcaaaaaacttactgcagtcaggctaccgttacatcgatgtcaggacagtggaagaattcgagaagggacatgtggaagcagcgaatattcttaacatcccatacttgttcatcacaccagaaggtagggtgaagaatcctgagttcttgaaagaggtttcatctctctgcaaggaggaagatcgtctcatag

SEQ ID NO: 221881 - DNA, 428 bp, Gossypium hirsutum
caaagagaagaaacccagagctcaaacgaagaacatgttgattaaacaaaacgccataagtgggacaatgacatactctctttgcttgaagccgaagaggatgagcccagccaagacttgtcacccctcatcaccactttacaacaacagctctcctcggactccgttttggatgcccctttccctctttgtcaaccagcaacaccatcgccctcgaaacccgacaaggaaaacgccaccgccgccctcagcttagaagactgcacatcagcaacttgttccttgaaagaagatgatgatgataaagagcaagtcataagacatttgcttgaagcctctgatgatgagctggggattccaaatagagaagatggcgatggaaatggtagcggtggtggtggggatgtggctttgaagttttgagtgga

SEQ ID NO: 221882 - DNA, 378 bp, Gossypium hirsutum
agcatatagtaatagtaagcagtaattttaatggccttctccatgatctcatcggcgaccattggcaccgtgaaccggtcctacccggcacaggccaacatggtggcccccttcaccggcctcaaatctgcctctgctttcccagtcaccaggaaggccaacaacgacatcacttctcttgcaagcaacggtgggagagtgcaatgcatgcaggtgtggccgcctcttgggaagaagaagttcgagactctctcatacctgcccgatcttactcccgtacagttggctaaggaagtagattaccttcttcgctctaaatggattccttgcttggaattcgaattaaaggaaggattcgtgcaaccgaagtactcgagc

SEQ ID NO: 221883 - DNA, 367 bp, Gossypium hirsutum
ggaatgcccggggcgaccgatgcgaacggcaagacacaattcaacagctggtttattgactctgtctataacacatggctgcagccatggccaccgtcgacgccgttgccgacaacaaccgagctctgtgagtgtcagcaccaacctgagctttcatggggaagaaagtgagctcgagattcaacaacaccaggcaggttccttcgggaagttttaaggtgatggcggccgaaaaagagatcgacgaagagacacagaccgaaaaggaccgatggaaagggttggcttaccgatattgggacgaccaacaagacattactcgagggaaaggggatggtggattccttgtttcaagctcccatgaatg

SEQ ID NO: 221884 - DNA, 337 bp, Gossypium hirsutum
gtggttttcttttaatttggtcactgttgaaattgtatggtcatacttgcatggatcgatctcccctgttttcttctctgtaaattttataacttggaacctagacacccatggctactgtttctcaattgaataactttccatgcaagaccttcttaataaccccacaaaacagtaactttacctcaaaacttccggttctgcctctaaactctacaaaaccaactcagaattcgatcaagaaatctcaatttttgacccagaaatcagtccagccaaggcctgttttccaggtccgtgcttcggacgccgacgacgaatggggcccggacaagga

SEQ ID NO: 221885 - DNA, 363 bp, Gossypium hirsutum
  unsure (1)..(363): unsure at all n locations
ctttttgttaatctctctgcctggaactgcaattaaaaactgtccattgacactgntctcgtttttttctctatttgaacaagcatgggtttaggccataaaatcaggaccggatatgcgaagctcagctttctttcgagactggctcgtcagtctcatgatgctaagactcttccagcattgccctgccaaatcatgaagcaagatggagatagactacgatcccttgcactctttggggcaggggtctcagggcttttgggttgtgctaccatagcttattctgatgaggctgagcatggtttggcggttcctaactatccttggcctcatcaaggcatactaagctcatatgaccatgct

SEQ ID NO: 221886 - DNA, 252 bp, Gossypium hirsutum
accactgcttctccaatggcgactcagctgatgagcatctttaggtcgtctgttacaagaggactggtagtcccccaggggcatttcgggatccccgtttaagtatcttccggaaagaccagacccctttgcttcactgtcaaggctgttcaatcccgcaagtcaacattttaagtaatccaacccatcaacggcgaccctttcattggagcctggagactccaatcacctcaagccccttaattgcatggt

SEQ ID NO: 221887 - DNA, 398 bp, Gossypium hirsutum
cccacgcgtccgccaacattgaagagataagattatggtgaaaaactaaacataataaagtccctcataacattcttcgacttgcttcattgattagcccaaagataaacataaccaaaaagaaaaatggcttctgcttccgctactctcctcaagtcttcacctattatcgacaagtccgagtggattaagggccaaaacctccgccacccttcggtttgttttgtacggtcacaccctacatcggccgcctttaccgtccgtgctagttcatatgccgatgagcttgttaagaccgcgaaaactgttgcatctccaggtcgtggtattttggccatggatgaatcaaatgctacatgtgggaagcggcttgcctcgattggtctcgagaataccga

SEQ ID NO: 221888 - DNA, 432 bp, Gossypium hirsutum
cccacgcgtccgcgacggcttccatcaacggttggtgccttacctcctcttcttgctccaccaccacctcctctttttccgctcgtcgacgacctacattgcggccttcggtcgtcgctagccttaactcttctccttctcctccgactcttatccaagaccgcccggttttcgctgcccctgttcctttgctcaccccgagagaagagatgggaaacaagtcctacgacgaagccattgaagctctcaagaaacttctcagtgagaaaggagaactgaaagctgaagcagctgcaagggtagatcaaataacagcagagttaaacacaacatcagctgacggcaaaccatctgactcttctgttgagagactgaaagaaggcttcgtttacttcaagaaagaaaaatatgaaaagaatcctgctctgtatg

SEQ ID NO: 221889 - DNA, 433 bp, Gossypium hirsutum
tttagctatagcatacactactagtacccactactagcaatggcttcctcaatgatctcatcggctaccattgccactgcctctccggcacaggctaacatggtcgctcctttcaccggtctcaagtctgcctctgctttcccagtcaccaggaaggccaacaacgacattacttctctcgcaagcaatggcggtagagtgcaatgcatgcaggtgtggcctcctactgggaagaagaagtttgagactctctcatacctccccgatcttacacccgtgcagttggctaaggaagtagattaccttcttcgctcaaaatgggttccttgcttggaattcgaattggaggagggattcgtgcaccgtaagtactcgagcctacccacgtactacgatggacgctactggaccatgtggaagctgcccatgttcg

SEQ ID NO: 221890 - DNA, 434 bp, Gossypium hirsutum
ggagagccttttttttgtgtagcgattctcagttagtcttttctttaagcttacagcttctctccagagttttataatgggtaaggagaaggttcacatcaaccttgttgtcattggccatgtcgactctggcaagtcgaccactactggtcatttgatctacaagctaggtggtattgacaagcgtgtgattgagaggttcgagaaggaggctgctgaaatgaacaaaaggtcattcaagtatgcttgggtgcttgacaagcttaaggctgagcgtgaacgtggtatcaccattgatattgccctgtggaagtttgagaccaccaaatactattgcaccgttattgatgcacctggacaccgtgactttatcaagaacatgattaccggtacctcacaagctgactgtgctgttctcattattgactcaacca

SEQ ID NO: 221891 - DNA, 252 bp, Gossypium hirsutum
cttctccaatggcgactcagctgaagagcagttttaggtcgtctgttacaagaggactggtagtccccaggggcatttcgggatccccgtttaaagtatcttccggaaagaccaggaccccttgcttcactgtcaaagctgttcaatccgacaagtcaacatttcaagtaatccaacccatcaacggcgaccccttcattggaagcctggagactccaatcacctcaagccccttaattgcatggtaccttt

SEQ ID NO: 221892 - DNA, 384 bp, Gossypium hirsutum
gggaggcaaaggtcaaggaaaatctttttaatgtgagcttgtctttgccaagatgggaatcaaccccattatgatgagtgccggagaattggaaagtgggaacgccggagaaccagccaagttgatcaggcaaaggtaccgtgaggccgccgacattatcaagaaagggaaaatgtgttgcctctttatcaacgatctcgacgctggagccggtcgtatgggaggaaccacacaatacacagtgaacaaccaaatggtgaacgccacactcatgaacatcgctgataaccccaccaacgttcagctccccggtatgtacaacaaggaagagaaccctcgtgttccgatcattgtcaccggtaacgatttctcgacgctgtacgc

SEQ ID NO: 221893 - DNA, 398 bp, Gossypium hirsutum
caagcttttcatcaatggcttcccttcaacatgcttcaatctctcttcaacccaagcttctttcatcttctcaacaccccagatcccttccctctctcaacctctctttttcagccactttcccttccctcaaactctgcaccactcgccctcttcatggcggtgccaaaatgtcagcctccgccgcttccagctacgccaccgctttagccgatgtagccaagtccaacaacacccttgatgccaccagctccgacgttgaaaaggtcgagaaaatcttctccgacccacaagtcctccagttcttcaccaaccccaccattgatgtcctcaaaaaacgtcaggttttggatgagattgttagctcctccgagcttcagccgcacacggcgaatttt

SEQ ID NO: 221894 - DNA, 385 bp, Gossypium hirsutum
gtctcaagctctctcttcctgtcttcgtctacttcgcctctttctctatggatccctacaagcaccgtccatcaagtgctttcaattcaccattctggactaccaattctggcgctccagtttggaataacaattcatctctcactgttggacccagaggtccaattctccttgaggactatcatctggtggaaaagcttgccaactttgacagggagcggattccagaacgtgttgtccatgctaggggagcaagcgcaaagggtttcttcgaggttacccatgacatttctcaccttacatgtgctgattttctgcgagcacctggagttcaaacccctgttatcgtgcgattttcaaccgtcatccatgagcgtggaagccc

SEQ ID NO: 221895 - DNA, 435 bp, Gossypium hirsutum
cccacgcgtccggtcctcaaatatctcatactaggaattaaattgaattaatggctcaaaccatgttgctcatgtctagccatgcagtgagcttgaagagagatcaccctttactccatttccaagctcaaggactcaagcctaaacctgcctctcatctcttcttcaatccattgtctaatggtgtccatacttcacccaaagctttcaccactttagctgtctttaaatcaaagaccaaagcagctcccaagagggttgagccaaagccaaaggttgaagatgggatctttggcacctctggagggattggttttaccaagcaaaatgagctctttgtgggacgtgttgccatgcttggttttgctgcatcattgctaggcgaagcaataacagggaaaggaatcctagcacagctgaatttggagactggaa

SEQ ID NO: 221896 - DNA, 434 bp, Gossypium hirsutum
gccgccttttgggaagaagaagttcgagacttttcattacctgcccgatcttactcccgtacagttggctaaggaagtagattaccttcttcgctctaaatggattccttgcttggaattcgaattagaggagggattcgtgcaccgtaagtactcgagcttacccacgtactacgatggacgctactggaccatgtggaaactgcccatgttcgggtgcaccgactcggctcaggtgttgaaggagcttgaggaatgcaagaaggaataccccaatgcattcattagaatcattgggttcgacaacgttcgtcaagtgcagtgcattagtttcattgcctacaagcctgaaggctactaagttgtttacttccctcctaggaattccatttgtttcaaagttgtacttaaattaagcccctcaaacccccccc

SEQ ID NO: 221897 - DNA, 429 bp, Gossypium hirsutum
cccacgcgtccgaaagtccaatcactcccaatactttcataacatttcacgaacttcactctccagtctccaatggcggctgccgtctccaccatcggtgctgtcaaccgagcaccgttgagtttgaatggatcaggtgccggagcttctgctccaagctcagctttcatggggaacagcttgaagaaagtgagcgctaggttcaacaacaacggcaaggctccagtgggaagtttcatgattgtggctgccaaagaaatcgacgaagacacacagaccgaccaggaccgatggaagggtcttgcttatgatatctccgatgaccaacaagacattaccagagggaaaggtatggtcgactcattgttccaagctcccatgaacgatggtactcactatgctgtcatgagctcctatgagtacattagc

SEQ ID NO: 221898 - DNA, 435 bp, Gossypium hirsutum
atcactcaccattgttccaagtttgttgtaaaccaagttagaaccagcagccaacatggcctcattagcagcctccaccgctgccgcctcccttggcgtctctgaaatgcttggtaaccctctgaatttcagtggtggagctaggtcatcggctccaacaccatccaactcatccactttcaagaccgttgctcttttctccaagaagaaggccgctcctccaaagcccaaggctgctgctgtcgccccggccgatgaagagctggctaagtggtacggtccggacagaaggattttcttgcctgaaggtctgttagacagatcggagatcccagagtacttgaacggagaagttcccggagactatggatacgatccgtttggtctgagcaagaagccagaagactttgcaaaatatcaagcatatgagttgat

SEQ ID NO: 221899 - DNA, 431 bp, Gossypium hirsutum
cccacgcgtccgaaattttcttttacttttcctatcttgaaatcccagagctttgtctcagctctctctctctctctctcatcttttacatggcatctcaagccagcctcctccttcaaaaacagctcaaagatctttgtaagaatccggttgatgggttctcggctggattggtcgatgagaacaatatctttgaatggagtgtaacaattattggacctcctgatactctttatgaagggggatttttcaatgctatcatgagttttccaccaaattatccaaacagccctccaacagtcaaatttacatcagagatttggcatcctaatgtttatcctgatgggcgtgtttgcatatcaattcttcatcctccgggtgatgatccaaatggctatgagcttgcaagtgagcgctggatgccagtccat

SEQ ID NO: 221900 - DNA, 432 bp, Gossypium hirsutum
cccacgcgtccgcccacgcgtccgcccacgcgtccgaaaaaaggtttaaaaactcgctcaaccccttttatgtccggcccaactccggccgtggtccaatcatcggaccgacgtcgtccaccgcgccggccaccatacacggtggccgaaaatcgaaagaaggttggggaagaagtcaacgaggtaggtggccattttggtgttagcgggctaggggagccgaccctcgagtgaagaacgtgctgacgaggcacgtgggcgatagcagggaggcacgacgctaaagggtggctaaggtttcctttgctgaaactagtttaggtagtgggcttatcgggcttagggttattttaattttgggcctattgggttgtaattttggctgggtttaattgtgtttaatgtttgagttgatgtaatgggcttatttat

SEQ ID NO: 221901 - DNA, 431 bp, Gossypium hirsutum
cccacgcgtccgcccacgcgtccgtaagaactaaatccatcccaacttgtttcagatctaggtacttcagaataccctgctgaaatgaatcaaaagggcttgatttatagttttgttgcaaaaggaactgttgttttagctgagcacacatcatattctgggaactttagtaccattgctgttcaatgtttacagaagctgccttcaaatagcagcaagttcacgtattcttgtgacggtcacacatttaacttcctcattgacaatggatttgtgtttctagttgtcgcagatgaatcagttggcaggagtgtgcctttcgtttttcttgaacgggtgctagatgattttaaacaacgatatggtgcaagtataagaaatgagggtccccatcctttagctgatgatgacgatgatgacgacttatttga

SEQ ID NO: 221902 - DNA, 156 bp, Gossypium hirsutum
agccttccgttagaacccacaaagggtgtgggtcgattaatactgcaggacggtggtcatggaagtcgaaatccgttaaggagtgtgaaccacctcacctgccaaatcaactagccccaaaaatggttggccctaaagcccgggacctatacccgg

SEQ ID NO: 221903 - DNA, 433 bp, Gossypium hirsutum
cccacgcgtccggaagatcaaacgaaatcgtttattagccattctttcaagctccttttttgtggtcttcatcgaccacacagtttaactcaccgcctcgcccatggaagctctcagctctcaacccctcgcccttctctccatcttctctcctaaaccaaaagatttcccggctagaatcatccgctttcccacccattccaaaaaggacggtaacgattccgatatccaatatgatcctaacaacacaagcatcgttcctcttgtcggcaatcaaactttctcccaggatgcagcgatgggattggttctaagcgcggcgtctgtaagaggatggacaacaggatcgggcatggagggtccatctgtacccgcccgaaccgatgatgaccaatctaatacggagcaaggtttcacctttccatggtctctc

SEQ ID NO: 221904 - DNA, 425 bp, Gossypium hirsutum
ctgagtacaaaatagaactagaggcttgctctaaaaactatactctctgattatctctcttcttcgagccgctaggtcgtactgttttagcttcaagtctctcttttttgaaagttcctagttaatactgcataatgggtaaggagaaggttcacatcaacattgttgtcattggccatgttgactctggaaagtcaaccacaacaggtcacttgatctacaagcttggaggtattgacaagcgtgtgatcgagaggttcgagaaggaagctgctgagatgaacaaaaggtcattcaagtatgcctgggtgctcgacaaattgaaggctgagcgtgagcgtggtatcaccattgatattgccttgtggaagtttgagacgaccaagtactactgcactgtcattgatgctcctggacatcgcgac

SEQ ID NO: 221905 - DNA, 419 bp, Gossypium hirsutum
cccacgcgtccgcccacgcgtccggatttttttcattcgtttcttctcacgctcgattaccttacaaaaagagaaaatgaccaagtgttacccaactgtgagcgaggaataccagaagtcagttgaaaaggccaagaggaagctcagaggtctcatcgctgagaagaactgtgctccactcatgctccgtttagcgtggcactcagctggaacttttgatgttaagaccaagaccggaggtccattcggaaccatgaagcatcctgctgagctcgcacatgctgctaacaacggcctagatatcgccgtcagacttctcgagccgatcaaggagcagttccctaacctcacctacgctgacttctatcagcttgctggtgtcgttgccgttgagattactggtggacctgaaattccct

SEQ ID NO: 221906 - DNA, 428 bp, Gossypium hirsutum
gttcaaggccggatctcagatcttcagcgattgtgggcttgactacttgggaaacccaagcttgatccacgctcaaagcatcttggccatctgggcttgccaagttatcttgatgggagctgttgagggttaccgtattgctggcgggcctctcggtgaggtgaccgaccccttgtacccaggtggcagcttcgacccattgggtcttgctgacgacccagaggcattcgctgagcttaaggtgaaggagatcaagaacggcagattggctatgttctccatgtttggattcttcgtccaagccatcgtcaccggaaagggaccattggagaacttggctgaccaccttgctgacccagttaacaacaatgcctgggcctacgccaccaactttgttcccggaaagtgagattagatggtgagagtga

SEQ ID NO: 221907 - DNA, 433 bp, Gossypium hirsutum
gcgaaaaagctccacaaaagaaactgaaattataggttgtggatgtgaaagatggaaggagttgagcatagagttattaaggtgaatggcataaacatgcacgtagcagagaaaggggaaggcccactcattcttttcatccatggcttccccgagctatggtactcttggcgtcaccagattgcttctttgtcttccaaaggttaccgagctgtggcacccgacctgagaggctacggtgacacggatgcgccagatttggtcaccagttatacctgcttccatatagtgggggatttggttcagcttttaaatattatttcccctaacgaacacaaagtgttggtagtagggcatgactggggagctgccatagcttggtatttgtgtttgtttaggccagacaaagtgaaagctgtgttcaacctcagtg

SEQ ID NO: 221908 - DNA, 289 bp, Gossypium hirsutum
cccacgcgtccggatcagtgagactcttttgtttaacctgtagcatatagtaatagaaggcagtattagcattggcttcttcaatgacttaatgggaaccaatggcaacggggaccggttcttcccgggacaaggcaacaaggggggcccctttaaccggcctaaaatctgcctctgctttcccagtcaccaggaaggccaacaacgacatcacttctcttgcaagcaacggtgggagagtgcaatgcatgcaggtgtggccgcctcttgagaagaagaagttagagac

SEQ ID NO: 221909 - DNA, 437 bp, Gossypium hirsutum
aaattcagataacaatttcacagttgttttcttcactctctctctcagccatggctgcagcgatctccaccgtcgccgccgctgccgccgccaaccgagctctgggagtgtcagtcccaacctcagctttcatggggaagaaagtgagctcgagattcaacaacaccaggcaggttccttcgggaagttttaaggtgatggcggccgaaaaagagatagacgaagagacacagaccgaaaaggaccgatggaaagggttggcttacgatatttcggacgaccaacaagacattactcgagggaaagggatggtggattccttgttccaagctcccatgaatgatggaactcactatgctgtcatgagttcctatgaatacatcagccaaggtcttaaaacgtacaatttggacaacaacatggatggtttctacatc

SEQ ID NO: 221910 - DNA, 418 bp, Gossypium hirsutum
gtttggcatgcacaacagagaaaatgtcttggtattttgctatgcattgagcccaaatgatgggacagagtggaggttgcgaatacagtcagaagctgagcacttcatagatgtatcgtctatgtcctctgatatgattgcaaagatgataaatgaggacaaaatacaaattcttgtcaatcttaatggttatactaagggagcaaggaatgaaatatttgctatgcaacctgctcctattcagatttcttacatgggatttcctgggactactggtgcatcatatatacactacttggtcacggatgagtttgtttcacctcttcacttttctcatatctactctgagaagcttgtacaccttcctcattgttattttgtaaatgactataagcagaaaaatcttgatgtcttggat

SEQ ID NO: 221911 - DNA, 420 bp, Gossypium hirsutum
atcggcaaacaaaccaagtcaacctaaagccttatgcaccatggcaacctctgctatccaacaatctgctttcgttggccagaccgctttgaagcagtccaatgagctcttacgcaaagtcggagctttcgatggtggtcgtgttaccatgcgcagaactgtgaaaagtgcccctaccagcatctggtacggccctgaccgcccaaagtacttgggtccattctcagaccaaatcccatcatacctgacaggtgaattccctggtgactatgggtgggacactgctgggttatcagctgacccagagacatttgctaagaaccgtgagcttgaagtgatccactgcagatgggcaatgcttggtgcccttggttgtgtcttccctgaaattctttcaaagaatggagttaagttcggaga

SEQ ID NO: 221912 - DNA, 260 bp, Gossypium hirsutum
gcttcacaatggcctctacaaccatggctctttcttccccatcattcgccggtaaggcagtgaagttctccccttccacccctgaaatccagggaactggccgtgtttccatgaggaaaaccaccaagcctgttccttctggtagcccatggtacggtcctgaccgagttttgtacttgggtccactttccggtgagccaccatcttacttgaccggtgagttccctggtgactatggttgggacactgctggactctca

SEQ ID NO: 221913 - DNA, 435 bp, Gossypium hirsutum
gtgagactcttttgtatacctgtagcatatagtaatagtaagcagtaatagcaatggcctcctccatgatctcatcggcaaccattgccaccgtgaaccgctcctccccggcacaggccaacatggtggcccccttcaccggcctcaaatctgcctctgctttcccagtcaccaggaaggccaacaacgacatcacttctcttgcaagcaacggtgggagagtgcaatgcatgcaggtgtggccgcctcttgggaagaagaagttcgagactctctcatacctgcccgatcttactcccgtacagttggctaaggaagtagattaccttcttcgctctaaatggattccttgcttggaattcgaattagaggagggattcgtgcaccgtaagtactcgagcttacccacgtactacgatggacgctactggacca

SEQ ID NO: 221914 - DNA, 429 bp, Gossypium hirsutum
accaaaataagttgcttaacaatggcctctacaaccatggctctttcttccccatcatgcgccggtaaggcagtgaagttctccccttccacccctgaaatccggggaactggccgtgtttccatgaggaaaaccaccaagcctgttccttctggtagcccatggtacggtcctgaccgagttttgtacttgggtccactttccggtgagccaccatcttacttgaccggtgagttccctggtgactatggttgggacactgctggactctcagctgatcccgagacctttgctaggaaccgtgagctcgaagtcattcactgcagatgggccatgttgggagctcttgggtgtgttttccctgagctgttggctaggaacggtgtcaagttcggtgaagctgtatggttcaaggccgggtctcaaatc

SEQ ID NO: 221915 - DNA, 437 bp, Gossypium hirsutum
agccttccacaaaaataagttgcttcacaatggcctctacttccatggctctttcttccccatcattcgccggtaaggcagtgaagttctccccttccacccctgaaatccggggaactggccgtgtttccatgaggaaaaccaccaagcctgttccttctggtagcccatggtacggtcctgaccgagttttgtacttgggtccactttccggtgagccaccatcttacttgaccggtgagttccctggtgactatggttgggacactgctggactctcagctgatcccgagacctttgctaggaaccgtgagctcgaagtcattcactgcagatgggccatgttgggagctcttgggtgtgttttccctgagctgttggctaggaacggtgtcaagttcggtgaagctgtatggttcaaggccgggtctcaaatc

SEQ ID NO: 221916 - DNA, 448 bp, Gossypium hirsutum
caacgcgtccggttgagttgccatggcttcagcttcctccatttttctatcaatctcaccctcatccaggggggtggatgccaaagctcctcgtcaaccaactgctgcatccccacaatgtgtcactcttcctactctttctcccccacccgttcagtcccagagtcgtccctggaagaccactgcctactgtcgcaagattgctcgaaatgtgatggctatggccactggtgagactttggccacgcgtgaagctccaaccgaagttaccccaactgagctgacagagtttatcaacaaaatacaagaaacatgggataaagttgaggacatgtacgcagtgagttcacttgctgtagcaggtcttgttttggtctggggtactgctggaatggtctcggcaattgataaacttcctgtgatttccacatttctcgaggtcgtgggt

SEQ ID NO: 221917 - DNA, 434 bp, Gossypium hirsutum
cccacgcgtccgtttagctatagcatacactactagtacccactactagcaatggctgcctcaatgatctcatcggctaccattgccactgcctctccggcacaggctaacatggtcgctcctttcaccggcctcaagtctgcctctgctttcccagtcaccaggaaggccaacaacgacattacttctctcgcaagcaatggcggcagagtgcaatgcatgcaggtgtggcctcctactggaaagaagaagttcgagactctctcatacctccccgatcttacacccgtgcagttggctaaggaagtggattaccttcttcgctcaaaatgggttccttgcttggaattcgaattagaggagggattcgtgcaccgtaaatactcgagcctacccacgtactacgatggacgctactggaccatgtggaagct

SEQ ID NO: 221918 - DNA, 433 bp, Gossypium hirsutum
gatttttgtattaagagtcgccctttggtgtttttctaattcaatcagtgaggtgaagaaaaatgtcttgctgtggtggaaactgcggttgcggctccggttgcaagtgcggcggcggcggcggctgcggctgcggcggttgcaagatgtaccctgagatgaactttgctgagcaaaccacaactgagacacttgttcttggcgtggcaccccggaaagtgaactttgatggagctgaaatggaaactggggctgaaaatggctgcaaatgtggagataactgcacttgcaacccttgcaattgtaaatgaggggaaaaaaaaaaccgaagcatattatggaagctgatctaaataatatatgatgtatttgggtttttattgttagaataaagcagccatggttcattaggtgttttgcttcttgtatccat

SEQ ID NO: 221919 - DNA, 359 bp, Gossypium hirsutum
aaattattcttttaaacgaaggtattcgtgcttgtatggcggctcaagatcagcctcatgaaaaccttatattccctgaggaggttctaccccggggaaacgctctttaatggaactttagctttagccggtcgtgaccaagaaaccaccggtcgcttggggggcccgggaatgccccggcttatcaatttatcccggaaaactattggggggctcatgtagcccatgccggattaatcgtattctgggccggagcaatgaacctatttgaagtggctcattttgtcccagaaaaacccatgtacgaacaaggattaattttactttcccacctaagctactctagggctgggggggta

SEQ ID NO: 221920 - DNA, 435 bp, Gossypium hirsutum
aacaaaatcagttgcttcacaatggcctctacaagcatggctctttcttccccatcattggccggtaaggcagtgaagttctccccttccacccctgaaatccggggaactggccgtgtttccatgaggaaaaccaccaagcctgttccttctggtagcccatggtacggtcctgaccgagttttgtacttgggtccactttccggtgagccaccatcttacttgaccggtgagttccctggtgactatggttgggacactgctggactctcagctgatcccgagacctttgctaggaaccgtgagctcgaagtcattcactgcagatgggccatgttgggagctcttgggtgtgttttccctgagctgttggctaggaacggtgtcaagttcggtgaagctgtatggttcaaggccgggtctcaaatcttcagt

SEQ ID NO: 221921 - DNA, 433 bp, Gossypium hirsutum
aacaaccgtacttataacagattaaaggaagcccctcacactgaaagcaaaaagggacattggtgattccaacaaaagcctttagcggtttcatcagatctaccacaatcgcaaaccgtgcaaacttctctctccttgattttgttgtgttatagttcacctttaccaccttctccaatgtccttgctattattctcaacagtttcttgttataatacctatacgggagccccgacattctcatccacaccactatctttgagggatgttgcttgttcgtagagaagtctcgactctaaggttgaacagtgaggtaattcccataaaccatttatggtccctctgtgagtgctttggtatagtcttgactcaaagcaaactttaccaagtaataatcattgtctatgtcgatcacctgaaatgatctaacaag

SEQ ID NO: 221922 - DNA, 405 bp, Gossypium hirsutum
ctgattcgaaagactggaggcgagtgggtatagttagcccagtcaaagatcaaggctcgtgtggatcttgctggacattcagtaccactggagctcttgaggcagcttaccatcaggcatttgggaaagggatctccctatctgagcagcagcttgtggactgtgctggagcttttaacaacttcggttgcaacggggggttgccatcccaagcctttgagtacatcaaatataacggcggcctcgatacggaggagtcatacccttacactgcaacaaatggtctatgcaaattctcttctgaaaatgttggtgttaaagtccttgactctgtcaacattaccttgggtgctgaagatgaattaaagcatgcagttgccatggtccggcctgttagtgtggcat

SEQ ID NO: 221923 - DNA, 429 bp, Gossypium hirsutum
gaaaaatggctttggcaagcttggtgagaagaaaggcataccttttgtctagaaacctgtcgaattcgcccgcagatgcgttgaaatactctttttcactcagcaatttctcgaggggtttcgcttcaggatctgaagagaacgacgtcgtcgtcatcggcggcggacccggcggctacgtggcagctatcaaggctgcacagctaggtctcaaaacaacctgtatcgagaagcgtggtaccctcggtggtacttgccttaacgttggttgcatcccatctaaggcgcttcttcattcatcccacatgtaccatgaagctacgcattcatttgctggccatggtgtgaaattctcctctgttgagattgatttgcctgccatgatggcccaaaaggacaaagctgtttctaatcttacccgtggtatcg

SEQ ID NO: 221924 - DNA, 439 bp, Gossypium hirsutum
atgtccacggcttcggtctccggcttctgcctctcttccaataccacctctccttctaactcactccggcaacccacattgcggcggccctctatcatcgccaacctcaactcttccacttctcctcctacactcatccgaaatcaaccagttttcgcagcacctactcctttgctcactccttccaattggaaagaaaccatgggagacgagtcatacgaggaagccattgaagctctcaagaaactgctcaatgagaaaggagaattgaagagtgcagcgacggcaaaggtagagcaagtgacagctgagttgaagactgctgcttcctccgatgagtctgttgaccgcttgaaacaaggcttcatttacttcaagactgaaaaatacgaaaagaatcctgctctgtatggtgagcttgccaagggtcaaagcccaa

SEQ ID NO: 221925 - DNA, 437 bp, Gossypium hirsutum
cccacgcgtccgcaacaaaatcagttgcttcacaatggcctctacaaccatggctctttcttccccatcattcgccggtaaggcagtgaagttctccccttccacccctgaaatccggggaactggccgtgtttccatgaggaaaaccaccaagcctgttccttctggtagcccatggtacggtcctgaccgagttttgtacttgggtccactttccggtgagccaccatcttacttgaccggtgagttccctggtgactatggttgggacactgctggactctcagctgatcccgagacctttgctaggaaccgtgagctcgaagtcattcactgcagatgggccatgttgggagctcttgggtgtgttttccctgagctgttggctaggaacggtgtcaagttcggtgaagctgtatggttcaaggccgggtctt

SEQ ID NO: 221926 - DNA, 411 bp, Gossypium hirsutum
  unsure (1)..(411): unsure at all n locations
cccacgcgtccggtcggcttttgttggcaagtatgcagaggagttgataaagaacgcgaactacatcgtcacgccaggcaaaggtattttggcggcggacgagagcacaggcaccatcgggaagcgtctctcgagcatcaacgtcgagaacatcgagtccaatcgccaagccctccgcgagctccttttcacctctcccaacgcattatcctgcctctccggtgtcattcttttcgaggaaacactntaccagaaaacatctgacgggaaacccttcgttgaaatcctcgaagagaacaatgtcattccaggtatcaaggtcgataagggcaccgttgagatagccggcaccaatggcgagaccaccactcaagggttcgactccttgggtgcgcgtngtcagcaatacta

SEQ ID NO: 221927 - DNA, 435 bp, Gossypium hirsutum
actcttttgtatacctgtagcatatagtaatagtaagcagtaatagcaatggcctcctccatgatctaatcggcaaccatggccaccgggaaccgctcctccccggcacaggccaacatggtggcccccttcaccggcctcaaatctgcctctgctttcccagtcaccaggaaggccaacaacgacatcacttctcttgcaagcaacggtgggagagtgcaatgcatgcaggtgtggccgcctcttgggaagaagaagttcgagactctctcatacctgcccgatcttactcccgtacagttggctaaggaagtagattaccttcttcgctctaaatggattccttgcttggaattcgaattagaggagggattcgtgcaccgtaagtactcgagcttacccacgtactacgatggacgctactggaccatgtgg

SEQ ID NO: 221928 - DNA, 420 bp, Gossypium hirsutum
cccacgcgtccgatttttcctgcattttctttctctccaaacagaaatcttagatcatttctagacgcagcgaacgatggagaaagcgatcaaccgacagcaagttttgcttcaacaccttaatccttcagcttcttctttttcgtcgcaccaaaacaactctgccctctctgcatcggcttgtttagctggagatagcgctgcttatctaagaactaatgtatttggagatgatgtggtgatagtagcagcatataggaccgcgctttgcaaatccaagcgagggggtttcaaggatacttatcctgatgatttacttgcacctgttttaacggcagtgatagagaaaacaaatttgaatcctagtgaagttggggataatggtgtgggaacggtattggcaccaggatctcaacgagc

SEQ ID NO: 221929 - DNA, 432 bp, Gossypium hirsutum
caggctttgaggagtggttttaatggtcaaagagtggttgttttagagaaaagaagtctaaatgagagaaggttctgtcgagttcccattaaagcacagatgcaaacagggcttattggtaaaacccaaaagtggtgggagaaggggaatcaaccaaatatgaaagaagtgacatctgcacaagacctggtggactcacttttgaatgctggggataaacttgttatagtggattttttctctcctggttgtggtggctgcaaggctcttcatcccaagatttgccaattggcagagatgaatccggatgtgcagttccttaagctgaactatgaggagcataaatccatgtgttatagccttaatgtacatgtgttgcctttctttaggttctatagaggagctcagggtcgtttatgcagctttagctgc

SEQ ID NO: 221930 - DNA, 418 bp, Gossypium hirsutum
tgattcgtatacctgtagcatctagacatagtaagcagtaggagcaatggcctcctccaagatctcaccatgtggcattgtcaccgtgaaccgctcctccccggcacaggccaacatggtggcccccttcaccggcctcaaatctgcctctgctttcccagtcaccaggaaggccaacaacgacatcacttctcttgcaagcaacggtgggagagtgcaatgcatgcaggtgtggccgcctcttgggaagaagaagttcgagactctctcatacctgcccgatcttactcccgtacagttggctaaggaagtagattaccttcttcgctctaaatggattccttgcttggaattcgaattagaggagggattcgtgcaccgtaagtactcgagcttacccacgtactacgatggacgc

SEQ ID NO: 221931 - DNA, 434 bp, Gossypium hirsutum
  unsure (1)..(434): unsure at all n locations
agccttccgtcgggttgtggtccgtgccgcccccgccggcctttgaaattccgaaggaccaattgcggtccgcccccggccgtcctaataaccgattaaggtttccaaggtgaccagcctttgttcaatggaccaatgtaggcaagggaagtcggcaaaatggatccgtaacctcggaaaaaggattgcttttgagggctggcaacgggggtcccagtcccgaacccgtcggctgccggcgcactgctcgagctgctcccgcggcgagagccggtcgncgcgtgccgcccgggggacggactgggaacggttccctcgggggccttcncgggcgacgaacagtcgactcagaactggtacggacaaggggaatncgactgtttattaaaacaaagcattgcgatggtccctgcggatgctcacgcaatgtgatt

SEQ ID NO: 221932 - DNA, 440 bp, Gossypium hirsutum
cccacgcgtccgcccacgcgtccgagaatcataaaaataaacagagagagggaaaaaaaacaataaagagaaaaaatggatgaagaggagcatgaggtgtacggaggggaaatccccgacgaaggagagatggagggcgaattggaccctcagaacgccgacgtcgacatgtccgccgccgatgaagacgctgtcaaggaattggacgagatgaagaaacggttgaaggaaatggaagatgaagcggcggcactccgggaaatgcaggccaaagtcgagaaggaaatgggtgctgttcaagatcccgctggtgcaacagctaatcaggcgagcaaagaggaagcagattcacgatcagtttttgttggcaatgttgattatgcatgcacacctgaagaagtgcagcagcattttcaatcttgtggcactgtaaacagagt

SEQ ID NO: 221933 - DNA, 438 bp, Gossypium hirsutum
gcaattccaagacacaagaaccaagacacataccacgatggcaacaacgacggagaagcaagccatggttgttggaatcgacgacagcgagcacagtacgtacgcgctgcagtggatcctcgatcacttctttgctcctttcgcttccaatcctcctttcaagctcgtcatcgttcatgccaagccttctgcttcttctgctgttggtctcgccggacctggagctgctgatgtattgccctatgtggatgcggatttgaggaagatcgctgccagggttgttgagaaagccaaggaactctgccttagcaaatcggtacatgatgccgtagttgaagtgggggaaggtgatgcaaggaatgttctctgtgacgctgtagaaaaacaccatgcctccattctcgctgttggtagccatggttatggagctataaagag

SEQ ID NO: 221934 - DNA, 403 bp, Gossypium hirsutum
gatttttggacgaacttgggttgattcaccaggagagatgatcatgacgaatttgactactggggacaaagttgtgctttattttcaaccatgtggctggtttggagctggtcgttatgaagtggatggttatgtttataatgctgctgaggaacctaaaatattgatgacagggaagtggaatgagtcaatgagttatcagccatgtgatatggaaggagaacctcttcagggcacagaattgaaagaggtgtggcatgttgctgatactccaaaaaacgacaaattccagtttacatattttgcacacaaaataaatagctttgacactgcccctaagaagttgctagcatcagactctcgtctccggcctgatagatttgcacttgagaagggtgattta

SEQ ID NO: 221935 - DNA, 431 bp, Gossypium hirsutum
agagagctcccttcatacgttactaaattatcttctttctcttctcttaccatggatccttacaagtttcgtccttctagttcctttgattccccgttctggactaccaattctggtgctccagtttggaacaataactcatcacttactgtgggagcaagaggtccaattctccttgaagactatcatttggtggagaagctagctaatttcgacagagaacgcatacctgaacgtgttgttcatgctagaggagccagtgcgaaagggttctttgaggtcactcatgatatatctcagctcacatgtgctgatttccttcgtgcccctggagtgcagaccccgctcattgttagattctccacggttattcatgaacgtggtagtcctgaaactttgagagacccccgaggtttcgctgtgaaatttta

SEQ ID NO: 221936 - DNA, 424 bp, Gossypium hirsutum
cggacgcgtgggccacaaccatcttattttgtgaccacttacgcacaaatgatgaccttttcagtggagcaagcctccaccatggaaagatcagttggaggtttccaaattcctgcaggttccctcactgtcttctttgtggcagctatattgatcactctggctgtttatgaccgtctcgttatgccattatggaagaaatggaaaggaaaaccaggtttcagcagcctacagagaattgccttaggcttagcactatcaactatgggaatggcatctgccgcagtagccgaggtgaaaagactggaagtggctcgagccacgggtgcaagtgcaacgactggaaccctgcctgtaacagtgttcatattgatcccacagttcttcctagtgggtgccggtgaggctttcatttacacaggcc

SEQ ID NO: 221937 - DNA, 419 bp, Gossypium hirsutum
caaaatcagttgcttcacaatggcctctacaatcatggctctttcttccccatcattcgccggtaaggcagtgaagttctccccttccacccctgaaatccggggaactggccgtgtttccatgaggaaaaccaccaagcctgttccttctggtagcccatggtacggtcctgaccgagttttgtacttgggtccactttccggtgagccaccatcttacttgaccggtgagttccctggtgactatggttgggacactgctggactctcagctgatcccgagacctttgctaggaaccgtgagctcgaagtcattcactgcagatgggccatgttgggagctcttgggtgtgtattacctgagctgttggctaggaacggtgtcaagttcggtgaagctgtatggttcaaggccgggt

SEQ ID NO: 221938 - DNA, 413 bp, Gossypium hirsutum
gtttgtgaggaaagtaatgaatttgttttttttaagttcaagttgattctaaaagtttgtatttagtgcattaaaatatgaagttgaagatatgtcatgccagccagtattgctggtgaagttcttcagttggttctatatgatttggggagggctagccccatgtcaaagcataagcaaaagcaacagatacgtgaaatgataaaatcaagaggttgaataacggttatattatatgacaggtccaattctccttgaagactatcatttggtggagaagctagctaatttcgatagagaacgcatacctgaacgtgttgttcatgctagaggagccagtgcgaaagggttcttcgaggtcactcatgatatatctcagctcacatgtgctgatttccttcgtgcccctggag

SEQ ID NO: 221939 - DNA, 426 bp, Gossypium hirsutum
  unsure (1)..(426): unsure at all n locations
cggaatggcaggcctgtgctgaatggcaatggcaacccaagcctcctttttaactccatttttcttttgcaccccaaaatccggcgaccgcatcgccgccgtgttatggaaacaaccaccgttcctaaccgtccgtagcttcaagtccccaaaaagcatcatcgccccacgcaccatcaaagcccaagcaaccgaagaggaagccgagacaaccgccacanaggaagcaccagtcggtttcaccccaccagagctggacccaaacaccccatcaccgatcttcggcggcagcaccggcgggcttttacgcaaagcacaattgggagagttttacgtcatcacatgggagtcacccaaggaacaaatcttcgagatgccaacaggtggtgcagccatcatgagacatggtccgacctgctgaaattg

SEQ ID NO: 221940 - DNA, 419 bp, Gossypium hirsutum
aaaatcagttgcttcacaatggcctctacaattatttttctttcttccccatcattcgccggtaaggcagtgaagttctccccttccacccctgaaatccggggaactggccgtgtttccatgaggaaaaccaccaagcctgttccttctggtagcccatggtacggtcctgaccgagttttgtacttgggtccactttccggtgagccaccatcttacttgaccggtgagttccctggtgactatggttgggacactgctggactctcagctgatcccgagacctttgctaggaaccgtgagctcgaagtcattcactgcagatgggccatgttgggagctcttgggtgtgttttccctgagctgttggctaggaacggtgtcaagttcggtgaagctgtatggttcaaggccgggtc

SEQ ID NO: 221941 - DNA, 426 bp, Gossypium hirsutum
ctcaaattcagttaacaatttcacagtggttttttttagtctctctctcagccatggctgcagccatctccaccgtcgctgccgctgccgccgccaaccgagctctgggagtgtcagtcccaacctcagctttcatggggaagaaagtgagctcaagattcaacagcaccaggcaggttccttcgggaagttttaaggtgatggcggcggagaaagagatagacgaagagacacagaccgaaaaggaccgatggaaagggttggcttacgatatttcggacgaccaacaggacattactcgagggaaagggatggtggattccttgttccaagctcccatgaatgatggaactcactatgctgtcatgagttcctatgaatacctcagccaaggtcttaaaacgtacaatttggacaacaacatgg

SEQ ID NO: 221942 - DNA, 405 bp, Gossypium hirsutum
ggcgtccgagatgaagacattgttaagtctttctacaccttccccggccaatccatcgatttcttcggtgccttgagggctcgggtttacgatgacgaagtgaggaaatggatcagtgaggtcggagtcgcaagcgtagggaagaagttagtgaactcaagggaaggacctccaacatttgagcagccaaaaatgaccattgaaaagctattggaatatggaaacatgcttgttgctgagcaagagaatgttaagagagtccaattggctgacaaatacttgagtgaagctgccctcggtgaagctaatgaagattccatcaatagaggaactttctatggcaaagcagcacaacaagttggggttccagttcccgaagggtgcactgatccaaatgctgataac

SEQ ID NO: 221943 - DNA, 418 bp, Gossypium hirsutum
cccacgcgtccgtttagctatagcatacactactagtacccactactagcaatggcttgctcaatgatctcatcggctaccattgccactgcctctccggcacaggctaacatggtcgctcctttcaccggcctcaagtctgcctctgctttcccagtcaccaggaaggccaacaacgacattacttctctcgcaagcaatggcggcagagtgcaatgcatgcaggtgtggcctcctactggaaagaagaagttcgagactctctcatacctccccgatcttacacccgtgcagttggctaaggaagtggattaccttcttcgctcaaaatgggttccttgcttggaattcgaattagaggagggattcgtgcaccgtaaatactcgagcctacccacgtactacgatggacgctact

SEQ ID NO: 221944 - DNA, 401 bp, Gossypium hirsutum
cttccttccttttaattcctttggctatggttttttttggggtggtcgctgttaatgggaacggcgcattacctgaaacccacaaatcccctttctccgccaaggttggcctaccccaaatgctccgtggcggggtgattatggatgtcgtcacccctgaccaagctcgcatcgctgaagaagctggagcctgcgccgacatggctcttgaacgagtccccgccgacatccgagcccaaggtggcgtggcgcggatgagtgacccacaactcatcaaagaaattaagcacgctgtcaccattcccgtcatggccaaggctcgtattggccatttcgttgaggcccacatccttgaagccattgacatcgactatgttgacgagagcgaagtccttaccctc

SEQ ID NO: 221945 - DNA, 278 bp, Gossypium hirsutum
gtttcttttagctcacaggttccattgtttttcatttttaaagagcaaaaaacagaggggaaatcaatggaagggaaagaagaagatgttaaattgggagctaacaagttctcagaaaggcagcctattggaacagcagctcagtcccaaaatgataaggattacactgagccaccaccagcacccttgtttgagcctagtgagttgacctcatgggtctttttaccgagcttgaatcgctgagttcgttgctactttccttttcttggatatctcgg

SEQ ID NO: 221946 - DNA, 427 bp, Gossypium hirsutum
  unsure (1)..(427): unsure at all n locations
nccacgcgtnncgccacgcgtncgaaagaatgttaattttagaagaagaaaaatggctggtgttactctctcaacaacactgtctctccggttaccctcttatcctccacccacttactgttatcctacgcaccctgcccttttcaaaaccccttctctccaattccctccccgttccgccactcctactaacctcacccaccgttccaccggccttctgcctctcaatgccactgccgcgcccgaaaaaatcggaaaactcggcaccgaaatctccaacctaaccctcgaggaagcccgcacccttgtcgactaccttcaagagaaactcggcgtctccgccgccgctttctcccccgcagccgttccagttgccgcccccggtgttgccgatgccggagagactgttgtcgaagagaagactgag

SEQ ID NO: 221947 - DNA, 328 bp, Gossypium hirsutum
  unsure (1)..(328): unsure at all n locations
gtctgaccctgagacattgagatggatcgttcttgcagagctggttcactgcagatgggcaatgttgggagctgctggtattttcatcccagagttcttaaccaagattgggattttaaacactccatcgtggtactcagctggaacagaggaatacttcactgacaccacaactctcttcatcgttgagcttatttttatcggctgggctgaagggagaagatgggctgacattctcaagccagggtgtgtaaacacagaccccatcttccctaacaacaagctcaccgggactgatgttggatacccangtggcctgtggtttgac

SEQ ID NO: 221948 - DNA, 345 bp, Gossypium hirsutum
  unsure (1)..(345): unsure at all n locations
cccacgcgtccgaaaatcatggccactgtttttacgcaagcctctgccgctgttttccggccatgtgcatcgaaaacacggttccttactggttcttccggtaagttaaaccgagacgtttcatttaaaccagtggcttctacatcgactagctcattcaaagttgaagcaaagaaaggggagtggttacctggtcttccttcaccagcttacctcaatggcagtcttccaggtgataatggctttgatcctcttggattggctgaggaccctgagaacttaagatggtatgtacaagctgagctngtgaatggacgttgggctatgttgggtgttgcagggatg

SEQ ID NO: 221949 - DNA, 417 bp, Gossypium hirsutum
gggcgttagtcagcggcacagagaggtgtttgttgaataatattgaggagggagagggtggaaatggtgaatatgaagaactggagaagataagtccgagggtttttgaggatttgtcgccggaggctttgaagtatattgagaagctgcaagctgagttatctgatatggaggaggaactgactgctcaaaagaaggaaaatgtgcgaatggagtgtggcagggaaaacatgaatggtttgttagagtatttacgatccttggatgctgacatggtgacagaattatcccaaccatcatcggtacaagtggaggaaatgatccatcagcttgttcagaatatattgcaaaggttgttcaaggatgcctgtatgagagattcacggatagtaaacacgggaaatcttcaagatgctg

SEQ ID NO: 221950 - DNA, 410 bp, Gossypium hirsutum
gaaatttgcctatccccccaacttcattttctttatggctcaaattacatttcttgctgctgtttgtgctcttcttctatcacattcctttatatcaggagtgcaaggaacaagctttaccatagtaaacaaatgcaattacgtggtatggcctggagttctctcaaacgcgggcgtttccacaatttccaccacaggtttcactctccgaagaggtgaatccaaaaccattagcgccccggcatcatggggaggtcgtttttggggaaagacccattgctccctagattccgccggtaaattctcatgtttgacgggcgattgtgcttccgggaagctagaatgttcaaggaacggcgctgctacgcctgccactttggctgaatttaccttggacggtgccgggggtc

SEQ ID NO: 221951 - DNA, 419 bp, Gossypium hirsutum
cccacgcgtccgcggacgcgtgggtcttatttaatttttggtagcagagaggagatcatcacgagatggagaagaaagggacagtactgatgcaaaggtttgaggtgggacgattactgggtcaagggacattcgccaaggtttaccaagccaggaacctaagaaccggcgaaagttgcgccattaaaaccatcgataaagagaagataatgaaaggaggtttgatagatcaaatcaaacgtgaaatctcagttatgcgcctcgttaaacatcccaatgttgttcgactctatgaggtaatggctagcaaatcaaagatatatttcgtgatggaatatgttaaaggcggtgagcttttcaacaagatcgctaaagggaagctcaaggaagatgacgcccgacgctatttccagcaattg

SEQ ID NO: 221952 - DNA, 449 bp, Gossypium hirsutum
aaaaccggggcggccccacgcgtccggacggtttccatcaacggttggtgcctaacttttttttcttcctccaccaccacctcgtgtttttccgttcgtcgacgacctacattgcggccttcggtcgtcgctagcctaaactcttctccttctcctccgactcttatccaagaccgcccggttttcgctgcccctgttcctttgctcaccccgagagaagagatgggaaacaagtcctacgacgaagccattgaagctctcaagaaacttctcagtgagaaaggaagaactgaagctgaagcagcttgcagggtagatcaaataacagcagagttaaacacaacatcagctgacggcaaaccatctgactcttctgttgagagactgaaagaaggcttcgtttacttcaagaaagaaaaatatgaaaagaatcctgctctgtatggtga

SEQ ID NO: 221953 - DNA, 420 bp, Gossypium hirsutum
  unsure (1)..(420): unsure at all n locations
gcgagacttttttgaatacttgtaacatattttattgttaagcaccaataccaatggcggcctcaatgatctaatcggcgaccattgccaccatgaaccggtcttacccggaacaagcccaacatggtggcccccttcaccggcctaaaatctgcctctgctttcccagtcaccaggaaggccaacaacgacataacttctcttgcaagcaacggtgggagagtgcaatgcatgcacgtgtggccgcctcttgcgaagaagaagttcgagactctctcatacctgcccgatcttactcccgtacagntggctaangaagtagattaccttcttcgctctaaatggattccttgcttggaattcgaattagaggagggattcgtgcaccgtaagtactcgagcttacccacgtactacgat

SEQ ID NO: 221954 - DNA, 427 bp, Gossypium hirsutum
  unsure (1)..(427): unsure at all n locations
cccgggccgccccacgcgtccgncgacggcttccatcaacggttggtgccttttttctttttcttcctccaccaccaccggctcgttttccgctcgtcgacgacctacattgcggcctccggtcgcggctagccttaactcttctccttctcctccgacctctatccaagaccgcccggttttcgctgcccctgttcctttgctcaccccgcgagaagagatgggaaacaagtcctacgccgaagccattgaagctctcaagaaacttctcagtgagaaaggagaactgaaagctgaagcagctgcaatggtagatcaaataacagcagagttaaacacaacatcagctgacggcaacccatctgactcttctgttgagagactgaaagaaggcttcgtttacttcaagaaagaaaaatatgaaaag

SEQ ID NO: 221955 - DNA, 449 bp, Gossypium hirsutum
gggaaaacccggcgcgacccacgcgtccgaagggatcagaaaagagtggtggagcaacatgtctgtttaaccaggcattctcagtggggggcgatggaagtcaatggggaacttcaagtatgcccttgtggttccgggggcaatttacagcacctactcgttcataatgtgcaaagatgaaaacgagaggaactggttcatgtttttggtcttaccatttctggtgtttagattgattcactatcaactatggatttcatactctcgctatcgcactgccaaagggaacaaccggatacttgacaagagcatcgacttcgaccaagttgaccgagagagaagctgggacgatcagataatactgaacggaatattgttctacggggcggggatagtgttaaaagatcaatttaacatgcctttctttaaagccgacgggacactgatca

SEQ ID NO: 221956 - DNA, 420 bp, Gossypium hirsutum
aaaataattatttacaaaatggcatccgcttttgcttttgcttctggaacctcaccttgattcttaccctctaacagcctcaaacccaaacattcaccgcttcgtcgtcctttggcgcctattaacataagatccgaaagcatggctactgagaaactcggcatcaaagttgaaaccaacccctcagaatccaagctttctcagcttggtgtacgccagtggcccaagtggggttgtcctcctagtaaattcccatggacatatagttcaaaagagacatgttatctattggaagggaaagtcaaggtataccctgaaggtagcaatgactttgttgaaattggtgctggtgatttagttgagtttcctaaagggatgagttgcacttgggaagtttcagtggcttgtgacaaacactat

SEQ ID NO: 221957 - DNA, 429 bp, Gossypium hirsutum
gcgtccgaacaaaatcagttgcttcacaatggcctcttttactttggctctttcttccccatcattcgccggtaaggcagtgaagttctccccttccacccctgaaatccggggaactggccgtgtttccatgaggaaaaccaccaagcctgttccttctggtagcccatggtacggtcctgaccgagttttgtacttgggtccactttccggtgagccaccatcttacttgaccggtgagttccctggtgactatggttgggacactgctggactctcagctgatcccgagacctttgctaggaaccgtgagctcgaagtcattcactgcagatgggccatgttgggagctcttgggtgtgttttccctgagctgttggctaggaacggtgtcaagttcggtgaagctgtatggttcaaggccgggtc

SEQ ID NO: 221958 - DNA, 263 bp, Gossypium hirsutum
gttaccctcaagccttcattcaatgatgagaaacctggtgtaagaggggttccttcccttgctaggtccccttcttcttctttcaaggttgaagccagtggtggcaagaagatcaagaccgacaagccttacggaatcaatggtggtatgagcttgagggatggtgttgatgcctctggaaagaaaggtaagggaaagggtgtttaccaatatgttgacaaatatggtgctaacgtcgatgggtacaagcctatctacaacac

SEQ ID NO: 221959 - DNA, 420 bp, Gossypium hirsutum
tgagggaagatggaggcttcgaagtttttaataatgcaatcctgaatttgtcggggcggcacaaggagcatatcagtgcctatggtgagggaaacgaaagaagactgaccggaaagcatgaaacggccagcatcaacacgttttcatggggagtggctaatcgcggttgctcaatccgagttgggcgtgacactgagaagaatggaaaaggttacttggaagatcggcgtccggcatcgaacatggacccatatgttgtgacagcattgctggcagaaactacactattgtatgagccaacacttgaagctgaagcacttgctgctcaaaagattgctttgaatgtctaaattaaagcagtttagctttattcatagagatggttttctattttattttcaattaggctgggttttggga

SEQ ID NO: 221960 - DNA, 419 bp, Gossypium hirsutum
  unsure (1)..(419): unsure at all n locations
gcagctgcaccacacctccagagaagagggtttgtttaaaaaaaccgtcgccgttttggctgctttttttacttcgttctttctccttctccgaagttcctctttcgttctttcattaattcagtattgtaaaaaatggccgacggtgaggatattcaacccctcgtctgtgataatggaactggaagggtgaaggctgtttttgctggtgatgatgctccaagggcagtttttcccagaattgttggtcgtccccggcacactggtgttatggttgggatgggtcagaaagatgcctatgtangagatgaagcacaatctaaaagagtatccttactttgaaatatctattgagcatggtattgtgagcaaactggatgatatggaaaagatcttgcatcatacattctacaatgaac

SEQ ID NO: 221961 - DNA, 417 bp, Gossypium hirsutum
cctcactccgccatcttcaataatttcttcctttgatctttgttagagattagctttttaatttttcattatgggaaagatcaagatcggaatcaatggatttggaaggatcgggcgtttggttgcgagagttgctctccaaagcgatgatattgagctcgttgctgttaacgatcctttcatcaccactgaatacatgacgtacatgtttaagtacgacagtgttcacggtcaatggaagcatcatgagcttaaggtgaaggactcaaagacccttctctttggtgaaaagcctgtcacagttttcggtatcagaaaccctgaggaaatcccatgggctgaggctggagctgagtatgttgttgagtctactggtgtttttactgacaaggacaaggctgctgctcacttgaaggg

SEQ ID NO: 221962 - DNA, 392 bp, Gossypium hirsutum
  unsure (1)..(392): unsure at all n locations
cagaaggttcaaagatttttaagagaccaacttccatgggctgctacatctggggctgtgctaaatggattaggctcttcatttctttgtggggaaaagaggacccaagccctttggggtgctagcattggggccaaaggctcgccctcccctgctgctggaactagaaagttgatcgttgtggcagccgccgcacctaaaaagtcttggatccctgctgntaaaggtggtggcaacttcattgacccagagtggctcgatggatcgctccctggagactacggatttgacccactaggtcttggaaaagacccagcattcctcaaatggtaccgagaagctgagctgatccatggatgttgggccatggctgctgtcgtctgcatcttcgt

SEQ ID NO: 221963 - DNA, 424 bp, Gossypium hirsutum
atagcatacactactagtacccactactagctttgttttcctcaatgatctcatcggctgcgagggccactgcctctccggcacaggctaacatggtcgctcctttcaccggtctcaagtctgcctctgctttcccagtcaccaggaaggccaacaacgacattacttctctcgcaagcaatggcggtagagtgcaatgcatgcaggtgtggcctcctactgggaagaagaagtttgagactctctcatacctccccgatcttacacccgtgcagttggctaaggaagtagattaccttcttcgctcaaaatgggttccttgcttggaattcgaattggaggagggattcgtgcaccgtaagtactcgagcttacccacgtactacgatggacgctactggaccatgtggaagctgcccatgtt

SEQ ID NO: 221964 - DNA, 442 bp, Gossypium hirsutum
aaccgggggaccacgcgtccgcaccacccttttttaattaccacctaaactttactttaacataaccgaccgggtctacctggacttttccctctgcccgacctacttccgcaacgctactgccgccgacagcatccctctatgctccgacccttctccgttaggccgcctagtcctcggcctctacggcaacctccttcctctaactgtctccactttcaagcgcatgtgcacctcttcctcctacaaaaacaccctcgtccacaaaatattccctgggcagttcttccaagctggacgccaaggccgcagtagagaatacggcgaagtccgtttgccccctgccttggacttgcctcggaacactgagactgtcgactctaaggccttcttgcttaaacattcaaggcccggtgtcgtttccctttgtttgtcagagaac

SEQ ID NO: 221965 - DNA, 417 bp, Gossypium hirsutum
gagactcttttgtatacctgtagcatatatgtttagtaagcagtaatagcaatggcctgctccatgatctcatcggcaaccattgccaccgtgaaccgctcctccccggcacaggccaacatggtggcccccttcaccggcctcaaatctgcctctgctttcccagtcaccaggaaggccaacaacgacatcacttctcttgcaagcaacggtgggagagtgcaatgcatgcaggtgtggccgcctcttgggaagaagaagttcgagactctctcatacctgcccgatcttactcccgtacaggtggctaaagaagtagattaccttcttcgctctaaatggattccttgcttggaattcgaattagaggagggattcgtgcaccgtaagtactcgagcttacccacgtactacgat

SEQ ID NO: 221966 - DNA, 420 bp, Gossypium hirsutum
gttactggtctcttggatcctcctgatttaattaagcctccaaagatccttgtcatcgaaggactgcaccccatgtttgatgaacgtgtgagggatctgttagacttcagtatctatttggatatcagcaatgaggtcaaatttgcatggaaaattcagagggacatggctgagagaggacacagccttgaaagcattaaagccagtattgaagccagaaagcccgatttcgatgcctttatcgatcctcaaaagcaatacgccgatgcagtaatcgaagtgctcccaactcagctgatcccagatgacaatgaggggaaggttttgagagtgaggttgataatgaaagaaggggtggagcatttcagtccagtttacctgtttgatgaaggctcaaccatctcatggataccatgtgga

SEQ ID NO: 221967 - DNA, 416 bp, Gossypium hirsutum
cccacgcgtccgcccacgcgtccgcgcacagttagtttgatgccgacatcactgaagctgcatggccgatggatgaaaaacgggctactgcgtttggtttaatgaagattgacgaagaaggacgaatcatcgaattcgctgagaaaccaaaaggcgaccagctaaaagctatgcaggttgatactacaattttagggcttgatgatgagagagcaaaagaaatgcctttcattgctagcatgggcatatatgttgtgagtaaaaatgtgatgttgaatcttcttcgagaccagtttccgggagccaatgattttggaagtgaaataattccaggtgctacttccattgggatgagggtgcaagcttacctgtatgatggctactgggaggacattggtacgattgaggcattttat

SEQ ID NO: 221968 - DNA, 423 bp, Gossypium hirsutum
  unsure (1)..(423): unsure at all n locations
agactcttttgtataactgtagcatatagtttttgtttgcagtaatagcaatggcctcgtcgatgatctaatcggcaaccattgccaccgggaactgctcctccccggcacaggccaacatggtggcccccttcaccggcctcaagtctgcctctgctttcccagtcactaggaaggccaacaacgacatcacttctcttgcaagcaatggtgggagagtgcaatgcatgcaggtgtggcctcctcttgggaagaagaagttcgagacactctcatacctncccgatcttacacccgtacagttggctaaggaagtagattaccttcttcgctctaaatggattccttgcttggaattcgaattagaggagggattcgtgcaaccgaagtactcgagcttacccacgtactacgatggacgct

SEQ ID NO: 221969 - DNA, 424 bp, Gossypium hirsutum
aacatggagactagtgtcacgtgctacgctcttttttttgttcttcctggtgtctctgctaagcactcctcggcattagtctcccctccatccacatctccttccttcagctctaagagccttaaaacaagttcactatttggagaatcattaagggttgttccaaggtcatcattgaaggtttcaaaggcaaagcacactacttcactagtgacaaaatgtgaaattggagagtctttggaagagtttctcacaaaggcaacaacagataaggcattgattagattaatgatgtgtatgggtgaagcattaagaacaattgcttttaaagttagaacagcttcatgtggtggtactgcttgtgttaattcctttggtgatgaacaacttgctgttgatctacttgccaacaagcttctttttg

SEQ ID NO: 221970 - DNA, 422 bp, Gossypium hirsutum
  unsure (1)..(422): unsure at all n locations
cccacgcgtccgcccacgcgtccgattttcncgcatctttgtttgttcataaaatgatggtatagttttcttagaaaagccagagtgaaagaaagaaaaaaagtaaaagaaaaatggctttggcaagcttggtgagaagaaaggcataccttttgtctagaaacctgtcgaattcgcccgcagatgcgttgaaatactctttttcactcagcaatttctcgaggggtttcgcttcaggatctgaagagaacgacgtcgtcgtcatcggcggcggacccggcggctacgtggcagctatcaaggctgcacagctaggtctcaagacaacctgtatcgagaagcgtggtaccctcggtggtacttgccttaacgttggttgcatcccatctaaggcgcttcttcattcatcccacatgtaccat

SEQ ID NO: 221971 - DNA, 397 bp, Gossypium hirsutum
tatagcatacactactagtacccactactagctttggcttcctcaatgatctcatcggcgaccattgccactgcctctccggcacaggctaacatggtcgctcctttcaccggcctcaagtctgcctctgctttcccagtcaccaggaaggccaacaacgacattacttctctcgcaagcaatggcggcagagtgcaatgcatgcaggtgtggcctcctactggaaagaagaagttcgagactctctcatacctccccgatcttacacccgtgcagttggctaaggaagtggattaccttcttcgctcaaaatgggttccttgcttggaattcgaattagaggagggattcgtgcaccgtaaatactcgagcctacccacgtactacgatggacgct

SEQ ID NO: 221972 - DNA, 441 bp, Gossypium hirsutum
gggctggaaaaaccggggcggacccacgcgtccgagagaaagcactgaaaaagcaaaaccatggcttttgtttttttcctaaaaacttaaccggttttagacaagtctgagtgggttaagggtaacacctttcgccaaccttcaacttctgtggtgaggtgccaccctgttgcaccctccgaactaactgtgcgtgcaagctcatatgccgatgagcttgtcaagactgctaaagctattgcttcttctggccgtggaattttggccatggatgagtccaacgctacctgtgggaaacgtttggcctcaatcgggctagaaaacacggaggctaaccgccaagcctacaggacgttgcttgtttcagctactggccttggtcagtacatctcaagtgccatcctctttgaggaaaccctctatcaaaccacaattgatggc

SEQ ID NO: 221973 - DNA, 419 bp, Gossypium hirsutum
cacctctgccgctgtcgctatcccatctttcaccggccttaaagccggtgcaaccgcagctaaagttagcgccacagccaaggttgcagcctctccagtcccaaggggcagcatcaaggcctccctcaaagacgttggtgttgctgttggggcaactgctgcaagcgtaatccttgccagcaatgccatggccattgaagtcttgctcggcagtgacgatgggggtctggctttcattcccaaagaattcagcgtaagcccaggggagaagattgtgttcaagaacaatgccggattcccacacaatgttgtgttcgatgaggacgaaatcccaagcggcgtcgacgtatccaaaatctccatgcctgaagaagagctactcaatgccaaagacgagacttacgctgttaccttgactg

SEQ ID NO: 221974 - DNA, 424 bp, Gossypium hirsutum
  unsure (1)..(424): unsure at all n locations
ctctcttgttgctgctaaagctgctggggctgttgttatagtcatgctaaacaatggctggctctgctgaactgaaaggggtgatcttgtgaggatgattgcagagctagtcagtaagaaaaaagggaaatttgaccacattgtaatcgagactacagggttggcaaatcctgcaccaataattcagacattttatgctgaggatcangttttcaatgatgtcaagttagatggtgttgttactctagttgatgcaaaacatgctggctttcatttggatgaggtcaaaccaaanggagtggtcaatgaggcagtagagcaaattgcttatgctgaccgcataattgtaaacatgactgatcttgttggtgagccagaaattacgtccctggttaagcggataaggagcattaatggtatggct

SEQ ID NO: 221975 - DNA, 372 bp, Gossypium hirsutum
  unsure (1)..(372): unsure at all n locations
cgggccgaccacgcgtccgtccaaacccatggcatgtgtcattctaatattcatttcccctccaaaccactggcctgaggaggtggggaggcaaacctgaaaatgtgaaggatgctcaggaagtgttgttaatccaaccaaaggccaactttttggctcaactcggaaagtacaccggcaaaggagagtcagaggaggccaagcagggaatgtttgtaaagggttatgtctattagcatgtttgtatcttcaacagctctatgaatttcctgcactgaaaanttaattgaaagagcagaacactgatctttcattataaactccttggtttccccttttttccctctaataattatgttaaagcataagaat

SEQ ID NO: 221976 - DNA, 424 bp, Gossypium hirsutum
cccacgcgtccggaaattcgaaagtaccagattagtactgagcttcttatcaggaaattgcctttccagaggcttgttcgtgaaattgcccaggatttcaagactgatttgcgtttccagagccatgccgttcttgctcttcaggaagctgcagaagcataccttgtgggtctctttgaagacaccaacctgtgtgcgatccacgccaagcgtgttactataatgcccaaggacattcagttggctcgtaggatcaggggcgagcgtgcttaatttccaagtgtgttaatcacacacttagaatggagaaactattgtttgttgttaggcaaatgtgttgtactatttttttatgtttatttttaatcctcttttaggacaagattaaatgataggtttatcttagtgcgtaggttccaatgtt

SEQ ID NO: 221977 - DNA, 440 bp, Gossypium hirsutum
cggggcggacccacgcgtccggttaagggtcacacccttcgccaaccttccatttttttggggaggggccaccctgttgcaccgtctggactaactgtgcgtgcaagctcatatgccgatgagcttgtcaagactgctaaagctattgcttctcctggccgtggaattttggccatggatgagtccaacgctacctgtgggaaacgtttggcctcaatcgggctagaaaacacagaggctaaccgccaagcctacaggacgttgcttgtttcagctcctggccttggtcagtacatctctggtgccatcctctttgaggaaaccctctatcaaaccacaattgatggcaagaagatggttgatgttcttgttgagcagaacatagtccccggtatcaaggtcgacaagggtcttgttccactggctggctcaaacaacga

SEQ ID NO: 221978 - DNA, 421 bp, Gossypium hirsutum
cccacgcgtccgatattggcacctaagttgcttctgcaggaaaaatggcatccatggggatgacaacatcattccttagcaccactaacctcacaaagggttctccaagaattacccagcggagactagtggttgccaatgctgctaagggagctcaagtggagagtgtccagatgagcggtgagaggaaaacagagggcaacaatggcaggagggagatgatgtttgcagctgcagctgctgctatttgctcggttgcgggggttgcaacggcggagcctaaacgtggtagcgcagaggccaagaaggcgtatgctcctgtttgtgttactatgccaactgctaggatctgtcgcaactgaggcagtgccactgcacattgctcgagtgccatgagactatgcttgttatgggcaggggc

SEQ ID NO: 221979 - DNA, 420 bp, Gossypium hirsutum
ggacagtgaggctgagggacagtatcttgtgtttgtctgagcctgaactatcaaaaaccacgatcacagcttccgttgagggaccttacgggcatgaaatgccataccacttgatgtatgagaacctgattttagttgcaggtggcattgggatttcgccattcttagcgatcttaagtgatatcctccaccgcattaacgatggaaaaccatgtctaccaagaaagattttggttgtttgggccgttaaaaagtcggatgaacttccgcttctttcaagtatcgacatggaatcaatttgcccatttttctccaacaaaataaatctcgagattgatatttatgtcactcgagaatccgggccttcaatggaagaaggtaaggttcatgtggcatcgagctcttcctgccctttctcgg

SEQ ID NO: 221980 - DNA, 422 bp, Gossypium hirsutum
ctcaaattcagttaacaatttcacagttgttttcttcagtctctctctcagccatggctgcagccatctccaccgtcgctgccgctgccgccgacaaccgagctctgggagtgtcagtcccaacctcagctttcatggggaagaaagtgagctcaagattcaacagcaccaggcaggttccttcgggaagttttaaggtgatggcggcggagaaagagatagacgaagagacacagaccgaaaaggaccgatggaaagggttggcttacgatatttcggacgaccaacaggacattactcgagggaaagggatggtggattccttgttccaagctcccatgaatgatggaactcactatgctgtcatgagttcctatgaataacctcaccaaggtcttaaaacgtacaatttggacaacaac

SEQ ID NO: 221981 - DNA, 258 bp, Gossypium hirsutum
  unsure (1)..(258): unsure at all n locations
cgctatgtttcatctgatctgtttactcctgaatgtcttcttgattgccttgatttgtcctccgagcatcaagctatagatatcgccaaccgagtggaggcctcaatatatctgtggcgcagaaagaccaataccaaacctgtcaacaacacattccgctctagttcaaagtcgtcatgggacatggttaaggatctaatggttgatgctgaaaagagagaaatacttgcaaatagagctgaaagcctnctgctttgc

SEQ ID NO: 221982 - DNA, 423 bp, Gossypium hirsutum
tttagctatagcatacactactagtactcacttctagcaatggcttcctcaatgatctcatcggctaccattgccactgcctctccggcacaggctaacatggtcgctcctttcaccggtctcaagtctgcctctgctttcccagtcaccaggaaggccaacaacgacattacttctctcgcaagcaatggcggtagagtgcaatgcatgcaggtgtggcctcctactgggaagaagaagtttgagactctctcatacctccccgatcttacacccgtgcagttggctaaggaagtagattaccttcttcgctcaaaatgggttccttgcttggaattcgaattggaggagggattcgtgcaccgtaagtactcgagcttacccacgtactacgatggacgctactggaccatgtggaagctg

SEQ ID NO: 221983 - DNA, 425 bp, Gossypium hirsutum
agaggccggatttcaaaaccctttctctttattttttttagaaaagagggaccaaagtgaaagaaaatcgaagtatagatttgattttcaatctgcattttcagggtgtggaacaatgggtgcaggtggcagaatgtcggttcctccaagtcaaaggaaacaagaatcgggctcaatgaaaagagcccctatatctaaaccaccatttactctcagtgaaataaaaaaagccatcccaccacactgtttccaacgctcacttatccgttcattttcctatctcgtttacgacttcattttagtctctatcttttactacgtagccaccacttacttccgcaacctccctcagccactatctttcgtcgcctggccaatttattgggctcttcaaggttcagtcctcactggcgtttgggttatcg

SEQ ID NO: 221984 - DNA, 428 bp, Gossypium hirsutum
taccgaatcggaagtgccggcgctagaccgtacccgtaccgctgtaactctccgatcatccatgacggttttatgtagaagatttactgggcacgcaccagggaagataggatcggtgtttgcacaggtattttcaggaccgacaatgttcccgttgatgacattgttaagcttgttgacaccttcccgggccaatccattgactttttcggtgctctgagggccagagtttacgatgacgaagtgaggaaatggatcggagaggtaggagtcaatagtgtcgggaaaaagctcgtgaactcgagggaagggccaccatctttcgagcaacctacgatgaccattgagaagctgttggagtattggaacatgcttgttgcagaacaagaaaacgtgaagagggttcaattgctgcaaatatttgagtg

SEQ ID NO: 221985 - DNA, 382 bp, Gossypium hirsutum
cccacgcgtccgcccacgcgtccgcccactctttcggttgttccaaaaaaaggcaaacgatagttttggaacaatctcacatcattacataaaatagaaaaagggttttctttttcaacccaatactactataatacaaggttaaaattggtaagtgcaagttccaccctcatgaacatcgccgataaccccaccaacgtccatctccccggtatgtacaacaaggaagagaacccccgtgtccccattatcgtcactggtaacgatttctccacactgtatgctcctatcatacgtgacggtcgtatggagaaattctactgttcaccaactaaggactaccgcgtcggtgtttgcaaaggtattttcaggaccgactgca

SEQ ID NO: 221986 - DNA, 421 bp, Gossypium hirsutum
aaaaacagtttcatttccattctaagtttgtgttttttatttgccttttgtggggtttgtttaaaaaaaattcagcaaaaatgtttattgagagttttaaggtagagagccccaatgtgaagtacacggagaatgaaattcagtctgtttacaactatgaaactacagagcttgttcatgagaacaaaaatggaacctatcaatgggttgttaaacccaaaactgtcaaatatgaattcaagactgatatccatgtccctaaattgggggtgatgcttgtgggatggggaggaaacaatggttcaaccctcaccggaggtgttatagctaacaaagagggtatctcttgggctactaaagacaaggtacaacaagctaattactttggttcattgactcaagcattaacgatccgagttgg

SEQ ID NO: 221987 - DNA, 417 bp, Gossypium hirsutum
ggcagctccatgtctctcaaaacgcaataccatttgctccgttgtcttcttaatcgaccgggtttagctccatacaatgatgccgtcaactgggttgttttcatctgatggaatcatttaaaaatcaacacacttggattctctttcatttcacatatttgctaaaccaccaaccaccctccaatcctccggatctcaacacacagttccataattgttgtgtgtgggaaaacgaaaaagggaattcatggaagagaggcatattctgtttgggaaatatgagatggggagattgcttgggaaaggcactttcgccaaagtctactacgcgaaggaattaaaatcgggtgaaagcgtggcgataaaggtcatcaacaaagctgaggtaaagaaagaaggcatgatggagcagatcaa

SEQ ID NO: 221988 - DNA, 418 bp, Gossypium hirsutum
cccacgcgtccgcccacgcgtccgcccacgcgttcgcaccattgttccaagtttggtgtagaccaagctagaaccagcagccaacatggcctcattagcagcctccaccgctgccgcctcccttggcgtctctgaaatgctcggtaaccctctgaatttcagtggtggagctaggtcatcggctccaacaccatccaactcatccattttcaagaccgttgctcttttctccaagaagaaggccgctcctccaaagcccaaggctgctgctgtcgccccggccgatgaagagctggctaagtggtacggtccggacagaaggattttcttgcctgaaggtctgttagacagatcggagatcccagagtacttgaacggagaagttcccggagactatggatacgatccgtttggtctg

SEQ ID NO: 221989 - DNA, 452 bp, Gossypium hirsutum
gtaccgaattcgggattcggcccacgacctcacgcgggcctcctctcgtgaagaagaagttcgagacactctcatacctccccgatcttacacccgtacagttggctaaggaagtagattaccttcttcgctctaaatggattccttgcttggaattcgaattagaggagggattcgtgcaccgtaagtactcgagcttacccacgtactacgatggacgctactggaccatgtggaaactgcccatgtttgggtgcactgactcggctcaggtgttggaggagcttgagaattgcaagaaggaataccccaatgcattcattagaatcattgggttcgacaacgttcgtcaagtgcagtgcattagtttcattgcctacaagcctaaaggctactaagttgtttacttccctcctaggaattccatttgtttcaaagttgtacttaaatta

SEQ ID NO: 221990 - DNA, 435 bp, Gossypium hirsutum; identical to SEQ ID NO: 198145

SEQ ID NO: 221991 - DNA, 415 bp, Gossypium hirsutum
ggctctctactctacaattctgcttcctatcagtcagaacctgagatagtgaggtggctaagcaatggcagtttgcccagtatacaccacccaatctctcaactcaacatgttcaatctccacaccatcaaaaacccacttcagttctcaccacaaccacctagttttctacagaactagcaagagaactagcaagagaggtggcagcagctcatgtgtgataacctgctcagctggtgactcacaaacagttgtgattggtttagctgctgactcaggatgtgggaagagtaccttcatgaggaggctaacaagtgtgttcggtggtgcagctgagccaccaaagggaggcaaccctgattccaacacactgatcagcgatatgaccactgtgatatgtttagatgattatcat

SEQ ID NO: 221992 - DNA, 413 bp, Gossypium hirsutum
cccacgcgtccgcccacgcgtccgattactcactgataaccatgtccaagtgtagggatgaagaagatcccaccactcgaaaacccgaatacgatcgactaagcaaattgaaagctttcgatgaaacaagagctggtgtaaaaggacttgttgattctggaatcaaacatgttccaaggatgtttcatcatcaattcgagaataacccggtttcatgtggcatacaggttagtattcccattatagacctcgaaaaagtgaagcaaaatcgaactactcgtgaggagatcgtcgggaaagttcgaaacgcgtccaagacatggggattctttcaggtacttaaccatgggataccaatgaatgtcatggaggaaatgaaggacggtgcacgtaggttcttcgagcaagacgtt

SEQ ID NO: 221993 - DNA, 339 bp, Gossypium hirsutum
  unsure (1)..(339): unsure at all n locations
taccgaatcgcaggttcgacccaggcgtacgcccacgcgtncgcttttgtataactgtagcatatagtactagtaagcagtaatagcaatgggctggtccatgatctcatcggcaaccattgccaccgtgaactgctcctccccggcacaggccaacatggtggcccccttcaccggcctcaagtctgcctctgctttcccagtcactaggaaggccaacaacgacatcacttctcttgcaagcaatggtgggagagtgcaatgcatgcaagtgtggcctcctcttgggaagaagaagttcgagacactctcataccttcccgatcttacacccgtaca

SEQ ID NO: 221994 - DNA, 383 bp, Gossypium hirsutum
acccgggcaaatactattgcaccgttattgatgcacctggacaccgtgtttttattaagaacatgattaccggtacgtcacggtctgactgtgctgttctcattattgactcaaccactggtggttttgaagctggtatctctaaagatggtcagactcgtgagcatgctttgcttgcttttaccctcggtgttaggcagatgatttgctgctgcaacaagatggatgcaacaaccccaaagtactcaaaggcaaggtttgatgaaattgtcaaggaagtctcttcttatcttaagaaagttgggtacaaccctgagaagatcccgtttgttccaatctccggttttgagggtgacaacatgattgagagatctacaaacttc

SEQ ID NO: 221995 - DNA, 420 bp, Gossypium hirsutum
aaaatcagttgcttcacaatggcctctacaactttggttctttcttccccatcattcgccggtggggcagtgaagttctccccttccacccctgaaatccggggaactggccgtgtttccatgaggaaaaccaccaagcctgttccttctggtagcccatggtacggtcctgaccgagttttgtacttgggtccactttccggtgagccaccatcttacttgaccggtgagttccctggtgactatggttgggacactgctggactctcagctgatcccgagacctttgctaggaaccgtgagctcgaagtcattcactgcagatgggccatgttgggagctcttgggtgtgttttccctgagctgttggctaggaacggtgtcaagttcggtgaagctgtatggttcaaggccgggtct

SEQ ID NO: 221996 - DNA, 380 bp, Gossypium hirsutum
accacacacttatcaccagggggtgatgattattattatcgccgccgctgcgcccgggtttaaacatcaagcctaaccaccaggtggtgtgcaaggctcataagcaagaagatgatggaagccttctgtcccgcaggttggctctcactgtactcattggtgctgcccctgatggcatctaaagattctcctgctgatgctgcctatggtgaagctgcaaatgtatttgcgaagccaacaacagacacagaattcatgccatacaatggggatggattcaagctgtcgataccatctaaatggaacccaagcaaagaggtggagtttccaggtcaagcgcttgggtatgacgacaacttcaacaccaccagcaatgtgag

SEQ ID NO: 221997 - DNA, 410 bp, Gossypium hirsutum
cccacgcgtccgggcttcaatattttgatgtgacaaaggaccgcaactgggcctgtggtatcgtaagtcgtaagtttcctggagttccctatacgttttatccgcagagaaaagggtgtaaagtttctctgtaccaagatgcccatatcccagacggatttgttcctaaaattcctcttgccggaggcaagaattatgagccacatagatgctgggaagatatttttgatgctatcaccaatgctaaacacatgatctacattactggttggtctgtttatactgagatcgctttggtgagagactcaagaaggccaaagcctgggggtgacatcactattggtgaattgctaaaaaagaaagcaagtgaaagtgtcagggttaatatgcttgtttgggatgatagaaca

SEQ ID NO: 221998 - DNA, 411 bp, Gossypium hirsutum
ggtgactttgcgagactcaacttccctaaccttcgtcaccacggttcccacgtaggtgacgtacaagcctttgccttcctctgttgacgctaagcttcaagccatttgtgagagcttggtacaaaaccctaagcaagggagcaagaagaaatcatccaaggttacggcagacaccaaaagcaggaacaacaaaaaatccgacatggcagagccaaagcccgaggagaatacagcgaaagtggagaactcctcatctttgtctacggttcaatccgagagtgagggttcggctgtatcttcacctttatcagatcttacattctcggatttcgacgaacaaccatggccggaagtcgtttcttcttcggaaacttttatgttgtccaagtacccttcagagatcgattggga

SEQ ID NO: 221999 - DNA, 420 bp, Gossypium hirsutum
cccacgcgtccgcacgaacttcactctccagtctccaatggcggctgccgtctccacgcatgggtgctgtcaaccgagcaccgttgagtttgaatggatcaggtgccggagcttctgctccaagctcagctttcatggggaacagcttgaagaaagtgagcgctaggttcaacaacaacggcaaggctccagtgggaagtttcatgattgtggctgccaaagaaatcgacgaagacacacagaccgaccaggaccgatggaagggtcttgcttatgatatctccgatgaccaacaagacattaccagagggaaaggtatggtcgactcattgttccaagctcccatgaacgatggtactcactatgctgtcatgagcttctatgagtacattagccaaggccttcgcacatacgacttgg

SEQ ID NO: 222000 - DNA, 371 bp, Gossypium hirsutum
aaaatcagttgcttcacaatggcctttacaaccttggttttttcttccccatcattcgccggtaaggcagtgaagttctccccttccacccctgaaatccggggaactggccgtgtttccatgaggaaaaccaccaagcctgttccttctggtagcccatggtacggtcctgaccgagttttgtacttgggtccactttccggtgagccaccatcttacttgaccggtgagttccctggtgactattgttgggacactgctggactctcagctgatcccgagacctttgctaggaaccgtgagctcgaagtcattcactgcagatgggccatgttgggagctcttgggtgtgttttccctgagctgttggc

SEQ ID NO: 222001 - DNA, 418 bp, Gossypium hirsutum
attctccctctgtgtctctctatatctttcattccatagcttttttttggtaaaaggccgtggatgggaatggaagagttcacccagattgtcctaatgctgcaaatccctaccatgaatgtggtggactctgcttagagaagattgctgaaggcaaaggaccaaaggcaaaagaaactaaaaagtcattaagttcaaaatttcttgatgcttccagaagctttggccggaaaaagaagggatccgactctctgctgagatcccctaaagcactcgagactacccctgcaataggtgcagtttatcctggtggccctaggtcacctcgttctcatttttctagaaagaaaatggaagcagaaaacggtgagtcgtattcatcttccgagcaacactctggcgagatatattcccaaga

SEQ ID NO: 222002 - DNA, 414 bp, Gossypium hirsutum
cccacgcgtccgcccacgcgtccggctctttctcttgctctctttagagtaaatggcttgggcaatcctttgtagagctccgggatccattgtcaccatgtcttgctcaaatctgacaatgtgggtgtcctcaaaaccctctctttctgacacttcttcactctctttccgttctttcatcagcccttttcagctcccatctcagagctcaacccccggtaacccttccaggtcctcatctgtaaccccagttcactgtggtcttcgtgagcttagagaccgtattgattcagtaaagaacacgcagaagatcactgaagccatgaaacttgtggctgctgctaaagttaggagagcacaagaagctgttgtcaatggcagacctttctctgagtccctggttgaagttcttta

SEQ ID NO: 222003 - DNA, 275 bp, Gossypium hirsutum
caaagctcatggtggagaagcttccataatggttaccataggtggatgaaccatcgaaatatggtgtggtggtgatggaagaatcaacaggacaagtggacaaattcgtggaaaaacctaaattgttcgttggaaacaaaatcaatgctgggatttatctgctgaacccttctgttcttgatagaatcgaactgagaccaacctcgattgaaaaagaggtcttcccgaagattgcagccgagaagaagctgtatgcaatggtcctacccagggtt

SEQ ID NO: 222004 - DNA, 401 bp, Gossypium hirsutum
cccacgcgtccgcccacgcgtccggcggacagaatgagcaaggagctttctgcactcgctcgtagcagcatgaagatcaaggttgtcgctccacctgagcgaaagtacagtgtctggatcggaggctcgatcttggcttccctcagcaccttccaacaaatgtggatcgcaaaggctgagtatgatgaatcaggtccagcgatcgtccacaggaaatgcttctaaaatgcccataccatgaaagagagaagtactgtttcattgtttcttgatgcagcttggaactttgctttgttctaatggatttgttatccttctgtgtgttttcatgttggagtgaaacaatgaactttgagaaagccagtgatttgatttttgttccaattctttgaatctcagac

SEQ ID NO: 222005 - DNA, 364 bp, Gossypium hirsutum
  unsure (1)..(364): unsure at all n locations
ccacgcgtccgcccttttctacattcaagtgcgcgtgttttnttttccttcgnacaangccacanggcaagggagggacccttgtttccgtctgtgccggccgctcttgcgacaacaaaatcatttgcgagactttagcaaccagcgaaagtgattccgacgaccacctccacccggcggagaaacatattgaagaagaaatcccatcggatttcccgccagaatcgttttggttatccaaagacgccgagttcgactggttcgatcgtaacgctttttacgaacggaaagattcgcatactagaaattcatgtgccaactctgcaaacctcaaccctaatcttaactcgatctccaattctca

SEQ ID NO: 222006 - DNA, 407 bp, Gossypium hirsutum
gttaaggcaatggctaccctcagaatagctcttcgtaacgtccaccgcatcgttaatgccgccgccgtttccggccgtacaacaaccgttttcaggccacagtatggttgggtttcaacatatttttcaactaatattagtaacactcagccattaaacatcgatctttctaacgaagaaagcaaaaggcgtctttataacagattgttgtataggagcaaacaaagaggatttctggagctggatttggttttgggaaaatgggttgaagaacatatccattccatggatgaaaatggaattaaagctcttgttaatgtcctcgatttggaaaaccccgacctttggaaatggctaaccggtcaagaacaaccacccgaagcagtgactcttaatcctgtcttctc

SEQ ID NO: 222007 - DNA, 413 bp, Gossypium hirsutum
gaaaatcaaaaagaagaagaaaagagatccccatgatgtctcttacaatcccaacgaatcggtcaaaatcaattttgaagccaaagctggagacccaagtgatccccaaggcttcatccagatcattgattgtatgctcctccagcaatccttcctcctccgacaaatcggcttcatcactccaggccttctcagcggctctcgctctttcttccatccttctttcggctccactccctgctgttgcggacattgcggggctcactccttgcaaagagtccaagcaattcgccaagcgcgagaagcagcagatcaagaagctggaatcctcgttgaagctttacgcccccgatagcgcaccggctctcgccatcaaagccaccatcgagaaaaccaagagacggttcgacaac

SEQ ID NO: 222008 - DNA, 417 bp, Gossypium hirsutum
caaaaccagaaagtaaaaagaacagagctttgatatcctaagctaatgtcggacgaggaggaccatttcgagtccaaggccgacgccggcgcctccaaaacctatcctcagcaggccggtactatccgtaaaaacggctacatcgtcatcaaaggccgtccttgcaaggttgtcgaagtttccacttccaagactgggaagcacggacatgctaagtgtcactttgttgggatcgacatcttcactgctaagaagctggaagatatcgttccttcttcccacaattgtgatgtgccacacgtcaaccgtactgattaccaattgatcgacatttccgaggatggatttgtgagcttgctgaccgacagcggagacactaaggatgatctaaggctcccaactgatgaaaacttgttg

SEQ ID NO: 222009 - DNA, 414 bp, Gossypium hirsutum
cccacgcgtccggctctttgaatactccagtaccagtacaaggcaggtgattgaaaggagaaatctgcagtcagaaaggatcgatcgattggatccaatttcaacccttgagcttcagcttcaaagtagcacatgtgccatgttgggcaaggaaatagcagaaaagaccaaagagctgagacagctgagaggagaggagcttcaagggttagatcttgaagaattaaaacatctagagaaattacttgaaggaggccttaaccgagtcactcaaacaaaggatgaactatttttcaaagaaatcagcatccttaaaaggaaggaagtagaactgatggaagaaaaccagcaattgaaagagaaaatggggaattcacctcatgtggtccaaccagctgtggctcagcaaggcct

SEQ ID NO: 222010 - DNA, 407 bp, Gossypium hirsutum
gaagacacagttctctcatactaaaaaagacatggaagtttaccttgtaattagagattgggttgcattgcttgttgttgggttattaatgatatggggatggagaactttaaactgggtatggctggccccaaaaaggctcgaaaggtgcttgagacaacagggctttgcagggaatccttacaggttcctttctggtgacataaaagagctcttcactatgagcagacaaacaagagcgaaacctatgcctcttagtgatgatattgggccttatgttgttccttttcaacatcaaactgctaaccagtatggaaagaattcatttacgtggtttggtccaagaccaagggtgaacattacggaccccgaaaaaataagagaaatacttaacaaatttaatgact

SEQ ID NO: 222011 - DNA, 420 bp, Gossypium hirsutum
ctttgtgaatcctttcaacccttgctttaacgtcccttttttttttctgaattacagagagaatgggattttccaaagacaagaggaagcagctgaacctgaaactatatgtatcaaacaacaaagcgagctaagatttgatggagatagcaatgaagcagttgaagaagggaaagcaggagagtggttgaacctgagcttgggtgggaattcagtatcaacagcaggagattctgacactcaactaacaccagtttcaaccaaggttttctcatgtaacttctgcatgaggaagttttacagttcacaagccttgggtggccaccaaaacgcccacaagagggagaggggtgcggccaggagataccactcccagcggatgacgtcgtcgtctatgatggctttgccaatgattagtag

SEQ ID NO: 222012 - DNA, 404 bp, Gossypium hirsutum
tacaactcagcgtctccactctctttctctctttgcctccaaatggcttctgccacgcactgccaccactttttccctcctcaaaaccaccgcctccaccacctcttcctccgcctcccgctcttctgcatccctcatccgccttccctccactcgccgccacctcaaatcctcttctctcatccacagcctaggcttctcctccgctgcttctggggactctctgctttccctccatgcctcctccaaagttcgatctttcaagggaaaagggtcaagaggggttgtttcaatggccaagaagagtgttggggacttgactgccgctgatttgaaagggaagaaagtgtttgtgagggctgacttgaatgttccattggatgatagccagaacatcactgatg

SEQ ID NO: 222013 - DNA, 412 bp, Gossypium hirsutum
gcatatagtaatagtaagcagtaatagcaatggcctcctccatgatctcatcggcgaccggtgccaccgtgaaccgctcctccccgacaggccaacatggtggcccccttcaccggcctcaaatctgcctctgctttcccagtcaccaggaaggccaacaacgacatcacttctcttgcaagcaacggtgggagagtgcaatgcatgcaggtgtggccgcctcttgggaagaagaagttcgagactctctcatacctgcccgatcttactcccgtacagttggctaaggaagtagattaccttcttcgctctaaatggattccttgcttggaattcgaattagaggagggattcgtgcaccgtaagtactcgagcttacccacgtactacgatggacgctactggaccatgt

SEQ ID NO: 222014 - DNA, 409 bp, Gossypium hirsutum
  unsure (1)..(409): unsure at all n locations
cgacccacgcgtacggatgcttaaatntntgtaattctcactttttttttctttaaacacaccatcaattatcccgcgcgcttattttatttcttaacctcaccatattcaaccacttgtttgtcacaatggaactggaatggtgtctgcaaccatttcatgggaaatatgcttaatgttccaacatcaataccttcccttgatcaaaacctcacaccctttcgataccttgcaattcacataaccatacatctatcggtgataaatcttaatcaaagatagaccattggactttcaaataccctatagagcatgatattgcgagcaactgagattatatagaaaagatttggcatcataccttttataaaccgatcaaagatcaccaacagtccattacatgctcaaa

SEQ ID NO: 222015 - DNA, 433 bp, Gossypium hirsutum
ctccaccacagccaccctctccatcgctgtagccacggcggcgatgaatacgacgaccctaagttcccttgcattgagccaatcagttttcgggctgaagtcccaaagaaaaggccgctttaccatggcttcacacaaagtaacactgataactccgtcgggaaccaagcaattcgactgctcggacggcgactatatcctggaccgtgccgaggaagtaggaatggatctcccgtactcgtgcagggctggggcttgctcttcgtgtgcgggactgatcaaacaaggcaccgtcgaccaatcggacaatagcttccttgatgatgaattgattgatgcaggcttcgtcctaacttgtgttgccatccctaagagtgatgttatcattgagacacacaaagaggaggacctagtatcttaaaaggtgtcataa

SEQ ID NO: 222016 - DNA, 364 bp, Gossypium hirsutum
cccacgcgtccgcttttgtataactgtagcatatagtactagtaagcagtaatagcaatggcctgctccatgatctcatcggcaaccattgccaccgtgaactgctcctccccggcacaggccaacatggtggcccccttcaccggcctcaagtctgcctctgctttcccagtcactaggaaggccaacaacgacatcacttctcttgcaagcaatggtgggagagtgcaatgcatgcaggtgtggcctcctcttgggaagaagaagttcgagacactctcatacctccccgatcttacacccgtacagttggctaaggaagtagattaccttcttcgctctaaatggattccttgcttggaat

SEQ ID NO: 222017 - DNA, 422 bp, Gossypium hirsutum
gaaagcactaaaaaagcaaaaccatgggctcttcttctctacttaagacttcaccagctggagacatgtctgcgtgggttcagggtcacacccttcaccaaccttacacttgtgcggtgaggagccaccctgccgcaccctccggactaactgtacgtgcaagctaatatacccatcagcatagcaagactgctaaagctattgcttatcctggccgagggacttaccatatgaatgactgccaccctctctgacctaaagcgttcactctctatcaggctcgtaaacacagctgtttactgacccgcgtgctcatctgacctcgtcttagctgctcaacttattgatgacatatctggaggcgacatctgtgagctaactctatagctaaccacaatcgctggcatcaatatggttctttt

SEQ ID NO: 222018 - DNA, 420 bp, Gossypium hirsutum
ccacactctcaaattcagttaacaatttcacagttgttttcttcagtctctctctcagccgtgggtgcagccatctccaccgtcgctgccgctgccgccgccaaccgagctctgggagtgtcagtcccaacctcagctttcatggggaagaaagtgagctcaagattcaacagcaccaggcaggttccttcgggaagttttaaggtgatggcggcggagaaagagatagacgaagagacacagaccgaaaaggaccgatggaaagggttggcttacgatatttcggacgaccaacaggacattactcgagggaaagggatggtggattccttgttccaagctcccatgaatgatggaactcactatgctgtcatgagttcctatgaatacctcagccaaggtcttaaaacgtacaatttg

SEQ ID NO: 222019 - DNA, 409 bp, Gossypium hirsutum
  unsure (1)..(409): unsure at all n locations
cccacgcctccgctagcattagcactagcacttgtagctaccatggcctccgncgcatggggctcgctccattactcactcacaaccaacggcanatcatcatcattatcgccgtcgctgcgccaggtttcaaacatgaagcctacccagcaggtggtgtgcaaggctcaaaagcacgaagatgatggaagccttgtgtcccgtaggttggctctcactgtactcattggtgctgccgctgttggctctaaggtttctcctgctgatgctgcctatggtgaagctgcaaatgtatttggaaagccaaaaacagacacaaacttcatgccatacagtggggatggattcaagctctcgataccatcgaaatggaacccaagcaaagaggtggagttcccaggtcaagtgc

SEQ ID NO: 222020 - DNA, 411 bp, Gossypium hirsutum
  unsure (1)..(411): unsure at all n locations
accgatcgtcttcatggttaagcttcttgccctaccatttctcattacttatttcgtcacgtgtgttcccctagggaacactgcanctacaataacatcatgtacccaaacaccctaccccggtgtctgcaaccatttcatgggaaatggtgttaatgttgcaacatcaaaccttgcccttgatcaaacccgcttctccttccgtgaccttgcgattcaggtcaccctaaaccaagcggttcaagctcatcgcctcgtctctaccatggacttgacttctttcaatgagcgagccaaattggcttggaacgattgcttggagctctaccagaacaccatttcccatcttaaccgatcaaagagcaccaacagtccattagatgctcaaacctggttaagtgctgccattgc

SEQ ID NO: 222021 - DNA, 394 bp, Gossypium hirsutum
  unsure (1)..(394): unsure at all n locations
ctcaaaccccattacttgcaccctcttttaatttactgcccaaccagaaaaaccggggccggtcttaatccataaatgggctgcgcacatacacancaagggctagcaccattagctatctctatggcactcaatttttctccagttctatacactgccaatgcaattgcatccgaatttgatgtgataaatcatggaccaccaaacgaatcttatgtagatgatgatactaatgcacttagtccagtgacaaaatctgatttgaagcgccttttgtctgatttggagtcaacgaagaacttacacatcaattttattactgttagaaagctcactagcaaagctgatgcttttgagtatgctgaccaagttctggagcgttggtatcctacac

SEQ ID NO: 222022 - DNA, 415 bp, Gossypium hirsutum
cgagaaggaagcagtgaatgtatcccttggaatcctgtttagttatccatttgtgagagagggatgtgtgaataaaaccctgggaatcaagggcggttactatgacttcgttaaaggaagtttcgagctatggagtcttcagttccaactttcaagctctctctctgtatgaaaacacaccaaaccatcaccattgacaccatctttgttccttaactaccaatcctttttcttacaatgtactatgttcatgtctttatcgtctattacaataaatatagatgatagagatcacctgccgcccgccgtctgcggtggtggctgcggtggctctttccatctataaattctcctttgaagaggtgttcattattcggttttaattgaattaatcggtagaaatttacttcggttc

SEQ ID NO: 222023 - DNA, 261 bp, Gossypium hirsutum
  unsure (1)..(261): unsure at all n locations
ttcaattcctcatttcaagggagagagtgtatcagtgtttcttcccctctttacggaatgtctctccgccatggctctctccgtcnagaaaaccgcccgcggcccggagtacaagggcaaagacatgtcttaagctgacttcggtcgtctcgagatcgagttagctgaggttgaaatgcctggtttaatggcttgtagaaccgagttcggccctgcccaacctttcaaaggagccaaaattactggttctcttcacatgac

SEQ ID NO: 222024 - DNA, 419 bp, Gossypium hirsutum
agagtccaagctggcaaagatatttttgttaataaattgacattgcaacaggcgagggacgcgagagatgcattggcaaaattcatctatgcaagcttgtttgactggcttgtggaacaaatcaacaagtcacttggagttcataaaaaatacataggcaggtccataagcatccttgacatttatgggtttgaatcatttaagaaaaatagctttgaacagttttgtataaattatgcaaatgagaggctgcaacaacacttcaaccggtatctatttaagcttgggcaagaggagtatgggttggatgggattgattggaccaaagttgattttgaagacaaccaagagtgcttggacttatttgagaagaaaccattggggatattttctttgttggatgaggaatcaaaatttcc

SEQ ID NO: 222025 - DNA, 417 bp, Gossypium hirsutum
gggaccattgcacccattgccatcggcttcattgttggtgccaacatcttggccgctggggcatggtctggtggatccatgaacccagctcgctccttcggaccagcagtggctagtggcgacttcaacggcatatggatctactgggtgggaccactgatcggtggcggattgtctggtctcatctatggaaatgtgttcatgaactctgaccatgcaccattgtccaatgacttttaatcaagttattctcaggacagtctaatttgcttaatttgatcttttaatccattgcttagtgtaataaaatggcacttcttgttgttctttcctcttttagctttgggtttggttttgttttgttattgtttgtaaagttattgtcgccaatcgttgctatcgtggaaatgaatgagg

SEQ ID NO: 222026 - DNA, 288 bp, Gossypium hirsutum
cgaaatcgtgatgaccttcggattggtgtacacagtgttcgccacagccgttgatcccaggaacgcatgcttgggaacaatcgcaccattggcaattggtttcatcgtgggggccaacattttggcaggaggtgccttcgatggagcctcaatgaacccagctgtttcattcggaccagccttggttagctggacatgggacaaccactggatctactgggtcggaccccttatcggtggtgggctcgctggtctcatctacgagttcatctttatcagcaacaccca

SEQ ID NO: 222027 - DNA, 422 bp, Gossypium hirsutum
ctaacttctacattaggcaagaagctcctaaggtttgagagagatggcttcaaaaagatcggcgatcggttgccctcttttttgcactcaacattctcttcttttcacttgtcagtgctaattgttcttgcccttcccccaagccaaaaccaaaccccactccctccccaactcctgctgcggaaggaaagtgccccataaatacccttaaactaggtgtatgtgctgaggtgcttggtttagtcaatgtaactgttgggtcacccccagttcaaccttgctgcacccttatcaaaagccttgctgatcttgaagctgctgtttgcctttgcacagcgatcaaaggcaacattttgggtatcaatcttaatatcccagtttccctcagcttgcttctaaatgtctgctcaaaaaaagttcca

SEQ ID NO: 222028 - DNA, 413 bp, Gossypium hirsutum
cccacgcgtccgcccacgcgtccgaactactattactaccattatggcttcggctgctggttctgtttccaaacccaaccttcagattcaggcaaaaggaaagggtgttggttttgcagatttctcaggcctacacaactcctctactagccttccctttgccaggaaaacctctgatgacttccattcactcgttgcttttcagacatctgctctaggaagcaataatggcgggtacaggaaagggatggcagaggcaaagctaaaggtggctataaatgggtttggtaggattggcaggaatttcttaagatgctggcatggccgtaaggactccccacttgatgtcattgccatcaatgacactggtggtgttaagcaagcttttcaccttctcaaatatgattccaccc

SEQ ID NO: 222029 - DNA, 421 bp, Gossypium hirsutum
cggacgcgtgggcggacgcgtgggctgtcgcgtgggcgggactctcagactactggttcgagaccagctccaccatcacccccaaaaaacaaagcaaattgtagaagatggcaacacaagcacttgtatcatcgtctcttacctactcagtggagactgcaaggcagattcttggagctaaacgacaaattgggccttcaaggaaaggatcctttgttgttaaggcagcttcgactccacccgttaagcaaggagctgatagacctttatggtttgcatctaaacaaagcctttcatacttggatggcagccttccaagtgattatggatttgaccccttgggactctcagaccctgaaggtccaggagggttcatcgagcctaaatggctagcctacggtgagatcatcaacgggcgtta

SEQ ID NO: 222030 - DNA, 422 bp, Gossypium hirsutum
ctcaaatatctcatacaaggaattaaattgaatcaatggctcaaaccatgttgctcatgtctagccatgcggtgagcttgaagagagatcaccctttactccatttccaagctcaagggctcaagcctaaacctgtctctcatctcttcttcaatccattgtctaacggtgtccatacttcatccaaagctttcaccactttagctatctttaaatcaaagaccaaagcagctcccaagagggttgagccaaagtcaaagccaaaggttgaagatgggatctttggcacctctggagggattggttttaccaagcaaaatgagctctttgtgggacgtgttgccatgcttggttttgctgcatcattgctaggcgaagcaataacagggaaaggaatcctagcacagctgaatttggagact

SEQ ID NO: 222031 - DNA, 414 bp, Gossypium hirsutum
attccccaaaatttgtttcagtaatggctgccttagttatggcttcttcagttaccgtcaagccttcattcaatgttgagaaacctggtgtaagaggggttccttcccttgctaggtccccttcttctttcaaggttgaagccagtggtggcaagaagatcaagaccgacaagccttacggaatcaatggtggtatgagcttgagggatggtgttgatgcctctggaaggaagggtaagggaaagggtgtttaccaatatgttgacaaatatggtgctaacgtcgatgggtacagtcctatctacaacaccaacgactggtctcccagtggtgatgtttatgttggcggtactaccggattggcaatctgggcggttaccctagctggaattcttgccggtggtgcactttttg

SEQ ID NO: 222032 - DNA, 418 bp, Gossypium hirsutum
cgtgtgccccgacgacgtatacatcgttgaccaagctgaggaagaaggcattgatcttccgttctcgtgtagggctgggtcttgttcttcgtgtgccggagtgattaagcaaggctccgtcgatcaatccgacggtaatttccttgatgatgaccagattgctgcaggttttgtcctcacttgtgttgcttaccctcagagtgatgttgttattgagacccacaaggaggaacagcttaccgcttgattatatatgatactatataatataatcatcaactagaccaagatttaatcatctttttcctgtctgtttgatttatgtttgttcagtttggtcggagggatgatgttcatgtccctgtttgtgggagcctttaatgagttcatttgtaatggcatttcatgctttattttt

SEQ ID NO: 222033 - DNA, 258 bp, Gossypium hirsutum
cccacgcgtccgctatggcaaagcagcacaacatgttggggttccagttcccgaagggtgcgctgagccaaatgctgataactttgatccaacggctagaagtgatgatggaacttgcacttacaaattctagacctcgtattatagtagtattgggttgaaaaagaaaaccctttttctattttatgtaatgatgtgagattgttccaaaactatcgtttgccttttgttgttccaattatatgattttgctttctc

SEQ ID NO: 222034 - DNA, 440 bp, Gossypium hirsutum
  unsure (1)..(440): unsure at all n locations
gttcttaaggtttcgtcctcgtattctcattgatgtaaacaagatagacatgaccacaactgtgttgggtttcaagagatcaatgcctatcatgattgccccaactgccatgcaaaaaatggctcatcctgaaggggagtatgcaacagctagggctgcatctgctgctggaactatcatgacattatcctcatgggcaacttctagtgttgaggaggttgcttcgacaggacccggcattcggtttttccaactctatgtatacaaggacaggaatgtagttgcacagctcgttagaagagccgaaagggctggtttcaaggcaattgcccttacggttgatactccgagactcggtcgcagagaagctgatatcaagaacaggttcactttaccaccatttttgacattgaagaacnttgaagtttggaccttggcaa

SEQ ID NO: 222035 - DNA, 383 bp, Gossypium hirsutum
cttccaaaatcaattgcttcacaatggcctttttaacttttgctctttcttccccaacacgcgcgggttaagtaattaaattcttcccttccacccctgaaatcccgggaacttgccctgttttcattaagaaaaccaccaaacctgttccttctggtagcccattggaccggccttacccaattttggactttggttcaattttccgtgaaccaacattttacttgacccgtgaattccctggtgactattggtgggacacttcttgacttttaacttatccccaaacctttgcttagaaccctgagcttggagtcattcacttcaaattggccatgttgggagctcttgggtgtgtttttccttaacttgtggctaagaac

SEQ ID NO: 222036 - DNA, 414 bp, Gossypium hirsutum
cccacgcgtccgcttttgggcaatcaattttgtaagcaagtatggctaaggacggggaggttggtggtgagttccaagccaaggactaccatgatcctccaccagctccattagtggacggggaggagttgacaaagtggtcattttatagggctgtaatagccgagtttattgccacgctcttatttttatacatcactgtgttgacagtgatcggatacaagagtcaggttgaccctgataagggcagtgacgaatgcggtggtgttggcattcttggcattgcttgggcttttggtgggatgatctttatccttgtttactgcactgctggtatctctggaggacacatcaacccagcagtgacctttgggcttttcttggctaggaaggtgtccttagttcgagccatat

SEQ ID NO: 222037 - DNA, 415 bp, Gossypium hirsutum
gacggcttccatcaacggttggtgccttacctcctcttcttcctccaccaccacgtcctggttttccgctcgtcgacgacctacattgcggccttcggtcgtcgctagccttaactcttctccttctcctccgactcttatccaagaccgcccggttttcgctgcccctgttcctttgctcaccccgagagaagagatgggaaacaagtcctacgacgaagccattgaagctctcaagaaacttctcagtgagaaaggagaactgaaagctgaagcagctgcaagggtagatcaaataacagcagagttaaacacaacatcagctgacggcaaaccatctgactcttctgttgagagactgaaagaaggcttcgtttacttcaagaaagaaaaatatgaaaagaatcctgctctg

SEQ ID NO: 222038 - DNA, 417 bp, Gossypium hirsutum
  unsure (1)..(417): unsure at all n locations
cccacgcgtccgggcgatgatgctcctggagagacttggcacatggtcttcagcaccggaggagaggtcccctacagagaagggcaatccattggggtgattccagatggcgttgacaagaacggaaaaccacacaagctgagattgtactctattgctagcagtgctcttggtgattttggggactccaaaactgtatccctatgtgtgaaacgactggtatacaccaacgagaaaggagagcttgtcaaaggagtctgctccaatttcttgtgtgactngaaactctgggcggaagttaaaataactggacctgttggaaaagaaatgcttatgccaaaggatcccaatgccacaatcatcatgctcgctactggaactggaatcgctccctttcgatcatttctgtggaaaatg

SEQ ID NO: 222039 - DNA, 421 bp, Gossypium hirsutum
cccacgcgtccggtatgcggtaacaagagaaaaagatggtgaggcatctacaaagaaatcgctaaccttgcttcttctagccaagcaattggtgatagcaatggtggtgatagatacatggtcgttttttgtacattggtacttgcatcagaacaagtttttatacaaacaccttcatgttccgcatcaccggctggttgttccctattcatttggaggacagtatatgcatccaattgaggggttcttggacaccatgggcggaacattagctgtactcctcttcggcatgtctcctcggactgccatgtttgtctactgctttaccatccttaaattagtggatgatcattgcgggatgaagcttcccggaaaccccttttacctctattctaacaacaatgcggcataccatgatgtc

SEQ ID NO: 222040 - DNA, 401 bp, Gossypium hirsutum
cgcccacgcgtgccattatttctttatccaagcagagacacgacagtgcaatgcatgcaggtgtggcctgctacgtggaaagaagaagttcgagactctctcatacctccccgatcttacacccgtgcagttggctaaggaagtggattaccttcttcgctcaaaatgggttccttgcttggaattcgaattagaggacggattcgtgcaccgtaaatactcgagcctacccacgtactacgatggacgctactggaccatgtggaagctgcctatgttcgggtgcaccgactcggctcaggtattgaaggagcttgaggaatgcaagaaggaataccccaatgcattcattagaatcattggcttcgacaacgtgcgtcaagtgcagtgcattagtttca

SEQ ID NO: 222041 - DNA, 419 bp, Gossypium hirsutum
cccacgcgtccgcccacgcgtccggttagctatagcatacactactagtacccactactagcaatggcttcctcaatgatctcatcgctaccattgccactgcctctccggcacaggctaacatggtcgctcctttcaccggcctcaagtctgcctctgctttcccagtcatcaggaaggccaacaacgacattacttctctcgcaagcaatggcggcagagtgcaatgcatgcaggtgtggcctcctactggaaagaagaagttcgagactctctcatacctccccgatcttacacccgtgcagttggctaaggaagtagattaccttcttcgctcaaaatgggttccttgcttggaattcgaattagaggagggattcgtgcaccgtaaatactcgagcctacccacgtactacgat

SEQ ID NO: 222042 - DNA, 419 bp, Gossypium hirsutum
aattgggggagaggaaatacttcaggggatggtataatatagggccagttggtcctatggggaatagggctggtggaatgggtcgtagaggtatcatgggaaatgggggaaatggatttgggcagggcatgggtgcaacaccttctcccatgcacccacagtcgatgatgggtcaaggtttcgatcctgcttttggtggacccatgggaagaatgggcggttatggaggttttcccggtgctccaacgccaccattttcagggattttaccttcatttcctcctgttggaggagttggtttgcctggagtggctcctcatgttaaccctgcattttttggaagaggtatgcctatgaatggtatggggatgatgccctcgagtggtgtagatggacctaatatgggaatgtggtcagat

SEQ ID NO: 222043 - DNA, 419 bp, Gossypium hirsutum
caacgacatcacttctcttgcaagcaatggttggagagtgcaatgcatgcaggtgtggcctcctcttgggaagaagaagttcgagacactctcatacctccccgatcttacacccgtacagttggctaaggaagtagattaccttcttcgctctaaatggattccttgcttggaattcgaattagaggagggattcgtgcaccgtaagtactcgagcttacccacgtactacgatggacgctactggaccatgtggaaactgcccatgtttgggtgcactgactcggctcaggtgttggaggagcttgagaattgcaagaaggaataccccaatgcattcattagaatcattgggttcgacaacgttcgtcaagtgcagtgcattagtttcattgcctacaagcctaaaagctactaag

SEQ ID NO: 222044 - DNA, 436 bp, Gossypium hirsutum
  unsure (1)..(436): unsure at all n locations
cccacgcgtccgagagtctgcgcccctttcttagagttaccacagacggacatggcttgaatgagcatgacagcctctctccttccgagctcaagctccagtttgactagacttcctttcgagagctgctcgcagaggtgcgattgtggccaaggcgaccagcgccgaccaaggagacaaggccagcttggaaataatgaagcaagagggcagcaatgggaggagggaattgatctttgccgctgctgccgctgccgcttgctctgttgcaaatgttgcgatgggcgaagaagagcctaaacgtgggacggctgaagctaagaaaaaatatgctcctgtttgtgtcacaatgcctactgctagaatctgtcggaactgaaccttagtttctctgtatctaatgtggatntgtatgtgagattcatgtactgagttg

SEQ ID NO: 222045 - DNA, 372 bp, Gossypium hirsutum
ccaacccttccgaccaaaataagttgcttaatattttcctttacaaccatggttttttggtgccattaattcgccggtagggcagtaaagttttccctttccacccttgaaatccggggaactggccgggtttccatgaggaaaaccaccaagcctgttctttttggtagccaatggaccggccctgaccgagttttgactttgggtcacttttccggggggcacccatctacttggaccgggagttcctggggactatggtgggacactgctggactcttagctgatcccggacctttgctagaacccggagctcaagtcatcactgcagatgggccatgttgggagcctcttggtgtgttttccctgagc

SEQ ID NO: 222046 - DNA, 395 bp, Gossypium hirsutum
  unsure (1)..(395): unsure at all n locations
ctcaaaacccattacttgtaccctcaagaaactaatttcccaatcagtaaaaccatctggggcggaaccaaaaaatgggttggttaatgcacagcagggcctagcaccataagctatctttttggcactcaatttttctccagttctatacactggcaaatgcatttgcatcgggaattggatgtgataaatgagggccccccaaaggaatcttatgtaggtgatgatgctaatgtgcttagtcgagtgacaaaatctgatttgaagcgccttttgtctgatttggagtcaaggaagaaccttncacatcaattttattactgttagaaagctcactagcaaagctgatgcttttgagtatgctgaccaagttcttgagcgttggtatcctacac

SEQ ID NO: 222047 - DNA, 370 bp, Gossypium hirsutum
cccacgcgtccgaagacctcaaaattatcatttaaaacgtttctcttatatttccctcgcggaaaaccgagagaaaaaaatccatgttcttgtcgaacataagacaaagtgctgaatttcccggtggaaaccgtccatttttttccggtcccacgaggattttccgccccatgttgcggctgagaagctgaaaaccgcattatcggagctgctagtgccgtatgatttcttagccggaaggttgaggtcgaacccggaaacaggtcggctggaaatcgactgtaactcggccggaatcggtttcgcggtggcttcaagcgattatgcgttggatgatgttggagacttgatttatcctaatccagcattt

SEQ ID NO: 222048 - DNA, 441 bp, Gossypium hirsutum
cccacgcgtccgcaaattcagttaacaatttcacagtggttttcttcagtctctctctgagggcggggctgcagccatctccaccgtcgctgccgctgccgccgccaaccgagctctgggagtgtcagtcccaacctcagctttcatggggaagaaagtgagctcaagattcaacagcaccaggcaggttccttcgggaagttttaaggtgatggcggcggagaaagagatagacgaagagacacagaccgaaaaggaccgatggaaagggttggcttacgatatttcggacgaccaacaggacattactcgagggaaagggatggtggattccttgttccaagctcccatgaatgatggaactcactatgctgtcatgagttcctatgaatacctcagccaaggtcttaaaacgtacaatttggacaacaacatggatgg

SEQ ID NO: 222049 - DNA, 423 bp, Gossypium hirsutum
cccacgcgtccgaaattaataaaatcttgatttagttgctctgcttttgcttcggtgagactgagttccaagcaaaacccctttttgtttttcgtctgattcagctaaggtcttctttgggtagtttgagatttgagttattcatcatactatggcttctcaaccttctaagggatcagttcatgatttcactgttaaggatgcaagagggaatgatgttgatttaagtatttacaagggcaaggttttgttgattgccaatgttgcatcacaatgtggcttgaccaattccaactacactgagctgagtaaattgtatgagcaatataaagatcaaggttttgagattcttgcattcccatgtaaccagattggaggacaggagccagggaacaatgagcaaatcttagagtttgcttgcac

SEQ ID NO: 222050 - DNA, 426 bp, Gossypium hirsutum
atctactcctcacctcacctttctccttcgctgtatggccacttccgccgctggcggtgccattaacccatccaacactcgccttggatggattgggactggcgtcatgggtcgatccatgtgtgctcatctgatcaacgctggctactctctcaccgtcttcaaccgtaccctttccaaagcccaacccctcgttgacatgggtgcccgcctagcccaaacacctcacgacctcgctgcccaatccgatgtcgttttctccatcgtcggttacccttccgacgtcctccaggtcctactcgatccctttaacggagccctctctggcctccgtcccggcggcatactcgttgacatgacaacatcggagccttctctcgccgtcgaaatatccaccgccgcatcttccaagaactgctcctcaat

SEQ ID NO: 222051 - DNA, 421 bp, Gossypium hirsutum
cccacgcgtccgaattccccaaaatttgttttattaatggctgcctcagttatggctggttcagttaccctcaagccttcattcaatgttgagaaacctggtgtaagaggggttccttcccttgctaggtccccttcttctttcaaggttgaagccagtggtggcaagaagatcaagaccgacaagccttacggaatcaatggtggtatgagcttgagggatggtgttgatgcctctggaaggaagggtaagggaaagggtgtttaccaatatgttgacaaatatggtgctaacgtcgatgggtacagtcctatctacaacaccaacgactggtctcccagtggtgatgtttatgttggcggtactaccggattggcaatctgggcgggtaccctagctggaatttcttgccgtggtgcac

SEQ ID NO: 222052 - DNA, 430 bp, Gossypium hirsutum
acacaacataagttattctggtttttggtggttgcggcggcggcggcggcggggtttgggttccaatgcttaccttgattgttggatttgataccaaatctgccgctgctatttccaaatgcatgatcatgggggcatcagcatcgtcagtttggtataatcttagagtgccgcatcccacaaaggaagtgccaatcattgactacgatttggctcttcttttccagcctatgttgatgcttggcatcactgttggggtttgccttgagcgtcgttttcccttattggctcattactgtgctcatcatcatactcttcttaggtacgtcttcaaggtctttctataggggtattgaaatgtggaaagaagagacaattttgaataaagaactcaccaagccacaagaatcttttgtttattccaggggtg

SEQ ID NO: 222053 - DNA, 419 bp, Gossypium hirsutum
cccacgcgtccgtttccggtgagccaccatcttacttgaccggtgagttccctggtgagtagggttggtacactgctggactctcagctgatcccgagacctttgctaggaaccgtgagctcgaagtcattcactgcagatgggccatgttgggagctcttgggtgtgttttccctgagctgttggctaggaacggtgtcaagttcggtgaagctgtatggttcaaggccgggtctcaaatcttcagtgagggtggacttgactacttgggtaacccaagcttgatccatgctcaaagcattttggccatctgggcttgccaagttatcttgatgggagccgtcgagggttaccgtattgccggtggaccactcggtgaagtgactgacccattgtacccaggtggtagctttgaccca

SEQ ID NO: 222054 - DNA, 342 bp, Gossypium hirsutum
  unsure (1)..(342): unsure at all n locations
acacaacataagttattctggtncctataaattgtagcngcagcnccaactggggggcgttggtttatgtgggagggccacaccctaacctgtcaaaatctaaagggcctatttccaaatgcatgatcatgggggcatcagcatcgtcagtttggtataatcttagagtgccgcattccacaaaggaagtgccaatcattgactacgatttggctcttcttttccagcctatgttgatgcttggcatcactgttggggttgccttgagccgtcgttttcccttattgcctcagtaacacccccaatattacacttatctgttggaccacgccttaacttttt

SEQ ID NO: 222055 - DNA, 426 bp, Gossypium hirsutum
ctccgttgaaaacaataccgtttgcagccgattaaattgtagttgcagggccaggttagggtggtggcgccatgtcaaactccaagagcttagctgttcagattctaaagggcccatggctcatggttttcggctcactgttgatcatgtctgccgctggtgcaacctacatgtttagtctatactccggcgacattaaagaatcgctcggctatgaccaaaccaccctaaattatctcagtttcttcaaggatttaggcaccaacgttggggtcctttcgggtctcatagccgaggtaacacccccatggttcgtgttatctgttggtgcaggccttaacttctttgggtactttatggattgggttggccgtcaccaaaaggatccccaccaaagtgtggcaaatgtgtttgtatatttgcata

SEQ ID NO: 222056 - DNA, 402 bp, Gossypium hirsutum
gagaaagcactgaaaaagcaaaaccatggcctctgcttctctcctcaagacttcaccagttttagacaagtctgagtgggttaagggtcacacccttcgccaacctccacttctgtggtgaggtgccaccctgttgcaccctccggactaactgtgcgtgcaagctcatatgccgatgagcttgtcaagactgctaaagctattgcttctcctggccgtggaattttggccatggatgagtccaacgctacctgtgggaaacgtttggcctcaatcgggctagaaaacacggaggctaaccgccaagcctacaggacgttgcttgtttcagctccctggccttggcagtacatctcaagtgccatcctctttgaggaaaccctctatcaaaccacaattgat

SEQ ID NO: 222057 - DNA, 399 bp, Gossypium hirsutum
cgggggggcgcaggcgtccgtggaattgaaaccctaaaaattccactaaaattttgtcttcaaaggtttccttttcagggggggtggcaacaacttttttcttcgcgggcaccccgccccgaaaaccctaaggttcctttctttcaaccaatcttttttcgggcttaaaccccaacgaaatgggcggctcaacatggctggatacaaaggggcacttgtaacacccggaggaccccaagaattcggggggcccgacgacgtttacatcgttgaccaagctgaggaagaaggcattgatcttccgttctcgggtagggctgggtcttggtcttcgtgtgccggaatgattaagccagggctccgtcgatcaatcccgacgggtaatttccttgatgatga

SEQ ID NO: 222058 - DNA, 331 bp, Gossypium hirsutum
  unsure (1)..(331): unsure at all n locations
aaaccttaatcacccttccttttaaccaaatttcttttctncctaaaaccccaacaaaatgcccctcttaccattccttcatacaaaattacacttttaacaccctaaggaccccaaaaatttcttttccccaacatactttacatccttcaccaaacttataaataaagcattgatcttccgttctcgtgtagggcgggggggggctacttctgtcccggaatgattaaccaaggctccgtcgtacaatccgacggtaatttgccttgatgatgaccagattgttgcaggttttgtcctcacttgtgttgctaaccctcagagtgatgtt

SEQ ID NO: 222059 - DNA, 428 bp, Gossypium hirsutum
  unsure (1)..(428): unsure at all n locations
caagcagcaaggttttattgagaggcaggangttgaagcaaatggtagtggctacggtgggtgaatctggcatgaacctttcagatgatgttatagaaagtataattgacaagacctttgaggaagctgatacaaaacatgacgggaggatcgacaaggaagagtggagaagccttgttttgcgacatccatcccttctgaaaaatatgaccctgcaataccttaaggacatcaccacaacgttcccaagctttgttttccactctcaagttgatgatacctgagatcagcaattcgattcaagcttccatagaccggcttgtttcattctaggtggtttcaaatatgaatgccccaagagctagtgtatgtgatattctggtttattggttaaaaacaattcctagtgtgggtctaaattcaacaag

SEQ ID NO: 222060 - DNA, 399 bp, Gossypium hirsutum
ctgtcctagtctagcgattctcagttagtcttttctttaagcttacattttctctccagagttttataatgggtcaggagaaggttcacatcaacctcgatgtcattggccatgtcgactctggcaagcagaccactactggtcatttgatctacaagcctaagaggtattcgacaagcgtgtgattgacaggatcgcgaacgacgctgttgaaatgaacaaaaggtcattcaagtgtgctcgggtgcttcacaagcttacggctgtgcgtgaacatagtatcaccactgatatatacctgtgcaagcttgcgaccacacaatactattgcgccgttattgatgcacctggacaccgtgactttatcaagaacatgattaccggtacctcacaagctga

SEQ ID NO: 222061 - DNA, 410 bp, Gossypium hirsutum
cccacgcgtccgagagataagagaaagcactttaaaagcaaaaccatggcctctgcttctctcctcaagacttcaccagttttagacaagtctgagtgggttaagggtcacacccttcgccaaccttccacttctgtggtgaggtgccaccctgttgcaccctccggactaactgtgcgtgcaagctcatatgccgatgagcttgtcaagactgctaaagctattgcttctcctggccgtggaattttggccatggatgagtccaacgctacctgtgggaaacgtttggcctcaatcgggctagaaaacacggaggctaaccgccaagcctacaggacgttgcttgtttcagctcctggccttggtcagtacatctcaaggtgccatcctctttgaggaaaccctctatc

SEQ ID NO: 222062 - DNA, 413 bp, Gossypium hirsutum
gcggcgggaaccaacttgaagcgcggctaacaactggttacaagccctcgggcctgttttgtcgccgtttctacccaatttccaaggataaagaagatgattattgcaatgctcctggggttgaaaccagggtccctgaatttggttctaccaactcccttctctaccttaaccctaatctcaagagtctcacggcatacatggcaccgttggtgaagttcctggaagggattggttatgtgagtggtgaaaccatgtttggagctccgtacgactttcgatatggcttagcagctgaaggccacccatcccacgtgggatccaagttcctgcaagacctaaaagatttgatagaaaaagcaagcgcttccaatggagggaaaccggtgattctcctcttccacagcttggga

SEQ ID NO: 222063 - DNA, 410 bp, Gossypium hirsutum
attgagtttaaacaccgagtcatcatcatttatggttatcgaggcttggtttatgggtgaaggcaaagaagaccaaaggcttcctaatcgacgcaaccccaacgaacctgtttcgttggagcacttggcagagctgggagtgttgtattggcatttgaaccccaaggattacgagaacgatgaagagttgaagaagattagagaagccagaggttataattacatggatttgcttgatttatgccctgagaaagttgacaactatgaggagaaactgaggaacttttacaccgagcacatccatgctgacgaagagatacgctactgcctggaaggcagtgggtatttgatgttagggacaaggatgaccgatgggattcggatttggatcaaaggaggagactattata

SEQ ID NO: 222064 - DNA, 425 bp, Gossypium hirsutum
ccacgcgtccggttctagatcgcgatctagaacacaaaatcatttgtttcacaatggcctctacaaccggggcgctttcttccccatcattcgccggtaaggcagtgaagttctccccttccacccctgaaatccagggaactggccgtgtttccatgaggaaaaccaccaagcctgttccttctggtagcccatggtacggtcctgaccgagttttgtacttgggtccactttccggtgagccaccatcttacttgaccggtgagttccctggtgactatggttgggacactgctggactctcagctgatcccgagacctttgctaggaaccgtgagctcgaagtcattcactgcagatgggccatgttgggagctttttggtgtgttttccctgagctgttggctaggaacggtgtcaagttc

SEQ ID NO: 222065 - DNA, 423 bp, Gossypium hirsutum
aaaactcagaaacacgcaggaaacccaaagtttttttctttttttttccctcttttttggtacacaaaggtaataattttcgaaaatggcatttgctgttacctcctctccggctgcaatttctggttccagcttttctcgttcaagtgcctcatctgatctcagaattccgcaaattggttcatttcggctagcggatcgccatgcaacggtgaatctatctcaaaagcgttgcgcagtgaagcccgtgaatgcggagccaaagaggaacgattccatgctttctcatgctgcaaccacctctgctcctgaagtgtcggaaaaagttgaggtggaggattttgaccaattggccaaagaacttaacaatgcttctccactcgaaatcatggattaggctcttgagaaatttggaaacgacat

SEQ ID NO: 222066 - DNA, 431 bp, Gossypium hirsutum
ggaatgggccagattttggccgccatggccgtcgcactcttgattcgcttgttctccgggcctggcccagctagcttgccggaagatgaaacctgtgaagaaaacgactccgtcaacggagatgatgctccgccatcagctggcaaagttcttccggtcaccataacgtggaggaacatcacatgttccctctccgataaacactcaaaatcagttcgctttctgcttaaagatgtgagtggagaggcaaaacctggaagattactcgccgtaatggggccatcaggatcaggaaaaaccactctgttaaacgttctggcgagtcagattttggcatcaccgcggttggcgttgtcagggtcttttggagttcaatggaaagcccagttcaactaaagcttacaaatttgcttatgtccgacaggaggatc

SEQ ID NO: 222067 - DNA, 226 bp, Gossypium hirsutum
  unsure (1)..(226): unsure at all n locations
aaaacaagcatggtgatctacttaataagtatctctacttgtcccgaagggtcgacatgaggcaaatngagaagacaatccagtatttgattggatcaggaaatggatccacgtactgagaataatccttatctgggattcatctacacatcattccaagaaagggcaactttcattttcccatgggaatacagcccggctcgcaaaggagcatggtgacatcaag

SEQ ID NO: 222068 - DNA, 420 bp, Gossypium hirsutum
cccacgcgtccggaggcttcctccgttgtcaacggagccgaaccgatgcgagcgtgcggtcgttggtaacaccataggtcaggcaaatggtgtgtatgataagccgctcgatctacgcttctgcgattacactaacgagaaatcgaacctgaaggggaaatctcttgcggctgcacttatgtcggatgctaagtttgatggtgcagacatgtctgaagctgtgatgtcaaaggcttatgctgttggagctagcttcaaaggtacagacttctcgaatgcggttttggatcgagttaatttcggaaaagcgaatctgcaaggagctatattcaagaacacagtgttatctggttcaacattcgacaatgcgcagcttgaagatgcagttttcgaagataccatcatcgggtccatggatct

SEQ ID NO: 222069 - DNA, 419 bp, Gossypium hirsutum
attaaaatttatttcttgttagcatctatccttgtagagaggtgagggtacctaagacacaataatgaagatgggagaggatggagctgcaagaaatcaccttcacaacaaccaagtgttcgacctctccattgatgtgcttccacaaggtgggaccaagtgctatgatgacgacggccgcctcaagcgatctggaaccgtgtggaccgctagcgcacatattattacagcagtcattggttcaggggttctgtcactggcttgggccacggctcagctgggatggatcgctggtccaatagtgatgattttgttttcttttgtaacttattacacctccactcttcttgcccgttgttaccgctctggtgaccctgttaacggcaagcgaaactatacttacatggatgctgtccgat

SEQ ID NO: 222070 - DNA, 388 bp, Gossypium hirsutum
  unsure (1)..(388): unsure at all n locations
ccggggcggccccacgcgtccgcccacgcgtccgcccacgcgtccgaaaagatatcttcaagcaaactgggttgttgaaggggcgtcgaagttgtgtgactcatgcaaataaccaacggcgactgtttcttgccgggctgcctcggcggttctatgctccaactgggactccaaaatccaacccagcaacaggctcgcctcgcgtcacgctcgagtttgggtctgtggagtctgcgaggcagcccccgctcacgtcacttgcaaggccgatgcagncgctctctgtattaccctgcgaccgtgacattcactccggcaacccttnttgctagcccgacacgagcgcccntncctgtaaaccccctcttctacgacttccgtcaaattc

SEQ ID NO: 222071 - DNA, 421 bp, Gossypium hirsutum
gttggttttagcatacactactagtacccattactagcaatggcttcctcaatgatctggtgggttaccattgccactgcctttccggaacaggctaacatggtcacccttttaaccggcctaaagtttgcctctgctttcccagtcaccaggaaggccaacaacgacattacttttttcgcaagcaatggcggcagagtccaatgcatgcaggtgtggccttctactggaaagaagaagttcgagactctctcatccctccccgatcttacacccgtgcagttggctaaggaagtagattaccttcttcgctcaaaatgggttccttgcttggagttcgaattggaggagggattcgtgcaccgtaagtactcgagcttacccacgtactacgatggacgctactggaccatgtggaagc

SEQ ID NO: 222072 - DNA, 403 bp, Gossypium hirsutum
gaacaccattgtgttgcacaacacatgtgaggttttcctgttggctgctcccattatcgtaggtttggttctccttgctgaacttagcaccaggatccagttcaaggctgatggagagggcaagttccacactttccatcctgtggctacaatcctcagttacctcaccaaagcccctcttgttccaccaggcacaccggtggtgaacgcactgtccaagcagcgtgcaatgctggagaacatactaagggccagcattggcttggctcctgaaaacaacatgattttggaatacaagtgaaaaagttgagagaaaagtggaacaaagctttggttcttagaactttaggaccattttccctttctctgtcgttttcataaaagctgtggttactgttgtcac

SEQ ID NO: 222073 - DNA, 423 bp, Gossypium hirsutum; identical to SEQ ID NO: 198200

SEQ ID NO: 222074 - DNA, 420 bp, Gossypium hirsutum
gcgaagctgatgaagcgcctgagactgttactggggatatagtctttgtccttcagcagaaggaccatccgaagttcaagaggaagggagaagacctgtttttggaacatactttgtctcttactgaggcattgtgtggctttcaattcgttataacccatcttgatggtcgacaacttctaatcaagtcgaaccctggggaggttgtgaagcctgattcttgcaaggcaatcaatgatgaggggatgccattataccagaggccattcatgaagggcaaattgtacattcagttcactgttgaattccctgattcccttggccctgatcaggttaaggcacttgaggccatcctgccttcaaaaaccaacctctcagttgagtgatatggagctagacgagtgtgaggagactacgcta

SEQ ID NO: 222075 - DNA, 418 bp, Gossypium hirsutum
gtccacttatttatcttcttatccacttccctctggtatttcatttatccctcgcccgtattctcttttactgcaaactgtgagcgagtgagtgagatggcttgctcagctacttcatcggccgcggctctcatctcctctaagccaagggctttctcctccaattccaagcccttctcccaatccctttctctccccaatcccttcactggtctccctgcccctctcctttctcgtcccgcctccttttccctctcccgcacctccccttctcgcaagtctttcgtcgtcaaagccaccagtgagcttccattggtgggaaatcctgcccctgattttgaggctgaggccgtctttgaccaggagttcattaaggtcaagctctccgaaatacattgggaagaaatatgtgattctc

SEQ ID NO: 222076 - DNA, 283 bp, Gossypium hirsutum
atcgttggtcggggaatcattaaggcagcgaacccagcggaggcagctcgtgagtaccgtcttcaaggatgggaagcatacatggctaaatgcacttaagagggtatcttatcttttaaatatgttacgtccctaataacataagggccaaattttgttgaatctatctatgattttgcatgattggcttgttatatttgtattacttgttgagggagatctttgggatcccattactgttttcatccttgtttgctgagggcaatttcttctatgttatttt

SEQ ID NO: 222077 - DNA, 391 bp, Gossypium hirsutum
aaccaccaccaacatagtccaacattttcatattattggctgcagtcacaaacgccggggctgcatcctccttaatggggacacccttccccgacgtctacacaagttcagggagattcgtcgccaggtttggttttggcggcaaaaaagcagctcccaagaaagcctcgaaacaaacctccaaccgccctttatggtacccaggagcggtggctcctgattggctcgatggaagcttggtgggtgattaccggttcgacccgttcgggtagggaaaccagcggagtacttgcaatatgatttggattctttggaccagaaacctggctaagaatatggcttggtgagatcattggaacttagaaccgaagttgccgacgtgaaggcgacg

SEQ ID NO: 222078 - DNA, 417 bp, Gossypium hirsutum
ctgttctatccctctctatacacatggttaaggtgaagatcggattcaccggatgcggtaggatcggtaggtgggtgcttcgagttgcttaaaaaagagacaatgttgaactcgtccttgttaacgatccttttatcactactgattacatgacatatatgttcaagtacgacagtgttcacgggcaatggaagcatcatgaactcaaagcaaggattcgaagacccttctgtttggcgagaagccagtcactgttttcggtattaggaacccagaggagattccatggggcgagaccggagctgaatacattgttgaatcaactggagtgttcactgacaaagacaaggcagctgcccactttgaagggtggtgctaagaaagtaattatatctgccccaagcaaggatgctccca

SEQ ID NO: 222079 - DNA, 431 bp, Gossypium hirsutum
cccacgcgtccggagactcttttgtataactgtagcatatagtactagtaagcaggagtgagcaatggcctcctccatgatctcatcggcaaccattgccaccgtgaactgctcctccccggcacaggccaacatggtggcccccttcaccggcctcaagtctgcctctgctttcccagtcactaggaaggccaacaacgacatcacttctcttgcaagcaatggtgggagagtgcaatgcatgcaggtgtggcctcctcttgggaagaagaagttcgagacactctcatacctccccgatcttacacccgtacagttggctaaggaagtagattaccttcttcgctctaaatggattccttgcttggaattcgaattagaggagggattcgtgcaccgtaagtactcgagcttacccacgtactacgatg

SEQ ID NO: 222080 - DNA, 423 bp, Gossypium hirsutum
gggaactatagcaaagctttccctttatacattaactcgctcgagtatttcaagacccggtggaaatacgagaagaaccccaaaattagggaggctattacccagaaattcaccgagtatttacgccgtgccgaggagatccgtaccgttctcgatgaaggtgggcctggaccggctactaatgggggcgctgctgttgccactcgccccaaaagtaagcccaaggatggtagcggcggaggggaaggaggtgatgggaggatcccgatcaggctaagttgagagctgggcttgattcggctattattagggaaaagcctaatattaagtggaatgatgtggctgggttagaaagtgctaagcaggctttgcaagaagctgttattttgccagtcaaatttcctcaattttttactggaaaga

SEQ ID NO: 222081 - DNA, 405 bp, Gossypium hirsutum
ctcaaattcagataacaatttcacagttgttttcttcactctctctctcagccatgggtgcagccatctccaccgtcgccgccgctgccgccgccaaccgagctctgggagtgtcagtcccaacctcagctttcatggggaagaaagtgagctcgagattcaacaacaccaggcaggttccttcgggaagttttaaggtgatggcggccgaaaaagagatagacgaagagacacagaccgaaaaggaccgatggaaagggttggcttacgatatttcggacgaccaacaagacattactcgagggaaaagggatggtggattccttgttccaagctcccatgaatgatggaactcactatgctgtcatgagttcctatgaatacatcagccaaggtcttaaaacg

SEQ ID NO: 222082 - DNA, 385 bp, Gossypium hirsutum
aacacacaggaaacccaaagtctttcttcttttttttccccctctttttttatggacaggggtaataattttcgaaaatggcgtttgctgttacctcttccccggctgcaatttctggttccagcttttctcgttcaagtgcctcctctgacctcaaaattccgcaaattggttcatttcggctagcggatcgccatgcaacggtgaatctatctcaaaagcgttgcgcagtgaagcccgtgaatgcggagccaaagaggaacgattccatgctttctcatgctgcaaccacctctgctcctgaagtgtcggaaaaagttgaggtggaggattttgagcaattggccaaagaacttaacaatgcttctccactcgaaatcatgga

SEQ ID NO: 222083 - DNA, 326 bp, Gossypium hirsutum
cgggccggccccacccgtccggttttttgttttaagagtcgccctttggtgtttttttaatccaaccattgaggtgaggagggaggttttgctgtgggggaacctgcggttccggctccggttgcaagtccgccggcggcggcggttgcggttgcggcggttgcaagatgtcccctgagatgacctttgctgagcaacccacacttgagacactggttctgggcgtggccccccggaaggtgaattttgttggacctgaaatggaacttggggctgaaaatggctgcaaatgtggagataactgcacttgcaccccttgcatttgt

SEQ ID NO: 222084 - DNA, 422 bp, Gossypium hirsutum
tccgtgaaattcggccactttccaaagggtgccttcctgcatgttctgttgtctaggcgccatggccattctcaaatttccttcttaagacccttatattattcttccaatggatctttgcatctgcttttctcctccttttatcatgtcacgtaatttacccgttgaagagacaagggaactgtgctgctcagcagcttcagcacttgttactaaactgtcctatgcaatcttcatctttttatttgcagtggtaggagcaacattaggagccctgactggagcttttgttgggacgaaaacaaagatgggttgtcttcatggagccatggttggagccataaaaggcagctttttctccatcaatctcttcaaaatttcactcaaaatttgcagttccgaaatccgtgtctcaaaatcat

SEQ ID NO: 222085 - DNA, 423 bp, Gossypium hirsutum
cttgtcggaaggaagaagatatgggaagcgagtcatacgaggaagccattgcagggggggcgaagcttctcagtgacaaagctgatctcgggagtgtcgccgccgcaaaaatcaagcagataacagccgagttagaggcagctgccgattccactcagttcgacccggtcaagcggctcgagaccggtttccttcacttcaagaaagaaaaatttgacaaaaatcctgatctgtacggtgcacttgccaaagggcaaagacctaagttcttggtatttgcatgctccgactctcgggtgtgcccctcccacatcctgaatttccaaccaggggaggcttttatcgtccgtaacattgccagcatggtcccgccctatgacaagaaaaaaatactctggagctggggcggccatcgaatacgct

SEQ ID NO: 222086 - DNA, 336 bp, Gossypium hirsutum
cccacgcgtccgtcactgtatccatcgctgtagccacggcggcgacgaagacgacgaccctaagttaccttccatttaaccaatcagatttcgggctgaagtgccaaagaaaagggcgttttaccatggcttcacacaaagcaacactgataactacgtcgggaaccaagcaatacgactgctctgacggggactatatcctggaccgtggcgaggaagtaggaatggatctcccgtactcgggcagggctgtggctggctctttgagtgcgggactgatcaaacaaggaaccgacgaccaatcggtcgatagctgacttgatgatgaattgtttg

SEQ ID NO: 222087 - DNA, 414 bp, Gossypium hirsutum
cccacgcgtccgcccacgcgtccggcagcccggtttggcaggttcgtcgtggaggttcagctgttaagagctccgatgttatggcccggaccgctgaaaaaggtagcagtagaaaagaagttaccgaaactcgtcgcggtaaaattggtaacagtggcaacaacaatagtaacaaagccaaggtcttgaatttgaatgtgccaatgtgtattgggtataagcatcatttgaattgtagaatcgacaataacagtgccacggttgccggcattagcaccgacccgaacggcggcaggaatggtagaaccaacggccctaacgtcggaagcggtagtaacttttttaacttccggaatcttttcactaagaaagtttattaagcgtgtaaaccttttttaagttggattgtaattt

SEQ ID NO: 222088 - DNA, 413 bp, Gossypium hirsutum
cccacgcgtacgcaacgtctcaaattcaacgtcgacgttgtcgaaagtgagtggggagagggtgctaacctcgacgtttgggccgaaaaactcgcggccgatcgtacgcacaccattaaggctatttgtattgttcacaacgaaaccgcgactggagttaccaacaacttggccacagtgagaaaactactagatcattacgggcacccagcactgcttctcgtcgatggagtttcctcgatttgtgctctcgatttccgtatggatgaatggggagttgacgtaaccttaaccggctcgcaaaaggcgctttctcttccaaccgggatcgggattgattgcgctagcccgaaagctgtcgaggcgaccaaaaccgtgaaatcagtccgggttttcttcgataggaacgatta

SEQ ID NO: 222089 - DNA, 417 bp, Gossypium hirsutum
acgatactcaacggtgttttgtgattaaaaaaactaccaagattgtggcaaaacaagatggcttccctgcatgaaccatggctagtggagaacgggttgaaggggtctagcaaggagattcgccatggcaggactgcacacaacatgtcgtcttcgtcgttgcggaaaaaatcggacctgacgcttgtttccaaggttcggtatgcaatgcttaggcagttcctcgccaatcttcaagaggtcatattagggaccaagctctccgttctcttcccagctattccattggccattgttgctgagtgttatggatttggaagaccctgggtgtttgcattaagtttacttggacttacaccattggctgaacgagtcagctttctcaccgagcaaattgcttattacactggtccaaca

SEQ ID NO: 222090 - DNA, 420 bp, Gossypium hirsutum
atgttcagcactctagacactctgttcgagaaaacaggagtttccccgtcagaaatcgacggactcgtcgtcgatgtctcgttgttttcacctgcaccgtcgttaacatcccggattataaacaggtacaagatgagggacaacattaagtccttcagtctctccggaatgggatgtagtgcaagcatggttgcaatcgatatggtgcagcagttgttcaagacatacaagaaccagttcgccatcgttgtgagcaccgaatcaatcgctaggcattggtactgcggcaaagagaagtcaatgatgttatcgaattgcctgttccgtaacggagggtgttcaatcctcttaacaaacaaaagggacttgaaggatcgatgcttgttgaagttgaagtgtgccgtaagaaccaatatcggt

SEQ ID NO: 222091 - DNA, 414 bp, Gossypium hirsutum
gtgagactcttttgtataactgtagcatatagtactagtaagcagtaatagcaatggcctgctccatgatctcatcggcaaccattgccaccgtgaactgctcctccccggcacaggccaacatggtggcccccttcaccggcctcaagtctgcctctgctttcccagtcactaggaaggccaacaacgacatcacttctcttgcaagcaatggtgggagagtgcaatgcatgcaggtgtggcctcctcttgggaagaagaagttcgagacactctcatacctccccgatcttacacccgtacagttggctaaggaagtagattaccttcttcgctctaaatggattccttgcttggaattcgaattagaggagggattcgtgcaccgtaagtactcgagcttacccacgtact

SEQ ID NO: 222092 - DNA, 417 bp, Gossypium hirsutum
  unsure (1)..(417): unsure at all n locations
cccacgcgtacgcccacgcgtccgnnnagctccttcaagaatccctgccaacaccaggcttccatggaagaccactcactctttccccactcaatgctcttccaagagactggaagtgactgaattctctggacttcgatccagctcatgcgtcacctttgccaagaatgttagagatgcttcctttttcgacgtgctggctgcccaacttactcccaagggtgtaggggtaccatcaacatctgttaggggagaaacagttgccaaactgaaggttgcaatcaatggatttggacgcattggcaggaacttcctccgatgctggcatggcaggaaggactcacccctcgaggtggttgttggaaatgacagtggtggtgtcaagaatgcttcacacttgctgaaatatgactccat

SEQ ID NO: 222093 - DNA, 408 bp, Gossypium hirsutum
gtttttcaaaaatatgtgcaattttttttaaaaaaaaactcatgaacaattttattcgtggcggttgggaaaatgttatatgaaaactctctggtgtccgacttgttcgccgccgtggtttgctgcggcgttatattcgcgtttctcttactctggcaagtaaccgccaaatgcggcgtagatcagaaactgaataggaagcttgtgcatataagtatagggctagttttcatgctttgctggccattattcagtgcagggtatcgcggagcaattttagcagctataactcctggtgtcaatattatacgaatgcttcttatcggttctggaatttggaaagatgaagccactgtgaagtcaatgagcagatatggaaactacagggaacttctcaaaggaccactc

SEQ ID NO: 222094 - DNA, 414 bp, Gossypium hirsutum
cccacgcgtccgttttgttttctctccctccaattaagatgcagatcttcgttaagaccctgaccggcaagaccatcaccctcgaagtcgagagttccgacacgatcgacaacgttaaggcgaaaatccaagacaaggaagggatcccaccagaccaacaacgtctcatcttcgccggaaaacagctcgaagatggccggaccttggccgattacaacatccagaaggagtccaccctccatctcgtcctccgtctacgtggtggcatgcagatcttcgtcaaaaccctgaccggcaagaccataactttggaagtcgaaagctctgacaccattgacaacgtcaaggcaaagatccaagacatggaaggcatcccaccagaccagcaaaggctcatatttgccgggaaacaac

SEQ ID NO: 222095 - DNA, 413 bp, Gossypium hirsutum
  unsure (1)..(413): unsure at all n locations
ctnctttggggagaaagacgnnagnagcggaaaattttgaacgttactattaaggaaggataatgctatccttgcgcttcgctattcctaccgcgaatacattaactccgcccaagattaaaccaaaaccgggtttagtagtacaaaccgcttggaaccaaacggacctttttccttctcttcccaaacgaaatgattataagctacaagcagctaccacggacttatctgtggcgggagatataccggcggaggaggtggtggagcttacggcggagctgagcagagagttgatgccgaagcacgtagcggtgataatggacgggaacgggcggtgggctcggcagcggggattggcgacatcagcgggacacgaagccggtgtaaaggcgttgagggagctggtcgaacta

SEQ ID NO: 222096 - DNA, 355 bp, Gossypium hirsutum
ctcctcctccatggctcgatggcagcctccctggagacttcggttttgatcctctaggccttggatcagaccctgagaccttgagatggaacgtacaggcagagctcgtccattgcagatgggcaatgttaggagccgctgggattttcatcccagagttcctaaccaaaattggcattttaaacactccatcatggtactctgctggaaccgaggaatacttcactgacaccaccaccctcttcatcgttgagcttattttcatcgggtgggcagaagggagaagatgggctgacattctcaagcctgggtgcgtaaacactgaccccatattccctaacaacaagcttacggg

SEQ ID NO: 222097 - DNA, 373 bp, Gossypium hirsutum
ctcttttgtataactgtagcatatagtactagtaagcagtaatagcaatggcctcctccatgatctcatcggcaaccattgccaccgtgaactgctcctccccggcacaggccaacatggtggcccccttcaccggcctcaagtctgcctctgctttcccagtcactaggaaggccaacaacgacatcacttctcttgcaagcaatggtgggagagtgcaatgcatgcaggtgtggcctcctcttgggaagaagaagttcgagacactctcatacctccccgatcttacacccgtacagttggctaaggaagtagattaccttcttcgctctaaatggattccttgcttggaattcgaattaaaggagggatt

SEQ ID NO: 222098 - DNA, 430 bp, Gossypium hirsutum
cttatttcttcattataaaaaaagaaaagaaaagacatggctgctgttactgctgcagtctctgttccttctaccaaggccacctctctccctgctagaacctctcttgtctttcctgataggatcaccttcaagaaggtgcccgtttactacagagatgtttgcagtggggggagagtggtttctgtcagggcccaggttacaactgaagctcctgccaaagttgtaaaggaatccaagaaaaacgatgaaggtgttgtggttaacaagttcaggcctatcaacccttacattggtagatgccttctaaacactaagatcactggcgatgatgctcctggagagacttggcacatggtcttcagcaccgaaggagaggtcccctacaaagaaggacaatccattggggtgattccagatggcgttgaca

SEQ ID NO: 222099 - DNA, 416 bp, Gossypium hirsutum
gtgagactcttttgtataactgtagcatatagtactagtaagcagtaatagcaatggcctcctccatgatctcatcggcaaccattgccaccgtgaactgctcctccccggcacaggccaacatggtggcccccttcaccggcctcaagtctgcctctgctttcccagtcactaggaaggccaacaacgacatcacttctcttgcaagcaatggtgggagagtgcaatgcatgcaggtgtggcctcctcttgggaagaagaagttcgagacactctcatacctccccgatcttacacccgtacagttggctaaggaagtagattaccttcttcgctctaaatggattccttgcttggaattcgaattagaggagggattcgtgcaccgtatgtactcgagcttacccacgtactac

SEQ ID NO: 222100 - DNA, 414 bp, Gossypium hirsutum
caccaacatagtccaacattttcataacaatggctgcagtcacaaacgccgctgctacatcctgcttcatggggacacgcttccccgacgtctacacaagttcagggagattcgtcgccaggtttggttttggcggcaaaaaagcagctcccaagaaagcctcgaaacaaacctccgaccgccctctatggtacccaggagcggtggctcctgattggctcgatggaagcttggtgggtgattacgggttcgacccgttcgggttagggaaaccagcggagtacttgcaatatgatttggattctttggaccagaacctggctaagaatatggctggtgagatcattggaactaggaccgaagttgccgacgtgaaggcgacgcctgttcagccttacagcgaggttttggtct

SEQ ID NO: 222101 - DNA, 413 bp, Gossypium hirsutum
attccgatcagattcggaatcattgggtgtgccttgatagcccgcaaagtttctcgagctatccggcttgctcctaacgccactgtctccgccgatgccagccgctccttcgacaaagccgccaatttcgccaaggctaatggcttcccacctgacaccaagatctacggctcctacgagtcccttcttgacgaccccgacatcgacgccgtttatttgcctttacccactagccttcacctcaaatgggctgttttgacggctcacaaaaagaagcatctgctcacggagaaacccgtcgccttgagcgtggccgagtttgatcagattctaaaggcttgtgaagaaaacggggttcagattatggaccgtaccatgtgggtgcataatcccaaaacccataaaatgaagca

SEQ ID NO: 222102 - DNA, 390 bp, Gossypium hirsutum
ctcactcaacattcccatttccaatctccatttttcaaggtaaatatgccgatcagaggcagagcggttggccggcccgaagaggctactcaccccgatgctctcaaggctgctttggctgagttcatctcaaccttgatcttcgttttcgctggatcgggctcaggaatggtctttaacaagttgactgacaacggagcaaccaccccggctggtcttgtagccgccgctctagctcatggcttcggtcttttcgtcgctgtctccagtggcgccaacatcttaggtggccacatcaaccctgccggcaccttcggtgcttttgttggcggatacataaattttttgccccgcattttttactggaacggccaactcctaagtttaacc

SEQ ID NO: 222103 - DNA, 373 bp, Gossypium hirsutum
cccacgcgtccgcaacgtctcaaattcaatttcttcgttgtcgaaagtgagtgggggcggggtgctaaccttgacgtttgggccgaaaaactcgcggccgatcgtacgcacaccattaaggctatttgtattgttcacaacgaaaccgcgactggagttaccaacaacttggccacagtgagaaaactactagatcattacgggcacccagcactgcttctagtcgatggagtttcctcgatttgtgctctcgatttccgtatggatgaatggggagttgacttagtcttaacccggttcgcaaaaggcgctttctctttcaacccggattggtattgttttgcctagcccgaaagctttcgaggcgtccaaa

SEQ ID NO: 222104 - DNA, 411 bp, Gossypium hirsutum
gggggctggacgtaaacaatcttcgtgaattagttgcacaggctcgcttcaaaggaatagctgtgagagcaatggtaattattaaccctgggaaccctactggtcagtgtctcagtgaagctaatttaagagaaatattgaatttttgttaccaagaaaacttggtattacttggagatgaggtttaccaacagaatatataccaggacgagcgcccctttatcagttctagaaaggtgttgatggatatggggccaccaattagcaaggaagtccagctcgtttctttccacactgtgtctaaaggatattggggtgaatgtgggcagcgagggggatactttgagatgaccaacatttcttcaaagacagttgacgagatatacaagattgcatcaatattcctcaatc

SEQ ID NO: 222105 - DNA, 386 bp, Gossypium hirsutum
ctccataaacacccaaagtaaaacgagtggagactttgagacaacatctgtggggtcccccctaaaaaagggtttgtaagagaaatggctactttcccagtgatcaacttagagaagcttaatggtgatgagagatcaagaatcatggagcaaatcaaggatgcctgtgaaaactggggattttttgaggtgatgaaccatgggattccacatgattttatggacactgttgagagattaacgaaagaacattataagaaatgtatggaacaaaggtttaaagaactggtagcaagcaaggctcttgaaggacttgaggctgaaattacggatatggattgggaaagtacatttcacttgtgccatcttcctgaatcaaacatggc

SEQ ID NO: 222106 - DNA, 400 bp, Gossypium hirsutum
ctccataaacacccaaagtaaaacgagtggagactttgagacaacatcttgtaggtcccccctaaaaaagggtttgtaagagaaatggctactttcccagtgatcaacttagagaagcttaatggtgatgagagatcaagaatcatggagcaaatcaaggatgcctgtgaaaactggggattttttgaggtgatgaaccatgggattccacatgattttatggacactgttgagagattaacgaaagaacattataagaaatgtatggaacaaaggtttaaagaactggtagcaagcaaggctcttgaaggacttgaggctgaagttacggatatggattgggaaagtacatttcacttgtgccatctccctgaatcaaacatggctgaaatcccagatc

SEQ ID NO: 222107 - DNA, 403 bp, Gossypium hirsutum
ttcatttcctttgccactttccctactttttcaaccaaaaaaaaaaaaccttcctttctcgtagctatggcgtttagaaccttagatatcaacgttatctctgcaaaaggcttgaaaaacgtcaacctcatcgataaaatggacgtttacgccgtcgtttcactcaagggtgattcatcgaagcaaaaattgaagacgctggtgcataaagattgtggcaaaaccccgaattggaattttccggtcaagttcaccgtcgatgaatcattggctaaaaacaataagcttagcatcaagttcaagatcatgtgtgaacgtatattcggtgataaagaacttggtgtagtcaacgttccggtcaaagagcttttggattcgccgggcgatggtgggtcaatgaaat

SEQ ID NO: 222108 - DNA, 412 bp, Gossypium hirsutum
  unsure (1)..(412): unsure at all n locations
aggaanggccggaccgacgcaggcggttagctttagcatacactactaatacccactactatcaatggcttcctcaatgatctcatcgggtccattgccactggctgtgcggcacaggctaacatggtcacccctttcaccggcctcaagtctgcctctgctttcccagtcaccaggaaggccaacaacgacattacttctctcgcaagcaatggcggcagagtgcaatgcatgcaggtgtggcctcctactggaaagaagaagttcgagactctctcatacctccccgatcttacacccgtgcagttggctaaagaagtagattaccttcttcgctcaaaatgggttccttgcttggagatcgaattggaggagggattcgtgcaccgtaagtactcgagcttacccacgt

SEQ ID NO: 222109 - DNA, 387 bp, Gossypium hirsutum
cccacgcgtccggagacaaccgccacaaaggatgcaccagtcggtttcaccccaccagagctgggcgccaaacaccccatcaccgatcttcggcggcagcaccggcgggcttttacgcaaagcacaagtggaagagttttacgtcatcacatgggagtcacccaaggaacaaatcttcgagatgccaacaggtggtgcagccatcatgagacaaggtccgaacctgctgaaattggctcgtaaagagcagtgcttggctcttgggactaggcttaggtctaagtacaagatcaagtatcagttttatagggtgttccctaatggtgaggttcaatatttgcaccctaaaaatggggtgtaccctgagaaggtgaaccctggtcgaca

SEQ ID NO: 222110 - DNA, 188 bp, Gossypium hirsutum
  unsure (1)..(188): unsure at all n locations
aaaccgggggcgacccacgcgnaccgcccacgcgnccgcccacgcgnccgaaaacaactgctncacaanggccncnacaaccagggcgggggcnnccccagcaggcgccggnaaggcagagaagnacnccccnnccaccccngaaaaccagggaaccggccgngangccangaggaaaaccaccaagc

SEQ ID NO: 222111 - DNA, 417 bp, Gossypium hirsutum
atttagctatagcatacactactagtacccactactagcaatggcttcctcaatgatctcatcggctaccattgccactgcctctccggcacaggctaacatggtcgctcctttcaccggcctcaagtctgcctctgctttcccagtcaccaggaaggccaacaacgacattacttctctcgcaagcaatggcggcagagtgcaatgcatgcaggtgtggcctcctactggaaagaagaagttcgagactctctcatacctccccgatcttacacccgtgcagttggctaaggaagtggattaccttcttcgctcaaaatgggttccttgcttggaattcgaattagaggagggattcgtgcaccgtaaatactcgagcctacccacgtactacgatggacgctactggaccatgtg

SEQ ID NO: 222112 - DNA, 390 bp, Gossypium hirsutum
ggagtctgacatgtgtgcgagtcaacgggctcaaatacccggaaggcgcaaggaagctgacgggcgggataccttgtgggtgcaccatcgaccgaccttgatcttttgagacgggtacgggtgacagcattcctttaagaaccaagaaggatggttaactatgcctgagcccgactaaaccagatgaaactctggtggaggaccgcaccaatactgacgcgcatatcttgcgactgacttgagtataatggcgaaagactaattgaaccgaatattagctggctcactgcacagttttcataatgattgcgggagcccttagcgagttttattatgtcaacccaatgattaaaggcatcttgggctgatcgaaatatagctattcttaaa

SEQ ID NO: 222113 - DNA, 364 bp, Gossypium hirsutum
ccgggaaatcattcaagtttcttaattttcattcgatatcgaagatgtcaggatgttgtgaaagggaggcaagggacttggcaagggaggagcgaagcgccaccgtaaggtcctccgtgacaacatccagggcattacaaagccggcaattcgacgcttggcccgtaggggaggagtaaagcgtatcagtggcttaatctacgaggaaacccgtggagttctcaagatcttcttggagaacgtcattcgcgatgctgtcacctacactgaacatgccaggaggaagacggtgaccgccatggatgtggtttatgcttttaagaggcaaggtatgactttgtattgattcgtcgttagtccattt

SEQ ID NO: 222114 - DNA, 414 bp, Gossypium hirsutum
cccacgcgtccgcagaggagttgatcaagaacgccaagtacatcgccacgccaggcaaagggattttggcggcggacgagagcacaggcaccatcgggaagcgtctctcgagcatcaacgtcgagaacatcgagtccaatcgccaagccctccgcgagctccttttcacctctcccaacgcattatcctgcctctccggtgtcattcttttcgaggaaacactttaccagaaaacctctgacgggaaacccttcgttgaaatcctcgaagagaacaatgtcattccaggtatcaaggtcgataagggcaccgttgagatagccggcaccaatggcgagaccactactcaagggttcgactccttgggtgcgcgttgtcagcaatactataaagctggtgcgcgtttcgccaaat

SEQ ID NO: 222115 - DNA, 431 bp, Gossypium hirsutum
  unsure (1)..(431): unsure at all n locations
cgggncgaccgacgcgnccggaaanataccagaaaancaaaaagaagaagaaaagaganccccaagagggcnctnacaagccgggcgaancgctcaaaagcaagggggaagccaaagctggagacccaagnganccccaaggctncatccagancanggangggatgctcctccagcaatccttcctccgacaaatcggcttcaccactccaggccttctcagcggctctggctctttcttccatccttctttcagctccactccctgctgttgccgacattgcggggctcactccttgcaaagagtccaagcaattcgccaagcgcgagaagcagcagatcaagaagctggaatcctcgttgaagctttacggccccgatagcgcaccggctctcgccatcaaagccaccatcgagaaaaccaagagacg

SEQ ID NO: 222116 - DNA, 386 bp, Gossypium hirsutum
cccacgcgtccgtaacaatttcacagttggtttcttcattctctctctcacccatggctgccgggatattcaccgtagatgtcgctgccatcgccaaccgagctttgggagtgtcagtcccaacctcagctttcatggggaagaaagtgagctcaagattcaacagcaccaggcaggttccttcgggaagttttaaggtgatggcggcggagaaagagatagacgaagagacacagaccgaaaaggaccgatggaaagggttggcttacgatatttcggacgaccaacaggacattacttgagggaaagggatggtggattcctttgttcaagctcccatgaatgatggaactcactatgctgtcatgggtttctatgaataacct

SEQ ID NO: 222117 - DNA, 412 bp, Gossypium hirsutum
acctccccaaaggcctcaccatctcaaaaccagccaacaactcaaacctaccttcttcactcgctggcagcgccattgctggagctatcttctcaaccttaagttcatgtgaccccgccttagctgcacaacagattgctgaaatagctgaaggagacaaccgtgggctagctctattgcttcccataatcccagcgatcgcttgggtcctcttcaacatcctccagccagcacttaaccagctgaatcgaatgaggagctccaaaggggttatcatagggctagggctcggaggattggctgcatcagggttcatgtcaacaccggaagcatcggccagtgagatagctatggtagctgatgctgcatctagtgacaataggggtacccttctcctcttcgttgtagcacc

SEQ ID NO: 222118 - DNA, 413 bp, Gossypium hirsutum
ggaagcttgatttcagtcctggtggtgtttccaccattttccaggttagtgatctcaaaagctcgcctggacctggaaaaaaggagcttagattggcaacaaaacaggctcttcaggttcttcaagataattatccagagtttgttgcaaaacaggtgtttattaatgttccttggtggtatctggcattctatacaatgattagtccatttatgacccaaagaactaagagcaagtttgtcattgcactgccatctaaatctgctgaaacacttttcaaatacataccacctgagcaagtgccaattcaatatggtggtttgagtgtggattattgtgattgcaatccagaattcagtgatgctgatcctgccactgagatgactgtgaaaccagggacaaagcaaactgtc

SEQ ID NO: 222119 - DNA, 410 bp, Gossypium hirsutum
ccggcctcaagtctgcctatgctttcccagtcactaggaaggccaacaacgacatcacttctcttgcaagcaatggtgggagagtgcaatgcatgcaggtgtggcctcctcttgggaagaagaagttcgagacactctcatacctccccgatcttacacccgtacagttggctaaggaagtagattaccttcttcgctctaaatggattccttgcttggaattcgaattagaggagggattcgtgcaccgtaagtactcgagcttacccacgtactacgatggacgctactggaccatgtggaaactgcccatgtttgggtgcactgactcggctcaagtgttggaggagcttgagaattgcaagaaggaataccccaatgcattcattagaatcattgggttcgacaac

SEQ ID NO: 222120 - DNA, 387 bp, Gossypium hirsutum
acactctcaaattcagataacaatttcacagttgttttcttcactctctctctcagccatggctgcagccatctccaccgtcgccgccgctgccgccgccaaccgagctctgggagtgtcagtcccaacctcagctttcatggggaagaaagtgagctcgagattcaacaacaccaggcaggttccttcgggaagttttaaggtgatggcggccgaaaaagagatagacgaagagacacagaccgaaaaggaccgatggaaagggttggcttacgatatttcggacgaccaacaagacattactcgagggaaagggatggtggattccttgttccaagctcccatgaatgatggaactcactatgctgtcatgagttcctatgaata

SEQ ID NO: 222121 - DNA, 421 bp, Gossypium hirsutum
gggaaggaccggggggaccgagacacccatggctactgattctcaattgaataactttccatgcatgaccttcttaataaccccacaaaacagtgactttacctcaaaacttccggttctgcctctaaactctacaaaaccaactcagaattcgatcaagaaatcttaatttttgacccagaaatcagtccagccaaggcctgttttccaggtccgtgctttggacgccgacgacgaatggggcccggacaaggaggagccagttgtaatcgagagtcctggagtggccgtggcggaagagaagaagcctgacgatgcgggggaaatagagagcttgaagaaagctttggtggattcgttttatgggacggatcgtggcttgaaagctagcagtgagaccagagctgagattgttgagctt

SEQ ID NO: 222122 - DNA, 398 bp, Gossypium hirsutum
  unsure (1)..(398): unsure at all n locations
cccacgcgtccgngcttcgacaggacccggcattcggtttttccaactctatgtatacaaggacgggaatgtagttgcacagctcgttagaagagccgagagggctggtttcaaggcaattgcccttacagatgatactccgagactcggtcgcagagaagctgatatcaagaacaggttcactttacccccatttttgacattgaagaactttgaaggtttggaccttggcaagatggatcaagctgatgactcgggtcttgcttcgtatgttgccggacaaatcgatcgttcccttagctggaaggatgtgaaatggcttcaaacaatcaccacattgccaattcttgtgaagggtgtactcactgctgaagatacaaggatagcggcagaggctg

SEQ ID NO: 222123 - DNA, 412 bp, Gossypium hirsutum
acttaattctcaatctcaaagtagaaagaagctgtgtttcgaagatttaaggataatattgagcaagaattcagcttttcatggagtttttcctcaggacgagaaagaggccgcgatcctactcatggccttatcgtatggtcttgttcatggttgaaatttctccccaccaccttagccttatatattgttgttttctaggtttaaataattagtgttgggagtgtagtagctaactaaggtcataaatgtttgaaactagaattgtcattgagtgtgaacaaaaagtaatttgttaaaataaagaaaaagagattagaaaagcaaaatgcatgtagaactttagagctttgattatcaggtgaatttgaacaggttggtaaccataattatggagctcttgttcttctac

SEQ ID NO: 222124 - DNA, 414 bp, Gossypium hirsutum
gtccccgacttttctcgctcttcctcctccacagcaaaagcagataaaaaacctacgctgatggctggtcgttacgataaaaatcctttcgacgaggaagaagaagaagttaatccttttgctgatacaacagcaagagggaaggcacctggccagtctaaatttggaggaggtctattttcaacgcgcactgcaagcgttccacctgcctcaaactcaagactttcaccactacctcctgaacctgctggttttagttatgagcgtgaggcaacagttgatatccctcttgatacagcttcaggaggatcacgtaatcaggatttaaagaagaaagaaaaggaactccaggccaaggaggctgaactgagaaggcgggaacaggaagtgagaaagaaagaagaggcagtggca

SEQ ID NO: 222125 - DNA, 414 bp, Gossypium hirsutum
gaaggttcagagattttagagagaacaaacaacaatggctgctacatctggggctgtactaaatggattaggctcttcatttctttgtgggggaaagaggagccaagcccttttgggtgctagcattggggccaaaggctcgccctcccctgctgctggaactagaaagttgatcgttgtggcagccgccgcacctaaaaagtcttggatccctgctgttaaaggtggtggcaacttcattgacccagagtggctcgatggatcgctccctggagactacggatttgacccactaggtcttggaaaagacccagcattcctcaaatggtaccgagaagctgagctgatccatggacgttgggccatggctgctgtcgtcggcatcttcgtcggccaagcttggagtggcattcc

SEQ ID NO: 222126 - DNA, 403 bp, Gossypium hirsutum
  unsure (1)..(403): unsure at all n locations
ggcctgnaagcaaaaggctactnnggaacaaagggctagcatnncaaactngactgggggggaaggagctgncaacgggcaaggagaggancaaaagaagctcgacgttgtttctaatgaggtgttctctaactgtttgagatcaagtggaaggacagggattatagcatcagaggaagaagatgtgccagtggcagtggaagagagttactctgggaactatattgaggtatttgaccctcttgatggatcatccaacattgatgctgctgtttcaacaggttcaatttttgggatatacagtcccaacgatgaatgcctagcagaaatagatgatgattccactcttggttcaacagaacaaagatgtgttgtgaatgtgtgccaaccaaggagtaatcta

SEQ ID NO: 222127 - DNA, 415 bp, Gossypium hirsutum
atccaatccaacttaaccaagttggaaacttaagagagagaaacagctagcaatggaacatggggtgaacctacaggataccagatgggaaggctatgctgattggaggaatcgacctgctctcaagggtagacatggtggcatttttgcagcctcctttgtcttggttgtggaagtgctggagaacctggcgtacttggcaaatgccagcaacctagtgatgtatttgtccaagtacatgcacttatctccatctaaatcggcaaacaatgtcaccaatttcatggggactgcctttcttctagctctgcttggaggtttcttatctgatgctttcttcaccacttatcacatctacttgataagcgcattcaccgagtttctggggttgatcattcttacaatacaagcacgg

SEQ ID NO: 222128 - DNA, 436 bp, Gossypium hirsutum
  unsure (1)..(436): unsure at all n locations
ccgggccgacccacgcgaccggngagactctnnngnataactgnagcatatagnactaggaagcagnaatagcaagggcctgctgcgtgatctcatcggcaaccattgccaccgtgaactgctcctccccggcacaggccaacatggtggcccccttcaccggcctcaagtctgcctctgctttcccagtcactaggaaggccaacaacgacatcacttctcttgcaagcaatggtgggagagtgcaatgcatgcaggtgtggcctcctcttgggaagaagaagttcgagacactctcatacctgcccgatcttacacccgtacagttggctaaggaagtagattaccttcttcgctctaaatggattccttgcttggaattcgaattagaggagggattcgtgcacccgaagtactcgagcttacccacgtacta

SEQ ID NO: 222129 - DNA, 419 bp, Gossypium hirsutum
gcaactcccgatatgggaagttcaccaccgtcagaatgtcatctacttcccagtcaacaacaaaggccgccgcgaagggtggcaagaaagctgccaaaaccgccatcaaagagacccttttgacaccaaggttttacacaaccgactttgatgaaatggaggcgcttttcaacactgagattaacaagaaccttaaccagtccgaatttgaggcactgctgcaagagttcaagactgattacaatcagactcactttgtaaggaacaaggagttcaaagaagctgctgataagattgatggtcctttgagacaaatcttcgttgagttcttggagaggtcttgtactgctgagttctctggttttctcctctacaaagaacttggaaggaggctgaagaaaaccaatccagttgtggct

SEQ ID NO: 222130 - DNA, 404 bp, Gossypium hirsutum
cccacgcgtccgcccacgcgtccgcaaattcagttaacaatttcacagttgttttcttcaggctctctctcagccatggctgcagccatctccaccgtcgctgccgctgccgccgccaaccgagctctgggagtgtcagtcccaacctcagctttcatggggaagaaagtgagctcaagattcaacagcaccaggcaggttccttcgggaagttttaaggtgatggcggcggagaaagagatagacgaagagacacagaccgaaaaggaccgatggaaagggttggcttacgatatttcggacgaccaacaggacattactcgagggaaagggatggtggattccttgttccaagctcccatgaatgatggaactcactatgctgtcatgagttcctatgaata

SEQ ID NO: 222131 - DNA, 414 bp, Gossypium hirsutum
cccacgcgtccgcttatggccactcctctgttcctcagaaactctctattccctcctctccaccattcctttctttccttccccaaatcttctttcccttcgtttccttcctccattaaatcaaggcctctaacttctaccatgatgagaggaagtgaaataacagaggaagtttccgaaaccaaagaggcagtaaatgtggatacaaagaagaaaactatatttgtagctggagcaacgggtagtactgggaaaagggtcgttgaacagctactttctaagggattttcagtcaaggctggggttcgtgatttggggaaagctaaaactttgctttctaacgacaacccatctcttcaaattgtgcaagcagatgtgactgagggatcagcaaagctagcagaagccattggt

SEQ ID NO: 222132 - DNA, 371 bp, Gossypium hirsutum
cgcctggtaggattgtaagggcaattggagaattagctaaatctattggggctgaagggttggtggctggtcaagttgtggatataaatagtgagggactaacagatgtggggttggatcatttagaattcattcatgttcataaaactgctgctttgcttgaagctgctgtagttttgggggcaattcttggaggtggatgtgatgaagatgtggaaaggttgaggaaatttgcaaggtatattgagcttttgtttcaggttgcggatgacatacttgatgtgacaaaatcatctaatgaattagggaagactgcaggaaaagatttgttggctgataaagtcacttatccaaagttgattgggatagag

SEQ ID NO: 222133 - DNA, 405 bp, Gossypium hirsutum
acgcacacacgtccgtgcactgctccatgatctgatcggcaaccattgccaccgtgaaccgctgctccccggcacaggccaacatgggggcccccttcaccgccctcaaatctgcctctgctttcccagtcaccaggaaggccaacaacgacatcacttctcttgcaagcaacggtgggagagtgcaatgcatgcaggtgtggccgcctcttgggaagaagaagttcgagactctctcatacctgcccgatcttactaccgtacagatggctaaggaacgagattaccttcttcgctctaaatggattccttgcttggaattcgaattagaggagggatttttgcaccttaagaactcgagcttacccacgtaccacgatggacgctactggaccattggggaac

SEQ ID NO: 222134 - DNA, 416 bp, Gossypium hirsutum
cccacgcgtccgctcttctctcttgcttttcgtcttgcgttcttttgatatggcaggaaccggggtggttgcagtttatggaaacggggctataaccgagactcacaaatcccctttctcggtgaaagtggggctagcccaaatgctccgaggcggagttataatggacgtggtcactcccgatcaagctcgcatcgctgaagaagccggagcctgcgccgtcatggctctcgaacgagtccccgccgatatccgagcccaaggcggcgtggctcgaatgagtgacccacaactcatcaaagagattaagcaatccgttactatacctgtcatggcgaacgcccgtattggacatttcgttgaggcccagatcctcgaagccattggcatcgattatgttgatgagagcgaaattc

SEQ ID NO: 222135 - DNA, 414 bp, Gossypium hirsutum
ctctttctctctttgtctccgcccttttctcatggatccttttggtctcttctgtactggggctgttcttgcctgcggtctttactggttcgtctgccttttagggccggccgagcaaaagggcaagcgagccgtcgatctctccggcggctccatctctgccgagaaagttcaggacaactacaaacagtattggtctttcttccgccaaccaaaggagatcgaaaccgccgaaaaggttccagatttcgtcgatactttttacaacttagtcaccgatatttacgaatggggttggggtcagtccttccacttttctccttccattcgagggaaatctcaccgggacgctacgcgccttcacgaagagatggccgtcgatatgatcgaagtcaagcccggagatcgagtcct

SEQ ID NO: 222136 - DNA, 355 bp, Gossypium hirsutum
cccacgcgtccgcccacgcgtccgcccacgcgttcgcccacgcgtccggttggtgttattgaagacgaggaaaatgcctatactggaactagagtccggccctttgttgccacgccaagggttgaggatgagaagaagcaaagtcccactaccttgaacaagattttatgtcttgaagagcttttctctttggaggtttggagagcatctctggcagagctccttgggacagcagtgttggtcttcgcaatggataccatagtcatctcctcctacgagacacaaacaaaaacgccccaccttataatgtcatttcttattgctgtcactatcacagttctcctcctagccacgt

SEQ ID NO: 222137 - DNA, 402 bp, Gossypium hirsutum
atcggcttacccgccgttccagaaggttcgccgtcatcattcgaccgatactgatccccaacctattaaacttttgataggtcaattatgaggcaagatgaatgagatgatagaaaagcgtggcgtcatattagattaccttgtaagcccaacaattgtgagtggcacgcggatccttgaattggttgaggaaagagtgagcggactgctcgttagagatgggaccagcaatggcgatgaatttgctcttttttatttctttttcgaatgttactgtttctttaatggtggtgaacgcgcctgcgttgctggtggtgccggagctgctggctgtaatgaccattggtttttcggcgggggagagggcggaaattgaagcggagaggcggtggttgagcttgt
